United States Patent Application Publication US 2026/0227408 A1 - sequence listing, part 4

SEQ ID NO: 21072 - protein, 1224 aa, Homo sapiens
VELRGPGMKGMSHEPKSPSLGMLSTATRTTATVNPLTPSPLNGALVPSGSPATSSALSAQAAPSSSFAAALRKLAKQAEEPRGSSLSSESSPVSSPATNHSSPASTPKRVPMGPIIVPPGGHSVPSTPPVVTIAPTKTVNGVWRSESRQDAGSRSSSGGRERLIVEPPLPQEKAGGPAIPSHLLSTPYPFGLSPSSVVQDSRFPPLNLQRPVHHVVPPSTVTEDYLRSFRPYHTTDDLRMSSLPPLGLDPATAAAYYHPSYLAPHPFPHPAFRMDDSYCLSALRSPFYPIPTPGSLPPLHPSAMHLHLSGVRYPPELSHSSLAALHSERMSGLSAERLQMDEELRREREREREREREREADREREKEREREREKEREQEKEREREKERERELERQREQRAREKELLAAKALEPSFLPVAELHGLRGHATEERGKPSEQLTPTRAEKLKDAGLQAPKPVQHPLHPVPTPHHTVPSLISNHGIFSLPSSSAATALLIQRTNEEEKWLARQRRLRQEKEDRQSQVSEFRQQVLEQHLDMGRPPVPAEAEHRPESTTRPGPNRHEPGGRDPPQHFGGPPPLISPKPQLHAAPTALWNPVSLMDNTLETRRAESHSLHSHPAAFEPSRQAAVPLVKVERVFCPEKAEEGPRKREPAPLDKYQPPPPPPREGGSLEHQPFLPGPGPFLAELEKSTQTILGQQRASLPQAATFGELSGPLKPGSPYRPPVPRAPDPAYIYDEFLQQRRRLVSKLDLEERRRREAQEKGYYYDLDDSYDESDEEEVRAHLRCVAEQPPLKLDTSSEKLEFLQLFGLTTQQQKEELVAQKRRKRRRMLRERSPSPPTIQSKRQTPSPRLALSTRYSPDEMNNSPNFEEKKKFLTIFNLTHISAEKRKDKERLVEMLRAMKQKALSAAVADSLTNSPRDSPAVSLSEPATQQASLDVEKPVGVAASLSDIPKAAEPGKLEQVRPQELSRVQELAPASGEKARLSEAPGGKKSLSMLHYIRGAAPKDIPVPLSHSTNGKSKPWEPFVAEEFAHQFHESVLQSTQKALQKHKGSVAVLSAEQNHKVDTSVHYNIPELQSSSRAPPPQHNGQQEPPTARKGPPTQELDRDSEEEEEEDDEDGEDEEEVPKRKWQGIEAVFEAYQEHIEEQNLERQVLQTQCRRLEARHYSLSLTAEQLSHSVAELRSQKQKMVSERERLQAELDHLRKCLALPAMHWPRGYLKGYPR

SEQ ID NO: 21073 - protein, 169 aa, Homo sapiens
MLRAMKQKALSAAVADSLTNSPRDSPAVSLSEPATQQASLDVEKPVGVAASLSDIPKAAEPGKLEQVRPQELSRVQELAPASGEKARLSEAPGGKKSLSMLHYIRGAAPKDIPVPLSHSTNGKSKPWEPFVAEEFAHQFHESVLQSTQKALQKHKGNEAASPCSALGCG

SEQ ID NO: 21074 - protein, 215 aa, Homo sapiens
VAGKRRPRRLLRDAEGPEETVRLWPAARAAMDAAEVEFLAEKELVTIIPNFSLDKIYLIGGDLGPFNPGLPVEVPLWLAINLKQRQKCRLLPPEWMDVEKLEKMRDHERKEETFTPMPSPYYMELTKLLLNHASDNIPKADEIRTLVKDMWDTRIAKLRVSADSFVRQQEAHAKLDNLTLMEINTSGTFLTQALNHMYKLRTNLQPLESTQSQDF

SEQ ID NO: 21075 - protein, 84 aa, Homo sapiens
LSLCRVYVRVCSTPGFSGFQMCVSSSSSSHDEAPVLNDKHLDVPDIIITPPTPTGMMLPRDLGSTVWLDETGSCPDDGEIDPEA

SEQ ID NO: 21076 - protein, 63 aa, Homo sapiens
LPESSSSSHDEAPVLNDKHLDVPDIIITPPTPTGMMLPRDLGSTVWLDETGSCPDDGEIDPEA

SEQ ID NO: 21077 - protein, 125 aa, Homo sapiens
LLCLAGSSPRPPEPDRRRHHHQRPGGPRAPRARLRSEPTKKEAACRGADMGLKMSCLKGFQMCVSSSSSSHDEAPVLNDKHLDVPDIIITPPTPTGMMLPRDLGSTVWLDETGSCPDDGEIDPEA

SEQ ID NO: 21078 - protein, 96 aa, Homo sapiens [sequence omitted]

SEQ ID NO: 21079 - protein, 254 aa, Homo sapiens
LGGGYAVQWYSGGVPLVTGYTTYDAHHSAFSQMVISFYYGGKLVGQATTTCPEGCRLSLSQPGLPGTKLYGPEGLELVRFPPADAIPSERQRQVTRKLFGHLERGVLLHSSRQGVFVKRLCQGRVFCSGNAVVCKGRPNKLERDEVVQVFDTSQFFRELQQFYNSQGRLPDGRVVLCFGEEFPDMAPLRSKLILVQIEQLYVRQLAEEAGKSCGAGSVMQAPEEPPPDQVFRMFPDICASHQRSFFRENQQITV

SEQ ID NO: 21080 - protein, 135 aa, Homo sapiens
LSSWRAQGRLADQRVGETRVRHHVNSQGDCCGFQVAYTFDAGPNAVIFTLDDTVAEFVAAVWHGFPPGSNGDTFLKGLQVRPAPLSAELQAALAMEPTPGGVKYIIVTQVGPGPQILDDPCAHLLGPDGLPKPAA

SEQ ID NO: 21081 - protein, 269 aa, Homo sapiens [sequence omitted]

SEQ ID NO: 21082 - protein, 217 aa, Homo sapiens
MASEKPLAAVTCTAPVNIAVIKYWGKRDEELVLPINSSLSVTLHQDQLKTTTTAVISKDFTEDRIWLNGREEDVGQPRLQACLREIRCLARKRRNSRDGDPLPSSLSCKVHVASVNNFPTAAGLASSAAGYACLAYTLARVYGVESDLSEVARRGSGSACRSLYGGFVEWQMGEQADGKDSIARQVAPESHWPELRVLILVVSGVGRVEQQPGGLCP

SEQ ID NO: 21083 - protein, 139 aa, Homo sapiens
LVLPINSSLSVTLHQDQLKTTTTAVISKDFTEDRIWLNGREEDVGQPRLQACLREIRCLARKRRNSRDGDPLPSSLSCKVHVASVNNFPTAAGLASSAAGYACLGTFCCPCRGPQALQAVNRECPRVELAEVGDRRLGR

SEQ ID NO: 21084 - protein, 86 aa, Homo sapiens
LGEGGPGSPPAWPWLFITGGKRDEELVLPINSSLSVTLHQDQLKTTTTAVISKDFTEDRIWLNGREEDVGQPRLQACLRESELGSP

SEQ ID NO: 21085 - protein, 143 aa, Homo sapiens
VNKFYEALTLVTLAKMRVHISSCLKVQEQMANCPKFVPVVPTSQPIPSNIPNRSTFACPYCGARNLDQQELVKHCVESHRSDPNRVVCPICSAMPWGDPSYKSANFLQHLLHRHKFSYDTFVDYSIDEEAAFQAALALSLSEN

SEQ ID NO: 21086 - protein, 170 aa, Homo sapiens
VTLAKMRVHISSCLKVQEQMANCPKFVPVVPTSQPIPSNIPNRSTFACPYCGARNLDQQELVKHCVESHRSDPNRVVCPICSAMPWGDPSYKSANFLQHLLHRHKFSYDTFVVGIPPAPSSPTPSSSTLLLLGPLASLRVRRVQRKPETEASFQVATFPQVLWGLPAGGE

SEQ ID NO: 21087 - protein, 81 aa, Homo sapiens
LGFSLLDVEREWTPTTRVGRACCLPCTVFQAFRCVVGLHASSRPNALSMGVHATPSLHPFTDGHLSCFRFSCHECLSMGVP

SEQ ID NO: 21088 - protein, 49 aa, Homo sapiens
LGPFSFPSARGRAVQPSPGLVSGSSGFTQEVHHPVVSSVFAIMQQSMQF

SEQ ID NO: 21089 - protein, 498 aa, Homo sapiens
LSPPQSATGPGVPMCQVGEDYGEPAPEEPPPAPRPSREQKCVKCKEAQPVVVIRAGDAFCRDCFKAFYVHKFRAMLGKNRLIFPGEKVLLAWSGGPSSSSMVWQVLEGLSQDSAKRLRFVAGVIFVDEGAACGQSLEERSKTLAEVKPILQATGFPWHVVALEEVFSLPPSVLWCSAQELVGSEGAYKAAVDSFLQQQHVLGAGGGPGPTQGEEQPPQPPLDPQNLARPPAPAQTEALSQLFCSVRTLTAKEELLQTLRTHLILHMARAHGYSKVMTGDSCTRLAIKLMTNLALGRGAFLAWDTGFSDERHGDVVVVRPMRDHTLKEVAFYNRLFSVPSVFTPAVDTKAPEKASIHRLMEAFILRLQTQFPSTVSTVYRTSEKLVKGPRDGPAAGDSGPRCLLCMCALDVDAADSATAFGAQTSSRLSQMQSPIPLTETRTPPGPCCSPGVGWAQRCGQGACRREDPQACIEEQLCYSCRVNMKDLGLGLAGDPGLSD

SEQ ID NO: 21090 - protein, 347 aa, Homo sapiens
MLGKNRLIFPGEKVLLAWSGGPSSSSMVWQVLEGLSQDSAKRLRFVAGVIFVDEGAACGQSLEERSKTLAEVKPILQATGFPWHVVALEEVFSLPPSVLWCSAQELVGSEGAYKAAVDSFLQQQHVLGAGGGPGPTQGEEQPPQPPLDPQNLARPPAPAQTEALSQLFCSVRTLTAKEELLQTLRTHLILHMARAHGYSKVMTGDSCTRLAIKLMTNLALGRGAFLAWDTGFSDERHGDVVVVRPMRDHTLKEVAFYNRLFSVPSVFTPAVDTKAPEKASIHRLMEAFILRLQTQFPSTVSTVYRTSEKLVKGPRDGPAAGDSGPRCLLCMCALDVDAAGLCFMLLG

SEQ ID NO: 21091 - protein, 589 aa, Homo sapiens
VLCPDGSVRAGGGARAPAGNLAGTAPASSSLPSFLAFAAHSAAMEQRRVTDFFARRRPGPPRIAPPKLACRTPSPARPALRAPASATSGSRKRARPPAAPGRDQARPPARRRLRLSVDEVSSPSTPEAPDIPACPSPGQKIKKSTPAAGQPPHLTSAQDQDTISELASCLQRARELGARVRALKASAQDAGESCTPEAEGRPEEPCGEKAPAYQRFHALAQPGLPGLVLPYKYQVLAEMFRSMDTIVGMLHNRSETPTFAKVQRGVQDMMRRRFEECNVGQIKTVYPASYRFRQERSVPTFKDGTRRSDYQLTIEPLLEQEADGAAPQLTASRLLQRRQIFSQKLVEHVKEHHKAFLASLSPAMVVPEDQLTRWHPRFNVDEVPDIEPAALPQPPATEKLTTAQEVLARARNLISPRMEKALSQLALRSAAPSSPGSPRPALPATPPATPPAASPSALKGVSQDLLERIRAKEAQKQLAQMTRCPEQEQRLQRLERLPELARVLRSVFVSERKPALSMEVACARMVGSCCTIMSPGEMEKHLLLLSELLPDWLSLHRIRTDTYVKLDKAADLAHITARLAHQTRAEEGL

SEQ ID NO: 21092 - protein, 35 aa, Homo sapiens [sequence omitted]

SEQ ID NO: 21093 - protein, 154 aa, Homo sapiens [sequence omitted]

SEQ ID NO: 21094 - protein, 186 aa, Homo sapiens
VTAAALLSTRRKARQAKARRIAPRPASGPIRPIVRCPTVRYHTKVRAGRGFSLEELRVAGIHKKVARTIGISVDPRRRNKSTESLQANVQRLKEYRSKLILFPRKPSAPKKGDSSAEELKLATQLTGPVMPVRNVYKKEKARVITEEEKNFKAFASLRMARANARLFGIRAKRAKEAAEQDVEKKK

SEQ ID NO: 21095 - protein, 98 aa, Homo sapiens [sequence omitted]

SEQ ID NO: 21096 - protein, 155 aa, Homo sapiens
LLRLFIQASGLEKARACLHLSLVLGQVAGIHKKVARTIGISVDPRRRNKSTESLQANVQRLKEYRSKLILFPRKPSAPKKGDSSAEELKLATQLTGPVMPVRNVYKKEKARVITEEEKNFKAFASLRMARANARLFGIRAKRAKEAAEQDVEKKK

SEQ ID NO: 21097 - protein, 639 aa, Homo sapiens
VYLRDKQVVVFLAYPTRAPGRNNGVTSLHWPDPTLSLSWTQEAYTEYLRSIHYISQVLLEEVETTKEAGETVPPDTSKMLKLAQQCLERAQSTAAKLGKTRLKPTMPAAAPIPQPAGRHRRVYSDEGGKLSPFLPPEIFQKLQGAESQSCKKELTPLEEASLQNQKLKAAYEARMARLDPSQAMQKTSLTLSLQRQMMENLVIAKAREETLQRKMEERRLRLQEAANRRFCSQVALTPEEREQRALYAAILEYEQDHDWPKHWKAKLKRNPGDLSLVTSLVSHLLSLPDHPIAQLLRRLQCSVYSALYPAVSRAAAPAPGCCPPTPNPGSRRLRPSQSLHCMLSPPEPSAAPRPQDSPPTPPLQPGPVGSPSPLGDTASGLPDKDSSFEDLEQFLGTSERQGRGRGVQPEPQLQQLKTAVEEIHNAVDRLLSLTLLAFEGLNTAASKDRCLACIEEPFFSPLWPLLLALYRSVHRAREAALSRSMELYRNAPPTAIGIPTKLLPQNPEAKGATGYPYCAAAQELGLLVLESCPQKKLECIVRTLRIICVCAEDYCPTPEATPQAGPPPIAAAAIGADDLLPILSFVVLRSGLPQLVSECAALEEFIHEGYLIGEEGYCLTSLQSALSYVELLPRGGLAK

SEQ ID NO: 21098 - protein, 664 aa, Homo sapiens
LLGRLQHQRRLRSGPPVARPAPRLPPPPPPLGAMAAAAGDGTVKPLQSAMKLANGAIELDTGNRPREAYTEYLRSIHYISQVLLEEVETTKEAGETVPPDTSKMLKLAQQCLERAQSTAAKLGKTRLKPTMPAAAPIPQPAGRHRRVYSDEGGKLSPFLPPEIFQKLQGAESQSCKKELTPLEEASLQNQKLKAAYEARMARLDPSQAMQKTSLTLSLQRQMMENLVIAKAREETLQRKMEERRLRLQEAANRRFCSQVALTPEEREQRALYAAILEYEQDHDWPKHWKAKLKRNPGDLSLVTSLVSHLLSLPDHPIAQLLRRLQCSVYSALYPAVSRAAAPAPGCCPPTPNPGSRRLRPSQSLHCMLSPPEPSAAPRPQDSPPTPPLQPGPVGSPSPLGDTASGLPDKDSSFEDLEQFLGTSERQGRGRGVQPEPQLQQLKTAVEEIHNAVDRLLSLTLLAFEGLNTAASKDRCLACIEEPFFSPLWPLLLALYRSVHRAREAALSRSMELYRNAPPTAIGIPTKLLPQNPEAKGATGYPYCAAAQELGLLVLESCPQKKLECIVRTLRIICVCAEDYCPTPEATPQAGPPPIAAAAIGADDLLPILSFVVLRSGLPQLVSECAALEEFIHEGYLIGEEGYCLTSLQSALSYVELLPRGGLAK

SEQ ID NO: 21099 - protein, 367 aa, Homo sapiens
LRAPRVLVAGAAESGWVVATEPGLFAVLRRGWREGPLTELPWASNRGSQAPLYVRPRPPSPFCSPPATCAPRGLRRRLPAPRLRLPRSRPGSRHGSLSPLPREVFLEKPAQHLREGAWSEHGEAIRRGARARTGLPAPAWCGCPPGPHLVSVCLQELPRPVLPVPQPSQVLPAEGQRLPGWSPEALCKGRCPAPNRGRGGSVSGPQCLHGLVGWVHGHAASCGALPHLQRTLSSEYCGVIQVVWGCDQGHDYTMDTSSSCKAFLLDSALAVKWPWDKETAPRLPQHRGWNPGDAPQTSQGRGTGTPVGAETKTLPSTDVAQPPSDSDAVGPRSGFPPQPSLPLCRAPGQLGEKQLPSSTSDDRRRLE

SEQ ID NO: 21100 - protein, 561 aa, Homo sapiens
VASAGACPPRASVSHGAGRALAMGHCRLCHGKFSSRSLRSISERAPGASMERPSAEERVLVRDFQRLLGVAVRQDPTLSPFVCKSCHAQFYQCHSLLKSFLQRVNASPAGRRKPCAKVGAQPPTGAEEGACLVDLITSSPQCLHGLVGWVHGHAASCGALPHLQRTLSSEYCGVIQVVWGCDQGHDYTMDTSSSCKAFLLDSALAVKWPWDKETAPRLPQHRGWNPGDAPQTSQGRGTGTPVGAETKTLPSTDVAQPPSDSDAVGPRSGFPPQPSLPLCRAPGQLGEKQLPSSTSDDRVKDEFSDLSEGDVLSEDENDKKQNAQSSDESFEPYPERKVSGKKSESKEAKKSEEPRIRKKPGPKPGWKKKLRCEREELPTIYKCPYQGCTAVYRGADGMKKHIKEHHEEVRERPCPHPGCNKVFMIDRYLQRHVKLIHTEVRNYICDECGQTFKQRKHLLVHQMRHSGAKPLQCEVCGFQCRQRASLKYHMTKHKAETELDFACDQCGRRFEKAHNLNVHMSMVHPLTQTQDKALPLEAEPPPGPPSPSVTTEGQAVKPEPT

SEQ ID NO: 21101 - protein, 621 aa, Homo sapiens
LLASSAAMKRDRLGRFLSPGSSRQCGASDGGGGVSRTRGRPSLSGGPRVDGATARRAWGPVGSCGDAGEDGADEAGAGRALAMGHCRLCHGKFSSRSLRSISERAPGASMERPSAEERVLVRDFQRLLGVAVRQDPTLSPFVCKSCHAQFYQCHSLLKSFLQRVNASPAGRRKPCAKVGAQPPTGAEEGACLVDLITSSPQCLHGLVGWVHGHAASCGALPHLQRTLSSEYCGVIQVVWGCDQGHDYTMDTSSSCKAFLLDSALAVKWPWDKETAPRLPQHRGWNPGDAPQTSQGRGTGTPVGAETKTLPSTDVAQPPSDSDAVGPRSGFPPQPSLPLCRAPGQLGEKQLPSSTSDDRVKDEFSDLSEGDVLSEDENDKKQNAQSSDESFEPYPERKVSGKKSESKEAKKSEEPRIRKKPGPKPGWKKKLRCEREELPTIYKCPYQGCTAVYRGADGMKKHIKEHHEEVRERPCPHPGCNKVFMIDRYLQRHVKLIHTEVRNYICDECGQTFKQRKHLLVHQMRHSGAKPLQCEVCGFQCRQRASLKYHMTKHKAETELDFACDQCGRRFEKAHNLNVHMSMVHPLTQTQDKALPLEAEPPPGPPSPSVTTEGQAVKPEPT

SEQ ID NO: 21102 - protein, 400 aa, Homo sapiens
MDMRPAAGPCPTFRGHCPPSTAASSRSCGAATRATTTPWIPAPAARPSCWTVRWQSSGHGTKRRRHGCPSTEGGTLGMPLRPPRVEGQGPQLGLRPRPCPARMWPSLLRTATRWGPGRASHLSQACPFAGPQGSWVRSSFHLQPRMIGDVLSEDENDKKQNAQSSDESFEPYPERKVSGKKSESKEAKKSEEPRIRKKPGPKPGWKKKLRCEREELPTIYKCPYQGCTAVYRGADGMKKHIKEHHEEVRERPCPHPGCNKVFMIDRYLQRHVKLIHTEVRNYICDECGQTFKQRKHLLVHQMRHSGAKPLQCEVCGFQCRQRASLKYHMTKHKAETELDFACDQCGRRFEKAHNLNVHMSMVHPLTQTQDKALPLEAEPPPGPPSPSVTTEGQAVKPEPT

SEQ ID NO: 21103 - protein, 126 aa, Homo sapiens
LPSTDVAQPPSDSDAVGPRSGFPPQPSLPLCRAPGQLGEKQLPSSTSDDRVKDEFSDLSEGDVLSEDENDKKQNAQSSDESFEPYPERKVSGKKSESKEAKKSEEPRIRKKPGPKPGWKKKLRCER

SEQ ID NO: 21104 - protein, 208 aa, Homo sapiens
LQREARPACRGRGSMHALHCREELPTIYKCPYQGCTAVYRGADGMKKHIKEHHEEVRERPCPHPGCNKVFMIDRYLQRHVKLIHTEVRNYICDECGQTFKQRKHLLVHQMRHSGAKPLQCEVCGFQCRQRASLKYHMTKHKAETELDFACDQCGRRFEKAHNLNVHMSMVHPLTQTQDKALPLEAEPPPGPPSPSVTTEGQAVKPEPT

SEQ ID NO: 21105 - protein, 413 aa, Homo sapiens
LCGVGARLGRRGCLGPGPSCAWADAPSRRPRGAPFFPERRPRRPPCQAGLGCAAWGSPQRRGRPSPAVPGLPCLGPSWAVFPGVRGGAVSVSFPRPAPWGGAPAPLREGVAGGFLRGVHLRVGPGTPCVNCAVMVSNRLLSVAGRVKREKYNPERAQKLKESAVRLLRSHQDLNALLLEVEGPLCKKLSLSKVIDCDSSEAYANHSSSFIGSALQDQASRLGVPVGILSAGMVASSVGQICTAPAETSHPVLLTVEQRKKLSSLLEFAQYLLAHSMFSRLSFCQELWKIQSSLLLEAVWHLHVQGIVSLQELLESHPDMHAVGSWLFRNLCCLCEQMEASCQHADVARAMLSDFVQMFVLRGFQKNSDLRRTVEPEKMPQVTVDVLQRMLIFALDALAAGVQEESSTHKIVRC

SEQ ID NO: 21106 - protein, 417 aa, Homo sapiens
VKKVAEACLWSRTLTSEYRLLGSHKYVPRAILVDLEPGTMDSVRSGAFGHLFRPDNFIFGQSGAGNNWAKGHYTEGAELVDSVLDVVRKECENCDCLQGFQLTHSLGGGTGSGMGTLLISKVREEYPDRIMNTFSVVPSPKVSDTVVEPYNATLSIHQLVENTDETYCIDNEALYDICFRTLKLATPTYGDLNHLVSATMSGVTTSLRFPGQLNADLRKLAVNMVPFPRLHFFMPGFAPLTARGSQQYRALTVPELTQQMFDAKNMMAACDPRHGRYLTVATVFRGRMSMKEVDEQMLAIQSKNSSYFVEWIPNNVKVAVCDIPPRGLKMSSTFIGNSTAIQELFKRISEQFTAMFRRKAFLHWYTGEGMDEMEFTEAESNMNDLVSEYQQYQDATAEEEGEMYEDDEEESEAQGPK

SEQ ID NO: 21107 - protein, 191 aa, Homo sapiens
LEAEMPGERPTDATVIPSAKRERKAITLDLKLEVLRRFEAGEKLSQIAKALDLAISTVATIRDSKEKIKASSQIATPLRASRLTRHRSAVMESMEQLLSLWLEDQSQPNATLSAAIVQEKAEFDDLQREHGEGSQTERFHASQGWLVRFKECHCLPHFKMNSAAPSNKDMYTEMLKSIIEEGEYTPQVSLT

SEQ ID NO: 21108 - protein, 507 aa, Homo sapiens
LRPPDPGRASGAPAHSLGGRARWRPLVLFQAPKKKGKKGKAKGTPIVDGLAPEDMSKEQVEEHVSRIREELDREREERNYFQLERDKIHTFWEITRRQLEEKKAELRNKDREMEEAEERHQVEIKVYKQKVKHLLYEHQNNLTEMKAEGTVVMKLAQKEHRIQESVLRKDMRALKVELKEQELASEVVVKNLRLKHTEEITRMRNDFERQVREIEAKYDKKMKMLRDELDLRRKTELHEVEERKNGQIHTLMQRHEEAFTDIKNYYNDITLNNLALINSLKEQMEDMRKKEDHLEREMAEVSGQNKRLADPLQKAREEMSEMQKQLANYERDKQILLCTKARLKVREKELKDLQWEHEVLEQRFTKVQQERDELYRKFTAAIQEVQQKTGFKNLVLERKLQALSAAVEKKEVQFNEVLAASNLDPAALTLVSRKLEDVLESKNSTIKDLQYELAQVCKAHNDLLRTYEAKLLAFGIPLDNVGFKPLETAVIGQTLGQGPAGLVGTPT

SEQ ID NO: 21109 - protein, 491 aa, Homo sapiens
LVPESPLGLSAGVMAPKKKGKKGKAKGTPIVDGLAPEDMSKEQVEEHVSRIREELDREREERNYFQLERDKIHTFWEITRRQLEEKKAELRNKDREMEEAEERHQVEIKVYKQKVKHLLYEHQNNLTEMKAEGTVVMKLAQKEHRIQESVLRKDMRALKVELKEQELASEVVVKNLRLKHTEEITRMRNDFERQVREIEAKYDKKMKMLRDELDLRRKTELHEVEERKNGQIHTLMQRHEEAFTDIKNYYNDITLNNLALINSLKEQMEDMRKKEDHLEREMAEVSGQNKRLADPLQKAREEMSEMQKQLANYERDKQILLCTKARLKVREKELKDLQWEHEVLEQRFTKVQQERDELYRKFTAAIQEVQQKTGFKNLVLERKLQALSAAVEKKEVQFNEVLAASNLDPAALTLVSRKLEDVLESKNSTIKDLQYELAQVCKAHNDLLRTYEAKLLAFGIPLDNVGFKPLETAVIGQTLGQGPAGLVGTPT

SEQ ID NO: 21110 - protein, 72 aa, Homo sapiens
VGSWAPTWRVCRRSAASYLCGSEKAGLQHGRSVGVRPEQPGLYSYVKLSTKSHGNNGVKKIVSWVFVTYKLS

SEQ ID NO: 21111 - protein, 107 aa, Homo sapiens
LDTSWPTPPPALREASELLRELCIKNMVWKYCRSISPEWKQQLQQKAVASEIFKGKKDNYPQSVPRLFISTRLGEPLTFQHSDLSSPSWSPIASTDFPPRHLSCRYR

SEQ ID NO: 21112 - protein, 35 aa, Homo sapiens
LLQPPEAEASAPPDRPLTFSSLASFPLSVLVLLTS

SEQ ID NO: 21113 - protein, 820 aa, Homo sapiens
LSWPGSSADSVHARCGMAAHRPGPLKQQNKAHKGGRHRGRGSAQRDGKGRLALKTLSKKVRKELSRVDQRHRASQLRKQKKEAVLAEKRQLGGKDGPPHQVLVVPLHSRISLPEAMQLLQDRDTGTVHLNELGNTQNFMLLCPRLKHRWFFTSARPGDLHVVLDMAKVADTILFLLDPLEGWDSTGDYCLSCLFAQGLPTYTLAVQGISGLPLKKQIDTRKKLSKAVEKRFPHDKLLLLDTQQEAGMLLRQLANQKQQHLAFRDRRAYLFAHAVDFVPSEENNLVGTLKISGYVRGQTLNVNRLLHIVGYGDFQMKQIDAPGDPFPLNPRGIKPQKDPDMAMEICATDAVDDMEEGLKVLMKADPGRQESLQAEVIPDPMEGEQTWPTEEELSEAKDFLKESSKVVKKVPKGTSSYQAEWILDGGSQSGGEGDEYEYDDMEHEDFMEEESQDESSEEEEEYETMTIGESVHDDLYDKKVDEEAEAKMLEKYKQERLEEMFPDEVDTPRDVAARIRFQKYRGLKSFRTSPWDPKENLPQDYARIFQFQNFTNTRKSIFKEVEEKEVEGAEVGWYVTLHVSEVPVSVVECFRQGTPLIAFSLLPHEQKMSVLNMVVRRDPGNTEPVKAKEELIFHCGFRRFRASPLFSQHTAADKHKLQRFLTADMALVATVYAPITFPPASVLLFKQKSNGMHSLIATGHLMSVDPDRMVIKRVVLSGHPFKIFTKMAVVRYMFFNREDVLWFKPVELRTKWGRRGHIKEPLGTHGHMKCSFDGKLKSQDTVLMNLYKRVFPKWTYDPYVPEPVPWLKSEISSTVPQGGME

SEQ ID NO: 21114 - protein, 160 aa, Homo sapiens
VQQGFLKEGCELINEALNLFNNVYGAMHVETCACLRLLARLHYIMGDYAEALSNQQKAVLMSERVMGTEHPNTIQEYMHLALYCFASSQLSTALSLLYRARYLMLLVFGEDHPEMALLDNNIGLVLHGVMEYDLSLRFLENALAVSTKYHGPKALKVALR

SEQ ID NO: 21115 - protein, 133 aa, Homo sapiens
MTPQELWKNICQEAKNYFDFDLECETVDQAVETYGLQKITLLREISLKTGIQVLLKEYSFDSRHKPAFTEEDVLNIFPVVKHVNPKASDAFHFFQSGQAKVQQGVWPGGAGWRWGFPMARPDLATPGGALQAS

SEQ ID NO: 21116 - protein, 748 aa, Homo sapiens
LHTRPPIGCVCVREVCSPCQDLAREADRDGGQRIDKTMLASLKVKKQELANSSDATLPDRPLSPPLTAPPTMKSSEFFEMLEKMQGIKLEEQKPGPQKNKDDYIPYPSIDEVVEKGGPYPQVILPQFGGYWIEDPENVGTPTSLGSSICEEEEEDNLSPNTFGYKLECKGEARAYRRHFLGKDHLNFYCTGSSLGNLILSVKCEEAEGIEYLRVILRSKLKTVHERIPLAGLSKLPSVPQIAKAFCDDAVGLRFNPVLYPKASQMIVSYDEHEVNNTFKFGVIYQKARQTLEEELFGNNEESPAFKEFLDLLGDTITLQDFKGFRGGLDVTHGQTGVESVYTTFRDREIMFHVSTKLPFTDGDAQQLQRKRHIGNDIVAIIFQEENTPFVPDMIASNFLHAYIVVQVETPGTETPSYKVSVTAREDVPTFGPPLPSPPVFQKGPEFREFLLTKLTNAENACCKSDKFAKLEDRTRAALLDNLHDELHAHTQAMLGLGPEEDKFENGGHGGFLESFKRAIRVRSHSMETMVGGQKKSHSGGIPGSLSGGISHNSMEVTKTTFSPPVVAATVKNQSRSPIKRRSGLFPRLHTGSEGQGDSRARCDSTSSTPKTPDGGHSSQEIKSETSSNPSSPEICPNKEKPFMKLKENGRAISRSSSSTSSVSSTAGEGEAMEEGDSGGSQPSTTSPFKQEVFVYSPSPSSESPSLGAAATPIIMSRSPTDAKSRNSPRSNLKFRFDKLSHASSGAGH

SEQ ID NO: 21117 - protein, 185 aa, Homo sapiens
LDLLGDTITLQDFKGFRGGLDVTHGQTGVESVYTTFRDREIMFHVSTKLPFTDGDAQQLQRKRHIGNDIVAIIFQEENTPFVPDMIASNFLHAYIVVQVETPGTETPSYKVRTMTLFHSGLCHCAGRCAHLWSTSAQSPRFPEGPGIQGVSAHQAHQCRERLLQVGQVCKAGGPDQGCPPGQPSR

SEQ ID NO: 21118 - protein, 129 aa, Homo sapiens
LESFKRAIRVRSHSMETMVGGQKKSHSGGIPGSLSGGISHNSMEVTKTTFSPPVVAATVKNQSRSPIKRRSGLFPRLHTGSEGQGDSRARCDSTSSTPKTPDGGHSSQEIKSETSSNPSSPEICPNKEK

SEQ ID NO: 21119 - protein, 801 aa, Homo sapiens
VPAMAASLPGPGSRLFRTYGAADGRRQRRPGREAAQWFPPQDRRRFFNSSGSSDASIGDPSQSDDPDDPDDPDFPGSPVRRRRRRPGGRVPKDRPSLTVTPKRWKLRARPSLTVTPRRLGLRARPPQKCSTPCGPLRLPPFPSRDSGRLSPDLSVCGQPRDGDELGISASLFSSLASPCPGSPTPRDSVISIGTSACLVAASAVPSGLHLPEVSLDRASLPCSQEEATGGAKDTRMVHQTRASLRSVLFGLMNSGTPEDSEFRADGKNMRESCCKRKLVVGNGPEGPGLSSTGKRRATGQDSCQERGLQEAVRREHQEASVPKGRIVPRGIDRLERTRSSRKSKHQEATETSLLHSHRFKKGQKLGKDSFPTQDLTPLQNVCFWTKTRASFSFHKKKIVTDVSEVCSIYTTATSLSGSLLSECSNRPVMNRTSGAPSSWHSSSMYLLSPLNTLSISNKKASDAEKVYGECSQKGPVPFSHCLPTEKLQRCEKIGEGVFGEVFQTIADHTPVAIKIIAIEGPDLVNGSHQKTFEEILPEIIISKELSLLSGEVCNRTEGFIGLNSVHCVQGSYPPLLLKAWDHYNSTKGSANDRPDFFKDDQLFIVLEFEFGGIDLEQMRTKLSSLATAKSILHQLTASLAVAEASLRFEHRDLHWGNVLLKKTSLKKLHYTLNGKSSTIPSCGLQVSIIDYTLSRLERDGIVVFCDVSMDEDLFTGDGDYQFDIYRLMKKENNNRWGEYHPYSNVLWLHYLTDKMLKQMTFKTKCNTPAMKQIKRKIQEFHRTMLNFSSATDLLCQHSLFK

SEQ ID NO: 21120 - protein, 54 aa, Homo sapiens
LARGGAGILAAGEEAASEPRTERAAGARTMGEKPGTRVFKKSSPNCKLPTSCDS

SEQ ID NO: 21121 - protein, 65 aa, Homo sapiens
LRQYRRRKMAATLLAARGAGPAPAWGPEAFTPDWESREVSTGTTIMAVQFDGGVVLGADSRTTTG

SEQ ID NO: 21122 - protein, 115 aa, Homo sapiens
LNEPPLVHTAASLFKEMCYRYREDLMAGIIIAGWDPQEGGQVRSPPDQSTLEPGLLSSPQPFSFSFQSLPHLFLLLTCLRPIAEWTGECTCVGGRIRLVTPLLLSGRCTQCLWGV

SEQ ID NO: 21123 - protein, 114 aa, Homo sapiens [sequence omitted]

SEQ ID NO: 21124 - protein, 54 aa, Homo sapiens [sequence omitted]

SEQ ID NO: 21125 - protein, 86 aa, Homo sapiens
MNRSDFSRAAERLCSSSSTTAPTAAGPALPTGLRPPCLPATSSFLTKKQDQAARKIMRFLRRCRHRMRELKQNQELEGLPQPGLAT

SEQ ID NO: 21126 - protein, 132 aa, Homo sapiens
LGEPQGFGSPSLYFSPCPSSPPLQFALYKKMTQAAILIQSKFRSYYEQKRFQQSRRAAVLIQQHYRSYRRRPGPPHRTSATLPARNKGSFLTKKQDQAARKIMRFLRRCRHRMRELKQNQELEGLPQPGLAT

SEQ ID NO: 21127 - protein, 515 aa, Homo sapiens
VSERGAVAACDCEMGTENKEVIPKEEISEESEPHGSLLEKFPKVVYQGHEFGAGCEEDMLEGHSRESMEEVIEQMSPQERDFPSGLMIFKKSPSSEKDRENNESERGCSPSPNLVTHQGDTTEGVSAFATSGQNFLEILESNKTQRSSVGEKPHTCKECGKAFNQNSHLIQHMRVHSGEKPFECKECGKTFGTNSSLRRHLRIHAGEKPFACNECGKAFIQSSHLIHHHRIHTGERPYKCEECGKAFSQNSALILHQRIHTGEKPYECNECGKTFRVSSQLIQHQRIHTEERYHECNECGKAFKHSSGLIRHQKIHTGEKPYLCNECGKGFGQSSELIRHQRIHTGDKPYECNECGKTFGQNSEIIRHIRIHTGEKPYVCKECGKAFRGNSELLRHERIHTGEKPYECFECGKAFRRTSHLIVHQRIHTGEKPHQCNECARTFWDNSELLLHQKIHIGEKPYECSECEKTFSQHSQLIIHQRIHTGEKPYECQECQKTFSRSSHLLRHQSVHCME

SEQ ID NO: 21128 - protein, 71 aa, Homo sapiens
LKAHSLLCGSSHPTSSQPCSSRVDLRSPGPRRGKNLRNTEQDGWRSLGPPGLLLGVPEEGGAEGVPASARQ

SEQ ID NO: 21129 - protein, 77 aa, Homo sapiens
LPTPHLPSPHLPSPSPSLPGPGPHPRTSLSADFFQCLAGPSGLLPPLAFPTTPPLSASICRCPGIYKTGFRMLNKRR

SEQ ID NO: 21130 - protein, 113 aa, Homo sapiens
LPPFEGRVCFHSCRDCQLPEVSSAMLNCAVLAGWCPRAWRGLKKPGSQQPGAPLWVLKAHSLLCGSSHPTSSQPCSSRVDLRSPGPRRGKNLRNTEQCPGIYKTGFRMLNKRR

SEQ ID NO: 21131 - protein, 260 aa, Homo sapiens
LRLCSALVVSGSSGQRRLLARQMASRWQNMGTSVRRRSLQHQEQLEDSKELQPVVSHQETSVGALGSLCRQFQRRLPLRAVNLNLRAGPSWKRLETPEPGQQGLQAAARSAKSALGAVSQRIQESCQSGTKWLVETQVKARRRKRGAQKGSGSPTHSLSQKSTRLSGAAPAHSAADPWEKEHHRLSVRMGSHAHPLRRSRREAAFRSPYSSTEPLCSPSESDSDLEPVGAGIQHLQKLSQELDEAIMAEESGDIVSLIHD

SEQ ID NO: 21132 - protein, 270 aa, Homo sapiens
LRLCSALVVSGSSGQRRLLARQMASRWQNMGTSVRRRSLQHQEQLEDSKELQPVVSHQETSVGALGSLCRQFQRRLPLRAVNLNLRAGPSWKRLETPEPGQQGLQAAARSAKSALGAVSQRIQESCQSGTKWLVETQVKARRRKRGAQKGSGSPTHSLSQKSTRLSGAAPAHSAADPWEKEHHRLSVRMGSHAHPLRRSRREAAFRSPYSSTEPLCSPSESDSDLEPVGAGIQHLQKLSQELDEAIMAEERKQALSDRQGFILKDVYASP

SEQ ID NO: 21133 - protein, 301 aa, Homo sapiens
LRLCSALVVSGSSGQRRLLARQMASRWQNMGTSVRRRSLQHQEQLEDSKELQPVVSHQETSVGALGSLCRQFQRRLPLRAVNLNLRAGPSWKRLETPEPGQQGLQAAARSAKSALGAVSQGINFRSCREGPVRGDLLSNESCCQEDVLILDRIQESCQSGTKWLVETQVKARRRKRGAQKGSGSPTHSLSQKSTRLSGAAPAHSAADPWEKEHHRLSVRMGSHAHPLRRSRREAAFRSPYSSTEPLCSPSESDSDLEPVGAGIQHLQKLSQELDEAIMAEERKQALSDRQGFILKDVYASP

SEQ ID NO: 21134 - protein, 35 aa, Homo sapiens
MCVHLLPSRRKALPQKLVESECLQANLVEMLFSED

SEQ ID NO: 21135 - protein, 49 aa, Homo sapiens
VSFKAELIPLLITFYRSSEDLTVFLLQPQKLVESECLQANLVEMLFSED

SEQ ID NO: 21136 - protein, 155 aa, Homo sapiens
LGHRKTFSFVSLPARNETQPKACREQNMEGDFSVCRNCKRHVVSANFTLHEAYCLRFLVLCPECEEPVPKETMEEHCKLEHQQAYGSGIGKRFWFQERLAVLLRSVKRGCEKGRSWKAVRWSPVSRLSMSIPPGAPDLSLWRYSSSGSRCQLRLV

SEQ ID NO: 21137 - protein, 309 aa, Homo sapiens
LGHRKTFSFVSLPARNETQPKACREQNMEGDFSVCRNCKRHVVSANFTLHEAYCLRFLVLCPECEEPVPKETMEEHCKLEHQQANECQERPVECKFCKLDMQLSKLELHESYCGSRTELCQGCGQFIMHRMLAQHRDVCRSEQAQLGKGERISAPEREIYCHYCNQMIPENKYFHHMGKCCPDSEFKKHFPVGNPEILPSSLPSQAAENQTSTMEKDVRPKTRSINRFPLHSESSSKKAPRSKNKTLDPLLMSEPKPRTSSPRGDKAAYDILRRCSQCGILLPLPILNQHQEKCRWLASSKGKQVRNFS

SEQ ID NO: 21138 - protein, 328 aa, Homo sapiens
LGHRKTFSFVSLPARNETQPKACREQNMEGDFSVCRNCKRHVVSANFTLHEAYCLRFLVLCPECEEPVPKETMEEHCKLEHQQVGCTMCQQSMQKSSLEFHKANECQERPVECKFCKLDMQLSKLELHESYCGSRTELCQGCGQFIMHRMLAQHRDVCRSEQAQLGKGERISAPEREIYCHYCNQMIPENKYFHHMGKCCPDSEFKKHFPVGNPEILPSSLPSQAAENQTSTMEKDVRPKTRSINRFPLHSESSSKKAPRSKNKTLDPLLMSEPKPRTSSPRGDKAAYDILRRCSQCGILLPLPILNQHQEKCRWLASSKGKQVRNFS

SEQ ID NO: 21139 - protein, 94 aa, Homo sapiens
MEGDFSVCRNCKRHVVSANFTLHEAYCLRFLVLCPECEEPVPKETMEEHCKLEHQQVRRRQGGWGLRVKVSVQSSLQVRWGLRVGGRGSSPPCR

SEQ ID NO: 21140 - protein, 141 aa, Homo sapiens
MEGDFSVCRNCKRHVVSANFTLHEAYCLRFLVLCPECEEPVPKETMEEHCKLEHQQVRRRQGGWGLRVKAYGSGIGKRFWFQERLAVLLRSVKRGCEKGRSWKAVRWSPVSRLSMSIPPGAPDLSLWRYSSSGSRCQLRLV

SEQ ID NO: 21141 - protein, 241 aa, Homo sapiens
MCQQSMQKSSLEFHKANECQERPVECKFCKLDMQLSKLELHESYCGSRTELCQGCGQFIMHRMLAQHRDVCRSEQAQLGKGERISAPEREIYCHYCNQMIPENKYFHHMGKCCPDSEFKKHFPVGNPEILPSSLPSQAAENQTSTMEKDVRPKTRSINRFPLHSESSSKKAPRSKNKTLDPLLMSEPKPRTSSPRGDKAAYDILRRCSQCGILLPLPILNQHQVLSLCSLLTFLGTIRTVS

SEQ ID NO: 21142 - protein, 9 aa, Homo sapiens
LLSVVPARV

SEQ ID NO: 21143 - protein, 111 aa, Homo sapiens
LPGRTSGLSRGGKMRLKRLKNRLESKPLKMADDLDFETGDAGASATFPMQCSALRKNGFVVLKGRPCKIVEMSTSKTGKHGHAKVRISPPHLAFPMPPVSLALPAASCQQC

SEQ ID NO: 21144 - protein, 105 aa, Homo sapiens
LGSRRADGVESVRSRELESKPLKMADDLDFETGDAGASATFPMQCSALRKNGFVVLKGRPCKIVEMSTSKTGKHGHAKVRISPPHLAFPMPPVSLALPAASCQQC

SEQ ID NO: 21145 - protein, 177 aa, Homo sapiens
LGSRRADGVESVRSRELESKPLKMADDLDFETGDAGASATFPMQCSALRKNGFVVLKGRPCKIVEMSTSKTGKHGHAKVHLVGIDIFTGKKYEDICPSTHNMDVPNIKRNDFQLIGIQDGYLSLLQDSGEVREDLRLPEGDLGKEIEQKYDCGEEILITVLSAMTEEAAVAIKAMAK

SEQ ID NO: 21146 - protein, 209 aa, Homo sapiens
LGSRRADGVESVRSRELESKPLKMADDLDFETGDAGASATFPMQCSALRKNGFVVLKGRPCKIVEMSTSKTGKHGHAKVHLVGIDIFTGKKYEDICPSTHNMDVPNIKRNDFQLIGIQDGYLSLLQDSGEVREDLRLPEGDLGKEIEQKYDCGEEILVWCLPPCFCAQLCSVRFFLSSDISWLSLLLLQITVLSAMTEEAAVAIKAMAK

SEQ ID NO: 21147 - protein, 174 aa, Homo sapiens
LKNPPVKCGGQPGLESKPLKMADDLDFETGDAGASATFPMQCSALRKNGFVVLKGRPCKIVEMSTSKTGKHGHAKVHLVGIDIFTGKKYEDICPSTHNMDVPNIKRNDFQLIGIQDGYLSLLQDSGEVREDLRLPEGDLGKEIEQKYDCGEEILITVLSAMTEEAAVAIKAMAK

SEQ ID NO: 21148 - protein, 27 aa, Homo sapiens
LGQKVPPPASPGARPPGPAGPTAGKLR

SEQ ID NO: 21149 - protein, 115 aa, Homo sapiens
MTVKLDFEECLKDSPRFRASIELVEAEVSELETRLEKLLKLGTGLLESGRHYLAASRAFVVGICDLARLGPPEPMMAECLEKFTVSLNHKLDSHAELLDATQHTLQQQIQTLVKE

SEQ ID NO: 21150 - protein, 58 aa, Homo sapiens
MPALPPSVFRSSSSSPGHCPPAQGLTLPLWPSRSLGVHFSKVRSLTLDSWEPELVKVT

SEQ ID NO: 21151 - protein, 50 aa, Homo sapiens
MPPSTPLLDFSMQNSLLACEFLLQNGANVNQADSAGRGPLHHATILGHTG

SEQ ID NO: 21152 - protein, 18 aa, Homo sapiens
VAALTRSEHLGGGGAGFL

SEQ ID NO: 21153 - protein, 48 aa, Homo sapiens
VAAAAVALVAAVAEVEVEVEAEAEAEPEAARRGARRRGTRPRSVGILN

SEQ ID NO: 21154 - protein, 25 aa, Homo sapiens
MSASQDSRSRDNGPDGMEPEGVIEL

SEQ ID NO: 21155 - protein, 9 aa, Homo sapiens
MSASQDSRL

SEQ ID NO: 21156 - protein, 171 aa, Homo sapiens
MSASQDSRSRDNGPDGMEPEGVIESNWNEIVDSFDDMNLSESLLRGIYAYGFEKPSAIQQRAILPCIKGYDVIAQAQSGTGKTATFAISILQQIELDLKATQALVLAPTRELAQQKVVMALGDYMGASCHACIGGTNVRAEVQKLQMEAPHIIVGTPGRVFDMLNRRYLCE

SEQ ID NO: 21157 - protein, 173 aa, Homo sapiens [sequence omitted]

SEQ ID NO: 21158 - protein, 377 aa, Homo sapiens
MSASQDSRSRDNGPDGMEPEGVIESNWNEIVDSFDDMNLSESLLRGIYAYGFEKPSAIQQRAILPCIKGYDVIAQAQSGTGKTATFAISILQQIELDLKATQALVLAPTRELAQQIQKVVMALGDYMGASCHACIGGTNVRAEVQKLQMEAPHIIVGTPGRVFDMLNRRYLSPKYIKMFVLDEADEMLSRGFKDQIYDIFQKLNSNTQVVLLSATMPSDVLEVTKKFMRDPIRILVKKEELTLEGIRQFYINVEREEWKLDTLCDLYETLTITQAVIFINTRRKVDWLTEKMHARDFTVSAMVCLPAASLLWVCPSEVSYLKPGFLEPRCLPGLLHICFLFQHGDMDQKERDVIMREFRSGSSRVLITTDLLVSRGN

SEQ ID NO: 21159 - protein, 210 aa, Homo sapiens
LRARIPGLSLTPRSGRVRHQEPTRRRAGGSILPHKPGYWQTADGQVHLPSGVSGLRSRDNGPDGMEPEGVIESNWNEIVDSFDDMNLSESLLRGIYAYGFEKPSAIQQRAILPCIKGYDVIAQAQSGTGKTATFAISILQQIELDLKATQALVLAPTRELAQQVRVASIPSFRADLGMMSIIQGPEKSSLITTLGGRHGCPNTLETCWVN

SEQ ID NO: 21160 - protein, 44 aa, Homo sapiens
MHGDMDQKERDVIMREFRSGSSRVLITTDLLCLPSGIECPPCTC

SEQ ID NO: 21161 - protein, 57 aa, Homo sapiens
LTCWENYIHRIGRGGRFGRKGVAINMVTEEDKRTLRDIETFYNTSIEEMPLNVADLI

SEQ ID NO: 21162 - protein, 8 aa, Homo sapiens
LGACFPRR

SEQ ID NO: 21163 - protein, 25 aa, Homo sapiens
LEPDHRPRELGQGAVPNLQGSWGHC

SEQ ID NO: 21164 - protein, 77 aa, Homo sapiens [sequence omitted]

SEQ ID NO: 21165 - protein, 51 aa, Homo sapiens
LGFLVSRRPQACPAACPFFTSLPVPCSQDSNIQACLPLTFTPEEYDKQDIQ

SEQ ID NO: 21166 - protein, 175 aa, Homo sapiens
LDPSSPPPFSLRMAQKENSYPWPYGRQTAPSGLSTLPQRVLRKEPVTPSALVLMSRSNVQPTAAPGQKVMENSSGTPDILTRHFTIDDFEIGRPLGKGKFGNVYLAREKKSHFIVALKVLFKSQIEKEGVEHQLRREIEIQAHLQYGLMPPEPKPLCSLTPSSSFSPTSSRLLSL

SEQ ID NO: 21167 - protein, 140 aa, Homo sapiens
VRTGKVRPKEGWGRARGLGARVGMKDLGSHFPPPSIPGYVAFSSPELQAQIEARGLAPLHWADDDGNPTEQYPLNPNGSPGGVAGICSCDGRHLAVMPHPERAVRPWQWAWRPPPFDTLTTSPWLQLFINARNWTLEGSC

SEQ ID NO: 21168 - protein, 44 aa, Homo sapiens
LQVVITRLKLDKDRKKILERKAKSRQVGKEKGKYKEETIEKMQE

SEQ ID NO: 21169 - protein, 93 aa, Homo sapiens
LHLQVVRGHYKGQQIGKVVQVYRKKYVIYIERVQREKANGTTVHVGIHPSKVVITRLKLDKDRKKILERKAKSRQVGKEKGKYKEETIEKMQE

SEQ ID NO: 21170 - protein, 118 aa, Homo sapiens
MQVAAHNLEFALSFCSCSICKKKQNRHFIVPASRFKLLKGAEHITTYTFNTHKAQHTFCKRCGVQSFYTPRSNPGGFGIAPHCLDEGTVRSMVTEEFNGSDWEKAMKEHKTIKNMSKE

SEQ ID NO: 21171 - protein, 62 aa, Homo sapiens
LAHIRCDLFIPVVMEGHICQSLESAKAGTRFPGPQWGCANPRELGKLGSACSLGYPEGGVRR

SEQ ID NO: 21172 - protein, 52 aa, Homo sapiens
LAHIRCDLFIPVVMEGHICQSLESAKAGTRFPGPQWGCANPRELDCVPTAEC

SEQ ID NO: 21173 - protein, 66 aa, Homo sapiens
LAHIRCDLFIPVVMEGHICQSLESAKAGTRFPGPQWGCANPRELGCKFVKNQHHVWQLSIGARSLP

SEQ ID NO: 21174 - protein, 38 aa, Homo sapiens
MEGHICQSLESAKAGTRFPGPQWGCANPRELVAETSTT

SEQ ID NO: 21175 - protein, 46 aa, Homo sapiens
MEGHICQSLESAKAGTRFPGPQWGCCKFVKNQHHVWQLSIGARSLP

SEQ ID NO: 21176 - protein, 55 aa, Homo sapiens
VAPRLLRPRGFRGGRCGPGHICQSLESAKAGTRFPGPQWGCANPRELDCVPTAEC

SEQ ID NO: 21177 - protein, 34 aa, Homo sapiens
LESAKAGTRFPGPQWGCANPRELVKSSPLAGSQE

SEQ ID NO: 21178 - protein, 768 aa, Homo sapiens
LTLLSVAMLASSKRMNSSSRSQILLRWKSDKAQSGPYNVEKEILTSRFLRDTETCRQNFRNFPYPDLAGPRKALSQLRELCLKWLRPEIHSKEQILELLVLEQFLTILPGEVRTWVKSQYPESSEEAVTLVEDLTQILEEEAPQNSTLSQDTPEEDPRGKHAFQTGWLNDLVTKESMTFKDVAVDITQEDWELMRPVQKELYKTVTLQNYWNMVSLGLTVYRPTVIPILEEPWMVIKEILEGPSPEWETKAQACTPVEDMSKLTKEETHTIKLEDSYDYDDRLERRGKGGFWKIHTDERGFSLKSVLSQEYDPTEECLSKYDIYRNNFEKHSNLIVQFDTQLDNKTSVYNEGRATFNHVSYGIVHRKILPGEKPYKCNVCGKKFRKYPSLLKHQSTHAKEKSYECEECGKEFRHISSLIAHQRMHTGEKPYECHQCGKAFSQRAHLTIHQRIHTGEKPYKCDDCGKDFSQRAHLTIHQRTHTGEKPYKCLECGKTFSHSSSLINHQRVHTGEKPYICNECGKTFSQSTHLLQHQKIHTGKKPYKCNECWKVFSQSTYLIRHQRIHSGEKCYKCNECGKAFAHSSTLIQHQTTHTGEKSYICNICGKAFSQSANLTQHHRTHTGEKPYKCSVCGKAFSQSVHLTQHQRIHNGEKPFKCNICGKAYRQGANLTQHQRIHTGEKPYKCNECGKAFIYSSSLNQHQRTHTGERPYKCNECDKDFSQRTCLIQHQRIHTGEKPYACRICGKTFTQSTNLIQHQRVHTGAKHRN

SEQ ID NO: 21179 - protein, 148 aa, Homo sapiens
VPRLPQGGVDEVIPQPSLAAPEKTVKGTEKGQENFIKQGIQVRHDQDPGYMHHKFAIVDKRVLITGSLNWTTQAIQNNRENVLITEDDEYVRLFLEEFERIWEQFNPTKYTFFPPKKSHGSCAPPVSRAGGRLLSWHRTCGTSSESQT

SEQ ID NO: 21180 - protein, 8 aa, Homo sapiens
LKLTSILS

SEQ ID NO: 21181 - protein, 117 aa, Homo sapiens
LVSGGTILATVPLVVDAEKLPINRLAAGSKAPASAQSRGEKRTAHNAIEKRYRSSINDKIIELKDLVVGTEAKLNKSAVLRKAIDYIRFLQHSNQKLKQENLSLRTAVHKSSESWLY

SEQ ID NO: 21182 - protein, 106 aa, Homo sapiens
MGILEKISEIEKEIARTQKNKATEYHLGLLKAKLAKYRAQLLEPSKSASSKGEGFDVMKSGDARVALIGFPSVGKVSDGQCGPRGGKQEVIFQTGDHPGSPRCLSA

SEQ ID NO: 21183 - protein, 75 aa, Homo sapiens
LTFSPSCPAERPDFTDAIILRKGASVEHVCHRIHRSLASQFKYALVWGTSTKYSPQRVGLTHTMEHEDVIQIVKK

SEQ ID NO: 21184 - protein, 229 aa, Homo sapiens
MTMPVNGAHKDADLWSSHDKMLAQPLKDSDVEVYNIIKKESNRQRVGLELIASENFASRAVLEALGSCLNNKYSEGYPGQRYYGGTEFIDELETLCQKRALQAYKLDPQCWGVNVQPYSGSPANFAVYTALVEPHGRIMGLDLPDGGHLTHGFMTDKKKISATSIFFESMPYKVNPDTGYINYDQLEENARLFHPKLIIAGDARGGKSPCSPVAWCLLQNEDGKMFAPC

SEQ ID NO: 21185 - protein, 94 aa, Homo sapiens [sequence omitted]

SEQ ID NO: 21186 - protein, 227 aa, Homo sapiens
LQRKQEAVGPALSPAAGAPSSGMESVALYSFQATESDELAFNKGDTLKILNMEDDQNWYKAELRGVEGFIPKNYIRVKPHPWYSGRISRQLAEEILMKRNHLGAFLIRESESSPGEFSVSVNHLGPALPRPSLTSQPRTPRSSASAVATSLRSWSAQTPTGGGAGPAGALASSHGVTCSPCTCEQPGGRSGQRAFLQELRSREDMDTPSSVRVTRGSVDGLGLNVGS

SEQ ID NO: 21187 - protein, 1057 aa, Homo sapiens
VLIPAPHCAARPSAVCPGGAAMEVVGDFEYSKRDLVGHGAFAVVFRGRHRQKTDWEVAIKSINKKNLSKSQILLGKEIKILKELQHENIVALYDVQELPNSVFLVMEYCNGGDLADYLQAKGTLSEDTIRVFLHQIAAAMRILHSKGIIHRDLKPQNILLSYANRRKSSVSGIRIKIADFGFARYLHSNMMAATLCGSPMYMAPEVIMSQHYDAKADLWSIGTVIYQCLVGKPPFQANSPQDLRMFYEKNRSLMPSIPRETSPYLANLLLGLLQRNQKDRMDFEAFFSHPFLEQGPVKKSCPVPVPMYSGSVSGSSCGSSPSCRFASPPSLPDMQHIQEENLSSPPLGPPNYLQVSKDSASTSSKNSSCDTDDFVLVPHNISSDHSCDMPVGTAGRRASNEFLVCGGQCQPTVSPHSETAPIPVPTQIRNYQRIEQNLTSTASSGTNVHGSPRSAVVRRSNTSPMGFLRPGSCSPVPADTAQTVGRRLSTGSSRPYSPSPLVGTIPEQFSQCCCGHPQGHDSRSRNSSGSPVPQAQSPQSLLSGARLQSAPTLTDIYQNKQKLRKQHSDPVCPSHTGAGYSYSPQPSRPGSLGTSPTKHLGSSPRSSDWFFKTPLPTIIGSPTKTTAPFKIPKTQASSNLLALVTRHGPAEEQSKDGNEPRECAHCLLVQGSERQRAEQQSKAVFGRSVSTGKLSDQQGKTPICRHQGSTDSLNTERPMDIAPAGACGGVLAPPAGTAASSKAVLFTVGSPPHSAAAPTCTHMFLRTRTTSVGPSNSGGSLCAMSGRVCVGSPPGPGFGSSPPGAEAAPSLRYVPYGASPPSLEGLITFEAPELPEETLMEREHTDTLRHLNVMLMFTECVLDLTAMRGGNPELCTSAVSLYQIQESVVVDQISQLSKDWGRVEQLVLYMKAAQLLAASLHLAKAQIKSGKLSPSTAVKQVVKNLNERYKFCITMCKKLTEKLNRFFSDKQRFIDEINSVTAEKLIYNCAVEMVQSAALDEMFQQTEDIVYRYHKAALLLEGLSRILQDPADIENVHKYKCSIERRLSALCHSTATV

SEQ ID NO: 21188 - protein, 21 aa, Homo sapiens
LGRLPAAMSVLGPGGARSPLD

SEQ ID NO: 21189 - protein, 299 aa, Homo sapiens
VAGCLRTARGAPWRVSEVVSLLLVRNIAITGNLEVETPFCHPSVPRAAANPPAGLQDPGLTERPHRSRRPRARYAPGIMGEKSRRKGPAPRHADGKLGRTCDHPYAPWSFTPSSRAPTAWVRPPCPVWASRLQEHSPEPRRARAPPTRRAQAALYAPALRLRDHLDRFSILMTSCTSWLQAPQAPGLCRDEQSSRISVPQLSGAPILLPDLEGTKLSNFQESSPLPHKHERKDKRSTPEEEGRSAPEKIIQSLKLCPGGHRPASLSSGCPAGCRLSFNLPPSMLLSVQKCCMPSSLKTC

SEQ ID NO: 21190 - protein, 85 aa, Homo sapiens
LPGRCSESSPLPHKHERKDKRSTPEEEGRSAPEKIIQSLKLCPGGHRPASLSSGCPAGCRLSFNLPPSMLLSVQKCCMPSSLKTC

SEQ ID NO: 21191 - protein, 175 aa, Homo sapiens
LWLTPYFGLRPSGAFPRQLAEAAAAAPARLLCPWAREGPTWRHAPQRSPLSSLLLGPHRIPGIRRCPIDGQLSPEGQRERDRLLHGTKNVTNSSSLRLPRQNSDGGQKNKPREHIIDCGDIVWSLAFGSSVPEKQSRCVNIEWHRFRFGQDQLLLATGLNNGRIKIWDVYTGMDS

SEQ ID NO: 21192 - protein, 244 aa, Homo sapiens
MASFPPRVNEKEIVRLRTIGELLAPAAPFDKKCGRENWTVAFAPDGSYFAWSQGHRTVKLVPWSQCLQNFLLHGTKNVTNSSSLRLPRQNSDGGQKNKPREHIIDCGDIVWSLAFGSSVPEKQSRCVNIEWHRFRFGQDQLLLATGLNNGRIKIWDVYTGKLLLNLVDHTEVVRDLTFAPDGSLILVSASRDKTLRVWDLKDDGNMMKVLRGHQNWVYSCAFSPDSSMLCSVGASKAVVAAILV

SEQ ID NO: 21193 - protein, 219 aa, Homo sapiens
MLNIILIKFSSFSIRCAILSSVCLNEAITFAFLLQVFLWNMDKYTMIRKLEGHHHDVVACDFSPDGALLATASYDTRVYIWDPHNGDILMEFGHLFPPPTPIFAGGANDRWVRSVSFSHDGLHVASLADDKMVRFWRIDEDYPVQVAPLSNGLCCAFSTDGSVLAAGTHDGSVYFWATPRQVPSLQHLCRMSIRRVMPTQEVQELPIPSKLLEFLSYRI

SEQ ID NO: 21194 - protein, 260 aa, Homo sapiens
VGVKGSGGHRGGGEMAFSGSQAPYLSPAVPFSGTIQGGLQDGLQITVNGTVLSSSGTRFAVNFQTGFSGNDIAFHFNPRFEDGGYVVCNTRQNGSWGPEERKTHMPFQKGMPFDLCFLVQSSDFKVMVNGILFVQYFHRVPFHRVDTISVNGSVQLSYISFQPPGVWPANPAPITQTVIHTVQSAPGQMFSTPAIPPMMYPHPAYPMPFITTILGGLYPSKSILLSGTVLPSAQRCGSCVKLTASRWPWMVSTCLNTTIA

SEQ ID NO: 21195 - protein, 209 aa, Homo sapiens
MAFSGSQAPYLSPAVPFSGTIQGGLQDGLQITVNGTVLSSSGTRFAVNFQTGFSGNDIAFHFNPRFEDGGYVVCNTRQNGSWGPEERKTHMPFQKGMPFDLCFLVQSSDFKVMVNGILFVQYFHRVPFHRVDTISVNGSVQLSYISFQTQTVIHTVQSAPGQMFSTPAIPPMMYPHPAYPMPFITTILGGLYPSKSILLSGTVLPSAQR

SEQ ID NO: 21196 - protein, 163 aa, Homo sapiens
LTLAPMTHLLLTATVTPSEQNSSREPGWETAMAKDILGEAGLHFDELNKLRVLDPEVTQQTIELKEECKDFVDKIGQFQKIVGGLIELVDQLAKEAENEKMKAIGARNLLKSIAKQREAQQQQLQALIAEKKMQLERYRVEYEALCKVEAEQNEFIDQFIFQK

SEQ ID NO: 21197 - protein, 143 aa, Homo sapiens
LQRAAAAGPAAMAKDILGEAGLHFDELNKLRVLDPEVTQQTIELKEECKDFVDKIGQFQKIVGGLIELVDQLAKEAENEKMKAIGARNLLKSIAKQREAQQQQLQALIAEKKMQLERYRVEYEALCKVEAEQNEFIDQFIFQK

SEQ ID NO: 21198 - protein, 155 aa, Homo sapiens
LQRAAAAGPAEQNSSREPGWETAMAKDILGEAGLHFDELNKLRVLDPEVTQQTIELKEECKDFVDKIGQFQKIVGGLIELVDQLAKEAENEKMKAIGARNLLKSIAKQREAQQQQLQALIAEKKMQLERYRVEYEALCKVEAEQNEFIDQFIFQK

SEQ ID NO: 21199 - protein, 56 aa, Homo sapiens
LPSCLNHIGSCAHRWSHEYQEATIEKIIRFLQGRSSRDSSAGSDTSLEGAAPMGPT

SEQ ID NO: 21200 - protein, 1204 aa, Homo sapiens
LRRDRPAFWLKMWRVKKLSLSLSPSPQTGKPSMRTPLRELTLQPGALTNSGKRSPACSSLTPSLCKLGLQEGSNNSSPVDFVNNKRTDLSSEHFSHSSKWLETCQHESDEQPLDPIPQISSTPKTSEEAVDPLGNYMVKTIVLVPSPLGQQQDMIFEARLDTMAETNSISLNGPLRTDDLVREEVAPCMGDRFSEVAAVSEKPIFQESPSHLLEESPPNPCSEQLHCSKESLSSRTEAVREDLVPSESNAFLPSSVLWLSPSTALAADFRVNHVDPEEEIVEHGAMEEREMRFPTHPKESETEDQALVSSVEDILSTCLTPNLVEMESQEAPGPAVEDVGRILGSDTESWMSPLAWLEKGVNTSVMLENLRQSLSLPSMLRDAAIGTTPFSTCSVGTWFTPSAPQEKSTNTSQTGLVGTKHSTSETEQLLCGRPPDLTALSRHDLEDNLLSSLVILEVLSRQLRDWKSQLAVPHPETQDSSTQTDTSHSGITNKLQHLKESHEMGQALQQARNVMQSWVLISKELISLLHLSLLHLEEDKTTVSQESRRAETLVCCCFDLLKKLRAKLQSLKAEREEARHREEMALRGKDAAEIVLEAFCAHASQRISQLEQDLASMREFRGLLKDAQTQLVGLHAKQEELVQQTVSLTSTLQQDWRSMQLDYTTWTALLSRSRQLTEKLTVKSQQALQERDVAIEEKQEVSRVLEQVSAQLEECKGQTEQLELENSRLATDLRAQLQILANMDSQLKELQSQHTHCAQDLAMKDELLCQLTQSNEEQAAQWQKEEMALKHMQAELQQQQAVLAKEVRDLKETLEFADQENQVAHLELGQVECQLKTTLEVLRERSLQCENLKDTVENLTAKLASTIADNQEQDLEKTRQYSQKLGLLTEQLQSLTLFLQTKLKEKTEQETLLLSTACPPTQEHPLPNDRTFLGSILTAVADEEPESTPVPLLGSDKSAFTRVASMVSLQPAETPGMEESLAEMSIMTTELQSLCSLLQESKEEAIRTLQRKICELQARLQAQEEQHQEVQKAKEADIEKLNQALCLRYKNEKELQEVIQQQNEKILEQIDKSGELISLREEVTHLTRSLRRAETETKVLQEALAGQLDSNCQPMATNWIQEKVWLSQEVDKLRVMFLEMKNEKEKLMIKFQSHRNILEENLRRSDKELEKLDDIVQHIYKTLLSIPEVVRGCKELQGLLEFLS

SEQ ID NO: 21201 - protein, 93 aa, Homo sapiens
MATNWIQEKVWLSQEVDKLRVMFLEMKNEKEKLMIKFQSHVRMSMPFQGHFLPSLTNAPPCFPCPTKFALLCIGLIKSVCFLEKYPRGEPSAL

SEQ ID NO: 21202 - protein, 103 aa, Homo sapiens [sequence omitted]

SEQ ID NO: 21203 - protein, 76 aa, Homo sapiens
VIQQQNEKILEQIDKSGELISLREEVTHLTRSLRRAETETKVLQEALAGQLDSNCQPMATNWIQEKVWLSQEVTQS

SEQ ID NO: 21204 - protein, 115 aa, Homo sapiens
LQARLQAQEEQHQEVQKAKEADIEKLNQALCLRYKNEKELQEVIQQQNEKILEQIDKSGELIVCSPSCPGLCLLCYWSARIPSMRNGLLLFTTCCLSLCPIGHLSILIPRALERR

SEQ ID NO: 21205 - protein, 88 aa, Homo sapiens
LPNDRTFLGSILTAVADEEPESTPVPLLGSDKSAFTRVASMVSLQPAETPGMEESLAEMSIMTTELQSLCSLLQESKEEAIRTLQRKM

SEQ ID NO: 21206 - protein, 70 aa, Homo sapiens
LEKTRQYSQKLGLLTEQLQSLTLFLQTKLKEKTEQETLLLSTACPPTQEHPLPNDRTFLGSILTAVADEG

SEQ ID NO: 21207 - protein, 156 aa, Homo sapiens
LAPLARAGRSPAMPGFDYKFLEKPKRRLLCPLCGKPMREPVQVSTCGHRFCDTCLQEFLSEGVFKWPFARRVTFSLLDQSDPGLAKPQHVTETFHPDPNWKNFQKPGTWRGSLDESSLGFGYPKFISHQDIRKRNYVRDDAVFIRAAVELPRKILS

SEQ ID NO: 21208 - protein, 449 aa, Homo sapiens
LAPLARAGRSPAMPGFDYKFLEKPKRRLLCPLCGKPMREPVQVSTCGHRFCDTCLQEFLSEGVFKCPEDQLPLDYAKIYPDPELEVQVLGLPIRCIHSEEGCRWSGPLRHLQGHLNTCSFNVIPCPNRCPMKLSRRDLPAHLQHDCPKRRLKCEFCGCDFSGEAYESHEGMCPQESVYCENKCGARMMRRLLAQHATSECPKRTQPCTYCTKEFVFDTIQSHQYQCPRLPVACPNQCGVGTVAREDLPGHLKDSCNTALVLCPFKDSGCKHRCPKLAMARHVEESVKPHLAMMCALVSRQRQELQELRRELEELSVGSDGVLIWKIGSYGRRLQEAKAKPNLECFSPAFYTHKYGYKLQVSAFLNGNGSGEGTHLSLYIRVLPGAFDNLLEWPFARRGLSPFLGRADMPWCRSHSTRTEVPAQVLCPKSHKGVGIGEGERVVQRVCLEI

SEQ ID NO: 21209 - protein, 68 aa, Homo sapiens
MGNCHTVGPNEALVVSGEGAARKVGAVEAGWVPGEPALDPSAPRDPDSGADLSGPGPVCQAGAGGGSP

SEQ ID NO: 21210 - protein, 61 aa, Homo sapiens
LGLGLVVYLRHSEVKIMTEKELLAVACEQFLGKNVQDIKNVVLQTLEGHLRSILGEALFSL

SEQ ID NO: 21211 - protein, 44 aa, Homo sapiens
MGNCHTVGPNEALVVSGGCCGSDYKQYVFGGWAWAWWCISDTQR

SEQ ID NO: 21212 - protein, 22 aa, Homo sapiens
MGNCHTVGPNEALVVSDCLWRL

SEQ ID NO: 21213 - protein, 142 aa, Homo sapiens
VAQASRDLAQINDLQAQLEEANKEKQELQEKLQALQSQVEFLEQSMVDKSLVSRQEAKIRELETRLEFERTQVKRLESLASRLKENMEKLTEERDQRIAAENREKEQNKRLQRQLRDTKEEMGELARKEAEASRKKHELGRS

SEQ ID NO: 21214 - protein, 195 aa, Homo sapiens
MALVTVQRSPTPSTTSSPCASEADSGEEECRSQPRSISESFLTVKGAALFLPRGNGSSTPRISHRRNKHAGDLQQHLQAMFILLRPEDNIRLAVRLESTYQNRTRYMVVVSTNGRQDTEESIVLGMDFSSNDSSTCTMGLVLPLWSDTLIHLDGDGGFSVSTDNRVHIFKPVSVQAMWVDRDSRNKHCDVLLVEE

SEQ ID NO: 21215 - protein, 178 aa, Homo sapiens
MALVTVQRSPTPSTTSSPCASEADSGEEECRSQPRSISESFLTVKGAALFLPRGNGSSTPRISHRRNKHAGDLQQHLQAMFILLRPEDNIRLAVRLESTYQNRTRYMVVVSTNGRQDTEESIVLGMDFSSNDSSTCTMGLVLPLWSDTLIHLDGDGGFSVSTDNRVHIFKPVSVQAMW

SEQ ID NO: 21216 - protein, 74 aa, Homo sapiens
VGAMSSSGLNSEKVAALIQKLNSDPQFVLAQNVGTTHDLLDICLKRATVQRAQHVFQHAVPQEGKPITNQKSSG

SEQ ID NO: 21217 - protein, 106 aa, Homo sapiens
LEATVTPPGSVGAMSSSGLNSEKVAALIQKLNSDPQFVLAQNVGTTHDLLDICLKRATVQRAQHVFQHAVPQEGKPITNQKSSGVGFHFSHTFLDLPDSVPFWCLI

SEQ ID NO: 21218 - protein, 25 aa, Homo sapiens
LHTLAAPQGSHCPRFLIASFRVRFG

SEQ ID NO: 21219 - protein, 27 aa, Homo sapiens
LCNLMVSSLLDVAESTPAYQPTQLILE

SEQ ID NO: 21220 - protein, 85 aa, Homo sapiens
LPLWISWAEWSEGAKSQEDTEAVFKKALLAVIGADSVTLKNKYLDWAYRSGGYKKARAVFKRYSQTFIVVTSPSTPCSAAHTQII

SEQ ID NO: 21221 - protein, 90 aa, Homo sapiens
MAAAAVVEFQRAQSLLSTDREASIDILHSIVKRDIQENDEEAVQVKEQSILELGSLLAKTGQAAGKCYTWIVSEMLSEIPVFCWSEESWD

SEQ ID NO: 21222 - protein, 314 aa, Homo sapiens
MAAAAVVEFQRAQSLLSTDREASIDILHSIVKRDIQENDEEAVQVKEQSILELGSLLAKTGQAAELGGLLKYVRPFLNSISKAKAARLVRSLLDLFLDMEAATGQEVELCLECIEWAKSEKRTFLRQALEARLVSLYFDTKRYQEALHLGSQLLRELKKMDDKALLVEVQLLESKTYHALSNLPKARAALTSARTTANAIYCPPKLQATLDMQSGIIHAAEEKDWKTAYSYFYEAFEGYDSIDSPKAITSLKYMLLCKIMLNTPEDVQALVSGKLALRYAGRQTEALKCVAQASKNRSLADFEKVSMILGWYGM

SEQ ID NO: 21223 - protein, 110 aa, Homo sapiens
MLVCRINRFHGLSLYSQTEALKCVAQASKNRSLADFEKALTDYRAELRDDPIISTHLAKLYDNLLEQNLIRVIEPFSRVQVRTLWGLHFWPGILTVATSLPHLSRMGTHF

SEQ ID NO: 21224 - protein, 84 aa, Homo sapiens
LTPLHLQVLLDIFTGVRLYLPPSTPDFSRLRRYFVAFDGDLVQEFDMTSATHVLGSRDKNPAAQQVSPEWIWACIRKRRLVAPC

SEQ ID NO: 21225 - protein, 225 aa, Homo sapiens
LGLFRPAGNMGVLRVGLCPGLTEEMIQLLRSHRIKTVVDLVSADLEEVAQKCGLSYKAEALRRIQVVHAFDIFQMLDVLQELRGTVAQQVTGSSGTVKVVVVDSVTAVVSPLLGGQQREGLALMMQLARELKTLARDLGMAVVVTNHITRDRDSGRLKPALGRSWSFVPSTRILLDTIEGAGASGGRRMACLAKSSRQPTGFQEMVDIGTWGTSEQSATLQGDQT

SEQ ID NO: 21226 - protein, 357 aa, Homo sapiens
LGLFRPAGNMGVLRVGLCPGLTEEMIQLLRSHRIKTVVDLVSADLEEVAQKCGLSYKTWRAHSSGNLGGLQLPQVPAGRSWSGVRNALKKAGLGHGGTDGLSLNAFDERGTAVSTSRLDKLLDAGLYTGEVTEIVGGPGSGKTQVCLCMAANVAHGLQQNVLYVDSNGGLTASRLLQLLQAKTQDEEEQAEALRRIQVVHAFDIFQMLDVLQELRGTVAQQVTGSSGTVKVVVVDSVTAVVSPLLGGQQREGLALMMQLARELKTLARDLGMAVVVTNHITRDRDSGRLKPALGRSWSFVPSTRILLDTIEGAGASGGRRMACLAKSSRQPTGFQEMVDIGTWGTSEQSATLQGDQT

SEQ ID NO: 21227 - protein, 483 aa, Homo sapiens
LLAQDEAVARDVQRLLVQFQDEGGQLLGSPFDVPVDITPDRLQLVCNALLAQEDPLPLAFFVHDAEIVSSLGKTLESQAVETEKVLDIIYQPQAIFRVRAVTRCTSSLEGHSEAVISVAFSPTGKYLASGSGDTTVRFWDLSTETPHFTCKGHRHWVLSISWSPDGRKLASGCKNGQILLWDPSTGKQVGRTLAGHSKWITGLSWEPLHANPECRYVASSSKDGSVRIWDTTAGRCERILTGHTQSVTCLRWGGDGLLYSASQDRTIKVWRAHDGVLCRTLQGHGHWVNTMALSTDYALRTGAFEPAEASVNPQDLQGSLQELKERALSRYNLVRGQGPERLVSGSDDFTLFLWSPAEDKKPLTRMTGHQALINQVLFSPDSRIVASASFDKSIKLWDGRTGKYLASLRGHVAAVYQIAWSADSRLLVSGSSDSTLKVWDVKAQKLAMDLPGHADEVYAVDWSPDGQRVASGGKDKCLRIWRR

SEQ ID NO: 21228 - protein, 497 aa, Homo sapiens
LPGSFSSTWGRRMAAAVPDEAVARDVQRLLVQFQDEGGQLLGSPFDVPVDITPDRLQLVCNALLAQEDPLPLAFFVHDAEIVSSLGKTLESQAVETEKVLDIIYQPQAIFRVRAVTRCTSSLEGHSEAVISVAFSPTGKYLASGSGDTTVRFWDLSTETPHFTCKGHRHWVLSISWSPDGRKLASGCKNGQILLWDPSTGKQVGRTLAGHSKWITGLSWEPLHANPECRYVASSSKDGSVRIWDTTAGRCERILTGHTQSVTCLRWGGDGLLYSASQDRTIKVWRAHDGVLCRTLQGHGHWVNTMALSTDYALRTGAFEPAEASVNPQDLQGSLQELKERALSRYNLVRGQGPERLVSGSDDFTLFLWSPAEDKKPLTRMTGHQALINQVLFSPDSRIVASASFDKSIKLWDGRTGKYLASLRGHVAAVYQIAWSADSRLLVSGSSDSTLKVWDVKAQKLAMDLPGHADEVYAVDWSPDGQRVASGGKDKCLRIWRR

SEQ ID NO: 21229 - protein, 179 aa, Homo sapiens
LLAQDEAVARDVQRLLVQFQDEGGQLLGSPFDVPVDITPDRLQLVCNALLAQEDPLPLAFFVHDAEIVSSLGKTLESQAVETEKVLDIIYQPQAIFRVRAVTRCTSSLEGHSEAVISVAFSPTGKYLASGSGDTTVRFWDLSTETPHFTCKGHRHWVLSISWSPDGRKLASGCKNGQEP

SEQ ID NO: 21230 - protein, 117 aa, Homo sapiens
LGGLGRTEEGKRFFVASLCFLFYFIYFIFRFSVLISPREGDLGIHPMSSRELPWPRSESSWDATGSESAPQVSPPAPPNLSIPTRITPSAAGRGARGMARRVGTWGTGGKGKPPSFS

SEQ ID NO: 21231 - protein, 424 aa, Homo sapiens
LDLGGSVACSRRETRCRGEPSGRTFQDRNRPSAEKMSLRIDVDTNFPECVVDAGKVTLGTQQRQEMDPRLREKQNEIILRAVCALLNSGGGIIKAEIENKGYNYERHGVGLDVPPIFRSHLDKMQKENHFLIFVKSWNTEAGVPLATLCSNLYHRERTSTDVMDSQEALAFLKCRTQTPTNINVSNSLGPQAAQGSVQYEGNINVSAAALFDRKRLQYLEKLNLPESTHVEFVMFSTDVSHCVKDRLPKCVSAFANTEGGYVFFGVHDETCQVIGCEKEKIDLTSLRASIDGCIKKLPVHHFCTQRPEIKYVLNFLEVHDKGALRGYVCAIKVEKFCCAVFAKVPSSWQVKDNRVRQLPTREWTAWMMEADPDLSRCPEMVLQLSLSSATPRSKPVCIHKNSECLKEQQKRYFPVSARKTSASQ

SEQ ID NO: 21232 - protein, 283 aa, Homo sapiens
MSERAAETLLSSFSKKNICQPVTRKTFMKNNFEHIQHIIIDDAQNFRTEDGDWYGKAKFITQTARDGPGVLWIFLDYFQTYHLSCSGLPPPSDQYPREEINRVVRNAGPIANYLQQVMQEARQNPPPNLPPGSLVMLYEPKWAQGVPGNLEIIEDLNLEEILIYVANKCRFLLRNGYSPKDIAVLFTKASEVEKYKDRLLTAMRKRKLSQLHEESDLLLQIGDASDVLTDHIVLDSVCRFSGLERNIVFGINPGVAPPAGAYNLLLCLASRAKRHLYILKASV

SEQ ID NO: 21233 - protein, 73 aa, Homo sapiens
LLSFFLLSVHPAVVIRQRKSYRRKDGVFLYFEDNAGVIVNNKGEMKGSAITGPVAKECADLWPRIASNAGSIA

SEQ ID NO: 21234 - protein, 168 aa, Homo sapiens
VRRVGGALKFISQCPLNRLPFFFFPAFKMSKRGRGGSSGAKFRISLGLPVGAVINCADNTGAKNLYIISVKGIKGRLNRLPAAGVGDMVMATVKKGKPELRKKVHPAVVIRQRKSYRRKDGVFLYFEDNAGVIVNNKGEMKGSAITGPVAKECADLWPRIASNAGSIA

SEQ ID NO: 21235 - protein, 55 aa, Homo sapiens
LLSFFLLSVHPAVVIRQRKSYRRKDGVFLYFEDNAGVIVNNKGEMKGRKSVQLVP

SEQ ID NO: 21236 - protein, 77 aa, Homo sapiens
MSKRGRGGSSGAKFRISLGLPVGAVINCADNTGAKNLYIISVKGIKGRLNRLPAAGVGDMVMATVKKGKPELRKKGE

SEQ ID NO: 21237 - protein, 52 aa, Homo sapiens
MSKRGRGGSSGAKFRISLGLPVGAVINCADNTGEVFARCYTPPFKSTQWACG

SEQ ID NO: 21238 - protein, 104 aa, Homo sapiens
VSSGVPAPAFLGTMNPNCARCGKIVYPTEKVNCLDKFWHKACFHCETCKMTLNMKNYKGYEKKPYCNAHYPKQSFTMVADTPENLRLKQQSELQSQMKKPRPGA

SEQ ID NO: 21239 - protein, 351 aa, Homo sapiens
MRGTLCQGRDPIIQDSWQGECKTCLVSTTFQRRQLPKEGFQNAGPWETGSQSDSSHKPQGASSAPPRTWPHQGAQGNEEDNHSYYVSRLYGPSEPHSRELWVDVAEANRSQVKIHTILSNTHRQASRVVLSFDFPFYGHPLRQITIATGGFIFMGDVIHRMLTATQYVAPLMANFNPGYSDNSTVVYFDNGTVFVVQWDHVYLQGWEDKGSFTFQAALHHDGRIVFAYKEIPMSVPEISSSQHPVKTGLSDAFMILNPSPDVPESRRRSIFEYHRIELDPSKVTSMSAVEFTPLPTCLQHRSCDACMSSDLTFNCSWCHVLQRSLNNQDENTYVNCLDSQQCHGSSESRRP

SEQ ID NO: 21240 - protein, 352 aa, Homo sapiens
LGFKLDIKKNLQTGLALFHGHDEGPGSGWAAKGTVRGWNRRARESPGHVSEPDRTQLSQDLGGGTLAMDTLPDNRTRVVEDNHSYYVSRLYGPSEPHSRELWVDVAEANRSQVKIHTILSNTHRQASRVVLSFDFPFYGHPLRQITIATGGFIFMGDVIHRMLTATQYVAPLMANFNPGYSDNSTVVYFDNGTVFVVQWDHVYLQGWEDKGSFTFQAALHHDGRIVFAYKEIPMSVPEISSSQHPVKTGLSDAFMILNPSPDVPESRRRSIFEYHRIELDPSKVTSMSAVEFTPLPTCLQHRSCDACMSSDLTFNCSWCHVLQRSLNNQDENTYVNCLDSQQCHGSSESRRP

SEQ ID NO: 21241 - protein, 307 aa, Homo sapiens
LGFKLDIKKNLQTGLALFHGHDEGPGSGWAAKGTVRGWNRRARESPGHVSEPDRTQLSQDLGGGTLAMDTLPDNRTRVVEDNHSYYVSRLYGPSEPHSRELWVDVAEANRSQVKIHTILSNTHRQASRVVLSFDFPFYGHPLRQITIATGGFIFMGDVIHRMLTATQYVAPLMANFNPGYSDNSTVVYFDNGTVFVVQWDHVYLQGWEDKGSFTFQAALHHDGRIVFAYKEIPMSVPEISSSQHPVKTGLSDAFMILNPSPDVPESRRRSIFEYHRIELDPSKVTSMSAVEFTPLPSPSTTRMKTRM

SEQ ID NO: 21242 - protein, 88 aa, Homo sapiens
MSMLRLQKRLASSVLRCGKKKVWLDPNETNEIANANSRQQIRKLIKDGLIIRKPVTVHSRARCRKNTLARRKGRHMGIGKCGHLLLKK

SEQ ID NO: 21243 - protein, 196 aa, Homo sapiens
LGMLRLQKRLASSVLRCGKKKVWLDPNETNEIANANSRQQIRKLIKDGLIIRKPVTVHSRARCRKNTLARRKGRHMGIGKRKGTANARMPEKVTWMRRMRILRRLLRRYRESKKIDRHMYHSLYLKVKGNVFKNKRILMEHIHKLKADKARKKLLADQAEARRSKTKEARKRREERLQAKKEEIIKTLSKEEETKK

SEQ ID NO: 21244 - protein, 92 aa, Homo sapiens
VFPSFLRPWGQECEQCLWPGLFGLCDVLGPQLTDQVHYAFPGQQIRKLIKDGLIIRKPVTVHSRARCRKNTLARRKGRHMGIGKCGHLLLKK

SEQ ID NO: 21245 - protein, 73 aa, Homo sapiens
LTRLKGRGLGMCFCLPSISSLPKLTRLFSSLTSDQAEARRSKTKEARKRREERLQAKKEEIIKTLSKEEETKK

SEQ ID NO: 21246 - protein, 44 aa, Homo sapiens
LELASAVKEQYPGIEIESRLGGTGEARRTPAGSVCALNPSSPAF

SEQ ID NO: 21247 - protein, 17 aa, Homo sapiens
LLMKVLVGDGSSFPISA

SEQ ID NO: 21248 - protein, 63 aa, Homo sapiens
MQSRTPLPQRPTLLQGCSPATPRPCCRVLRILIVSRGVHSPPLASAQGATAAIATSSLSQGPV

SEQ ID NO: 21249 - protein, 466 aa, Homo sapiens
LLRTTMTMRSAVFKAAAAPAGGNPEQRLDYERAAALGGPEDEPGAAEAHFLPRHRKLKEPGPPLASSQGGSPAPSPAGCGGKGRGLLLPAGAAPGQQEESWGGSVPLPCPPPATKQAGIGGEPAAAGAGCSPRPKYQAVLPIQTGSLVAAAKEPTPWAGDKGGAASPAATASDPAGPPPLPLPGPPPLAPTATAGTLAASEGRWKSMRKSPLGGGGGSGASSQAACLKQILLLQLDLIEQQQQQLQAKEKEIEELKSERDTLLARIERMERRMQLVKKDNEKERHKLFQGYETEEREETELSEKIKLECQPELSETSQTLPPKPFSCGRSGKGHKRKSPFGSTERKTPVKKLAPEFSKVKTKTPKHSPIKEEPCGSLSETVCKRELRSQETPEKPRSSVDTPPRLSTPQKGPSTHPKEKAFSSEIEDLPYLSTTEMYLCRWHQPPPSPLPLRESSPKKEETVASKA

SEQ ID NO: 21250 - protein, 596 aa, Homo sapiens
LRRWKEEDCSRRPGVCEAAELGEGCGFRRGLSCAVVMPQTRSQAQATISFPKRKLSRALNKAKNSSDAKLEPTNVQTVTCSPRVKALPLSPRKRLGDDNLCNTPHLPPCSPPKQGKKENGPPHSHTLKGRRLVFDNQLTIKSPSKRELAKVHQNKILSSVRKSQEITTNSEQRCPLKKESACVRLFKQEGTCYQQAKLVLNTAVPDRLPAREREMDVIRNFLREHICGKKAGSLYLSGAPGTGKTACLSRILQDLKKELKGFKTIMLNCMSLRTAQAVFPAIAQEICQEEVSRPAGKDMMRKLEKHMTAEKGPMIVLVLDEMDQLDSKGQDVLYTLFEWPWLSNSHLVLIGIANTLDLTDRILPRLQAREKCKPQLLNFPPYTRNQIVTILQDRLNQVSRDQVLDNAAVQFCARKVSAVSGDVRKALDVCRRAIEIVESDVKSQTILKPLSECKSPSEPLIPKRVGLIHISQVISEVDGNRMTLSQEGAQDSFPLQQKILVCSLMLLIRQLKIKEVTLGKLYEAYSKVCRKQQVAAVDQSECLSLSGLLEARGILGLKRNKETRLTKVFFKIEEKEIEHALKDKALIGNILATGLP

SEQ ID NO: 21251 - protein, 93 aa, Homo sapiens
LVLNTAVPDRLPAREREMDVIRNFLREHICGKKAGSLYLSGAPGTGKTACLSRILQDLKVSRDQVLDNAAVQFCARKVSAVSGDVRKALDVCR

SEQ ID NO: 21252 - protein, 128 aa, Homo sapiens
MRPVPVRGVHSLHPRPFGGPVSLPWLRTGRCRWGLGLYRQPSLLPEEICGVFFRRHYPLTTLRFCGMDPEQRKWQKYCKPSWIFGFVAKSQTEPQENVCHLFAEYDMVQPASQVIGLVTALLQDAERM

SEQ ID NO: 21253 - protein, 145 aa, Homo sapiens
LASNCDHPHTHFLLGGGSKRSSTGFLNRRLTPSPGPGQRENLGPGSVAPAQCLPPTGCHTLYLSSVSVETLTGALAVQKAISTTFERDILPTPTVVHFKVTEQGITLTDVQRKVFFRRHYPLTTLRFCGMDPEQRKWQKYCKPSW

SEQ ID NO: 21254 - protein, 30 aa, Homo sapiens
MNRHHTEVFVRKKVDAGILSSNRSLPVSAD

SEQ ID NO: 21255 - protein, 141 aa, Homo sapiens
VGMFDLNLEEQAETQEVQKRGGGNSMNEVGHANSLSIDTIFHVRAASCNTEVFRFYEKVLNELKALLRGQLSPLPILLSAHKTGTDNLLEELGRNFSIFSVQSSLVPLCERRRDLLDWCRWEKGIKCAWLSLFLALSLGLT

SEQ ID NO: 21256 - protein, 16 aa, Homo sapiens
LSQGLKTSPHVLLSIR

SEQ ID NO: 21257 - protein, 37 aa, Homo sapiens
LPRRPPRLSTGESVVFPAGQASCLRVIKATLWAPEWG

SEQ ID NO: 21258 - protein, 66 aa, Homo sapiens
LSPKPKTESESPETVPTCWSEGAKEGECKGRGSGLKSPLNEPSGLPQTQMLRPALPKTRPYLQDQR

SEQ ID NO: 21259 - protein, 62 aa, Homo sapiens [sequence omitted]

SEQ ID NO: 21260 - protein, 21 aa, Homo sapiens
MGRILLLSSLGQTSEDFSDGS

SEQ ID NO: 21261 - protein, 19 aa, Homo sapiens
MSRISLLSLVTGLKTSQLV

SEQ ID NO: 21262 - protein, 20 aa, Homo sapiens
LAVSSLKPSNTVMFQPSPEP

SEQ ID NO: 21263 - protein, 14 aa, Homo sapiens
MSKHQNVRPTFYQS

SEQ ID NO: 21264 - protein, 16 aa, Homo sapiens
LSLWLEVPLPTKCLFA

SEQ ID NO: 21265 - protein, 16 aa, Homo sapiens
LGLQLEVPLPTKCLFA

SEQ ID NO: 21266 - protein, 31 aa, Homo sapiens
LDFSEGAQKMTRARAGRRRQLVHFSLLPFCG

SEQ ID NO: 21267 - protein, 50 aa, Homo sapiens
VVGVILASLESPVLPLSTVLSLRSQNLWPPRHTCAHTRVHTHTPHIYFLI

SEQ ID NO: 21268 - protein, 44 aa, Homo sapiens
MRTHARAHTHPTHLFFNLGAQKMTRARAGRRRQLVHFSLLPFCG

SEQ ID NO: 21269 - protein, 256 aa, Homo sapiens
LCHLSGSVSVSSVSRCLCILCVCEYFQLPQSTFSPLLSPSQGRVPFAVPDKVLWPQLCEALNMKFKAEVQSNRGLTKENLVFLAQKLFNNSSSHLEDYSGLSVSWSQFNRENLPGWNYTFWQWFDGVMEVLKKHHKPHWNDGAILGFVNKQQAHDLLINKPDGTFLLRFSDSEIGGITIAWKFDSPERNLWNLKPFTTRDFSIRSLADRLGDLSYLIYVFPDRPKDEVFSKYYTPVLGGYCPRTLPADSPGLFPSP

SEQ ID NO: 21270 - protein, 272 aa, Homo sapiens
LCVCEYFQLPQSTFSPLLSPSQGRVPFAVPDKVLWPQLCEALNMKFKAEVQSNRGLTKENLVFLAQKLFNNSSSHLEDYSGLSVSWSQFNRENLPGWNYTFWQWFDGVMEVLKKHHKPHWNDGAILGFVNKQQAHDLLINKPDGTFLLRFSDSEIGGITIAWKFDSPERNLWNLKPFTTRDFSIRSLADRLGDLSYLIYVFPDRPKDEVFSKYYTPVLAKAVDGYVKPQIKQVVPEFVNASADAGGSSATYMDQAPSPAVCPQAPYNMYPQK

SEQ ID NO: 21271 - protein, 18 aa, Homo sapiens
LNPTLLFGNNMQCEAVVL

SEQ ID NO: 21272 - protein, 30 aa, Homo sapiens
VNVDSRLSVNPMRARLGPAMSLAQGGRRFE

SEQ ID NO: 21273 - protein, 119 aa, Homo sapiens
LRGRWSFPDNLGMRMSEFQISPAEADGFLQLCLLNAKSQSVRKLVFFFPGAAPYLKTKFICVTPTTCSNTIDLPMSPRTLDSLMQFGNNGEGAEPSAGGQFESLTFDMELTSECATSPM

SEQ ID NO: 21274 - protein, 28 aa, Homo sapiens
MTEPGASPEDPWVKVEYAYSDNSLDPGE

SEQ ID NO: 21275 - protein, 90 aa, Homo sapiens
MTEPGASPEDPWVKVEYAYSDNSLDPDDEDSDYHQEAYKESYKDRRRRAHTQAEQKRRDAIKPLTTFSFCTRRRKSRRRRCPRYARMSPP

SEQ ID NO: 21276 - protein, 152 aa, Homo sapiens
LRIRPSGDFGDQFDMVSDADLQVLDGKIVALTAKVQSLQQSCRYMEAELKELSSALTTPEMQKEIQELKKECAGYRERLKNIKAATNHVTPEEKEQVYRERQKYCKEWRKRKRMATELSDAILEGYPKSKKQFFEEVGIETDEDYNVTLPDP

SEQ ID NO: 21277 - protein, 216 aa, Homo sapiens
VAPSPAFLSVAAGILLRYLQEQNRPYSSQDVFGNLQREHGLGKAVVVKTLEQLAQQGKIKEKMYGKQKIYFADQDQFDMVSDADLQVLDGKIVALTAKVQSLQQSCRYMEAELKELSSALTTPEMQKEIQELKKECAGYRERLKNIKAATNHVTPEEKEQVYRERQKYCKEWRKRKRMATELSDAILEGYPKSKKQFFEEVGIETDEDYNVTLPDP

SEQ ID NO: 21278 - protein, 225 aa, Homo sapiens
LSWVAGKAMSKGRAEAAAGAAGILLRYLQEQNRPYSSQDVFGNLQREHGLGKAVVVKTLEQLAQQGKIKEKMYGKQKIYFADQDQFDMVSDADLQVLDGKIVALTAKVQSLQQSCRYMEAELKELSSALTTPEMQKEIQELKKECAGYRERLKNIKAATNHVTPEEKEQVYRERQKYCKEWRKRKRMATELSDAILEGYPKSKKQFFEEVGIETDEDYNVTLPDP

SEQ ID NO: 21279 - protein, 840 aa, Homo sapiens
LPPPCPLLPSAPPTSSFPCSGRSPASSSDPLLLGRGCPRPHPQLLARMPLPGGLWWLLCCRRGFTLLHRDYGDGELSGDGDEDEDEETFELRTPSPAGGGRGPLEVTLTQPVRSGPVSNRLQSWEETWSLIPEKGLPEDDPDIVVKGWLYREPRGGGARPWLPPRRAWFVLTRDSLDQFSSSGKGARRLGSLVLTSLCSVTGPERRRKETGLWSVTVSGRKHSVRLCSPRQAEAERWGVALREVIASKAPLETPTQLLLRDIQESCGDPEAVALIYLRNPILRHTSGALYAPLLPLPYGVSAPGPGYAPLREEAVRLFLALQALEGARRPGPLMQGVLQTCRDLPALRDELFLQLAKQTSGPAGPPGLPATQDPAALRYWQLLTCMSCTFRPGGAVRGHLLGHLERTEQALPDSELAEYARFIRKALGRTRGRELVPSLAEISALSQRQELLCTVHCPGAGACAVAIDSHTTAGEVARELVGRLGLARSRNAFALYEQRGAQERALAGGTLVADVLTRFENLAAEEAGLEDSPDSGWRLCLRLHGPLHPEGLSPDGHELPFLFEQAHALLLRGRPPPPDDTLRALAALRLQSLQRDFSPRVPLPRLDRLLPPPAPPREDPPRPTPRPPPSAALLAGALWSPGLAKRRAERARRGGAGRTAGSIAREGGGGAGTAAAVLGGWKRLRGMGRAEAMAAYLALAAQCPGFGAARYDVLELSTEPGRGAPQKLCLGLGAKAMSLSRPGETEPIHSVSYGHVAACQLMGPHTLALRVGESQLLLQSPQVEEIMQLVNAYLANPSPERPCSSSSPPCQDLPDTSPPSQRPGLDEPQGQSGCLGQLQD

SEQ ID NO: 21280 - protein, 837 aa, Homo sapiens
LPPPCPLLPSAPPTSSFPCSGRSPASSSDPLLLGRGCPRPHPQLLARMPLPGGLWWLLCCRRGFTLLHRDYGDGELSGDGDEDEDEETFELRTPSPAGGGRGPLEVTLTQPVRSGPVSNRLQSWEETWSLIPEKGLPEDDPDIVVKGWLYREPRGGGARPWLPPRRAWFVLTRDSLDQFSSSGKGARRLGSLVLTSLCSVTGPERRRKETGLWSVTVSGRKHSVRLCSPRQAEAERWGVALREVIASKAPLETPTQLLLRDIQESCGDPEAVALIYLRNPILRHTSGALYAPLLPLPYGVSAPGPGYAPLREEAVRLFLALQALEGARRPGPLMQGVLQTCRDLPALRDELFLQLAKQTSGPAGPPGLPATQDPAALRYWQLLTCMSCTFRPGGAVRGHLLGHLERTEQALPDSELAEYARFIRKALGRTRGRELVPSLAEISALSQRQELLCTVHCPGAGACAVAIDSHTTAGEVARELVGRLGLARSRNAFALYEQRGAQERALAGGTLVADVLTSLAAEEAGLEDSPDSGWRLCLRLHGPLHPEGLSPDGHELPFLFEQAHALLLRGRPPPPDDTLRALAALRLQSLQRDFSPRVPLPRLDRLLPPPAPPREDPPRPTPRPPPSAALLAGALWSPGLAKRRAERARRGGAGRTAGSIAREGGGGAGTAAAVLGGWKRLRGMGRAEAMAAYLALAAQCPGFGAARYDVLELSTEPGRGAPQKLCLGLGAKAMSLSRPGETEPIHSVSYGHVAACQLMGPHTLALRVGESQLLLQSPQVEEIMQLVNAYLANPSPERPCSSSSPPCQDLPDTSPPSQRPGLDEPQGQSGCLGQLQD

SEQ ID NO: 21281 - protein, 622 aa, Homo sapiens
VRRPDARAPAAETWTRGRSHPRIGVCGGDPKEREGPLEVTLTQPVRSGPVSNRLQSWEETWSLIPEKGLPEDDPDIVVKGWLYREPRGGGARPWLPPRRAWFVLTRDSLDQFSSSGKGARRLGSLVLTSLCSVTGPERRRKETGLWSVTVSGRKHSVRLCSPRQAEAERWGVALREVIASKAPLETPTQLLLRDIQESCGDPEAVALIYLRNPILRHTSGALYAPLLPLPYGVSAPGPPGLPATQDPAALRYWQLLTCMSCTFRPGGAVRGHLLGHLERTEQALPDSELAEYARFIRKALGRTRGRELVPSLAEISALSQRQELLCTVHCPGAGACAVAIDSHTTAGEVARELVGRLGLARSRNAFALYEQRGAQERALAGGTLVADVLTSLAAEEAGLEDSPDSGWRLCLRLHGPLHPEGLSPDGHELPFLFEQAHALLLRGRPPPPDDTLRALAALRLQSLQRDFSPRVPLPRLDRLLPPPAPPREDPPRPTPRPPPSAALLAGALWSPGLAKRRAERARRGGAGRTAGSIAREGGGGAGTAAAVLGGWKRLRGMGRAEAMAAYLALAAQCPGFGAARSLVGVLHRSCAWAWEPRPCPSPGQGRRSPSTVSAMAMWPPAS

SEQ ID NO: 21282 - protein, 721 aa, Homo sapiens
LLGRGCPRPHPQLLARMPLPGGLWWLLCCRRGFTLLHRDYGDGELSGDGDEDEDEETFELRTPSPAGGGRGPLEVTLTQPVRSGPVSNRLQSWEETWSLIPEKGLPEDDPDIVVKGWLYREPRGGGARPWLPPRRAWFVLTRDSLDQFSSSGKGARRLGSLVLTSLCSVTGPERRRKETGLWSVTVSGRKHSVRLCSPRQAEAERWGVALREVIASKAPLETPTQLLLRDIQESCGDPEAVALIYLRNPILRHTSGALYAPLLPLPYGVSAPGPGYAPLREEAVRLFLALQALEGARRPGPLMQGVLQTCRDLPALRDELFLQLAKQTSGPAGPPGLPATQDPAALRYWQLLTCMSCTFRPGGAVRGHLLGHLERTEQALPDSELAEYARFIRKALGRTRGRELVPSLAEISALSQRQELLCTVHCPGAGACAVAIDSHTTAGEVARELVGRLGLARSRNAFALYEQRGAQERALAGGTLVADVLTRFENLAAEEAGLEDSPDSGWRLCLRLHGPLHPEGLSPDGHELPFLFEQAHALLLRGRPPPPDDTLRALAALRLQSLQRDFSPRVPLPRLDRLLPPPAPPREDPPRPTPRPPPSAALLAGALWSPGLAKRRAERARRGGAGRTAGSIAREGGGGAGTAAAVLGGWKRLRGMGRAEAMAAYLALAAQCPGFGAARSLVGVLHRSCAWAWEPRPCPSPGQGRRSPSTVSAMAMWPPAS

SEQ ID NO: 21283 - protein, 780 aa, Homo sapiens
LPPPCPLLPSAPPTSSFPCSGRSPASSSDPLLLGRGCPRPHPQLLARMPLPGGLWWLLCCRRGFTLLHRDYGDGELSGDGDEDEDEETFELRTPSPAGGGRGPLEVTLTQPVRSGPVSNRLQSWEETWSLIPEKGLPEDDPDIVVKGWLYREPRGGGARPWLPPRRAWFVLTRDSLDQFSSSGKGARRLGSLVLTSLCSVTGPERRRKETGLWSVTVSGRKHSVRLCSPRQAEAERWGVALREVIASKAPLETPTQLLLRDIQESCGDPEAVALIYLRNPILRHTSGALYAPLLPLPYGVSAPGPGYAPLREEAVRLFLALQALEGARRPGPLMQGVLQTCRDLPALRDELFLQLAKQTSGPAGPPGLPATQDPAALRYWQLLTCMSCTFRPGGAVRGHLLGHLERTEQALPDSELAEYARFIRKALGRTRGRELVPSLAEISALSQRQELLCTVHCPGAGACAVAIDSHTTAGEVARELVGRLGLARSRNAFALYEQRGAQERALAGGTLVADVLTSLAAEEAGLEDSPDSGWRLCLRLHGPLHPEGLSPDGHELPFLFEQAHALLLRGRPPPPDDTLRALAALRLQSLQRDFSPRVPLPRLDRLLPPPAPPREDPPRPTPRPPPSAALLAGALWSPGLAKRRAERARRGGAGRTAGSIAREGGGGAGTAAAVLGGWKRLRGMGRAEAMAAYLALAAQCPGFGAARYDVLELSTVRGRREKGTLAAQAPHLCPRATGPTECHVIPHIQNSYPSQTPGVTSPWALTSLEPQPPPHTCCES

SEQ ID NO: 21284 - protein, 55 aa, Homo sapiens
LESTAPPVSRGSDTARPGHGLVAEGGSGSEAQALSFRSAQPSPQLPGSASRERKI

SEQ ID NO: 21285 - protein, 70 aa, Homo sapiens
LESTAPPVSRGSDTARPGHGLVAEGGSGSEAQDSFRHRRKGGKGEDRGDRQVLSSKPCVLLRWKNGSSKK

SEQ ID NO: 21286 - protein, 85 aa, Homo sapiens
LGRCGHITQETLLFLTVGDEKGGGLFLLAGPPASVETLGPRVAEVLEGKGAGKKGRFQGKATKMSRRMEAQALLQDYISTQSAKE

SEQ ID NO: 21287 - protein, 116 aa, Homo sapiens
VKKLQNSTKILQKNNLNLLRDLAVHIAHSLRNSPDWGGVVILHRKEGDSEFMNIIANEIGSEETLLFLTVGDEKGGGLFLLAGPPASVETLGPRWLRSWKAKEQGRKAVFRARPPR

SEQ ID NO: 21288 - protein, 86 aa, Homo sapiens
LKTTSWELGRFRSAIELDTPSMTAEQVAAIEQSVNEKIRDRLPVNVRELSLDDPEVEQVRVEPEGWFLRNDSSSDSDSPSPLLESR

SEQ ID NO: 21289 - protein, 146 aa, Homo sapiens
VRSLLTGVKEMGKFMKPGKVVLVLAGRYSGRKAVIVKNIDDGTSDRPYSHALVAGIDRYPRKVTAAMGKKKIAKRSKIKSFVKVYNYNHLMPTRYSVDIPLDKTVVNKDVFRDPALKRKARREAKVKFEERYKTGKNKWFFQKLRF

SEQ ID NO: 21290 - protein, 45 aa, Homo sapiens
VVAAEMGKFMKPGKVVLVLAGRYSGRKAVIVKVLCGYPLGQNCRQ

SEQ ID NO: 21291 - protein, 141 aa, Homo sapiens
VVAAEMGKFMKPGKVVLVLAGRYSGRKAVIVKNIDDGTSDRPYSHALVAGIDRYPRKVTAAMGKKKIAKRSKIKSFVKVYNYNHLMPTRYSVDIPLDKTVVNKDVFRDPALKRKARREAKVKFEERYKTGKNKWFFQKLRF

SEQ ID NO: 21292 - protein, 53 aa, Homo sapiens
LNLSIRCHPRLGGRRSGRRRVHSFPRSLAATYPILSCEQGPRAALTKATVNTV

SEQ ID NO: 21293 - protein, 164 aa, Homo sapiens
LGLLAGVSSGHLWLYGFLSGPFSLLSAEMGKFMKPGKVVLVLAGRYSGRKAVIVKNIDDGTSDRPYSHALVAGIDRYPRKVTAAMGKKKIAKRSKIKSFVKVYNYNHLMPTRYSVDIPLDKTVVNKDVFRDPALKRKARREAKVKFEERYKTGKNKWFFQKLRF

SEQ ID NO: 21294 - protein, 1812 aa, Homo sapiens
LQILHAETSQPEERAFTVSFMSLQESTRFSQLVEELLKIICAFQLDTGLEYANSYNFAKKENNSPEHLKDEVSIIQSMGYRNRAKRLLQSEPENPSLETSLSVQLSNLGTVRTLRTKQRIQPQKTSVYIELGSDSSEDTVNKATYCSVGDQELLQITPQGTRDEISLDSAKKAACEFSETDVTNTEHHQPSNNDLNTTEKRAAERHPEKYQGSSVSNLHVEPCGTNTHASSLQHENSSLLLTKDRMNVEKAEFCNKSKQPGLARSQHNRWAGSKETCNDRRTPSTEKKVDLNADPLCERKEWNKQKLPCSENPRDTEDVPWITLNSSIQKVNEWFSRSDELLGSDDSHDGESESNAKVADVLDVLNEVDEYSGSSEKIDLLASDPHEALICKSERVHSKSVESNIEDKIFGKTYRKKASLPNLSHVTENLIIGAFVTEPQIIQERPLTNKLKRKRRPTSGLHPEDFIKKADLAVQKTPEMINQGTNQTEQNGQVMNITNSGHENKTKGDSIQNEKNPNPIESLEKESAFKTKAEPISSSISNMELELNIHNSKAPKKNRLRRKSSTRHIHALELVVSRNLSPPNCTELQIDSCSSSEEIKKKKYNQMPVRHSRNLQLMEGKEPATGAKKSNKPNEQTSKRHDSDTFPELKLTNAPGSFTKCSNTSELKEFVNPSLPREEKEEKLETVKVSNNAEDPKDLMLSGERVLQTERSVESSSISLVPGTDYGTQESISLLEVSTLGKAKTEPNKCVSQCAAFENPKGLIHGCSKDNRNDTEGFKYPLGHEVNHSRETSIEMEESELDAQYLQNTFKVSKRQSFAPFSNPGNAEEECATFSAHSGSLKKQSPKVTFECEQKEENQGKNESNIKPVQTVNITAGFPVVGQKDKPVDNAKCSIKGGSRFCLSSQFRGNETGLITPNKHGLLQNPYRIPPLFPIKSFVKTKCKKNLLEENFEEHSMSPEREMGNENIPSTVSTISRNNIRENVFKEASSSNINEVGSSTNEVGSSINEIGSSDENIQAELGRNRGPKLNAMLRLGVLQPEVYKQSLPGSNCKHPEIKKQEYEEVVQTVNTDFSPYLISDNLEQPMGSSHASQVCSETPDDLLDDGEIKEDTSFAENDIKESSAVFSKSVQKGELSRSPSPFTHTHLAQGYRRGAKKLESSEENLSSEDEELPCFQHLLFGKVNNIPSQSTRHSTVATECLSKNTEENLLSLKNSLNDCSNQVILAKASQEHHLSEETKCSASLFSSQCSELEDLTANTNTQDPFLIGSSKQMRHQSESQGVGLSDKELVSDDEERGTGLEENNQEEQSMDSNLGEAASGCESETSVSEDCSGLSSQSDILTTQQRDTMQHNLIKLQQEMAELEAVLEQHGSQPSNSYPSIISDSSALEDLRNPEQSTSEKAVLTSQKSSEYPISQNPEGLSADKFEVSADSSTSKNKEPGVERSSPSKCPSLDDRWYMHSCSGSLQNRNYPSQEELIKVVDVEEQQLEESGPHDLTETSYLPRQDLEGTPYLESGISLFSDDPESDPSEDRAPESARVGNIPSSTSALKVPQLKVAESAQSPAAAHTTDTAGYNAMEESVSREKPELTASTERVNKRMSMVVSGLTPEEFMLVYKFARKHHITLTNLITEETTHVVMKTDAEFVCERTLKYFLGIAGGKWVVSYFWVTQSIKERKMLNEHDFEVRGDVVNGRNHQGPKRARESQDRKIFRGLEICCYGPFTNMPTDQLEWMVQLCGASVVKELSSFTLGTGVHPIVVVQPDAWTEDNGFHAIGQMCEAPVVTREWVLDSVALYQCQELDTYLIPQIPHSHY

SEQ ID NO: 21295 - protein, 1868 aa, Homo sapiens
LEQKEMDLSALRVEEVQNVINAMQKILECPICLELIKEPVSTKCDHIFCKFCMLKLLNQKKGPSQCPLCKNDITKRSLQESTRFSQLVEELLKIICAFQLDTGLEYANSYNFAKKENNSPEHLKDEVSIIQSMGYRNRAKRLLQSEPENPSLQETSLSVQLSNLGTVRTLRTKQRIQPQKTSVYIELGSDSSEDTVNKATYCSVGDQELLQITPQGTRDEISLDSAKKAACEFSETDVTNTEHHQPSNNDLNTTEKRAAERHPEKYQGSSVSNLHVEPCGTNTHASSLQHENSSLLLTKDRMNVEKAEFCNKSKQPGLARSQHNRWAGSKETCNDRRTPSTEKKVDLNADPLCERKEWNKQKLPCSENPRDTEDVPWITLNSSIQKVNEWFSRSDELLGSDDSHDGESESNAKVADVLDVLNEVDEYSGSSEKIDLLASDPHEALICKSERVHSKSVESNIEDKIFGKTYRKKASLPNLSHVTENLIIGAFVTEPQIIQERPLTNKLKRKRRPTSGLHPEDFIKKADLAVQKTPEMINQGTNQTEQNGQVMNITNSGHENKTKGDSIQNEKNPNPIESLEKESAFKTKAEPISSSISNMELELNIHNSKAPKKNRLRRKSSTRHIHALELVVSRNLSPPNCTELQIDSCSSSEEIKKKKYNQMPVRHSRNLQLMEGKEPATGAKKSNKPNEQTSKRHDSDTFPELKLTNAPGSFTKCSNTSELKEFVNPSLPREEKEEKLETVKVSNNAEDPKDLMLSGERVLQTERSVESSSISLVPGTDYGTQESISLLEVSTLGKAKTEPNKCVSQCAAFENPKGLIHGCSKDNRNDTEGFKYPLGHEVNHSRETSIEMEESELDAQYLQNTFKVSKRQSFAPFSNPGNAEEECATFSAHSGSLKKQSPKVTFECEQKEENQGKNESNIKPVQTVNITAGFPVVGQKDKPVDNAKCSIKGGSRFCLSSQFRGNETGLITPNKHGLLQNPYRIPPLFPIKSFVKTKCKKNLLEENFEEHSMSPEREMGNENIPSTVSTISRNNIRENVFKEASSSNINEVGSSTNEVGSSINEIGSSDENIQAELGRNRGPKLNAMLRLGVLQPEVYKQSLPGSNCKHPEIKKQEYEEVVQTVNTDFSPYLISDNLEQPMGSSHASQVCSETPDDLLDDGEIKEDTSFAENDIKESSAVFSKSVQKGELSRSPSPFTHTHLAQGYRRGAKKLESSEENLSSEDEELPCFQHLLFGKVNNIPSQSTRHSTVATECLSKNTEENLLSLKNSLNDCSNQVILAKASQEHHLSEETKCSASLFSSQCSELEDLTANTNTQDPFLIGSSKQMRHQSESQGVGLSDKELVSDDEERGTGLEENNQEEQSMDSNLGEAASGCESETSVSEDCSGLSSQSDILTTQQRDTMQHNLIKLQQEMAELEAVLEQHGSQPSNSYPSIISDSSALEDLRNPEQSTSEKAVLTSQKSSEYPISQNPEGLSADKFEVSADSSTSKNKEPGVERSSPSKCPSLDDRWYMHSCSGSLQNRNYPSQEELIKVVDVEEQQLEESGPHDLTETSYLPRQDLEGTPYLESGISLFSDDPESDPSEDRAPESARVGNIPSSTSALKVPQLKVAESAQSPAAAHTTDTAGYNAMEESVSREKPELTASTERVNKRMSMVVSGLTPEEFMLVYKFARKHHITLTNLITEETTHVVMKTDAEFVCERTLKYFLGIAGGKWVVSYFWVTQSIKERKMLNEHDFEVRGDVVNGRNHQGPKRARESQDRKIFRGLEICCYGPFTNMPTDQLEWMVQLCGASVVKELSSFTLGTGVHPIVVVQPDAWTEDNGFHAIGQMCEAPVVTREWVLDSVALYQCQELDTYLIPQIPHSHY

SEQ ID NO: 21296 - protein, 726 aa, Homo sapiens
LEQKEMDLSALRVEEVQNVINAMQKILECPICLELIKEPVSTKCDHIFCKFCMLKLLNQKKGPSQCPLCKNDITKRSLQESTRFSQLVEELLKIICAFQLDTGLEYANSYNFAKKENNSPEHLKDEVSIIQSMGYRNRAKRLLQSEPENPSLQETSLSVQLSNLGTVRTLRTKQRIQPQKTSVYIELGSDSSEDTVNKATYCSVGDQELLQITPQGTRDEISLDSAKKGEAASGCESETSVSEDCSGLSSQSDILTTQQRDTMQHNLIKLQQEMAELEAVLEQHGSQPSNSYPSIISDSSALEDLRNPEQSTSEKAVLTSQKSSEYPISQNPEGLSADKFEVSADSSTSKNKEPGVERSSPSKCPSLDDRWYMHSCSGSLQNRNYPSQEELIKVVDVEEQQLEESGPHDLTETSYLPRQDLEGTPYLESGISLFSDDPESDPSEDRAPESARVGNIPSSTSALKVPQLKVAESAQSPAAAHTTDTAGYNAMEESVSREKPELTASTERVNKRMSMVVSGLTPEEFMLVYKFARKHHITLTNLITEETTHVVMKTDAEFVCERTLKYFLGIAGGKWVVSYFWVTQSIKERKMLNEHDFEVRGDVVNGRNHQGPKRARESQDRKIFRGLEICCYGPFTNMPTDQLEWMVQLCGASVVKELSSFTLGTGVHPIVVVQPDAWTEDNGFHAIGQMCEAPVVTREWVLDSVALYQCQELDTYLIPQIPHSHY

SEQ ID NO: 21297 - protein, 1889 aa, Homo sapiens
LEQKEMDLSALRVEEVQNVINAMQKILECPICLELIKEPVSTKCDHIFCKFCMLKLLNQKKGPSQCPLCKNDITKRSLQESTRFSQLVEELLKIICAFQLDTGLEYANSYNFAKKENNSPEHLKDEVSIIQSMGYRNRAKRLLQSEPENPSLQETSLSVQLSNLGTVRTLRTKQRIQPQKTSVYIELGSDSSEDTVNKATYCSVGDQELLQITPQGTRDEISLDSAKKAACEFSETDVTNTEHHQPSNNDLNTTEKRAAERHPEKYQGSSVSNLHVEPCGTNTHASSLQHENSSLLLTKDRMNVEKAEFCNKSKQPGLARSQHNRWAGSKETCNDRRTPSTEKKVDLNADPLCERKEWNKQKLPCSENPRDTEDVPWITLNSSIQKVNEWFSRSDELLGSDDSHDGESESNAKVADVLDVLNEVDEYSGSSEKIDLLASDPHEALICKSERVHSKSVESNIEDKIFGKTYRKKASLPNLSHVTENLIIGAFVTEPQIIQERPLTNKLKRKRRPTSGLHPEDFIKKADLAVQKTPEMINQGTNQTEQNGQVMNITNSGHENKTKGDSIQNEKNPNPIESLEKESAFKTKAEPISSSISNMELELNIHNSKAPKKNRLRRKSSTRHIHALELVVSRNLSPPNCTELQIDSCSSSEEIKKKKYNQMPVRHSRNLQLMEGKEPATGAKKSNKPNEQTSKRHDSDTFPELKLTNAPGSFTKCSNTSELKEFVNPSLPREEKEEKLETVKVSNNAEDPKDLMLSGERVLQTERSVESSSISLVPGTDYGTQESISLLEVSTLGKAKTEPNKCVSQCAAFENPKGLIHGCSKDNRNDTEGFKYPLGHEVNHSRETSIEMEESELDAQYLQNTFKVSKRQSFAPFSNPGNAEEECATFSAHSGSLKKQSPKVTFECEQKEENQGKNESNIKPVQTVNITAGFPVVGQKDKPVDNAKCSIKGGSRFCLSSQFRGNETGLITPNKHGLLQNPYRIPPLFPIKSFVKTKCKKNLLEENFEEHSMSPEREMGNENIPSTVSTISRNNIRENVFKEASSSNINEVGSSTNEVGSSINEIGSSDENIQAELGRNRGPKLNAMLRLGVLQPEVYKQSLPGSNCKHPEIKKQEYEEVVQTVNTDFSPYLISDNLEQPMGSSHASQVCSETPDDLLDDGEIKEDTSFAENDIKESSAVFSKSVQKGELSRSPSPFTHTHLAQGYRRGAKKLESSEENLSSEDEELPCFQHLLFGKVNNIPSQSTRHSTVATECLSKNTEENLLSLKNSLNDCSNQVILAKASQEHHLSEETKCSASLFSSQCSELEDLTANTNTQDPFLIGSSKQMRHQSESQGVGLSDKELVSDDEERGTGLEENNQEEQSMDSNLGEAASGCESETSVSEDCSGLSSQSDILTTQQRDTMQHNLIKLQQEMAELEAVLEQHGSQPSNSYPSIISDSSALEDLRNPEQSTSEKDSHIHGQRNNSMFSKRPREHISVLTSQKSSEYPISQNPEGLSADKFEVSADSSTSKNKEPGVERSSPSKCPSLDDRWYMHSCSGSLQNRNYPSQEELIKVVDVEEQQLEESGPHDLTETSYLPRQDLEGTPYLESGISLFSDDPESDPSEDRAPESARVGNIPSSTSALKVPQLKVAESAQSPAAAHTTDTAGYNAMEESVSREKPELTASTERVNKRMSMVVSGLTPEEFMLVYKFARKHHITLTNLITEETTHVVMKTDAEFVCERTLKYFLGIAGGKWVVSYFWVTQSIKERKMLNEHDFEVRGDVVNGRNHQGPKRARESQDRKIFRGLEICCYGPFTNMPTDQLEWMVQLCGASVVKELSSFTLGTGVHPIVVVQPDAWTEDNGFHAIGQMCEAPVVTREWVLDSVALYQCQELDTYLIPQIPHSHY

SEQ ID NO: 21298 - protein, 779 aa, Homo sapiens
LGPCAQEAFTLCSGSLEQKEMDLSALRVEEVQNVINAMQKILECPICLELIKEPVSTKCDHIFCKFCMLKLLNQKKGPSQCPLCKNDITKRSLQESTRFSQLVEELLKIICAFQLDTGLEYANSYNFAKKENNSPEHLKDEVSIIQSMGYRNRAKRLLQSEPENPSLQETSLSVQLSNLGTVRTLRTKQRIQPQKTSVYIELGSDSSEDTVNKATYCSVGDQELLQITPQGTRDEISLDSAKKAACEFSETDVTNTEHHQPSNNDLNTTEKRAAERHPEKYQGEAASGCESETSVSEDCSGLSSQSDILTTQQRDTMQHNLIKLQQEMAELEAVLEQHGSQPSNSYPSIISDSSALEDLRNPEQSTSEKVLTSQKSSEYPISQNPEGLSADKFEVSADSSTSKNKEPGVERSSPSKCPSLDDRWYMHSCSGSLQNRNYPSQEELIKVVDVEEQQLEESGPHDLTETSYLPRQDLEGTPYLESGISLFSDDPESDPSEDRAPESARVGNIPSSTSALKVPQLKVAESAQSPAAAHTTDTAGYNAMEESVSREKPELTASTERVNKRMSMVVSGLTPEEFMLVYKFARKHHITLTNLITEETTHVVMKTDAEFVCERTLKYFLGIAGGKWVVSYFWVTQSIKERKMLNEHDFEVRGDVVNGRNHQGPKRARESQDRKIFRGLEICCYGPFTNMPTDQLEWMVQLCGASVVKELSSFTLGTGVHPIVVVQPDAWTEDNGFHAIGQMCEAPVVTREWVLDSVALYQCQELDTYLIPQIPHSHY

SEQ ID NO: 21299 - protein, 719 aa, Homo sapiens
LGPCAQEAFTLCSGSLEQKEMDLSALRVEEVQNVINAMQKILECPICLELIKEPVSTKCDHIFCKFCMLKLLNQKKGPSQCPLCKNDITKRSLQESTRFSQLVEELLKIICAFQLDTGLEYANSYNFAKKENNSPEHLKDEVSIIQSMGYRNRAKRLLQSEPENPSLQETSLSVQLSNLGTVRTLRTKQRIQPQKTSVYIELGSDSSEDTVNKATYCSVGDQELLQITPQGTRDEISLDSAKKAACEFSETDVTNTEHHQPSNNDLNTTEKRAAERHPEKYQGEAASGCESETSVSEDCSGLSSQSDILTTQQRDTMQHNLIKLQQEMAELEAVLEQHGSQPSNSYPSIISDSSALEDLRNPEQSTSEKVLTSQKSSEYPISQNPEGLSADKFEVSADSSTSKNKEPGVERSSPSKCPSLDDRWYMHSCSGSLQNRNYPSQEELIKVVDVEEQQLEESGPHDLTETSYLPRQDLEGTPYLESGISLFSDDPESDPSEDRAPESARVGNIPSSTSALKVPQLKVAESAQSPAAAHTTDTAGYNAMEESVSREKPELTASTERVNKRMSMVVSGLTPEEFMLVYKFARKHHITLTNLITEETTHVVMKTDAEFVCERTLKYFLGIAGGKWVVSYFWVTQSIKERKMLNEHDFEVRGDVVNGRNHQGPKRARESQDRKIFRGLEICCYGPFTNMPTGCPPNCGCAARCLDRGQWLPCNWADV

SEQ ID NO: 21300 - protein, 1404 aa, Homo sapiens
LEQKEMDLSALRVEEVQNVINAMQKILECPICLELIKEPVSTKCDHIFCKFCMLKLLNQKKGPSQCPLCKNDITKRSLQESTRFSQLVEELLKIICAFQLDTGLEYANSYNFAKKENNSPEHLKDEVSIIQSMGYRNRAKRLLQSEPENPSLQETSLSVQLSNLGTVRTLRTKQRIQPQKTSVYIELGSDSSEDTVNKATYCSVGDQELLQITPQGTRDEISLDSAKKAACEFSETDVTNTEHHQPSNNDLNTTEKRAAERHPEKYQGSSVSNLHVEPCGTNTHASSLQHENSSLLLTKDRMNVEKAEFCNKSKQPGLARSQHNRWAGSKETCNDRRTPSTEKKVDLNADPLCERKEWNKQKLPCSENPRDTEDVPWITLNSSIQKVNEWFSRSDELLGSDDSHDGESESNAKVADVLDVLNEVDEYSGSSEKIDLLASDPHEALICKSERVHSKSVESNIEDKIFGKTYRKKASLPNLSHVTENLIIGAFVTEPQIIQERPLTNKLKRKRRPTSGLHPEDFIKKADLAVQKTPEMINQGTNQTEQNGQVMNITNSGHENKTKGDSIQNEKNPNPIESLEKESAFKTKAEPISSSISNMELELNIHNSKAPKKNRLRRKSSTRHIHALELVVSRNLSPPNCTELQIDSCSSSEEIKKKKYNQMPVRHSRNLQLMEGKEPATGAKKSNKPNEQTSKRHDSDTFPELKLTNAPGSFTKCSNTSELKEFVNPSLPREEKEEKLETVKVSNNAEDPKDLMLSGERVLQTERSVESSSISLVPGTDYGTQESISLLEVSTLGKAKTEPNKCVSQCAAFENPKGLIHGCSKDNRNDTEGFKYPLGHEVNHSRETSIEMEESELDAQYLQNTFKVSKRQSFAPFSNPGNAEEECATFSAHSGSLKKQSPKVTFECEQKEENQGKNESNIKPVQTVNITAGFPVVGQKDKPVDNAKCSIKGGSRFCLSSQFRGNETGLITPNKHGLLQNPYRIPPLFPIKSFVKTKCKKNLLEENFEEHSMSPEREMGNENIPSTVSTISRNNIRENVFKEASSSNINEVGSSTNEVGSSINEIGSSDENIQAELGRNRGPKLNAMLRLGVLQPEVYKQSLPGSNCKHPEIKKQEYEEVVQTVNTDFSPYLISDNLEQPMGSSHASQVCSETPDDLLDDGEIKEDTSFAENDIKESSAVFSKSVQKGELSRSPSPFTHTHLAQGYRRGAKKLESSEENLSSEDEELPCFQHLLFGKVNNIPSQSTRHSTVATECLSKNTEENLLSLKNSLNDCSNQVILAKASQEHHLSEETKCSASLFSSQCSELEDLTANTNTQDPFLIGSSKQMRHQSESQGVGLSDKELVSDDEERGTGLEENNQEEQSMDSNLGIGTRFLCLPQSIYRSELNVYAFGEHILQISKYS

SEQ ID NO: 21301 - protein, 82 aa, Homo sapiens
LAWESGFPKLTDGSLEQKEMDLSALRVEEVQNVINAMQKILECPICLELIKEPVSTKCDHIFCKFCMLKLLNQKKGPSQCPL

SEQ ID NO: 21302 - protein, 83 aa, Homo sapiens
LGPCAQEAFTLCSGSLEQKEMDLSALRVEEVQNVINAMQKILECPICLELIKEPVSTKCDHIFCKFCMLKLLNQKKGPSQCPL

SEQ ID NO: 21303 - protein, 64 aa, Homo sapiens
LEQKEMDLSALRVEEVQNVINAMQKILECPICLELIKEPVSTKCDHIFCKVLLCCPSWSTVVRS

SEQ ID NO: 21304 - protein, 46 aa, Homo sapiens
LGPCAQEAFTLCSGSLEQKEMDLSALRVEEVQNVINAMQKILECPI

SEQ ID NO: 21305 - protein, 49 aa, Homo sapiens
LPHSMEPQVTLNVTFKNEIQSFLVSDPENTTWADIEAMVSVTLFCFSLV

SEQ ID NO: 21306 - protein, 91 aa, Homo sapiens [sequence omitted]

SEQ ID NO: 21307 - protein, 457 aa, Homo sapiens
VCERSPLPHQVSAPAWGPGRAAGGSGRMERRMKAGYLDQQVPYTFSSKSPGNGSLREALIGPLGKLMDPGSLPPLDSEDLFQDLSHFQETWLAEAQVPDSDEQFVPDFHSENLAFHSPTTRIKKEPQSPRTDPALSCSRKPPLPYHHGEQCLYSSSVFQQPLDICHSFTSQGGGREPLPAPYQHQLSEPCPPYPQQSFKQEYHDPLYEQAGQPAVDQGGVNGHRYPGAGVVIKQEQTDFAYDSDVTGCASMYLHTEGFSGPSPGDGAMGYGYEKPLRPFPDDVCVVPEKFEGDIKQEGVGAFREGPPYQRRGALQLWQFLVALLDDPTNAHFIAWTGRGMEFKLIEPEEVARLWGIQKNRPAMNYDKLSRSLRYYYEKGIMQKVAGERYVYKFVCEPEALFSLAFPDNQRPALKAEFDRPVSEEDTVPLSHLDESPAYLPELAGPAQPFGPKGGYSY

SEQ ID NO: 21308 - protein, 504 aa, Homo sapiens
VRWGPGAGAALLRPSPAALGAGSRACSGPPAAPAQTPRPQKSPGNGSLREALIGPLGKLMDPGSLPPLDSEDLFQDLSHFQETWLAEAQVPDSDEQFVPDFHSENLAFHSPTTRIKKEPQSPRTDPALSCSRKPPLPYHHGEQCLYSSAYDPPRQIAIKSPAPGALGQSPLQPFPRAEQRNFLRSSGTSQPHPGHGYLGEHSSVFQQPLDICHSFTSQGGGREPLPAPYQHQLSEPCPPYPQQSFKQEYHDPLYEQAGQPAVDQGGVNGHRYPGAGVVIKQEQTDFAYDSDVTGCASMYLHTEGFSGPSPGDGAMGYGYEKPLRPFPDDVCVVPEKFEGDIKQEGVGAFREGPPYQRRGALQLWQFLVALLDDPTNAHFIAWTGRGMEFKLIEPEEVARLWGIQKNRPAMNYDKLSRSLRYYYEKGIMQKVAGERYVYKFVCEPEALFSLAFPDNQRPALKAEFDRPVSEEDTVPLSHLDESPAYLPELAGPAQPFGPKGGYSY

SEQ ID NO: 21309 - protein, 87 aa, Homo sapiens [sequence omitted]

SEQ ID NO: 21310 - protein, 68 aa, Homo sapiens
VTRGHSPRFSQKSPGNGSLREALIGPLGKLMDPGSLPPLDSEDLFQDLSHFQETWLAEAQIQLPWNSP

SEQ ID NO: 21311 - protein, 25 aa, Homo sapiens
LQKAETASPAPGSRNRPEMGACAKR

SEQ ID NO: 21312 - protein, 32 aa, Homo sapiens
VRAPGHARDPPRLQPRRPGLRNRPEMGACAKR

SEQ ID NO: 21313 - protein, 275 aa, Homo sapiens
LNIKSIKNQIFERTEACSGQQMDPAASSCMRSLQPPAPVWGCLRNPHSEGNGASGLPHYPPTPFSFHQKPDFLATATAAYPDFSASCLAATPHSLPQEEHIFTEQHPAFPQSPNWHFPVSDARRRPNSGPAGGSKEMGTSSLGLVDTTGGPGDDYGVLGSTANETEKKSSRRRKESSDNQENRGKPEGSSKARKERTAFTKEQLRELEAEFAHHNYLTRLRRYEIAVNLDLSERQVKVWFQNRRMKWKRVKGGQPISPNGQDPEDGDSTASPSSE

SEQ ID NO: 21314 - protein, 219 aa, Homo sapiens
LLWAPGRTPRQLKPDFLATATAAYPDFSASCLAATPHSLPQEEHIFTEQHPAFPQSPNWHFPVSDARRRPNSGPAGGSKEMGTSSLGLVDTTGGPGDDYGVLGSTANETEKKSSRRRKESSDNQENRGKPEGSSKARKERTAFTKEQLRELEAEFAHHNYLTRLRRYEIAVNLDLSERQVKVWFQNRRMKWKRVKGGQPISPNGQDPEDGDSTASPSSE

SEQ ID NO: 21315 - protein, 156 aa, Homo sapiens
VRDYKDRVNVLFMSVAQDIPKLQKLGITHVLNAAEGRSFMHVNTNANFYKDSGITYLGIKANDTQEFNLSAYFERAADFIDQALAQKNGRVLVHCREGYSRSPTLVIAYLMMRQKMDVKSALSIVRQNREIGPNDGFLAQLCQLNDRLAKEGKLKP

SEQ ID NO: 21316 - protein, 205 aa, Homo sapiens
LIRRSPPRLLLPGVQGPAAAMSGSFELSVQDLNDLLSDGSGCYSLPSQPCNEVTPRIYVGNASVAQDIPKLQKLGITHVLNAAEGRSFMHVNTNANFYKDSGITYLGIKANDTQEFNLSAYFERAADFIDQALAQKNGRVLVHCREGYSRSPTLVIAYLMMRQKMDVKSALSIVRQNREIGPNDGFLAQLCQLNDRLAKEGKLKP

SEQ ID NO: 21317 - protein, 43 aa, Homo sapiens
LLPRQPTGLGLLSLPPARGTKCLRREAPRWDAPLRDPALRQLL

SEQ ID NO: 21318 - protein, 547 aa, Homo sapiens
VAAPYGGPSGRGQVLVFLGQSEGLRSRPSQVLDSPFPTGSAFGFSLRGAVDIDDNGYPDLIVGAYGANQVAVYRAQPVVKASVQLLVQDSLNPAVKSCVLPQTKTPVSCFNIQMCVGATGHNIPQKLSLNAELQLDRQKPRQGRRVLLLGSQQAGTTLNLDLGGKHSPICHTTMAFLRDEADFRDKLSPIVLSLNVSLPPTEAGMAPAVVLHGDTHVQEQTRIVLDCGEDDVCVPQLQLTASVTGSPLLVGADNVLELQMDAANEGEGAYEAELAVHLPQGAHYMRALSNVEGFERLICNQKKENETRVVLCELGNPMKKNAQIGIAMLVSVGNLEEAGESVSFQLQIRSKNSQNPNSKIVLLDVPVRAEAQVELRGNSFPASLVVAAEEGEREQNSLDSWGPKVEHTYELHNNGPGTVNGLHLSIHLPGQSQPSDLLYILDIQPQGGLQCFPQPPVNPLKVDWGLPIPSPSPIHPAHHKRDRRQIFLPEPEQPSRLQDPVLVVSRLSGLWPGLPGTHGAEGMGGGRGVRVCCGPLWATLGPWEHFK

SEQ ID NO: 21319 - protein, 853 aa, Homo sapiens
VMAVEDSTLQVVVRVRPPTPRELDSQRRPVVQVVDERVLVFNPEEPDGGFPGLKWGGTHDGPKKKGKDLTFVFDRVFGEAATQQDVFQHTTHSVLDSFLQGYNCSVFAYGATGAGKTHTMLGREGDPGIMYLTTVELYRRLEARQQEKHFEVLISYQEVYNEQIHDLLEPKGPLAIREDPDKGVVVQGLSFHQPASAEQLLEILTRGNRNRTQHPTDANATSSRSHAIFQIFVKQQDRVPGLTQAVQVAKMSLIDLAGSERASSTHAKGERLREGANINRSLLALINVLNALADAKGRKTHVPYRDSKLTRLLKDSLGGNCRTVMIAAISPSSLTYEDTYNTLKYADRAKEIRLSLKSNVTSLDCHISQYATICQQLQAEVAALRKKLQVYEGGGQPPPQDLPGSPKSGPPPEHQPCTPELPAGPRALQEESLGMEAQVERAMEGNSSDQEQSPEDEDEGPAEEVPTQMPEQNPTHALPESPRLTLQPKPVVGHFSARELDGDRSKQLALKVLCVAQRQYSLLQAANLLTPDMITEFETLQQLVQEEKIEPGAEALRTSGLARGAPLAQELCSESIPVPSPLCPEPPGYTGPVTRTMARRLSGPLHTLGIPPGPNCTPAQGSRWPMEKKRRRPSALEADSPMAPKRGTKRQRQSFLPCLRRGSLPDTQPSQGPSTPKGERASSPCHSPRVCPATVIKSRVPLGPSAMQNCSTPLALPTRDLNATFDLSEEPPSKPSFHECIGWDKIPQELSRLDQPFIPRAPVPLFTMKGPKPTSSLPGTSACKKKRVASSSVSHGRSRIARLPSSTLKRPAGPLVLPELPLSPLCPSNRRNGKDLIRVGRALSAGNGVTKVS

SEQ ID NO: 21320 - protein, 59 aa, Homo sapiens
LKSNVTSLDCHISQYATICQQLQAEVAALRKKLQVYEGGGQPPPQDLPGSPKSGPPPEQ

SEQ ID NO: 21321 - protein, 487 aa, Homo sapiens
LIPSSLPPRLMKLIRSSSCHVGSARKLHHWRAGQTEPGWAGTRHDSPVPLPPRGGLAADNVLLSSDGSHAALCDFGHAVCLQPDGLGKSLLTGDYIPGTETHMAPEVVLGRSCDAKVDVWSSCCMMLHMLNGCHPWTQFFRGPLCLKIASEPPPVREIPPSCAPLTAQAIQEGLRKEPIHRVSAAELGGKVNRALQQVGGLKSPWRGEYKEPRHPPPNQANYHQTLHAQPRELSPRAPGPRPAEETTGRAPKLQPPLPPEPPEPNKSPPLTLSKEESGMWEPLPLSSLEPAPARNPSSPERKATVPEQELQQLEIELFLNSLSQPFSLEEQEQILSCLSIDSLSLSDDSEKNPSKASQSSRDTLSSGVHSWSSQAEARSSSWNMVLARGRPTDTPSYFNGVKVQIQSLNGEHLHIREFHRVKVGDIATGISSQIPAAAFSLVTKDGQPVRYDMEVPDSGIDLQCTLAPDGSFAWSWRVKHGQLENRP

SEQ ID NO: 21322 - protein, 130 aa, Homo sapiens
VLLSSDGSHAALCDFGHAVCLQPDGLGKSLLTGDYIPGTETHMAPEVVLGRSCDAKVDVWSSCCMMLHMLNGCHPWTQFFRGPLCLKVGDGTQHGQQGELQGPGAQAAGWRGCSAVADGARGGLVIHVGS

SEQ ID NO: 21323 - protein, 101 aa, Homo sapiens [sequence omitted]

SEQ ID NO: 21324 - protein, 19 aa, Homo sapiens
LIRKLKDSFITIFPTEQMT

SEQ ID NO: 21325 - protein, 137 aa, Homo sapiens
VETRGPGSRAARGPRVGMHRRGVGAGAIAKKKLAEAKYKERGTVLAEDQLAQMSKQLDMFKTNLEEFASKHKQEIRKNPEFRVQFQDMCATIGVDPLASGKGFWSEMLGVGDFYYELGVQIIEVCLALKHRNGGEGG

SEQ ID NO: 21326 - protein, 152 aa, Homo sapiens
VIESMASVVLALRTRTAVTSLLSPTPATALAVRYASKKSGGSSKNLGGKSSGRRQGIKKMEGHYVHAGNIIATQRHFRWHPGAHVGVGKNKCLYALEEGIVRYTKEVYVPHPRNTEAVDLITRLPKGAVLYKTFVHVVPAKPEGTFKLVAML

SEQ ID NO: 21327 - protein, 88 aa, Homo sapiens
VIESMASVVLALRTRTAVTSLLSPTPATALAVRYASKKSGGSSKNLGGKSSGRRQGIKKMEGHYVHAGNIIATQRHFRWHPGAHWRWK

SEQ ID NO: 21328 - protein, 98 aa, Homo sapiens
VIESMASVVLALRTRTAVTSLLSPTPATALAVRYASKKSGGSSKNLGGKSSGRRQGIKKMEGHYVHAGNIIATQRHFRWHPGAHVSCSVAAPLFPFLG

SEQ ID NO: 21329 - protein, 93 aa, Homo sapiens
MASVVLALRTRTAVTSLLSPTPATALAVRYASKKSGGSSKNLGGKSSGRRQGIKKMEGEDVPWLPLPSCTLSSCSLGEQKNPACAWPCSSLPS

SEQ ID NO: 21330 - protein, 584 aa, Homo sapiens
LMALKKSSPSLDSGDSDSEELPTFAFLKKEPSSTKRRQPEREEKIVVVDISDCEASCPPAPELFSPPVPEIAETVTQTQPVRLLSSESEDEEEFIPLAQRLTCKFLTHKQLSPEDSSSPVKSVLDHQNNEGASCDWKKPFPKIPEVPLHDTPERSAADNKDLILDPCCQLPAYLSTCPGQSSSLAVTKTNSDILPPQKKTKPSQKVQGRGSHGCRQQRQARQKESTLRRQERKNAALVTRMKAQRPEECLKHIIVVLDPVLLQMEGGGQLLGALQTMECRCVIEAQAVPCSVTWRRRAGPSEDREDWVEEPTVLVLLRAEAFVSMIDNGKQGSLDSTMKGKETLQGFVTDITAKTAGKALSLVIVDQEKCFSLELLFFDFLPCTSAQNPPRRGKQGANKQTKKQQQRQPEASIGSMVSRVDAEEALVDLQLHTEAQAQIVQSWKELADFTCAFTKAVAEAPFKKLRDETTFSFCLESDWAGGVKVDLAGRGLALVWRRQIQQLNRVSLEMASAVVNAYPSPQLLVQAYQQCFSDKERQNLLADIQVRRGEGVTSTSRRIGPELSRRIYLQMTTLQPHLSLDSAD

SEQ ID NO: 21331 - protein, 571 aa, Homo sapiens
LMALKKSSPSLDSGDSDSEELPTFAFLKKEPSSTKRRQPEREEKIVVVDISDCEASCPPAPELFSPPVPEIAETVTQTQPVRLLSSESEDEEEFIPLAQRLTCKFLTHKQLSPEDSSSPVKSVLDHQNNEGASCDWKKPFPKIPEVPLHDTPERSAADNKDLILDPCCQLPAYLSTCPGQSSSLAVTKTNSDILPPQKKTKPSQKVQGRGSHGCRQQRQARQKESTLRRQERKNAALVTRMKAQRPEECLKHIIVVLDPVLLQMEGGGQLLGALQTMECRCVIEAQAVPCSVTWRRRAGPSEDREDWVEEPTVLVLLRAEAFVSMIDNGKQGSLDSTMKGKETLQGFVTDITAKTAGKALSLVIVDQEKCFSAQNPPRRGKQGANKQTKKQQQRQPEASIGSMVSRVDAEEALVDLQLHTEAQAQIVQSWKELADFTCAFTKAVAEAPFKKLRDETTFSFCLESDWAGGVKVDLAGRGLALVWRRQIQQLNRVSLEMASAVVNAYPSPQLLVQAYQQCFSDKERQNLLADIQVRRGEGVTSTSRRIGPELSRRIYLQMTTLQPHLSLDSAD

SEQ ID NO: 21332 - protein, 86 aa, Homo sapiens
LTSDISAPFTRRNPGAGARSAGVTMTKAGSKGGNLRDKLDGNELDLSLSDLNEVPVKELVSIVPRGPGAHLRRALAPTWATYFPLL

SEQ ID NO: 21333 - protein, 638 aa, Homo sapiens
LRARPAPAHFKSLLGPGRRAKRAMAVYVGMLRLGRLCAGSSGVLGARAALSRSWQEARLQGVRFLSSREVDRMVSTPIGGLSYVQGCTKKHLNSKTVGQCLETTAQRVPEREALVVLHEDVRLTFAQLKEEVDKAASGLLSIGLCKGDRLGMWGPNSYAWVLMQLATAQAGIILVSVNPAYQAMELEYVLKKVGCKALVFPKQFKTQQYYNVLKQICPEVENAQPGALKSQRLPDLTTVISVDAPLPGTLLLDEVVAAGSTRQHLDQLQYNQQFLSCHDPINIQFTSGTTGSPKGATLSHYNIVNNSNILGERLKLHEKTPEQLRMILPNPLYHCLGSVAGTMMCLMYGATLILASPIFNGKKALEAISRERGTFLYGTPTMFVDILNQPDFSSYDISTMCGGVIAGSPAPPELIRAIINKINMKDLVVAYGTTENSPVTFAHFPEDTVEQKAESVGRIMPHTEARIMNMEAGTLAKLNTPGELCIRGYCVMLGYWGEPQKTEEAVDQDKWYWTGDVATMNEQGFCKIVGRSKDMIIRGGENIYPAELEDFFHTHPKVQEVQVVGVKDDRMGEEICACIRLKDGEETTVEEIKAFCKGKISHFKIPKYIVFVTNYPLTISGKIQKFKLREQMERHLNL

SEQ ID NO: 21334 - protein, 477 aa, Homo sapiens
LAGSQVAGCPLPQVSVNPAYQAMELEYVLKKVGCKALVFPKQFKTQQYYNVLKQICPEVENAQPGALKSQRLPDLTTVISVDAPLPGTLLLDEVVAAGSTRQHLDQLQYNQQFLSCHDPINIQFTSGTTGSPKGATLSHYNIVNNSNILGERLKLHEKTPEQLRMILPNPLYHCLGSVAGTMMCLMYGATLILASPIFNGKKALEAISRERGTFLYGTPTMFVDILNQPDFSSYDISTMCGGVIAGSPAPPELIRAIINKINMKDLVVAYGTTENSPVTFAHFPEDTVEQKAESVGRIMPHTEARIMNMEAGTLAKLNTPGELCIRGYCVMLGYWGEPQKTEEAVDQDKWYWTGDVATMNEQGFCKIVGRSKDMIIRGGENIYPAELEDFFHTHPKVQEVQVVGVKDDRMGEEICACIRLKDGEETTVEEIKAFCKGKISHFKIPKYIVFVTNYPLTISGKIQKFKLREQMERHLNL

SEQ ID NO: 21335 - protein, 31 aa, Homo sapiens
LRRSVPCVQVLRTTWVPGAFRVLAAAAGVQT

SEQ ID NO: 21336 - protein, 69 aa, Homo sapiens
LQPEFKPKQLEGTMANCERTFIAIKPDGVQRGLVGEIIKRFEQKGFRLVGLKFMQVSGLHCSHFDSFIV

SEQ ID NO: 21337 - protein, 95 aa, Homo sapiens
LQPEFKPKQLEGTMANCERTFIAIKPDGVQRGLVGEIIKRFEQKGFRLVGLKFMQASEDLLKEHYVDLKDRPFFAGLVKYMHSGPVVAMLPDFLL

SEQ ID NO: 21338 - protein, 165 aa, Homo sapiens
LQPEFKPKQLEGTMANCERTFIAIKPDGVQRGLVGEIIKRFEQKGFRLVGLKFMQASEDLLKEHYVDLKDRPFFAGLVKYMHSGPVVAMVWEGLNVVKTGRVMLGETNPADSKPGTIRGDFCIQVGRNIIHGSDSVESAEKEIGLWFHPEELVDYTSCAQNWIYE

SEQ ID NO: 21339 - protein, 210 aa, Homo sapiens
LQPEFKPKQLEGTMANCERTFIAIKPDGVQRGLVGEIIKRFEQKGFRLVGLKFMQASEDLLKEHYVDLKDRPFFAGLVKYMHSGPVVAMVWEGLNVVKTGRVMLGETNPADSKPGTIRGDFCIQVGRTMANLERTFIAIKPDGVQRGLVGEIIKRFEQKGFRLVAMKFLRASEEHLKQHYIDLKDRPFFPGLVKYMNSGPVVAMEHHSWQ

SEQ ID NO: 21340 - protein, 280 aa, Homo sapiens
LQPEFKPKQLEGTMANCERTFIAIKPDGVQRGLVGEIIKRFEQKGFRLVGLKFMQASEDLLKEHYVDLKDRPFFAGLVKYMHSGPVVAMVWEGLNVVKTGRVMLGETNPADSKPGTIRGDFCIQVGRTMANLERTFIAIKPDGVQRGLVGEIIKRFEQKGFRLVAMKFLRASEEHLKQHYIDLKDRPFFPGLVKYMNSGPVVAMVWEGLNVVKTGRVMLGETNPADSKPGTIRGDFCIQVGRNIIHGSDSVKSAEKEISLWFKPEELVDYKSCAHDWVYE

SEQ ID NO: 21341 - protein, 81 aa, Homo sapiens
MVLLSTLGIVFQGEGPPISSCDTGTMANCERTFIAIKPDGVQRGLVGEIIKRFEQKGFRLVGLKFMQVSGLHCSHFDSFIV

SEQ ID NO: 21342 - protein, 134 aa, Homo sapiens
MVLLSTLGIVFQGEGPPISSCDTGTMANCERTFIAIKPDGVQRGLVGEIIKRFEQKGFRLVGLKFMQASEDLLKEHYVDLKDRPFFAGLVKYMHSGPVVAMVSVPVWDTPSMHCLSSVLGSLLDTGDTAMNETK

SEQ ID NO: 21343 - protein, 42 aa, Homo sapiens
LSLEVWEGLNVVKTGRVMLGETNPADSKPGTIRGDFCIQVGR

SEQ ID NO: 21344 - protein, 80 aa, Homo sapiens
LSLEVWEGLNVVKTGRVMLGETNPADSKPGTIRGDFCIQVGRNIIHGSDSVESAEKEIGLWFHPEELVDYTSCAQNWIYE

SEQ ID NO: 21345 - protein, 165 aa, Homo sapiens
VNWKTRPHFSARTMANLERTFIAIKPDGVQRGLVGEIIKRFEQKGFRLVAMKFLRASEEHLKQHYIDLKDRPFFPGLVKYMNSGPVVAMVWEGLNVVKTGRVMLGETNPADSKPGTIRGDFCIQVGRNIIHGSDSVKSAEKEISLWFKPEELVDYKSCAHDWVYE

SEQ ID NO: 21346 - protein, 158 aa, Homo sapiens
LRCRRTMANLERTFIAIKPDGVQRGLVGEIIKRFEQKGFRLVAMKFLRASEEHLKQHYIDLKDRPFFPGLVKYMNSGPVVAMVWEGLNVVKTGRVMLGETNPADSKPGTIRGDFCIQVGRNIIHGSDSVKSAEKEISLWFKPEELVDYKSCAHDWVYE

SEQ ID NO: 21347 - protein, 111 aa, Homo sapiens [sequence omitted]

SEQ ID NO: 21348 - protein, 118 aa, Homo sapiens
LVPPLQCQASEEHLKQHYIDLKDRPFFPGLVKYMNSGPVVAMVWEGLNVVKTGRVMLGETNPADSKPGTIRGDFCIQVGRNIIHGSDSVKSAEKEISLWFKPEELVDYKSCAHDWVYE

SEQ ID NO: 21349 - protein, 458 aa, Homo sapiens
LQRVPRWKRERRTEHSSRSERKRRDSFGMFDGYDSCSEDTSSSSSSEESEEEVAPLPSNLPIIKNNGQVYTYPDGKSGMATCEMCGMVGVRDAFYSKTKRFCSVSCSRSYSSNSKKASILARLQGKPPTKKAKVLQKQPLVAKLAAYAQYQATLQNQAKTKAAVSMEGFSWGNYINSNSFIAAPVTCFKHAPMGTCWGDISENVRVEVPNTDCSLPTKVFWIAGIVKLAGYNALLRYEGFENDSGLDFWCNICGSDIHPVGWCAASGKPLVPPRTIQHKYTNWKAFLVKRLTGAKTLPPDFSQKVSESMQYPFKPCMRVEVVDKRHLCRTRVAVVESVIGGRLRLVYEESEDRTDDFWCHMHSPLIHHIGWSRSIGHRFKRSDITKKQDGHFDTPPHLFAKVKEVDQSGEWFKEGMKLEAIDPLNLSTICVATIRKVTQNFLLNGLTTSGKLAPLQHQ

SEQ ID NO: 21350 - protein, 186 aa, Homo sapiens
VTEHSSRSERKRRDSFGMFDGYDSCSEDTSSSSSSEESEEEVAPLPSNLPIIKNNGQVYTYPDGKSGMATCEMCGMVGVRDAFYSKTKRFCSVSCSRSYSSNSKKASILARLQGKPPTKKAKVLQKQPLVAKLAAYAQYQATLQNQAKTKAAVSMEGFSWGNYINSNSFIAAPVTCFKHGRRVAPR

SEQ ID NO: 21351 - protein, 178 aa, Homo sapiens
VGTGFSYVNGSGAYAKDLAMVASDMMVLLKTFFSCHKEFQTVPFYIFSESYGGKMAAGIGLELYKAIQRGTIKCNFAGVALGDSWISPVDSVLSWGPYLYSMSLLEDKGLAEVSKVAEQVLNAVNKGLYREATELWGKAEMIIEQNTDGVNFYNILTKSTPTSTMESSLEFTQSHLGE

SEQ ID NO: 21352 - protein, 169 aa, Homo sapiens
VNGSGAYAKDLAMVASDMMVLLKTFFSCHKEFQTVPFYIFSESYGGKMAAGIGLELYKAIQRGTIKCNFAGVALGDSWISPVDSVLSWGPYLYSMSLLEDKGLAEVSKVAEQVLNAVNKGLYREATELWGKAEMIIEQVKRGNTQRRACLAFSGGYRAHGWCCQTWSLH

SEQ ID NO: 21353 - protein, 86 aa, Homo sapiens
LNAVNKGLYREATELWGKAEMIIEQNTDGVNFYNILTKSTPTSTMESSLEFTQSHLAESETLPLAVQHPQQLGKDVLMARRGGSHL

SEQ ID NO: 21354 - protein, 108 aa, Homo sapiens
LLLSAWNPHLAHPSGKSDFVTLPFQGAEVLLDSVMPLSDDDQFSPEADAAMSEMTGNTALLAQVTSYSPTGLPLIQLWSVVGDEVVLINRSLVERGLAQWVDSYYTSL

SEQ ID NO: 21355 - protein, 23 aa, Homo sapiens
MAGSRLETVGSIFSRCVLPAVVG

SEQ ID NO: 21356 - protein, 9 aa, Homo sapiens
MIDISEEMD

SEQ ID NO: 21357 - protein, 39 aa, Homo sapiens
MPGRNLSNFSRFEGRIFFSCSLEGSLVWLMKSQSSEIPS

SEQ ID NO: 21358 - protein, 66 aa, Homo sapiens [sequence omitted]

SEQ ID NO: 21359 - protein, 106 aa, Homo sapiens
VRSLAAPGLAGEPAMRGKTFRFEMQRDLVSFPLSPAVRVKLVSAGFQTAEELLEVKPSELSKEHCRWEPLHPETYKYEAGGGHLLCTSLYDMSGPVLFTEEDGTEF

SEQ ID NO: 21360 - protein, 18 aa, Homo sapiens
MAWERPQPGLHRLPRLLD

SEQ ID NO: 21361 - protein, 96 aa, Homo sapiens
MPKFKQRRRKLKAKAERLFKKKEASHFQSKLITPPPPPPSPERVGISSIDISQSRSWLTSSWNFNFPNIRDAIKLWTNRVWSIYSWCQNCITQVWM

SEQ ID NO: 21362 - protein, 163 aa, Homo sapiens
VEPATPTRCQTTAFTCVFRCFPCDPSCGSASWAAPEFTPHSAAPMVKMTRSKTFQAYLPSCHRTYSCIHCRAHLANHDELISKSFQGSQGRAYLFNSVVNVGCGPAEERVLLTGLHAVADIYCENCKTTLGWKYEHAFESSQKYKEGKYIIELAHMIKDNGWD

SEQ ID NO: 21363 - protein, 163 aa, Homo sapiens
LPTTLLPASFSLPPHLTPGPPGRPPSPAPLSRCLFSSKESACPPQGPKLPHCHRRLCGPHVSPSTSTLNLFLSHGDREEGARQCHLLGIINAPAAHGGGDGEVEPPCLCRARQGLPQWGLGPSRTTSVEKQKQKHSPGCSLRHWQGLVRPHSPPPLPFVPILL

SEQ ID NO: 21364 - protein, 24 aa, Homo sapiens
LLRRRGPGQGSAPGLLPSSFSRSR

SEQ ID NO: 21365 - protein, 8 aa, Homo sapiens
LEPAGGSR

SEQ ID NO: 21366 - protein, 27 aa, Homo sapiens
LRKAWSRQGEGGKEVELGLRGGQVGRG

SEQ ID NO: 21367 - protein, 61 aa, Homo sapiens
LTPLFGFCSLGSYAALHGEFYCKPHFQQLFKSKGNYDEGFGRKQHKELWAHKEVDPGTKTA

SEQ ID NO: 21368 - protein, 110 aa, Homo sapiens
LGQHLAELPAQSFSLRAQVKETCAACQKTVYPMERLVADKLIFHNSCFCCKHCHTKLSLGSYAALHGEFYCKPHFQQLFKSKGNYDEGFGRKQHKELWAHKEVDPGTKTA

SEQ ID NO: 21369 - protein, 144 aa, Homo sapiens
LRRAPGPWADGCSPDPGPPGAAPALTAPLPQDAKGGGSSTVQRSKSFSLRAQVKETCAACQKTVYPMERLVADKLIFHNSCFCCKHCHTKLSLGSYAALHGEFYCKPHFQQLFKSKGNYDEGFGRKQHKELWAHKEVDPGTKTA

SEQ ID NO: 21370 - protein, 75 aa, Homo sapiens
LGQHLAELPAQSFSLRAQVKETCAACQKTVYPMERLVADKLIFHNSCFCCKHCHTKLRCAPALPAPASPANPAPT

SEQ ID NO: 21371 - protein, 82 aa, Homo sapiens
LRRAPGPWADGCSPDPGPPGAAPALTAPLPQDAKGGGSSTVQRSKVGAWGRVCGRRGVRERDEHWGSTWLSFPHSPSACGPR

SEQ ID NO: 21372 - protein, 65 aa, Homo sapiens
MFQAAGAAQATPSHDAKGGGSSTVQRSKVGAWGRVCGRRGVRERDEHWGSTWLSFPHSPSACGPR

SEQ ID NO: 21373 - protein, 22 aa, Homo sapiens
MFQAAGAAQATPSHGLPELPLP

SEQ ID NO: 21374 - protein, 94 aa, Homo sapiens
LAGLAASGSGVRSSRGQVGGRGAGRAGTSGAVQGLRSLGLDARARRRAARAGVRSGQRLLIAAPPAPTSPHPKRSQPAGRTRRLRGSPRPLRSR

SEQ ID NO: 21375 - protein, 77 aa, Homo sapiens
VWGEGRPWGPGESASRSRPGRTGSSPRFRAGPRLGGAETRWRGSRRRGLGSGPRGARSGAEGRGGRGPRALSRGCAA

SEQ ID NO: 21376 - protein, 39 aa, Homo sapiens
VAVSRRLCLRPAVRLQGGSSSAAQALSPQLSGPRLPREK

SEQ ID NO: 21377 - protein, 153 aa, Homo sapiens
LSSRRPRPVLCPYRPRSQGRVLAMPARRLLLLLTLLLPGLGIFGSTSTVTLPETLLFVSTLDGSLHAVSKRTGSIKWTLKEDPVLQVPTHVEEPAFLPDPNDGSLYTLGSKNNEGLTKLPFTIPELVQASPCRSSDGILYMGKSSCLQKLVSL

SEQ ID NO: 21378 - protein, 119 aa, Homo sapiens
LSSRRPRPVLCPYRPRSQGRVLAMPARRLLLLLTLLLPGLGIFGSTSTVTLPETLLFVSTLDGSLHAVSKRTGSIKWTLKEGNLDLVLGRHGHLLNWFHRNIFWRKRKHYSLSNKINKK

SEQ ID NO: 21379 - protein, 93 aa, Homo sapiens
LSSRRPRPVLCPYRPRSQGRVLAMPARRLLLLLTLLLPGLGVSDRGAWGGGQLATAGSGPGQRRGAGAGVRAGSATAAARCPVSPAVGGSGRA

SEQ ID NO: 21380 - protein, 484 aa, Homo sapiens
MTIRHQGQQYRPRMAFLQKIEALVKDMQNPETGVRMQNQRVLVTSVPHAMTGSDVLQWIVQRLWISSLEAQNLGNFIVRYGYIYPLQDPKNLILKPDGSLYRFQTPYFWPTQQWPAEDTDYAIYLAKRNIKKKGILEEYEKENYNFLNQKMNYKWDFVIMQAKEQYRAGKERNKADRYALDCQEKAYWLVHRCPPGMDNVLDYGLDRVTNPNEVKKQTVVAVKKEIMYYQQALMRSTVKSSVSLGGIVKYSEQFSSNDAIMSGCLPSNPWITDDTQFWDLNAKLVEIPTKMRVERWAFNFSELIRDPKGRQSFQYFLKKEFSGENLGFWEACEDLKYGDQSKVKEKAEEIYKLFLAPGARRWINIDGKTMDITVKGLKHPHRYVLDAAQTHIYMLMKKDSYARYLKSPIYKDMLAKAIEPQETTKKSSTLPFMRRHLRSSPSPVILRQLEEEAKAREAANTVDITQVMSKLDRRSQLQKELPPK

SEQ ID NO: 21381 - protein, 255 aa, Homo sapiens
LNLRKPPRKGNSTLPFMRRHLRSSPSPVILRQLEEEAKAREAANTVDITQPGQHMAPSPHLTVYTGTCMPPSPSSPFSSSCRSPRKPFASPSRFIRRPSTTICPSPIRVALESSSGLEQKGECSGSMAPRGPSVTESSEASLDTSWPRSRPRAPPKARMALSFSRFLRRGCLASPVFARLSPKCPAVSHGRVQPLGDVGQQLPRLKSKRVANFFQIKMDVPTGSGTCLMDSEDAGTGESGDRATEKEVICPWESL

SEQ ID NO: 21382 - protein, 56 aa, Homo sapiens
VTSGGRSRGTARDAQAGTMADGGSERADGRIVKMEVDYSATVDQRLPECAKLAKVV

SEQ ID NO: 21383 - protein, 85 aa, Homo sapiens
VDPLNAVALQPLIPPASPPVEAQARFAAFSLCLITMSTNENANTPAARLHRFKNKGKDSTVKRHVIFSQGNEASQNRGQCGAEES

SEQ ID NO: 21384 - protein, 31 aa, Homo sapiens
VFRDLVIKYGAVDPLLALLAVPDMSSLAVSY

SEQ ID NO: 21385 - protein, 8 aa, Homo sapiens
LKTQAAKK

SEQ ID NO: 21386 - protein, 111 aa, Homo sapiens
VGPQQFGMSLFPPPASADRGPPARPRRPPHPRPSLLLRFPFSPVLGSDIRGRRGRQPKQPAASAAERCAPAPAPAPAPAPPPPPPKSGPIGGLSSRHREQQGQVGRRRRLG

SEQ ID NO: 21387 - protein, 434 aa, Homo sapiens
VAVAGSELRLPGPSPRWRPRPRTLPRAGLSRRSAASLSTRTAHEIPDVYIVERLFSSSLVVVVSHTKPRQMNVYHFKKGTEICNYSYSSNILSIRLNRQRLLVCLEESIYIHNIKDMKLLKTLLDIPANPTGLCALSINHSNSYLAYPGSLTSGEIVLYDGNSLKTVCTIAAHEGTLAAITFNASGSKLASASEKGTVIRVFSVPDGQKLYEFRRGMKRYVTISSLVFSMDSQFLCASSNTETVHIFKLEQVTNSRPEEPSTWSGYMGKMFMAATNYLPTQVSDMMHQDRAFATARLNFSGQRNICTLSTIQKLPRLLVASSSGHLYMYNLDPQDGGECVLIKTHSLLGSGTTEENKENDLRPSLPQSYAATVARPSASSASTVPGYSEDGGALRGEVIPEHEFATGPVCLDDENEFPPIILCRGNQKGKTKQS

SEQ ID NO: 21388 - protein, 357 aa, Homo sapiens
VAVAGSELRLPGPSPRWRPRPRTLPRAGLSRRSAASLSTRTAHEIPDVYIVERLFSSSLVVVVSHTKPRQMNVYHFKKGTEICNYSYSSNILSIRLNRQRLLVCLEESIYIHNIKDMKLLKTLLDIPANPTGLCALSINHSNSYLAYPGSLTSGEIVLYDGNSLKTVCTIAAHEGTLAAITFNASGSKLASASEKGTVIRVFSVPDGQKLYEFRRGMKRYVTISSLVFSMDSQFLCASSNTETVHIFKLEQVTNRQSTRRAFDLEWLHGKDVYGCYQLPPYPGVRHDASGQGFCHCTLELLRTEEHLYPLNDPEVATAASCVIQWTPLYVQFGSSGWRRVCLNQNPQLAWLRNNRRE

SEQ ID NO: 21389 - protein, 80 aa, Homo sapiens
MGKMFMAATNYLPTQVSDMMHQDRAFATARLNFSGQRNICTLSTIQKLPRLLVASSSGHLYMYNLDPQDGGECVLIKTHR

SEQ ID NO: 21390 - protein, 227 aa, Homo sapiens [sequence omitted]

SEQ ID NO: 21391 - protein, 34 aa, Homo sapiens
LFTANGGLTFTFHSATLGNGDRGSMGIREKHPQN

SEQ ID NO: 21392 - protein, 30 aa, Homo sapiens
LTRLTFTFHSATLGNGDRGSMGIREKHPQN

SEQ ID NO: 21393 - protein, 43 aa, Homo sapiens
LGGLSPGPPGLSGLPRLTFTFHSATLGNGDRGSMGIREKHPQN

SEQ ID NO: 21394 - protein, 42 aa, Homo sapiens
LCMLPSHLSDRVLHRLTFTFHSATLGNGDRGSMGIREKHPQN

SEQ ID NO: 21395 - protein, 35 aa, Homo sapiens [sequence omitted]

SEQ ID NO: 21396 - protein, 43 aa, Homo sapiens
LVEDPGPKVVPSLLFMIRGVWGGDSGWKRESAETQAWEHWGSM

SEQ ID NO: 21397 - protein, 100 aa, Homo sapiens [sequence omitted]

SEQ ID NO: 21398 - protein, 48 aa, Homo sapiens
LGAPESSRKHSQPPVPVTSFPFAPASSQLCVWRTKLLPAWLQEKMWLT

SEQ ID NO: 21399 - protein, 151 aa, Homo sapiens
LRAGTAHLSSRDMTGTPGAVATRDGEAPERSPPCSPSYDLTGKNKVVTVDGVRVKLQIWDTAGQERFRSVTHAYYRDAQALLLLYDITNKSSFDNIRAWLTEIHEYAQRDVVIMLLGNKVSGSGAGSAQPCTSSALAGPITTQEQLSRHPS

SEQ ID NO: 21400 - protein, 201 aa, Homo sapiens
LRAGTAHLSSRDMTGTPGAVATRDGEAPERSPPCSPSYDLTGKVMLLGDTGVGKTCFLIQFKDGAFLSGTFIATVGIDFRNKVVTVDGVRVKLQIWDTAGQERFRSVTHAYYRDAQALLLLYDITNKSSFDNIRAWLTEIHEYAQRDVVIMLLGNKADMSSERVIRSEDGETLAREYGVPFLETSAKTGMNVELAFLAIAK

SEQ ID NO: 21401 - protein, 235 aa, Homo sapiens
LRAGTAHLSSRDMTGTPGAVATRDGEAPERSPPCSPSYDLTGKVMLLGDTGVGKTCFLIQFKDGAFLSGTFIATVGIDFRNKVVTVDGVRVKLQIWDTAGQERFRSVTHAYYRDAQALLLLYDITNKSSFDNIRAWLTEIHEYAQRDVVIMLLGNKADMSSERVIRSEDGETLAREYGVPFLETSAKTGMNVELAFLAIAKELKYRAGHQADEPSFQIRDYVESQKKRSSCCSFM

SEQ ID NO: 21402 - protein, 198 aa, Homo sapiens
LRAGTAHLSSRDMTGTPGAVATRDGEAPERSPPCSPSYDLTGKNKVVTVDGVRVKLQIWDTAGQERFRSVTHAYYRDAQALLLLYDITNKSSFDNIRAWLTEIHEYAQRDVVIMLLGNKADMSSERVIRSEDGETLAREYGVPFLETSAKTGMNVELAFLAIAKELKYRAGHQADEPSFQIRDYVESQKKRSSCCSFM

SEQ ID NO: 21403 - protein, 69 aa, Homo sapiens [sequence omitted]

SEQ ID NO: 21404 - protein, 170 aa, Homo sapiens
LPPAWCCPHSPQQGVDEATRAVPTGDMEDLPCGLVLSSIGYKSRPVDPSVPFDSKLGVIPNVEGRVMDVPGLYCSGWVKRGPTGVIATTMTDSFLTGQMLLQDLKAGLLPSGPRPGYAAIQALLSSRGVRPVSFSDWEKLDAEEVARGQGTGKPREKLVDPQEMLRLLGH

SEQ ID NO: 21405 - protein, 447 aa, Homo sapiens
VKDLSQERMEDKDREHPQAHVDIYEKQPVPFGLVRFGVAPDHPEVKNVINTFTQTAHSGRCAFWGNVEVGRDVTVPELQEAYHAVVLSYGAEDHRALEIPGEELPGVCSARAFVGWYNGLPENQELEPDLSCDTAVILGQGNVALDVARILLTPPEHLERTDITKAALGVLRQSRVKTVWLVGRRGPLQVAFTIKELREMIQLPGARPILDPVDFLGLQDKIKEVPRPRKRLTELLLRTATEKPGPAEAARQASASRAWGLRFFRSPQQVLPSPDGRRAAGVRLAVTRLEGVDEATRAVPTGDMEDLPCGLVLSSIGYKSRPVDPSVPFDSKLGVIPNVEGRVMDVPGLYCSGWVKRGPTGVIATTMTDSFLTGQMLLQDLKAGLLPSGPRPGYAAIQALLSSRGVRPVSFSDWEKLDAEEVARGQGTGKPREKLVDPQEMLRLLGH

SEQ ID NO: 21406 - protein, 489 aa, Homo sapiens
MGARGGLRALSRGRSRAGAGLEKGFCHHFSTQEKTPQICVVGSGPAGFYTAQHLLKQHPQAHVDIYEKQPVPFGLVRFGVAPDHPEVKNVINTFTQTAHSGRCAFWGNVEVGRDVTVPELQEAYHAVVLSYGAEDHRALEIPGEELPGVCSARAFVGWYNGLPENQELEPDLSCDTAVILGQGNVALDVARILLTPPEHLERTDITKAALGVLRQSRVKTVWLVGRRGPLQVAFTIKELREMIQLPGARPILDPVDFLGLQDKIKEVPRPRKRLTELLLRTATEKPGPAEAARQASASRAWGLRFFRSPQQVLPSPDGRRAAGVRLAVTRLEGVDEATRAVPTGDMEDLPCGLVLSSIGYKSRPVDPSVPFDSKLGVIPNVEGRVMDVPGLYCSGWVKRGPTGVIATTMTDSFLTGQMLLQDLKAGLLPSGPRPGYAAIQALLSSRGVRPVSFSDWEKLDAEEVARGQGTGKPREKLVDPQEMLRLLGH

SEQ ID NO: 21407 - protein, 456 aa, Homo sapiens
LLLPAMASRCWRWWGWSAWPRTRLPPAGSTPSFCHHFSTQEKTPQICVVGSGPAGFYTAQHLLKQHPQAHVDIYEKQPVPFGLVRFGVAPDHPEVKSYGAEDHRALEIPGEELPGVCSARAFVGWYNGLPENQELEPDLSCDTAVILGQGNVALDVARILLTPPEHLERTDITKAALGVLRQSRVKTVWLVGRRGPLQVAFTIKELREMIQLPGARPILDPVDFLGLQDKIKEVPRPRKRLTELLLRTATEKPGPAEAARQASASRAWGLRFFRSPQQVLPSPDGRRAAGVRLAVTRLEGVDEATRAVPTGDMEDLPCGLVLSSIGYKSRPVDPSVPFDSKLGVIPNVEGRVMDVPGLYCSGWVKRGPTGVIATTMTDSFLTGQMLLQDLKAGLLPSGPRPGYAAIQALLSSRGVRPVSFSDWEKLDAEEVARGQGTGKPREKLVDPQEMLRLLGH

SEQ ID NO: 21408 - protein, 502 aa, Homo sapiens
LLLPAMASRCWRWWGWSAWPRTRLPPAGSTPSFCHHFSTQEKTPQICVVGSGPAGFYTAQHLLKHPQAHVDIYEKQPVPFGLVRFGVAPDHPEVKNVINTFTQTAHSGRCAFWGNVEVGRDVTVPELQEAYHAVVLSYGAEDHRALEIPGEELPGVCSARAFVGWYNGLPENQELEPDLSCDTAVILGQGNVALDVARILLTPPEHLEALLLCQRTDITKAALGVLRQSRVKTVWLVGRRGPLQVAFTIKELREMIQLPGARPILDPVDFLGLQDKIKEVPRPRKRLTELLLRTATEKPGPAEAARQASASRAWGLRFFRSPQQVLPSPDGRRAAGVRLAVTRLEGVDEATRAVPTGDMEDLPCGLVLSSIGYKSRPVDPSVPFDSKLGVIPNVEGRVMDVPGLYCSGWVKRGPTGVIATTMTDSFLTGQMLLQDLKAGLLPSGPRPGYAAIQALLSSRGVRPVSFSDWEKLDAEEVARGQGTGKPREKLVDPQEMLRLLGH

SEQ ID NO: 21409 - protein, 488 aa, Homo sapiens
LLLPAMASRCWRWWGWSAWPRTRLPPAGSTPSFCHHFSTQEKTPQICVVGSGPAGFYTAQHLLKHPQAHVDIYEKQPVPFGLVRFGVAPDHPEVKTAHSGRCAFWGNVEVGRDVTVPELQEAYHAVVLSYGAEDHRALEIPGEELPGVCSARAFVGWYNGLPENQELEPDLSCDTAVILGQGNVALDVARILLTPPEHLERTDITKAALGVLRQSRVKTVWLVGRRGPLQVAFTIKELREMIQLPGARPILDPVDFLGLQDKIKEVPRPRKRLTELLLRTATEKPGPAEAARQASASRAWGLRFFRSPQQVLPSPDGRRAAGVRLAVTRLEGVDEATRAVPTGDMEDLPCGLVLSSIGYKSRPVDPSVPFDSKLGVIPNVEGRVMDVPGLYCSGWVKRGPTGVIATTMTDSFLTGQMLLQDLKAGLLPSGPRPGYAAIQALLSSRGVRPVSFSDWEKLDAEEVARGQGTGKPREKLVDPQEMLRLLGH

SEQ ID NO: 21410 - protein, 527 aa, Homo sapiens
LLLPAMASRCWRWWGWSAWPRTRLPPAGSTPTFGGSDEVRDPANAKALRNKRRRMQVRVKLGKFQLLLDIQEKTPQICVVGSGPAGFYTAQHLLKHPQAHVDIYEKQPVPFGLVRFGVAPDHPEVKNVINTFTQTAHSGRCAFWGNVEVGRDVTVPELQEAYHAVVLSYGAEDHRALEIPGEELPGVCSARAFVGWYNGLPENQELEPDLSCDTAVILGQGNVALDVARILLTPPEHLERTDITKAALGVLRQSRVKTVWLVGRRGPLQVAFTIKELREMIQLPGARPILDPVDFLGLQDKIKEVPRPRKRLTELLLRTATEKPGPAEAARQASASRAWGLRFFRSPQQVLPSPDGRRAAGVRLAVTRLEGVDEATRAVPTGDMEDLPCGLVLSSIGYKSRPVDPSVPFDSKLGVIPNVEGRVMDVPGLYCSGWVKRGPTGVIATTMTDSFLTGQMLLQDLKAGLLPSGPRPGYAAIQALLSSRGVRPVSFSDWEKLDAEEVARGQGTGKPREKLVDPQEMLRLLGH

SEQ ID NO: 21411 - protein, 510 aa, Homo sapiens
LPCGAVARNRSTCRLLLPAMASRCWRWWGWSAWPRTRLPPAGSTPSFCHHFSTQEKTPQICVVGSGPAGFYTAQHLLKHPQAHVDIYEKQPVPFGLVRFGVAPDHPEVKNVINTFTQTAHSGRCAFWGNVEVGRDVTVPELQEAYHAVVLSYGAEDHRALEIPGEELPGVCSARAFVGWYNGLPENQELEPDLSCDTAVILGQGNVALDVARILLTPPEHLERTDITKAALGVLRQSRVKTVWLVGRRGPLQVAFTIKELREMIQLPGARPILDPVDFLGLQDKIKEVPRPRKRLTELLLRTATEKPGPAEAARQASASRAWGLRFFRSPQQVLPSPDGRRAAGVRLAVTRLEGVDEATRAVPTGDMEDLPCGLVLSSIGYKSRPVDPSVPFDSKLGVIPNVEGRVMDVPGLYCSGWVKRGPTGVIATTMTDSFLTGQMLLQDLKAGLLPSGPRPGYAAIQALLSSRGVRPVSFSDWEKLDAEEVARGQGTGKPREKLVDPQEMLRLLGH

SEQ ID NO: 21412 - protein, 482 aa, Homo sapiens
LPCGAVARNRSTCRLLLPAMASRCWRWWGWSAWPRTRLPPAGSTPSFCHHFSTQEKTPQICVVGSGPAGFYTAQHLLKQHPQAHVDIYEKQPVPFGLVRFGVAPDHPEVKNVINTFTQTAHSGRCAFWGNVEVGRDVTVPELQEAYHAVVLSYGAEDHRALEIPGEELPGVCSARAFVGWYNGLPENQELEPDLSCDTAVILGQGNVALDVARILLTPPEHLERTDITKAALGVLRQSRVKTVWLVGRRGPLQVAFTIKVPRPRKRLTELLLRTATEKPGPAEAARQASASRAWGLRFFRSPQQVLPSPDGRRAAGVRLAVTRLEGVDEATRAVPTGDMEDLPCGLVLSSIGYKSRPVDPSVPFDSKLGVIPNVEGRVMDVPGLYCSGWVKRGPTGVIATTMTDSFLTGQMLLQDLKAGLLPSGPRPGYAAIQALLSSRGVRPVSFSDWEKLDAEEVARGQGTGKPREKLVDPQEMLRLLGH

SEQ ID NO: 21413 - protein, 553 aa, Homo sapiens
LPCGAVARNRSTCRLLLPAMASRCWRWWGWSAWPRTRLPPAGSTPSFCHHFSTQEKTPQICVVGSGPAGFYTAQHLLKRVEALCSQPRVLNSPALSGEGEDLGASQPLSLGPTSCHPVPQQHPQAHVDIYEKQPVPFGLVRFGVAPDHPEVKNVINTFTQTAHSGRCAFWGNVEVGRDVTVPELQEAYHAVVLSYGAEDHRALEIPGEELPGVCSARAFVGWYNGLPENQELEPDLSCDTAVILGQGNVALDVARILLTPPEHLERTDITKAALGVLRQSRVKTVWLVGRRGPLQVAFTIKELREMIQLPGARPILDPVDFLGLQDKIKEVPRPRKRLTELLLRTATEKPGPAEAARQASASRAWGLRFFRSPQQVLPSPDGRRAAGVRLAVTRLEGVDEATRAVPTGDMEDLPCGLVLSSIGYKSRPVDPSVPFDSKLGVIPNVEGRVMDVPGLYCSGWVKRGPTGVIATTMTDSFLTGQMLLQDLKAGLLPSGPRPGYAAIQALLSSRGVRPVSFSDWEKLDAEEVARGQGTGKPREKLVDPQEMLRLLGH

SEQ ID NO: 21414 - protein, 398 aa, Homo sapiens
VALSLSQALSTASRSILMTTCKAGVVPLASQQHPQAHVDIYEKQPVPFGLVRFGVAPDHPEVKNVINTFTQTAHSGRCAFWGNVEVGRDVTVPELQEAYHAVVLSYGAEDHRALEIPGEELPGVCSARAFVGWYNGLPENQELEPDLSCDTAVILGQGNVALDVARILLTPPEHLERTDITKAALGVLRQSRVKTVWLVGRRGPLQVAFTIKELREMIQLPGARPILDPVDFLGLQDKIKEVPRPRKRLTELLLRTATEKPGPAEAARQASASRAWGLRFFRSPQQVLPSPDGRRAAGVRLAVTRLEVSLMFPKDTPFPGLCHPPGVAHTLPNRVSMRPPVQCPRETWKTSLVGWCSAALGIRAALSTQACPLTPSLGSSPMWRAGLWMCQASTAAAG

SEQ ID NO: 21415 - protein, 198 aa, Homo sapiens
VVGSGPAGFYTAQHLLKQHPQAHVDIYEKQPVPFGLVRFGVAPDHPEVKTAHSGRCAFWGNVEVGRDVTVPELQEAYHAVVLSYGAEDHRALEIPGEELPGVCSARAFVGWYNGLPENQELEPDLSCDTAVILGQGNVALDVARILLTPPEHLERTDITKAALGVLRQSRVKTVWLVGRRGPLQVAFTIKRSPARGSG

SEQ ID NO: 21416 - protein, 136 aa, Homo sapiens
VVGCWVWSFPAPLGSDPLSVLLRRQPTSLLGAMTTTTTFKGVDPNSRNSSRVLRPPGGGSNFSLGFDEPTEQPVRKNKMASNIFGTPEENQASWAKSAGAKSSGGREDLESSGLQRRNSSEASSGDFLDLKVSVTA

SEQ ID NO: 21417 - protein, 40 aa, Homo sapiens
LLEATMNDDDIETTKVEMLRLSLARNLARAIIREGSLEGS

SEQ ID NO: 21418 - protein, 23 aa, Homo sapiens
VKVARGWSGLALGVRRAVLQLPG

SEQ ID NO: 21419 - protein, 71 aa, Homo sapiens
VATTEPLAASWWRATAHSGEALWAPRSCRAQAGPGPPLQYPLCRDDYEEHYGGTATFYLSQAADGAKVLCL

SEQ ID NO: 21420 - protein, 121 aa, Homo sapiens
VATTEPLAASWWRATAHSGEALWAPRSCRAQAGPGPPLQYPLCRDDYEVSCPELDQLVEAALAVPGVYGSRMTGGGFGGCTVTLLEASAAPHAMRHIQEHYGGTATFYLSQAADGAKVLCL

SEQ ID NO: 21421 - protein, 166 aa, Homo sapiens
LQARVMAALRQPQVAELLAEARRAFREEFGAEPELAVSAPGRVNLIGEHTDYNQGLVLPMALELMTVLVGSPRKDGLVSLLTTSEGADEPQRLQFPLPTAQRSLEPGTPRWANYVKGVIQYYPAAPLPGFSAVVVSSVPLGGGLSSSASLEVATYTFLQQLCPGTS

SEQ ID NO: 21422 - protein, 126 aa, Homo sapiens
LRQPQVAELLAEARRAFREEFGAEPELAVSAPGRVNLIGEHTDYNQGLVLPMALELMTVLVGSPRKDGLVSLLTTSEGADEPQRLQFPLPTAQRSLEPGTPRWANYVKGVIQYYPGMGPRPEPSPH

SEQ ID NO: 21423 - protein, 27 aa, Homo sapiens
LGGAGFSLVDCGSSSGSGSGAAVGEVA

SEQ ID NO: 21424 - protein, 80 aa, Homo sapiens
LDNSESNLEKSILGTLYKGAPSLQIAPQISAQKQDTLVDLHVLPLFNTLMPEAMVDTKGGFPTIRMHLLCFEIATMDSYG

SEQ ID NO: 21425 - protein, 88 aa, Homo sapiens
LATPHFLEANILWEKQSQGVTLEPQALKSSTELVTLQTPLGWGARADGRSLGGHLLLQAPWPGGSRQVHMHTSNTSQAMASAKAEAIG

SEQ ID NO: 21426 - protein, 295 aa, Homo sapiens
LPALALTHTGLGVWSGFVFLNIFQQTTSPPHRWLSPAPRTYTLHTRTHTHTHTRRAQTHAPSLRALPLARPPRTQPAPAPGAPRPAPRAPPPPPPSKAGLGLELLMEKVPGEMEIERRERSEELSEAERKAVQAMWARLYANCEDVGVAILVRFFVNFPSAKQYFSQFKHMEDPLEMERSPQLRKHACRVMGALNTVVENLHDPDKVSSVLALVGKAHALKHKVEPVYFKILSGVILEVVAEEFASDFPPETQRAWAKLRGLIYSHVTAAYKEVGWVQQVPNATTPPATLPSSGP

SEQ ID NO: 21427 - protein, 34 aa, Homo sapiens
LEDMATPVGVEHGEQSQAFSDDGKAAWVGKRGLP

SEQ ID NO: 21428 - protein, 39 aa, Homo sapiens
LEDMATPVGVEHGEQSQAFSDDGWLGGLKVLDEKMLSKR

SEQ ID NO: 21429 - protein, 40 aa, Homo sapiens
LEDMATPVGVEHGEQSQAFSDDEAFLCLASAETVKSRAPG

SEQ ID NO: 21430 - protein, 36 aa, Homo sapiens
LEDMATPVGVEHGEQSQAFSDDGAVSLSFQSRKRIL

SEQ ID NO: 21431 - protein, 20 aa, Homo sapiens
MATPVGVEHGEQSQAFSDDD

SEQ ID NO: 21432 - protein, 244 aa, Homo sapiens
VSPRGRQLPERRGVAPPRAEEAGASSRGSGPPLRAMSYGRPPPDVEGMTSLKVDNLTYRTSPDTLRRVFEKYGRVGDVYIPRDRYTKESRGFAFVRFHDKRDAEDAMDAMDGAVLDGRELRVQMARYGRPPDSHHSRRGPPPRSPRRRRRSRSRSRSRSRSRSRSRYSRSKSRSRTRSRSRSTSKSRSARRSKSKSSSVSRSRSRSRSRSRSRSPPPVSKRESKSRSRSKSPPKSPEEEGAVSS

SEQ ID NO: 21433 - protein, 315 aa, Homo sapiens
LGVKNSEPSARHVDSLSQRSPKASLRRVELSGPKAAEPVSRRTELSIDISSKQVENAGAIGPSRFGLKRAEVLGHKTPEPAPRRTEITIVKPQESAHRRMEPPASKVPEVPTAPATDAAPKRVEIQMPKPAEAPTAPSPAQTLENSEPAPVSQLQSRLEPKPQPPVAEATPRSQEATEAAPSCVGDMADTPRDAGLKQAPASRNEKAPVDFGYVGIDSILEQMRRKAMKQGFEFNIMVVGESSPCMPLNQCRKPASAPRAAHKPLGLVFPSVKWGSNPDLKDGLPVTLRVHACAWEEPTASSGSSEGPVLHIQGP

SEQ ID NO: 21434 - protein, 46 aa, Homo sapiens
MFRASALSPWPGVWEEGFISMLESRVNGQGKLWGLLPAGPSLQPSP

SEQ ID NO: 21435 - protein, 59 aa, Homo sapiens
LRVGSMARVSCGGSSPPAPLCSPHLNTEHRYHLGFGKTWRLTTLEAPSVPQPLFGEEAS

SEQ ID NO: 21436 - protein, 123 aa, Homo sapiens
LEADHPGGSQRPTATLWGRGFLRDLWPLAGTLVPEFCLPAPSFDLFIECQPGSRTATEAAPSCVGDMADTPRDAGLKQAPASRNEKAPVDFGYVGIDSILEQMRRKAMKQGFEFNIMVVERLG

SEQ ID NO: 21437 - protein, 127 aa, Homo sapiens
VSPASSGPCLAGRQPAKSAVNAALPPLLGRCGCMAHSFGESYRVGSTSGIHAITVFCSWDYKVTQKRASRLQQDNIRTRLKEGEDKIFLINKLHSIYERKEREERSRVGTTEEAAAPPALLTDEQDA

SEQ ID NO: 21438 - protein, 222 aa, Homo sapiens
LRLAQSPLGPFATPLARRAETSVPGGSCGAQVSPGCARGPSSPAPPSQGPSPYDESEVHDSFQQLIQEQSQCTAQEGLELQQREREVTGSSQQTLWRPEGTQSTATLRILASMPSRTIGRSRGAIISQYYNRTVQLRCRSSRPLLGNFVRSAWPSLRLYDLELDPTALEEEEKQSLLVKELQSLAVAQRDHMLRGMPLSLAEKRSLRPCTAWAWRCSPPCRP

SEQ ID NO: 21439 - protein, 179 aa, Homo sapiens [sequence omitted]

SEQ ID NO: 21440 - protein, 126 aa, Homo sapiens
LARDMAQPLAFILDVPETPGDQGQGPSPYDESEVHDSFQQLIQEQSQCTAQEGLELQQREREVTGSSQQTLWRPEGTQSTATLRILASMPSRTIGEWDPQPRPRPRPRVDPSPWGWAGLPARHLPG

SEQ ID NO: 21441 - protein, 150 aa, Homo sapiens
LRLAQSPLGPFATPLARRAETSVPGGSCGAQVSPGCARGPSSPAPPSQGPSPYDESEVHDSFQQLIQEQSQCTAQEGLELQQREREVTGSSQQTLWRPEGTQSTATLRILASMPSRTIGEWDPQPRPRPRPRVDPSPWGWAGLPARHLPG

SEQ ID NO: 21442 - protein, 106 aa, Homo sapiens
LAWQESSEKGTPPGTWSLGPQVSWMSSGGRMQRMGRLRPWLCVPLRVGAGLGPNSTAAGFSLISEPRRWQSGRPGQVNPRAAGAQAPTPAQRGRKGPPPAQRAQRP

SEQ ID NO: 21443 - protein, 94 aa, Homo sapiens
LAWQESSEKGTPPGTWSLGPQMGRLRPWLCVPLRVGAGLGPNSTAAGFSLISEPRRWQSGRPGQVNPRAAGAQAPTPAQRGRKGPPPAQRAQRP

SEQ ID NO: 21444 - protein, 104 aa, Homo sapiens
LAWQESSEKGTPPGTWSLGPQMGRLRPWLCVPLRVGAGLGPNSTAAGFSLISEPRRWQSGRPGPLRHRNSVLLHLPPLPAATQPAEPAAHRKLRAAAPGLAPPP

SEQ ID NO: 21445 - protein, 193 aa, Homo sapiens
LESTRVRELPGGAMSCINLPTVLPGSPSKTRGQIQVILGPMFSGKSTELMRRVRRFQIAQYKCLVIKYAKDTRYSSSFCTHDRNTMEALPACLLRDVAQEALGVAVIGIDEGQFFPDIVEFCEAMANAGKTVIVAALDGTFQRKPFGAILNLVPLAESVVKLTAVCMECFREAAYTKRLGTEKEQILQCSPAN

SEQ ID NO: 21446 - protein, 280 aa, Homo sapiens
LIGPMAAGPARDWPARRGLKRSAREPGAYCGTALESTRVRELPGGAMSCINLPTVLPGSPSKTRGQIQVILGPMFSGKSTELMRRVRRFQIAQYKCLVIKYAKDTRYSSSFCTHDRNTMEALPACLLRDVAQEALGVAVIGIDEGQFFPDIVEFCEAMANAGKTVIVAALDGTFQRKPFGAILNLVPLAESVVKLTAVCMECFREAAYTKRLGTEKEVEVIGGADKYHSVCRLCYFKKASGQPAGPDNKENCPVPGKPGEAVAARKLFAPQQILQCSPAN

SEQ ID NO: 21447 - protein, 313 aa, Homo sapiens
LIGPMAAGPARDWPARRGLKRSAREPGAYCGTALESTRVRELPGGAMSCINLPTVLPGSPSKTRGQIQVILGPMFSGKSTELMRRVRRFQIAQYKCLVIKYAKDTRYSSSFCTHDRNTMEALPACLLRDVAQEALGVAVIGIDEGQFFPDIVEFCEAMANAGKTVIVAALDGTFQRKPFGAILNLVPLAESVVKLTAVCMECFREAAYTKRLGTEKEVAPPAFPAGRRGGGMALPPSCPGPSPIPCPCGQVEVIGGADKYHSVCRLCYFKKASGQPAGPDNKENCPVPGKPGEAVAARKLFAPQQILQCSPAN

SEQ ID NO: 21448 - protein, 100 aa, Homo sapiens
LESTRVRELPGGAMSCINLPTVLPGSPSKTRGQIQVILGPMFSGKSTELMRRVRRFQIAQYKCLVIKYAKDTRYSSSFCTHDRSLTSWSSARPWPTPGRP

SEQ ID NO: 21449 - protein, 57 aa, Homo sapiens
LPFRCCFDFSREEHKKHSSGCAFLSVKKQFEELTLGEFLKLDRERAKNKIERALLAE

SEQ ID NO: 21450 - protein, 79 aa, Homo sapiens
LPFRCCFDFSREEHKKHSSGCAFLSVKKQFEELTLGEFLKLDRERAKNKIAKETNNKKKEFEETAEKVRRAIEQLAAMD

SEQ ID NO: 21451 - protein, 55 aa, Homo sapiens
LMFARVCLTGHEEEGSGLSSRSFRRKAKETNNKKKEFEETAEKVRRAIEQLAAMD

SEQ ID NO: 21452 - protein, 355 aa, Homo sapiens
LLPLRPRTQPAASRPPGPAPAAAPCRGPSPGPLPVGPGVRRGQGGRPGEARGTRARRLLCGLHGRQHLGAARATAGRLAAASPWGPEGAQPQGRRLRFGTSPPGCGSGRCAEAAKQLQPPPRRSTLAPCAMVTHSKFPAAGMSRPLDTSLRLKTFSSKSEYQLVVNAVRKLQESGFYWSAVTGGEANLLLSAEPAGTFLIRDSSDQRHFFTLSVKTQSGTKNLRIQCEGGSFSLQSDPRSTQPVPRFDCVLKLVHHYMPPPGAPSFPSPPTEPSSEVPEQPSAQPLPGSPPRRAYYIYSGGEKIPLVLSRPLSSNVATLQHLCRKTVNGHLDSYEKVTQLPGPIREFLDQYDAPL

SEQ ID NO: 21453 - protein, 147 aa, Homo sapiens
LDSLLRCCRFGPARSQPPAARPAQLPPRPLAAVPLLVPSRLVRGCAGGRAGAQGKLEGRAREGSFVDFTAANIWAQRGPPLAVSPPRRLGDPRGLSPKDGDFDSGPAPRDAVAAAVRRPRSSCSRRRADPRWLRAPWSPTASFPPPG

SEQ ID NO: 21454 - protein, 227 aa, Homo sapiens
LGSPCPLPVSHLAAVCNPPAPPAGLDVLSLSLAPGACFRNSPHLCVLCFAVIRAKAVSEKEVDSGNDIYGNPIKRIQYEIKQIKMFKGPEKDIEFIYTAPSSAVCGVSLDVGGKKEYLIAGKAEGDGKMHITLCDFIVPWDTLSTTQKKSLNHRYQMGCECKITRCPMIPCYISSPDECLWMDWVTEKNINGHQAKFFACIKRSDGSCAWYRGAAPPKQEFLDIEDP

SEQ ID NO: 21455 - protein, 228 aa, Homo sapiens
LPSLIPSHPFRAQPTWDKQPRTSQGRVPEQIPQGRQRPVYSPVFDSPRSDAVIRAKAVSEKEVDSGNDIYGNPIKRIQYEIKQIKMFKGPEKDIEFIYTAPSSAVCGVSLDVGGKKEYLIAGKAEGDGKMHITLCDFIVPWDTLSTTQKKSLNHRYQMGCECKITRCPMIPCYISSPDECLWMDWVTEKNINGHQAKFFACIKRSDGSCAWYRGAAPPKQEFLDIEDP

SEQ ID NO: 21456 - protein, 561 aa, Homo sapiens
VLCVLPAGRAAVRAGDWRRAPRSGWLPGSMEELSSVGEQVFAAECILSKRLRKGKLEYLVKWRGWSSKHNSWEPEENILDPRLLLAFQKKEHEKEVQNRKRGKRPRGRPRKLTAMSSCSRRSKLKEPDAPSKSKSSSSSSSSTSSSSSSDEEDDSDLDAKRGPRGRETHPVPQKKAQILVAKPELKDPIRKKRGRKPLPPEQKATRRPVSLAKVLKTARKDLGAPASKLPPPLSAPVAGLAALKAHAKEACGGPSAMATPENLASLMKGMASSPGRGGISWQSSIVHYMNRMTQSQAQAASRLALKAQATNKCGLGLDLKVRTQKGELGMSPPGSKIPKAPSGGAVEQKVGNTGGPPHTHGASRVPAGCPGPQPAPTQELSLQVLDLQSVKNGMPGVGLLARHATATKGVPATNPAPGKGTGSGLIGASGATMPTDTSKSEKLASRAVAPPTPASKRDCVKGSATPSGQESRTAPGEARKAATLPEMSAGEESSSSDSDPDSASPPSTGQNPSVSVQTSQDWKPTRSLIEHVFVTDVTANLITVTVKESPTSVGFFNLRHY

SEQ ID NO: 21457 - protein, 365 aa, Homo sapiens
LPRARLLRAAASPGALPGASPERTAAPRRPCTLCLPPHAADDGGFESGAYNNSAIATPHLDALARRSLLFRNAFTSVSSCSPSRASLLTGLPQHQNGMYGLHQDVHHFNSFDKVRSLPLLLSQAGVRTGIIGKKHVGPETVYPFDFAYTEENGSVLQVGRNITRIKLLVRKFLQTQDDRPFFLYVAFHDPHRCGHSQPQYGTFCEKFGNGESGMGRIPDWTPQAYDPLDVLVPYFVPNTPAARADLAAQYTTVGRMDQGVGLVLQELRDAGVLNDTLVIFTSDNGIPFPSGRTNLYWPGTAEPLLVSSPEHPKRWGQVSEAYVSLLGMPLSVSVRKGVGVDLGRGHDLSDAAPHPLPNVALISSG

SEQ ID NO: 21458 - protein, 7 aa, Homo sapiens
MASSLMG

SEQ ID NO: 21459 - protein, 13 aa, Homo sapiens
LFFRRSAVAFLCR

SEQ ID NO: 21460 - protein, 137 aa, Homo sapiens
MKQRDKGRGWHPAEGGPALTAQPPETRPALDRSRRESRSQGCRGVSVSLTMNLEPPKAEFRSATRVAGGPVTPRKGPPKFKQRQTRQFKSKPPKKGVQGFGDDIPGMEGLGTDITVICPWEAFNHLELHELAQYGII

SEQ ID NO: 21461 - protein, 50 aa, Homo sapiens
LPTHFSQQEFPKFGDDIPGMEGLGTDITVICPWEAFNHLELHELAQYGII

SEQ ID NO: 21462 - protein, 95 aa, Homo sapiens
LWRQLDIGRPSSRQVLGSRKRATGAGAPDSGVLSSALTGFCPYAMRANVAVEARAPKPAVIHVSRPLRAPSAAVAGGGARSGLWRLRSRRRHPLS

SEQ ID NO: 21463 - protein, 7 aa, Homo sapiens
MPGGRGG

SEQ ID NO: 21464 - protein, 331 aa, Homo sapiens
LNRARGAGRGALRPVHAGVGPGSGCGRAGIGLSWAMAAEARVSRWYFGGLASCGAACCTHPLDLLKVHLQTQQEVKLRMTGMALRVVRTDGILALYSGLSASLCRQMTYSLTRFAIYETVRDRVAKGSQGPLPFHEKVLLGSVSGLAGGFVGTPADLVNVRMQNDVKLPQGQRRNYAHALDGLYRVAREEGLRRLFSGATMASSRGALVTVGQLSCYDQAKQLVLSTGYLSDNIFTHFVASFIAAAGDEPPPQGGCATFLCQPLDVLKTRLMNSKGEYQGVFHCAVETAKLGPLAFYKGLVPAGIRLIPHTVLTFVFLEQLRKNFGIKVPS

SEQ ID NO: 21465 - protein, 311 aa, Homo sapiens
LRPVHAGVGPGSGCGRAGIGLSWAMAAEARVSRWYFGGLASCGAACCTHPLDLLKVHLQTQQEVKLRMTGMALRVVRTDGILALYSGLSASLCRQMTYSLTRFAIYETVRDRVAKGSQGPLPFHEKVLLGSVSGLAGGFVGTPADLVNVRMQNDVKLPQGQRRNYAHALDGLYRVAREEGLRRLFSGATMASSRGALVTVGQLSCYDQAKQLVLSTGYLSDNIFTHFVASFIAGGCATFLCQPLDVLKTRLMNSKGEYQGVFHCAVETAKLGPLAFYKGLVPAGIRLIPHTVLTFVFLEQLRKNFGIKVPS

SEQ ID NO: 21466 - protein, 261 aa, Homo sapiens
LREGQVHLQTQQEVKLRMTGMALRVVRTDGILALYSGLSASLCRQMTYSLTRFAIYETVRDRVAKGSQGPLPFHEKVLLGSVSGLAGGFVGTPADLVNVRMQNDVKLPQGQRRNYAHALDGLYRVAREEGLRRLFSGATMASSRGALVTVGQLSCYDQAKQLVLSTGYLSDNIFTHFVASFIAGGCATFLCQPLDVLKTRLMNSKGEYQGVFHCAVETAKLGPLAFYKGLVPAGIRLIPHTVLTFVFLEQLRKNFGIKVPS

SEQ ID NO: 21467 - protein, 198 aa, Homo sapiens
MSSEYREYADSFGKCPGGRNPWTGVSQFLQTSQKIIQFASGKEPQPGETVIYVAGAFDLFHIGHVDFLEKVHRLAERPYIIAGLHFDQYVSEVVIGAPYAVTAELLSHFKVDLVCHGKTEIIPDRDGSDPYQEPKRRGIFRQIDSGSNLTTDLIVQRIITNRLEYEARNQKKEAKELAFLEAARQQAAQPLGERDGDF

SEQ ID NO: 21468 - protein, 458 aa, Homo sapiens
LPGDRARVLGGVLVRHGPGLAGCGARLPGGSGCRGSAPCRGRPRLPLAEAPPGHADLSGAATALRSGATASLLLRNHQQPACPAPVQGFPWPPGERPCSYDMVHYGHSNQLRQARAMGDYLIVGVHTDEEIAKHKGPPVFTQEERYKMVQAIKWVDEVVPAAPYVTTLETLDKYNCDFCVHGNDITLTVDGRDTYEEVKQAGRYRECKRTQGVSTTDLVGRMLLVTKAHHSSQEMSSEYREYADSFGKCPGGRNPWTGVSQFLQTSQKIIQFASGKEPQPGETVIYVAGAFDLFHIGHVDFLEKVHRLAERPYIIAGLHFDQEVNHYKGKNYPIMNLHERTLSVLACRYVSEVVIGAPYAVTAELLSHFKVDLVCHGKTEIIPDRDGSDPYQEPKRRGIFRQIDSGSNLTTDLIVQRIITNRLEYEARNQKKEAKELAFLEAARQQAAQPLGERDGDF

SEQ ID NO: 21469 - protein, 418 aa, Homo sapiens
LPGCPRRRCGAMIRNGRGAAGGAEQPGPGGRRAVRVWCDGCYDMVHYGHSNQLRQARAMGDYLIVGVHTDEEIAKHKGPPVFTQEERYKMVQAIKWVDEVVPAAPYVTTLETLDKYNCDFCVHGNDITLTVDGRDTYEEVKQAGRYRECKRTQGVSTTDLVGRMLLVTKAHHSSQEMSSEYREYADSFGKPPHPIPAGDILSSEGCSQCPGGRNPWTGVSQFLQTSQKIIQFASGKEPQPGETVIYVAGAFDLFHIGHVDFLEKVHRLAERPYIIAGLHFDQEVNHYKGKNYPIMNLHERTLSVLACRYVSEVVIGAPYAVTAELLSHFKVDLVCHGKTEIIPDRDGSDPYQEPKRRGIFRQIDSGSNLTTDLIVQRIITNRLEYEARNQKKEAKELAFLEAARQQAAQPLGERDGDF

SEQ ID NO: 21470 - protein, 378 aa, Homo sapiens
LPGCPRRRCGAMIRNGRGAAGGAEQPGPGGRRAVRVWCDGCYDMVHYGHSNQLRQARAMGDYLIVGVHTDEEIAKHKGPPVFTQEERYKMVQAIKWVDEVVPAAPYVTTLETLDKYNCDFCVHGNDITLTVDGRDTYEEVKQAGRYRECKRTQGVSTTDLVGRMLLVTKAHHSSQEMSSEYREYADSFGKCPGGRNPWTGVSQFLQTSQKIIQFASGKEPQPGETVIYVAGAFDLFHIGHVDFLEKVHRLAERPYIIAGLHFDQEVNHYKGKNYPIMNLHERTLSVLACRYVSEVVIGAPYAVTAELLSHFKEPKRRGIFRQIDSGSNLTTDLIVQRIITNRLEYEARNQKKEAKELAFLEAARQQAAQPLGERDGDF

SEQ ID NO: 21471 - protein, 420 aa, Homo sapiens
VTAAERAPGGAGGGARSRRELPGCPRRRCGAMIRNGRGAAGGAEQPGPGGRRAVRVWCDGCYDMVHYGHSNQLRQARAMGDYLIVGVHTDEEIAKHKGPPVFTQEERYKMVQAIKWVDEVVPAAPYVTTLETLDKYNCDFCVHGNDITLTVDGRDTYEEVKQAGRYRECKRTQGVSTTDLVGRMLLVTKAHHSSQEMSSEYREYADSFGKCPGGRNPWTGVSQFLQTSQKIIQFASGKEPQPGETVIYVAGAFDLFHIGHVDFLEKVHRLAERPYIIAGLHFDQEVNHYKGKNYPIMNLHERTLSVLACRYVSEVVIGAPYAVTAELLSHFKVDLVCHGKTEIIPDRDGSDPYQEPKRRGIFRQIDSGSNLTTDLIVQRIITNRLEYEARNQKKEAKELAFLEAARQQAAQPLGERDGDF

SEQ ID NO: 21472 - protein, 228 aa, Homo sapiens
LPGCPRRRCGAMIRNGRGAAGGAEQPGPGGRRAVRVWCDGCYDMVHYGHSNQLRQARAMGDYLIVGVHTDEEIAKHKGPPVFTQEERYKMVQAIKWVDEVVPAAPYVTTLETLDKYNCDFCVHGNDITLTVDGRDTYEEVKQAGRYRECKRTQGVSTTDLVGRMLLVTKAHHSSQVSRRRNPRGPWVEVSRGKEGHLPALSGSSCPLLPIPSRFWGGHAGRAGPSALL

SEQ ID NO: 21473 - protein, 182 aa, Homo sapiens
LGEAKGCLLSESACSLCPRVMTTPNKGNKALKVKREPGENGTSLTDEELVTMSVRELNQHLRGLSKEEIVQLKQRRRTLKNRGYAASCRVKRVTQKEELEKQKAELQQEVEKLASENASMKLELDALRSKYEALQTFARTVARSPVAPARGPLAAGLGPLVPGKVAATSVITIVKSKTDARS

SEQ ID NO: 21474 - protein, 330 aa, Homo sapiens
VPSVGALGQGSPDSMSVGFIGAGQLAFALAKGFTAAGVLAAHKIMASSPDMDLATVSALRKMGVKLTPHNKETVQHSDVLFLAVKPHIIPFILDEIGADIEDRHIVVSCAAGVTISSIEKKLSAFRPAPRVIRCMTNTPVVVREGATVYATGTHAQVEDGRLMEQLLSSVGFCTEVEEDLIDAVTGLSGSGPAYAFTALDALADGGVKMGLPRRLAVRLGAQALLGAAKMLLHSEQHPGQLKDNVSSPGGATIHALHVLESGGFRSLLINAVEASCIRTRELQSMADQEQVSPAAIKKTILDKDHLPLELGSPEGLHPLLLQYQLARAPS

SEQ ID NO: 21475 - protein, 311 aa, Homo sapiens
VAAAALREPVPSVGALGQGSPDSMSVGFIGAGQLAFALAKGFTAAGVLAAHKIMASSPDMDLATVSALRKMGVKLTPHNKETVQHSDVLFLAVKPHIIPFILDEIGADIEDRHIVVSCAAGVTISSIEKKLSAFRPAPRVIRCMTNTPVVVREGATVYATGTHAQVEDGRLMEQLLSSVGFCTEVEEDLIDAVTGLSGSGPAYGAAKMLLHSEQHPGQLKDNVSSPGGATIHALHVLESGGFRSLLINAVEASCIRTRELQSMADQEQVSPAAIKKTILDKVKLDSPAGTALSPSGHTKLLPRSLAPAGKD

SEQ ID NO: 21476 - protein, 342 aa, Homo sapiens
VAAAALREPVPSVGALGQGSPDSMSVGFIGAGQLAFALAKGFTAAGVLAAHKIMASSPDMDLATVSALRKMGVKLTPHNKETVQHSDVLFLAVKPHIIPFILDEIGADIEDRHIVVSCAAGVTISSIEKKLSAFRPAPRVIRCMTNTPVVVREGATVYATGTHAQVEDGRLMEQLLSSVGFCTEVEEDLIDAVTGLSGSGPAYAFTALDALADGGVKMGLPRRLAVRLGAQALLGAAKMLLHSEQHPGQLKDNVSSPGGATIHALHVLESGGFRSLLINAVEASCIRTRELQSMADQEQVSPAAIKKTILDKVKLDSPAGTALSPSGHTKLLPRSLAPAGKD

SEQ ID NO: 21477 - protein, 172 aa, Homo sapiens
LAKGFTAAGVLAAHKIMASSPDMDLATVSALRKMGVKLTPHNKETVQHSDVLFLAVKPHIIPFILDEIGADIEDRHIVVSCAAGVTISSIEKKLSAFRPAPRVIRCMTNTPVVVREGATVYATGTHAQVEDGRLMEQLLSSVGFCTEVEEDLIDAVTGLSGSGPAYGAAVHG

SEQ ID NO: 21478 - protein, 240 aa, Homo sapiens
VAAAALREPVPSVGALGQGSPDSMSVGFIGAGQLAFALAKGFTAAGVLAAHKIMASSPDMDLATVSALRKMGVKLTPHNKETVQHSDVLFLAVKPHIIPFILDEIGADIEDRHIVVSCAAGVTISSIEKKLSAFRPAPRVIRCMTNTPVVVREGATVYATGTHAQVEDGRLMEQLLSSVGFCTEVEEDLIDAVTGLSGSGPAYAFTALDALADGGVKMGLPRRLAVRLGAQALLGAAVHG

SEQ ID NO: 21479 - protein, 96 aa, Homo sapiens
LRLGPFSDSISGRAARPAPSWAGVSQLELVSRLLHLHFKDDKTKVSGDALQLMVELLKVFVVEAAVRGVRQAQAEDALRVDVDQLEKVLPQLLLDF

SEQ ID NO: 21480 - protein, 22 aa, Homo sapiens
VDGTPRRGGCKMPLPVQVFNLQ

SEQ ID NO: 21481 - protein, 23 aa, Homo sapiens
VDGTPRRGGCKMPLPVQVFNLQQ

SEQ ID NO: 21482 - protein, 167 aa, Homo sapiens
LGNKNETRLKKKKPTRSVAQGRPVLWVLPAPAQSPTPQVLEALLPLKGLEERVAAAVDLIIKSHQGLDRQELSFAARSFYYKLRAAEQYTPKAKYHGNVMLLRAKTGGAYGEDLGADYNLSQVCDGKVSVHVIEGDHRTLLEGSGLESIISIIHSSLAEPRVSVREG

SEQ ID NO: 21483 - protein, 243 aa, Homo sapiens
VPGTAIAAAPLDSIHSLAAYYIDCIRQVQPEGPYRVAGYSYGACVAFEMCSQLQAQQSPAPTHNSLFLFDGSPTYVLAYTQSYRAKLTPGCEAEAETEAICFFVQQFTDMEHNRVLEALLPLKGLEERVAAAVDLIIKSHQGLDRQELSFAARSFYYKLRAAEQYTPKAKYHGNVMLLRAKTGGAYGEDLGADYNLSQVCDGKVSVHVIEGDHRTLLEGSGLESIISIIHSSLAEPRVSVREG

SEQ ID NO: 21484 - protein, 520 aa, Homo sapiens
VGNPIGPGVRLVLSRCSHWPSAAVGGEAASGEDNKGPRAAGSGVPVSRCFPEAEAPGLPPAALQMKCEHCTRKECSKKTKTDDQENVSADAPSPAQENGEKGEFHKLADAKIFLSDCLACDSCMTAEEGVQLSQQNAKDFFRVLNLNKKCDTSKHKVLVVSVCPQSLPYFAAKFNLSVTDASRRLCGFLKSLGVHYVFDTTIAADFSILESQKEFVRRYRQHSEEERTLPMLTSACPGWVRYAERVLGRPITAHLCTAKSPQQVMGSLVKDYFARQQNLSPEKIFHVIVAPCYDKKLEALQESLPPALHGSRGADCVLTSGEIAQIMEQGDLSVRDAAVDTLFGDLKEDKVTRHDGASSDGHLAHIFRHAAKELFNEDVEEVTYRALRNKDFQEVTLEKNGEVVLRFAAAYGFRNIQNMILKLKKGKFPFHFVEVLACAGGCLNGRGQAQTPDGHADKALLRQMEGIYADIPVRRPESSAHVQELYQEWLEGINSPKAREVLHTTYQSQERGTHSLDIKW

SEQ ID NO: 21485 - protein, 167 aa, Homo sapiens
MKCEHCTRKECSKKTKTDDQENVSADAPSPAQENGEKCDTSKHKVLVVSVCPQSLPYFAAKFNLSVTDASRRLCGFLKSLGVHYVFDTTIAADFSILESQKEFVRRYRQHSEEERTLPMLTSACPGWVRYAERVLGRPITAHLCTAKSPQQVMGSLVKDYFARQQVS

SEQ ID NO: 21486 - protein, 76 aa, Homo sapiens
VPRWGSGSQIWAAASPLHMLATHASASASLPTKRHNGDQPEQPELKRIKTEDGEGIVIALSVDTPPAAVREKGVQN

SEQ ID NO: 21487 - protein, 88 aa, Homo sapiens
LRPRLQGGASEVVTGFAQLTPTAAAASPLHMLATHASASASLPTKRHNGDQPEQPELKRIKTEDGEGIVIALSVDTPPAAVREKGVQN

SEQ ID NO: 21488 - protein, 99 aa, Homo sapiens
VPPGEVTASSRNAAAHKEDWPVPEAGDGGVLMAPAAASPLHMLATHASASASLPTKRHNGDQPEQPELKRIKTEDGEGIVIALSVDTPPAAVREKGVQN

SEQ ID NO: 21489 - protein, 144 aa, Homo sapiens
LHCTQPAGNKNCNCIRERHLIQELRRGSQAANIYCINFNQDASLICVSSDHGTVHIFAAEDPKRNKQSSLASASFLPKYFSSKWSFSKFQVPSGSPCICAFGTEPNAVIAICADGSYYKFLFNPKGECIRDVYAQFLEMTDDKL

SEQ ID NO: 21490 - protein, 126 aa, Homo sapiens
LRLGPYGTTIWTHRVRFLEEQALPRWAAFTIWNAGKQGRRLYRSLTAGSQRKVVAFCDVDENKIRKGFYCHEDSQERPKPRIPILHFRAARPPFVICVKLDLTGGAFEDNLRSLHLQEGQDFLHFS

SEQ ID NO: 21491 - protein, 25 aa, Homo sapiens
VAGRMFEDNLRSLHLQEGQDFLHFS

SEQ ID NO: 21492 - protein, 56 aa, Homo sapiens
LLLVPVPLPPSSGPALLRRRLPPRPAMPLYSETGWSRTPDLMIRPPRPPKVLGLQA

SEQ ID NO: 21493 - protein, 206 aa, Homo sapiens
LACLRPAAPLRLPPSPARRAMPVAGSELPRRPLPPAAQERDAEPRPPHGELQYLGQIQHILRCGVRKDDRTGTGTLSVFGMQARYSLRDEFPLLTTKRVFWKGVLEELLWFIKGSTNAKELSSKGVKIWDANGSRDFLDSLGFSTREEGDLGPVYGFQWRHFGAEYRDMESDYSGQGVDQLQRVIDTIKTNPDDRRIIMCAWNPRG

SEQ ID NO: 21494 - protein, 333 aa, Homo sapiens
LACLRPAAPLRLPPSPARRAMPVAGSELPRRPLPPAAQERDAEPRPPHGELQYLGQIQHILRCGVRKDDRTGTGTLSVFGMQARYSLRDEFPLLTTKRVFWKGVLEELLWFIKGSTNAKELSSKGVKIWDANGSRDFLDSLGFSTREEGDLGPVYGFQWRHFGAEYRDMESDYSGQGVDQLQRVIDTIKTNPDDRRIIMCAWNPRDLPLMALPPCHALCQFYVVNSELSCQLYQRSGDMGLGVPFNIASYALLTYMIAHITGLKPGDFIHTLGDAHIYLNHIEPLKIQLQREPRPFPKLRILRKVEKIDDFKAEDFQIEGYNPHPTIKMEMAV

SEQ ID NO: 21495 - protein, 146 aa, Homo sapiens
LRPARGQAQAALPNPPALGKRCPMTPASGATASLGRLRARPRSRWDAAYLPAVAAVCVARASHVPNGTLRFGVCKARRTMRPLPRRIEVRTKRGPQRPAAPERSPQPRLPPSRHPSRRGPRRHLSGCSAPACRIPTGCRCPCGRPS

SEQ ID NO: 21496 - protein, 169 aa, Homo sapiens
VGQVTCADYSGQGVDQLQRVIDTIKTNPDDRRIIMCAWNPRDLPLMALPPCHALCQFYVVNSELSCQLYQRSGDMGLGVPFNIASYALLTYMIAHITGLKPGDFIHTLGDAHIYLNHIEPLKIQLQREPRPFPKLRILRKVEKIDDFKAEDFQIEGYNPHPTIKMEMAV

SEQ ID NO: 21497 - protein, 85 aa, Homo sapiens
LRASCVMTSAPAENFKFERLWRAEEGPGVLMTAVLSSRYLHGLQKFGPWVVSGNWKKGHKHEAQFSFQRWCWPPLHAGVKIPGCK

SEQ ID NO: 21498 - protein, 670 aa, Homo sapiens
LSCLADTCTVYRNSVPGSCQETGKKVISMKRSSVSSGGAGRLSMQELRSQDVNKQGLYTPQTKEKPTFGKLSINKPTSERKVSLFGKRTSGHGSRNSQLGIFSSSEKIKDPRPLNDKAFIQQCIRQLCEFLTENGYAHNVSMKSLQAPSVKDFLKIFTFLYGFLCPSYELPDTKFEEEVPRIFKDLGYPFALSKSSMYTVGAPHTWPHIVAALVWLIDCIKIHTAMKESSPLFDDGQPWGEETEDGIMHNKLFLDYTIKCYESFMSGADSFDEMNAELQSKLKDLFNVDAFKLESLEAKNRALNEQIARLEQEREKEPNRLESLRKLKASLQGDVQKYQAYMSNLESHSAILDQKLNGLNEEIARVELECETIKQENTRLQNIIDNQKYSVADIERINHERNELQQTINKLTKDLEAEQQKLWNEELKYARGKEAIETQLAEYHKLARKLKLIPKGAENSKGYDFEIKFNPEAGANCLVKYRAQVYVPLKELLNETEEEINKALNKKMGLEDTLEQLNAMITESKRSVRTLKEEVQKLDDLYQQKIKEAEEEDEKCASELESLEKHKHLLESTVNQGLSEAMNELDAVQREYQLVVQTTTEERRKVGNNLQRLLEMVATHVGSVEKHLEEQIAKVDREYEECMSEDLSENIKEIRDKYEKKATLIKSSEE

SEQ ID NO: 21499 - protein, 31 aa, Homo sapiens
MYTVGAPHTWPHIVAALVWLIDCIKVFDLFF

SEQ ID NO: 21500 - protein, 47 aa, Homo sapiens
VKAGIQVDSDKSESQEVNSTLILQMHASRAWQEGTQVSRSGLSWFSY

SEQ ID NO: 21501 - protein, 29 aa, Homo sapiens
LPELDHARPPTPCKNNRSRMRRLIKEEAS

SEQ ID NO: 21502 - protein, 66 aa, Homo sapiens
VKPPAPALPRVRTGEGGVATGKEEGGARFRACPRRQGGDPLSSALLPFPLPRARSRMRRLIKEEAS

SEQ ID NO: 21503 - protein, 19 aa, Homo sapiens
LRRPCLGSRMRRLIKEEAS

SEQ ID NO: 21504 - protein, 258 aa, Homo sapiens
LEIIRKALTEEKRVSTKTSAADLVTETDHLVEDLIISELRERFPSHRFIAEEAAASGAKCVLTHSPTWIIDPIDGTCNFVHRFPTVAVSIGFAVRQELEFGVIYHCTEERLYTGRRGRGAFCNGQRLRVSGETDLSKALVLTEIGPKRDPATLKLFLSNMERLLHAKAHGVRVIGSSTLALCHLASGAADAYYQFGLHCWDLAAATVIIREAGGIVIDTSGGPLDLMACRVVAASTREMAMLIAQALQTINYGRDDEK

SEQ ID NO: 21505 - protein, 173 aa, Homo sapiens
LEVEGPGEAAMKPSGEDQAALAAGPWEECFQAAVQLALRAGQIIRKALTEEKRVSTKTSAADLVTETDHLVEDLIISELRERFPSHRFIAEEAAASGAKCVLTHSPTWIIDPIDGTCNFVHRFPTVAVSIGFAVRQEVRVWPRSPGPLPGLPLAILPFWLQPLCAWFAVCPVP

SEQ ID NO: 21506 - protein, 126 aa, Homo sapiens
LEVEGPGEAAMKPSGEDQAALAAGPWEECFQAAVQLALRAGQIIRKALTEEKRVSTKTSAADLVTETDHLVEDLIISELRERFPSHRFIAEEAAASGAKCVLTHSPTWIIDPIDGTCNFVHSLNSE

SEQ ID NO: 21507 - protein, 298 aa, Homo sapiens
LEVEGPGEAAMKPSGEDQAALAAGPWEECFQAAVQLALRAGQIIRKALTEEKRVSTKTSAADLVTETDHLVEDLIISELRERFPSHRFIAEEAAASGAKCVLTHSPTWIIDPIDGTCNFVHRFPTVAVSIGFAVRQELEFGVIYHCTEERLYTGRRGRGAFCNGQRLRVSGETDLSKALVLTEIGPKRDPATLKLFLSNMERLLHAKAHGVRVIGSSTLALCHLASGAADAYYQFGLHCWDLAAATVIIREAGGIVIDTSGGPLDLMACRVVAASTREMAMLIAQALQTINYGRDDEK

SEQ ID NO: 21508 - protein, 184 aa, Homo sapiens
VCAHPQPDVDHRPHRRHLQFCAQLEFGVIYHCTEERLYTGRRGRGAFCNGQRLRVSGETDLSKALVLTEIGPKRDPATLKLFLSNMERLLHAKAHGVRVIGSSTLALCHLASGAADAYYQFGLHCWDLAAATVIIREAGGIVIDTSGGPLDLMACRVVAASTREMAMLIAQALQTINYGRDDEK

SEQ ID NO: 21509 - protein, 185 aa, Homo sapiens
LASASVRLVCCLPCALIMTGKSKPLEFGVIYHCTEERLYTGRRGRGAFCNGQRLRVSGETDLSKALVLTEIGPKRDPATLKLFLSNMERLLHAKAHGVRVIGSSTLALCHLASGAADAYYQFGLHCWDLAAATVIIREAGGIVIDTSGGPLDLMACRVVAASTREMAMLIAQALQTINYGRDDEK

SEQ ID NO: 21510 - protein, 24 aa, Homo sapiens
LQSVSVRLKDSVCCRTQRVTAPLG

SEQ ID NO: 21511 - protein, 909 aa, Homo sapiens
VWSILSKMNISGSSCGSPNSADTSSDFKDLWTKLKECHDREVQGLQVKVTKLKQERILDAQRLEEFFTKNQQLREQQKVLHETIKVLEDRLRAGLCDRCAVTEEHMRKKQQEFENIRQQNLKLITELMNERNTLQEENKKLSEQLQQKIENDQQHQAAELECEEDVIPDSPITAFSFSGVNRLRRKENPHVRYIEQTHTKLEHSVCANEMRKVSKSSTHPQHNPNENEILVADTYDQSQSPMAKAHGTSSYTPDKSSFNLATVVAETLGLGVQEESETQGPMSPLGDELYHCLEGNHKKQPFEESTRNTEDSLRFSDSTSKTPPQEELPTRVSSPVFGATSSIKSGLDLNTSLSPSLLQPGKKKHLKTLPFSNTCISRLEKTRSKSEDSALFTHHSLGSEVNKIIIQSSNKQILINKNISESLGEQNRTEYGKDSNTDKHLEPLKSLGGRTSKRKKTEEESEHEVSCPQASFDKENAFPFPMDNQFSMNGDCVMDKPLDLSDRFSAIQRQEKSQGSETSKNKFRQVTLYEALKTIPKGFSSSRKASDGNCTLPKDSPGEPCSQECIILQPLNKCSPDNKPSLQIKEENAVFKIPLRPRESLETENVLDDIKSAGSHEPIKIQTRSDHGGCELASVLQLNPCRTGKIKSLQNNQDVSFENIQWSIDPGADLSQYKMDVTVIDTKDGSQSKLGGETVDMDCTLVSETVLLKMKKQEQKGEKSSMLFYIDEERKMNDSLEDMFDRTTHEEYESCLADSFSQAADEEEELSTATKKLHTHGDKQDKVKQKAFVEPYFKGDERETSLQNFPHIEVVRKKEERRKLLGHTCKECEIYYADMPAEEREKKLASCSRHRFRYIPPNTPENFWEVGFPSTQTCMERGYIKEDLDPCPRPKRRQPYNAIFSPKGKEQKT

SEQ ID NO: 21512 - protein, 874 aa, Homo sapiens
VWSILSKMNISGSSCGSPNSADTSSDFKDLWTKLKECHDREVQGLQVKVTKLKQERILDAQRLEEFFTKNQQLREQQKVLHETIKVLEDRLRAGLCDRCAVTEEHMRKKQQEFENIRQQNLKLITELMNERNTLQEENKKLSEQLQQKIENDQQHQAAELECEEDVIPDSPITAFSFSGVNRLRRKENPHVRYIEQTHTKLEHSVCANEMRKVSKSSTHPQHNPNENEILVADTYDQSQSPMAKAHGTSSYTPDKSSFNLATVVAETLGLGVQEESETQGPMSPLGDELYHCLEGNHKKQPFEESTRNTEDSLRFSDSTSKTPPQEELPTRVSSPVFGATSSIKSGLDLNTSLSPSLLQPGKKKHLKTLPFSNTCISRLEKTRSKSEDSALFTHHSLGSEVNKIIIQSSNKQILINKNISESLGEQNRTEYGKDSNTDKHLEPLKSLGGRTSKRKKTEEESEHEVSCPQASFDKENAFPFPMDNQFSMNGDCVMDKPLDLSDRFSAIQRQEKSQGSETSKNKFRQVTLYEALKTIPKGFSSSRKASDGNCTLPKDSPGEPCSQECIILQPLNKCSPDNKPSLQIKEENAVFKIPLRPRESLETENVLDDIKSAGSHEPIKIQTRSDHGGCELASVLQLNPCRTGKIKSLQNNQDVSFENIQWSIDPGADLSQYKMDVTVIDTKDGSQSKLGGETVDMDCTLVSETVLLKMKKQEQKGEKSSNEERKMNDSLEDMFDRTTHEEYESCLADSFSQAADEEEELSTATKKLHTHGDKQDKVKQKAFVEPYFKGDESIMQICQQKKEKRNWLPAQDTDSATFHPTHQRIFGKLVFLPLRLVWKEVILRKILILVLVQKDVSLTTQYFLQKARSRRHRR

SEQ ID NO: 21513 - protein, 378 aa, Homo sapiens
LSTLVPVYEGEEIIIYKNLQGDQGKRVRRLISQRSSLETLEDIEENAPLRRCRTLSGSPRPKNFKKIHFIKNMRQHDTRNGRIVLISGRRSFCSIFSVLPYRDSTQVGDLKLDGGRQSTGAVSLKEIIGLEGVELGADGKTVSYTQFLLPTNAFGARRNTIDSTSSFSQFRNLSHRSLSIGRASGTQGSLDTGSDLGDFMDYDPNLLDDPQWPCGKHKRVLIFPSYMTTVIDYVKPSDLKKDMNETFKEKFPHIKLTLSKIRSLKREMRKLAQEDCGLEEPTVAMAFVYFEKLALKGKLNKQNRKLCAGACVLLAAKIGSDLKKHEVKHLIDKLEEKFRLNRRELIAFEFPVLVALEFALHLPEHEVMPHYRRLVQSS

SEQ ID NO: 21514 - protein, 52 aa, Homo sapiens
LPCSGRPSLTSLLRPPRLSPAMLWNPNRTGVGCRAPSLPSPLLPEPQRQSCR

SEQ ID NO: 21515 - protein, 625 aa, Homo sapiens
LPLSPWGMPAGLTEPAGAAPPAAVSASGTVTMAPAGALPVRVESTPVALGAVTKAPVSVCVEPTASQPLRSPVGTLVTKVAPVSAPPKVSSGPRLPAPQIVAVKAPNTTTIQFPANLQLPPGTVLIKSNSGPLMLVSPQQTVTRAETTSNITSRPAVPANPQTVKICTVPNSSSQLIKKVAVTPVKKLAQIGTTVVTTVPKPSSVQSVAVPTSVVTVTPGKPLNTVTTLKPSSLGASSTPSNEPNLKAENSAAVQINLSPTMLENVKKCKNFLAMLIKLACSGSQSPEMGQNVKKLVEQLLDAKIEAEEFTRKLYVELKSSPQPHLVPFLKKSVVALRQLLPNSQSFIQQCVQQTSSDMVIATCTTTVTTSPVVTTTVSSSQSEKSIIVSGATAPRTVSVQTLNPLAGPVGAKAGVVTLHSVGPTAATGGTTAGTGLLQTSKPLVTSVANTVTTVSLQPEKPVVSGTAVTLSLPAVTFGETSGAAICLPSVKPVVSSAGTTSDKPVIGTPVQIKLAQPGPVLSQPAGIPQAVQVKQLVVQQPSGGNEKQVTTISHSSTLTIQKCGQKTMPVNTIIPTSQFPPASILKQITLPGNKILSLQASPTQKNRIKENVTSCFRSTFICVY

SEQ ID NO: 21516 - protein, 275 aa, Homo sapiens
LSCSVISWLDEVHLLVNSSGKAHRDEDDINDVTSMAGVNLNEENACILATNSELVGTLIQSCKDEPFLFIGALQKRILDIGKKHDITELNSDAVNLISQATQERLRGLLEKLTAIAQHRMTTYKASENYILCSDTRSQLKFLEKLDQLEKQRKDLEEREMLLKAAKSRSNKEDPEQLRLKQKAKELQQLELAQIQHRDANLTALAAIGPRKKRPLESGIEGLKDNLLASGTSSLTATKQLHRPRITRICLRDLIFCMEQEREMKYSRALYLALLK

SEQ ID NO: 21517 - protein, 42 aa, Homo sapiens
LGAAAEVASGLRELGELGGGDRSWAGTSFLHRTATKQPCGRH

SEQ ID NO: 21518 - protein, 651 aa, Homo sapiens
LTLQLVENRLEEGLKPGAPSQLAMSRSGDRTSTFDPSHSDNLLHGLNLLWRKQLFCDVTLTAQGQQFHCHKAVLASCSQYFRSLFSSHPPLGGGVGGQDGLGAPKDQQQPPQQQPSQQQQPPPQEEPGTPSSSPDDKLLTSPRAINNLVLQGCSSIGLRLVLEYLYTANVTLSLDTVEEVLSVSKILHIPQVTKLCVQFLNDQISVQNYKQVCKIAALHGLEETKKLANKYLVEDVLLLNFEEMRALLDSLPPPVESELALFQMSVLWLEHDRETRMQYAPDLMKRLRFALIPAPELVERVQSVDFMRTDPVCQKLLLDAMNYHLMPFRQHCRQSLASRIRSNKKMLLLVGGLPPGPDRLPSNLVQYYDDEKKTWKILTIMPYNSAHHCVVEVENFLFVLGGEDQWNPNGKHSTNFVSRYDPRFNSWIQLPPMQERRASFYACRLDKHLYVIGGRNETGYLSSVECYNLETNEWRYVSSLPQPLAAHAGAVHNGKIYISGGVHNGEYVPWLYCYDPVMDVWARKQDMNTKRAIHTLAVMNDRLYAIGGNHLKGFSHLDVMLVECYDPKGDQWNILQTPILEGRSGPGCAVLDDSIYLVGGYSWSMGAYKSSTICYCPEKGTWTELEGDVAEPLAGPACVTVILPSCVPYNK

SEQ ID NO: 21519 - protein, 204 aa, Homo sapiens
LEKLTLGITRILESSPGVTEVTIIEKPPAERHMISSWEQKNNCVMPEDVKNFYLMTNGFHMTWSVKLDEHIIPLGSMAINSISKLTQLTQSSMYSLPNAPTLADLEDDTHEASDDQPEKPHFDSRSVIFELDSCNGSGKVCLVYKSGKPALAEDTEIWFLDRALYWHFLTDTFTAYYRLLITHLGLPQWQYAFTSYGISPQAKV

SEQ ID NO: 21520 - protein, 90 aa, Homo sapiens
MEEEASSPGLGCSKPHLEKLTLGITRILESSPGVTEVTIIEKPPAERHMISSWEQKNNCVMPEDVKNFYLMTNGFHMTWSVKLDGESASL

SEQ ID NO: 21521 - protein, 38 aa, Homo sapiens
VAPSIPSEEEGTKGPGPPGSDGAGPGATLQVRYKRLFS

SEQ ID NO: 21522 - protein, 92 aa, Homo sapiens
VLGLVPFLLRSLRLPYPPRAAFGRRASRPNGRLEAPISGRQGASPGAAPANRRGPRPRVAGGSTRAAAAAEKQLASQQPASRREVRYKRLFS

SEQ ID NO: 21523 - protein, 255 aa, Homo sapiens
LSRPLIISIKAASQPFGMCGLSFMLFRACLKMDLGVFICVFISFSPLFKSTADCPDAVPSSAETGGTNYLAPGGLSDSQLLLEPGDRSHWCVVAYWEEKTRVGRLYCVQEPSLDIFYDLPQGNGFCLGQLNSDNKSQLVQKVRSKIGCGIQLTREVDGVWVYNRSSYPIFIKSATLDNPDSRTLLVHKVFPGFSIKAFDYEKAYSLQRPNDHEFMQQPWTGFTVQISFVKGWGQCYTRQFISSCPCWLEVIFNSR

SEQ ID NO: 21524 - protein, 241 aa, Homo sapiens
VAAHLWSFGAKRVGWKAELESPPPPYSRYPMDFLKPTADCPDAVPSSAETGGTNYLAPGGLSDSQLLLEPGDRSHWCVVAYWEEKTRVGRLYCVQEPSLDIFYDLPQGNGFCLGQLNSDNKSQLVQKVRSKIGCGIQLTREVDGVWVYNRSSYPIFIKSATLDNPDSRTLLVHKVFPGFSIKAFDYEKAYSLQRPNDHEFMQQPWTGFTVQISFVKGWGQCYTRQFISSCPCWLEVIFNSR

SEQ ID NO: 21525 - protein, 511 aa, Homo sapiens
VGQPERRPPIPGGRPRAPARAPASGRLAHATERPSGRRRSCPGPCCCCCRLRLLPQLGARLLHGVRRSCSLLSRQTTFLLASSPRMFRTKRSALVRRLWRSRAPGGEDEEEGAGGGGGGGELRGEGATDSRAHGAGGGGPGRAGCCLGKAVRGAKGHHHPHPPAAGAGAAGGAEADLKALTHSVLKKLKERQLELLLQAVESRGGTRTACLLLPGRLDCRLGPGAPAGAQPAQPPSSYSLPLLLCKVFRWPDLRHSSEVKRLCCCESYGKINPELVCCNPHHLSRLCELESPPPPYSRYPMDFLKPTADCPDAVPSSAETGGTNYLAPGGLSDSQLLLEPGDRSHWCVVAYWEEKTRVGRLYCVQEPSLDIFYDLPQGNGFCLGQLNSDNKSQLVQKVRSKIGCGIQLTREVDGVWVYNRSSYPIFIKSATLDNPDSRTLLVHKVFPGFSIKAFDYEKAYSLQRPNDHEFMQQPWTGFTVQISFVKGWGQCYTRQFISSCPCWLEVIFNSR

SEQ ID NO: 21526 - protein, 31 aa, Homo sapiens
MVRYSLDPENPTKSCKSRGSNLRVHFKVCDS

SEQ ID NO: 21527 - protein, 18 aa, Homo sapiens
MSSPKIHRSSSFPKQPEG

SEQ ID NO: 21528 - protein, 32 aa, Homo sapiens
MASSDLEQLCSHVNEKIGNIKKTLSLRNCGTL

SEQ ID NO: 21529 - protein, 72 aa, Homo sapiens
MGESLHQVKETMFIFFQVTEYLYANKMAFRYPEPEDKAKYVKERTWRSEYDSLLPDVYEWPESASSPPVITE

SEQ ID NO: 21530 - protein, 59 aa, Homo sapiens
LGLQVTEYLYANKMAFRYPEPEDKAKYVKERTWRSEYDSLLPDVYEWPESASSPPVITE

SEQ ID NO: 21531 - protein, 105 aa, Homo sapiens
LASPRVRTPDPSIPACRTVRVQLASCSCPRCSSWRLRFPGSVAEWAAAPAEMPGKKARKNAQPSPARAPAELEVECATQLRRFGDKLNFRQKLLNLISKLFCSGT

SEQ ID NO: 21532 - protein, 19 aa, Homo sapiens
LKTPPRPRMQSTSNKIAGL

SEQ ID NO: 21533 - protein, 18 aa, Homo sapiens
LGIDLEILLIFTPSPRDS

SEQ ID NO: 21534 - protein, 15 aa, Homo sapiens
LAMLKPEKEDTTDNI

SEQ ID NO: 21535 - protein, 314 aa, Homo sapiens
LRTLTQRFVGVNASDINYSAGRYDPSVKPPFDIGFEGIGEVVALGLSASARYTVGQAVAYMAPGSFAEYTVVPASIATPVPSVKPEYLTLLVSGTTAYISLKELGGLSEGKKVLVTAAAGGTGQFAMQLSKKAKCHVIGTCSSDEKSAFLKSLGCDRPINYKTEPVGTVLKQEYPEGVDVVYESVGGAMFDLAVDALATKGRLIVIGFISGYQTPTGLSPVKAGTLPAKLLKKSASVQGFFLNHYLSKYQAAMSHLLEMCVSGDLVCEVDLGDLSPEGRFTGLESIFRAVNYMYMGKNTGKIVVELPHSVNSKL

SEQ ID NO: 21536 - protein, 106 aa, Homo sapiens
LGARPSLGAAAVSHRRRAPERSSLRPRRPLSPDPGRRSRLPGDPARGRLKPRPACPGLGRRSRALDPAAPLGLGATSAAPPLKSQSIQDGKPRRQTRIKCREGQYE

SEQ ID NO: 21537 - protein, 28 aa, Homo sapiens
VQPLKSQSIQDGKPRRQTRIKCREGQYE

SEQ ID NO: 21538 - protein, 108 aa, Homo sapiens
LSPDPGRRSRLPGDPARGRLKPRPACPGLGRRSRALDPAAPLGLGATSAAPPLKSQSIQDGKPRRQTRIKCREGQYGHRPEQQHPAEKSVSGIFCYAEEMESSQVTDS

SEQ ID NO: 21539 - protein, 9 aa, Homo sapiens
MTFLRGARR

SEQ ID NO: 21540 - protein, 719 aa, Homo sapiens
LAAATPAPAPAPARPAMTGLEDQEFDFEFLFEFNQRDEGAAAAAPEHYGYASSNVSPALPLPTAHSTLPAPCHNLQTSTPGIIPPADHPSGYGAALDGGPAGYFLSSGHTRPDGAPALESPRIEITSCLGLYHNNNQFFHDVEVEDVLPSSKRSPSTATLSLPSLEAYRDPSCLSPASSLSSRSCNSEASSYESNYSYPYASPQTSPWQSPCVSPKTTDPEEGFPRGLGACTLLGSPRHSPSTSPRASVTEESWLGARSSRPASPCNKRKYSLNGRQPPYSPHHSPTPSPHGSPRVSVTDDSWLGNTTQYTSSAIVAAINALTTDSSLDLGDGVPVKSRKTTLEQPPSVALKVEPVGEDLGSPPPPADFAPEDYSSFQHIRKGGFCDQYLAVPQHPYQWAKPKPLSPTSYMSPTLPALDWQLPSHSGPYELRIEVQPKSHHRAHYETEGSRGAVKASAGGHPIVQLHGYLENEPLMLQLFIGTADDRLLRPHAFYQVHRITGKTVSTTSHEAILSNTKVLEIPLLPENSMRAVIDCAGILKLRNSDIELRKGETDIGRKNTRVRLVFRVHVPQPSGRTLSLQVASNPIECSQRSAQELPLVEKQSTDSYPVVGGKKMVLSGHNFLQDSKVIFVEKAPDGHHVWEMEAKTDRDLCKPNSLVVEIPPFRNQRITSPVHVSFYVCNGKRKRSQYQRFTYLPANGNAIFLTVSREHERVGCFF

SEQ ID NO: 21541 - protein, 828 aa, Homo sapiens
LAAATPAPAPAPARPAMTGLEDQEFDFEFLFEFNQRDEGAAAAAPEHYGYASSNVSPALPLPTAHSTLPAPCHNLQTSTPGIIPPADHPSGYGAALDGGPAGYFLSSGHTRPDGAPALESPRIEITSCLGLYHNNNQFFHDVEVEDVLPSSKRSPSTATLSLPSLEAYRDPSCLSPASSLSSRSCNSEASSYESNYSYPYASPQTSPWQSPCVSPKTTDPEEGFPRGLGACTLLGSPRHSPSTSPRASVTEESWLGARSSRPASPCNKRKYSLNGRQPPYSPHHSPTPSPHGSPRVSVTDDSWLGNTTQYTSSAIVAAINALTTDSSLDLGDGVPVKSRKTTLEQPPSVALKVEPVGEDLGSPPPPADFAPEDYSSFQHIRKGGFCDQYLAVPQHPYQWAKPKPLSPTSYMSPTLPALDWQLPSHSGPYELRIEVQPKSHHRAHYETEGSRGAVKASAGGHPIVQLHGYLENEPLMLQLFIGTADDRLLRPHAFYQVHRITGKTVSTTSHEAILSNTKVLEIPLLPENSMRAVIDCAGILKLRNSDIELRKGETDIGRKNTRVRLVFRVHVPQPSGRTLSLQVASNPIECSQRSAQELPLVEKQSTDSYPVVGGKKMVLSGHNFLQDSKVIFVEKAPDGHHVWEMEAKTDRDLCKPNSLVVEIPPFRNQRITSPVHVSFYVCNGKRKRSQYQRFTYLPANVPIIKTEPTDDYEPAPTCGPVSQGLSPLPRPYYSQQLAMPPDPSSCLVAGFPPCPQRSTLMPAAPGVSPKLHDLSPAAYTKGVASPGHCHLGLPQPAGEAPAVQDVPRPVATHPGSPGQPPPALLPQQ

SEQ ID NO: 21542 - protein, 946 aa, Homo sapiens
LAAATPAPAPAPARPAMTGLEDQEFDFEFLFEFNQRDEGAAAAAPEHYGYASSNVSPALPLPTAHSTLPAPCHNLQTSTPGIIPPADHPSGYGAALDGGPAGYFLSSGHTRPDGAPALESPRIEITSCLGLYHNNNQFFHDVEVEDVLPSSKRSPSTATLSLPSLEAYRDPSCLSPASSLSSRSCNSEASSYESNYSYPYASPQTSPWQSPCVSPKTTDPEEGFPRGLGACTLLGSPRHSPSTSPRASVTEESWLGARSSRPASPCNKRKYSLNGRQPPYSPHHSPTPSPHGSPRVSVTDDSWLGNTTQYTSSAIVAAINALTTDSSLDLGDGVPVKSRKTTLEQPPSVALKVEPVGEDLGSPPPPADFAPEDYSSFQHIRKGGFCDQYLAVPQHPYQWAKPKPLSPTSYMSPTLPALDWQLPSHSGPYELRIEVQPKSHHRAHYETEGSRGAVKASAGGHPIVQLHGYLENEPLMLQLFIGTADDRLLRPHAFYQVHRITGKTVSTTSHEAILSNTKVLEIPLLPENSMRAVIDCAGILKLRNSDIELRKGETDIGRKNTRVRLVFRVHVPQPSGRTLSLQVASNPIECSQRSAQELPLVEKQSTDSYPVVGGKKMVLSGHNFLQDSKVIFVEKAPDGHHVWEMEAKTDRDLCKPNSLVVEIPPFRNQRITSPVHVSFYVCNGKRKRSQYQRFTYLPANVPIIKTEPTDDYEPAPTCGPVSQGLSPLPRPYYSQQLAMPPDPSSCLVAGFPPCPQRSTLMPAAPGVSPKLHDLSPAAYTKGVASPGHCHLGLPQPAGEAPAVQDVPRPVATHPGSPGQPPPALLPQQVSAPPSSSCPPGLEHSLCPSSPSPPLPPATQEPTCLQPCSPACPPATGRPQHLPSTVRRDESPTAGPRLLPEVHEDGSPNLAPIPVTVKREPEELDQLYLDDVNEIIRNDLSSTSTHS

SEQ ID NO: 21543 - protein, 118 aa, Homo sapiens
LSLQVASNPIECSQRSAQELPLVEKQSTDSYPVVGGKKMVLSGHNFLQDSKVIFVEKAPGMLFTRGHLRPGLRRWWEPVPSRWSRTHLCTVTGTGLMGCGTEQRLCVARVCIRLWVFV

SEQ ID NO: 21544 - protein, 56 aa, Homo sapiens
LSPRTPAAGRRGPRRPGRAQASGHAPRLARAATPGPAATAVNEIIRNDLSSTSTHS

SEQ ID NO: 21545 - protein, 54 aa, Homo sapiens
LRMIERACVPPSNVVTVADGGYRVMDGAADSAVQIIHRVNEIIRNDLSSTSTHS

SEQ ID NO: 21546 - protein, 37 aa, Homo sapiens
LPRQPGTGSRHSWTRVGPRRKLNEIIRNDLSSTSTHS

SEQ ID NO: 21547 - protein, 9 aa, Homo sapiens
MLTSADKDF

SEQ ID NO: 21548 - protein, 9 aa, Homo sapiens
MTTEGRWPG

SEQ ID NO: 21549 - protein, 82 aa, Homo sapiens
LLQDSLHLHVCTYLGIYLCINNNRADVSSPRRASLSAITGIRFGTCVWGSSRCSCWRPSPPRTAVHFLVSRSSRRTLESQEL

SEQ ID NO: 21550 - protein, 123 aa, Homo sapiens
LDLKWRGLSAGPGCWSLGGPVSSPPFRSPPLCHRKGLTFVSVHDCYWTHAADVSVMNQVCREQFVRLHSEPILQDLSRFLVKRFCSEPQKILEASQLKETLQAVPKPGAFDLEQVKRSTYFFS

SEQ ID NO: 21551 - protein, 264 aa, Homo sapiens
LGQCLSHSGFTMHSWERLAVLVLLGAAACAAPPRGRILGGREAEAHARPYMASVQLNGAHLCGGVLVAEQWVLSAAHCLEDAADGKVQVLLGAHSLSQPEPSKRLYDVLRAVPHPDSQPDTIDHDLLLLQLSEKATLGPAVRPLPWQRVDRDVAPGTLCDVAGWGIVNHAGRRPDSLQHVLLPVLDRATCNRRTHHDGAITERLMCAESNRRDSCKGDSGGPLVCGGVLEGVVTSGSRVCGNRKKPGIYTRVASYAAWIDSVLA

SEQ ID NO: 21552 - protein, 444 aa, Homo sapiens [sequence omitted]

SEQ ID NO: 21553 - protein, 95 aa, Homo sapiens
LGLQVGMTAPGTRRHIYDTKLGTDKCDNSSMSLQMGYTQGANQSGQVFGLGRQIYDPKYCPQGTVADGAPSGTGDCPDPGEVPEYPPYYQEEAGY

SEQ ID NO: 21554 - protein, 90 aa, Homo sapiens
LPAAGRREGGKSCGAPGRASRNPALWDKGMRFRKGQGVARSRTARLQPDRCPDLSVPSPAQSHHGLLDTADAAALEEFHVSPETAGNAPV

SEQ ID NO: 21555 - protein, 115 aa, Homo sapiens
LPAAGRREGGKSCGAPGRASRNPALWDKGMRFRKGQGVARSRTARLQPDRCPDLSVPSPAQSHHGLLDTADAAALEEFHVSPETAGPAPGRIAVASLPLLHPGGCSPLPPAPGAP

SEQ ID NO: 21556 - protein, 89 aa, Homo sapiens
LWDKGMRFRKGQGVARSRTARLQPDRCPDLSVPSPAQSHHGLLDTADAAALEEFHVSPETAAPGRIAVASLPLLHPGGCSPLPPAPGAP

SEQ ID NO: 21557 - protein, 44 aa, Homo sapiens
MFSRKKRELMKTPSISKKNRAGSPSPQPSGVPRHACPEEQLQRE

SEQ ID NO: 21558 - protein, 39 aa, Homo sapiens
MLKKPQRRRYGLLANTEDPTEMASLDSDEETVFESRNLR

SEQ ID NO: 21559 - protein, 63 aa, Homo sapiens [sequence omitted]

SEQ ID NO: 21560 - protein, 233 aa, Homo sapiens
MTPRSRGPEVEVKRAEPRDSKSQAPGQPGASQWGSRVVPNAANGWAGQPPPTWQQGYGPQGMWVPAGQAIGGYGPPPAGRGAPPPPPPFTSYIVSTPPGGFPPPQGFPQGYGAPPQFSFGYGPPPPPPDQFAPPGVPPPPATPGAAPLAFPPPPSQAAPDMSKPPTAQPDFPYGQYGYGQDLSGFGQGFSDPSQQPPSYGGPSVPGSGGPPAGGSGFGRGQNHNVQGFHPYRR

SEQ ID NO: 21561 - protein, 84 aa, Homo sapiens
LCPGGLARRQCQPPRDRPELTGLSPPAGYGQDLSGFGQGFSDPSQQPPSYGGPSVPGSGGPPAGGSGFGRGQNHNVQGFHPYRR

SEQ ID NO: 21562 - protein, 31 aa, Homo sapiens
MAEVEQKKKRTFRKFTYRGVDLDQLLDMSYA

SEQ ID NO: 21563 - protein, 30 aa, Homo sapiens
MAEVEQKKKRTFRKFTYRGVDLDQLLDMSY

SEQ ID NO: 21564 - protein, 221 aa, Homo sapiens
MGEKSRRKGPAPRHADGKLGRTCDHPYAPWSFTPSSRAPTAWVRPPCPVWASRLQEHSPEPRRARAPPTRRAQAALYAPALRLRDHLDRFSILMTSCTSWLQAPQAPGLCRDEQSSRISVPQLSGAPILLPDLEGTKLSNFQESSPLPHKHERKDKRSTPEEEGRSAPEKIIQSLKLCPGGHRPASLSSGCPAGCRLSFNLPPSMLLSVQKCCMPSSLKTC

SEQ ID NO: 21565 - protein, 276 aa, Homo sapiens
VQSARRMARTRPAAGVPEPAGPTLRERPPRTVGVLAGAGDTRGAGKAGGHPGPAPPEAPRRRGAPRPDCISFLPQGKPDLNTALPVRQTASIFKQPVTKITNHPSNKVKSDPQKAVDQPRQLFWEKKLSGLNAFDIAEELVKTMDLPKGLQGVGPGCTDETLLSAIASALHTSTMPITGQLSAAVEKNPGVWLNTTQPLCKAFMVTDEDIRKQEELVQQVRKRLEEALMADMLAHVEELARDGEAPLDKACAEDDDEEDEEEEEEEPDPDPEMEHV

SEQ ID NO: 21566 - protein, 342 aa, Homo sapiens
VLWVWLAPRSRGQLWGAGVWDEGLGSRQGWGLGLGPGPAWVWGQGRVGVWGWGRDLKLGLGLGLGLRPRPGFGVWGPPGAPTVPPPRSPSGKKFRSKPQLARYLGGSMDLSTFDFRTGKMLMSKMNKSRQRVRYDSSNQVKGKPDLNTALPVRQTASIFKQPVTKITNHPSNKVKSDPQKAVDQPRQLFWEKKLSGLNAFDIAEELVKTMDLPKGLQGVGPGCTDETLLSAIASALHTSTMPITGQLSAAVEKNPGVWLNTTQPLCKAFMVTDEDIRKQEELVQQVRKRLEEALMADMLAHVEELARDGEAPLDKACAEDDDEEDEEEEEEEPDPDPEMEHV

SEQ ID NO: 21567 - protein, 257 aa, Homo sapiens
LLCPSGKKFRSKPQLARYLGGSMDLSTFDFRTGKMLMSKMNKSRQRVRYDSSNQVKGKPDLNTALPVRQTASIFKQPVTKITNHPSNKVKSDPQKAVDQPRQLFWEKKLSGLNAFDIAEELVKTMDLPKGLQGVGPGCTDETLLSAIASALHTSTMPITGQLSAAVEKNPGVWLNTTQPLCKAFMVTDEDIRKQEELVQQVRKRLEEALMADMLAHVEELARDGEAPLDKACAEDDDEEDEEEEEEEPDPDPEMEHV

SEQ ID NO: 21568 - protein, 237 aa, Homo sapiens
LKLGLGLGLGLRPRPGFGVWGPPGAPTVPPPRSPSGKKFRSKPQLARYLGGSMDLSTFDFRTGKMLMSKMNKSRQRVRYDSSNQVKGKPDLNTALPVRQTASIFKQPVTKITNHPSNKVKSDPQKAVDQPRQLFWEKKLSGLNAFDIAEELVKTMDLPKGLQGVGPGCTDETLLSAIASALHTSTMPITGQLSAAVEKNPGVWLNTTQPLCKAFMVTDEDISRKSWCSRCGSGWRRR

SEQ ID NO: 21569 - protein, 75 aa, Homo sapiens
VVSGGRWDPARYRSGSALPLSGRSHSFPRPRVPRRPVGAAAGSGLRGSARRSMVSGATGRSEGNLARAGDAWAPG

SEQ ID NO: 21570 - protein, 172 aa, Homo sapiens
MLFESIQEGKYEFPDKDWAHISCAAKDLISKLLVRDAKQRLSAAQVLQHPWVQGCAPENTLPTPMVLQRNSCAKDLTSFAAEAIAMNRQLAQHDEDLAEEEAAGQGQPVLVRATSRCLQLSPPSQSKLAQRRQRASLSSAPVVLVGQSLPPPSPPLSHPRATWRTGQNRYCE

SEQ ID NO: 21571 - protein, 397 aa, Homo sapiens
LTLACSAQPALTCPPASPLTSRTPRRGARRRSAAGPPTASRAGLKIIEKQPGHIRSRVFREVEMLYQCQGHRNVLELIEFFEEEDRFYLVFEKMRGGSILSHIHKRRHFNELEASVVVQDVASALDFLHNKGIAHRDLKPENILCEHPNQVSPVKICDFDLGSGIKLNGDCSPISTPELLTPCGSAEYMAPEVVEAFSEEASIYDKRCDLWSLGVILYILLSGYPPFVGRCGSDCGWDRGEACPACQNMLFESIQEGKYEFPDKDWAHISCAAKDLISKLLVRDAKQRLSAAQVLQHPWVQGCAPENTLPTPMVLQRNSCAKDLTSFAAEAIAMNRQLAQHDEDLAEEEAAGQGQPVLVRATSRCLQLSPPSQSKLAQRRQRASLSSAPVVLVGDHA

SEQ ID NO: 21572 - protein, 644 aa, Homo sapiens
MVSNINQPLEITAISSPETSLKSSPVPYQDHDQPPVLKKERPLSQTNGAHYSPLTSDEEPGSEDEPSSARIERKIATISLESKSPPKTLENGGGLAGRKPAPAGEPVNSSKWKSTFSPISDIGLAKSADSPLQASSALSQNSLFTFRPALEEPSADAKLAAHPRKGFPGSLSGADGLSPGTNPANGCTFGGGLAADLSLHSFSDGASLPHKGPEAAGLSSPLSFPSQRGKEGSDANPFLSKRQLDGLAGLKGEGSRGKEAGEGGLPLCGPTDKTPLLSGKAAKARDREVDLKNGHNLFISAAAVPPGSLLSGPGLAPAASSAGGAASSAQTHRSFLGPFPPGPQFALGPMSLQANLGSVAGSSVLQSLFSSVPAAAGLVHVSSAATRLTNSHAMGSFSGVAGGTVGEGHRAQGHQSITFSRGGHLLGVAARALARLWELVLGVFNHAVPSASAHPFGARVGRGAACGSATLGPSPLQAAASASASSFQAPASVETRPPPPPPPPPPPLPPPAHLGRSPAGPPVLHAPPPPNAALPPPPTLLASNPEPALLQSLASLPPNQAFLPPTSAASLPPANASLSIKLTSLPHKGARPSFTVHHQPLPRLALAQAAPGIPQASATGPSAVWVSLGMPPPYAAHLSGVKPR

SEQ ID NO: 21573 - protein, 18 aa, Homo sapiens
VVLRCPSPTPEDPRWARE

SEQ ID NO: 21574 - protein, 43 aa, Homo sapiens
VGRASRDADTRCSFAVLLEFAEEQLRADHVFICFHKNREDRGR

SEQ ID NO: 21575 - protein, 42 aa, Homo sapiens
LGSLARILQFLPGDCRGAASTVDYNCNMTLEELVACDNAAQK

SEQ ID NO: 21576 - protein, 76 aa, Homo sapiens
LGSLARILQFLPGDCRGAASTVDYNCNMTLEELVACDNAAQKMQTVTAAVEELLVAAQRQDRLTVGVYESAKLMNV

SEQ ID NO: 21577 - protein, 87 aa, Homo sapiens
LGSLARILQFLPGDCRGAASTVDYNCNMTLEELVACDNAAQKMQTVTAAVEELLVAAQRQDRLTVGVYESAKLMNGPRQRGPLPLGH

SEQ ID NO: 21578 - protein, 203 aa, Homo sapiens
LGSLARILQFLPGDCRGAASTVDYNCNMTLEELVACDNAAQKMQTVTAAVEELLVAAQRQDRLTVGVYESAKLMNVDPDSVVLCLLAIDEEEEDDIALQIHFTLIQSFCCDNDINIVRVSGMQRLAQLLGEPAETQGTTEARDLHCLLVTVSRASALPRHARAPGPVFVNKVGLTGPAQLSAQPRLACPVGSRAGASSPRKLF

SEQ ID NO: 21579 - protein, 112 aa, Homo sapiens [sequence omitted]

SEQ ID NO: 21580 - protein, 182 aa, Homo sapiens
VCPPLPPPSPACRGNPLHPCSFSFALARSFFANSPCTVAPPLSPADPSLPFGPLRDPDSVVLCLLAIDEEEEDDIALQIHFTLIQSFCCDNDINIVRVSGMQRLAQLLGEPAETQGTTEARDLHCLLVTVSRASALPRHARAPGPVFVNKVGLTGPAQLSAQPRLACPVGSRAGASSPRKLF

SEQ ID NO: 21581 - protein, 121 aa, Homo sapiens
LSPGHGESGLCPAPPRPGTWAGVCQQSRADWSCTAQRSATFGMSRGQPGWGLLTQEAILSLTVFPTQGPREREAPLNPFFSLLQNPHTDAWKSHGLVEVASYCEESRGNNQWVPYISLQER

SEQ ID NO: 21582 - protein, 296 aa, Homo sapiens
LRDAESGTLAVSLVPAGPDAASLPREGKYGHAACFGLQPGCLRQDGSRQIAIAAMVANFTKPTADAPSLLQHDEVETYFHEFGHVMHQLCSQAEFAMFSGTHVERDFVEAPSQMLENWVWEQEPLLRMSRHYRTGSAVPRELLEKLIESRQANTGLFNLRQIVLAKVDQALHTQTDADPAEEYARLCQEILGVPATPGTNMPATFGHLAGGYDAQYYGYLWSEVYSMDMFHTRFKQEGVLNSKVGMDYRSCILRPGGSEDASAMLRRFLGRDPKQDAFLLSKGLQVGGCEPEPQVC

SEQ ID NO: 21583 - protein, 648 aa, Homo sapiens
LASRFLSRSPAPVAKKSPRDMDSVVFEDVAVDFTLEEWALLDSAQRDLYRDVMLETFQNLASVDDETQFKASGSVSQQDIYGEKIPKESKIATFTRNVSWASVLGKIWDSLSIEDQTTNQGRNLSRNHGLERLCESNDQCGEALSQIPHLNLYKKIPPGVKQYEYNTYGKVFMHRRTSLKSPITVHTGHKPYQCQECGQAYSCRSHLRMHVRTHNGERPYVCKLCGKTFPRTSSLNRHVRIHTAEKTYECKQCGKAFIDFSSLTSHLRSHTGEKPYKCKECGKAFSYSSTFRRHTITHTGEKPYKCKECAEAFSYSSTFRRHMISHTGEKPHKCKECGEAFSYSSAFRRHMITHTGEKPYECKQCGKTFIYLQSFRRHERIHTGEKPYECKQCGKTFIYPQSFRRHERTHGGEKPYECNQCGKAFSHPSSFRGHMRVHTGEKPYECKQCGKTFNWPISLRKHMRTHTREKPYECKQCGKAFSLSACFREHVRMHPEDKSYECKLCGKAFYCHISLQKHMRRHTAEKLYKCKQCGKAFSWPELLQQHVRTHTVEKPYECKECGKVFKWPSSLPIHMRLHTGEKPYQCKHCGKAFNCSSSLRRHVRIHTTEKQYKCNVGHPPANEFMCSASEKSHQERDLIKVVNMVLPL

SEQ ID NO: 21584 - protein, 647 aa, Homo sapiens
LASRFLSRSPAPVAKKSPRDMDSVVFEDVAVDFTLEEWALLDSAQRDLYRDVMLETFQNLASVDDETQFKASGSVSQQDIYGEKIPKESKIATFTRNVSWASVLGKIWDSLSIEDQTTNQGRNLRNHGLERLCESNDQCGEALSQIPHLNLYKKIPPGVKQYEYNTYGKVFMHRRTSLKSPITVHTGHKPYQCQECGQAYSCRSHLRMHVRTHNGERPYVCKLCGKTFPRTSSLNRHVRIHTAEKTYECKQCGKAFIDFSSLTSHLRSHTGEKPYKCKECGKAFSYSSTFRRHTITHTGEKPYKCKECAEAFSYSSTFRRHMISHTGEKPHKCKECGEAFSYSSAFRRHMITHTGEKPYECKQCGKTFIYLQSFRRHERIHTGEKPYECKQCGKTFIYPQSFRRHERTHGGEKPYECNQCGKAFSHPSSFRGHMRVHTGEKPYECKQCGKTFNWPISLRKHMRTHTREKPYECKQCGKAFSLSACFREHVRMHPEDKSYECKLCGKAFYCHISLQKHMRRHTAEKLYKCKQCGKAFSWPELLQQHVRTHTVEKPYECKECGKVFKWPSSLPIHMRLHTGEKPYQCKHCGKAFNCSSSLRRHVRIHTTEKQYKCNVGHPPANEFMCSASEKSHQERDLIKVVNMVLPL

SEQ ID NO: 21585 - protein, 559 aa, Homo sapiens
LSRKQEEPGSVQWHPAPYLLCQPTGLWQAIPSVPDCDHLLSVPLTCLSFPLGAMAGRGSLVSWRAFHGCDSAEELPRVSPRFLRAWHPPPVSARMPTRRWAPGTQCITKCEHTRPKPGELAFRKGDVVTILEACENKSWYRVKHHTSGQEGLLAAGALREREALSADPKLSLMPWFHGKISGQEAVQQLQPPEDGLFLVRESARHPGDYVLCVSFGRDVIHYRVLHRDGHLTIDEAVFFCNLMDMVEHYSKDKGAICTKLVRPKRKHGTKSAEEELARAGWLLNLQHLTLGAQIGEGEFGAVLQGEYLGQKVAVKNIKCDVTAQAFLDETAVMTKMQHENLVRLLGVILHQGLYIVMEHVSKGNLVNFLRTRGRALVNTAQLLQFSLHVAEGMEYLESKKLVHRDLAARNILVSEDLVAKVSDFGLAKAERKGLDSSRLPVKWTAPEALKHGFTSKSDVWSFGVLLWEVFSYGRAPYPKMSLKEVSEAVEKGYRMEPPEGCPGPVHVLMSSCWEAEPARRPPFRKLAEKLARELRSAGAPASVSGQDADGSTSPRSQEP

SEQ ID NO: 21586 - protein, 515 aa, Homo sapiens
LCSRDRLGVCSRLAEALLGAGAGRGSGAPPEQVSPRFLRAWHPPPVSARMPTRRWAPGTQCITKCEHTRPKPGELAFRKGDVVTILEACENKSWYRVKHHTSGQEGLLAAGALREREALSADPKLSLMPWFHGKISGQEAVQQLQPPEDGLFLVRESARHPGDYVLCVSFGRDVIHYRVLHRDGHLTIDEAVFFCNLMDMVEHYSKDKGAICTKLVRPKRKHGTKSAEEELARAGWLLNLQHLTLGAQIGEGEFGAVLQGEYLGQKVAVKNIKCDVTAQAFLDETAVMTKMQHENLVRLLGVILHQGLYIVMEHVSKGNLVNFLRTRGRALVNTAQLLQFSLHVAEGMEYLESKKLVHRDLAARNILVSEDLVAKVSDFGLAKAERKGLDSSRLPVKWTAPEALKHGKFTSKSDVWSFGVLLWEVFSYGRAPYPKMSLKEVSEAVEKGYRMEPPEGCPGPVHVLMSSCWEAEPARRPPFRKLAEKLARELRSAGAPASVSGQDADGSTSPRSQEP

SEQ ID NO: 21587 - protein, 628 aa, Homo sapiens
VRPALGPAGASQAAAPPAFPHSPTLLRPQNEETEQLAPSCAAGTASGCAAGSRRPSWGRARGAARGRPLSRKQEEPGSVQWHPAPYLLCQPTGLWQAIPSVPDCDHLLSVPLTCLSFPLGAMAGRGSLVSWRAFHGCDSAEELPRVSPRFLRAWHPPPVSARMPTRRWAPGTQCITKCEHTRPKPGELAFRKGDVVTILEACENKSWYRVKHHTSGQEGLLAAGALREREALSADPKLSLMPWFHGKISGQEAVQQLQPPEDGLFLVRESARHPGDYVLCVSFGRDVIHYRVLHRDGHLTIDEAVFFCNLMDMVEHYSKDKGAICTKLVRPKRKHGTKSAEEELARAGWLLNLQHLTLGAQIGEGEFGAVLQGEYLGQKVAVKNIKCDVTAQAFLDETAVMTKMQHENLVRLLGVILHQGLYIVMEHVSKGNLVNFLRTRGRALVNTAQLLQFSLHVAEGMEYLESKKLVHRDLAARNILVSEDLVAKVSDFGLAKAERKGLDSSRLPVKWTAPEALKHGKFTSKSDVWSFGVLLWEVFSYGRAPYPKMSLKEVSEAVEKGYRMEPPEGCPGPVHVLMSSCWEAEPARRPPFRKLAEKLARELRSAGAPASVSGQDADGSTSPRSQEP

SEQ ID NO: 21588 - protein, 73 aa, Homo sapiens
MVNFTVDQIRAIMDKKANIRNMSVIAHVDHGKSTLTDSLVCKAGIIASARAGETRFTDTRKDEQERCITIKST

SEQ ID NO: 21589 - protein, 58 aa, Homo sapiens
LPLGLGLRRQPSSGLGSGSGSLASAPAPLGYPRPRPAAPPALGRPDAGLGRGRSPGLA

SEQ ID NO: 21590 - protein, 444 aa, Homo sapiens
LAGEGVDGLTQETPLKPVSQLPGPAGAPTGRRGQAEDPGSVMASALRPPRVPKPKGVLPSHYYESFLEKKGPCDRDYKKFWAGLQGLTIYFYNSNRDFQHVEKLNLGAFEKLTDEIPWGSSRDPGTHFSLILRDQEIKFKVETLECREMWKGFILTVVELRVPTDLTLLPGHLYMMSEVLAKEEARRALETPSCFLKVSRLEAQLLLERYPECGNLLLRPSGDGADGVSVTTRQMHNGTHVVRHYKVKREGPKYVIDVEQPFSCTSLDAVVNYFVSHTKKALVPFLLDEDYEKVLGYVEADKENGENVWVAPSAPGPGPAPCTGGPKPLSPASSQDKLPPLPPLPNQEENYVTPIGDGPAVDYENQDVASSSWPVILKPKKLPKPPAKLPKPPVGPKPEPKVFNGGLGRKLPVSSAQPLFPTAGLADMTAELQKKLEKRRALEH

SEQ ID NO: 21591 - protein, 442 aa, Homo sapiens
LKSRQLFLGRPVDRASAAETMSADGAEADGSTQVTVEEPVQQPSVVDRVASMPLISSTCDMVSAAYASTKESYPHIKTVCDAAEKGVRTLTAAAVSGAQPILSKLEPQIASASEYAHRGLDKLEENLPILQQPTEKVSGAQEMVSSAKDTVATQLSEAVDATRGAVQSGVDKTKSVVTGGVQSVMGSRLGQMVLSGVDTVLGKSEEWADNHLPLTDAELARIATSLDGFDVASVQQQRQEQSYFVRLGSLSERLRQHAYEHSLGKLRATKQRAQEALLQLSQVLSLMETVKQGVDQKLVEGQEKLHQMWLSWNQKQLQGPEKEPPKPEQVESRALTMFRDIAQQLQATCTSLGSSIQGLPTNVKDQVQQARRQVEDLQATFSSIHSFQDLSSSILAQSRERVASAREALDHMVEYVAQNTPVTWLVGPFAPGITEKAPEEKK

SEQ ID NO: 21592 - protein, 455 aa, Homo sapiens
LVLKSRQLFLGRPVDRASAAETMSADGAEADGSTQVTVEEPVQQPSVVDRVASMPLISSTCDMVSAAYASTKESYPHIKTVCDAAEKGVRTLTAAAVSGAQPILSKLEPQIASASEYAHRGLDKLEENLPILQQPTEKVLADTKELVSSKVSGAQEMVSSAKDTVATQLSEAVDATRGAVQSGVDKTKSVVTGGVQSVMGSRLGQMVLSGVDTVLGKSEEWADNHLPLTDAELARIATSLDGFDVASVQQQRQEQSYFVRLGSLSERLRQHAYEHSLGKLRATKQRAQEALLQLSQVLSLMETVKQGVDQKLVEGQEKLHQMWLSWNQKQLQGPEKEPPKPEVESRALTMFRDIAQQLQATCTSLGSSIQGLPTNVKDQVQQARRQVEDLQATFSSIHSFQDLSSSILAQSRERVASAREALDHMVEYVAQNTPVTWLVGPFAPGITEKAPEEKK

SEQ ID NO: 21593 - protein, 133 aa, Homo sapiens
LWCPRRRKVVSRTAGIRRHPDSRVLCAAMALRYPMAVGLNKGHKVTKNVSKPRHSRRRGRLTKHTKFVRDMIREVCGFAPYERRAMELLKVSKDKRALKFIKKRVGTHIRAKRKREELSNVLAAMRKAAAKKD

SEQ ID NO: 21594 - protein, 46 aa, Homo sapiens
VSRDCTTALQPGRQSIMTVMSALSVAPSKAREYSKEGWEYVKARTK

SEQ ID NO: 21595 - protein, 109 aa, Homo sapiens
LSAAMALRYPMAVGLNKGHKVTKNVSKPRHSRRRGRLTKHTKFVRDMIREVCGFAPYERRAMELLKVSKDKRALKFIKKRVGTHIRAKRKREELSNVLAAMRKAAAKKD

SEQ ID NO: 21596 - protein, 387 aa, Homo sapiens
LGGLARGTARGTTCCLLPQVDKIGRGYQGDPSSALLELLDPEQNANFLDHYLDVPVDLSKVLFICTANVTDTIPEPLRDRMEMINVSGYVAQEKLAIAERYLVPQARALCGLDESKAKLSSDVLTLLIKQYCRESGVRNLQKQVEKVLRKSAYKIVSGEAESVEVTPENLQDFVGKPVFTVERMYDVTPPGVVMGLAWTAMGGSTLFVETSLRRPQDKDAKGDKDGSLEVTGQLGEVMKESARIAYTFARAFLMQHAPANDYLVTSHIHLHVPEGATPKDGPSAGCTIVTALLSLAMGRPVRQNLAMTGEVSLTGKILPVGGIKEKTIAAKRAGVTCIVLPAENKKDFYDLAAFITEGLEVHFVEHYREIFDIAFPDEQAEALAVER

SEQ ID NO: 21597 - protein, 20 aa, Homo sapiens
VGGSGGRTREGIELFLSFSY

SEQ ID NO: 21598 - protein, 7 aa, Homo sapiens
LLLIRVF

SEQ ID NO: 21599 - protein, 32 aa, Homo sapiens
LKQVDAQEPREGAAVSFLPSRQRSAPPSPLLR

SEQ ID NO: 21600 - protein, 45 aa, Homo sapiens
MNSGRTPLTHYSHREQQQEAGCGGSHLSSRHFGGPTQQDRLSPDV

SEQ ID NO: 21601 - protein, 15 aa, Homo sapiens
MVVCHFVLCRQGHHL

SEQ ID NO: 21602 - protein, 31 aa, Homo sapiens
LDMGLTRGELRGCLRGKKTHEAEAGRGGSRL

SEQ ID NO: 21603 - protein, 206 aa, Homo sapiens
LGMEESVVRPSVFVVDGQTDIPFTRLGRSHRRQSCSVARDGPAGSWEQLIQERRSHEVNPAAHLTGANSSLTGSGGPLLWETQLGLAFLRGLSYHDGALVVTKAGYYYIYSKVQLGGVGCPLGLASTITHGLYKRTPRYPEELELLVSQQSPCGRATSSSRVWWDSSFLGGVVHLEAGEKVVVRVLDERLVRLRDGTRSYFGAFMV

SEQ ID NO: 21604 - protein, 24 aa, Homo sapiens
LSHIFRSLWKVVHSPGVLSNFGFL

SEQ ID NO: 21605 - protein, 456 aa, Homo sapiens
MDWGTELWDQFEVLERHTQWGLDLLDRYVKFVKERTEVEQAYAKQLRSLVKKYLPKRPAKDDPESKFSQQQSFVQILQEVNDFAGQRELVAENLSVRVCLELTKYSQEMKQERKMHFQEGRRAQQQLENGFKQLENSKRKFERDCREAEKAAQTAERLDQDINATKADVEKAKQQAHLRSHMAEESKNEYAAQLQRFNRDQAHFYFSQMPQIFDKLQDMDERRATRLGAGYGLLSEAELEVVPIIAKCLEGMKVAANAVDPKNDSHVLIELHKSGFARPGDVEFEDFSQPMNRAPSDSSLGTPSDGRPELRGPGRSRTKRWPFGKKNKTVVTEDFSHLPPEQQRKRLQQQLEERSRELQKEVDQREALKKMKDVYEKTPQMGDPASLEPQIAETLSNIERLKLEVQKYEAWLAEAESRVLSNRGDSLSRHARPPDPPASAPPDSSSNSASQDTKER

SEQ ID NO: 21606 - protein, 238 aa, Homo sapiens
LAFWQEEQAFEAAVGPLPTLQTVVTEDFSHLPPEQQRKRLQQQLEERSRELQKEVDQREALKKMKDVYEKTPQMGDPASLEPQIAETLSNIERLKLEVQKYEAWLAEAESRVLSNRGDSLSRHARPPDPPASAPPDSSSNSASQDTKESSEEPPSEESQDTPIYTEFDEDFEEEPTSPIGHCVAIYHFEGSSEGTISMAEGEDLSLMEEDKGDGWTRVRRKEGGEGYVPTSYLRVTLN

SEQ ID NO: 21607 - protein, 8 aa, Homo sapiens
VASMQAGS

SEQ ID NO: 21608 - protein, 1115 aa, Homo sapiens
LSCLRSRVTRQKEKGKSPAHLKDKGQDARERRECVNGHQLLQGTFSGPSSCPLCGKPFLSSASLKEHPRGTLLSDGSPALSRNVGMTVSQKGGPQPTPSPAGPGTQLGPITGEMDEADSAFLKFKQTADDSLSLTSPNTESIFVEDPYTASLRSEIESDGHEFEAESWSLAVDAAYAKKQKREVVKRQDVLYELMQTEVHHVRTLKIMLKVYSRALQEELQFSSKAIGRLFPCADDLLETHSHFLARLKERRQESLEEGSDRNYVIQKIGDLLVQQFSGENGERMKEKYGVFCSGHNEAVSHYKLLLQQNKKFQNLIKKIGNFSIVRRLGVQECILLVTQRITKYPVLVERIIQNTEAGTEDYEDLTQALNLIKDIISQVDAKVSECEKGQRLREIAGKMDLKSSSKLKNGLTFRKEDMLQRQLHLEGMLCWKTTSGRLKDILAILLTDVLLLLQEKDQKYVFASVDSKPPVISLQKLIVREVANEEKAMFLISASLQGPEMYEIYTSSKEDRNAWMAHIQRAVESCPDEEEGPFSLPEEERKVVEARATRLRDFQERLSMKDQLIAQSLLEKQQIYLEMAEMGGLEDLPQPRGLFRGGDPSETLQGELILKSAMSEIEGIQSLICRQLGSANGQAEDGGSSTGPPRRAETFAGYDCTNSPTKNGSFKKKVSSTDPRPRDWRGPPNSPDLKLSDSDIPGSSEESPQVVEAPGTESDPRLPTVLESELVQRIQTLSQLLLNLQAVIAHQDSYVETQRAAIQEREKQFRLQSTRGNLLLEQERQRNFEKQREERAALEKLQSQLRHEQQRWERERQWQHQELERAGARLQEREGEARQLRERLEQERAELERQRQAYQHDLERLREAQRAVERERERLELLRRLKKQNTAPGALPPDTLAEAQPPSHPPSFNGEGLEGPRVSMLPSGVGPEYAERPEVARRDSAPTENRLAKSDVPIQLLSATNQFQRQAAVQQQIPTKLAASTKGGKDKGGKSRGSQRWESSASFDLKQQLLLNKLMGKDESTSRNRRSLSPILPGRHSPAPPPDPGFPAPSPPPADSPSEGFSLKAGGTALLPGPPAPSPLPARWRRQHLSPESGRIHFPNRAPRRFTMNLRVRE

SEQ ID NO: 21609 - protein, 1057 aa, Homo sapiens
LREWQRSWRRAACGRSGRASLKEHPRGTLLSDGSPALSRNVGMTVSQKGGPQPTPSPAGPGTQLGPITGEMDEADSAFLKFKQTADDSLSLTSPNTESIFVEDPYTASLRSEIESDGHEFEAESWSLAVDAAYAKKQKREVVKRQDVLYELMQTEVHHVRTLKIMLKVYSRALQEELQFSSKAIGRLFPCADDLLETHSHFLARLKERRQESLEEGSDRNYVIQKIGDLLVQQFSGENGERMKEKYGVFCSGHNEAVSHYKLLLQQNKKFQNLIKKIGNFSIVRRLGVQECILLVTQRITKYPVLVERIIQNTEAGTEDYEDLTQALNLIKDIISQVDAKVSECEKGQRLREIAGKMDLKSSSKLKNGLTFRKEDMLQRQLHLEGMLCWKTTSGRLKDILAILLTDVLLLLQEKDQKYVFASVDSKPPVISLQKLIVREVANEEKAMFLISASLQGPEMYEIYTSSKEDRNAWMAHIQRAVESCPDEEEGPFSLPEEERKVVEARATRLRDFQERLSMKDQLIAQSLLEKQQIYLEMAEMGGLEDLPQPRGLFRGGDPSETLQGELILKSAMSEIEGIQSLICRQLGSANGQAEDGGSSTGPPRRAETFAGYDCTNSPTKNGSFKKKVSSTDPRPRDWRGPPNSPDLKLSDSDIPGSSEESPQVVEAPGTESDPRLPTVLESELVQRIQTLSQLLLNLQAVIAHQDSYVETQRAAIQEREKQFRLQSTRGNLLLEQERQRNFEKQREERAALEKLQSQLRHEQQRWERERQWQHQELERAGARLQEREGEARQLRERLEQERAELERQRQAYQHDLERLREAQRAVERERERLELLRRLKKQNTAPGALPPDTLAEAQPPSHPPSFNGEGLEGPRVSMLPSGVGPEYAERPEVARRDSAPTENRLAKSDVPIQLLSATNQFQRQAAVQQQIPTKLAASTKGGKDKGGKSRGSQRWESSASFDLKQQLLLNKLMGKDESTSRNRRSLSPILPGRHSPAPPPDPGFPAPSPPPADSPSEGFSLKAGGTALLPGPPAPSPLPATPLSAKEDASKEDVIFF

SEQ ID NO: 21610 - protein, 30 aa, Homo sapiens
LSGSSHILTPTRFLDDLKALDKKLEDIALP

SEQ ID NO: 21611 - protein, 90 aa, Homo sapiens
VVPESRQLCWPLLPAPGEVAGGSCPTEPGPPPELPGSPQPSQQCPSHPTLQDKVLRMLYVWALCRDQDELNPYAAWRLLDISASSTEQIL

SEQ ID NO: 21612 - protein, 171 aa, Homo sapiens
LATRPLPLTAFTTSIRLLPALLPAPGTSLPLIGSGPGSRILWKQLPAQAMISGELDILKDWCYEATYSQLAHPIQQAKALGLQFHSRILDIDNVDLAMGKMMEQGPVLIITFQAQLVMVVRNPKGEVVEGDPDKVLRMLYVWALCRDQDELNPYAAWRLLDISASSTEQIL

SEQ ID NO: 21613 - protein, 830 aa, Homo sapiens
VPLTAAAGNMAKFALNQNLPDLGGPRLCPVPAAGGARSPSSPYSVETPYGFHLDLDFLKYIEELERGPAARRAPGPPTSRRPRAPRPGLAGARSPGAWTSSESLASDDGGAPGILSQGAPSGLLMQPLSPRAPVRNPRVEHTLRETSRRLELAQTHERAPSPGRGVPRSPRGSGRSSPAPNLAPASPGPAQLQLVREQMAAALRRLRELEDQARTLPELQEQVRALRAEKARLLAGRAQPEPDGEAETRPDKLAQLRRLTERLATSERGGRARASPRADSPDGLAAGRSEGALQVLDGEVGSLDGTPQTREVAAEAVPETREAGAQAVPETREAGVEAAPETVEADAWVTEALLGLPAAAERELELLRASLEHQRGVSELLRGRLRELEEAREAAEEAAAGARAQLREATTQTPWSCAEKAAQTESPAEAPSLTQESSPGSMDGDRAVAPAGILKSIMKKRDGTPGAQPSSGPKSLQFVGVLNGEYESSSSEDASDSDGDSENGGAEPPGSSSGSGDDSGGGSDSGTPGPPSGGDIRDPEPEAEAEPQQVAQGRCELSPRLREACVALQRQLSRPRGVASDGGAVRLVAQEWFRVSSQRRSQAEPVARMLEGVRRLGPELLAHVVNLADGNGNTALHYSVSHGNLAIASLLLDTGACEVNRQNRAGYSALMLAALTSVRQEEEDMAVVQRLFCMGDVNAKASQTGQTALMLAISHGRQDMVATLLACGADVNAQDADGATALMCASEYGRLDTVRLLLTQPGCDPAILDNEGTSALAIALEAEQDEVAALLHAHLSSGQPDTQSESPPGSQTATPGEGECGDNGENPQVQ

SEQ ID NO: 21614 - protein, 849 aa, Homo sapiens
VPLTAAAGNMAKFALNQNLPDLGGPRLCPVPAAGGARSPSSPYSVETPYGFHLDLDFLKYIEELERGPAARRAPGPPTSRRPRAPRPGLAGARSPGAWTSSESLASDDGGAPGILSQGAPSGLLMQPLSPRAPVRNPRVEHTLRETSRRLELAQTHERAPSPGRGVPRSPRGSGRSSPAPNLAPASPGPAQLQLVREQMAAALRRLRELEDQARTLPELQEQVRALRAEKARLLAGRAQPEPDGEAETRPDKLAQLRRLTERLATSERGGRARASPRADSPDGLAAGRSEGALQVLDGEVGSLDGTPQTREVAAEAVPETREAGAQAVPETREAGVEAAPETVEADAWVTEALLGLPAAAERELELLRASLEHQRGVSELLRGRLRELEEAREAAEEAAAGARAQLREATTQTPWSCAEKAAQTESPAEAPSLTQESSPGSMDGDRAVAPAGILKSIMKKRDGTPGAQPSSGPKSLQFVGVLNGEYESSSSEDASDSDGDSENGGAEPPGSSSGSGDDSGGGSDSGTPGPPSGGDIRDPEPEAEAEPQQVAQGRCELSPRLREACVALQRQLSRPRGVASDGGAVRLVAQEWFRVSSQRRSQAEPVARMLEGVRRLGPELLAHVVNLADGNGNTALHYSVSHGNLAIASLLLDTGACEVNRQNRAGYSALMLAALTSVRQEEEDMAVVQRLFCMGDVNAKASQTGQTALMLAISHGRQDMVATLLACGADVNAQDADGATALMCASEYGRLDTVRLLLTQPGCDPAILDNEGTSALAIALEAEQDEVAALLHAHLSSGQPDTQAGVQRHNLSSLQPPPPRFKKFSCLSLPSSWDYNSCEPSRLAQLTIF

SEQ ID NO: 21615 - protein, 120 aa, Homo sapiens
LLRASLEHQRGVSELLRGRLRELEEAREAAEEAAAGARAQLREATTQTPWSCAEKAAQTESPAEAPSLTQESSPGSMDGDRAVAPAGILKSIMKKRDGTPGAQPSSGPKSLQFVGVLNGE

SEQ ID NO: 21616 - protein, 1136 aa, Homo sapiens
VNGQKQGHAQATPKIPLNLHLHHDPFRSLQEPRHQPPTMGSKERFHWQSHNVKQSGVDDMVLLPQITEDAIAANLRKRFMDDYIFTYIGSVLISVNPFKQMPYFTDREIDLYQGAAQYENPPHIYALTDNMYRNMLIDCENQCVIISGESGAGKTVAAKYIMGYISKVSGGGEKVQHVKDIILQSNPLLEAFGNAKTVRNNNSSRFGKYFEIQFSRGGEPDGGKISNFLLEKSRVVMQNENERNFHIYYQLLEGASQEQRQNLGLMTPDYYYYLNQSDTYQVDGTDDRSDFGETLSAMQVIGIPPSIQQLVLQLVAGILHLGNISFCEDGNYARVESVDLLAFPAYLLGIDSGRLQEKLTSRKMDSRWGGRSESINVTLNVEQAAYTRDALAKGLYARLFDFLVEAINRAMQKPQEEYSIGVLDIYGFEIFQKNGFEQFCINFVNEKLQQIFIELTLKAEQEEYVQEGIRWTPIQYFNNKVVCDLIENKLSPPGIMSVLDDVCATMHATGGGADQTLLQKLQAAVGTHEHFNSWSAGFVIHHYAGKVSYDVSGFCERNRDVLFSDLIELMQTSEQAFLRMLFPEKLDGDKKGRPSTAGSKIKKQANDLVATLMRCTPHYIRCIKPNETKRPRDWEENRVKHQVEYLGLKENIRVRRAGFAYRRQFAKFLQRYAILTPETWPRWRGDERQGVQHLLRAVNMEPDQYQMGSTKVFVKNPESLFLLEEVRERKFDGFARTIQKAWRRHVAVRKYEEMREEASNILLNKKERRRNSINRNFVGDYLGLEERPELRQFLGKRERVDFADSVTKYDRRFKPIKRDLILTPKCVYVIGREKVKKGPEKGQVCEVLKKKVDIQALRGVSLSTRQDDFFILQEDAADSFLESVFKTEFVSLLCKRFEEATRRPLPLTFSDTLQFRVKKEGWGGGGTRSVTFSRGFGDLAVLKVGGRTLTVSVGDGLPKSSKPTRKGMAKGKPRRSSQAPTRAAPAPPRGMDRNGVPPSARGGPLPLEIMSGGGTHRPPRGPPSTSLGASRRPRARPPSEHNTEFLNVPDQGMAGMQRKRSVGQRPVPGVGRPKPQPRTHGPRCRALYQYVGQDVDELSFNVNEVIEILMEDPSGWWKGRLHGQEGLFPGNYVEKI

SEQ ID NO: 21617 - protein, 125 aa, Homo sapiens
VKKEGWGGGGTRSVTFSRGFGDLAVLKVGGRTLTVSVGDGLPKSSKPTRKGMAKGKPRRSSQAPTRAAPAPPRGEELRPLLYSLVCCGSHGLSQTFSKRNLTNTVYHSLLCPGLSVAPHLPQNKG

SEQ ID NO: 21618 - protein, 126 aa, Homo sapiens
LKKKVDIQALRGVSLSTRQDDFFILQEDAADSFLESVFKTEFVSLLCKRFEEATRRPLPLTFSDTYGPANPSTISGWSRRGAPSPAPPTRPNCASAPAAAPPLPQPARVGWGGGPQPAPPSFLLSP

SEQ ID NO: 21619 - protein, 64 aa, Homo sapiens
MREEASNILLNKKERRRNSINRNFVGDYLGLEERPELRQFLGKRERVDFADSVTKYDRRFKVRH

SEQ ID NO: 21620 - protein, 119 aa, Homo sapiens
LSPPGIMSVLDDVCATMHATGGGADQTLLQKLQAAVGTHEHFNSWSAGFVIHHYAGKVRPLPLPYPVPPRRPPGLQAVAPTLQHPGWKEPARTLIQGCRIPLSPASIHPLLTRTTDPSG

SEQ ID NO: 21621 - protein, 171 aa, Homo sapiens
VMPWPRGSMPASSTSSWRRAINRAMQKPQEEYSIGVLDIYGFEIFQKNGFEQFCINFVNEKLQQIFIELTLKAEQEEYVQEGIRWTPIQYFNNKVVCDLIENKLVRAGSTLAGASHWSPELSLEDEGEGQGCYGILRPFSTLHSGLPATDNNQNVPSAPHPFIPPTCPPFT

SEQ ID NO: 21622 - protein, 127 aa, Homo sapiens
LQEKLTSRKMDSRWGGRSESINVTLNVEQAAYTRDALAKGLYARLFDFLVEAINRAMQKPQEEYSIGVLDIYGFEIFQKNGFEQFCINFVNEKLQQIFIELTLKAEQVGGQAVRDGGSWGGGGVEGP

SEQ ID NO: 21623 - protein, 446 aa, Homo sapiens
VNGQKQGHAQATPKIPLNLHLHHDPFRSLQEPRHQPPTMGSKERFHWQSHNVKQSGVDDMVLLPQITEDAIAANLRKRFMDDYIFTYIGSVLISVNPFKQMPYFTDREIDLYQGAAQYENPPHIYALTDNMYRNMLIDCENQCVIISGESGAGKTVAAKYIMGYISKVSGGGEKVQHVKDIILQSNPLLEAFGNAKTVRNNNSSRFGKYFEIQFSRGGEPDGGKISNFLLEKSRVVMQNENERNFHIYYQLLEGASQEQRQNLGLMTPDYYYYLNQSDTYQVDGTDDRSDFGETLSAMQVIGIPPSIQQLVLQLVAGILHLGNISFCEDGNYARVESVDLLAFPAYLLGIDSGRLQEKLTSRKMDSRWGGRSESINVTLNVEQAAYTRDALAKGLYARLFDFLVEASHQPCYAETPGRVQHRCAGHLRLRDLPEKWLRAVLHQLRQ

SEQ ID NO: 21624 - protein, 117 aa, Homo sapiens
LVLQLVAGILHLGNISFCEDGNYARVESVDLLAFPAYLLGIDSGRLQEKLTSRKMDSRWGGRSESINVTLNVEQAAYTRDALAKGLYARLFDFLVEASGAGAGRQSGCSGVTNIYGS

SEQ ID NO: 21625 - protein, 185 aa, Homo sapiens [sequence omitted]

SEQ ID NO: 21626 - protein, 272 aa, Homo sapiens
VNGQKQGHAQATPKIPLNLHLHHDPFRSLQEPRHQPPTMGSKERFHWQSHNVKQSGVDDMVLLPQITEDAIAANLRKRFMDDYIFTYIGSVLISVNPFKQMPYFTDREIDLYQGAAQYENPPHIYALTDNMYRNMLIDCENQCVIISGESGAGKTVAAKYIMGYISKVSGGGEKVQHVKDIILQSNPLLEAFGNAKTVRNNNSSRFGKYFEIQFSRGGEPDGGKISNFLLEKSRVVMQNENERNFHIYYQVQGRGRGRGSTTWSPAGWTMGR

SEQ ID NO: 21627 - protein, 205 aa, Homo sapiens [sequence omitted]

SEQ ID NO: 21628 - protein, 86 aa, Homo sapiens
VKQSGVDDMVLLPQITEDAIAANLRKRFMDDYIFTYIGSVLISVNPFKQMPYFTDREIDLYQGAVRLGLGGRHSPQTPGPQPWAET

SEQ ID NO: 21629 - protein, 114 aa, Homo sapiens
VNGQKQGHAQATPKIPLNLHLHHDPFRSLQEPRHQPPTMGSKERFHWQSHNVKQSGVDDMVLLPQITEDAIAANLRKRFMDDYIFVPWAKAGDLHRLCAHLCKPLQADALLHRP

SEQ ID NO: 21630 - protein, 99 aa, Homo sapiens
VNGQKQGHAQATPKIPLNLHLHHDPFRSLQEPRHQPPTMGSKERFHWQSHNVKQSGVDDMVLLPQITEDAIAANLRKRFMDDYIFVPWAKAGGGQAGKE

SEQ ID NO: 21631 - protein, 9 aa, Homo sapiens
MPKPPPRSP

SEQ ID NO: 21632 - protein, 1177 aa, Homo sapiens
LPRLQRRRNQGPEREAQVQGAGEGRIRTGAQHYSTNRSPQKEPGDAAKAVNRGGGTVGAAGSRGWGETCGHVASMAPACQILRWALALGLGLMFEVTHAFRSQDEFLSSLESYEIAFPTRVDHNGALLAFSPPPPRRQRRGTGATAESRLFYKVASPSTHFLLNLTRSSRLLAGHVSVEYWTREGLAWQRAARPHCLYAGHLQGQASSSHVAISTCGGLHGLIVADEEEYLIEPLHGGPKGSRSPEESGPHVVYKRSSLRHPHLDTACGVRDEKPWKGRPWWLRTLKPPPARPLGNETERGQPGLKRSVSRERYVETLVVADKMMVAYHGRRDVEQYVLAIMNIVAKLFQDSSLGSTVNILVTRLILLTEDQPTLEITHHAGKSLDSFCKWQKSIVNHSGHGNAIPENGVANHDTAVLITRYDICIYKNKPCGTLGLAPVGGMCERERSCSVNEDIGLATAFTIAHEIGHTFGMNHDGVGNSCGARGQDPAKLMAAHITMKTNPFVWSSCSRDYITSFLDSGLGLCLNNRPPRQDFVYPTVAPGQAYDADEQCRFQHGVKSRQCKYGEVCSELWCLSKSNRCITNSIPAAEGTLCQTHTIDKGWCYKRVCVPFGSRPEGVDGAWGPWTPWGDCSRTCGGGVSSSSRHCDSPRPTIGGKYCLGERRRHRSCNTDDCPPGSQDFREVQCSEFDSIPFRGKFYKWKTYRGGGVKACSLTCLAEGFNFYTERAAAVVDGTPCRPDTVDICVSGECKHVGCDRVLGSDLREDKCRVCGGDGSACETIEGVFSPASPGAGYEDVVWIPKGSVHIFIQDLNLSLSHLALKGDQESLLLEGLPGTPQPHRLPLAGTTFQLRQGPDQVQSLEALGPINASLIVMVLARTELPALRYRFNAPIARDSLPPYSWHYAPWTKCSAQCAGGSQVQAVECRNQLDSSAVAPHYCSAHSKLPKRQRACNTEPCPPDWVVGNWSLCSRSCDAGVRSRSVVCQRRVSAAEEKALDDSACPQPRPPVLEACHGPTCPPEWAALDWSECTPSCGPGLRHRVVLCKSADHRATLPPAHCSPAAKPPATMRCNLRRCPPARWVAGEWGECSAQCGVGQRQRSVRCTSHTGQASHECTEALRPPTTQQCEAKCDSPTPGDGPEECKDVNKVAYCPLVLKFQFCSRAYFRQMCCKTCHGH

SEQ ID NO: 21633 - protein, 15 aa, Homo sapiens
MRCPEVMVTSMKGGF

SEQ ID NO: 21634 - protein, 245 aa, Homo sapiens
LYDSNHSGKVFNEHPFLMTHMITHIGEKTSEDNQSGKALRKNFPHSFYKKSHAEGKMPKCVKHEKAFNQFPNLTRQNKTHTQEKLCECKDCWRTFLNQSSLKLHIRSHNGDKHYVCKECGKAFSNSSHLIGHGRIHSGEKPYVCKECGKAFTQSTGLKLHIRTHSGEKPYKCKECGKAFTHSSYLTDHTRIHSGKKPYVCMECGKAFTRSTGLILHMRIHTGEKPYELETGFHRFSRDGLDLLTL

SEQ ID NO: 21635 - protein, 534 aa, Homo sapiens
LMDSSQHLVTFEDVAVDFTQEEWTLLDQAQRDLYRDVMLENYKNLIILAGSELFKRSLMSGLEQMEELRTGVTGVLQELDLQLKTKGSPLLQDISAERSPNGVQLERSNTAEKLYDSNHSGKVFNEHPFLMTHMITHIGEKTSEDNQSGKALRKNFPHSFYKKSHAEGKMPKCVKHEKAFNQFPNLTRQNKTHTQEKLCECKDCWRTFLNQSSLKLHIRSHNGDKHYVCKECGKAFSNSSHLIGHGRIHSGEKPYVCKECGKAFTQSTGLKLHIRTHSGEKPYKCKECGKAFTHSSYLTDHTRIHSGKKPYVCMECGKAFTRSTGLILHMRIHTGEKPYECKECGKAFIHSSYLTKHVRIHSGEKLYLCKACGKAFTRSSGLVLHMRTHTGEKPYECKECGKAFNNSSMLSQHVRIHTGEKPYECKECGKAFTQSSGLSTHLRTHTGEKACECKECGKAFARSTNLNMHMRTHTGEKPYACKECGKAFRYSTYLNVHTRTHTGAKPYECKKCGKNFTQSSALAKHLRTKACEKT

SEQ ID NO: 21636 - protein, 285 aa, Homo sapiens
VFFSPTTVPLCLKAASQPLCPFSRRKSISAVVEKGPSVLLSPTGRLQCVPERSNTAEKLYDSNHSGKVFNEHPFLMTHMITHIGEKTSEDNQSGKALRKNFPHSFYKKSHAEGKMPKCVKHEKAFNQFPNLTRQNKTHTQEKLCECKDCWRTFLNQSSLKLHIRSHNGDKHYVCKECGKAFSNSSHLIGHGRIHSGEKPYVCKECGKAFTQSTGLKLHIRTHSGEKPYKCKECGKAFTHSSYLTDHTRIHSGKKPYVCMECGKAFTRSTGLILHMRIHTGEKPYE

SEQ ID NO: 21637 - protein, 35 aa, Homo sapiens
MIEVVCNDRLGKKVRVKCKYPLAAERQWYPQGCLA

SEQ ID NO: 21638 - protein, 19 aa, Homo sapiens
MIEVVCNDRLGKKVRVKCK

SEQ ID NO: 21639 - protein, 1771 aa, Homo sapiens
LHRAREVAAPRSRPDWFPALPVGPAGMGNRRDLGQPRAGLCLLLAALQLLPGTQADPVDVLKALGVQGGQAGVPEGPGFCPQRTPEGDRAFRIGQASTLGIPTWELFPEGHFPENFSLLITLRGQPANQSVLLSIYDERGARQLGLALGPALGLLGDPFRPLPQQVNLTDGRWHRVAVSIDGEMVTLVADCEAQPPVLGHGPRFISIAGLTVLGTQDLGEKTFEGDIQELLISPDPQAAFQACERYLPDCDNLAPAATVAPQGEPETPRPRRKGKGKGRKKGRGRKGKGRKKNKEIWTSSPPPDSAENQTSTDIPKTETPAPNLPPTPTPLVVTSTVTTGLNATILERSLDPDSGTELGTLETKAAREDEEGDDSTMGPDFRAAEYPSRTQFQIFPGAGEKGAKGEPAVIEKGQQFEGPPGAPGPQGVVGPSGPPGPPGFPGDPGPPGPAGLPGIPGIDGIRGPPGTVIMMPFQFAGGSFKGPPVSFQQAQAQAVLQQTQLSMKGPPGPVGLTGRPGPVGLPGHPGLKGEEGAEGPQGPRGLQGPHGPPGRVGKMGRPGADGARGLPGDTGPKGDRGFDGLPGLPGEKGQRGDFGHVGQPGPPGEDGERGAEGPPGPTGQAGEPGPRGLLGPRGSPGPTGRPGVTGIDGAPGAKGNVGPPGEPGPPGQQGNHGSQGLPGPQGLIGTPGEKGPPGNPGIPGLPGSDGPLGHPGHEGPTGEKGAQGPPGSAGPPGYPGPRGVKGTSGNRGLQGEKGEKGEDGFPGFKGDVGLKGDQGKPGAPGPRGEDGPEGPKGQAGQAGEEGPPGSAGEKGKLGVPGLPGYPGRPGPKGSIGFPGPLGPIGEKGKSGKTGQPGLEGERGPPGSRGERGQPGATGQPGPKGDVGQDGAPGIPGEKGLPGLQGPPGFPGPKGPPGHQGKDGRPGHPGQRGELGFQGQTGPPGPAGVLGPQGKTGEVGPLGERGPPGPPGPPGEQGLPGLEGREGAKGELGPPGPLGKEGPAGLRGFPGPKGGPGDPGPTGLKGDKGPPGPVGANGSPGERGPLGPAGGIGLPGQSGSEGPVGPAGKKGSRGERGPPGPTGKDGIPGPLGPLGPPGAAGPSGEEGDKGDVGAPGHKGSKGDKGDAGPPGQPGIRGPAGHPGPPGADGAQGRRGPPGLFGQKGDDGVRGFVGVIGPPGLQGLPGPPGEKGEVGDVGSMGPHGAPGPRGPQGPTGSEGTPGLPGGVGQPGAVGEKGERGDAGDPGPPGAPGIPGPKGDIGEKGDSGPSGAAGPPGKKGPPGEDGAKGSVGPTGLPGDLGPPGDPGVSGIDGSPGEKGDPGDVGGPGPPGASGEPGAPGPPGKRGPSGHMGREGREGEKGAKGEPGPDGPPGRTGPMGARGPPGRVGPEGLRGIPGPVGEPGLLGAPGQMGPPGPLGPSGLPGLKGDTGPKGEKGHIGLIGLIGPPGEAGEKGDQGLPGVQGPPGPKGDPGPPGPIGSLGHPGPPGVAGPLGQKGSKGSPGSMGPRGDTGPAGPPGPPGAPAELHGLRRRRRFVPVPLPVVEGGLEEVLASLTSLSLELEQLRRPPGTAERPGLVCHELHRNHPHLPDGEYWIDPNQGCARDSFRVFCNFTAGGETCLYPDKKFEIVKLASWSKEKPGGWYSTFRRGKKFSYVDADGSPVNVVQLNFLKLLSATARQNFTYSCQNAAAWLDEATGDYSHSARFLGTNGEELSFNQTTAATVSVPQDGCRLRKGQTKTLFEFSSSRAGFLPLWDVAATDFGQTNQKFGFELGPVCFSS

SEQ ID NO: 21640 - protein, 488 aa, Homo sapiens
VFCELRWIQGLGHQRSAAMGKPWLRALQLLLLLGASWARAGAPRCTYTFVLPPQKFTGAVCWSGPASTRATPEAANASELAALRMRVGRHEELLRELQRLAAADGAVAGEVRALRKESRGLSARLGQLRAQLQHEAGPGAGPGADLGAEPAAALALLGERVLNASAEAQRAAARFHQLDVKFRELAQLVTQQSSLIARLERLCPGGAGGQQQVLPPPPLVPVVPVRLVGSTSDTSRMLDPAPEPQRDQTQRQQEPMASPMPAGHPAVPTKPVGPWQDCAEARQAGHEQSGVYELRVGRHVVSVWCEQQLEGGGWTVIQRRQDGSVNFFTTWQHYKAGFGRPDGEYWLGLEPVYQLTSRGDHELLVLLEDWGGRGARAHYDGFSLEPESDHYRLRLGQYHGDAGDSLSWHNDKPFSTVDRDRDSYSGNCALYQRGGWWYHACAHSNLNGVWHHGGHYRSRYQDGVYWAEFRGGAYSLRKAAMLIRPLKL

SEQ ID NO: 21641 - protein, 106 aa, Homo sapiens
LDVKFRELAQLVTQQSSLIARLERLCPGGAGGQQQVLPPPPLVPVVPVRLVGSTSDTSRMLDPAPEPQRDQTQRQQEPMASPMPAGHPAVPTKPVGKSTLGLRNCG

SEQ ID NO: 21642 - protein, 7 aa, Homo sapiens
LDFLCVL

SEQ ID NO: 21643 - protein, 491 aa, Homo sapiens
LRSAGSGGRRRPRGGHSSMGQSGRSRHQKRARAQAQLRNLEAYAANPHSFVFTRGCTGRNIRQLSLDVRRVMEPLTASRLQVRKKNSLKDCVAVAGPLGVTHFLILSKTETNVYFKLMRLPGGPTLTFQVKKYSLVRDVVSSLRRHRMHEQQFAHPPLLVLNSFGPHGMHVKLMATMFQNLFPSINVHKVNLNTIKRCLLIDYNPDSQELDFRHYSIKVVPVGASRGMKKLLQEKFPNMSRLQDISELLATGAGLSESEAEPDGDHNITELPQAVAGRGNMRAQQSAVRLTEIGPRMTLQLIKVQEGVGEGKVMFHSFVSKTEEELQAILEAKEKKLRLKAQRQAQQAQNVQRKQEQREAHRKKSLEGMKKARVGGSDEEASGIPSRTASLELGEDDDEQEDDDIEYFCQAVGEAPSEDLFPEAKQKRLAKSPGRKRKRWEMDRGRGRLCDQKFPKTKDKSQGAQARRGPRGASRDGGRGRGRGRPGKRVA

SEQ ID NO: 21644 - protein, 538 aa, Homo sapiens
LRSAGSGGRRRPRGGHSSMGQSGRSRHQKRARAQAQLRNLEAYAANPHSFVFTRGCTGRNIRQLSLDVRRVMEPLTASRLQVRKKNSLKDCVAVAGPLGVTHFLILSKTETNVYFKLMRLPGGPTLTFQVKKYSLVRDVVSSLRRHRMHEQQFAHPPLLVLNSFGPHGMHVKLMATMFQNLFPSINVHKVNLNTIKRCLLIDYNPDSQELDFRHYSIKVVPVGASRGMKKLLQEKFPNMSRLQDISELLATGAGLSESEAEPDGDHNITELPQAVAGRGNMRAQQSAVRLTEIGPRMTLQLIKVQEGVGEGKVMFHSFVSKTEEELQAILEAKEKKLRLKAQRQAQQAQNVQRKQEQREAHRKKSLEGMKKARVGGSDEEASGIPSRTASLELGEDDDEQEDDDIEYFCQAVGEAPSEDLFPEAKQKRLAKSPGRKRKRWEMDRGRGRLCDQKFPKTKDKSQGAQVPSPALPTSWQLPTTNSVGSRGTSCGPYWWLSSWWPWPAMAWPCTASASGSSAHGTPPWSSLSSWQSATCSAP

SEQ ID NO: 21645 - protein, 476 aa, Homo sapiens
LTLCLSSPQSRHQKRARAQAQLRNLEAYAANPHSFVFTRGCTGRNIRQLSLDVRRVMEPLTASRLQVRKKNSLKDCVAVAGPLGVTHFLILSKTETNVYFKLMRLPGGPTLTFQVKKYSLVRDVVSSLRRHRMHEQQFAHPPLLVLNSFGPHGMHVKLMATMFQNLFPSINVHKVNLNTIKRCLLIDYNPDSQELDFRHYSIKVVPVGASRGMKKLLQEKFPNMSRLQDISELLATGAGLSESEAEPDGDHNITELPQAVAGRGNMRAQQSAVRLTEIGPRMTLQLIKVQEGVGEGKVMFHSFVSKTEEELQAILEAKEKKLRLKAQRQAQQAQNVQRKQEQREAHRKKSLEGMKKARVGGSDEEASGIPSRTASLELGEDDDEQEDDDIEYFCQAVGEAPSEDLFPEAKQKRLAKSPGRKRKRWEMDRGRGRLCDQKFPKTKDKSQGAQARRGPRGASRDGGRGRGRGRPGKRVA

SEQ ID NO: 21646 - protein, 28 aa, Homo sapiens
LHRREGQIGALLPNMVTAAPLVLPEDVH

SEQ ID NO: 21647 - protein, 142 aa, Homo sapiens
LALISTIMCYVDEERDPHRHLPAGAFLQTPQLGVRVAPGLALQDVSRFIFPFQVLGACGSVNFGTICGTTMCDQTPNTPEAQWCRGASNLSRAGVEGLKVRVTDSHRTRSWTLLFLCKNSPSTSRVALQKKLRPSSLSVAFS

SEQ ID NO: 21648 - protein, 173 aa, Homo sapiens
LQAASVDMLLEEVRAGDRLSGAAARGDVQEVRRLLHRELVHPDALNRFGKTALQVMMFGSTAIALELLKQGASPNVQDTSGTSPVHDAARTGFLDTLKVLVEHGADVNVPDGTGALPIHLAVQEGHTAVVSFLAAESDLHRRDARGLTPLELALQRGAQDLVDILQGHMVAPL

SEQ ID NO: 21649 - protein, 208 aa, Homo sapiens
LRSGRGREHVGSAPWRLPQRRRRRRLRADPARRGGGRAASVDMLLEEVRAGDRLSGAAARGDVQEVRRLLHRELVHPDALNRFGKTALQVMMFGSTAIALELLKQGASPNVQDTSGTSPVHDAARTGFLDTLKVLVEHGADVNVPDGTGALPIHLAVQEGHTAVVSFLAAESDLHRRDARGLTPLELALQRGAQDLVDILQGHMVAPL

SEQ ID NO: 21650 - protein, 106 aa, Homo sapiens
MAGAATQASLESAPRIMRLVAECSRSRARAGELWLPHGTVATPVFMPVGTQATMKGITTEQLDALGCRICLGNTYHLGLRPGPELIQKANGLHGFMNWPHNLLTVS

SEQ ID NO: 21651 - protein, 107 aa, Homo sapiens
VSRAHPNAQPTREAALAAGLAPLPPALTSPSLDTGMPTAYDLSSVIASGSSVGHNNLIPLGSSGAQGSGGGSTSAHYAVNSQFTMGGPAISMASPMSIPTNTMHYGS

SEQ ID NO: 21652 - protein, 115 aa, Homo sapiens
LCPDGFQLVAQRRCEDIDECQDPDTCSQLCVNLEGGYKCQCEEGFQLDPHTKACKAVGSIAYLFFTNRHEVRKMTLDRSEYTSLIPNLRNVVALDTEVASNRIYWSDLSQRMICR

SEQ ID NO: 21653 - protein, 168 aa, Homo sapiens
VEPPSLCSPWGRTDPREPASLHPAEILTMEKEVAQSLLNAKEQVHQGGVELQQLEAGLQEAGEEDTRLKASLLQLTRELEELKEIEADLERQEKEVDEDTTVTIPSAVYVAQLYHQVSKIEWDYECEPGMVKGIHHGPSVAQPIHLDSTQLSRKFISDYLWSLVDTEW

SEQ ID NO: 21654 - protein, 206 aa, Homo sapiens
LRGLEPGVVMAAFRDIEEVSQGLLSLLGANRAEAQQRRLLGRHEQVVERLLETQDGAEKQLREILTMEKEVAQSLLNAKEQVHQGGVELQQLEAGLQEAGEEDTRLKASLLQLTRELEELKEIEADLERQEKEVDEDTTVTIPSAVYVAQLYHQVSKIEWDYECEPGMVKGIHHGPSVAQPIHLDSTQLSRKFISDYLWSLVDTEW

SEQ ID NO: 21655 - protein, 161 aa, Homo sapiens
VSQGLLSLLGANRAEAQQRRLLGRHEQVVERLLETQDGAEKQLREILTMEKEVAQSLLNAKEQVHQGGVELQQLEAGLQEAGEEDTRLKASLLQLTRELEELKEIEADLERQEKEVDEDTTVTIPSAVYVAQLYHQVSKIEWDYECEPGMVKGSILFGEPF

SEQ ID NO: 21656 - protein, 227 aa, Homo sapiens
LSQEACAKMASAGDTQAGPRDAADQNFDYMFKLLLIGNSSVGKTSFLFRYADDSFTPAFVSTVGIDFKVKTVYRHDKRIKLQIWDTAGQERYRTITTAYYRGAMGFLLMYDIANQESFAAVQDWATQIKTYSWDNAQVILVGNKCDLEDERVVPAEDGRRLADDLGFEFFEASAKENINVKQVFERLVDVICEKMNESLEPSSSSGSNGKGPAVGDAPAPQPSSCSC

SEQ ID NO: 21657 - protein, 629 aa, Homo sapiens
VVFAGSFPEESLQRSDAGNLEESGLHRSLLGERVDENTEENHCGETSSQIPDDTLNKKTSPGVKSCESSVCGEVFVGHSSLNRHIRADTAHKPSEYQEYGQEPYKCQQRKKAFRCHPSFQMQEKAHTGEKLYDCKECGKTFISHSSIQRHMIMHNGDGTYKCKFCGKACPCLSIYLIHERVHTGEKPYKCKQCGKAFSYSTSLQIHERTHTGEKPYECKECGKAFGSPNSLYEHRRTHTGEKPYECKQCGKAFRWFHSFQIHERTHSEEKAYECTKCGKAFKCPSYLCRHEVTHSGKKPCECKQCGKALSYLNFQRHMKMHTRMRPYKCKTVEKPLILPVRFEDMKELTLERNLMNASTVVKPSIVPVPFTIMKGLTLERNPMNVSSVVKPSFLPLPFDIMKGLTLERNRMSVSNVGKPSDLPHTFKCMEGLTLKRNPMNVSSVVKPSFFPLPFDIMKGLTLERNPMSVSNVGKPSHLPHTFKCMKGLTLESNCMNLNNVKKPLDLSETFKFMKRHTLERNPIRNMEKHSTISLPFKYMQQCTEDRMPMNVKSVTKHSYLPRSFEYMQEHTLERNPMNVRNAEKRSIIFLLCVYTKGCTLERNHINVRIVGKHSVCLVPFVDIKGLTLE

SEQ ID NO: 21658 - protein, 497 aa, Homo sapiens
VGPALAAGGRGRTLEHPGSREMDAVAFEDVAVNFTQEEWALLGPSQKNLYRYVMQETIRNLDCIRMIWEEQNTEDQYKNPRRNLRCHMVERFSESKDSSQCGETFSLIRDSIVNNSICPGEDPCQSAECEEVIMGHLSLNSHIRVDSGHKPHEYQEYGEKPHTHKQRGKAFSYHHSFQSRGRPHTGKKRYECKECGKTFSSRRNLRRHMVVQGGNRPYKCKLCGKAFFWPSLLRMHERTHTGEKPYECKQCSKAFPFYSSYRRHERMHTGEKPYECKQCSKALPDSSSYIRHERTHTGEKPYTCKQCGKAFSVSSSLRRHETTHSAEKPYECKQCGKTFHHLGSFQIHMKRHTGDRPHKCKICGKGFDRPSLVRYHERIHTGEKPYECKQCGKTLSHSSSFRRHMIMHTGGGPHKCKICGKAFVYPSVCQRHEKSHSGEKPYECKQCGKALSHSSSFRRHMVMHTGDGPNKCKVCGKAFVYPSVCQRHEKTHWRETI

SEQ ID NO: 21659 - protein, 102 aa, Homo sapiens
LGAPPGAEMQPYVQMVLNNLVEIINRPNTPKTLLENTAITIGRLGYVCPQEVAPMLQQFIRPWCTSLRNIRDNEEKDSAFRGICMMIGVNPGGVVQVGAAGL

SEQ ID NO: 21660 - protein, 7 aa, Homo sapiens
MLNLDDL

SEQ ID NO: 21661 - protein, 23 aa, Homo sapiens
LHVFLSPGFSPAELATSESQLLL

SEQ ID NO: 21662 - protein, 23 aa, Homo sapiens
LGAGGNDARKAIAPERATGAREA

SEQ ID NO: 21663 - protein, 34 aa, Homo sapiens
MRALPTVCPAGWKPGSDTIKPNVDDSKEYFSKHN

SEQ ID NO: 21664 - protein, 110 aa, Homo sapiens
LAASGNPHPGLGLLGASGCQDPQSLLPSCATPRAAPEMVSLLKRNNCGKALDIARQARDMLGGNGISDEYHVIRHAMNLEAVNTYEGTHDIHALILGRAITGIQAFTASK

SEQ ID NO: 21665 - protein, 297 aa, Homo sapiens
VALGGTGPSSPTTSWPTVSSPTAATFTRCSRFTEMPTDNFIESSFWNFDALFQPQQHPARDQHDTFFLRDPAEALQLPMDYVQRVKRTHSQGGYGSQGYKYNWKLDEARKNLLRTHTTSASARALYRLAQKKPFTPVKYFSIDRVFRNETLDATHLAEFHQIEGVVADHGLTLGHLMGVLREFFTKLGITQLRFKPAYNPYTEPSMEVFSYHQGLKKWVEVGNSGVFRPEMLLPMGLPENVSVIAWGLSLERPTMIKYGINNIRELVGHKVNLQMVYDSPLCRLDAEPRPPPTQEAA

SEQ ID NO: 21666 - protein, 481 aa, Homo sapiens
LEGVMADGQVAELLLRRLEASDGGLDSAELAAELGMEHQAVVGAVKSLQALGEVIEAELRSTKHWELTAEGEEIAREGSHEARVFRSIPPEGLAQSELMRLPSGKVGFSKAMSNKWIRVDKSAADGPRVFRVVDSMEDEVQRRLQLVRGGQAEKLGEKERSELRKRKLLAEVGSWRDRPFKPYNFLAHGVLPDSGHLHPLLKVRSQFRQIFLEMGFTEMPTDNFIESSFWNFDALFQPQQHPARDQHDTFFLRDPAEALQLPMDYVQRVKRTHSQGGYGSQGYKYNWKLDEARKNLLRTHTTSASARALYRLAQKKPFTPVKYFSIDRVFRNETLDATHLAEFHQIEGVVADHGLTLGHLMGVLREFFTKLGITQLRFKPAYNPYTEPSMEVFSYHQGLKKWVEVGNSGVFRPEMLLPMGLPENVSVIAWGLSLERPTMIKYGINNIRELVGHKVNLQMVYDSPLCRLDAEPRPPPTQEAA

SEQ ID NO: 21667 - protein, 555 aa, Homo sapiens
LVNQTPLMEPGWRWELSPMHLLRLRRHTQDDDTLSPVLQLDTFKMAVHTPVPVAELLLRRLEASDGGLDSAELAAELGMEHQAVVGAVKSLQALGEVIEAELRSTKHWELTAEGEEIAREGSHEARVFRSIPPEGLAQSELMRLPSGKVGFSKAMSNKWIRVDKSAADGPRVFRVVDSMEDEVQRRLQLVRGGQAEKLGEKERSELRKRKLLAEVTLKTYWVSKGSAFSTSISKQETELSPEMISSGSWRDRPFKPYNFLAHGVLPDSGHLHPLLKVRSQFRQIFLEMGFTEMPTDNFIESSFWNFDALFQPQQHPARDQHDTFFLRDPAEALQLPMDYVQRVKRTHSQGGYGSQGYKYNWKLDEARKNLLRTHTTSASARALYRLAQKKPFTPVKYFSIDRVFRNETLDATHLAEFHQIEGVVADHGLTLGHLMGVLREFFTKLGITQLRFKPAYNPYTEPSMEVFSYHQGLKKWVEVGNSGVFRPEMLLPMGLPENVSVIAWGLSLERPTMIKYGINNIRELVGHKVNLQMVYDSPLCRLDAEPRPPPTQEAA

SEQ ID NO: 21668 - protein, 373 aa, Homo sapiens
MADGQVAELLLRRLEASDGGLDSAELAAELGMEHQAVVGAVKSLQALGEVIEAELRSTKHWELTAEGEEIAREGSHEARVFRSIPPEGLAQSELMRLPSGKVGFSKAMSNKWIRVDKSAADGPRVFRVVDSMEDEVQRRLQLVRGGQAEKLGEKERSELRKRKLLAEVTLKTYWVSKGSAFSTSISKQETELSPEMISSGSWRDRPFKPYNFLAHGVLPDSGHLHPLLKVRSQFRQIFLEMGFTEMPTDNFIESSFWNFDALFQPQQHPARDQHDTFFLRDPAEALQLPMDYVQRVKRTHSQGGYGSQGYKYNWKLDEARKNLLRTHTTSASARALYRLAQKVRLAQAGAPVGRGCCQRDLLTHTWAWLGCHP

SEQ ID NO: 21669 - protein, 242 aa, Homo sapiens
MADGQVAELLLRRLEASDGGLDSAELAAELGMEHQAVVGAVKSLQALGEVIEAELRSTKHWELTAEGEEIAREGSHEARVFRSIPPEGLAQSELMRLPSGKVGFSKAMSNKWIRVDKSAADGPRVFRVVDSMEDEVQRRLQLVRGGQAEKLGEKERSELRKRKLLAEVTLKTYWVSKGSAFSTSISKQETELSPEMISSGSWRDRPFKPYNFLAHGVLPDSGHLHPLLKVRSQFRQIFLEMG

SEQ ID NO: 21670 - protein, 80 aa, Homo sapiens
LDSAELAAELGMEHQAVVGAVKSLQALGEVIEAELRSTKHWELTAEGEEIAREGSHEARVFRSIPPEGLAQSELMVGAAG

SEQ ID NO: 21671 - protein, 460 aa, Homo sapiens
LPGLPSPRPAAALPPGRPAMYSPYCLTQDEFHPFIEALLPHVRAFSYTWFNLQARKRKYFKKHEKRMSKDEERAVKDELLGEKPEIKQKWASRLLAKLRKDIRPEFREDFVLTITGKKPPCCVLSNPDQKGKIRRIDCLRQADKVWRLDLVMVILFKGIPLESTDGERLYKSPQCSNPGLCVQPHHIGVTIKELDLYLAYFVHTPESGQSDSSNQQGDADIKPLPNGHLSFQDCFVTSGVWNVTELVRVSQTPVATASGPNFSLADLESPSYYNINQVTLGRRSITSPPSTSTTKRPKSIDDSEMESPVDDVFYPGTGRSPAAGSSQSSGWPNDVDAGPASLKKSGKLDFCSALSSQGSSPRMAFTHHPLPVLAGVRPGSPRATASALHFPSTSIIQQSSPYFTHPTIRYHHHHGQDSLKEFVQFVCSDGSGQATGQHSQRQAPPLPTGLSASDPGTATF

SEQ ID NO: 21672 - protein, 150 aa, Homo sapiens
VESGDRGPRGQDEFHPFIEALLPHVRAFSYTWFNLQARKRKYFKKHEKRMSKDEERAVKDELLGEKPEIKQKWASRLLAKLRKDIRPEFREDFVLTITGKKPPCCVLSNPDQKGKIRRIDCLRQADKNPDNQIVQTSKEMRTSNHCPTGT

SEQ ID NO: 21673 - protein, 442 aa, Homo sapiens
LGFAGCFRSMDEFHPFIEALLPHVRAFSYTWFNLQARKRKYFKKHEKRMSKDEERAVKDELLGEKPEIKQKWASRLLAKLRKDIRPEFREDFVLTITGKKPPCCVLSNPDQKGKIRRIDCLRQADKVWRLDLVMVILFKGIPLESTDGERLYKSPQCSNPGLCVQPHHIGVTIKELDLYLAYFVHTPESGQSDSSNQQGDADIKPLPNGHLSFQDCFVTSGVWNVTELVRVSQTPVATASGPNFSLADLESPSYYNINQVTLGRRSITSPPSTSTTKRPKSIDDSEMESPVDDVFYPGTGRSPAAGSSQSSGWPNDVDAGPASLKKSGKLDFCSALSSQGSSPRMAFTHHPLPVLAGVRPGSPRATASALHFPSTSIIQQSSPYFTHPTIRYHHHHGQDSLKEFVQFVCSDGSGQATGQHSQRQAPPLPTGLSASDPGTATF

SEQ ID NO: 21674 - protein, 524 aa, Homo sapiens
LCRGELTGVHGCDRTWRCHGRDRAWRGYQQRDEFHPFIEALLPHVRAFSYTWFNLQARKRKYFKKHEKRMSKDEERAVKDELLGEKPEIKQKWASRLLAKLRKDIRPEFREDFVLTITGKKPPCCVLSNPDQKGKIRRIDCLRQADKVWRLDLVMVILFKGIPLESTDGERLYKSPQCSNPGLCVQPHHIGVTIKELDLYLAYFVHTPESGQSDSSNQQGDADIKPLPNGHLSFQDCFVTSGVWNVTELVRVSQTPVATASGPNFSLADLESPSYYNINQVTLGRRSITSPPSTSTTKRPKSIDDSEMESPVDDVFYPGTGRSPAAGSSQSSGWPNDVDAGPASLKKSGKLDFCSALSSQGSSPRMAFTHHPLPVLAGVRPGSPRATASALHFPSTSIIQQSSPYFTHPTIRYHHHHGQDSLKEFVQFVCSDGSGQATGQPNGSGQGKVPGSFLLPPPPPVARPVPLPMPDSKSTSTAPDGAALTPPSPSFATTGASSANRFVSIGPRDGNFLNIPQQSQSWFL

SEQ ID NO: 21675 - protein, 510 aa, Homo sapiens
MEMSWARQSLAGIPAACDEFHPFIEALLPHVRAFSYTWFNLQARKRKYFKKHEKRMSKDEERAVKDELLGEKPEIKQKWASRLLAKLRKDIRPEFREDFVLTITGKKPPCCVLSNPDQKGKIRRIDCLRQADKVWRLDLVMVILFKGIPLESTDGERLYKSPQCSNPGLCVQPHHIGVTIKELDLYLAYFVHTPESGQSDSSNQQGDADIKPLPNGHLSFQDCFVTSGVWNVTELVRVSQTPVATASGPNFSLADLESPSYYNINQVTLGRRSITSPPSTSTTKRPKSIDDSEMESPVDDVFYPGTGRSPAAGSSQSSGWPNDVDAGPASLKKSGKLDFCSALSSQGSSPRMAFTHHPLPVLAGVRPGSPRATASALHFPSTSIIQQSSPYFTHPTIRYHHHHGQDSLKEFVQFVCSDGSGQATGQPNGSGQGKVPGSFLLPPPPPVARPVPLPMPDSKSTSTAPDGAALTPPSPSFATTGASSANRFVSIGPRDGNFLNIPQQSQSWFL

SEQ ID NO: 21676 - protein, 120 aa, Homo sapiens
VVVRWGWGSARERRGKGQMGSHLLLPSHRGKAADEAMEERRRLLQNKRKEPPEDVAQRAARLKTFPCKRFKEGTCQRGDQCCYSHSPPTPRVSADAAPDCPETSNQTPPGPGAAAGPGID

SEQ ID NO: 21677 - protein, 679 aa, Homo sapiens
LCPPPPPEPGLAGGGASGCLMQGSSLWLSLTFRSARVLSRARFFEWQSPGLPNTAAMENGTGPYGEERPREVQETTVTEGAAKIAFPSANEVFYNPVQEFNRDLTCAVITEFARIQLGAKGIQIKVPGEKDTQKVVVDLSEQEEEKVELKESENLASGDQPRTAAVGEICEEGLHVLEGLAASGLRSIRFALEVPGLRSVVANDASTRAVDLIRRNVQLNDVAHLVQPSQADARMLMYQHQRVSERFDVIDLDPYGSPATFLDAAVQAVSEGGLLCVTCTDMAVLAGNSGETCYSKYGAMALKSRACHEMALRIVLHSLDLRANCYQRFVVPLLSISADFYVRVFVRVFTGQAKVKASASKQALVFQCVGCGAFHLQRLGKASGVPSGRAKFSAACGPPVTPECEHCGQRHQLGGPMWAEPIHDLDFVGRVLEAVSANPGRFHTSERIRGVLSVITEELPDVPLYYTLDQLSSTIHCNTPSLLQLRSALLHADFRVSLSHACKNAVKTDAPASALWDIMRCWEKECPVKRERLSETSPAFRILSVEPRLQANFTIREDANPSSRQRGLKRFQANPEANWGPRPRARPGGKAADEAMEERRRLLQNKRKEPPEDVAQRAARLKTFPCKRFKEGTCQRGDQCCYSHSPPTPRVSADAAPDCPETSNQTPPGPGAAAGPGID

SEQ ID NO: 21678 - protein, 650 aa, Homo sapiens
LCPPPPPEPGLAGGGASGCLMQGSSLWLSLTFRSARVLSRARFFEWQSPGLPNTAAMENGTGPYGEERPREVQETTVTEGAAKIAFPSANEVFYNPVQEFNRDLTCAVITEFARIQLGAKGIQIKVPGEKDTQKVVVDLSEQEEEKVELKESENLASGDQPRTAAVGEICEEGLHVLEGLAASGLRSIRFALEVPGLRSVVANDASTRAVDLIRRNVQLNDVAHLVQPSQADARMLMYQHQRVSERFDVIDLDPYGSPATFLDAAVQAVSEGGLLCVTCTDMAVLAGNSGETCYSKYGAMALKSRACHEMALRIVLHSLDLRANCYQRFVVPLLSISADFYVRVFVRVFTGQAKVKASARAKFSAACGPPVTPECEHCGQRHQLGGPMWAEPIHDLDFVGRVLEAVSANPGRFHTSERIRGVLSVITEELPDVPLYYTLDQLSSTIHCNTPSLLQLRSALLHADFRVSLSHACKNAVKTDAPASALWDIMRCWEKECPVKRERLSETSPAFRILSVEPRLQANFTIREDANPSSRQRGLKRFQANPEANWGPRPRARPGGKAADEAMEERRRLLQNKRKEPPEDVAQRAARLKTFPCKRFKEGTCQRGDQCCYSHSPPTPRVSADAAPDCPETSNQTPPGPGAAAGPGID

SEQ ID NO: 21679 - protein, 576 aa, Homo sapiens
LCQHGGAQVLIRETCTLTNSVFCGYESRARFFEWQSPGLPNTAAMENGTGPYGEERPREVQETTVTEGAAKIAFPSANEVFYNPVQEFNRDLTCAVITEFARIQLGAKGIQIKVPGEKDTQKVVVDLSEQEEEKVELKESENLASGDQPRTAAVGEICEEGLHVLEGLAASGLRSIRFALEVPGLRSVVANDASTRAVDLIRRNVQLNDVAHLVQPSQADARMLMYQHQRVSERFDVIDLDPYGSPATFLDAAVQAVSEGGLLCVTCTDMAVLAGNSGETCYSKYGAMALKSRACHEMALRIVLHSLDLRANCYQRFVVPLLSISADFYVRVFVRVFTGQAKVKASASKQALVFQCVGCGAFHLQRLGKASGVPSGRAKFSAACGPPVTPECEHCGQRHQLGGPMWAEPIHDLDFVGRVLEAVSANPGRFHTSERIRGVLSVITEELPDVPLYYTLDQLSSTIHCNTPSLLQLRSALLHADFRVSLSHACKNAVKTDAPASALWDIMRCWEKECPVKRERLSETSPAFRILSVEPRLQANFTIREDANPSSRQRGLKRFQANPEANWGPRPRARPG

SEQ ID NO: 21680 - protein, 119 aa, Homo sapiens
LEAVSANPGRFHTSERIRGVLSVITEELPDVPLYYTLDQLSSTIHCNTPSLLQLRSALLHADFRVSLSHACKNAVKTDAPASALWDIMRCWVRAGLTSCRWEGRWWSPGGPLGLVFPNL

SEQ ID NO: 21681 - protein, 172 aa, Homo sapiens
LSPTRCAVITEFARIQLGAKGIQIKVPGEKDTQKVVVDLSEQEEEKVELKESENLASGDQPRTAAVGEICEEGLHVLEGLAASGLRSIRFALEVPGLRSVVANDASTRAVDLIRRNVQLNDVAHLVQPSQADARMLMYQHQRVSERFDVIDLDPYGSPATFLDAAVQAGCCV

SEQ ID NO: 21682 - protein, 287 aa, Homo sapiens
LSGPIRVRVRNFGSRPSSSDCSCATSVSLPGTGNRGVSEPVVRSAPAACSVPPGSPRRCRRRVAMEVQKEAQRIMTLSVWKMYHSRMQRGGLRLHRSLQLSLVMRSARELYLSAKVEALEPEVSLPAALPSDPRLHPPREAESTAETATPDGEHPFPEPMDTQEAPTAEETSACCAPRPAKVSRKRRSSSLSDGGDAGLVPSKKARLEEKEEEEGASSEVADRLQPPPAQAEGAFPNLARVLQRRFSGLLNCSPAAPPTAPPACEAKPACRPADSMLNVLVRAVVAF

SEQ ID NO: 21683 - protein, 118 aa, Homo sapiens
LCLPATTAHSPASSAACRTMAQGQRKFQAHKPAKSKTAAAASEKNRGPRKGGRVIAPKKARVVQQQKLKKNLEVGIRKKIEHDVVMKASSSLPKKLALLKAPAKKKGAAAATSSKTPS

SEQ ID NO: 21684 - protein, 59 aa, Homo sapiens
LFLSATFICRWNLEVGIRKKIEHDVVMKASSSLPKKLALLKAPAKKKGAAAATSSKTPS

SEQ ID NO: 21685 - protein, 175 aa, Homo sapiens
LVSPTPLTPPDPGAASATATAPAPAAARRGEAMAKVSVLNVAVLENPSPFHSPFRFEISFECSEALADDLEWKIIYVGSAESEEFDQILDSVLVGPVPAGRHMFVFQLQRNILASNPRVTRFHINWDNNMDRLEAIETQDPSLGCGLPLNCTPIKGLGLPGCIPGLLPENSMDCI

SEQ ID NO: 21686 - protein, 319 aa, Homo sapiens
LVSSGHAKKLGDSFALLTRCGEGAPLIGPRSLGARRSALQDWLRGCARRQGALAVIGQRAEAGYLKAARGLGAHFSSRREEAGVDLVSPTPLTPPDPGAASATATAPAPAAARRGEAMAKVSVLNVAVLENPSPFHSPFRFEISFECSEALADDLEWKIIYVGSAESEEFDQILDSVLVGPVPAGRHMFVFQADAPNPSLIPETDAVGVTVVLITCTYHGQEFIRVGYYVNNEYLNPELRENPPMKPDFSQLQRNILASNPRVTRFHINWDNNMDRLEAIETQDPSLGCGLPLNCTPIKGLGLPGCIPGLLPENSMDCI

SEQ ID NO: 21687 - protein, 199 aa, Homo sapiens
VDLVSPTPLTPPDPGAASATATAPAPAAARRGEAMAKVSVLNVAVLENPSPFHSPFRFEISFECSEALADDLEWKIIYVGSAESEEFDQILDSVLVGPVPAGRHMFVFQADAPNPSLIPETDAVGVTVVLITCTYHGQEFIRVGYYVNNEYLNPELRENPPMKPDFSQVGPVSTSCFPQGRSLYLGGVQPFKLRVKVTS

SEQ ID NO: 21688 - protein, 115 aa, Homo sapiens
VDLVSPTPLTPPDPGAASATATAPAPAAARRGEAMAKVSVLNVAVLENPSPFHSPFRFEISFECSEALADDLEWKIIYVGSAESEEFDQILDSVLVGPVPAGRHMFVFQRLMPWV

SEQ ID NO: 21689 - protein, 82 aa, Homo sapiens
VDLVSPTPLTPPDPGAASATATAPAPAAARRGEAMAKVSVLNVAVLENPSPFHSPFRFEISFECSEALADGRRPQPIPHPRD

SEQ ID NO: 21690 - protein, 115 aa, Homo sapiens
VSDGLHLFLLHPSLSRYQQFKDFQRRILVATNLFGRGMDIERVNIVFNYDMPEDSDTYLHRVARAGRFGTKGLAITFVSDENDAKILNDVQDRFEVNVAELPEEIDISTYIEQSR

SEQ ID NO: 21691 - protein, 120 aa, Homo sapiens
VRRTASSLISWMCWSLTSLSRYQQFKDFQRRILVATNLFGRGMDIERVNIVFNYDMPEDSDTYLHRVARAGRFGTKGLAITFVSDENDAKILNDVQDRFEVNVAELPEEIDISTYIEQSR

SEQ ID NO: 21692 - protein, 453 aa, Homo sapiens
VSERPAENRSWKCLLAARGEERGASIMAEQDVENDLLDYDEEEEPQAPQESTPAPPKKDIKGSYVSIHSSGFRDFLLKPELLRAIVDCGFEHPSEVQHECIPQAILGMDVLCQAKSGMGKTAVFVLATLQQIEPVNGQVTVLVMCHTRELAFQISKEYERFSKYMPSVKVSVFFGGLSIKKDEEVLKKNCPHVVVGTPGRILALVRNRSFSLKNVKHFVLDECDKMLEQLDMRRDVQEIFRLTPHEKQCMMFSATLSKDIRPVCRKFMQDPMEVFVDDETKLTLHGLQQYYVKLKDSEKNRKLFDLLDVLEFNQVIIFVKSVQRCMALAQLLVEQNFPAIAIHRGMAQEERLSRYQQFKDFQRRILVATNLFGRGMDIERVNIVFNYDMPEDSDTYLHRVARAGRFGTKGLAITFVSDENDAKILNDVQDRFEVNVAELPEEIDISTYIEQSR

SEQ ID NO: 21693 - protein, 293 aa, Homo sapiens
VSERPAENRSWKCLLAARGEERGASIMAEQDVENDLLDYDEEEEPQAPQESTPAPPKKDIKGSYVSIHSSGFRDFLLKPELLRAIVDCGFEHPSEVQHECIPQAILGMDVLCQAKSGMGKTAVFVLATLQQIEPVNGQVTVLVMCHTRELAFQISKEYERFSKYMPSVKVSVFFGGLSIKKDEEVLKKNCPHVVVGTPGRILALVRNRSFSLKNVKHFVLDECDKMLEQLDMRRDVQEIFRLTPHEKQCMMFSATLSKDIRPVCRKFMQDVLWEVSHKGVAHWKVLGRRDAQR

SEQ ID NO: 21694 - protein, 170 aa, Homo sapiens
LKRGSRRTGTAAPRQRVSGLQLLPRLRSLATPQPLRHQDWPLPRLTLPSSRCHWLPGTDMRRDVQEIFRLTPHEKQCMMFSATLSKDIRPVCRKFMQDVSRARVAALAFPRGLEPGAPGHPHGPHGTEDAGMLGAGGASFPPLGLVKLGVKLGPHLSRARAYIQLLSDVY

SEQ ID NO: 21695 - protein, 242 aa, Homo sapiens
LLGWFQAPPALSEPRQGRWEMGLCPGRQLQLSPQRLSLPQAPLPEAWLEAHGHGCSAPACKWIAAPPAPALAGHPPAPQAPGLATPAAHSALVTVPLAPWHRLGGVWVWSGVGVLHGRRSCPPMSCPPHLDMRRDVQEIFRLTPHEKQCMMFSATLSKDIRPVCRKFMQDVSRARVAALAFPRGLEPGAPGHPHGPHGTEDAGMLGAGGASFPPLGLVKLGVKLGPHLSRARAYIQLLSDVY

SEQ ID NO: 21696 - protein, 316 aa, Homo sapiens
MAEQDVENDLLDYDEEEEPQAPQESTPAPPKKDIKGSYVSIHSSGFRDFLLKPELLRAIVDCGFEHPSEVQHECIPQAILGMDVLCQAKSGMGKTAVFVLATLQQIEPVNGQVTVLVMCHTRELAFQISKEYERFSKYMPSVKVSVFFGGLSIKKDEEVLKKNCPHVVVGTPGRILALVRNRSFSLKNVKHFVLDECDKMLEQLDMRRDVQEIFRLTPHEKQCMMFSATLSKDIRPVCRKFMQDVSRARVAALAFPRGLEPGAPGHPHGPHGTEDAGMLGAGGASFPPLGLVKLGVKLGPHLSRARAYIQLLSDVY

SEQ ID NO: 21697 - protein, 208 aa, Homo sapiens
MAEQDVENDLLDYDEEEEPQAPQESTPAPPKKDIKGSYVSIHSSGFRDFLLKPELLRAIVDCGFEHPSEVQHECIPQAILGMDVLCQAKSGMGKTAVFVLATLQQIEPVNGQVTVLVMCHTRELAFQISKEYERFSKYMPSVKVSVFFGGLSIKKDEEVLKKNCPHVVVGTPGRILALVRNRSFSLKNVKHFVLDECDKMLEQLGSPP

SEQ ID NO: 21698 - protein, 79 aa, Homo sapiens
MPSVKVSVFFGGLSIKKDEEVLKKNCPHVVVGTPGRILALVRNRSFSLKNVKHFVLDECDKMLEQLGESSALAAPAESQ

SEQ ID NO: 21699 - protein, 106 aa, Homo sapiens
VHPGSRPSRSASPAVQHECIPQAILGMDVLCQAKSGMGKTAVFVLATLQQIEPVNGQVTVLVMCHTRELAFQISKEYERFSKYMPSVKVSPSGQTGPGATWFLQLC

SEQ ID NO: 21700 - protein, 187 aa, Homo sapiens
VSERPAENRSWKCLLAARGEERGASIMAEQDVENDLLDYDEEEEPQAPQESTPAPPKKDIKGSYVSIHSSGFRDFLLKPELLRAIVDCGFEHPSEVQHECIPQAILGMDVLCQAKSGMGKTAVFVLATLQQIEPVNGQVTVLVMCHTRELAFQISKEYERFSKYMPSVKVSPSGQTGPGATWFLQLC

SEQ ID NO: 21701 - protein, 149 aa, Homo sapiens
MAEQDVENDLLDYDEEEEPQAPQESTPAPPKKDIKGSYVSIHSSGFRDFLLKPELLRAIVDCGFEHPSEGTPSGCYPLAQVLTKTRPALPAQSGAASSLPWVREGPVCPADQLCPAGPVAALGSGAFCFDQADTPALQVSVALSGLGLF

SEQ ID NO: 21702 - protein, 83 aa, Homo sapiens
MAEQDVENDLLDYDEEEEPQAPQESTPAPPKKDIKGSYVSIHSSGFRDFLLKPELLRAIVDCGFEHPSEALQVSVALSGLGLF

SEQ ID NO: 21703 - protein, 118 aa, Homo sapiens
VGLSLWAHSAKLDSVYLVHRHDWDPVYRVHDPGMYQVGTLGRTHWGQGSGECWEPPPHPTSLTSLHSRWDMFHSLAGEGPTANSLCPSPTLGHLPLGTRGLLVGNGSQGRCMHSFVSL

SEQ ID NO: 21704 - protein, 140 aa, Homo sapiens
VDLVGGFRCTCPPGYTGLRCEADINECRSGACHAAHTRDCLQDPGGGFRCLCHAGFSGPRCQTVLSPCESQPCQHGGQCRPSPGPGGGLTFTCHCAQVGVGGGLWRRSRGVASGVVGAWRLGGGCGFRGDIEGKGVSGKC

SEQ ID NO: 21705 - protein, 162 aa, Homo sapiens
LCKYRTFYEDEMASHLDSKFHKEHFKYVGTKLPKQTADFLQEYVTNKTKKTEELRKTVEDLDGLIQQIYRDQDLTQEIAMEHFVKKVEAAHCAACDLFIPMQFGIIQKHLKTMDHNRNRRQKYPTVTTSSADGQAGGPGHCFNTGGRSMTCKCSAVNWALSL

SEQ ID NO: 21706 - protein, 51 aa, Homo sapiens
LPPQEHRLNEMERTQAQLRDAVQSLQLSPRTRGSWSQPQPLKAPCLNGDTT

SEQ ID NO: 21707 - protein, 134 aa, Homo sapiens
LIGPVIPTIPVSGPTLLQAYLGPAPQSGQAPPPLQAPPPESLALPPGAGRDFLSLCPSPQSPDPHRSSEFDSEHNLTSNEGHSLKNLEHRLNEMERTQAQLRDAVQSLQLSPRTRGSWSQPQPLKAPCLNGDTT

SEQ ID NO: 21708 - protein, 127 aa, Homo sapiens
LIGPVIPTIPVSGPTLLQAYLGPAPQSGQAPPPLQAPPPESLALPPGAGRDFLSLCPSPQSPDPHRSSEFDSEHNLTSNEGHSLKNLVRLPSEPWGRSGRWRSKGCGAALSWFLNPITTASPGAPPK

SEQ ID NO: 21709 - protein, 88 aa, Homo sapiens
VLRATGRAQALVTDLGTAELARCGGREALLFRENTLATKAIDEYMKLVAQDYLQETLGELGESPCQRPAGELGDLGEVLRVLEQPGFW

SEQ ID NO: 21710 - protein, 425 aa, Homo sapiens
MDPPSPSRTSQTQPTATSPLTSYRWHTGGGGEKAAGGFRWGRFAGWGRALSHQEPMVSTQPAPRSIFRRVLSAPPKESRTSRLRLSKALWGRHKNPPPEPDPEPEQEAPELEPEPELEPPTPQIPEAPTPNVPVWDIGGFTLLDGKLVLLGGEEEGPRRPRVGSASSEGSIHVAMGNFRDPDRMPGKTEPETAGPNQVHNVRGLLKRLKEKKKARLEPRDGPPSALGSRESLATLSELDLGAERDVRIWPLHPSLLGEPHCFQVTWTGGSRCFSCRSAAERDRWIEDLRRQFQPTQVIALRKAGHGDPAHRPGPPLPLYPKPARSITRAPNTPAPPASLQRLQDSPSIYYQPREYQTRPFCPLPAPYAPKALPARQSRSLYSSTTLVCPGAPNSPGEPRKARRLPRNRLRTPVAPLLSPKAQQSP

SEQ ID NO: 21711 - protein, 75 aa, Homo sapiens
LESQYSEKEDKYEEEIKLLSDKLKEAETRAEFAERTVAKLEKTIDDLEEKLAQAKEENVGLHQTLDQTLNELNCI

SEQ ID NO: 21712 - protein, 106 aa, Homo sapiens
VQTLNRNPGSCRHWHSYSEGLGHPRVSQVTFPPPQEAMTEAGKLPLPLPPRLDWFVHTQMGQLAQDGVPEWFHGAISRDSLGSGVYSPLEEAEGQKGRDDCLRSHS

SEQ ID NO: 21713 - protein, 109 aa, Homo sapiens
VQTLNRNPGSCRHWHSYSEGLGHPRVSQVTFPPPQEAMTEAGKLPLPLPPRLDWFVHTQMGQLAQDGVPEWFHGAISREDAENLLESQPLGSFLIRVSHSHVGYTLSYK

SEQ ID NO: 21714 - protein, 94 aa, Homo sapiens
VTFPPPQEAMTEAGKLPLPLPPRLDWFVHTQMGQLAQDGVPEWFHGAISREDAENLLESQPLGSFLIRVSHSHVGYTLSYNVSAEPKAAAAISW

SEQ ID NO: 21715 - protein, 104 aa, Homo sapiens
MRGSRMSQPPQCLRRAQSSCCHFMVKLLDDGTFMIPGEKVAHTSLDALVTFHQQKPIEPRRELLTQPCRQKDPANVDYEDLFLYSNAVAEEAACPVSAPEEVCI

SEQ ID NO: 21716 - protein, 66 aa, Homo sapiens
VPRARPAGGEKPYHCNWDGCGWKFARSDELTRHYRKHTGHRPFQCHLCDRAFSRSDHLALHMKRHM

SEQ ID NO: 21717 - protein, 96 aa, Homo sapiens
VEGGKMADSSGRGAGKPATGPTNSSSAKKKDKRVQGGRVIESRYLQYEKKTTQKQIAVGSERVTCSPRCWKGMAQLHLTWISLLLMTKASSKRRHS

SEQ ID NO: 21718 - protein, 661 aa, Homo sapiens
LLERLRVSRAPEDTKALEPRCGPPCGAGQPGWEPCSALERGPPSRGEERRMPTSPPREVGNRPTRRCASDPARACARRPAWLAGCGMRCGRRSRVEELLRCGADPNLVLEDGAAAVHLAAGARHPRGLRCLGALLRQGGDPNARSVEALTPLHVAAAWGCRRGLELLLSQGADPALRDQDGLRPLDLALQQGHLECARVLQDLDTRTRTRTRIGAETQEPEPAPGTPGLSGPTDETLDSIALQKQPCRGDNRDIGLEADPGPPSLPVPLETVDKHGSSASPPGHWDYSSDASFVTAVEVSGAEDPASDTPPWAGSLPPTRQGLLHVVHANQRVPRSQGTEAELNARLQALTLTPPNAAGFQSSPSSMPLLDRSPAHSPPRTPTPGASDCHCLWEHQTSIDSDMATLWLTEDEASSTGGREPVGPCRHLPVSTVSDLELLKGLRALGPEFSGHSLELAAALRTGCIPDVQADEDALAQQFEQPDPARRWREGVVKSSFTYLLLDPRETQDLPARAFSLTPAERLQTFIRAIFYVGKGTRARPYVHLWEALGHHGRSRKQPHQACPKVRQILDIWASGCGVVSLHCFQHVVAVEAYTREACIVEALGIQTLTNQKQGHCYGVVAGWPPARRRRLGVHLLHRALLVFLAEGERQLHPQDIQARG

SEQ ID NO: 21719 - protein, 439 aa, Homo sapiens
MWTPVRRGAAWLGTLLGPGEGPPEPRGGAAHAHKPPAGSRKSTDQAVRFGPSQGMCSEARLARRLRDALREEEPWAVEELLRCGADPNLVLEDGAAAVHLAAGARHPRGLRCLGALLRQGGDPNARSVEALTPLHVAAAWGCRRGLELLLSQGADPALRDQDGLRPLDLALQQGHLECARVLQDLDTRTRTRTRIGAETQEPEPAPGTPGLSGPTDETLDSIALQKQPCRGDNRDIGLEADPGPPSLPVPLETVDKHGSSASPPGHWDYSSDASFVTAVEVSGAEDPASDTPPWAGSLPPTRQGLLHVVHANQRVPRSQGTEAELNARLQALTLTPPNAAGFQSSPSSMPLLDRSPAHSPPRTPTPGASDCHCLWEHQTSIDSDMATLWLTEDEASSTGGREPVGPCRHLPVSTVSDLELLKGLRALGRLRTCQPEPSH

SEQ ID NO: 21720 - protein, 77 aa, Homo sapiens [sequence omitted]

SEQ ID NO: 21721 - protein, 189 aa, Homo sapiens
LRGPLKKSNAPLVNVTLYYEALCGGCRAFLIRELFPTWLLVMEILNVTLVPYGNAQEQNVSGRWEFKCQHGEEECKFNKVEACVLDELDMELAFLTIVCMEEFEDMERSLPLCLQLYAPGLSPDTIMECAMGDRGMQLMHANAQRTDALQPPHEYVPWVTVNGVRIFLALSLTLIVPWSQGWTRQRDQR

SEQ ID NO: 21722 - protein, 232 aa, Homo sapiens
LGSTVTRDWSARRKQSGAPVPWFLRAMARGGWRRLRRLLSAGQLLFQGRALLVTNTLGCGALMAAGDGVRQSWEIRARPGQVFDPRRSASMFAVGCSMGPFLHYWYLSLDRLFPASGLRGFPNVLKKVLVDQLVASPLLGVWYFLGLGCLEGQTVGESCQELREKFWEFYKADWCVWPAAQFVNFLFVPPQFRVTYINGLTLGWDTYLSYLKYRSPVPLTPPGCVALDTRAD

SEQ ID NO: 21723 - protein, 191 aa, Homo sapiens
VSWAPRTWRGCGPGDPPSPSVPRNSERARPPGIPPPRGCPGLDKLDPLLPGGRAHDPPALALPLSPARPPRVAQTRASRLPLCTPRRGRGLRGGAASNPAFPLLLLFFFFLWKREEQSVRFCPIYVSTREQTLVVCVCVFLCWFFKEMGRRKKNSPPLSSISLPPSVLSTGPPSLFCSVLFCFATSPHSCL

SEQ ID NO: 21724 - protein, 142 aa, Homo sapiens
VQRRRRKWPASPVPAGTMLVELKNGETYNGHLVSCDNWMNINLREVICTSRDGDKFWRMPECYIRGSTIKYLRIPDEIIDMVKEEVVAKGRGRGGLQQQKQQKGRGMGGAGRGVFGGRGRGGIPGTGRGQPEKKPGRQAGKQ

SEQ ID NO: 21725 - protein, 179 aa, Homo sapiens
LACVSATFFQLSGARRGDDRRERVQRRRRKWPASPVPAGTMLPLSLLKTAQNHPMLVELKNGETYNGHLVSCDNWMNINLREVICTSRDGDKFWRMPECYIRGSTIKYLRIPDEIIDMVKEEVVAKGRGRGGLQQQKQQKGRGMGGAGRGVFGGRGRGGIPGTGRGQPEKKPGRQAGKQ

SEQ ID NO: 21726 - protein, 71 aa, Homo sapiens
VQASHHVGPGCVGDHLAGCRQSHGRSAFVHVPPLGKPYNADQLGRALRAIIEEMLDLLEQSEGKINYCHKH

SEQ ID NO: 21727 - protein, 23 aa, Homo sapiens
LRQDDLPQKCGHTNNLRPKKKVK

SEQ ID NO: 21728 - protein, 172 aa, Homo sapiens
MAGFAELGLSSWLVEQCRQLGLKQPTPVQLGCIPAILEGRDCLGCAKTGSGKTAAFVLPILQKLSEDPYGIFCLVLTPTRELAYQIAEQFRVLGKPLGLKDCIIVGGMGTGAGRRGKPQHGTLAALDHLPSPASHALSPRHGGPGAGALSETTRGHRHAGAPGRSPAQLQHF

SEQ ID NO: 21729 - protein, 199 aa, Homo sapiens
MAGFAELGLSSWLVEQCRQLGLKQPTPVQLGCIPAILEGRDCLGCAKTGSGKTAAFVLPILQKLSEDPYGIFCLVLTPTRGPAELNKMAPVQWLTPVIPALWELQGAGLPDRRAVPGPGEASRAERLHHRRWHGYGSWEAGEAPAWDPSSFGPPAQPCLSCSVPQTWWPRRWSSLGNHTWSSPRRGAWQITCAAPTLLV

SEQ ID NO: 21730 - protein, 653 aa, Homo sapiens
LHSQGLLTFRDVAIEFSLEEWQHLDIAQQNLYRNVMLENYRNLAFLGIAVSKPDLITCLEQGKEPWNMKRHEMVDEPPGMCPHFAQDLWPEQGMEDSFQKAILRRYGKYGHENLQLRKGCKSVDEYKVNKEGYNGLNQCFTTAQSKVFQCDKYLKVFYKFLNSNRPKIRHTEKKSFKCKKRVKLFCMLSHKTQHKSIYHREKSYKCKECGKTFNWSSTLTNHRKIYTEEKPYKCEEYNKSPKQLSTLTTHEIIHAGEKLYKCEECGEAFNRSSNLTTHKIIHTGEKPYKCEECGKAFIWSSTLTEHKKIHTRKKPYKCEECGKAFIWSSTLTRHKRMHTGEKPYKCEECGKAFSQSSTLTTHKIIHTGEKRYKCLECGKAFKQLSTLTTHKIIHVGEKLYKCEECGKGFNRSSNLTTHKIIHTGEKPYKCEECGKAFIWSSTLTKHKRIHTREKPYKCEECGKAFIWSSTLTRHKRMHTGEKPYKCEECGKSFSQSSTLTTHKIIHTGEKPYKCEECGKAFNWSSTLTKHKIIHTEEKPYKCEKCGKAFKQSSILTNHKRIHTGEKPYKCEECGKSFNRSSTFTKHKVIHTGVKPYKCEECGKAFFWSSTLTKHKRIHTGEQPYKWEKFGKAFNRSSHLTTDKITHWREILQV

SEQ ID NO: 21731 - protein, 45 aa, Homo sapiens
MRASWLLPGLREIKLWAQVMKPTSPGDTVSELQGEISRPAKLSSR

SEQ ID NO: 21732 - protein, 32 aa, Homo sapiens
MKSVIYHALSQKEANDSDVQVSSWQGVQEQQR

SEQ ID NO: 21733 - protein, 95 aa, Homo sapiens
MKSVIYHALSQKEANDSDVQPSGAQRAEAFVRAFLKRSTPRMSPQAREDQLQRKAVVLEYFTRHKRKEKKKKAKGLSARQRRELRLFDIKPEQQR

SEQ ID NO: 21734 - protein, 28 aa, Homo sapiens
MKSVIYHALSQKEANDSDVQIQPFPPSP

SEQ ID NO: 21735 - protein, 198 aa, Homo sapiens
LVLVGEMGPGYLLLRSPNRTATGMGPPYLRKTEGWSTGVIYHALSQKEANDSDVQLWVADAWRMSRLRASPSGAQRAEAFVRAFLKRSTPRMSPQAREDQLQRKAVVLEYFTRHKRKEKKKKAKGLSARQRRELRLFDIKPEQQRYSLFLPLHELWKQYIRDLCSGLKPDTQPQMIQAKLLKADLHGAIISALVAVRK

SEQ ID NO: 21736 - protein, 414 aa, Homo sapiens
VLTRPGATRVHRDAKERDTMKEDGGAEFSARSRKRKANVTVFLQDPDEEMAKIDRTARDQCGSQPWDNNAVCADPCSLIPTPDKEDDDRVYPNSTCKPRIIAPSRGSPLPVLSWANREEVWKIMLNKEKTYLRDQHFLEQHPLLQPKMRAILLDWLMEVCEVYKLHRETFYLAQDFFDRYMATQENVVKTLLQLIGISSLFIAAKLEEIYPPKLHQFAYVTDGACSGDEILTMELMIMKALKWRLSPLTIVSWLNVYMQVAYLNDLHEVLLPQYPQQIFIQIAELLDLCVLDVDCLEFPYGILAASALYHFSSSELMQKVSGYQWCDIENCVKWMVPFAMVIRETGSSKLKHFRGVADEDAHNIQTHRDSLDLLDKARAKKAMLSEQNRASPLPSGLLTPPQSGKKQSSGPEMA

SEQ ID NO: 21737 - protein, 369 aa, Homo sapiens
VLTRPGATRVHRDAKERDTMKEDGGAEFSARSRKRKANVTVFLQDPDEEMAKIDRTARDQCGSQPWDNNAVCADPCSLIPTPDKEDDDRVYPNSTCKPRIIAPSRGSPLPVLSWANREEVWKIMLNKEKTYLRDQHFLEQHPLLQPKMRAILLDWLMEVCEVYKLHRETFYLAQDFFDRYMATQENVVKTLLQLIGISSLFIAAKLEEIYPPKLHQFAYVTDGACSGDEILTMELMIMKLLDLCVLDVDCLEFPYGILAASALYHFSSSELMQKVSGYQWCDIENCVKWMVPFAMVIRETGSSKLKHFRGVADEDAHNIQTHRDSLDLLDKARAKKAMLSEQNRASPLPSGLLTPPQSGKKQSSGPEMA

SEQ ID NO: 21738 - protein, 165 aa, Homo sapiens
MAALTRDPQFQKLQQWYREHRSELNLRRLFDANKDRFNHFSLTLNTNHGHILVDYSKNLVTEDVMRMLVDLAKSRGVEAARERMFNGEKINYTEGRAVLHVALRNRSNTPILVDGKDVMPEVNKVLDKMKSFCQVSGYWAGLTLGRVCELFGNLGALRGSSSLFL

SEQ ID NO: 21739 - protein, 92 aa, Homo sapiens
MAAVLKPVLLGLRDAPVHGSPTGPGAWTASKLGGIPDALPTVAAPRPVCQRCGQPLALVVQVYCPLEGSPFHRLLHVFACACPGCSTGGARR

SEQ ID NO: 21740 - protein, 140 aa, Homo sapiens
VSFPAGWGGPAGWSRGAALTALCLHPEAGRCSAPSACRCQRERRRTLRYSWSGEPLFLTCPTSEVTELPACSQCGGQRIFEFQLMPALVSMLKSANLGLSVEFGTILVYTCEKSCWPPNHQTPMEEFCIIQEDPDELLFK

SEQ ID NO: 21741 - protein, 288 aa, Homo sapiens
LGRAGGLESGCSPHGPLSSPRSWKVFRSQCLQVPEREAQDAQKQGNSLAAEDWCEGADDWGSDTEEGPSPQFTLDFGNDASSAKDVDWTARLQDLRLQDAVLGAAHPVPPGLPLFLPYYICVADEDDYRDFVNLDHAHSLLRDYQQREGIAMDQLLSQSLPNDGDEKYEKTIIKSGDQTFYKFMKRIAACQEQILRYSWSGEPLFLTCPTSEVTELPACSQCGGQRIFEFQLMPALVSMLKSANLGLSVEFGTILVYTCEKSCWPPNHQTPMEEFCIIQEDPDELLFK

SEQ ID NO: 21742 - protein, 105 aa, Homo sapiens
VALIRGSLFPCPRYSWSGEPLFLTCPTSEVTELPACSQCGGQRIFEFQLMPALVSMLKSANLGLSVEFGTILVYTCEKSCWPPNHQTPMEEFCIIQEDPDELLFK

SEQ ID NO: 21743 - protein, 33 aa, Homo sapiens
LLQECPPALAAAGRPIYLMLLVFFGDLQGKEAG

SEQ ID NO: 21744 - protein, 10 aa, Homo sapiens
MRCPGRSYKR

SEQ ID NO: 21745 - protein, 17 aa, Homo sapiens
MFLPPLSTMDLTLWTSS

SEQ ID NO: 21746 - protein, 168 aa, Homo sapiens
MAFPSTIAPPPLEPGRRSGGNRGALATCAGHEDKAGCPPRPHPPPAPPARSRPYACSVCGKRFSLKHQMETHYRVHTGEKPFSCSLCPQRSRDFSAMTKHLRTHGAAPYRCSLCGAGCPSLASMQAHMRGHSPSQLPPGWTIRSTFLYSSSRPSRPSTSPCCPSSSTT

SEQ ID NO: 21747 - protein, 7 aa, Homo sapiens
MSLSVLC

SEQ ID NO: 21748 - protein, 8 aa, Homo sapiens
MVSLRSRE

SEQ ID NO: 21749 - protein, 8 aa, Homo sapiens
MFQPSPEP

SEQ ID NO: 21750 - protein, 9 aa, Homo sapiens
MSSSFSNSC

SEQ ID NO: 21751 - protein, 13 aa, Homo sapiens
MLVRKPSGAAAAI

SEQ ID NO: 21752 - protein, 13 aa, Homo sapiens
RRTEDIIQIPDIA

SEQ ID NO: 21753 - protein, 13 aa, Homo sapiens
MRRQPGSGSGREV

SEQ ID NO: 21754 - protein, 28 aa, Homo sapiens
MTDSPLRGDSSSAVAAETDERRLLAAGP

SEQ ID NO: 21755 - protein, 28 aa, Homo sapiens
MSVRPDAWPLAAWEVAGAAFAFARDSSN

SEQ ID NO: 21756 - protein, 14 aa, Homo sapiens
MPKAVDRVGSPPWD

SEQ ID NO: 21757 - protein, 33 aa, Homo sapiens
MITKVVFLRAKLIHCVPDVLTPAISPSVGNSSA

SEQ ID NO: 21758 - protein, 17 aa, Homo sapiens
MGFVSSSALVTDLDTEY

SEQ ID NO: 21759 - protein, 22 aa, Homo sapiens
QILARFTEIRSLGRVRKLEKRS

SEQ ID NO: 21760 - protein, 22 aa, Homo sapiens
MQDAARPRARLSPRHLRQPEIL

SEQ ID NO: 21761 - protein, 23 aa, Homo sapiens
SGAPEPELELKRRLRGAESGVQA

SEQ ID NO: 21762 - protein, 23 aa, Homo sapiens
KASRPRAHLALRTRVHACDRPCV

SEQ ID NO: 21763 - protein, 23 aa, Homo sapiens
NNFLQRGFLDLELFFSSTVISNS

SEQ ID NO: 21764 - protein, 24 aa, Homo sapiens
CRRDSWRVKVCVSFCVTRALGAAC

SEQ ID NO: 21765 - protein, 27 aa, Homo sapiens
MGSRGPRGTGPGKRRRRRRRSRSPGEA

SEQ ID NO: 21766 - protein, 28 aa, Homo sapiens
QPAFGSGVSAGYCRFSSPGVATSRVALL

SEQ ID NO: 21767 - protein, 28 aa, Homo sapiens
REPGGPRVGNYLFLSTRLRRPVGLGNLR

SEQ ID NO: 21768 - protein, 29 aa, Homo sapiens
TRVAHFPALGTRSGRSLAAIALRGKRPLV

SEQ ID NO: 21769 - protein, 30 aa, Homo sapiens
MVGVWLFPPFVPFLCPSPDSIPPDTLLFPA

SEQ ID NO: 21770 - protein, 31 aa, Homo sapiens
KNIELGAKTHLFTILVLCKSSYLSGSQLSHL

SEQ ID NO: 21771 - protein, 6 aa, Homo sapiens
MVKFAL

SEQ ID NO: 21772 - protein, 33 aa, Homo sapiens
MATPVGVEHGEQSQAFSDDGAVSLSFQSRKRIL

SEQ ID NO: 21773 - protein, 6 aa, Homo sapiens
MSFCRG

SEQ ID NO: 21774 - protein, 38 aa, Homo sapiens
VRHARAEETRLVPRKQSLQLPGGACVPGAGATGPRDCV

SEQ ID NO: 21775 - protein, 8 aa, Homo sapiens
MCGNSLPT

SEQ ID NO: 21776 - protein, 44 aa, Homo sapiens
MTKLTASGASMMADSQGPLRRGGAANGEPHSLARVLRRSSWLPS

SEQ ID NO: 21777 - protein, 45 aa, Homo sapiens
MEAAAAAAAGSRCAPSTAAREVGKFAARRPKARGAAPLCRELSPI

SEQ ID NO: 21778 - protein, 45 aa, Homo sapiens
RRERQNLWTQESRIKWKNRKKGQEPEYDLIAVSEGATSTESLLPW

SEQ ID NO: 21779 - protein, 46 aa, Homo sapiens
MQQRRLLPRSPRGPGIRRTGWHCLKRRLLGDCAARWIHCPRRFNQL

SEQ ID NO: 21780 - protein, 46 aa, Homo sapiens
EPGSPVSGGPLPGPQILASQPSVSKTQAARVPASRIQASGICATRT

SEQ ID NO: 21781 - protein, 47 aa, Homo sapiens
MLPAQQVHQRARMNYGCHECPCEAVGKPWLDCEGYLKSILESTRSSM

SEQ ID NO: 21782 - protein, 9 aa, Homo sapiens
MGETTASSR

SEQ ID NO: 21783 - protein, 57 aa, Homo sapiens
MFKQSLSMKLGGDRVSCQFLTATSHQWLHSVSLTQHMAQECLPSVSVSTAAIPRCWS

SEQ ID NO: 21784 - protein, 58 aa, Homo sapiens
RSVGDVHPSVGTRARAPLFLLTVAPTHTLQSPRELIFSPQRAPPYPAPPTGPPFPPAC

SEQ ID NO: 21785 - protein, 59 aa, Homo sapiens
MIECSVCSYQFNIWYVLLFDERYIKRSFGTGSWSKSLLYLVYASIWYCSTSRNGAPANH

SEQ ID NO: 21786 - protein, 59 aa, Homo sapiens
ALAETATGLAAPELRRLSLLRTWPTFPRTLPISRGPHKTGKGRKGQRRQQLNECLQQKA

SEQ ID NO: 21787 - protein, 61 aa, Homo sapiens
YSCSEAVTLAFCSGKTLSPTLAYPVGRQSCNLVNYLLSPRFPFILLKSSPVSDPYLLSLLL

SEQ ID NO: 21788 - protein, 68 aa, Homo sapiens
PGGPEVESARLFCACAARVTLLAAPRLPARRHLVLGFHCSRWAGRFSVIAAGGGGGVTSGQPRNPTIL

SEQ ID NO: 21789 - protein, 12 aa, Homo sapiens
MHLEFPRSPLRG

SEQ ID NO: 21790 - protein, 14 aa, Homo sapiens
MGFSTARGRQESCG

SEQ ID NO: 21791 - protein, 79 aa, Homo sapiens
MSSPKIHRSSSFPKQPEVSVSPALLRGPNPPAIAAILASGAPASRPPGGELLGLLNPRWRRWLLMREDVAEGLTLGAGG

SEQ ID NO: 21792 - protein, 48 aa, Homo sapiens
MLGCSFKLRTTHHAYPGAEGPDHHSLRTEEAACYSWCCIPPDTLLFPA

SEQ ID NO: 21793 - protein, 84 aa, Homo sapiens
MSSPKIHRSSSFPKQPEVSVSPALLRGPNPPAIAAILASGAPASRPPGGELLGLLNPRWRRWLLMREDVAEGLTLGAGVSRPLR

SEQ ID NO: 21794 - protein, 48 aa, Homo sapiens
MPVCCMQAFWLPTLQQNNCTNSLVPIPPTESPGATVFFALHCRRGTKC

SEQ ID NO: 21795 - protein, 74 aa, Homo sapiens
MQVSACVGRLPFFRKRGKYPHRLSVFSETIFFPRKKSLTVGVSLRQRRGQPTGPCKARAAAPPLSFRPEPPSSR

SEQ ID NO: 21796 - protein, 10 aa, Homo sapiens
KLQCYVSLAF

SEQ ID NO: 21797 - protein, 23 aa, Homo sapiens
VSLTVAGSGAVDHAARPPPPLGS

SEQ ID NO: 21798 - protein, 17 aa, Homo sapiens
MAFVPAYDWSQRAVQTP

SEQ ID NO: 21799 - protein, 34 aa, Homo sapiens
RSQSGRAYCHSNSFARCPGPGIVAEHPRPAEVPP

SEQ ID NO: 21800 - protein, 17 aa, Homo sapiens
MAQAALGISAQGNHIPL

SEQ ID NO: 21801 - protein, 8 aa, Homo sapiens
SGRTLVLR

SEQ ID NO: 21802 - protein, 10 aa, Homo sapiens
MLRAEALPVT

SEQ ID NO: 21803 - protein, 12 aa, Homo sapiens
ISKLQCYVSLAF

SEQ ID NO: 21804 - protein, 15 aa, Homo sapiens
QQAGCLAWNPKVAWL

SEQ ID NO: 21805 - protein, 16 aa, Homo sapiens
MSYLIKQHHSAITQGS

SEQ ID NO: 21806 - protein, 16 aa, Homo sapiens
ATQRKGRLVRPPLFVF

SEQ ID NO: 21807 - protein, 23 aa, Homo sapiens
MRLSQARGLSGSSCCAGGSWPPL

SEQ ID NO: 21808 - protein, 23 aa, Homo sapiens
MITFPLKPYPLLCIWEIIHREAL

SEQ ID NO: 21809 - protein, 27 aa, Homo sapiens
MLGCSFKLRTTHHAYPVQVLKGLTITH

SEQ ID NO: 21810 - protein, 31 aa, Homo sapiens
MPEAMVDTKGGFPTIRMHLLCFEIATMDSYG

SEQ ID NO: 21811 - protein, 31 aa, Homo sapiens
RRPRGARATAVTLRRASVLVFEPSCFTGLPR

SEQ ID NO: 21812 - protein, 31 aa, Homo sapiens
MGLQRLATHIDGAYVQAPVHRKEQNRHSSWS

SEQ ID NO: 21813 - protein, 25 aa, Homo sapiens
MPVWWRRRRLRARSWALRGARKPLR

SEQ ID NO: 21814 - protein, 26 aa, Homo sapiens
MNALASLTVRTCDRFWQTEPALLPPG

SEQ ID NO: 21815 - protein, 130 aa, Homo sapiens
RGKGAQTRTRKSRATLDRAWEGAPAFALLLQREGRALPRGGVRLVLTLAAEPKVDRGGGLHIPVVALRFLPLSLRAHGGGQSGGDGGARTTRRPVLFLLRTCPARSVSRRPAPGLCSDLALAAPRPSGRS

SEQ ID NO: 21816 - protein, 6 aa, Homo sapiens
MLLKCC

SEQ ID NO: 21817 - protein, 6 aa, Homo sapiens
MVFAQA

SEQ ID NO: 21818 - protein, 7 aa, Homo sapiens
MTLFVHT

SEQ ID NO: 21819 - protein, 8 aa, Homo sapiens
MITSQIRQ

SEQ ID NO: 21820 - protein, 30 aa, Homo sapiens
MVFYGKYLSVGLNVKERGRERNPFIMFSLP

SEQ ID NO: 21821 - protein, 9 aa, Homo sapiens
FPGARKPLR

SEQ ID NO: 21822 - protein, 10 aa, Homo sapiens
AVDRIGTAGL

SEQ ID NO: 21823 - protein, 12 aa, Homo sapiens
MVAEYPELRGVF

SEQ ID NO: 21824 - protein, 14 aa, Homo sapiens
MSAAAETGVLKAGC

SEQ ID NO: 21825 - protein, 13 aa, Homo sapiens
MPLIQCLCLAVTC

SEQ ID NO: 21826 - protein, 14 aa, Homo sapiens
MRPACVNTPSEEWS

SEQ ID NO: 21827 - protein, 15 aa, Homo sapiens
AISLETAARDLRYLL

SEQ ID NO: 21828 - protein, 15 aa, Homo sapiens
MFSQAAGRPGVASCP

SEQ ID NO: 21829 - protein, 15 aa, Homo sapiens
MLEHSCHPHPTDVLQ

SEQ ID NO: 21830 - protein, 15 aa, Homo sapiens
LGYGVSASLVRLFLG

SEQ ID NO: 21831 - protein, 40 aa, Homo sapiens
MAMVMAAVTRTTPVKLRSGRYIQKVPRRNFLLEKMKKQYL

SEQ ID NO: 21832 - protein, 16 aa, Homo sapiens
AFKVLKRAAVGSGFID

SEQ ID NO: 21833 - protein, 18 aa, Homo sapiens
MRSLEDPENEAHRKQVTC

SEQ ID NO: 21834 - protein, 19 aa, Homo sapiens
MLCGGGLKYSRREWELLEF

SEQ ID NO: 21835 - protein, 20 aa, Homo sapiens
ILEQGYSVEDPQRCGLGEQS

SEQ ID NO: 21836 - protein, 20 aa, Homo sapiens
AGSADWPGWAGLDSSAEQIL

SEQ ID NO: 21837 - protein, 21 aa, Homo sapiens
AADVGTKDLEKPRAKVTFFLL

SEQ ID NO: 21838 - protein, 22 aa, Homo sapiens
MISRDPLELHVSAPRTSNPRRS

SEQ ID NO: 21839 - protein, 22 aa, Homo sapiens
MWRRRGSSLRFAIAKTSLPEAP

SEQ ID NO: 21840 - protein, 24 aa, Homo sapiens
AREPLSSAAAKVLGPSEEAKAALG

SEQ ID NO: 21841 - protein, 25 aa, Homo sapiens
MLSVLRFTMRIVFPALAPDPYYSVN

SEQ ID NO: 21842 - protein, 63 aa, Homo sapiens
MARKALPPTHLGQSWFCSCCRDTELAISALRARTATGSPGSCRCTAGPLPCASALESCCCRVT

SEQ ID NO: 21843 - protein, 26 aa, Homo sapiens
MSITCWMRLCSSPPLSEWSVSINWTP

SEQ ID NO: 21844 - protein, 28 aa, Homo sapiens
SAPRGEPLLWEVSSPADSEEPLRTKSAQ

SEQ ID NO: 21845 - protein, 30 aa, Homo sapiens
VSGPFISRAEDRVISFQFSSVFRKSLKIRL

SEQ ID NO: 21846 - protein, 34 aa, Homo sapiens
MWKINQDKRRLMKSIKDQKIKIEWGKKLNRRLVR

SEQ ID NO: 21847 - protein, 35 aa, Homo sapiens
MIPFQAQWCPVASRSQTFMWTRKAYRGNGNSPLAH

SEQ ID NO: 21848 - protein, 37 aa, Homo sapiens
SCVRGLYYPRCCGAELVPLQLSRVGLDIFDSFPPRLN

SEQ ID NO: 21849 - protein, 38 aa, Homo sapiens
NNQRATGKEGLGLPEEFSKCSNARLTAPVIRPGGQSGI

SEQ ID NO: 21850 - protein, 39 aa, Homo sapiens
MPSPQLASVFRWNIRCTFMAILSVRADFCQAQHSIFADK

SEQ ID NO: 21851 - protein, 39 aa, Homo sapiens
MGVALGGHSREVLRGRGRRAARGGRVRDGTHQPPSRRRR

SEQ ID NO: 21852 - protein, 40 aa, Homo sapiens
RRGAGRWDPTLSSSGSWVVGSYLSVCSQLSWVSSDGVGPR

SEQ ID NO: 21853 - protein, 41 aa, Homo sapiens
PLANLSALSCRLLDLGTLTRFLWGTAEDYFEFRWSPVVWHI

SEQ ID NO: 21854 - protein, 8 aa, Homo sapiens
MVAPVFHD

SEQ ID NO: 21855 - protein, 47 aa, Homo sapiens
FGKLGCGVIPVCLLPAFLGFFRRRGASLRNSRPLRATALAVSFASSS

SEQ ID NO: 21856 - protein, 50 aa, Homo sapiens
NDLPQAFVWAHFCPGVIVPRWLRTWDFSCICTLSFYTQLPRWDCFQLYCA

SEQ ID NO: 21857 - protein, 53 aa, Homo sapiens
ARFGAGPEQREARHTIPGPTVAGRLRVLVKLGHPALSDDQQILSGRNICSAVR

SEQ ID NO: 21858 - protein, 10 aa, Homo sapiens
MRVGGSEDIF

SEQ ID NO: 21859 - protein, 56 aa, Homo sapiens
KLGLNLSIRCHPRLGGRRSGRRRVHSFPRSLAATYPILSCEQGPRAALTKATVNTV

SEQ ID NO: 21860 - protein, 59 aa, Homo sapiens
ASRGLGGAARGANANLARAERARRAPARSRRGTVFRIRAQELRFSTCSRGAIGIQRITR

SEQ ID NO: 21861 - protein, 63 aa, Homo sapiens
MLGIGCAATQRSPGAAAASAWAAYAASAAPRRGGRRRRRGRLGAAMAGGGARPGAAGLKLLAP

SEQ ID NO: 21862 - protein, 68 aa, Homo sapiens
MILRLSILARNLKGCVRLKRVYHWEQASRAQHVRIFEGAPSPKVIRNRGFKKFELGWARWLTTVIPAL

SEQ ID NO: 21863 - protein, 13 aa, Homo sapiens
MELVTGKEYSVGE

SEQ ID NO: 21864 - protein, 13 aa, Homo sapiens
MPRPLRAATKSRG

SEQ ID NO: 21865 - protein, 86 aa, Homo sapiens
GEPFPAALAGSISKAQVAEFLFPFSSGELCVPCAPEVIPCVAGLLGLDRQVREEGIASAKEVLESCVLAARDPAWVGRCFCEKPKD

SEQ ID NO: 21866 - protein, 15 aa, Homo sapiens
MSPAAQAERPVALFF

SEQ ID NO: 21867 - protein, 131 aa, Homo sapiens
MPRPASARARCAHPLTCAHCLALPREMNPVPQMEMQKSPSSASLTLGAVDQSCSYSAILAPYSHYLLELWLRHYNRALSPLSKSWEMVIVNASPILEAPGCRGPQLDPSHPWSLTLDLSQKAEKRSSLESL

SEQ ID NO: 21868 - protein, 17 aa, Homo sapiens
MTAPGPAADGRRPGVRI

SEQ ID NO: 21869 - protein, 6 aa, Homo sapiens
MRILCS

SEQ ID NO: 21870 - protein, 7 aa, Homo sapiens
MSRSLLP

SEQ ID NO: 21871 - protein, 7 aa, Homo sapiens
MGRTVFP

SEQ ID NO: 21872 - protein, 7 aa, Homo sapiens
MPSSRAV

SEQ ID NO: 21873 - protein, 7 aa, Homo sapiens
MFKQSCE

SEQ ID NO: 21874 - protein, 8 aa, Homo sapiens
ETAAAVAA

SEQ ID NO: 21875 - protein, 8 aa, Homo sapiens
KCKNEASE

SEQ ID NO: 21876 - protein, 8 aa, Homo sapiens
MSDARACA

SEQ ID NO: 21877 - protein, 8 aa, Homo sapiens
NNLEKIEV

SEQ ID NO: 21878 - protein, 9 aa, Homo sapiens
MDWLSPSLL

SEQ ID NO: 21879 - protein, 9 aa, Homo sapiens
MGEAPMLSL

SEQ ID NO: 21880 - protein, 9 aa, Homo sapiens
TNPLTSGRL

SEQ ID NO: 21881 - protein, 9 aa, Homo sapiens
PLSAALVNR

SEQ ID NO: 21882 - protein, 9 aa, Homo sapiens
MTPTKDPCL

SEQ ID NO: 21883 - protein, 9 aa, Homo sapiens
MALCLRGVS

SEQ ID NO: 21884 - protein, 11 aa, Homo sapiens
MLHFQGEDVWA

SEQ ID NO: 21885 - protein, 9 aa, Homo sapiens
GCLRRPEPI

SEQ ID NO: 21886 - protein, 10 aa, Homo sapiens
IVRKSLKIRL

SEQ ID NO: 21887 - protein, 10 aa, Homo sapiens
WQSSFGTDLK

SEQ ID NO: 21888 - protein, 11 aa, Homo sapiens
VVLRVCANLNQ

SEQ ID NO: 21889 - protein, 35 aa, Homo sapiens
GALQSSSLQVLLLNSVLGTSGPGKEPKRSQPASRR

SEQ ID NO: 21890 - protein, 10 aa, Homo sapiens
MPQEPSVPTN

SEQ ID NO: 21891 - protein, 10 aa, Homo sapiens
KVGSRRKKTS

SEQ ID NO: 21892 - protein, 12 aa, Homo sapiens
KKIERKDYRAPN

SEQ ID NO: 21893 - protein, 13 aa, Homo sapiens
MRAKVALGSSLGA

SEQ ID NO: 21894 - protein, 13 aa, Homo sapiens
NCSHLASKLALGN

SEQ ID NO: 21895 - protein, 13 aa, Homo sapiens
PSGGRLPLSLAAL

SEQ ID NO: 21896 - protein, 13 aa, Homo sapiens
DPENEAHRKQVTC

SEQ ID NO: 21897 - protein, 13 aa, Homo sapiens
SIEEESLEQATGY

SEQ ID NO: 21898 - protein, 74 aa, Homo sapiens
MRRAPASPPPARAAAPAFPAVVPHSVPAPRGRRLLPLGAVAACAVSAAQPLSPSLRQPRRTAHQEARARMGSLC

SEQ ID NO: 21899 - protein, 13 aa, Homo sapiens
MGSMSITWELAAL

SEQ ID NO: 21900 - protein, 83 aa, Homo sapiens
RVQKSFLSWSLFPSEYQLPTALRAGRPAAEGKRKRRRKLSRIPAVGPSLSRVASLSVGCGTTPGKRRGRNLILIGGGRFEGLL

SEQ ID NO: 21901 - protein, 13 aa, Homo sapiens
MIVKWWKWIQNNK

SEQ ID NO: 21902 - protein, 14 aa, Homo sapiens
MGLALACLPTQVKS

SEQ ID NO: 21903 - protein, 14 aa, Homo sapiens
MVVERRFCGLGPNG

SEQ ID NO: 21904 - protein, 14 aa, Homo sapiens
RYSICQKLGSPWAL

SEQ ID NO: 21905 - protein, 6 aa, Homo sapiens
MDPEPR

SEQ ID NO: 21906 - protein, 15 aa, Homo sapiens
MGPTSHSHLPSIGRG

SEQ ID NO: 21907 - protein, 15 aa, Homo sapiens
WASISKLQCYVSLAF

SEQ ID NO: 21908 - protein, 8 aa, Homo sapiens
MGARFLFL

SEQ ID NO: 21909 - protein, 15 aa, Homo sapiens
MLGEILRVWSKWCFL

SEQ ID NO: 21910 - protein, 15 aa, Homo sapiens
SGKLEDRSTGRRRKE

SEQ ID NO: 21911 - protein, 9 aa, Homo sapiens
MEPGSGRCC

SEQ ID NO: 21912 - protein, 9 aa, Homo sapiens
MASSTWSET

SEQ ID NO: 21913 - protein, 17 aa, Homo sapiens
MKKINFGSSLTNFDMWK

SEQ ID NO: 21914 - protein, 17 aa, Homo sapiens
PAGIERSTAKTPGTPEA

SEQ ID NO: 21915 - protein, 17 aa, Homo sapiens
LRSSIGWRADLASRATR

SEQ ID NO: 21916 - protein, 17 aa, Homo sapiens
QAAWLGNHTEEASRRCA

SEQ ID NO: 21917 - protein, 17 aa, Homo sapiens
DYILRDNFYSVFLEEYI

SEQ ID NO: 21918 - protein, 17 aa, Homo sapiens
MSSSLLLCHPIPVNKVV

SEQ ID NO: 21919 - protein, 12 aa, Homo sapiens
PNYKESINLPLR

SEQ ID NO: 21920 - protein, 17 aa, Homo sapiens
GRRACVLACVHFQPGVG

SEQ ID NO: 21921 - protein, 17 aa, Homo sapiens
MMFVANDRLFSLCKNYG

SEQ ID NO: 21922 - protein, 18 aa, Homo sapiens
MVAQECNRASTAAIFFLS

SEQ ID NO: 21923 - protein, 18 aa, Homo sapiens
IRPLADAVFPLSAALVNR

SEQ ID NO: 21924 - protein, 18 aa, Homo sapiens
GGRRSLRKPQISFFLFER

SEQ ID NO: 21925 - protein, 16 aa, Homo sapiens
MKSALRNEVDCLLAFC

SEQ ID NO: 21926 - protein, 18 aa, Homo sapiens
PVNDLRHNYLQNKWGRPR

SEQ ID NO: 21927 - protein, 19 aa, Homo sapiens
YLSEVGVSVGIVIRPRQWD

SEQ ID NO: 21928 - protein, 19 aa, Homo sapiens
HVATGLVQGLKQSLGVVWD

SEQ ID NO: 21929 - protein, 19 aa, Homo sapiens
SCLAAISLETAARDLRYLL

SEQ ID NO: 21930 - protein, 19 aa, Homo sapiens
GRLALLGELVCVPVGGRGW

SEQ ID NO: 21931 - protein, 20 aa, Homo sapiens
AAGVAPATAGPKLCRGLNQR

SEQ ID NO: 21932 - protein, 18 aa, Homo sapiens
MELGPAFALRSPRFRDQA

SEQ ID NO: 21933 - protein, 20 aa, Homo sapiens
MRVAVRFSVVSVEGQSHTRS

SEQ ID NO: 21934 - protein, 20 aa, Homo sapiens
QSGRCLSRSQPVVATFARSL

SEQ ID NO: 21935 - protein, 21 aa, Homo sapiens
QQKPVLLASVDISLPSRSVSH

SEQ ID NO: 21936 - protein, 21 aa, Homo sapiens
FLHAGTLSRHTYAKGQRSQTQ

SEQ ID NO: 21937 - protein, 21 aa, Homo sapiens
KYCQEFQIENEKQAKTSIGEV

SEQ ID NO: 21938 - protein, 22 aa, Homo sapiens
MQMTIEMRTTRRCCGGAVEVRR

SEQ ID NO: 21939 - protein, 22 aa, Homo sapiens
MGWRRVRVRCLALRAAGHGGLD

SEQ ID NO: 21940 - protein, 24 aa, Homo sapiens
MFQFLHLTDMKSILRGAASGSGSN

SEQ ID NO: 21941 - protein, 25 aa, Homo sapiens
MSAQSQALTRSTQPREGGRPLPAEP

SEQ ID NO: 21942 - protein, 23 aa, Homo sapiens
WDIFTGHISEERKKVILNLKVFS

SEQ ID NO: 21943 - protein, 23 aa, Homo sapiens
SFPDATLKSVTRNIPNKQQSSRN

SEQ ID NO: 21944 - protein, 24 aa, Homo sapiens
SRGDAPSGANQITWLVFACSGVIF

SEQ ID NO: 21945 - protein, 24 aa, Homo sapiens
MQRYTKKLPEHLGEYLMENRLVKT

SEQ ID NO: 21946 - protein, 24 aa, Homo sapiens
ARQKELGCPECQVAGKRWAFRRGL

SEQ ID NO: 21947 - protein, 26 aa, Homo sapiens
MILFISERDQVLSSLQLKESNVTCGV

SEQ ID NO: 21948 - protein, 68 aa, Homo sapiens
MGPQVCAPYSPPITYQRALQELLTNRLSMVLHSRINCTSVCAKSTRHWRNSRNNTWYRHMDLSGKRSR

SEQ ID NO: 21949 - protein, 26 aa, Homo sapiens
VLLTNNLLGSKGQHLLSKAQEEFEEN

SEQ ID NO: 21950 - protein, 26 aa, Homo sapiens
KSPAGQGAPLAAAALALSQCAALQPA

SEQ ID NO: 21951 - protein, 26 aa, Homo sapiens
YCGRVGELAAGELGAGGVVLVLRIPA

SEQ ID NO: 21952 - protein, 26 aa, Homo sapiens
SDNVTSSALEIFPRLQTPTDLLWEPE

SEQ ID NO: 21953 - protein, 56 aa, Homo sapiens
MAARPSFTRTVGIWASPKPSRWLLGLLEPVSSPLPPRPDPLFCPKELALTASGSRS

SEQ ID NO: 21954 - protein, 26 aa, Homo sapiens
MEARPLCQSPACRPARADLPSALGHG

SEQ ID NO: 21955 - protein, 26 aa, Homo sapiens
FLKERVSSGLAVRSFPASGIYGRLFE

SEQ ID NO: 21956 - protein, 26 aa, Homo sapiens
MLQTDLSVLHEHTCGRQMTVLYPVLL

SEQ ID NO: 21957 - protein, 27 aa, Homo sapiens
VLKGGSIRWISTPSFSLQAFLDSVLLV

SEQ ID NO: 21958 - protein, 59 aa, Homo sapiens
ARRGEEGWVEPGLAGCACSRWAVAAAASRRFEIRRVREAGRDLAQGRCGRRLQRRDSCG

SEQ ID NO: 21959 - protein, 27 aa, Homo sapiens
QLTQVLHRSGFSESRKTAADRIPGTSV

SEQ ID NO: 21960 - protein, 6 aa, Homo sapiens
MLMSCI

SEQ ID NO: 21961 - protein, 27 aa, Homo sapiens
MESRSRRAFANCPSNGRMVTQAPGALS

SEQ ID NO: 21962 - protein, 27 aa, Homo sapiens
GECGASRGVQLGTATHLGCAQKAGASE

SEQ ID NO: 21963 - protein, 28 aa, Homo sapiens
RLQGIHVGSERVSTSLEAGHLSSFLATA

SEQ ID NO: 21964 - protein, 29 aa, Homo sapiens
GGAAAGAGSASYGPRLGFPPPFLYPHEIL

SEQ ID NO: 21965 - protein, 6 aa, Homo sapiens
MTVDVC

SEQ ID NO: 21966 - protein, 30 aa, Homo sapiens
MKRKICAMPPHMSRDSDLPLSSEFAELWGT

SEQ ID NO: 21967 - protein, 30 aa, Homo sapiens
ERKRPGKLSFLRSTVGIAAAEQGFWKALRT

SEQ ID NO: 21968 - protein, 30 aa, Homo sapiens
AAARGSRSIALGEDFAARGRSLCDLIAALS

SEQ ID NO: 21969 - protein, 30 aa, Homo sapiens
MDGCSLYLEYLTGYVSDLERNYPDPDRRMQ

SEQ ID NO: 21970 - protein, 30 aa, Homo sapiens
WSPLRLRRRRARGGGGRARLLCSRLSCFPS

SEQ ID NO: 21971 - protein, 30 aa, Homo sapiens
MREGRPWPWGRRELLCLHRSPCAALMCCAR

SEQ ID NO: 21972 - protein, 30 aa, Homo sapiens
MVAILGVESALHKYTLYANDDKLVRMSRAA

SEQ ID NO: 21973 - protein, 31 aa, Homo sapiens
DHPPCLSSPGAEGPDHHSLRTEEAACYSWCW

SEQ ID NO: 21974 - protein, 8 aa, Homo sapiens
SGLALRLE

SEQ ID NO: 21975 - protein, 28 aa, Homo sapiens
MVAPMAWLEDKQIEDIGNGVIKMIDHEA

SEQ ID NO: 21976 - protein, 31 aa, Homo sapiens
MATPVGVEHGEQSQAFSDDGKAAWVGKRGLP

SEQ ID NO: 21977 - protein, 32 aa, Homo sapiens
MIALQQPTHGDCANLLLSYNAGPVIGLSEDHG

SEQ ID NO: 21978 - protein, 32 aa, Homo sapiens
LGLQRGAESRTRSRVLPAAVWTTRGHRQKWAL

SEQ ID NO: 21979 - protein, 32 aa, Homo sapiens
GLILIFPRPPLPRPPRWQLRRSLERFFLEFQN

SEQ ID NO: 21980 - protein, 32 aa, Homo sapiens
RALLSERLEPDHRPRELGQGAVPNLQGSWGHC

SEQ ID NO: 21981 - protein, 32 aa, Homo sapiens
MFSSPAPAALQAAAAATKTTTATATPKHSFRG

SEQ ID NO: 21982 - protein, 32 aa, Homo sapiens
MILFISERDQVLSSLQLKESNVTCGVISFLHL

SEQ ID NO: 21983 - protein, 32 aa, Homo sapiens
VAGRPRAALDPEPRRAWAVGPRGKVPCTRGLR

SEQ ID NO: 21984 - protein, 33 aa, Homo sapiens
ETESRSREGGGILILSEIFPRLQTPTDLLWEPE

SEQ ID NO: 21985 - protein, 33 aa, Homo sapiens
MWYTKQIGRLFQNPLSVDFYVKLSEVFIWWDVF

SEQ ID NO: 21986 - protein, 33 aa, Homo sapiens
RDAERKRPGKLSFLRSTVGIAAAEQGFWKALRT

SEQ ID NO: 21987 - protein, 33 aa, Homo sapiens
MHRLLQRLPVFPTSRDGFAHYQASFPCRHREEG

SEQ ID NO: 21988 - protein, 16 aa, Homo sapiens
MGPFFFADSVRPLPGL

SEQ ID NO: 21989 - protein, 35 aa, Homo sapiens
AAQAAGRRRRRRVAAGLGFGSLRSWRRRDPGNRHW

SEQ ID NO: 21990 - protein, 34 aa, Homo sapiens
LRRWVPSSWLRPAVTYKLAAVACASAGREAEQYC

SEQ ID NO: 21991 - protein, 35 aa, Homo sapiens
MQLPGEREPVSYVRAAAAAEPPPGRSSRCRPGLGP

SEQ ID NO: 21992 - protein, 35 aa, Homo sapiens
RVFWAGFEVLEHFLKGTESTLLHFLIKKLACSWES

SEQ ID NO: 21993 - protein, 35 aa, Homo sapiens
RGSPVSRRRLKSELLGFAQIGVGRACLWGAATPYC

SEQ ID NO: 21994 - protein, 35 aa, Homo sapiens
MPARPPACRVRPFPPGLPGQRIRLCRYRFLTLRTR

SEQ ID NO: 21995 - protein, 36 aa, Homo sapiens
GSGSQGASGDQARFWLHQPGIAGARHLHLGPTSWAG

SEQ ID NO: 21996 - protein, 36 aa, Homo sapiens
GAAGAEPRVRLLARVGADLVWGRRRDSGLPAKHCPT

SEQ ID NO: 21997 - protein, 36 aa, Homo sapiens
GEGGLYACLGGGFLHVFLSPGFSPAELATSESQLLL

SEQ ID NO: 21998 - protein, 37 aa, Homo sapiens
RQLQGLAGGRSGPILKRYLATTYFHLRPFLPGGETLD

SEQ ID NO: 21999 - protein, 8 aa, Homo sapiens
MKAEVMDR

SEQ ID NO: 22000 - protein, 38 aa, Homo sapiens
TLDKLYGSHSLRSRCTPTCPADLPVLAAVPAHLAVPEE

SEQ ID NO: 22001 - protein, 38 aa, Homo sapiens
MVGPSASSCSGPSSGVWGRRNRLRGPDNGPPPQHPGLA

SEQ ID NO: 22002 - protein, 38 aa, Homo sapiens
VISARVCPLFSSLLVAKCSWNQFDTGELRLKPRRNNHF

SEQ ID NO: 22003 - protein, 39 aa, Homo sapiens
LSKFETSLVALLEGVRNFQFWAWAVGLADRPLALGLGAR

SEQ ID NO: 22004 - protein, 38 aa, Homo sapiens
AEFLFPFSSGELCVPCAPEVIPCVAGLLGLDRQEKPKD

SEQ ID NO: 22005 - protein, 40 aa, Homo sapiens
RPPWPSVAGGPEPVARLGETERTSALKQKSPELRSPRRGW

SEQ ID NO: 22006 - protein, 40 aa, Homo sapiens
MQSAQRSGERGTPRTGPGSSSFAAAATTAATAARGGSSRA

SEQ ID NO: 22007 - protein, 40 aa, Homo sapiens [sequence omitted]

SEQ ID NO: 22008 - protein, 40 aa, Homo sapiens
MKGSAPHVSWNDGPVFRDLTEPTSKTSENRKKEEDTGINS

SEQ ID NO: 22009 - protein, 40 aa, Homo sapiens
AVVTAGDGWENRCGERYTRQTTSPFFELDPASTRVGVTIA

SEQ ID NO: 22010 - protein, 41 aa, Homo sapiens
NRKVGGAAGAEPRVRLLARVGADLVWGRRRDSGLPAKHCPT

SEQ ID NO: 22011 - protein, 25 aa, Homo sapiens
LTLRSLERAGEEGAAGTTASGCVRS

SEQ ID NO: 22012 - protein, 27 aa, Homo sapiens
MRRCRRPCPAGRGEGGGGRSPVVATVA

SEQ ID NO: 22013 - protein, 42 aa, Homo sapiens
RVCGRSCVRGLYYPRCCGAELVPLQLSRVGLDIFDSFPPRLN

SEQ ID NO: 22014 - protein, 43 aa, Homo sapiens
RFGGEARKKDSRKERVQFGDEGSRRLGLATTRRRRAGVVRRGS

SEQ ID NO: 22015 - protein, 43 aa, Homo sapiens
MMWKGLCLSATENFILAVFVETAFGKRKEMNFTDLTFLHLPFF

SEQ ID NO: 22016 - protein, 44 aa, Homo sapiens
MKFPVPVSAAVELPWQCGGRALVVLVSWEVAGLGRAGIRLSQLR

SEQ ID NO: 22017 - protein, 45 aa, Homo sapiens
VARFCTEDLKSPSLLGFAAFWILEGCRLHSPAPGQTLVQTTGVCW

SEQ ID NO: 22018 - protein, 45 aa, Homo sapiens
AAIGPVQIRGCSFAHKRGFAGSLNGKLESGPLIKILNWLEGRSRE

SEQ ID NO: 22019 - protein, 46 aa, Homo sapiens
GEVTWAPAARLSALGFLRPPAPATASPAPRRYLSKVPLEAPGWGRL

SEQ ID NO: 22020 - protein, 7 aa, Homo sapiens
MMLVCFQ

SEQ ID NO: 22021 - protein, 47 aa, Homo sapiens
FGPERGLVGTAAETRSAPSRGSSAGRSLGVRARRPAPCSLSAPGRTK

SEQ ID NO: 22022 - protein, 47 aa, Homo sapiens
MSRDRSIPHQPLTASGSRWACTPQPFRDSSCDSPPVQISGQLSRNSL

SEQ ID NO: 22023 - protein, 48 aa, Homo sapiens
APVEPRAPRKSRTFGSVQLLGPAQARRGGAAQGSARVGVSLLHQFIAT

SEQ ID NO: 22024 - protein, 9 aa, Homo sapiens
MLPEFGPPL

SEQ ID NO: 22025 - protein, 49 aa, Homo sapiens
PHWRLPSLSPLREVRPTLRAKKGDRASFRLAKQRPEAVVFSGSLGSRVV

SEQ ID NO: 22026 - protein, 9 aa, Homo sapiens
MFCPRRDLS

SEQ ID NO: 22027 - protein, 11 aa, Homo sapiens
MAPRAFLPLPV

SEQ ID NO: 22028 - protein, 51 aa, Homo sapiens
MAERTFEMRPSLQVVMRLVDCAVTVEISPVLPLRRWDLTKGNVREILMAQV

SEQ ID NO: 22029 - protein, 13 aa, Homo sapiens
MAACPCFATVPTL

SEQ ID NO: 22030 - protein, 52 aa, Homo sapiens
VAHVGQLDCSACGIDIKRFRKHNFLVFGQLVIVGPGALSLLLYVRRNITRLE

SEQ ID NO: 22031 - protein, 14 aa, Homo sapiens
MEAELNTLRWMMET

SEQ ID NO: 22032 - protein, 52 aa, Homo sapiens
TALGRSSRSRLYFRRRETSVASLSCGLSPSPSLAVLRHRTPPHPISRNLQTS

SEQ ID NO: 22033 - protein, 52 aa, Homo sapiens [sequence omitted]

SEQ ID NO: 22034 - protein, 53 aa, Homo sapiens
MQQRRLLPRSPRGPGIRRTGWHCLKRRLLGDCAARVDPKRGWGGVGKGRVCLA

SEQ ID NO: 22035 - protein, 53 aa, Homo sapiens
RCYPRILREGVARSCVLVPVQRGGFRQRVLILCGTASAFVLCPPRPRRPFEAA

SEQ ID NO: 22036 - protein, 54 aa, Homo sapiens
GPPSCAARGRHRRAPAVPGSPPASRRAGLLRGLAGKRTEGGIALSIKAGFRGFI

SEQ ID NO: 22037 - protein, 54 aa, Homo sapiens
LARFCWFRISGLRGGVGGQGGRRGLQRLAAARNPAPSGGGPASAARELRTVRSL

SEQ ID NO: 22038 - protein, 55 aa, Homo sapiens
MAGVWAVRGAAAQTQFAPGSRETGGFHRSPALYQPCSLDKIFDLSDPRFSSPFFF

SEQ ID NO: 22039 - protein, 55 aa, Homo sapiens
RHLPQTLWPRPRTASGRDYAVTSRCAAQRAASVLAGRPVLRTPYFVVAAARSSAV

SEQ ID NO: 22040 - protein, 18 aa, Homo sapiens
MPRPGIVAEHPRPAEVPP

SEQ ID NO: 22041 - protein, 57 aa, Homo sapiens
SQTPACIADHRPGLEKPTASSGKRARGLEVPEASGLGTHGRDTQGRAVRRFSWNNWR

SEQ ID NO: 22042 - protein, 57 aa, Homo sapiens
KGRYHDHEGGFSQGEAYPLRSGCADPCDFPKCGKLECIICDSRELRSRFLLVLLWCE

SEQ ID NO: 22043 - protein, 57 aa, Homo sapiens
PRARTGRRRRAWREIEKCFNPRRRRLQFLRARSAGPADTLTPSSAARGPERPEQPGS

SEQ ID NO: 22044 - protein, 19 aa, Homo sapiens
GRVTVIISNTNSKIVTLGQ

SEQ ID NO: 22045 - protein, 57 aa, Homo sapiens
WSRGCSERASGVSRALLQSAPGTPATVGISVGELWPFARCCSHSYVRSLRGLSVSTQ

SEQ ID NO: 22046 - protein, 20 aa, Homo sapiens
FCLFRPGIVAEHPRPAEVPP

SEQ ID NO: 22047 - protein, 21 aa, Homo sapiens
MRFAGLVAAAAAGGPAHVKPA

SEQ ID NO: 22048 - protein, 59 aa, Homo sapiens
RLGEREADGHLESLPLAFCFLLTGFGHWFFIFCLLHASRPPHLLPHSLDPALWAFTSVL

SEQ ID NO: 22049 - protein, 60 aa, Homo sapiens
IIVRTNQISGDVARGLARQVAVARRTLQNKRLRIALEINQFTPEPREGSVSVGSGRSAGL

SEQ ID NO: 22050 - protein, 62 aa, Homo sapiens
FFEIWSFAPGPRRSAKSRGGPYCAESLLSAVLRPWEPAPASRFRPVSKPADSSSSSPRRCHL

SEQ ID NO: 22051 - protein, 63 aa, Homo sapiens
PRRLAEDLSPAAARSPCPRPGLGAAAEVASGLRELGELGGGDRSWAGTSFLHRTATKQPCGRH

SEQ ID NO: 22052 - protein, 27 aa, Homo sapiens
MEGSRVRSRGTQSRQTGATGSCQKPRP

SEQ ID NO: 22053 - protein, 64 aa, Homo sapiens
MKGKGFVWKNALECDISARMLKYRFPAGTMALSSVAQWSSSEDAKIHEKTSRTSGRIFNGKSLG

SEQ ID NO: 22054 - protein, 30 aa, Homo sapiens
GGCGARSPPRRGRVRAGASGHASLGDRILL

SEQ ID NO: 22055 - protein, 65 aa, Homo sapiens
ACSSPLPLPLPLPVPHPRPLPPPPPPPGVSRLRSASAAAQQRRESGSGAAEPAGGRAGGRTGRIA

SEQ ID NO: 22056 - protein, 69 aa, Homo sapiens
EGVRRERSAAAEAVSPGRAWRSVAQSCWAQFLRLLLRRGCIGERASSREFSVALPLPFSLHGLAPRPST

SEQ ID NO: 22057 - protein, 69 aa, Homo sapiens
MTSRPRALSLVHFNSRGILELQEQPPLRRAARCISGRLWLATLGSACLRLSQPPRPCVVSSWVSERAGW

SEQ ID NO: 22058 - protein, 73 aa, Homo sapiens
RFAQGIVGRAAGAAAAAILGAPGATGFSLEAAFVAAVDAGKRHKVRWPTPFFPPASVEPPARVRRRRRGELAA

SEQ ID NO: 22059 - protein, 43 aa, Homo sapiens
PSPLPCALLPPGAEGPDHHSLRTEEAACYSWCCIPPDTLLFPA

SEQ ID NO: 22060 - protein, 46 aa, Homo sapiens
MRLSPPRSPFWLPETAAWCMMQHRDSETFLVSLLRHLCCKIEAVLW

SEQ ID NO: 22061 - protein, 75 aa, Homo sapiens
TLGSANRAFCGLCGESWRRRLPVAGLGAAPVGGLLPGPAAQPSRRLGGHSQAGLRGSGSVDPSRQNSRSAAAFKT

SEQ ID NO: 22062 - protein, 48 aa, Homo sapiens
MESPSRAGGVGLGKAASPLCSESSGYCGAFPRRSARRHLHLGPTSWAG

SEQ ID NO: 22063 - protein, 76 aa, Homo sapiens
KVWGEGAVSGCGEGRRGSEKSGPSLSSPFPSFGKWFLRGPGASEYRTSISGAGSLVGTERPLPGTGGLAAESPAGA

SEQ ID NO: 22064 - protein, 52 aa, Homo sapiens
ADSGGLGTGGGRLRFLVLLGARPAFGTERSASRAPPGKFAVESRPLGPRGPA

SEQ ID NO: 22065 - protein, 78 aa, Homo sapiens
MSNRCERAGRPRSDSGRLYKELLAAHFGLLRRPSRASGRVVGTMALSSVAQWSSSEDAKIHEKTSRTSGRIFNGKSLG

SEQ ID NO: 22066 - protein, 78 aa, Homo sapiens
GFRVARTTANRRGARRLRGEVRSEYPSAFLPPSLPPCAPPLTHSLPSFFLPPPPEHQRALSCPQGPSPAASSPFGGRK

SEQ ID NO: 22067 - protein, 58 aa, Homo sapiens
MAPAAGAASAAAGGRPEAVLAVAAAAVARRPGTESESTVASAAAAAAAAVATAAGTRS

SEQ ID NO: 22068 - protein, 79 aa, Homo sapiens [sequence omitted]

SEQ ID NO: 22069 - protein, 66 aa, Homo sapiens
MLGAFSARSCPSPSPAALARRPPAPAPAAALGTPAPGAQLPATAAAWVWGLLRLSRASAPALRTDA

SEQ ID NO: 22070 - protein, 83 aa, Homo sapiens
KPKLWTASICHWPPVSGSKRQLPYSPDTSRVLSLLTAAHVSSLAPVASLGREEAEDCTLRPKARVGPERPRLSGSRGRETGRG

SEQ ID NO: 22071 - protein, 15 aa, Homo sapiens
MGVGVTRPELPVSPQ

SEQ ID NO: 22072 - protein, 87 aa, Homo sapiens
ARSSDPRARHPEPLTAISQGLPEASVLCPQPRSGNVLHSASSPLPTLPRPRPAALLPAQPRVCGPSRPEAARTRSLKVKDNLLIPAL

SEQ ID NO: 22073 - protein, 88 aa, Homo sapiens
GACGGARRGRCFPRWTDQAREGARGNRKEEAAAPAFLGRRRRRDPRRGRGGRATPPPPRRRGPVWTGPPAGADPTPPDRGTRLLHRIR

SEQ ID NO: 22074 - protein, 88 aa, Homo sapiens
SRAPGDVACRATGSPSEAAAGAAGTAGRGAANATPRAAARCVRSVAGAAYRAEVSAAPAPPAADFGCDLTSGGSTSGLAGRIVPVEEL

SEQ ID NO: 22075 - protein, 89 aa, Homo sapiens
RGPGAALPLGCPGSVGSPVLAGRRAGRRAAVSLAVRGRRRSGNRGGARAAPAGGRAVPGRAAPQQGGGSQRSLRARVAAATGEIKLCGR

SEQ ID NO: 22076 - protein, 95 aa, Homo sapiens [sequence omitted]

SEQ ID NO: 22077 - protein, 6 aa, Homo sapiens
MMIGDA

SEQ ID NO: 22078 - protein, 96 aa, Homo sapiens
AALCCCAGAAAGGGVHRGSRSRYREKPVRDLVAAPPLPLPLGLGLRRQPSSGLGSGSGSLASAPAPLGYPRPRPAAPPALGRPDAGLGRGRSPGLA

SEQ ID NO: 22079 - protein, 98 aa, Homo sapiens
SELQILFSFHLLSNCPELAPVAPGLVFRECPESLVSSRPREESPAAQALLTAAESSGTHAPAGGSRRAAAAAKNFPGWEDRRQVAESRSQLLQAFPAS

SEQ ID NO: 22080 - protein, 100 aa, Homo sapiens
GGACHGGNHRPSIRGNRGLSIRRAAVELLRPARQPPPNARWGRGVSESQRHQGPCDKVAAARPGASGRRSGFGSVTRRPEGAGPAFSARAPGPCRSRFAS

SEQ ID NO: 22081 - protein, 6 aa, Homo sapiens
MSSSMG

SEQ ID NO: 22082 - protein, 104 aa, Homo sapiens
MKYNDITVKPFHFDSEVTLLTSITHLYFALINMLASLSGFLMTTTSKHAAYCLKGSCLTQARVQWPLKLTTASNFWAQVILSLPVVFVDCLMESHGTRRLKQCL

SEQ ID NO: 22083 - protein, 6 aa, Homo sapiens
MRYRPG

SEQ ID NO: 22084 - protein, 106 aa, Homo sapiens
KRFKILKKKKEKKKRILGEPAGKSLSYASGLPRARRRSAWRPSVSVRRSGGEPPARPAVPSPRSGPEPRAPRLPRRTTCPCCPSPPARGSPSRRPQRFGFPLPRRL

SEQ ID NO: 22085 - protein, 106 aa, Homo sapiens
VPRRVGSRFVVRSEARLGEPWEEKREQLGRGSPSSRSLERLKFTFQPLAPFAPLGLASEAVAVLGRRLGGAGCEQGLRATLLLATGFCCEVRPGNGGKKELREAVG

SEQ ID NO: 22086 - protein, 107 aa, Homo sapiens
AGFGAIANRRIRPNRGGRLNACGGGGFFRPGREVVTFVEGHQLRNLRLWQLFVPTELCFRKLASRASFRCAAAFFKASECGPAPTVRQARCKRVRFQSIDDQWEGLS

SEQ ID NO: 22087 - protein, 107 aa, Homo sapiens
GRRGGGICASKLARRAKFGRGLDFPSRRRHPNSYPVRKPKLLLPLGVSRPPPPPRVRGLPDPALLPSARPAALLFAVGAAPGAGPRAEPRRLQRRGPARRPGNFAES

SEQ ID NO: 22088 - protein, 110 aa, Homo sapiens
EQSSLASPEVTGNGQLRSSHPTWWPPCGFLSPFPNRGIATRLWLGGLCARGSENCWKAPGLWRGAGGSEFSDVEQAQNSRRFEEISWVWSVTFQNQLFLELYLLQQCLGD

SEQ ID NO: 22089 - protein, 121 aa, Homo sapiens [sequence omitted]

SEQ ID NO: 22090 - protein, 127 aa, Homo sapiens
GVRRRAGPRLRSASLPFTRASSRDPGLGRAGRRAAGRERLPRKTPGRTVWLAALPGRGGRRWRAPRPSLSFLSPHDGLHSPEPGGARTWRGELPPRPGTQTPPSQSPPPQSILGTGNGLRILQCTCN

SEQ ID NO: 22091 - protein, 137 aa, Homo sapiens
GSLFGAPRSSSLSSGCSNCNSSGCGRPGPGPAGGKPQEGGREEEGEEEGKEEEEEERSSQQARGGRTSWCGGCQQPRKRKTERQRPRGAEERRHGPSRVTREETRDTHSLAATGSRGGLGRPLPHQSPDPWGFRGRS

SEQ ID NO: 22092 - protein, 9 aa, Homo sapiens
MGLLGGACG

SEQ ID NO: 22093 - protein, 10 aa, Homo sapiens
MKCNRTDFTT

SEQ ID NO: 22094 - protein, 10 aa, Homo sapiens
MAAPTAAGAA

SEQ ID NO: 22095 - protein, 14 aa, Homo sapiens
MSVLGPGGARSPLD

SEQ ID NO: 22096 - protein, 15 aa, Homo sapiens
MAGRVRFWDSWRQWW

SEQ ID NO: 22097 - protein, 16 aa, Homo sapiens
NSGKQNLAGATRQSRA

SEQ ID NO: 22098 - protein, 16 aa, Homo sapiens
MCAHLDGRAVRIVYWM

SEQ ID NO: 22099 - protein, 16 aa, Homo sapiens
MEVAAGTEWRLQQRLL

SEQ ID NO: 22100 - protein, 20 aa, Homo sapiens
RTPAAEFAALAAVCSHRAVL

SEQ ID NO: 22101 - protein, 20 aa, Homo sapiens
MKTNTEMVCLRNFKRCRPPD

SEQ ID NO: 22102 - protein, 94 aa, Homo sapiens
GFTPKLHLRSRLSGNTALISAVRDRYLPAAAGALDPVGCTRRARPFPGGGSEFRQGASGLCVARGREAGTRVLAPALTFSLPFLLSSRLRRRRR

SEQ ID NO: 22103 - protein, 20 aa, Homo sapiens
MSPAPRCCLERGGTWREAAP

SEQ ID NO: 22104 - protein, 22 aa, Homo sapiens
VWRRGRAAELELLQLLPPPEEP

SEQ ID NO: 22105 - protein, 25 aa, Homo sapiens
MFFCLMNAILNAVLERGVGVRVYSI

SEQ ID NO: 22106 - protein, 25 aa, Homo sapiens
ISRPSLTSVTRLAPPTLVDVIPAVR

SEQ ID NO: 22107 - protein, 27 aa, Homo sapiens
MPPAARWPGPQCPKRALMVPSDRLALL

SEQ ID NO: 22108 - protein, 29 aa, Homo sapiens
MGAQRHRPGLGRCQGELSVVSASSPGAAV

SEQ ID NO: 22109 - protein, 31 aa, Homo sapiens
AAVAPQLFASISSRQAINYIQLSLQDWEELG

SEQ ID NO: 22110 - protein, 33 aa, Homo sapiens
STILEVEEKEVPALARGVWPFLESLWTHPPSIL

SEQ ID NO: 22111 - protein, 33 aa, Homo sapiens
PPLVVLGSRLAPLRGVALSSSLLAADLLSRSAD

SEQ ID NO: 22112 - protein, 35 aa, Homo sapiens
MIRMLSRSFWAHDGRYIQKVPRRNFLLEKMKKQYL

SEQ ID NO: 22113 - protein, 37 aa, Homo sapiens
VEDTTLDLKQEVCAYSTALKEHFPTLLVVFVFFSAVL

SEQ ID NO: 22114 - protein, 8 aa, Homo sapiens
MAAPREEA

SEQ ID NO: 22115 - protein, 39 aa, Homo sapiens
ASGRAGRLAWAATGGYDYSLAGSVRVVGWAECTLLGAAG

SEQ ID NO: 22116 - protein, 42 aa, Homo sapiens
MIPCSKRTFHLFNHSNFHSHLHDYRKHGVCRLVTHKKIAVRW

SEQ ID NO: 22117 - protein, 52 aa, Homo sapiens
MGRWRVSSVESWPFASTGGKLAIATAGTGTQAAPRPFLIRPPDSWALALALM

SEQ ID NO: 22118 - protein, 10 aa, Homo sapiens
MLLLRVGTLS

SEQ ID NO: 22119 - protein, 58 aa, Homo sapiens
MQQRRLLPRSPRGPGIRRTGWHCLKRRLLGDCAARIGGSPNILRSEDPAQVRCHRTCS

SEQ ID NO: 22120 - protein, 92 aa, Homo sapiens
TARTAAAPAGCSLHLWASLARHAGQCLPAPFATSSALRGLELGERAGGLVGWPGLRPAATTILWPGRCEWSAGQSARCLAPQADPAVHSREQ

SEQ ID NO: 22121 - protein, 6 aa, Homo sapiens
RLRRVA

SEQ ID NO: 22122 - protein, 6 aa, Homo sapiens
MWMFWS

SEQ ID NO: 22123 - protein, 179 aa, Homo sapiens
IMAQDQGEKENPMRELRIRKLCLNICVGESGDRLTRAAKVLEQLTGQTPVFSKARYTVRSFGIRRNEKIAVHCTVRGAKAEEILEKGLKVREYELRKNNFSDTGNFGFGIQEHIDLGIKYDPSIGIYGLDFYVVLGRPGFSIADKKRRTGCIGAKHRISKEEAMRWFQQKYDGIILPGK

SEQ ID NO: 22124 - protein, 453 aa, Homo sapiens
KMSPKRIAKRRSPPADAIPKSKKVKDTRAAASRRVPGARSCQGACGPSPPDQKTRPVSHRSHSTEPGLVLTLGQGDVGQLGLGENVMERKKPALVSIPEDVVQAEAGGMHTVCLSKSGQVYSFGCNDEGALGRDTSVEGSEMVPGKVELQEKVVQVSAGDSHTAALTDDGRVFLWGSFRDNNGVIGLLEPMKKSMVPVQVQLDVPVVKVASGNDHLVMLTADGDLYTLGCGEQGQLGRVPELFANRGGRQGLERLLVPKCVMLKSRGSRGHVRFQDAFCGAYFTFAISHEGHVYGFGLSNYHQLGTPGTESCFIPQNLTSFKNSTKSWVGFSGGQHHTVCMDSEGKAYSLGRAEYGRLGLGEGAEEKSIPTLISRLPAVSSVACGASVGYAVTKDGRVFAWGMGTNYQLGTGQDEDAWSPVEMMGKQLENRVVLSVSSGGQHTVLLVKDKEQS

SEQ ID NO: 22125 - protein, 31 aa, Homo sapiens
MSGPLRRLSITAKETSSLLWPRTLSSMYGTL

SEQ ID NO: 22126 - protein, 294 aa, Homo sapiens
LPHLRRSPQPPPSAMAPRKGSSRVAKTNSLRRRKLASFLKDFDREVEIRIKQIESDRQNLLKEVDNLYNIEILRLPKALREMNWLDYFALGGNKQALEEAATADLDITEINKLTAEAIQTPLKSAKTRKVIQVDEMIVEEEEEEENERKNLQTARVKRCPPSKKRTQSIQGKGKGKRSSRANTVTPAVGRLEVSMVKPTPGLTPRFDSRVFKTPGLRTPAAGERIYNISGNGSPLADSKEIFLTVPVGGGESLRLLASDLQRHSIAQLDPEALGNIKKLSNRLAQICSSIRTHK

SEQ ID NO: 22127 - protein, 36 aa, Homo sapiens
IPLTCTVGMQTVLQKQEQLHMCRHLTRCLLVLWQST

SEQ ID NO: 22128 - protein, 35 aa, Homo sapiens
IPLTCTVGMQTVLQKEQLHMCRHLTRCLLVLWQST

SEQ ID NO: 22129 - protein, 80 aa, Homo sapiens
LRMSGIYWGLTVMDLMGQLHRMNREEILAFIKSCQHECGGISASIGHDPHLLYTLSAVQVNTNQNCNDLDSMFSYFRVGN

SEQ ID NO: 22130 - protein, 301 aa, Homo sapiens
LFRRMGFVKVVKNKAYFKRYQVKFRRRREGKTDYYARKRLVIQDKNKYNTPKYRMIVRVTNRDIICQIAYARIEGDMIVCAAYAHELPKYGVKVGLTNYAAAYCTGLLLARRLLNRFGMDKIYEGQVEVTGDEYNVESIDGQPGAFTCYLDAGLARTTTGNKVFGALKGAVDGGLSIPHSTKRFPGYDSESKEFNAEVHRKHIMGQNVADYMRYLMEEDEDAYKKQFSQYIKNSVTPDMMEEMYKKAHAAIRENPVYEKKPKKEVKKKRWNRPKMSLAQKKDRVAQKKASFLRAQERAAES

SEQ ID NO: 22131 - protein, 7 aa, Homo sapiens
MKNLLET

SEQ ID NO: 22132 - protein, 24 aa, Homo sapiens
ILQILAEAFVMSAAAETGVLKAGC

SEQ ID NO: 22133 - protein, 802 aa, Homo sapiens
LYRLKGHKDAITQALFLREKNLLVTSGKDTMVKWWDLDTQHCFKTMVGHRTEVWGLVLLSEEKRLITGASDSELRVWDIAYLQEIEDPEEPDPKKIKGSSPGIQDTLEAEDGAFETDEAPEDRILSCRKAGSIMREGRDRVVNLAVDKTGRILACHGTDSVLELFCILSKKEIQKKMDKKMKKARKKAKLHSSKGEEEDPEVNVEMSLQDEIQRVTNIKTSAKIKSFDLIHSPHGELKAVFLLQNNLVELYSLNPSLPTPQPVRTSRITIGGHRSDVRTLSFSSDNIAVLSAAADSIKIWNRSTLQCIRTMTCEYALCSFFVPGDRQVVIGTKTGKLQLYDLASGNLLETIDAHDGALWSMSLSPDQRGFVTGGADKSVKFWDFELVKDENSTQKRLSVKQTRTLQLDEDVLCVSYSPNQKLLAVSLLDCTVKIFYVDTLKFFLSLYGHKLPVICMDISHDGALIATGSADRNVKIWGLDFGDCHKSLFAHDDSVMYLQFVPKSHLFFTAGKDHKIKQWDADKFEHIQTLEGHHQEIWCLAVSPSGDYVVSSSHDKSLRLWERTREPLILEEEREMEREAEYEESVAKEDQPAVPGETQGDSYFTGKKTIETVKAAERIMEAIELYREETAKMKEHKAICKAAGKEVPLPSNPILMAYGSISPSAYVLEIFKGIKSSELEESLLVLPFSYVPDILKLFNEFIQLGSDVELICRCLFFLLRIHFGQITSNQMLVPVIEKLRETTISKVSQVRDVIGFNMAGLDYLKRECEAKSEVMFFADATSHLEEKKRKRKKREKLILTLT

SEQ ID NO: 22134 - protein, 15 aa, Homo sapiens
MDHWRGSKVRVPVRE

SEQ ID NO: 22135 - protein, 276 aa, Homo sapiens
VRPFAQAAGGGAARTMAGDSEQTLQNHQQPNGGEPFLIGVSGGTASGKSSVCAKIVQLLGQNEVDYRQKQVVILSQDSFYRVLTSEQKAKALKGQFNFDHPDAFDNELILKTLKEITEGKTVQIPVYDFVSHSRKEETVTVYPADVVLFEGILAFYSQEVRDLFQMKLFVDTDADTRLSRRVLRDISERGRDLEQILSQYITFVKPAFEEFCLPTKKYADVIIPRGADNLVAINLIVQHIQDILNGGPSKRQTNGCLNGYTPSRKRQASESSSRPH

SEQ ID NO: 22136 - protein, 18 aa, Homo sapiens
IPSPAPLMRWRPRPGTPG

SEQ ID NO: 22137 - protein, 28 aa, Homo sapiens
LLCLLQLAAPLCSYSITIRFYLFWLNTP

SEQ ID NO: 22138 - protein, 11 aa, Homo sapiens
LLLVSVRSPAV

SEQ ID NO: 22139 - protein, 46 aa, Homo sapiens
VQNLAPRAAVAAAAPRAVAPYKYASSVRSPHPAIQPLQVRFTRQNA

SEQ ID NO: 22140 - protein, 126 aa, Homo sapiens
KSIAACHNVGLLAHDGQVNEDGQPDLGKARDYYTRACDGGYTSSCFNLSAMFLQGAPGFPKDMDLACKYSMKACDLGHIWACANASRMYKLGDGVDKDEAKAEVLKNRAQQLHKEQQKGVQPLTFG

SEQ ID NO: 22141 - protein, 15 aa, Homo sapiens
MVEFPSSRQPRRRSS

SEQ ID NO: 22142 - protein, 200 aa, Homo sapiens
KMSSGNAKIGHPAPNFKATAVMPDGQFKDISLSDYKGKYVVFFFYPLDFTFVCPTEIIAFSDRAEEFKKLNCQVIGASVDSHFCHLAWVNTPKKQGGLGPMNIPLVSDPKRTIAQDYGVLKADEGISFRGLFIIDDKGILRQITVNDLPVGRSVDETLRLVQAFQFTDKHGEVCPAGWKPGSDTIKPDVQKSKEYFSKQK

SEQ ID NO: 22143 - protein, 203 aa, Homo sapiens
LGTSAGWSPTMAAIRKKLVIVGDGACGKTCLLIVFSKDQFPEVYVPTVFENYIADIEVDGKQVELALWDTAGQEDYDRLRPLSYPDTDVILMCFSIDSPDSLENIPEKWTPEVKHFCPNVPIILVGNKKDLRQDEHTRRELAKMKQEPVRSEEGRDMANRISAFGYLECSAKTKEGVREVFEMATRAGLQVRKNKRRRGCPIL

SEQ ID NO: 22144 - protein, 8 aa, Homo sapiens
VLVLRIPA

SEQ ID NO: 22145 - protein, 81 aa, Homo sapiens
LKQVHPDTGISSKAMGIMNSFVNDIFERIAGEASRLAHYNKRSTITSREIQTAVRLLLPGKLAKHAVSEGTKAVTKYTSSK

SEQ ID NO: 22146 - protein, 43 aa, Homo sapiens
VLLASTLGMPLTPTVQGFQWILRGPDVETSPLGAPRAASHGVG

SEQ ID NO: 22147 - protein, 6 aa, Homo sapiens
MNMIPP

SEQ ID NO: 22148 - protein, 134 aa, Homo sapiens
ILAVMSGRGKQGGKARAKAKSRSSRAGLQFPVGRVHRLLRKGNYAERVGAGAPVYLAAVLEYLTAEILELAGNAARDNKKTRIIPRHLQLAVRNDEELNKLLGGVTIAQGGVLPNIQAVLLPKKTESHKPGKNK

SEQ ID NO: 22149 - protein, 10 aa, Homo sapiens
IFLAVATGTS

SEQ ID NO: 22150 - protein, 12 aa, Homo sapiens
MFSGRVWLGLPP

SEQ ID NO: 22151 - protein, 11 aa, Homo sapiens
RQPGSRHDALA

SEQ ID NO: 22152 - protein, 18 aa, Homo sapiens
MAAHKSGPAHVSAERTQQ

SEQ ID NO: 22153 - protein, 21 aa, Homo sapiens
KKERAGVSTVQKAKKKQKKRD

SEQ ID NO: 22154 - protein, 6 aa, Homo sapiens
MPGVGP

SEQ ID NO: 22155 - protein, 37 aa, Homo sapiens
MAAPSLSREKRPGKLSFLRSTVGIAAAEQGFWKALRT

SEQ ID NO: 22156 - protein, 200 aa, Homo sapiens
LGIMQRASRLKRELHMLATEPPPGITCWQDKDQMDDLRAQILGGANTPYEKGVFKLEVIIPERYPFEPPQIRFLTPIYHPNIDSAGRICLDVLKLPPKGAWRPSLNIATVLTSIQLLMSEPNPDDPLMADISSEFKYNKPAFLKNARQWTEKHARQKQKADEEEMLDNLPEAGDSRVHNSTQKRKASQLVGIEKKFHPDV

SEQ ID NO: 22157 - protein, 21 aa, Homo sapiens
MGLGGSSAGGGGGRSGSSWPC

SEQ ID NO: 22158 - protein, 34 aa, Homo sapiens
IAGPLNRRAFPPLSHSSFLSSIACEKIISEHFYF

SEQ ID NO: 22159 - protein, 16 aa, Homo sapiens
LSSIACEKIISEHFYF

SEQ ID NO: 22160 - protein, 43 aa, Homo sapiens
MSTGFAMQWSRGWRPGRKKRRRRTWQPLDSTLSMVEDFYYLPS

SEQ ID NO: 22161 - protein, 277 aa, Homo sapiens
LEPLEGDHVFRAVHLHSGEELVCKVFDISCYQESLAPCFCLSAHSNINQITEIILGETKAYVFFERSYGDMHSFVRTCKKLREEEAARLFYQIASAVAHCHDGGLVLRDLKLRKFIFKDEERTRVKLESLEDAYILRGDDDSLSDKHGCPAYVSPEILNTSGSYSGKAADVWSLGVMLYTMLVGRYPFHDIEPSSLFSKIRRGQFNIPETLSPKAKCLIRSILRREPSERLTSQEILDHPWFSTDFSVSNSAYGAKEVSDQLVPDVNMEENLDPFFN

SEQ ID NO: 22162 - protein, 7 aa, Homo sapiens
MLYLNYL

SEQ ID NO: 22163 - protein, 413 aa, Homo sapiens
LPPRRCSFVRPLPHTDTNMNGQLNGFHEAFIEEGTFLFTSESVGEGHPDKICDQISDAVLDAHLQQDPDAKVACETVAKTGMILLAGEITSRAAVDYQKVVREAVKHIGYDDSSKGFDYKTCNVLVALEQQSPDIAQGVHLDRNEEDIGAGDQGLMFGYATDETEECMPLTIVLAHKLNAKLAELRRNGTLPWLRPDSKTQVTVQYMQDRGAVLPIRVHTIVISVQHDEEVCLDEMRDALKEKVIKAVVPAKYLDEDTIYHLQPSGRFVIGGPQGDAGLTGRKIIVDTYGGWGAHGGGAFSGKDYTKVDRSAAYAARWVAKSLVKGGLCRRVLVQVSYAIGVSHPLSISIFHYGTSQKSERELLEIVKKNFDLRPGVIVRDLDLKKPIYQRTAAYGHFGRDSFPWEVPKKLKY

SEQ ID NO: 22164 - protein, 26 aa, Homo sapiens
LFPQMSDSDSRTEKRKKKRPNGKATF

SEQ ID NO: 22165 - protein, 824 aa, Homo sapiens
LNFRVKFFVSDPNKLQEEYTRYQYFLQIKQDILTGRLPCPSNTAALLASFAVQSELGDYDQSENLSGYLSDYSFIPNQPQDFEKEIAKLHQQHIGLSPAEAEFNYLNTARTLELYGVEFHYARDQSNNEIMIGVMSGGILIYKNRVRMNTFPWLKIVKISFKCKQFFIQLRKELHESRETLLGFNMVNYRACKNLWKACVEHHTFFRLDRPLPPQKNFFAHYFTLGSKFRYCGRTEVQSVQYGKEKANKDRVFARSPSKPLARKLMDWEVVSRNSISDDRLETQSLPSRSPPGTPNHRNSTFTQEGTRLRPSSVGHLVDHMVHTSPSEVFVNQRSPSSTQANSIVLESSPSQETPGDGKPPALPPKQSKKNSWNQIHYSHSQQDLESHINETFDIPSSPEKPTPNGGIPHDNLVLIRMKPDENGRFGFNVKGGYDQKMPVIVSRVAPGTPADLCVPRLNEGDQVVLINGRDIAEHTHDQVVLFIKASCERHSGELMLLVRPNAVYDVVEEKLENEPDFQYIPEKAPLDSVHQDDHSLRESMIQLAEGLITGTVLTQFDQLYRKKPGMTMSCAKLPQNISKNRYRDISPYDATRVILKGNEDYINANYINMEIPSSSIINQYIACQGPLPHTCTDFWQMTWEQGSSMVVMLTTQVERGRVKCHQYWPEPTGSSSYGCYQVTCHSEEGNTAYIFRKMTLFNQEKNESRPLTQIQYIAWPDHGVPDDSSDFLDFVCHVRNKRAGKEEPVVVHCSAGIGRTGVLITMETAMCLIECNQPVYPLDIVRTMRDQRAMMIQTPSQYRFVCEAILKVYEEGFVKPLTTSTNK

SEQ ID NO: 22166 - protein, 19 aa, Homo sapiens
LKEMKSALRNEVDCLLAFC

SEQ ID NO: 22167 - protein, 15 aa, Homo sapiens
LNLGNIERNIRIIAL

SEQ ID NO: 22168 - protein, 18 aa, Homo sapiens
MKKRGLTLLSFKTVLFKA

SEQ ID NO: 22169 - protein, 36 aa, Homo sapiens
LMLLEQNLITVDMQKHSLTFWWLVECWPQVVHWQMT

SEQ ID NO: 22170 - protein, 23 aa, Homo sapiens
KNMAAGCGEGDALAVAVSCFPVL

SEQ ID NO: 22171 - protein, 43 aa, Homo sapiens
VDEMNHDFQALALESRGMGETIQCPSLLWYREDLDRVFMETVK

SEQ ID NO: 22172 - protein, 11 aa, Homo sapiens
MLISGSTKGPS

SEQ ID NO: 22173 - protein, 7 aa, Homo sapiens
MTLEKLF

SEQ ID NO: 22174 - protein, 17 aa, Homo sapiens
ILMAGRVRFWDSWRQWW

SEQ ID NO: 22175 - protein, 124 aa, Homo sapiens
RRVSRALPPSVWHTSCRVAVCGWTRPLTSLSSAGGSSPPTSVSWGSCCSLRPRCCVTEVVPLCLPAPLCWQELTVDWWAPLWASTVPSPLAGLLPPQSFRSPHMGALGMPACWSFRPGALLLGD

SEQ ID NO: 22176 - protein, 228 aa, Homo sapiens
LSYIMVEDELALFDKSINEFWNKFKSTDTSCQMAGLRDTYKDSIKAFAEKLSVKLKEEERMVEMFLEYQNQISRQNKLIQEKKDNLLKLIAEVKGKKQELEVLTANIQDLKEEYSRKKETISTANKANAERLKRLQKSADLYKDRLGLEIRKIYGEKLQFIFTNIDPKNPESPFMFSLHLNEARDYEVSDSAPHLEGLAEFQENVRKTNNFSAFLANVRKAFTATVYN

SEQ ID NO: 22177 - protein, 21 aa, Homo sapiens
MEAKYMKEKLLFVSLLIAPDD

SEQ ID NO: 22178 - protein, 8 aa, Homo sapiens
MIMTKRNL

SEQ ID NO: 22179 - protein, 7 aa, Homo sapiens
MLSGYNH

SEQ ID NO: 22180 - protein, 50 aa, Homo sapiens
RLGPPLSAPRGPWMVKQQRSRGALCPRQLHPADPAWAVLRGGGGSPRSTQ

SEQ ID NO: 22181 - protein, 41 aa, Homo sapiens
LILSHQMWNLWKRSLGFAKLRTKPSRANRIQRSCTAKNLKR

SEQ ID NO: 22182 - protein, 8 aa, Homo sapiens
MYSSSARL

SEQ ID NO: 22183 - protein, 37 aa, Homo sapiens
LQARLDFPTYIGLVKKPVLPSCHSCLSMAPFPKSRCL

SEQ ID NO: 22184 - protein, 18 aa, Homo sapiens
RTPGLFSERWAAETDLPP

SEQ ID NO: 22185 - protein, 28 aa, Homo sapiens
MPRTCRPHRGLVLNRGGAGGTLMWHQMK

SEQ ID NO: 22186 - protein, 166 aa, Homo sapiens
LWSRSHPFCCSRGPLAMAGILFEDIFDVKDIDPEGKKFDRVSRLHCESESFKMDLILDVNIQIYPVDLGDKFRLVIASTLYEDGTLDDGEYNPTDDRPSRADQFEYVMYGKVYRIEGDETSTEAATRLSAYVSYGGLLMRLQGDANNLHGFEVDSRVYLLMKKLAF

SEQ ID NO: 22187 - protein, 28 aa, Homo sapiens
MTSLVDHVRDLFCLRGTGKGWTAPLSLY

SEQ ID NO: 22188 - protein, 136 aa, Homo sapiens
IMAALRPLVKPKIVKKRTKKFIRHQSDRYVKIKRNWRKPRGIDNRVRRRFKGQILMPNIGYGSNKKTKHMLPSGFRKFLVHNVKELEVLLMCNKSYCAEIAHNVSSKNRKAIVERAAQLAIRVTNPNARLRSEENE

SEQ ID NO: 22189 - protein, 17 aa, Homo sapiens
LDSDSLPEQWLPSGRNW

SEQ ID NO: 22190 - protein, 910 aa, Homo sapiens
LPKKPGPTILHFAVRFYIESISFLKDKTTVELFFLNAKACVHKGQIEVESETIFKLAAFILQEAKGDYTSDENARKDLKTLPAFPTKTLQEHPSLAYCEDRVIEHYLKIKGLTRGQAVVQYMKIVEALPTYGVHYYAVKDKQGLPWWLGISYKGIGQYDIQDKVKPRKLFQWKQLENLYFREKKFAVEVHDPRRISVSRRTFGQSGLFVQTWYANSSLIKSIWVMAISQHQFYLDRKQSKAKIPSARSLDEIAMDLTETGTQRASKLVTLETKSQFIMASNGSLISSGSQDSEVSEEQKREKILELKKKEKLLQEKLLKKVEELKKICLREAELTGKMPKEYPLNIGEKPPQVRRRVGTAFKLDDNLLPSEEDPALQELESNFLIQQKLVEAAKKLANEPDLCKTVKKKRKQDYTDAMKKLQEIENAINEYRIRCGKKPSQKATVLPEDIIPSESSSLSDTTTYDDPSDAFTFPGQRSSSVPHSPRILPPKSLGIERIHFRKSSINEQFVDTRQSREMLSTHSSPYKTLERRPQGGRSMPTTPVLTRNAYSSSHLEPESSSQHCRQRSGSLESQSHLLSEMDSDKPFFSLSKSQRSSSTEILDDGSSYTSQSSTEYYCVTPVTGPYYTTQTLDTRTRGRRRSKKQNVSTSNSGSMPNLAQKDSLRNGVYSKSQEPPSSSYYIAGYTPYAECDFYYSGGYVYENDTEGQYSVNPSYRSSAHYGYERQRDYSRSFHEDEVDRVPHNPYATLRLPRKAAAKSEHITKNIHKALVAEHLRGWYQRASGQKDQGHSPQTSFDSDRGSQRCLGFAGLQVPCSPSSRASSYSSVSSTNASGNWRTQLTIGLSDYETPAHSSYTSCYGNVYNPLPSPSRQYTEISQLDGTDGNQLEDNLESSEQRLFWHEDSKPGTLV

SEQ ID NO: 22191 - protein, 22 aa, Homo sapiens
LVIVALATDREAVAEDTCHGRL

SEQ ID NO: 22192 - protein, 67 aa, Homo sapiens
LARKMPGLVDSNPAPPESQEKKPLKPCCACPETKKARDACIIEKGEEHCGHLIEAHKECMRALGFKI

SEQ ID NO: 22193 - protein, 31 aa, Homo sapiens
MERVVHGGMSIFLKKMSHSLSSWSLMKIKPN

SEQ ID NO: 22194 - protein, 17 aa, Homo sapiens
MVGSERDEPPVLHRPQR

SEQ ID NO: 22195 - protein, 13 aa, Homo sapiens
MRKHGCGRFGPSL

SEQ ID NO: 22196 - protein, 427 aa, Homo sapiens
RIMATAEVLNIGKKLYEGKTKEVYELLDSPGKVLLQSKDQITAGNAARKNHLEGKAAISNKITSCIFQLLQEAGIKTAFTRKCGETAFIAPQCEMIPIEWVCRRIATGSFLKRNPGVKEGYKFYPPKVELFFKDDANNDPQWSEEQLIAAKFCFAGLLIGQTEVDIMSHATQAIFEILEKSWLPQNCTLVDMKIEFGVDVTTKEIVLADVIDNDSWRLWPSGDRSQQKDKQSYRDLKEVTPEGLQMVKKNFEWVAERVELLLKSESQCRVVVLMGSTSDLGHCEKIKKACGNFGIPCELRVTSAHKGPDETLRIKAEYEGDGIPTVFVAVAGRSNGLGPVMSGNTAYPVISCPPLTPDWGVQDVWSSLRLPSGLGCSTVLSPEGSAQFAAQIFGLSNHLVWSKLRASILNTWISLKQADKKIRECNL

SEQ ID NO: 22197 - protein, 18 aa, Homo sapiens
LTFSLPFLLSSRLRRRRR

SEQ ID NO: 22198 - protein, 20 aa, Homo sapiens
TGGTFEKKRAMLLLRVGTLS

SEQ ID NO: 22199 - protein, 47 aa, Homo sapiens
KDGNASGTTLLEALDCILPPTRPTDKPLCLPLQDVYKIGGIGTVPVG

SEQ ID NO: 22200 - protein, 9 aa, Homo sapiens
LSQMVSNNL

SEQ ID NO: 22201 - protein, 69 aa, Homo sapiens
IFLMIGKECQDGIFFWQDALVVQSLKILGTIFCIDSYTTKEYTSIFIKFIMSFRLHLEWKLNMHILWRL

SEQ ID NO: 22202 - protein, 56 aa, Homo sapiens
LRGLELGERAGGLVGWPGLRPAATTILWPGRCEWSAGQSARCLAPQADPAVHSREQ

SEQ ID NO: 22203 - protein, 20 aa, Homo sapiens
LAGSVRVVGWAECTLLGAAG

SEQ ID NO: 22204 - protein, 88 aa, Homo sapiens
RNLHQVENEAHSQRAKPRQRPQDLFWRWKLVENPDCLHGLPSRPQRNTDINFTLRSLLETLIHKDNHCQPLFRLLQEPSSKIKHKKVF

SEQ ID NO: 22205 - protein, 21 aa, Homo sapiens
INDFKSLEPGISMTLDMQMTV

SEQ ID NO: 22206 - protein, 6 aa, Homo sapiens
LTGAKT

SEQ ID NO: 22207 - protein, 31 aa, Homo sapiens
MNSPRPEPLAEWTPSRPQVARSGLSGSRKLQ

SEQ ID NO: 22208 - protein, 447 aa, Homo sapiens
LLLPAELLPGEEEAMALRVTRNSKINAENKAKINMAGAKRVPTAPAATSKPGLRPRTALGDIGNKVSEQLQAKMPMKKEAKPSATGKVIDKKLPKPLEKVPMLVPVPVSEPVPEPEPEPEPEPVKEEKLSPEPILVDTASPSPMETSGCAPAEEDLCQAFSDVILAVNDVDAEDGADPNLCSEYVKDIYAYLRQLEEEQAVRPKYLLGREVTGNMRAILIDWLVQVQMKFRLLQETMYMTVSIIDRFMQNNCVPKKMLQLVGVTAMFIASKYEEMYPPEIGDFAFVTDNTYTKHQIRQMEMKILRALNFGLGRPLPLHFLRRASKIGEVDVEQHTLAKYLMELTMLDYDMVHFPPSQIAAGAFCLALKILDNGEWTPTLQHYLSYTEESLLPVMQHLAKNVVMVNQGLTKHMTVKNKYATSKHAKISTLPQLNSALVQDLAKAVAKV

SEQ ID NO: 22209 - protein, 23 aa, Homo sapiens
IGYPSKMMHPKQNIKRTKRKKST

SEQ ID NO: 22210 - protein, 16 aa, Homo sapiens
MASRETRKWTPWLLES

SEQ ID NO: 22211 - protein, 307 aa, Homo sapiens
LEMHLRDEICNEMVEQMQQREQWCSEHLDTQKELLEEMYEEKLNILKESLTSFYQEEIQERDEKIEELEALLQEARQQSVAHQQSGSELALRRSQRLAASASTQQLQEVKAKLQQCKAELNSTTEELHKYQKMLEPPPSAKPFTIDVDKKLEEGQKNIRLLRTELQKLGESLQSAERACCHSTGAGKLRQALTTCDDILIKQDQTLAELQNNMVLVKLDLRKKAACIAEQYHTVLKLQGQVSAKKRLGTNQENQQPNQQPPGKKPFLRNLLPRTPTCQSSTDCSPYARILRSRRSPLLKSGPFGKKY

SEQ ID NO: 22212 - protein, 15 aa, Homo sapiens
VLLLETRLLVTAKER

SEQ ID NO: 22213 - protein, 12 aa, Homo sapiens
LDIFDSFPPRLN

SEQ ID NO: 22214 - protein, 15 aa, Homo sapiens
MNAAVKTCNNPEWLL

SEQ ID NO: 22215 - protein, 27 aa, Homo sapiens
MLVRKILFNLGSPSYGNLLKIHISLLE

SEQ ID NO: 22216 - protein, 729 aa, Homo sapiens
LAVNMSFPKAPLKRFNDPSGCAPSPGAYDVKTLEVLKGPVSFQKSQRFKQQKESKQNLNVDKDTTLPASARKVKSSESKKESQKNDKDLKILEKEIRVLLQERGAQDRRIQDLETELEKMEARLNAALREKTSLSANNATLEKQLIELTRTNELLKSKFSENGNQKNLRILSLELMKLRNKRETKMRGMMAKQEGMEMKLQVTQRSLEESQGKIAQLEGKLVSIEKEKIDEKSETEKLLEYIEEISCASDQVEKYKLDIAQLEENLKEKNDEILSLKQSLEENIVILSKQVEDLNVKCQLLEKEKEDHVNRNREHNENLNAEMQNLKQKFILEQQEREKLQQKELQIDSLLQQEKELSSSLHQKLCSFQEEMVKEKNLFEEELKQTLDELDKLQQKEEQAERLVKQLEEEAKSRAEELKLLEEKLKGKEAELEKSSAAHTQATLLLQEKYDSMVQSLEDVTAQFESYKALTASEIEDLKLENSSLQEKAAKAGKNAEDVQHQILATESSNQEYVRMLLDLQTKSALKETEIKEITVSFLQKITDLQNQLKQQEEDFRKQLEDEEGRKAEKENTTAELTEEINKWRLLYEELYNKTKPFQLQLDAFEVEKQALLNEHGAAQEQLNKIRDSYAKLLGHQNLKQKIKHVVKLKDENSQLKSEVSKLRCQLAKKKQSETKLQEELNKVLGIKHFDPSKAFHHESKENFALKTPLKEGNTNCYRAPMECQESWK

SEQ ID NO: 22217 - protein, 12 aa, Homo sapiens
MVVISSLNAGFI

SEQ ID NO: 22218 - protein, 9 aa, Homo sapiens
ISIHSKLVF

SEQ ID NO: 22219 - protein, 106 aa, Homo sapiens
IPCPEPIMLRSHVLVMSFIGKDDMPAPLLKNVQLSESKARELYLQVIQYMRRMYQDARLVHADLSEFNMLYHGGGVYIIDVSQSVEHDHPHALEFLRKDCANVNGE

SEQ ID NO: 22220 - protein, 135 aa, Homo sapiens
RLWTKCLFIMPEPAKSAPAPKKGSKKAVTKAQKKDGKKRKRSRKESYSVYVYKVLKQVHPDTGISSKAMGIMNSFVNDIFERIAGEASRLAHYNKRSTITSREIQTAVRLLLPGELAKHAVSEGTKAVTKYTSSK

SEQ ID NO: 22221 - protein, 25 aa, Homo sapiens
RRRRRMVRSASVAARRAIPCTCTRC

SEQ ID NO: 22222 - protein, 110 aa, Homo sapiens
IFVGVLVMSGRGKGGKGLGKGGAKRHRKVLRDNIQGITKPAIRRLARRGGVKRISGLIYEETRGVLKVFLENVIRDAVTYTEHAKRKTVTAMDVVYALKRQGRTLYGFGG

SEQ ID NO: 22223 - protein, 104 aa, Homo sapiens
IMSGRGKGGKGLGKGGAKRHRKVLRDNIQGITKPAIRRLARRGGVKRISGLIYEETRGVLKVFLENVIRDAVTYTEHAKRKTVTAMDVVYALKRQGRTLYGFGG

SEQ ID NO: 22224 - protein, 132 aa, Homo sapiens
IAMSGRGKQGGKARAKAKSRSSRAGLQFPVGRVHRLLRKGNYAERVGAGAPVYLAAVLEYLTAEILELAGNAARDNKKTRIIPRHLQLAIRNDEELNKLLGRVTIAQGGVLPNIQAVLLPKKTESHHKAKGK

SEQ ID NO: 22225 - protein, 105 aa, Homo sapiens
LIMSGRGKGGKGLGKGGAKRHRKVLRDNIQGITKPAIRRLARRGGVKRISGLIYEETRGVLKVFLENVIRDAVTYTEHAKRKTVTAMDVVYALKRQGRTLYGFGG

SEQ ID NO: 22226 - protein, 55 aa, Homo sapiens
MWPCGPSRSLASSLGSTPNCMPSPGVMTGGSAWKTTAAKVLWSIMSDSQEVTGWN

SEQ ID NO: 22227 - protein, 8 aa, Homo sapiens
KAMTPMSH

SEQ ID NO: 22228 - protein, 134 aa, Homo sapiens
IFRQLLPVMPEPSKSAPAPKKGSKKAVTKAQKKDGKKRKRSRKESYSVYVYKVLKQVHPDTGISSKAMGIMNSFVNDIFERIAGEASRLAHYNKRSTITSREIQTAVRLLLPGELAKHAVSEGTKAVTKYTSSK

SEQ ID NO: 22229 - protein, 41 aa, Homo sapiens
ILPTDTEPSSRPGPPLQSTSIRLEMAFVPAYDWSQRAVQTP

SEQ ID NO: 22230 - protein, 8 aa, Homo sapiens
MQLMQSES

SEQ ID NO: 22231 - protein, 30 aa, Homo sapiens
LQAARGPAAPPRLGLADSRGSRPCRGGMLL

SEQ ID NO: 22232 - protein, 19 aa, Homo sapiens
RAVRYNSTLKMSAVIVEEI

SEQ ID NO: 22233 - protein, 104 aa, Homo sapiens
RMALSTIVSQRKQIKRKAPRGFLKRVFKRKKPQLRLEKSGDLLVRFHPFSGWEWGTGEVHLNCLLFVHRLAEESRTNACASKCRVINKEHVLAAAKVILKKSRG

SEQ ID NO: 22234 - protein, 398 aa, Homo sapiens
KMNAGSDPVVIVSAARTIIGSFNGALAAVPVQDLGSTVIKEVLKRATVAPEDVSEVIFGHVLAAGCGQNPVRQASVGAGIPYSVPAWSCQMICGSGLKAVCLAVQSIGIGDSSIVVAGGMENMSKAPHLAYLRTGVKIGEMPLTDSILCDGLTDAFHNCHMGITAENVAKKWQVSREDQDKVAVLSQNRTENAQKAGHFDKEIVPVLVSTRKGLIEVKTDEFPRHGSNIEAMSKLKPYFLTDGTGTVTPANASGINDGAAAVVLMKKSEADKRGLTPLARIVSWSQVGVEPSIMGIGPIPAIKQAVTKAGWSLEDVDIFEINEAFAAVSAAIVKELGLNPEKVNIEGGAIALGHPLGASGCRILVTLLHTLERMGRSRGVAALCIGGGMGIAMCVQRE

SEQ ID NO: 22235 - protein, 7 aa, Homo sapiens
KLVLEVA

SEQ ID NO: 22236 - protein, 104 aa, Homo sapiens
KMSGRGKGGKGLGKGGAKRHRKVLRDNIQGITKPAIRRLARRGGVKRISGLIYEETRGVLKVFLENVIRDAVTYTEHAKRKTVTAMDVVYALKRQGRTLYGFGG

SEQ ID NO: 22237 - protein, 7 aa, Homo sapiens
IQMPGMH

SEQ ID NO: 22238 - protein, 127 aa, Homo sapiens
IMPELAKSAPAPKKGSKKAVTKAQKKDGKKRKRSRKESYSVYVYKVLKQVHPDTGISSKAMGIMNSFVNDIFERIASEASRLAHYNKRSTITSREIQTAVRLLLPGELAKHAVSEGTKAVTKYTSSK

SEQ ID NO: 22239 - protein, 144 aa, Homo sapiens
LSRYVYLAMARTKQTARKSTGGKAPRKQLATKAARKSAPATGGVKKPHRYRPGTVALREIRRYQKSTELLIRKLPFQRLVREIAQDFKTDLRFQSSAVMALQEACEAYLVGLFEDTNLCAIHAKRVTIMPKDIQLARRIRGERA

SEQ ID NO: 22240 - protein, 17 aa, Homo sapiens
IVDMVPDKPMCVDSLSD

SEQ ID NO: 22241 - protein, 19 aa, Homo sapiens
MALSSVAQWSSSEDAKVRA

SEQ ID NO: 22242 - protein, 21 aa, Homo sapiens
TSSDCKHNMSCAPMLVNSCCN

SEQ ID NO: 22243 - protein, 35 aa, Homo sapiens
MRGMVAILIAFMKQRRMGLNDFIQKIANNSYACKQ

SEQ ID NO: 22244 - protein, 7 aa, Homo sapiens
MVTMFRY

SEQ ID NO: 22245 - protein, 417 aa, Homo sapiens
LNTMIPLEKPGSGGSSPGATSGSGRAGRGLSGPCRPPPPPQARGLLTEIRAVVRTEPFQDGYSLCPGRELGRGKFAVVRKCIKKDSGKEFAAKFMRKRRKGQDCRMEIIHEIAVLELAQDNPWVINLHEVYETASEMILVLEYAAGGEIFDQCVADREEAFKEKDVQRLMRQILEGVHFLHTRDVVHLDLKPQNILLTSESPLGDIKIVDFGLSRILKNSEELREIMGTPEYVAPEILSYDPISMATDMWSIGVLTYVMLTGISPFLGNDKQETFLNISQMNLSYSEEEFDVLSESAVDFIRTLLVKKPEDRATAEECLKHPWLTQSSIQEPSFRMEKALEEANALQEGHSVPEINSDTDKSETKESIVTEELIVVTSYTLGQCRQSEKEKMEQKAISKRFKFEEPLLQEIPGEFIY

SEQ ID NO: 22246 - protein, 30 aa, Homo sapiens
MRLPPSKALARMPTPAAATGCASPATCVFF

SEQ ID NO: 22247 - protein, 14 aa, Homo sapiens
ILRSLQIILWKENA

SEQ ID NO: 22248 - protein, 24 aa, Homo sapiens
LESCVLAARDPAWVGRCFCEKPKD

SEQ ID NO: 22249 - protein, 11 aa, Homo sapiens
LQIIFSLGPGG

SEQ ID NO: 22250 - protein, 28 aa, Homo sapiens
MPLCFRSEPPWPGRSCVDQASQECGHVF

SEQ ID NO: 22251 - protein, 40 aa, Homo sapiens
MISPRSSSTTAPACARPASRATMPPGPSSPPSWGAPGTRA

SEQ ID NO: 22252 - protein, 7 aa, Homo sapiens
MVTMFRY

SEQ ID NO: 22253 - protein, 732 aa, Homo sapiens
LSPPSAAARPSAAMALKDYALEKEKVKKFLQEFYQDDELGKKQFKYGNQLVRLAHREQVALYVDLDDVAEDDPELVDSICENARRYAKLFADAVQELLPQYKEREVVNKDVLDVYIEHRLMMEQRSRDPGMVRSPQNQYPAELMRRFELYFQGPSSNKPRVIREVRADSVGKLVTVRGIVTRVSEVKPKMVVATYTCDQCGAETYQPIQSPTFMPLIMCPSQECQTNRSGGRLYLQTRGSRFIKFQEMKMQEHSDQVPVGNIPRSITVLVEGENTRIAQPGDHVSVTGIFLPILRTGFRQVVQGLLSETYLEAHRIVKMNKSEDDESGAGELTREELRQIAEEDFYEKLAASIAPEIYGHEDVKKALLLLLVGGVDQSPRGMKIRGNINICLMGDPGVAKSQLLSYIDRLAPRSQYTTGRGSSGVGLTAAVLRDSVSGELTLEGGALVLADQGVCCIDEFDKMAEADRTAIHEVMEQQTISIAKAGILTTLNARCSILAAANPAYGRYNPRRSLEQNIQLPAALLSRFDLLWLIQDRPDRDNDLRLAQHITYVHQHSRQPPSQFEPLDMKLMRRYIAMCREKQPMVPESLADYITAAYVEMRREAWASKDATYTSARTLLAILRLSTALARLRMVDVVEKEDVNEAIRLMEMSKDSLLGDKGQTARTQRPADVIFATVRELVSGGRSVRFSEAEQRCVSRGFTPAQFQAALDEYEELNVWQVNASRTRITFV

SEQ ID NO: 22254 - protein, 38 aa, Homo sapiens
MVIVAAAADMEPKQWRRESQGSSLTIFYCPCARWTQRC

SEQ ID NO: 22255 - protein, 8 aa, Homo sapiens
MADSVASR

SEQ ID NO: 22256 - protein, 59 aa, Homo sapiens
KPNIEPPENVEWSGAEASMFRVLIGTYYDNFCAIARLIGTKTCRQVRYPIKMLLKELQT

SEQ ID NO: 22257 - protein, 9 aa, Homo sapiens
TVRFIKKML

SEQ ID NO: 22258 - protein, 15 aa, Homo sapiens
IPLRLRAPASSCESL

SEQ ID NO: 22259 - protein, 6 aa, Homo sapiens
MVLPGA

SEQ ID NO: 22260 - protein, 333 aa, Homo sapiens
IETPHKEIGTSDFSRFTNYRFKNLFINPSPLPDLSWGCSKEVWLNMLKKESRYVHDKHFEVLHSDLEPQMRSILLDWLLEVCEVYTLHRETFYLAQDFFDRFMLTQKDINKNMLQLIGITSLFIASKLEEIYAPKLQEFAYVTDGACSEEDILRMELIILKALKWELCPVTIISWLNLFLQVDALKDAPKVLLPQYSQETFIQIAQLLDLCILAIDSLEFQYRILTAAALCHFTSIEVVKKASGLEWDSISECVDWMVPFVNVVKSTSPVKLKTFKKIPMEDRHNIQTHTNYLAMLEEVNYINTFRKGGQLSPVCNGGIMTPPKSTEKPPGKH

SEQ ID NO: 22261 - protein, 6 aa, Homo sapiens
MFMNIP

SEQ ID NO: 22262 - protein, 32 aa, Homo sapiens
RGVESVRCQRLVMPRIPLGSREAKLRGTASCR

SEQ ID NO: 22263 - protein, 14 aa, Homo sapiens
MCVGICEKKRICEV

SEQ ID NO: 22264 - protein, 13 aa, Homo sapiens
INSRLSRSKLPEK

SEQ ID NO: 22265 - protein, 6 aa, Homo sapiens
MMHDAL

SEQ ID NO: 22266 - protein, 446 aa, Homo sapiens
KMAEYDLTTRIAHFLDRHLVFPLLEFLSVKEIYNEKELLQGKLDLLSDTNMVDFAMDVYKNLYSDDIPHALREKRTTVVAQLKQLQAETEPIVKMFEDPETTRQMQSTRDGRMLFDYLADKHGFRQEYLDTLYRYAKFQYECGNYSGAAEYLYFFRVLVPATDRNALSSLWGKLASEILMQNWDAAMEDLTRLKETIDNNSVSSPLQSLQQRTWLIHWSLFVFFNHPKGRDNIIDLFLYQPQYLNAIQTMCPHILRYLTTAVITNKDVRKRRQVLKDLVKVIQQESYTYKDPITEFVECLYVNFDFDGAQKKLRECESVLVNDFFLVACLEDFIENARLFIFETFCRIHQCISINMLADKLNMTPEEAERWIVNLIRNARLDAKIDSKLGHVVMGNNAVSPYQQVIEKTKSLSFRSQMLAMNIEKKLNQNSRSEAPNWATQDSGFY

SEQ ID NO: 22267 - protein, 56 aa, Homo sapiens
LMAGVWAVRGAAAQTQFAPGSRETGGFHRSPALYQPCSLDKIFDLSDPRFSSPFFF

SEQ ID NO: 22268 - protein, 16 aa, Homo sapiens
MLCYPENFPNKYLKLI

SEQ ID NO: 22269 - protein, 40 aa, Homo sapiens
TSWSSVSGAAGTGRSGGPQGRVPGSQRGAPGPASLRASRG

SEQ ID NO: 22270 - protein, 64 aa, Homo sapiens
TAAEGPSLGLGTLRGENEAIRHPLGPCFQVSLSPLPAFFPALSPKLPPGREKRPGAKNEPFSST

SEQ ID NO: 22271 - protein, 47 aa, Homo sapiens
VALARTFLRQTYKISSADLEKFRMWRSSHGKMTKETHRKFLHISTSV

SEQ ID NO: 22272 - protein, 209 aa, Homo sapiens
KLMENRALDPGTRDSYGATSHLPNKGALAKVKNNFKDLMSKLTEGQYVLCRWTDGLYYLGKIKRVSSSKQSCLVTFEDNSKYWVLWKDIQHAGVPGEEPKCNICLGKTSGPLNEILICGKCGLGYHQQCHIPIAGSADQPLLTPWFCRRCIFALAVRVSLPSSPVPASPASSSGADQRLPSQSLSSKQKGHTWALETDSASATVLGQDL

SEQ ID NO: 22273 - protein, 18 aa, Homo sapiens
METGGSLGLEQRIHRQVP

SEQ ID NO: 22274 - protein, 46 aa, Homo sapiens
KFKGFGSLSNLPRSFTLRRSSASISRQSHLEPDTFEATRPGAMGRG

SEQ ID NO: 22275 - protein, 9 aa, Homo sapiens
VNFWMKPLN

SEQ ID NO: 22276 - protein, 8 aa, Homo sapiens
KLACSWES

SEQ ID NO: 22277 - protein, 32 aa, Homo sapiens
LETVGRTVVASATRGKRLLPSLNWTPRAPESA

SEQ ID NO: 22278 - protein, 11 aa, Homo sapiens
LRRPVGLGNLR

SEQ ID NO: 22279 - protein, 20 aa, Homo sapiens
VPSTDLLMGSMSITWELAAL

SEQ ID NO: 22280 - protein, 472 aa, Homo sapiens
LDLATISEMSSRSTKDLIKSKWGSKPSNSKSETTLEKLKGEIAHLKTSVDEITSGKGKLTDKERHRLLEKIRVLEAEKEKNAYQLTEKDKEIQRLRDQLKARYSTTTLLEQLEETTREGERREQVLKALSEEKDVLKQQLSAATSRIAELESKTNTLRLSQTVAPNCFNSSINNIHEMEIQLKDALEKNQQWLVYDQQREVYVKGLLAKIFELEKKTETAAHSLPQQTKKPESEGYLQEEKQKCYNDLLASAKKDLEVERQTITQLSFELSEFRRKYEETQKEVHNLNQLLYSQRRADVQHLEDDRHKTEKIQKLREENDIARGKLEEEKKRSEELLSQVQFLYTSLLKQQEEQTRVALLEQQMQACTLDFENEKLDRQHVQHQLHVILKELRKARNQITQLESLKQLHEFAITEPLVTFQGETENREKVAASPKSPTAALNESLVECPKCNIQYPATEHRDLLVHVEYCSK

SEQ ID NO: 22281 - protein, 701 aa, Homo sapiens
RMADAGIRRVVPSDLYPLVLGFLRDNQLSEVANKFAKATGATQQDANASSLLDIYSFWLNRSAKVPERKLQANGPVAKKAKKKASSSDSEDSSEEEEEVQGPPAKKAAVPAKRVGLPPGKAAAKASESSSSEESSDDDDEEDQKKQPVQKGVKPQAKAAKAPPKKAKSSDSDSDSSSEDEPPKNQKPKITPVTVKAQTKAPPKPARAAPKIANGKAASSSSSSSSSSSSDDSEEEKAAATPKKTVPKKQVVAKAPVKAATTPTRKSSSSEDSSSDEEEEQKKPMKNKPGPYSSVPPPSAPPPKKSLGTQPPKKAVEKQQPVESSEDSSDESDSSSEEEKKPPTKAVVSKATTKPPPAKKAAESSSDSSDSDSSEDDEAPSKPAGTTKNSSNKPAVTTKSPAVKPAAAPKQPVGGGQKLLTRKADSSSSEEESSSSEEEKTKKMVATTKPKATAKAALSLPAKQAPQGSRDSSSDSDSSSSEEEEEKTSKSAVKKKPQKVAGGAAPSKPASAKKGKAESSNSSSSDDSSEEEEEKLKGKGSPRPQAPKANGTSALTAQNGKAAKNSEEEEEEKKKAAVVVSKSGSLKKRKQNEAAKEAETPQAKKIKLQTPNTFPKRKKGEKRASSPFRRVREEEIEVDSRVADNSFDAKRGAAGDWGERANQVLKFTKGKSFRHEKTKKKRGSYRGGSISVQVNSIKFDSE

SEQ ID NO: 22282 - protein, 710 aa, Homo sapiens
RMADAGIRRVVPSDLYPLVLGFLRDNQLSEVANKFAKATGATQQDANASSLLDIYSFWLKSAKVPERKLQANGPVAKKAKKKASSSDSEDSSEEEEEVQGPPAKKAAVPAKRVGLPPGKAAAKASESSSSEESSDDDDEEDQKKQPVQKGVKPQAKAAKAPPKKAKSSDSDSDSSSEDEPPKNQKPKITPVTVKAQTKAPPKPARAAPKIANGKAASSSSSSSSSSSSDDSEEEKAAATPKKVWTITSVRAETVPKKQVVAKAPVKAATTPTRKSSSSEDSSSDEEEEQKKPMKNKPGPYSSVPPPSAPPPKKSLGTQPPKKAVEKQQPVESSEDSSDESDSSSEEEKKPPTKAVVSKATTKPPPAKKAAESSSDSSDSDSSEDDEAPSKPAGTTKNSSNKPAVTTKSPAVKPAAAPKQPVGGGQKLLTRKADSSSSEEESSSSEEEKTKKMVATTKPKATAKAALSLPAKQAPQGSRDSSSDSDSSSSEEEEEKTSKSAVKKKPQKVAGGAAPSKPASAKKGKAESSNSSSSDDSSEEEEEKLKGKGSPRPQAPKANGTSALTAQNGKAAKNSEEEEEEKKKAAVVVSKSGSLKKRKQNEAAKEAETPQAKKIKLQTPNTFPKRKKGEKRASSPFRRVREEEIEVDSRVADNSFDAKRGAAGDWGERANQVLKFTKGKSFRHEKTKKKRGSYRGGSISVQVNSIKFDSE

SEQ ID NO: 22283 - protein, 16 aa, Homo sapiens
MGSTVCTDERSYGRVS

SEQ ID NO: 22284 - protein, 14 aa, Homo sapiens
MALRWFRALFKLQH

SEQ ID NO: 22285 - protein, 7 aa, Homo sapiens
LLSVLMH

SEQ ID NO: 22286 - protein, 44 aa, Homo sapiens
VAGAAYRAEVSAAPAPPAADFGCDLTSGGSTSGLAGRIVPVEEL

SEQ ID NO: 22287 - protein, 7 aa, Homo sapiens
METAEQP

SEQ ID NO: 22288 - protein, 41 aa, Homo sapiens
LDLSCLICKKEIKIIYLPEHEVEDHPATVLLSLDYMFTYCS

SEQ ID NO: 22289 - protein, 35 aa, Homo sapiens
LQPLPPIPDLIATRPRRPPDVHSRFLLVPSPIWQL

SEQ ID NO: 22290 - protein, 15 aa, Homo sapiens
TRSAACWGCTLLSCS

SEQ ID NO: 22291 - protein, 9 aa, Homo sapiens
MVLPTGSHA

SEQ ID NO: 22292 - protein, 380 aa, Homo sapiens
VAQSNRATMGTTAPGPIHLLELCDQKLMEFLCNMDNKDLVWLEEIQEEAERMFTREFSKEPELMPKTPSQKNRRKKRRISYVQDENRDPIRRRLSRRKSRSSQLSSRRLRSKDSVEKLATVVGENGSVLRRVTRAAAAAAAATMALAAPSSPTPESPTMLTKKPEDNHTQCQLVPVVEIGISERQNAEQHVTQLMSTEPLPRTLSPTPASATAPTSQGIPTSDEESTPKKSKARILESITVSSLMATPQDPKGQGVGTGRSASKLRIAQVSPGPRDSPAFPDSPWRERVLAPILPDNFSTPTGSRTDSQSVRHSPIAPSSPSPQVLAQKYSLVAKQESVVRRASRRLAKKTAEEPAASGRIICHSYLERLLNVEVPQKVG

SEQ ID NO: 22293 - protein, 151 aa, Homo sapiens
KKFNGEDIDTISPTLGFNIKTLEHRGFKLNIWDVGGQKSLRSYWRNYFESTDGLIWVVDSADRQRMQDCQRELQSLLVEERLAGATLLIFANKQDLPGALSSNAIREVLELDSIRSHHWCIQGCSAVTGENLLPGIDWLLDDISSRIFTAD

SEQ ID NO: 22294 - protein, 47 aa, Homo sapiens
KLPDIREVLTCKIEELGSELKEHYKIEAFTPLLAPAQVRVVLIVLTN

SEQ ID NO: 22295 - protein, 6 aa, Homo sapiens
MSEVLL

SEQ ID NO: 22296 - protein, 67 aa, Homo sapiens
MMIFQLQNKVRPLVLFSRTESPSPLQRPLVPVAAMIPFRIHGALFHIWIKRVQQKSWVKNLAYKLRS

SEQ ID NO: 22297 - protein, 33 aa, Homo sapiens
LVFYYPKNANFINMIELYKVYHNEFDFEFDLWK

SEQ ID NO: 22298 - protein, 6 aa, Homo sapiens
MEDTLK

SEQ ID NO: 22299 - protein, 487 aa, Homo sapiens
IEGEAEVLGGVMAVPFVEDWDLVQTLGEGAYGEVQLAVNRVTEEAVAVKIVDMKRAVDCPENIKKEICINKMLNHENVVKFYGHRREGNIQYLFLEYCSGGELFDRIEPDIGMPEPDAQRFFHQLMAGVVYLHGIGITHRDIKPENLLLDERDNLKISDFGLATVFRYNNRERLLNKMCGTLPYVAPELLKRREFHAEPVDVWSCGIVLTAMLAGELPWDQPSDSCQEYSDWKEKKTYLNPWKKIDSAPLALLHKILVENPSARITIPDIKKDRWYNKPLKKGAKRPRVTSGGVSESPSGFSKHIQSNLDFSPVNSASSEENVKYSSSQPEPRTGLSLWDTSPSYIDKLVQGISFSQPTCPDHMLLNSQLLGTPGSSQNPWQRLVKRMTRFFTKLDADKSYQCLKETCEKLGYQWKKSCMNQVTISTTDRRNNKLIFKVNLLEMDDKILVDFRLSKGDGLEFKRHFLKIKGKLIDIVSSQKIWLPAT

SEQ ID NO: 22300 - protein, 25 aa, Homo sapiens
MCGILGGSAADLAKWTGLLRRLCRW

SEQ ID NO: 22301 - protein, 156 aa, Homo sapiens [sequence omitted]

SEQ ID NO: 22302 - protein, 21 aa, Homo sapiens
VSRSSMEVAAGTEWRLQQRLL

SEQ ID NO: 22303 - protein, 458 aa, Homo sapiens
INLPLRLPPGPIFCPLLQEMNLLPNIESPVTRQEKMATVWDEAEQDGIGEEVLKMSTEEIIQRTRLLDSEIKIMKSEVLRVTHELQAMKDKIKENSEKIKVNKTLPYLVSNVIELLDVDPNDQEEDGANIDLDSQRKGKCAVIKTSTRQTYFLPVIGLVDAEKLKPGDLVGVNKDSYLILETLPTEYDSRVKAMEVDERPTEQYSDIGGLDKQIQELVEAIVLPMNHKEKFENLGIQPPKGVLMYGPPGTGKTLLARACAAQTKATFLKLAGPQLVQMFIGDGAKLVRDAFALAKEKAPSIIFIDELDAIGTKRFDSEKAGDREVQRTMLELLNQLDGFQPNTQVKVIAATNRVDILDPALLRSGRLDRKIEFPMPNEEARARIMQIHSRKMNVSPDVNYEELARCTDDFNGAQCKAVCVEAGMIALRRGATELTHEDYMEGILEVQAKKKANLQYYA

SEQ ID NO: 22304 - protein, 6 aa, Homo sapiens
TMSSLH

SEQ ID NO: 22305 - protein, 6 aa, Homo sapiens
VETASP

SEQ ID NO: 22306 - protein, 19 aa, Homo sapiens
MPHCQETGAGRFSDKISLS

SEQ ID NO: 22307 - protein, 13 aa, Homo sapiens
MSTARLWDHKKKK

SEQ ID NO: 22308 - protein, 39 aa, Homo sapiens
VASLRRTMAELGEADEAELQRLVAAEQQKAQFTAQATCP

SEQ ID NO: 22309 - protein, 51 aa, Homo sapiens
VNPMESYQNRQSCVTGAVGGQQEDEDSSDSEVADSPSSDERRIIETPPHRY

SEQ ID NO: 22310 - protein, 121 aa, Homo sapiens
LRCIMKFQYKEDHPFEYRKKEGEKIRKKYPDRVPVIVEKAPKARVPDLDKRKYLVPSDLTVGQFYFLIRKRIHLRPEDALFFFVNNTIPPTSATMGQLYEDNHEEDYFLYVAYSDESVYGK

SEQ ID NO: 22311 - protein, 40 aa, Homo sapiens
VAGPVLRFSPSPTFLPPSLSLPRRLLLAGRRLPDPSLTPP

SEQ ID NO: 22312 - protein, 9 aa, Homo sapiens
MGMYTIIKE

SEQ ID NO: 22313 - protein, 6 aa, Homo sapiens
MRPQEP

SEQ ID NO: 22314 - protein, 14 aa, Homo sapiens
LNVKEYLSKVSCRS

SEQ ID NO: 22315 - protein, 31 aa, Homo sapiens
MTYFTSWILDSDSTHYIPSCNRKSCYKRMWS

SEQ ID NO: 22316 - protein, 172 aa, Homo sapiens
MAVFNQKSVSDMIKEFRKNWRALCNSERTTLCGADSMLLALQLSMAENNKQHSGEFTVSLSDVLLTWKYLLHEKLNLPVENMDVTDHYEDVRKIYDDFLKNSNMLDLIDVYQKCRALTSNCENYNTVSPSQLLDFLSGKQYAVGDETDLSIPTSPTSKYNRDNEKALPVLKR

SEQ ID NO: 22317 - protein, 29 aa, Homo sapiens
ICSRAKGGRVLKEGLMSSSFSNSCKLCVG

SEQ ID NO: 22318 - protein, 106 aa, Homo sapiens
LVGLEEIGGRRVAALTWSGTWGEGTMGRKLDPTKEKRGPGRKARKQKGAETELVRFLPAVSDENSKRLSSRARKRAAKRRLGSVEAPKTNKSPEAKPLPGKLPKGP

SEQ ID NO: 22319 - protein, 633 aa, Homo sapiens
KMDTMMLNVRNLFEQLVRRVEILSEGNEVQFIQLAKDFEDFRKKWQRTDHELGKYKDLLMKAETERSALDVKLKHARNQVDVEIKRRQRAEADCEKLERQIQLIREMLMCDTSGSIQLSEEQKSALAFLNRGQPSSSNAGNKRLSTIDESGSILSDISFDKTDESLDWDSSLVKTFKLKKREKRRSTSRQFVDGPPGPVKKTRSIGSAVDQGNESIVAKTTVTVPNDGGPIEAVSTIETVPYWTRSRRKTGTLQPWNSDSTLNSRQLEPRTETDSVGTPQSNGGMRLHDFVSKTVIKPESCVPCGKRIKFGKLSLKCRDCRVVSHPECRDRCPLPCIPTLIGTPVKIGEGMLADFVSQTSPMIPSIVVHCVNEIEQRGLTETGLYRISGCDRTVKELKEKFLRVKTVPLLSKVDDIHAICSLLKDFLRNLKEPLLTFRLNRAFMEAAEITDEDNSIAAMYQAVGELPQANRDTLAFLMIHLQRVAQSPHTKMDVANLAKVFGPTIVAHAVPNPDPVTMLQDIKRQPKVVERLLSLPLEYWSQFMMVEQENIDPLHVIENSNAFSTPQTPDIKVSLLGPVTTPEHQLLKTPSSSSLSQRVRSTLTKNTPRFGSKSKSATNLGRQGNFFASPMLK

SEQ ID NO: 22320 - protein, 40 aa, Homo sapiens
VSMVGPSASSCSGPSSGVWGRRNRLRGPDNGPPPQHPGLA

SEQ ID NO: 22321 - protein, 23 aa, Homo sapiens
VPHPELTGRSRDVSSKASLLWKL

SEQ ID NO: 22322 - protein, 33 aa, Homo sapiens
LPRSQCSLLLQSGTIEGTMSSLNFVLKTVRMLM

SEQ ID NO: 22323 - protein, 12 aa, Homo sapiens
MGSAVGVLAKAG

SEQ ID NO: 22324 - protein, 22 aa, Homo sapiens
ISPTNSKITSSRSQSSVMSVPG

SEQ ID NO: 22325 - protein, 45 aa, Homo sapiens
MLSRVWKHLTTKCYPCENSYSTRGSASVLYQHFCLQHCTSSATSS

SEQ ID NO: 22326 - protein, 96 aa, Homo sapiens
IEQLHRRFKQLSGDQPTIRKENFNNVPDLELNPIRSKIVRAFFDNRNLRKGPSGLADEINFEDFLTIMSYFRPIDTTMDEEQVELSRKEKLRCACH

SEQ ID NO: 22327 - protein, 318 aa, Homo sapiens
VMPREDRATWKSNYFLKIIQLLDDYPKCFIVGADNVGSKQMQQIRMSLRGKAVVLMGKNTMMRKAIRGHLENNPALEKLLPHIRGNVGFVFTKEDLTEIRDMLLANKVPAAARAGAIAPCEVTVPAQNTGLGPEKTSFFQALGITTKISRGTIEILSDVQLIKTGDKVGASEATLLNMLNISPFSFGLVIQQVFDNGSIYNPEVLDITEETLHSRFLEGVRNVASVCLQIGYPTVASVPHSIINGYKRVLALSVETDYTFPLAEKVKAFLADPSAFVAAAPVAAATTAAPAAAAAPAKVEAKEESEESDEDMGFGLFD

SEQ ID NO: 22328 - protein, 33 aa, Homo sapiens
KKNPKYLLAEYCEWLPQAMHPDIEKAWPPTTVH

SEQ ID NO: 22329 - protein, 45 aa, Homo sapiens
VGIGRLEELDSSRWESASLSGTLDDLQSGWRSHGGLLEVTAKEIL

SEQ ID NO: 22330 - protein, 39 aa, Homo sapiens
KTPSLGSRIPSRAGWITTSRGLGATRCFLMKRITQNHRL

SEQ ID NO: 22331 - protein, 11 aa, Homo sapiens
IKLFINKDLFL

SEQ ID NO: 22332 - protein, 435 aa, Homo sapiens
VAGGCELSGGVCVRLESFPAVLSMDPIRSFCGKLRSLASTLDCETARLQRALDGEESDFEDYPMRILYDLHSEVQTLKDDVNILLDKARLENQEGIDFIKATKVLMEKNSMDIMKIREYFQKYGYSPRVKKNSVHEQEAINSDPELSNCENFQKTDVKDDLSDPPVASSCISEKSPRSPQLSDFGLERYIVSQVLPNPPQAVNNYKEEPVIVTPPTKQSLVKVLKTPKCALKMDDFECVTPKLEHFGISEYTMCLNEDYTMGLKNARNNKSEEAIDTESRLNDNVFATPSPIIQQLEKSDAEYTNSPLVPTFCTPGLKIPSTKNSIALVSTNYPLSKTNSSSNDLEVEDRTSLVLNSDTCFENLTDPSSPTISSYENLLRTPTPPEVTKIPEDILQLLSKYNSNLATPIAIKAVPPSKRFLKHGQNIRDVSNKEN

SEQ ID NO: 22333 - protein, 9 aa, Homo sapiens
MPSATGKDS

SEQ ID NO: 22334 - protein, 23 aa, Homo sapiens
LDSETFLVSLLRHLCCKIEAVLW

SEQ ID NO: 22335 - protein, 119 aa, Homo sapiens
LSSLLGTENASVRLDNSSSGASVVAIDNKIEQAMDLVKSHLMYAVREEVEVLKEQIKELIEKNSQLEQENNLLKTLASPEQLAQFQAQLQTGSPPATTQPQGTTQPPAQPASQGSGPTA

SEQ ID NO: 22336 - protein, 155 aa, Homo sapiens
LTWLWPLGEMKLHCEVEVISRHLPALGLRNRGKGVRAVLSLCQQTSRSQPPVRAFLLISTLKDKRGTRYELRENIEQFFTKFVDEGKATVRLKEPPVDICLSKDSIWLSYHSIPSLPRFGYRKNLCLWKILSELFHSRNYYHESAFCCPHCGLSR

SEQ ID NO: 22337 - protein, 41 aa, Homo sapiens
LMAMVMAAVTRTTPVKLRSGRYIQKVPRRNFLLEKMKKQYL

SEQ ID NO: 22338 - protein, 14 aa, Homo sapiens
MRSLGCLRVFSSLG

SEQ ID NO: 22339 - protein, 11 aa, Homo sapiens
LLTHENLMTGI

SEQ ID NO: 22340 - protein, 10 aa, Homo sapiens
MNITGRYHWL

SEQ ID NO: 22341 - protein, 7 aa, Homo sapiens
MNLPPAE

SEQ ID NO: 22342 - protein, 28 aa, Homo sapiens
ILKGTERTGTPLRGPGTDLTGWHLMTLT

SEQ ID NO: 22343 - protein, 9 aa, Homo sapiens
KRTPSMWLT

SEQ ID NO: 22344 - protein, 36 aa, Homo sapiens
RLGREVAIAERQEGRGGPGRRPGGGAPLGPARTGFI

SEQ ID NO: 22345 - protein, 856 aa, Homo sapiens
LRFHARRWLRMSSSHFASRHRKDISTEMIRTKIAHRKSLSQKENRHKEYERNRHFGLKDVNIPTLEGRILVELDETSQGLVPEKTNVKPRAMKTILGDQRKQMLQKYKEEKQLQKLKEQREKAKRGIFKVGRYRPDMPCFLLSNQNAVKAEPKKAIPSSVRITRSKAKDQMEQTKIDNESDVRAIRPGPRQTSEKKVSDKEKKVVQPVMPTSLRMTRSATQAAKQVPRTVSSTTARKPVTRAANENEPEGKVPSKGRPAKNVETKPDKGISCKVDSEENTLNSQTNATSGMNPDGVLSKMENLPEINTAKIKGKNSFAPKDFMFQPLDGLKTYQVTPMTPRSANAFLTPSYTWTPLKTEVDESQATKEILAQKCKTYSTKTIQQDSNKLPCPLGPLTVWHEEHVLNKNEATTKNLNGLPIKEVPSLERNEGRIAQPHHGVPYFRNILQSETEKLTSHCFEWDRKLELDIPDDAKDLIRTAVGQTRLLMKERFKQFEGLVDDCEYKRGIKETTCTDLDGFWDMVSFQIEDVIHKFNNLIKLEESGWQVNNNMNHNMNKNVFRKKVVSGIASKPKQDDAGRIAARNRLAAIKNAMRERIRQEECAETAVSVIPKEVDKIVFDAGFFRVESPVKLFSGLSVSSEGPSQRLGTPKSVNKAVSQSRNEMGIPQQTTSPENAGPQNTKSEHVKKTLFLSIPESRSSIEDAQCPGLPDLIEENHVVNKTDLKVDCLSSERMSLPLLAGGVADDINTNKKEGISDVVEGMELNSSITSQDVLMSSPEKNTASQNSILEEGETKISQSELFDNKSLTTECHLLDSPGLNCSNPFTQLERRHQEHARHISFGGNLITFSPLQPGEF

SEQ ID NO: 22346 - protein, 6 aa, Homo sapiens
KMATAA

SEQ ID NO: 22347 - protein, 339 aa, Homo sapiens
RMTTTLVSATIFDLSEVLCKGNKMLNYSAPSAGGCLLDRKAVGTPAGGGFPRRHSVTLPSSKFHQNQLLSSLKGEPAPALSSRDSRFRDRSFSEGGERLLPTQKQPGGGQVNSSRYKTELCRPFEENGACKYGDKCQFAHGIHELRSLTRHPKYKTELCRTFHTIGFCPYGPRCHFIHNAEERRALAGARDLSADRPRLQHSFSFAGFPSAAATAAATGLLDSPTSITPPPILSADDLLGSPTLPDGTNNPFAFSSQELASLFAPSMGLPGGGSPTTFLFRPMSESPHMFDSPPSPQDSLSDQEGYLSSSSSSHSGSDSPTLDNSRRLPIFSRLSISDD

SEQ ID NO: 22348 - protein, 16 aa, Homo sapiens
LSVQEKLRTMRLIGTI

SEQ ID NO: 22349 - protein, 17 aa, Homo sapiens
KSSWVIPISPYHMSTTS

SEQ ID NO: 22350 - protein, 21 aa, Homo sapiens
LGGTDSIFRSLMGCWVDGAGK

SEQ ID NO: 22351 - protein, 407 aa, Homo sapiens
LALLPSPSLMALLRRPTVSSDLENIDTGVNSKVKSHVTIRRTVLEEIGNRVTTRAAQVAKKAQNTKVPVQPTKTTNVNKQLKPTASVKPVQMEKLAPKGPSPTPEDVSMKEENLCQAFSDALLCKIEDIDNEDWENPQLCSDYVKDIYQYLRQLEVLQSINPHFLDGRDINGRMRAILVDWLVQVHSKFRLLQETLYMCVGIMDRFLQVQPVSRKKLQLVGITALLLASKYEEMFSPNIEDFVYITDNAYTSSQIREMETLILKELKFELGRPLPLHFLRRASKAGEVDVEQHTLAKYLMELTLIDYDMVHYHPSKVAAAASCLSQKVLGQGKWNLKQQYYTGYTENEVLEVMQHMAKNVVKVNENLTKFIAIKNKYASSKLLKISMIPQLNSKAVKDLASPLIGRS

SEQ ID NO: 22352 - protein, 18 aa, Homo sapiens
LTRSTQPREGGRPLPAEP

SEQ ID NO: 22353 - protein, 20 aa, Homo sapiens
VAPCTAAARAVAPDLFVFAA

SEQ ID NO: 22354 - protein, 10 aa, Homo sapiens
VAPDLFVFAA

SEQ ID NO: 22355 - protein, 56 aa, Homo sapiens
IAREAEAAMFHRKLFEELVRASSHSTDLMEAMAMGSVEASYKCLAAALIVLTESGR

SEQ ID NO: 22356 - protein, 211 aa, Homo sapiens
VVVALGAVWSRSGPGLTAAWSVRHEEKELLDMMIAEEESLKERLIKSISVCQKELNTLCSELHVEPFQEEGETTILQLEKDLRTQVELMRKQKKERKQELKLLQEQDQELCEILCMPHYDIDSASVPSLEELNQFRQHVTTLRETKASRREEFVSIKRQIILCMEALDHTPDTSFERDVVCEDEDAFCLSLENIATLQKLLRQVLSSQIMP

SEQ ID NO: 22357 - protein, 53 aa, Homo sapiens
VGPRRKRKMRTKKRRCRTPRPWTCSRRVWLWWCRTRCSAICRSRLLWKKSTPK

SEQ ID NO: 22358 - protein, 18 aa, Homo sapiens
ILLSFNPAVTVCQNNLES

SEQ ID NO: 22359 - protein, 260 aa, Homo sapiens
IVRFSAGAMGSELIGRLAPRLGLAEPDMLRKAEEYLRLSRVKCVGLSARTTETSSAVMCLDLAASWMKCPLDRAYLIKLSGLNKETYQSCLKSFECLLGLNSNIGIRDLAVQFSCIEAVNMASKILKSYESSLPQTQQVDLDLSRPLFTSAALLSACKILKLKVDKNKMVATSGVKKAIFDRLCKQLEKIGQQVDREPGDVATPPRKRKKIVVEAPAKEMEKVEEMPHKPQKDEDLTQDYEEWKRKILENAASAQKATAE

SEQ ID NO: 22360 - protein, 11 aa, Homo sapiens
LQAFLDSVLLV

SEQ ID NO: 22361 - protein, 12 aa, Homo sapiens
IMAAFKVWILAP

SEQ ID NO: 22362 - protein, 230 aa, Homo sapiens
LSPAMVVPEDQLTRWHPRFNVDEVPDIEPAALPQPPATEKLTTAQEVLARARNLISPRMEKALSQLALRSAAPSSPGSPRPALPATPPATPPAASPSALKGVSQDLLERIRAKEAQKQLAQMTRCPEQEQRLQRLERLPELARVLRSVFVSERKPALSMEVACARMVGSCCTIMSPGEMEKHLLLLSELLPDWLSLHRIRTDTYVKLDKAADLAHITARLAHQTRAEEGL

SEQ ID NO: 22363 - protein, 1037 aa, Homo sapiens
MDLLAGKGSQGSQAPQALDRTPDAPLGPCSNDSRIQRHRKALLSKVGGGPELGGPWHRLASLLLVEGLTDLQLREHDFTQVEATRGGGHPARTVALDRLFLPLSRVSVPPRVSITIGVAGMGKTTLVRHFVRLWAHGQVGKDFSLVLPLTFRDLNTHEKLCADRLICSVFPHVGEPSLAVAVPARALLILDGLDECRTPLDFSNTVACTDPKKEIPVDHLITNIIRGNLFPEVSIWITSRPSASGQIPGGLVDRMTEIRGFNEEEIKVCLEQMFPEDQALLGWMLSQVQADRALYLMCTVPAFCRLTGMALGHLWRSRTGPQDAELWPPRTLCELYSWYFRMALSGEGQEKGKASPRIEQVAHGGRKMVGTLGRLAFHGLLKKKYVFYEQDMKAFGVDLALLQGAPCSCFLQREETLASSVAYCFTHLSLQEFVAAAYYYGASRRAIFDLFTESGVSWPRLGFLTHFRSAAQRAMQAEDGRLDVFLRFLSGLLSPRVNALLAGSLLAQGEHQAYRTQVAELLQGCLRPDAAVCARAINVLHCLHELQHTELARSVEEAMESGALARLTGPAHRAALAYLLQVSDACAQEANLSLSLSQGVLQSLLPQLLYCRKLRLDTNQFQDPVMELLGSVLSGKDCRIQKISLAENQISNKGAKALARSLLVNRSLTSLDLRGNSIGPQGAKALADALKINRTLTSLSLQGNTVRDDGARSMAEALASNRTLSMLHLQKNSIGPMGAQRMADALKQNRSLKELMFSSNSIGDGGAKALAEALKVNQGLESLDLQSNSISDAGVAALMGALCTNQTLLSLSLRENSISPEGAQAIAHALCANSTLKNLDLTANLLHDQGARAIAVAVRENRTLTSLHLQWNFIQAGAAQALGQALQLNRSLTSLDLQENAIGDDGACAVARALKVNTALTALYLQVASIGASGAQVLGEALAVNRTLEILDLRGNAIGVAGAKALANALKVNSSLRRLNLQENSLGMDGAICIATALSGNHRLQHINLQGNHIGDSGARMISEAIKTNAPTCTVEM

SEQ ID NO: 22364 - protein, 14 aa, Homo sapiens
RVIISAPSADAPCS

SEQ ID NO: 22365 - protein, 6 aa, Homo sapiens
INLPLR

SEQ ID NO: 22366 - protein, 135 aa, Homo sapiens
IAACFHLLFKDRKLMVQIVISSARAGGLAEWVLMELQGEIEARYSTGLAGNLLGDLHYTTEGIPVLIVGHHILYGKIIHLEKPFAVLVKHTPGDQDCDELGRETGTRYLVTALIKDKILFKTRPKPIITSVPKKV

SEQ ID NO: 22367 - protein, 8 aa, Homo sapiens
KMFLKPQD

SEQ ID NO: 22368 - protein, 49 aa, Homo sapiens
LGSLRGGTMASEKPLAAVTCTAPVNIAVIKYLEMGFHRVSQAGLKLLTS

SEQ ID NO: 22369 - protein, 7 aa, Homo sapiens
MQQSMQF

SEQ ID NO: 22370 - protein, 198 aa, Homo sapiens
VRSRELESKPLKMADDLDFETGDAGASATFPMQCSALRKNGFVVLKGRPCKIVEMSTSKTGKHGHAKVHLVGIDIFTGKKYEDICPSTHNMDVPNIKRNDFQLIGIQDGYLSLLQDSGEVREDLRLPEGDLGKEIEQKYDCGEEILVWCLPPCFCAQLCSVRFFLSSDISWLSLLLLQITVLSAMTEEAAVAIKAMAK

SEQ ID NO: 22371 - protein, 53 aa, Homo sapiens
MEGHICQSLESAKAGTRFPGPQWGCANPRELGCKFVKNQHHVWQLSIGARSLP

SEQ ID NO: 22372 - protein, 407 aa, Homo sapiens
IMSASQDSRSRDNGPDGMEPEGVIESNWNEIVDSFDDMNLSESLLRGIYAYGFEKPSAIQQRAILPCIKGYDVIAQAQSGTGKTATFAISILQQIELDLKATQALVLAPTRELAQQIQKVVMALGDYMGASCHACIGGTNVRAEVQKLQMEAPHIIVGTPGRVFDMLNRRYLSPKYIKMFVLDEADEMLSRGFKDQIYDIFQKLNSNTQVVLLSATMPSDVLEVTKKFMRDPIRILVKKEELTLEGIRQFYINVEREEWKLDTLCDLYETLTITQAVIFINTRRKVDWLTEKMHARDFTVSAMHGDMDQKERDVIMREFRSGSSRVLITTDLLARGIDVQQVSLVINYDLPTNRENYIHRIGRGGRFGRKGVAINMVTEEDKRTLRDIETFYNTSIEEMPLNVADLI

SEQ ID NO: 22373 - protein, 201 aa, Homo sapiens
LSCSGLPPPSDQYPREEINRVVRNAGPIANYLQQVMQEARQNPPPNLPPGSLVMLYEPKWAQGVPGNLEIIEDLNLEEILIYVANKCRFLLRNGYSPKDIAVLFTKASEVEKYKDRLLTAMRKRKLSQLHEESDLLLQIGDASDVLTDHIVLDSVCRFSGLERNIVFGINPGVAPPAGAYNLLLCLASRAKRHLYILKASV

SEQ ID NO: 22374 - protein, 397 aa, Homo sapiens
ILHSIVKRDIQENDEEAVQVKEQSILELGSLLAKTGQAAELGGLLKYVRPFLNSISKAKAARLVRSLLDLFLDMEAATGQEVELCLECIEWAKSEKRTFLRQALEARLVSLYFDTKRYQEALHLGSQLLRELKKMDDKALLVEVQLLESKTYHALSNLPKARAALTSARTTANAIYCPPKLQATLDMQSGIIHAAEEKDWKTAYSYFYEAFEGYDSIDSPKAITSLKYMLLCKIMLNTPEDVQALVSGKLALRYAGRQTEALKCVAQASKNRSLADFEKALTDYRAELRDDPIISTHLAKLYDNLLEQNLIRVIEPFSRVQIEHISSLIKLSKADVERKLSQMILDKKFHGILDQGEGVLIIFDEPPVDKTYEAALETIQNMSKVVDSLYNKAKKLT

SEQ ID NO: 22375 - protein, 600 aa, Homo sapiens
KDPALRRWKEEDCSRRPGVCEAAELGEGCGFRRGLSCAVVMPQTRSQAQATISFPKRKLSRALNKAKNSSDAKLEPTNVQTVTCSPRVKALPLSPRKRLGDDNLCNTPHLPPCSPPKQGKKENGPPHSHTLKGRRLVFDNQLTIKSPSKRELAKVHQNKILSSVRKSQEITTNSEQRCPLKKESACVRLFKQEGTCYQQAKLVLNTAVPDRLPAREREMDVIRNFLREHICGKKAGSLYLSGAPGTGKTACLSRILQDLKKELKGFKTIMLNCMSLRTAQAVFPAIAQEICQEEVSRPAGKDMMRKLEKHMTAEKGPMIVLVLDEMDQLDSKGQDVLYTLFEWPWLSNSHLVLIGIANTLDLTDRILPRLQAREKCKPQLLNFPPYTRNQIVTILQDRLNQVSRDQVLDNAAVQFCARKVSAVSGDVRKALDVCRRAIEIVESDVKSQTILKPLSECKSPSEPLIPKRVGLIHISQVISEVDGNRMTLSQEGAQDSFPLQQKILVCSLMLLIRQLKIKEVTLGKLYEAYSKVCRKQQVAAVDQSECLSLSGLLEARGILGLKRNKETRLTKVFFKIEEKEIEHALKDKALIGNILATGLP

SEQ ID NO: 22376 - protein, 7 aa, Homo sapiens
MITIKRN

SEQ ID NO: 22377 - protein, 15 aa, Homo sapiens
LKPSNTVMFQPSPEP

SEQ ID NO: 22378 - protein, 21 aa, Homo sapiens
LRTTWVPGAFRVLAAAAGVQT

SEQ ID NO: 22379 - protein, 13 aa, Homo sapiens
LLLAVSVSRVIRG

SEQ ID NO: 22380 - protein, 19 aa, Homo sapiens
TDMASRGARPGPSPPRPAL

SEQ ID NO: 22381 - protein, 356 aa, Homo sapiens
LDPSSPPPFSLRMAQKENSYPWPYGRQTAPSGLSTLPQRVLRKEPVTPSALVLMSRSNVQPTAAPGQKVMENSSGTPDILTRHFTIDDFEIGRPLGKGKFGNVYLAREKKSHFIVALKVLFKSQIEKEGVEHQLRREIEIQAHLHHPNILRLYNYFYDRRRIYLILEYAPRGELYKELQKSCTFDEQRTATIMEELADALMYCHGKKVIHRDIKPENLLLGLKGELKIADFGWSVHAPSLRRKTMCGTLDYLPPEMIEGRMHNEKVDLWCIGVLCYELLVGNPPFESASHNETYRRIVKVDLKFPASVPMGAQDLISKLLRHNPSERLPLAQVSAHPWVRANSRRVLPPSALQSVA

SEQ ID NO: 22382 - protein, 33 aa, Homo sapiens
MAAWGRRRLGPGSSGGSAREREPTVFVMKNIRL

SEQ ID NO: 22383 - protein, 141 aa, Homo sapiens
KMSKRGRGGSSGAKFRISLGLPVGAVINCADNTGAKNLYIISVKGIKGRLNRLPAAGVGDMVMATVKKGKPELRKKVHPAVVIRQRKSYRRKDGVFLYFEDNAGVIVNNKGEMKGSAITGPVAKECADLWPRIASNAGSIA

SEQ ID NO: 22384 - protein, 26 aa, Homo sapiens
VRPAGGGGLASAATEGSGVVVWVGGR

SEQ ID NO: 22385 - protein, 1535 aa, Homo sapiens
TTVTMEVSPLQPVNENMQVNKIKKNEDAKKRLSVERIYQKKTQLEHILLRPDTYIGSVELVTQQMWVYDEDVGINYREVTFVPGLYKIFDEILVNAADNKQRDPKMSCIRVTIDPENNLISIWNNGKGIPVVEHKVEKMYVPALIFGQLLTSSNYDDDEKKVTGGRNGYGAKLCNIFSTKFTVETASREYKKMFKQTWMDNMGRAGEMELKPFNGEDYTCITFQPDLSKFKMQSLDKDIVALMVRRAYDIAGSTKDVKVFLNGNKLPVKGFRSYVDMYLKDKLDETGNSLKVIHEQVNHRWEVCLTMSEKGFQQISFVNSIATSKGGRHVDYVADQIVTKLVDVVKKKNKGGVAVKAHQVKNHMWIFVNALIENPTFDSQTKENMTLQPKSFGSTCQLSEKFIKAAIGCGIVESILNWVKFKAQVQLNKKCSAVKHNRIKGIPKLDDANDAGGRNSTECTLILTEGDSAKTLAVSGLGVVGRDKYGVFPLRGKILNVREASHKQIMENAEINNIIKIVGLQYKKNYEDEDSLKTLRYGKIMIMTDQDQDGSHIKGLLINFIHHNWPSLLRHRFLEEFITPIVKVSKNKQEMAFYSLPEFEEWKSSTPNHKKWKVKYYKGLGTSTSKEAKEYFADMKRHRIQFKYSGPEDDAAISLAFSKKQIDDRKEWLTNFMEDRRQRKLLGLPEDYLYGQTTTYLTYNDFINKELILFSNSDNERSIPSMVDGLKPGQRKVLFTCFKRNDKREVKVAQLAGSVAEMSSYHHGEMSLMMTIINLAQNFVGSNNLNLLQPIGQFGTRLHGGKDSASPRYIFTMLSSLARLLFPPKDDHTLKFLYDDNQRVEPEWYIPIIPMVLINGAEGIGTGWSCKIPNFDVREIVNNIRRLMDGEEPLPMLPSYKNFKGTIEELAPNQYVISGEVAILNSTTIEISELPVRTWTQTYKEQVLEPMLNGTEKTPPLITDYREYHTDTTVKFVVKMTEEKLAEAERVGLHKVFKLQTSLTCNSMVLFDHVGCLKKYDTVLDILRDFFELRLKYYGLRKEWLLGMLGAESAKLNNQARFILEKIDGKIIIENKPKKELIKVLIQRGYDSDPVKAWKEAQQKVPDEEENEESDNEKETEKSDSVTDSGPTFNYLLDMPLWYLTKEKKDELCRLRNEKEQELDTLKRKSPSDLWKEDLATFIEELEAVEAKEKQDEQVGLPGKGGKAKGKKTQMAEVLPSPRGQRVIPRITIEMKAEAEKKNKKKIKNENTEGSPQEDGVELEGLKQRLEKKQKREPGTKTKKQTTLAFKPIKKGKKRNPWSDSESDRSSDESNFDVPPRETEPRRAATKTKFTMDLDSDEDFSDFDEKTDDEDFVPSDASPPKTKTSPKLSNKELKPQKSVVSDLEADDVKGSVPLSSSPPATHFPDETEITNPVPKKNVTVKKTAAKSQSSTSTTGAKKRAAPKGTKRDPALNSGVSQKPDPAKTKNRRKRKPSTSDDSDSNFEKIVSKAVTSKKSKGESDDFHMDFDSAVAPRAKSVRAKKPIKYLEESDEDDLF

SEQ ID NO: 22386 - protein, 19 aa, Homo sapiens
ICKCLFFIIALYIVCYLTR

SEQ ID NO: 22387 - protein, 23 aa, Homo sapiens
LRSPSVLFCGKAFPSVPTRKATA

SEQ ID NO: 22388 - protein, 256 aa, Homo sapiens
VSPRGRQLPERRGVAPPRAEEAGASSRGSGPPLRAMSYGRPPPDVEGMTSLKVDNLTYRTSPDTLRRVFEKYGRVGDVYIPRDRYTKESRGFAFVRFHDKRDAEDAMDAMDGAVLDGRELRVQMARYGRPPDSHHSRRGPPPRRYGGGGYGRRSRSPRRRRRSRSRSRSRSRSRSRSRYSRSKSRSRTRSRSRSTSKSRSARRSKSKSSSVSRSRSRSRSRSRSRSPPPVSKRESKSRSRSKSPPKSPEEEGAVSS

SEQ ID NO: 22389 - protein, 322 aa, Homo sapiens
LPPSPARRAMPVAGSELPRRPLPPAAQERDAEPRPPHGELQYLGQIQHILRCGVRKDDRTGTGTLSVFGMQARYSLRDEFPLLTTKRVFWKGVLEELLWFIKGSTNAKELSSKGVKIWDANGSRDFLDSLGFSTREEGDLGPVYGFQWRHFGAEYRDMESDYSGQGVDQLQRVIDTIKTNPDDRRIIMCAWNPRDLPLMALPPCHALCQFYVVNSELSCQLYQRSGDMGLGVPFNIASYALLTYMIAHITGLKPGDFIHTLGDAHIYLNHIEPLKIQLQREPRPFPKLRILRKVEKIDDFKAEDFQIEGYNPHPTIKMEMAV

SEQ ID NO: 22390 - protein, 28 aa, Homo sapiens
VGAPHTWPHIVAALVWLIDCIKVFDLFF

SEQ ID NO: 22391 - protein, 52 aa, Homo sapiens
IAAILASGAPASRPPGGELLGLLNPRWRRWLLMREDVAEGLTLGAGVSRPLR

SEQ ID NO: 22392 - protein, 186 aa, Homo sapiens
VKMVRYSLDPENPTKSCKSRGSNLRVHFKNTRETAQAIKGMHIRKATKYLKDVTLQKQCVPFRRYNGGVGRCAQAKQWGWTQGRWPKKSAEFLLHMLKNAESNAELKGLDVDSLVIEHIQVNKAPKMRRRTYRAHGRINPYMSSPCHIEMILTEKEQIVPKPEEEVAQKKKISQKKLKKQKLMARE

SEQ ID NO: 22393 - protein, 40 aa, Homo sapiens
VRTPSRQRPGHVGQRPRRPLMPRSRRSWRMPTGRTTTNTS

SEQ ID NO: 22394 - protein, 131 aa, Homo sapiens
LHYWYLSLDRLFPASGLRGFPNVLKKVLVDQLVASPLLGVWYFLGLGCLEGQTVGESCQELREKFWEFYKADWCVWPAAQFVNFLFVPPQFRVTYINGLTLGWDTYLSYLKYRSPVPLTPPGCVALDTRAD

SEQ ID NO: 22395 - protein, 25 aa, Homo sapiens
MCRQRRRRKRWTSRTRPRGSSAAAS

SEQ ID NO: 22396 - protein, 11 aa, Homo sapiens
MTIIELQVLTD

SEQ ID NO: 22397 - protein, 6 aa, Homo sapiens
IMREVV

SEQ ID NO: 22398 - protein, 27 aa, Homo sapiens
LGRSSMWRRRGSSLRFAIAKTSLPEAP

SEQ ID NO: 22399 - protein, 13 aa, Homo sapiens
LEKPRAKVTFFLL

SEQ ID NO: 22400 - protein, 22 aa, Homo sapiens
MSSPAAWTSAARELPRPPGSLK

SEQ ID NO: 22401 - protein, 51 aa, Homo sapiens
VPVFAHLSILQSLVPAAGAASPVAISAQHLCYSHVTPGDPGAGAGQGPAPS

SEQ ID NO: 22402 - protein, 27 aa, Homo sapiens
TRPPRAAMSPAPRCCLERGGTWREAAP

SEQ ID NO: 22403 - protein, 464 aa, Homo sapiens
IMATVTATTKVPEIRDVTRIERIGAHSHIRGLGLDDALEPRQASQGMVGQLAARRAAGVVLEMIREGKIAGRAVLIAGQPGTGKTAIAMGMAQALGPDTPFTAIAGSEIFSLEMSKTEALTQAFRRSIGVRIKEETEIIEGEVVEIQIDRPATGTGSKVGKLTLKTTEMETIYDLGTKMIESLTKDKVQAGDVITIDKATGKISKLGRSFTRARDYDAMGSQTKFVQCPDGELQKRKEVVHTVSLHEIDVINSRTQGFLALFSGDTGEIKSEVREQINAKVAEWREEGKAEIIPGVLFIDEVHMLDIESFSFLNRALESDMAPVLIMATNRGITRIRGTSYQSPHGIPIDLLDRLLIVSTTPYSEKDTKQILRIRCEEEDVEMSEDAYTVLTRIGLETSLRYAIQLITAASLVCRKRKGTEVQVDDIKRVYSLFLDESRSTQYMKEYQDAFLFNELKGETMDTS

SEQ ID NO: 22404 - protein, 159 aa, Homo sapiens
KMADIQTERAYQKQPTIFQNKKRVLLGETGKEKLPRYYKNIGLGFKTPKEAIEGTYIDKKCPFTGNVSIRGRILSGVVTKMKMQRTIVIRRDYLHYIRKYNRFEKRHKNMSVHLSPCFRDVQIGDIVTVGECRPLSKTVRFNVLKVTKAAGTKKQFQKF

SEQ ID NO: 22405 - protein, 205 aa, Homo sapiens
RMTEWETAAPAVAETPDIKLFGKWSTDDVQINDISLQDYIAVKEKYAKYLPHSAGRYAAKRFRKAQCPIVERLTNSMMMHGRNNGKKLMTVRIVKHAFEIIHLLTGENPLQVLVNAIINSGPREDSTRIGRAGTVRRQAVDVSPLRRVNQAIWLLCTGAREAAFRNIKTIAECLADELINAAKGSSNSYAIKKKDELERVAKSNR

SEQ ID NO: 22406 - protein, 512 aa, Homo sapiens
LEGVMADGQVAELLLRRLEASDGGLDSAELAAELGMEHQAVVGAVKSLQALGEVIEAELRSTKHWELTAEGEEIAREGSHEARVFRSIPPEGLAQSELMRLPSGKVGFSKAMSNKWIRVDKSAADGPRVFRVVDSMEDEVQRRLQLVRGGQAEKLGEKERSELRKRKLLAEVTLKTYWVSKGSAFSTSISKQETELSPEMISSGSWRDRPFKPYNFLAHGVLPDSGHLHPLLKVRSQFRQIFLEMGFTEMPTDNFIESSFWNFDALFQPQQHPARDQHDTFFLRDPAEALQLPMDYVQRVKRTHSQGGYGSQGYKYNWKLDEARKNLLRTHTTSASARALYRLAQKKPFTPVKYFSIDRVFRNETLDATHLAEFHQIEGVVADHGLTLGHLMGVLREFFTKLGITQLRFKPAYNPYTEPSMEVFSYHQGLKKWVEVGNSGVFRPEMLLPMGLPENVSVIAWGLSLERPTMIKYGINNIRELVGHKVNLQMVYDSPLCRLDAEPRPPPTQEAA

SEQ ID NO: 22407 - protein, 228 aa, Homo sapiens
LTPPDPGAASATATAPAPAAARRGEAMAKVSVLNVAVLENPSPFHSPFRFEISFECSEALADDLEWKIIYVGSAESEEFDQILDSVLVGPVPAGRHMFVFQADAPNPSLIPETDAVGVTVVLITCTYHGQEFIRVGYYVNNEYLNPELRENPPMKPDFSQLQRNILASNPRVTRFHINWDNNMDRLEAIETQDPSLGCGLPLNCTPIKGLGLPGCIPGLLPENSMDCI

SEQ ID NO: 22408 - protein, 189 aa, Homo sapiens
IMGVDIRHNKDRKVRRKEPKSQDIYLRLLVKLYRFLARRTNSTFNQVVLKRLFMSRTNRPPLSLSRMIRKMKLPGRENKTAVVVGTITDDVRVQEVPKLKVCALRVTSRARSRILRAGGKILTFDQLALDSPKGCGTVLLSGPRKGREVYRHFGKAPGTPHSHTKPYVRSKGRKFERARGRRASRGYKN

SEQ ID NO: 22409 - protein, 82 aa, Homo sapiens
LVLHPSRHSAVSCLGVAAAMARKALPPTHLGQSWFCSCCRDTELAISALRARTATGSPGSCRCTAGPLPCASALESCCCRVT

SEQ ID NO: 22410 - protein, 17 aa, Homo sapiens
LCPSPDSIPPDTLLFPA

SEQ ID NO: 22411 - protein, 37 aa, Homo sapiens
LGGGGVAGAAAASGLGLLGRLLPGEQLRPCRLKNGRI

SEQ ID NO: 22412 - protein, 17 aa, Homo sapiens
LRQMGFSTARGRQESCG

SEQ ID NO: 22413 - protein, 53 aa, Homo sapiens
TTPARVPSLFPPQPPFSSLPYVPECGSTASFPAARLPPDLSARVSPIPRGRWC

SEQ ID NO: 22414 - protein, 78 aa, Homo sapiens
MGLPVSWAPPALWVLGCCALLLSLWALCTACRRPEDAVAPRKRARRQRARLQGSATAAEAQVGHQTARAAPGPAQQQG

SEQ ID NO: 22415 - protein, 6 aa, Homo sapiens
TFARSL

SEQ ID NO: 22416 - protein, 17 aa, Homo sapiens
VSEQVFWTMDWLSPSLL

SEQ ID NO: 22417 - protein, 44 aa, Homo sapiens
MQEPSAVVGEVSAGAALPPGPGADPSDFPSVPSPLEPQPCLGTR

SEQ ID NO: 22418 - protein, 437 aa, Homo sapiens
TSAASMSDKLPYKVADIGLAAWGRKALDIAENEMPGLMRMRERYSASKPLKGARIAGCLHMTVETAVLIETLVTLGAEVQWSSCNIFSTQDHAAAAIAKAGIPVYAWKGETDEEYLWCIEQTLYFKDGPLNMILDDGGDLTNLIHTKYPQLLPGIRGISEETTTGVHNLYKMMANGILKVPAINVNDSVTKSKFDNLYGCRESLIDGIKRATDVMIAGKVAVVAGYGDVGKGCAQALRGFGARVIITEIDPINALQAAMEGYEVTTMDEACQEGNIFVTTTGCIDIILGRHFEQMKDDAIVCNIGHFDVEIDVKWLNENAVEKVNIKPQVDRYRLKNGRRIILLAEGRLVNLGCAMGHPSFVMSNSFTNQVMAQIELWTHPDKYPVGVHFLPKKLDEAVAEAHLGKLNVKLTKLTEKQAQYLGMSCDGPFKPDHYRY

SEQ ID NO: 22419 - protein, 15 aa, Homo sapiens
MHFITVKCSFNSESK

SEQ ID NO: 22420 - protein, 70 aa, Homo sapiens
MKTLYSLCVTPIGQSMSSMYTTIPRSNYSLNKMMTLKFPPMKTSSGMKRRMKSIQEMTVMGQSLLRSAHG

SEQ ID NO: 22421 - protein, 10 aa, Homo sapiens
LRPVQQLQGG

SEQ ID NO: 22422 - protein, 24 aa, Homo sapiens
TSRRITCASKAPNLGPQRGTKSSS

SEQ ID NO: 22423 - protein, 46 aa, Homo sapiens
MHHLKPQSQVIFITFPSGMPPVLKPTTTPVEEQPCHQNRAKNGSPK

SEQ ID NO: 22424 - protein, 181 aa, Homo sapiens
VMSVLRPLDKLPGLNTATILLVGTEDALLQQLADSMLKEDCASELKVHLAKSLPLPSSVNRPRIDLIVFVVNLHSKYSLQNTEESLRHVDASFFLGKVCFLATGAGRESHCSIHRHTVVKLAHTYQSPLLYCDLEVEGFRATMAQRLVRVLQICAGHVPGVSALNLLSLLRSSEGPSLEDL

SEQ ID NO: 22425 - protein, 404 aa, Homo sapiens
VMSHRKFSAPRHGSLGFLPRKRSSRHRGKVKSFPKDDPSKPVHLTAFLGYKAGMTHIVREVDRPGSKVNKKEVVEAVTIVETPPMVVVGIVGYVETPRGLRTFKTVFAEHISDECKRRFYKNWHKSKKKAFTKYCKKWQDEDGKKQLEKDFSSMKKYCQVIRVIAHTQMRLLPLRQKKAHLMEIQVNGGTVAEKLDWARERLEQQVPVNQVFGQDEMIDVIGVTKGKGYKGVTSRWHTKKLPRKTHRGLRKVACIGAWHPARVAFSVARAGQKGYHHRTEINKKIYKIGQGYLIKDGKLIKNNASTDYDLSDKSINPLGGFVHYGEVTNDFVMLKGCVVGTKKRVLTLRKSLLVQTKRRALEKIDLKFIDTTSKFGHGRFQTMEEKKAFMGPLKKDRIAKEEGA

SEQ ID NO: 22426 - protein, 281 aa, Homo sapiens
KMVARRRKCAARDPEDRIPSPLGYAAIPIKFSEKQQASHYLYVRAHGVRQGTKSTWPQKRTLFVLNVPPYCTEESLSRLLSTCGLVQSVELQEKPDLAESPKESRSKFFHPKPVPGFQVAYVVFQKPSGVSAALALKGPLLVSTESHPVKSGIHKWISDYADSVPDPEALRVEVDTFMEAYDQKIAEEEAKAKEEEGVPDEEGWVKVTRRGRRPVLPRTEAASLRVLERERRKRSRKELLNFYAWQHRESKMEHLAQLRKKFEEDKQRIELLRAQRKFRPY

SEQ ID NO: 22427 - protein, 10 aa, Homo sapiens
KMETAAAVAA

SEQ ID NO: 22428 - protein, 26 aa, Homo sapiens
MFSVHREWLAYFTLTSYYYAFQHDSG

SEQ ID NO: 22429 - protein, 36 aa, Homo sapiens
VKENWIGYFQNRQPKLMHKSVASFLEWPSHEFFGDL

SEQ ID NO: 22430 - protein, 14 aa, Homo sapiens
VADSLCTKAILSSM

SEQ ID NO: 22431 - protein, 307 aa, Homo sapiens
LQQSASSFNMTDAAVSFAKDFLAGGVAAAISKTAVAPIERVKLLLQVQHASKQITADKQYKGIIDCVVRIPKEQGVLSFWRGNLANVIRYFPTQALNFAFKDKYKQIFLGGVDKRTQFWLYFAGNLASGGAAGATSLCFVYPLDFARTRLAADVGKAGAEREFRGLGDCLVKIYKSDGIKGLYQGFNVSVQGIIIYRAAYFGIYDTAKGMLPDPKNTHIVISWMIAQTVTAVAGLTSYPFDTVRRRMMMQSGRKGTDIMYTGTLDCWRKIARDEGGKAFFKGAWSNVLRGMGGAFVLVLYDEIKKYT

SEQ ID NO: 22432 - protein, 15 aa, Homo sapiens
MEALGKLDRTKLLNC

SEQ ID NO: 22433 - protein, 210 aa, Homo sapiens
LPRLANNTVRMAKGDPKKPKGKMSAYAFFVQTCREEHKKKNPEVPVNFAEFSKKCSERWKTMSGKEKSKFDEMAKADKVRYDREMKDYGPAKGGKKKKDPNAPKRPPSGFFLFCSEFRPKIKSTNPGISIGDVAKKLGEMWNNLNDSEKQPYITKAAKLKEKYEKDVADYKSKGKFDGAKGPAKVARKKVEEEDEEEEEEEEEEEEEEDE

SEQ ID NO: 22434 - protein, 23 aa, Homo sapiens
TPSIHSPRPFSGCPPVPLPALPP

SEQ ID NO: 22435 - protein, 34 aa, Homo sapiens
MSTSALMTVGWLPKEIQKADFRQTLSAFLMGFAS

SEQ ID NO: 22436 - protein, 27 aa, Homo sapiens
KASLRMEGNQARKEREQILLQPITVEL

SEQ ID NO: 22437 - protein, 479 aa, Homo sapiens
LPCLAFQCSSFCEMTLKASEGESGGSMHTALSDLYLEHLLQKRSRPEAVSHPLNTVTEDMYTNGSPAPGSPAQVKGQEVRKVRLIQFEKVTEEPMGITLKLNEKQSCTVARILHGGMIHRQGSLHVGDEILEINGTNVTNHSVDQLQKAMKETKGMISLKVIPNQQSRLPALQMFMRAQFDYDPKKDNLIPCKEAGLKFATGDIIQIINKDDSNWWQGRVEGSSKESAGLIPSPELQEWRVASMAQSAPSEAPSCSPFGKKKKYKDKYLAKHSSIFDQLDVVSYEEVVRLPAFKRKTLVLIGASGVGRSHIKNALLSQNPEKFVYPVPYTTRPPRKSEEDGKEYHFISTEEMTRNISANEFLEFGSYQGNMFGTKFETVHQIHKQNKIAILDIEPQTLKIVRTAELSPFIVFIAPTDQGTQTEALQQLQKDSEAIRSQYAHYFDLSLVNNGVDETLKKLQEAFDQACSSPQWVPVSWVY

SEQ ID NO: 22438 - protein, 254 aa, Homo sapiens
MAAAGSRKRRLAELTVDEFLASGFDSESESESENSPQAETREAREAARSPDKPGGSPSASRRKGRASEHKDQLSRLKDRDPEFYKFLQENDQSLLNFSDSDSSEEEEGPFHSLPDVLEEASEEEDGAEEGEDGDRVPRGLKGKKNSVPVTVAMVERWKQAAKQRLTPKLFHEVVQAFRAAVATTRGDQESAEANKFQVTDSAAFNALVTFCIRDLIGCLQKLLFGKVAKDSSSKCGPKETSLRQLVVPGRPQRC

SEQ ID NO: 22439 - protein, 35 aa, Homo sapiens
MPLTPTVQGFQWILRGPDVETSPLGAPRAASHGVG

SEQ ID NO: 22440 - protein, 446 aa, Homo sapiens [sequence omitted]

SEQ ID NO: 22441 - protein, 1437 aa, Homo sapiens
MVPSVCFLIPPPNKDAIEMASRVEQSYQKVMALWHQLHVNTKSLISWNYLRKDLDLVQTWNLEKLRSSAPGECHQIMKNLQAHYEDFLQDSRDSVLFSVADRLRLEEEVEACKARFQHLMKSMENEDKEETVAKMYISELKNIRLRLEEYEQRVVKRIQSLASSRTDRDAWQDNALRIAEQEHTQEDLQQLRSDLDAVSMKCDSFLHQSPSSSSVPTLRSELNLLVEKMDHVYGLSTVYLNKLKTVDVIVRSIQDAELLVKGYEIKLSQEEVVLADLSALEAHWSTLRHWLSDVKDKNSVFSVLDEEIAKAKVVAEQMSRLTPERNLDLERYQEKGSQLQERWHRVIAQLEIRQSELESIQEVLGDYRACHGTLIKWIEETTAQQEMMKPGQAEDSRVLSEQLSQQTALFAEIERNQTKLDQCQKFSQQYSTIVKDYELQLMTYKAFVESQQKSPGKRRRMLSSSDAITQEFMDLRTRYTALVTLTTQHVKYISDALRRLEEEEKVVEEEKQEHVEKVKELLGWVSTLARNTQGKATSSETKESTDIEKAILEQQVLSEELTTKKEQVSEAIKTSQIFLAKHGHKLSEKEKKQISEQLNALNKAYHDLCDGSANQLQQLQSQLAHQTEQKTLQKQQNTCHQQLEDLCSWVGQAERALAGHQGRTTQQDLSALQKNQSDLKDLQDDIQNRATSFATVVKDIEGFMEENQTKLSPRELTALREKLHQAKEQYEALQEETRVAQKELEEAVTSALQQETEKSKAAKELAENKKKIDALLDWVTSVGSSGGQLLTNLPGMEQLSGASLEKGALDTTDGYMGVNQAPEKLDKQCEMMKARHQELLSQQQNFILATQSAQAFLDQHGHNLTPEEQQMLQQKLGELKEQYSTSLAQSEAELKQVQTLQDELQKFLQDHKEFESWLERSEKELENMHKGGSSPETLPSLLKRQGSFSEDVISHKGDLRFVTISGQKVLDMENSFKEGKEPSEIGNLVKDKLKDATERYTALHSKCTRLGSHLNMLLGQYHQFQNSADSLQAWMQACEANVEKLLSDTVASDPGVLQEQLATTKQLQEELAEHQVPVEKLQKVARDIMEIEGEPAPDHRHVQETTDSILSHFQSLSYSLAERSSLLQKAIAQSQSVQESLESLLQSIGEVEQNLEGKQVSSLSSGVIQEALATNMKLKQDIARQKSSLEATREMVTRFMETADSTTAAVLQGKLAEVSQRFEQLCLQQQEKESSLKKLLPQAEMFEHLSGKLQQFMENKSRMLASGNQPDQDITHFFQQIQELNLEMEDQQENLDTLEHLVTELSSCGFALDLCQHQDRVQNLRKDFTELQKTVKEREKDASSCQEQLDEFRKLVRTFQKWLKETEGSIPPTETSMSAKELEKQIEHLKSLLDDWASKGTLVEEINCKGTSLENLIMEITAPDSQGKTGEYRLFKI

SEQ ID NO: 22442 - protein, 203 aa, Homo sapiens
MVRVGGGWMALDEFLVKNDPCRARGRTNIELREKFILPEGASQGMTPFRSRGRRSKPSSRAASPTRSSSSASQSNHSCTSMPSSPATPASGTKTSLQFSRCYDKPWLVNSKAGTPIRDSHSPDLQLPTPEVIPSSGSKLKRPTPTFHSSRTSLAGDTSNSSSPASTGAKTNRAGKYLPRDLQARLRIWKQQPMWNVSLLPRSG

SEQ ID NO: 22443 - protein, 416 aa, Homo sapiens
MFAKGKGSAVPSDGQAREKLALYVYEYLLHVGAQKSAQTFLSEIRWEKNITLGEPPGFLHSWWCVFWDLYCAAPERRDTCEHSSEAKAFHDYSAAAAPSPVLGNIPPNDGMPGGPIPPGFFQPFMSPRYAGGPRPPIRMGNQPPGGVPGTQPLLPNSMDPTRQQGHPNMGGSMQRMNPPRGMGPMGPGPQNYGSGMRPPPNSLGPAMPGINMGPGAGRPWPNPNSANSIPYSSSSPGTYVGPPGGGGPPGTPIMPSPADSTNSSDNIYTMINPVPPGGSRSNFPMGPGSDGPMGGMGGMEPHHMNGSLGSGDIDGLPKNSPNNISGISNPPGTPRDDGELGGNFLHSFQNDNYSPSMTMSVSPLLRDAERAGIAGGKMPEIMQEVRCHYPGAGGEGISLLPSTPSHPIHAPYLSQF

SEQ ID NO: 22444 - protein, 52 aa, Homo sapiens
MGTPQKDVIIKSDAPDTLLLEKHADYIASYGSKKDDYVCIIFLCWKVYFKEV

SEQ ID NO: 22445 - protein, 99 aa, Homo sapiens
MSGIYWGLTVMDLMGQLHRMNREEILAFIKSCQHECGGISASIGHDPHLLYTLSAVQILTLYDSINVIDVNKVVEYVKGLQKEDGSFAGDIWGPTKQLV

SEQ ID NO: 22446 - protein, 78 aa, Homo sapiens
MSGIYWGLTVMDLMGQLHRMNREEILAFIKSCQHECGGISASIGHDPHLLYTLSAVQVNTNQNCNDLDSMFSYFRVGN

SEQ ID NO: 22447 - protein, 175 aa, Homo sapiens
MEDLEEDVRFIVDETLDFGGLSPSDSREEEDITVLVTPEKPLRRGLSHRSDPNAVAPAPQGVRLSLGPLSPEKLEEILDEANRLAAQLEQCALQDRESAGEGLGPRRVKPSPRRETFVLKDSPVRDLLPTVNSLTRSTPSPSSLTPRLRSNDRKGSVRALRATSGKRPSNMKRVS

SEQ ID NO: 22448 - protein, 380 aa, Homo sapiens
MIQKYNHDGEAGRLEAFGQGESVLKEPKYQEELEDRLHFYVEECDYLQGFQILCDLHDGFSGVGAKAAELLQDEYSGRGIITWGLLPGPYHRGEAQRNIYRLLNTAFGLVHLTAHSSLVCPLSLGGSLGLRPEPPVSFPYLHYDATLPFHCSAILATALDTVTVPYRLCSSPVSMVHLADMLSFCGKKVVTAGAIIPFPLAPGQSLPDSLMQFGGATPWTPLSACGEPSGTRCFAQSVVLRGIDRACHTSHRLMVVLALFWQPAHPRDTSTLCPSCMYHWGRNLGSVFTTAAAWSHEFFPSAADSLQGGSSLPPPLLKLQSTGYGSGWFPQGSSSGEHPSVWGTVFLFVPAPDPGSLGQRPHQTRLAALGQLHGCWSGAR

SEQ ID NO: 22449 - protein, 112 aa, Homo sapiens
MAASAGAGAVIAAPDSRRWLWSVLAAALGLLTAGVSALEVYTPKEIFVANGTQGKLTCKFKSTSTTGGLTSVSWSFQPEGADTTVSVRMLDFSWLVLPHRFLYCCIIGDPFF

SEQ ID NO: 22450 - protein, 50 aa, Homo sapiens
MDCTHPLGNFSFSSQCAFSCSEGTNLTGIEETTCGPFGNWSSPEPTCQGE

SEQ ID NO: 22451 - protein, 424 aa, Homo sapiens
MVQTLYYSADHKLLDGNLLDGQAEVFGSDDDHIQFVQKKPPRENGHKQISSSSTGCLSSPNATVQSPKHEWKIVASEKTSNNTYLCLAVLDGIFCVIFLHGRNSPQSSPTSTPKLSKSLSFEMQQDELIEKPMSPMQYARSGLGTAEMNGKLIAAGGYNREECLRTVECYNPHTDHWSFLAPMRTPRARFQMAVLMGQLYVVGGSNGHSDDLSCGEMYDSNIDDWIPVPELRTNRCNAGVCALNGKLYIVGGSDPYGQKGLKNCDVFDPVTKLWTSCAPLNIRRHQSAVCELGGYLYIIGGAESWNCLNTVERYNPENNTWTLIAPMNVARRGAGVAVLNGKLFVCGGFDGSHAISCVEMYDPTRNEWKMMGNMTSPRSNAGIATVGNTIYAVGGFDGNEFLNTVEVYNLESNEWSPYTKIFQF

SEQ ID NO: 22452 - protein, 226 aa, Homo sapiens
MQQDELIEKPMSPMQYARSGLGTAEMNGKLIAAGGYNREECLRTVECYNPHTDHWSFLAPMRTPRARFQMAVLMGQLYVVGGSNGHSDDLSCGEMYDSNIDDWIPVPELRTNRCNAGVCALNGKLYIVGGSDPYGQKGLKNCDVFDPVTKLWTSCAPLNIRRHQSAVCELGGYLYIIGGAESWNCLNTVERYNPENNTWTLIAPMNVARRGAGVAVLNGECWDLER

SEQ ID NO: 22453 - protein, 8 aa, Homo sapiens
MGPPPRLL

SEQ ID NO: 22454 - protein, 84 aa, Homo sapiens
MIQVVKQKLPQKNSSEGNKHHKSTPLLIHCRDGSQQTGIFCALLNLLESAETEEVVDIFQVVKALRKARPGMVSTFVSILHHCF

SEQ ID NO: 22455 - protein, 41 aa, Homo sapiens
MVQAHGGRSRAQPLTLSLGAAMTQPPPEKTPAKKHVRLQER

SEQ ID NO: 22456 - protein, 150 aa, Homo sapiens [sequence omitted]

SEQ ID NO: 22457 - protein, 56 aa, Homo sapiens
MQRASRLKRELHMLATEPPPGITCWQDKDQMDDLRARRYQIMYMMKVMTLLKIVLK

SEQ ID NO: 22458 - protein, 29 aa, Homo sapiens
MLLCLLQLAAPLCSYSITIRFYLFWLNTP

SEQ ID NO: 22459 - protein, 1754 aa, Homo sapiens
MSGEVRLRQLEQFILDGPAQTNGQCFSVETLLDILICLYDECNNSPLRREKNILEYLEWAKPFTSKVKQMRLHREDFEILKVIGRGAFGEVAVVKLKNADKVFAMKILNKWEMLKRAETACFREERDVLVNGDNKWITTLHYAFQDDNNLYLVMDYYVGGDLLTLLSKFEDRLPEDMARFYLAEMVIAIDSVHQLHYVHRDIKPDNILMDMNGHIRLADFGSCLKLMEDGTVQSSVAVGTPDYISPEILQAMEDGKGRYGPECDWWSLGVCMYEMLYGETPFYAESLVETYGKIMNHKERFQFPAQVTDVSENAKDLIRRLICSREHRLGQNGIEDFKKHPFFSGIDWDNIRNCEAPYIPEVSSPTDTSNFDVDDDCLKNSETMPPPTHTAFSGHHLPFVGFTYTSSCVLSDRSCLRVTAGPTSLDLDVNVQRTLDNNLATEAYERRIKRLEQEKLELSRKLQESTQTVQALQYSTVDGPLTASKDLEIKNLKEEIEKLRKQVTESSHLEQQLEEANAVRQELDDAFRQIKAYEKQIKTLQQEREDLNKELVQASERLKNQSKELKDAHCQRKLAMQEFMEINERLTELHTQKQKLARHVRDKEEEVDLVMQKVESLRQELRRTERAKKELEVHTEALAAEASKDRKLREQSEHYSKQLENELEGLKQKQISYSPGVCSIEHQQEITKLKTDLEKKSIFYEEELSKREGIHANEIKNLKKELHDSEGQQLALNKEIMILKDKLEKTRRESQSEREEFESEFKQQYEREKVLLTEENKKLTSELDKLTTLYENLSIHNQQLEEEVKDLADKKESVAHWEAQITEIIQWVSDEKDARGYLQALASKMTEELEALRNSSLGTRATDMPWKMRRFAKLDMSARLELQSALDAEIRAKQAIQEELNKVKASNIITECKLKDSEKKNLELLSEIEQLIKDTEELRSEKGIEHQDSQHSFLAFLNTPTDALDQFETDPVENTYVWNPSVKFHIQSRSTSPSTSSEAEPVKTVDSTPLSVHTPTLRKKGCPGSTGFPPKRKTHQFFVKSFTTPTKCHQCTSLMVGLIRQGCSCEVCGFSCHITCVNKAPTTCPVPPEQTKGPLGIDPQKGIGTAYEGHVRIPKPAGVKKGWQRALAIVCDFKLFLYDIAEGKASQPSVVISQVIDMRDEEFSVSSVLASDVIHASRKDIPCIFRVTASQLSASNNKCSILMLADTENEKNKWVGVLSELHKILKKNKFRDRSVYVPKEAYDSTLPLIKTTQAAAIIDHERIALGNEEGLFVVHVTKDEIIRVGDNKKIHQIELIPNDQLVAVISGRNRHVRLFPMSALDGRETDFYKLSETKGCQTVTSGKVRHGALTCLCVAMKRQVLCYELFQSKTRHRKFKEIQVPYNVQWMAIFSEQLCVGFQSGFLRYPLNGEGNPYSMLHSNDHTLSFIAHQPMDAICAVEISSKEYLLCFNSIGIYTDCQGRRSRQQELMWPANPSSCCYNAPYLSVYSENAVDIFDVNSMEWIQTLPLKKVRPLNNEGSLNLLGLETIRLIYFKNKMAEGDELVVPETSDNSRKQMVRNINNKRRYSFRVPEEERMQQRREMLRDPEMRNKLISNPTNFNHIAHMGPGDGIQILKDLPMNPRPQESRTVFSGSVSIPSITKSRPEPGRSMSASSGLSARSSAQNGSALKREFSGGSYSAKRQPMPSPSEGSLSSGGMDQGSDAPARDFDGEDSDSPRHSTASNSSNLSSPPSPASPRKTKSLSLESTDRGSWDP

SEQ ID NO: 22460 - protein, 57 aa, Homo sapiens [sequence omitted]

SEQ ID NO: 22461 - protein, 104 aa, Homo sapiens
MQERYFEPLVKKEQMEEKMRNIREVKCRVVTCKTCAYTHFKLLETCVSEQHEYHWHDGVKRFFKCPCGNRSISLDRLPNKHCRYENHLELFVPRGDFHLFFQSL

SEQ ID NO: 22462 - protein, 38 aa, Homo sapiens
MDEDVLHPEEPHHRLLLRFTDDTFDPELAATIDNAGIT

SEQ ID NO: 22463 - protein, 129 aa, Homo sapiens
MFHSGETGPGKRCYKKNDTVTIRTRKFMTNRLLQRKQMVIDVLHPGKATVPKTEIREKLAKMYKTTPDVIFVFGFRTHFGGGKTTGFGMIYDSLDYAKKNEPKHRLARVGVFSFVDQLLKTYFFNSVVL

SEQ ID NO: 22464 - protein, 107 aa, Homo sapiens [sequence omitted]

SEQ ID NO: 22465 - protein, 46 aa, Homo sapiens
MQACTLDFENEKLDRQHVQHQLHVILKELRKARNQITQLESLVSLE

SEQ ID NO: 22466 - protein, 318 aa, Homo sapiens
MRKYFLQANDQQDLVEWVNVLNKAIKITVPKQSDSQPNSDNLSRHGECGKKQVSYRTDIVGGVPIITPTQKEEVNECGESIDRNNLKRSQSHLPYFTPKPPQDSAVIKAGYCVKQGAVMKNWKRRYFQLDENTIGYFKSELEKEPLRVIPLKEVHKVQECKQSDIMMRDNLFEIVTTSRTFYVQADSPEEMHSWIKAVSGAIVAQRGPGRSASSEHPPGPSESKHAFRPTNAATATSHSTASRSNSLVSTFTMEKRGFYESLAKVKPGNFKVQTVSPREPASKVTEQALLRPQSKNGPQEKDCDLVDLDDASLPVSDV

SEQ ID NO: 22467 - protein, 433 aa, Homo sapiens [sequence omitted]

SEQ ID NO: 22468 - protein, 59 aa, Homo sapiens [sequence omitted]

SEQ ID NO: 22469 - protein, 218 aa, Homo sapiens
MVGELIAFCTSTHKVGLTSEILNSFEHEFLSKRLSKARHSTCKDSGHAGARDIVSIQELIEVEEEEEILLNSYTTPSKGSQKRAISTPETPLTKRSVSTRSPHQLLSPSSFSPSATPSQKYNSRSNRGEVVTSFGLAQGVSWSGRGGAGNISLKVLGCPEALTGSYKSMFQKLPDIREVLTCKIEELGSELKEHYKIEAFTPLLAPAQVRVVLIVLTN

SEQ ID NO: 22470 - protein, 13 aa, Homo sapiens
MKATNLKLRNLPF

SEQ ID NO: 22471 - protein, 47 aa, Homo sapiens
METIGRDLHRQFPLHEMFVSPQGHGYEAGDAQGPPAPQAPGAPAHFP

SEQ ID NO: 22472 - protein, 61 aa, Homo sapiens [sequence omitted]

SEQ ID NO: 22473 - protein, 43 aa, Homo sapiens [sequence omitted]

SEQ ID NO: 22474 - protein, 78 aa, Homo sapiens
MVNDGVEDLRCKYISLIYTNYEAGKDDYVKALPGQLKPFETLLSQNQGGKTFIVGDQVSIWPHAVPSSPPSASRWTQV

SEQ ID NO: 22475 - protein, 180 aa, Homo sapiens [sequence omitted]

SEQ ID NO: 22476 - protein, 118 aa, Homo sapiens [sequence omitted]

SEQ ID NO: 22477 - protein, 213 aa, Homo sapiens
MAQNLKDLAGRLPAGPRGMGTALKLLLGAGAVAYGVRESVFTVEGGHRAIFFNRIGGVQQDTILAEGLHFRIPWFQYPIIYDIRARPRKISSPTGSKDLQMVNISLRVLSRPNAQELPSMYQRLGLDYEERVLPSIVNEVLKSVVAKFNASQLITQRAQVSLLIRRELTERAKDFSLILDDVAITELSFSREYTAAVEAKQVGESQEPWGEGF

SEQ ID NO: 22478 - protein, 23 aa, Homo sapiens
MPPHMSRDSDLPLSSEFAELWGT

SEQ ID NO: 22479 - protein, 48 aa, Homo sapiens
MAMRQTPLTCSGHTRPVVDLAFSGITPYGYFLISACKAKCGMLSQEMN

SEQ ID NO: 22480 - protein, 119 aa, Homo sapiens
MSHTRDSHDSHLMPSPAPVAQPLPGHVVPCPSPFGRAQRVPSPGPPTLTSYSVLRRLTVQPKTRFTPMPSTPRVQQAQWLRGVSPQSCSEDPALPWVSIRSFPLLRSLALCCQPGGPGV

SEQ ID NO: 22481 - protein, 87 aa, Homo sapiens
MVKEVVRTDSLKGRRGRLPSKPKQPPDASPANLLTSLVRAHLDSGPSTAKLDYSKVRSHPVSALGRSMSTCSAFVRVRRATPSGRTE

SEQ ID NO: 22482 - protein, 91 aa, Homo sapiens
MTWDPALAQIAKAWASNCQFSHNTRLKPPHKLHPNFTSLGENIWTGSVPIFSVSSAITNWYDEIQDYDFKTRICKKVCGHYTQRELPNLAI

SEQ ID NO: 22483 - protein, 14 aa, Homo sapiens
MSSSFSNSCKLCVG

SEQ ID NO: 22484 - protein, 54 aa, Homo sapiens
MLNISPFSFGLVIQQVFDNGSIYNPEVLDITEETLHSRFLEVYAVSLAPSYTDG

SEQ ID NO: 22485 - protein, 32 aa, Homo sapiens
MELNGQVGFSFVANGECFSFDSTIQFRTSQCV

SEQ ID NO: 22486 - protein, 78 aa, Homo sapiens
MQVSACVGRLPFFRKRGKYPHRLSVFSETIFFPRKKSLTVGVSLRQRRGQPTGPCKARAAAPPLSFRPEPPSSSNSPK

SEQ ID NO: 22487 - protein, 21 aa, Homo sapiens
MDHDLLKNFISKASRVGAFKN

SEQ ID NO: 22488 - protein, 64 aa, Homo sapiens
MHVDREFAVVTGGSGQFPVSCNNNPMVEDTKQQESGSVGPKEIEIYTVSAMQTPCRCRNQYEKQ

SEQ ID NO: 22489 - protein, 36 aa, Homo sapiens
MAAVTRTTPVKLRSGRYIQKVPRRNFLLEKMKKQYL

SEQ ID NO: 22490 - protein, 227 aa, Homo sapiens
MACARPLISVYSEKGESSGKNVTLPAVFKAPIRPDIVNFVHTNLRKNNRQPYAVSELAGHQTSAESWGTGRAVARIPRVRGGGTHRSGQGAFGNMCRGGRMFAPTKTWRRWHRRVNTTQKRYAICSALAASALPALVMSKGHRIEEVPELPLVVEDKVEGYKKTKEAVLLLKKLKAWNDIKKVYASQRMRAGKGKMRNRRRIQRRGPCIIYNEDNGIIKAFRNIPGN

SEQ ID NO: 22491 - protein, 120 aa, Homo sapiens
MEATRRRQHLGATGGPGAQLGASFLQARHGSVSADEAARTAPFHLDLWFYFTLQNWVLDFGRPIAMLVFPLEWFPLNKPSVGDYFHMAYNVITPFLLLKVLSQGPHSLLSSPFFAHLAGR

SEQ ID NO: 22492 - protein, 108 aa, Homo sapiens
MKSARAKTPRKPTVKKGSQTNLKDPVGVYCRVRPLGFPDQECCIEVINNTTVQLHTPEGYRLNRNGDYKETQYSFKQVFGTHTTQKELFDVVANPLVNDLIHGKNGMI

SEQ ID NO: 22493 - protein, 51 aa, Homo sapiens
MASVSELACIYSALILHDDEVTVTEDKINALIKAAGVNVEPFWPGLFAKVR

SEQ ID NO: 22494 - protein, 201 aa, Homo sapiens
MVPREAPESAQCLCPSLTIPNAKDVLRKRHKRRSRQHQRFMARKALLQEQGLLSMPPEPGSSPLPTPFGAATATEAASSGKQCLRAGSGSAPCSRRPAPGKASGPLPSKCVAIDCEMVGTGPRGRVSELARCSIVSYHGNVLYDKYIRPEMPIADYRTRWSGITRQHMRKAVPFQVAQKEVRAGMGTCLGGVVGWKEPPWV

SEQ ID NO: 22495 - protein, 379 aa, Homo sapiens
MWPFPEGGNTIPILHTDICSKNPCHNGGLCEEISQEVRGDVFPSYTCTCLKGYAGNHCETKCVEPLGLENGNIANSQIAASSVRVTFLGLQHWVPELARLNRAGMVNAWTPSSNDDNPWIQVNLLRRMWVTGVVTQGASRLASHEYLKAFKVAYSLNGHEFDFIHDVNKKHKEFVGNWNKNAVHVNLFETPVEAQYVRLYPTSCHTACTLRFELLGCELNGCANPLGLKNNSIPDKQITASSSYKTWGLHLFSWNPSYARLDKQGNFNAWVAGSYGNDQWLQVDLGSSKEVTGIITQGARNFGSVQFVASYKVAYSNDSANWTEYQDPRTGSSKIFPGNWDNHSHKKNLFETPILARYVRILPVAWHNRIALRLELLGC

SEQ ID NO: 22496 - protein, 1903 aa, Homo sapiens
MLLLDTAGGAARHSRVRRAALRLLTYLSCRFGLARVHWAFKFFDSQGARSRPSRVSDFRELGSRSWEDFEEELEARLEDRAHLPGPAPRATHTHGALMETLLDYQWDRPEITSPTKPILRSSGRRLLDVESEAKEAEAALGGLVNAVFLLAPCPHSQRELLQFVSGCEAQAQRLPPTPKQVMEKLLPKRVREVMVARKITFYWVDTTEWSKLWESPDHLGYWTVCELLHHGGGTVLPSESFSWDFAQAGEMLLRSGIKLSSEPHLSPWISMLPTDATLNRLLYNSPEYEASFPRMEGMLFLPVEAGKEIQETWTVTLEPLAMHQRHFQKPVRIFLKGSVAQWSLPTSSTLGTDSWMLGSPEESTATQRLLFQQLVSRLTAEELHLVADVDPGEGRPPITGVISPLSASAMILTVCRTKEAEFQRHVLQTAVADSPRDTASLFSDVVDSILNQTHDSLADTASAASPVPEWAQQELGHTTPWSPAVVEKWFPFCNISGASSDLMESFGLLQAASANKEESSKTEGELIHCLAELYQRKSREESTIAHQEDSKKKRGVPRTPVRQKMNTMCRSLKMLNVARLNVKAQKLHPDGSPDVAGEKGIQKIPSGRTVDKLEDRGRTLRSSKPKDFKTEEELLSYIRENYQKTVATGEIMLYACARNMISTVKMFLKSKGTKELEVNCLNQVKSSLLKTSKSLRQNLGKKLDKEDKVRECQLQVFLRLEMCLQCPSINESTDDMEQVVEEVTDLLRMVCLTEDSAYLAEFLEEILRLYIDSIPKTLGNLYNSLGFVIPQKLAGVLPTDFFSDDSMTQENKSPLLSVPFLSSARRSVSGSPESDELQELRTRSAKKRRKNALIRHKSIAEVSQNLRQIEIPKVSKRATKKENSHPAPQQPSQPVKDTVQEVTKVRRNLFNQELLSPSKRSLKRGLPRSHSVSAVDGLEDKLDNFKKNKGYHKLLTKSVAETPVHKQISKRLLHRQIKGRSSDPGPDIGVVEESPEKGDEISLRRSPRIKQLSFSRTHSASFYSVSQPKSRSVQRVHSFQQDKSDQRENSPVQSIRSPKSLLFGAMSEMISPSEKGSARMKKRSRNTLDSEVPAAYQTPKKSHQKSLSFSKTTPRRISHTPQTPLYTPERLQKSPAKMTPTKQAAFKESLKDSSSPGHDSPLDSKITPQKRHTQAGEGTSLETKTPRTPKRQGTQPPGFLPNCTWPHSVNSSPESPSCPAPPTSSTAQPRRECLTPIRDPLRTPPRAAAFMGTPQNQTHQQPHVLRAARAEEPAQKLKDKAIKTPKRPGNSTVTSSPPVTPKKLFTSPLCDVSKKSPFRKSKIECPSPGELDQKEPQMSPSVAASLSCPVPSTPPELSQRATLDTVPPPPPSKVGKRCRKTSDPRRSIVECQPDASATPGVGTADSPAAPTDSRDDQKGLSLSPQSPPERRGYPGPGLRSDWHASSPLLITSDTEHVTLLSEAEHHGIGDLKSNVLSVEEGEGLRTADAEKSSLSHPGIPPSPPSCGPGSPLMPSRDVHCTTDGRQCQASAQLDNLPASAWHSTDSASPQTYEVELEMQASGLPKLRIKKIDPSSSLEAEPLSKEESSLGEESFLPALSMPRASRSLSKPEPTYVSPPCPRLSHSTPGKSRGQTYICQACTPTHGPSSTPSPFQTDGVPWTPSPKHSGKTTPDIIKDWPRRKRAVGCGAGSSSGRGEVGADLPGSLSLLESEGKDHGLELSIHRTPILEDFELEGVCQLPDQSPPRNSMPKAEEASSWGQFGLSSRKRVLLAKEEADRGAKRICDLREDSEVSKSKEGSPSWSAWQLPSTGDEEVFVSGSTPPPSCAVRSCLSASALQALTQSPLLFQGKTPSSQSKDPRDEDVDVLPSTVEDSPFSRAFSRRRPISRTYTRKKLMGTWLEDL

SEQ ID NO: 22497 - protein, 43 aa, Homo sapiens
MHQARKRYRDRLQYFRDHINDIIKIQAFIRANKARDDYKTLSE

SEQ ID NO: 22498 - protein, 179 aa, Homo sapiens
MIAEEESLKERLIKSISVCQKELNTLCSELHVEPFQEEGETTILQLEKDLRTQVELMRKQKKERKQELKLLQEQDQELCEILCMPHYDIDSASVPSLEELNQFRQHVTTLRETKASRREEFVSIKRQIILCMEALDHTPDTSFERDVVCEDEDAFCLSLENIATLQKLLRQVLSSQIMP

SEQ ID NO: 22499 - protein, 45 aa, Homo sapiens
MRTKKRRCRTPRPWTCSRRVWLWWCRTRCSAICRSRLLWKKSTPK

SEQ ID NO: 22500 - protein, 70 aa, Homo sapiens
MSAPCAARRGSSEQQDTCSNPGPCSSPTGNPEWGLRDTALLEDLGKASGLLLERMVDMPANNKCLIFRKN

SEQ ID NO: 22501 - protein, 159 aa, Homo sapiens
MCVAQGSGHTHSVGTVCCSRLKESFLVTGSQDCTVKLWPLPKALLSKNTAPDNGPILLQAQTTQRCHDKDINSVAIAPNDKLLATGSQDRTAKLWALPQCQLLGVFSGHRRGLWCVQFSPMDQVLATASADGTIKLWALQDFSCLKVSGAPDPPHFPPW

SEQ ID NO: 22502 - protein, 87 aa, Homo sapiens [sequence omitted]

SEQ ID NO: 22503 - protein, 255 aa, Homo sapiens
MASNDYTQQATQSYGAYPTQPGQGYSQQSSQPYGQQSYSGYSQSTDTSGYGQSSYSSYGQSQNTGYGTQSTPQGYGSTGGYGSSQSSQSSYGQQSSYPGYGQQPAPSSTSGSYGSSSQSSSYGQPQSGSYSQQPSYGGQQQSYGQQQSYNPPQGYGQQNQYNSSSGGGGGGGGGGNYGQDQSSMSSGGGSGGGYGNQDQSGGGGSGGYGQQDRGGRGRGGSGGGGGGGGGGYNRSSGGYEPRGRGGGRGGRGGMG

SEQ ID NO: 22504 - protein, 149 aa, Homo sapiens
MCLDLAASWMKCPLDRAYLIKLSGLNKETYQSCLKSFECLLGLNSNIGIRDLAVQFSCIEAVNMASKILKSYESSLPQTQQVDLDLSRPLFTSAALLSACKILKLKVDKNKMVATSGVKKAIFDRLCKQLEKIGQQVDSKYSVVQECVI

SEQ ID NO: 22505 - protein, 72 aa, Homo sapiens
MEYDLQALNIKYAMDAFGGPIWSMAASPSGSQLLVGCEDGSVKLFQITPDKIQFERNFDRQKSKRHFSWGGK

SEQ ID NO: 22506 - protein, 169 aa, Homo sapiens [sequence omitted]

SEQ ID NO: 22507 - protein, 71 aa, Homo sapiens
MSVQSPASWVPGGRCGENSARYQDRWGTAEAVWGGAFVHSFFLRNRQRLINCLMLCHQIKTARMSHPNPSL

SEQ ID NO: 22508 - protein, 28 aa, Homo sapiens
MTVKLDFEECLKDSPRFRQTRWTQALFP

SEQ ID NO: 22509 - protein, 41 aa, Homo sapiens
MGSRVLRTGKLLEAAGAGPGSPALAVFAFGRGQSLLFQVPA

SEQ ID NO: 22510 - protein, 163 aa, Homo sapiens [sequence omitted]

SEQ ID NO: 22511 - protein, 87 aa, Homo sapiens
MSLCQRPPPFVRIGIFRLLKGLAHIRCDLFIPVVMEGHICQSLESAKAGTRFPGPQWGCANPRELGCKFVKNQHHVWQLSIGARSLP

SEQ ID NO: 22512 - protein, 332 aa, Homo sapiens
MPRLPSIRHWQGPSHPGFLGPLFPICSLQWPHGFSAIFPGLLDVYGFESFPDNSLEQLCINYANEKLQQHFVAHYLRAQQEEYAVEGLEWSFINYQDNQPCLDLIEGSPISICSLINEECRLNRPSSAAQLQTRIETALAGSPCLGHNKLSREPSFIVVHYAGPVRYHTAGLVEKNKDPIPPELTRLLQQSQDPLLMGLFPTNPKEKTQEEPPGQSRAPVLTVVSKFKASLEQLLQVLHSTTPHYIRCIKPNSQGQAQTFLQEEVLSQLEACGLVETIHISAAGFPIRVSHRNFVERYKLLRRLHPCTSSGPDSPYPAKGLPASVFREALGI

SEQ ID NO: 22513 - protein, 735 aa, Homo sapiens
MPPWIYNESLVPDAYKKILETTMTPTGIDTAKLYPILMSSGLPRETLGQIWALANRTTPGKLTKEELYTVLAMIAVTQRGVPAMSPDALNQFPAAPIPTLSGFSMTLPTPVSQPTVIPSGPAGSMPLSLGQPVMGINLVGPVGGAAAQASSGFIPTYPANQVVKPEEDDFQDFQDASKSGSLDDSFSDFQELPASSKTSNSQHGNSAPSLLMPLPGTKALPSMDKYAVFKGIAADKSSENTVPPGDPGDKYSAFRELEQTAENKPLGESFAEFRSAGTDDGFTDFKTADSVSPLEPPTKDKTFPPSFPSGTIQQKQQTQVKNPLNLADLDMFSSVNCSSEKPLSFSAVFSTSKSVSTPQSTGSAATMTALAATKTSSLADDFGEFSLFGEYSGLAPVGEQDDFADFMAFSNSSISSEQKPDDKYDALKEEASPVPLTSNVGSTVKGGQNSTAASTKYDVFRQLSLEGSGLGVEDLKDNTPSGKSDDDFADFHSSKFSSINSDKSLGEKAVAFRHTKEDSASVKSLDLPSIGGSSVGKEDSEDALSVQFDMKLADVGGDLKHVMSDSSLDLPTVSGQHPPAAGSGSPSATSILQKKETSFGSSENITMTSLSKVTTFVSEDALPETTFPALASFKDTIPQTSEQKEYENRDYKDFTKQDLPTAERSQEATCPSPASSGASQETPNECSDDFGEFQSEKPKISKFDFLVATSQSKMKSSEEMIKSELATFDLSVQGE

SEQ ID NO: 22514 - protein, 739 aa, Homo sapiens
MEQPIKVTEWQQTYTYDSGIHSGANTCVPSVSSKGIMEEDEACGRQYTLKKTTTYTQGVPPSQGDLEYQMSTTARAKRVREAMCPGVSGEDSSLLLATQVEGQATNLQRLAEPSQLLKSAIVHLINYQDDAELATRALPELTKLLNDEDPVVVTKAAMIVNQLSKKEASRRALMGSPQLVAAVVRTMQNTSDLDTARCTTSILHNLSHHREGLLAIFKSGGIPALVRMLSSPVESVLFYAITTLHNLLLYQEGAKMAVRLADGLQKMVPLLNKNNPKFLAITTDCLQLLAYGNQESKLIILANGGPQALVQIMRNYSYEKLLWTTSRVLKVLSVCPSNKPAIVEAGGMQALGKHLTSNSPRLVQNCLWTLRNLSDVATKQEGLESVLKILVNQLSVDDVNVLTCATGTLSNLTCNNSKNKTLVTQNSGVEALIHAILRAGDKDDITEPAVCALRHLTSRHPEAEMAQNSVRLNYGIPAIVKLLNQPNQWPLVKATIGLIRNLALCPANHAPLQEAAVIPRLVQLLVKAHQDAQRHVAAGTQQPYTDGVRMEEIVEGCTGALHILARDPMNRMEIFRLNTIPLFVQLLYSSVENIQRVAAGVLCELAQDKEAADAIDAEGASAPLMELLHSRNEGTATYAAAVLFRISEDKNPDYRKRVSVELTNSLFKHDPAAWEAAQSMIPINEPYGDDMDATYRPMYSSDVPLDPLEMHMDMDGDYPIDTYSDGLRPPYPTADHMLA

SEQ ID NO: 22515 - protein, 62 aa, Homo sapiens
MGKFMKPGKVVLVLAGRYSGRKAVIVKVSASRDSASLHAGTRLAAAGRAGLEFKACFWGSSQ

SEQ ID NO: 22516 - protein, 120 aa, Homo sapiens
MHRRGVGAGAIAKKKLAEAKYKERGTVLAEDQLAQMSKQLDMFKTNLEEFASKHKQEIRKNPEFRVQFQDMCATIGVDPLASGKGFWSEMLGVGDFYYELGVQIIEVCLALKHRNGGEGG

SEQ ID NO: 22517 - protein, 104 aa, Homo sapiens
MSLFPPPASADRGPPARPRRPPHPRPSLLLRFPFSPVLGSDIRGRRGRQPKQPAASAAERCAPAPAPAPAPAPPPPPPKSGPIGGLSSRHREQQGQVGRRRRLG

SEQ ID NO: 22518 - protein, 381 aa, Homo sapiens
MTTCKAGVVPLASQQHPQAHVDIYEKQPVPFGLVRFGVAPDHPEVKNVINTFTQTAHSGRCAFWGNVEVGRDVTVPELQEAYHAVVLSYGAEDHRALEIPGEELPGVCSARAFVGWYNGLPENQELEPDLSCDTAVILGQGNVALDVARILLTPPEHLERTDITKAALGVLRQSRVKTVWLVGRRGPLQVAFTIKELREMIQLPGARPILDPVDFLGLQDKIKEVPRPRKRLTELLLRTATEKPGPAEAARQASASRAWGLRFFRSPQQVLPSPDGRRAAGVRLAVTRLEVSLMFPKDTPFPGLCHPPGVAHTLPNRVSMRPPVQCPRETWKTSLVGWCSAALGIRAALSTQACPLTPSLGSSPMWRAGLWMCQASTAAAG

SEQ ID NO: 22519 - protein, 59 aa, Homo sapiens [sequence omitted]

SEQ ID NO: 22520 - protein, 76 aa, Homo sapiens
MQRMGRLRPWLCVPLRVGAGLGPNSTAAGFSLISEPRRWQSGRPGQVNPRAAGAQAPTPAQRGRKGPPPAQRAQRP

SEQ ID NO: 22521 - protein, 309 aa, Homo sapiens
MAAGPARDWPARRGLKRSAREPGAYCGTALESTRVRELPGGAMSCINLPTVLPGSPSKTRGQIQVILGPMFSGKSTELMRRVRRFQIAQYKCLVIKYAKDTRYSSSFCTHDRNTMEALPACLLRDVAQEALGVAVIGIDEGQFFPDIVEFCEAMANAGKTVIVAALDGTFQRKPFGAILNLVPLAESVVKLTAVCMECFREAAYTKRLGTEKEVAPPAFPAGRRGGGMALPPSCPGPSPIPCPCGQVEVIGGADKYHSVCRLCYFKKASGQPAGPDNKENCPVPGKPGEAVAARKLFAPQQILQCSPAN

SEQ ID NO: 22522 - protein, 268 aa, Homo sapiens
MYGLHQDVHHFNSFDKVRSLPLLLSQAGVRTGIIGKKHVGPETVYPFDFAYTEENGSVLQVGRNITRIKLLVRKFLQTQDDRPFFLYVAFHDPHRCGHSQPQYGTFCEKFGNGESGMGRIPDWTPQAYDPLDVLVPYFVPNTPAARADLAAQYTTVGRMDQGVGLVLQELRDAGVLNDTLVIFTSDNGIPFPSGRTNLYWPGTAEPLLVSSPEHPKRWGQVSEAYVSLLGMPLSVSVRKGVGVDLGRGHDLSDAAPHPLPNVALISSG

SEQ ID NO: 22523 - protein, 123 aa, Homo sapiens
MTPASGATASLGRLRARPRSRWDAAYLPAVAAVCVARASHVPNGTLRFGVCKARRTMRPLPRRIEVRTKRGPQRPAAPERSPQPRLPPSRHPSRRGPRRHLSGCSAPACRIPTGCRCPCGRPS

SEQ ID NO: 22524 - protein, 60 aa, Homo sapiens
MEEEASSPGLGCSKPHLEKLTLGITRILESSPGVTEVTIIEKPPAERHMISSWEQVSVAT

SEQ ID NO: 22525 - protein, 14 aa, Homo sapiens
MVTAAPLVLPEDVH

SEQ ID NO: 22526 - protein, 205 aa, Homo sapiens
MAEGDVAALNRRIQLVEEELDRAQERLATALQKLEEAEKAADESERGMKVIENRAMKDEEKMEIQEMQLKEAKHIAEEADRKYEEVARKLVILEGELERAEERAEVSELKCGDLEEELKNVTNNLKSLEAASEKYSEKEDKYEEEIKLLSDKLKEAETRAEFAERTVAKLEKTIDDLEDELYAQKLKYKAISEELDHALNDMTSL

SEQ ID NO: 22527 - protein, 270 aa, Homo sapiens
MVCLTPMLTQLPILYWDTRFFFFFLRRSLALSPGWSAVARSQLTATSASRVQVILLPQPPEHVELQAEGDVAALNRRIQLVEEELDRAQERLATALQKLEEAEKAADESERGMKVIENRAMKDEEKMEIQEMQLKEAKHIAEEADRKYEEVARKLVILEGELERAEERAEVSELKCGDLEEELKNVTNNLKSLEAASEKYSEKEDKYEEEIKLLSDKLKEAETRAEFAERTVAKLEKTIDDLEEKLAQAKEENVGLHQTLDQTLNELNCI

SEQ ID NO: 22528 - protein, 54 aa, Homo sapiens
MKDEEKMEIQEMQLKEAKHIAEEADRKYEEVARKLVILEGELERAEERAEVSEL

SEQ ID NO: 22529 - protein, 138 aa, Homo sapiens
MKDEEKMEIQEMQLKEAKHIAEEADRKYEEVARKLVILEGELERAEERAEVSELKCGDLEEELKNVTNNLKSLEAASEKVGGWLELEGGLLDFVLFFSRGMQEPVRLWGICPLFNSSVGAWQPGFFPYRKSWISPAHS

SEQ ID NO: 22530 - protein, 365 aa, Homo sapiens [sequence omitted]

SEQ ID NO: 22531 - protein, 18 aa, Homo sapiens
MLKRNPVLLRSIDKPLAR

SEQ ID NO: 22532 - protein, 100 aa, Homo sapiens
MVEPHRHEGVFICRGKEDALVTKNLVPGESVYGEKRVSISEGDDKIEYRAWNPFRSKLAAAILGGVDQIHIKPGAKVLYLGAASGTTVSHVSDIVGPVSE

SEQ ID NO: 22533 - protein, 559 aa, Homo sapiens [sequence omitted]

SEQ ID NO: 22534 - protein, 44 aa, Homo sapiens
MDGSGEQPRGGGEAGGRRAGGGRAPSPARPGSFLPAWGCAISKH

SEQ ID NO: 22535 - protein, 130 aa, Homo sapiens
MVALTKPAVPISYAALGGDGCELTQRVQIHPCTQLTRELGQPLAPIAQRKGHCGSSRTPCEGLCQACGQLDRVRKQVVNIPSFIVRLDSQKHIDFSLRSPYGGGRPGRVKRKNAKKGQGGAGAGDDEEED

SEQ ID NO: 22536 - protein, 6 aa, Homo sapiens
MLEFMN

SEQ ID NO: 22537 - protein, 190 aa, Homo sapiens
MLSLRVPLAPITDPQQLQLSPLKGLSLVDKENTPPALSGTRVLASKTARRIFQEPTEPKTKAAAPGVEDEPLLRENPRRFVIFPIEYHDIWQMYKKAEASFWTAEEVDLSKDIQHWESLKPEERYFISHVLAFFAASDGIVNENLVERFSQEVQITEARCFYGFQIAMENIHSEMYSLLIDTYIKDPKER

SEQ ID NO: 22538 - protein, 173 aa, Homo sapiens
MDRLSYLLPSARPELGVGPGRSVDRSLMYSEANRRETFTSWPHVGYRWAQPDPMAQAGFYHQPASSGDDRAMCFTCSVCLVCWEPTDEPWSEHERHSPNCPFVKGEHTQNVPLSVTLATSPAQFPCTDGTDRISCFGSGSCPHFLAAATKRGKICIWDVSKLMKVCLNFEVTN

SEQ ID NO: 22539 - protein, 111 aa, Homo sapiens
MNILGLVLFALVLGVALKKLGSEGEDLIRFFNSLNEATMVLVSWIMWMEYSGAISAPCNLYLLGSSDSPASASREAGITGVRHHTQLIFFFFSRDGVSPCWPSWSQTPDLR

SEQ ID NO: 22540 - protein, 204 aa, Homo sapiens [sequence omitted]

SEQ ID NO: 22541 - protein, 75 aa, Homo sapiens [sequence omitted]

SEQ ID NO: 22542 - protein, 186 aa, Homo sapiens
MNFYCLQYMQFIRLLEKLLTSQCGAAEEEFVQRFRRSVTLESKKQLIEPVQYDEQGMAFSKSEGKRKTAKAEAIVYKHGSGRIKVNGIDYQLYFPITQDREQLMFPFHFVDRLGKHDVTCTVSGGGRSAQAGAIRLAMAKALCSFVTEDEVEWMRQAGLLTTDPRVRERKKPGQEGARRKFTWKKR

SEQ ID NO: 22543 - protein, 42 aa, Homo sapiens
MQNTPGFMYKNLQCLVIDEADRILDVGFEEELKQIIKLLPSK

SEQ ID NO: 22544 - protein, 116 aa, Homo sapiens
MRLQSVREGCRTRSQCRHSGPLRVAMKFPARSTRGATNKKAESRQPSENSVTDSNSDSEDESGMNFLEKRALNIKQNKAMLAKLMSELESFPGSFRGRHPLPGSDSTNEGDLEETP

SEQ ID NO: 22545 - protein, 74 aa, Homo sapiens [sequence omitted]

SEQ ID NO: 22546 - protein, 173 aa, Homo sapiens
MLRLPTVFRQMRPVSRVLAPHLTRAYAKDVKFGADARALMLQGVDLLADAVAVTMGPKGRTVIIEQSWGSPKVTKDGVTVAKSIDLKDKYKNIGAKLVQDVANNTNEEAGDGTTTATVLARSIAKEGFEKISKGANPVEIRRGVMLAVDAVIAELKKQSKPVTTPEEIAQVRT

SEQ ID NO: 22547 - protein, 87 aa, Homo sapiens
MAEIGEDLDKSDVSSLIFLMKDYMGRGKISKEKSFLDLVVELEKLNLVAPDQLDLLEKCLKNIHRIDLKTKIQKYKQSGKNFGLSVV

SEQ ID NO: 22548 - protein, 143 aa, Homo sapiens
MPLDKHMEMENISSEEVVEIEYVEKYTAPQPEQCMFHDDWISSIKGAEEWILTGSYDKTSRIWSLEGKSIMTIVGHTDVVKDVAWVKKDSLSCLLLSASMDQTILLWEWNVERNKVKALHCCRGHAGSVDSIAVDGSGTKVSS

SEQ ID NO: 22549 - protein, 48 aa, Homo sapiens
MVKKIEISQHAKYTCSFCGKTKMKRRAVGIWHCGSCMKTVAGGAWTYK

SEQ ID NO: 22550 - protein, 164 aa, Homo sapiens
MICFHLINTVTFVPVSKVSGQAEVDDILAAVRPTTRLVTIMLANNETGIVMPVPEISQRIKALNQERVAAGLPPILVHTDAAQALGKQRVDVEDLGVDFLTIVGHKFYGPRIGALYIRGLGEFTPLYPMLFGGGQERNFRPGTENTPMIAGLGKVSPGELEEMS

SEQ ID NO: 22551 - protein, 42 aa, Homo sapiens
MGVQVETISPGDGRTFPKRGQTCVVHYTGCSENQPCHPCTHL

SEQ ID NO: 22552 - protein, 63 aa, Homo sapiens
MNSQYLKLLSSQVSGESTAGSPAALGPQSSTASWGPLRLPVRTREAETPKGEAQGPVIGGVRI

SEQ ID NO: 22553 - protein, 80 aa, Homo sapiens
MQKSPSSASLTLGAVDQSCSYSAILAPYSHYLLELWLRHYNRALSPLSKSWEMVIVNASPILEAPGCRGPQLAGCGGSGL

SEQ ID NO: 22554 - protein, 280 aa, Homo sapiens
MKVITCEIAWHNKEPVYSLDFQHGTAGRIHRLASAGVDTNVRIWKVEKGPDGKAIVEFLSNLARHTKAVNVVRFSPTGEILASGGDDAVILLWKVNDNKEPEQIAFQDEDEAQLNKENWTVVKTLRGHLEDVYDICWATDGNLMASASVDNTAIIWDVSKGQKISIFNEHKSYVQGVTWDPLGQYVATLSCDRHSLTLSPRQVLWRNLTISAHCNLCLLVSSDSPVSASLLAGITGTCHHARLIFVFLVETGFHHVGQAVLKLLTSNDLPALANVLGLQA

SEQ ID NO: 22555 - protein, 950 aa, Homo sapiens
MKQFVPQFISQLQNEFYLDQVALSWRYGGLHFSDQVEVFSPPGSDRASFIKNLQGISSFRRGTFTDCALANMTEQIRQDRSKGTVHFAVVITDGHVTGSPCGGIKLQAERAREEGIRLFAVAPNQNLKEQGLRDIASTPHELYRNDYATMLPDSTEIDQDTINRIIKVMKHEAYGECYKVSCLEIPGPSGPKGYRGQKGAKGNMGEPGEPGQKGRQGDPGIEGPIGFPGPKGVPGFKGEKGEFGADGRKGAPGLAGKNGTDGQKGKLGRIGPPGCKGDPGNRGPDGYPGEAGSPGERGDQGGKGDPGRPGRRGPPGEIGAKGSKGYQGNSGAPGSPGVKGAKGGPGPRGPKGEPGRRGDPGTKGSPGSDGPKGEKGDPGPEGPRGLAGEVGNKGAKGDRGLPGPRGPQGALGEPGKQGSRGDPGDAGPRGDSGQPGPKGDPGRPGFSYPGPRGAPGEKGEPGPRGPEGGRGDFGLKGEPGRKGEKGEPADPGPPGEPGPRGPRGVPGPEGEPGPPGDPGLTECDVMTYVRETCGCCDCEKRCGALDVVFVIDSSESIGYTNFTLEKNFVINVVNRLGAIAKDPKSETGTRVGVVQYSHEGTFEAIQLDDERIDSLSSFKEAVKNLEWIAGGTWTPSALKFAYDRLIKESRRQKTRVFAVVITDGRHDPRDDDLNLRALCDRDVTVTAIGIGDMFHEKHESENLYSIACDKPQQVRNMTLFSDLVAEKFIDDMEDVLCPDPQIVCPDLPCQTELSVAQCTQRPVDIVFLLDGSERLGEQNFHKARRFVEQVARRLTLARRDDDPLNARVALLQFGGPGEQQVAFPLSHNLTAIHEALETTQYLNSFSHVGAGVVHAINAIVRSPRGGARRHAELSFVFLTDGVTGNDSLHESAHSMRKQNVVPTVLALGSDVDMDVLTTLSLGDRAAVFHEKDYDSLAQPGFFDRFIRWIC

SEQ ID NO: 22556 - protein, 641 aa, Homo sapiens
MTFYVGLQAEDGHWTGDYGGPLFLLPGLLITCHVARIPLPAGYREEIVRYLRHIEDKSTVFGTALNYVSLRILGVGPDDPDLVRARNILHKKGGAVAIPSWGKFWLAVLNVYSWEGLNTLFPEMWLFPDWAPAHPSTLWCHCRQVYLPMSYCYAVRLSAAEDPLVQSLRQELYVEDFASIDWLAQRNNVAPDELYTPHSWLLRVVYALLNLYEHHHSAHLRQRAVQKLYEHIVADDRFTKSISIGPISKTINMLVRWYVDGPASTAFQEHVSRIPDYLWMGLDGMKMQGTNGSQIWDTAFAIQALLEAGGHHRPEFSSCLQKAHEFLRLSQVPDNPPDYQKYYRQMRKGGFSFSTLDCGWIVSDCTAEALKAVLLLQEKCPHVTEHIPRERLCDAVAVLLNMRNPDGGFATYETKRGGHLLELLNPSEVFGDIMIDYTYVECTSAVMQALKYFHKRFPEHRAAEIRETLTQGLEFCRRQQRADGSWEGSWGVCFTYGTWFGLEAFACMGQTYRDGTACAEVSRACDFLLSRQMADGGWGEDFESCEERRYLQSAQSQIHNTCWAMMGLMAVRHPDIEAQERGVRCLLEKQLPNGDWPQENIAGVFNKSCAISYTSYRNIFPIWALGRFSQLYPERALAGHP

SEQ ID NO: 22557 - protein, 396 aa, Homo sapiens
MSDRTAPRSPRRDILFDYEQYEYHGTSSAMVMFELAWMLSKDLNDMLWWAIVGLTDQWVQDKITQMKYVTDVGVLQRHVSRHNHRNEDEENTLSVDCTRISFEYDLRLVLYQHWSLHDSLCNTSYTAARFKLWSVHGQKRLQEFLADMGLPLKQVKQKFQAMDISLKENLREMIEESANKFGMKDMRVQTFSIHFGFKHKFLASDVVFATMSLMESPEKDGSGTDHFIQALDSLSRSNLDKLYHGLELAKKQLRATQQTIASCLCTNLVISQGPFLYCSLMEGTPDVMLFSRPASLSLLSKHLLKSFVCSTKNRRCKLLPLVMAAPLSMEHGTVTVVGIPPETDSSDRKNFFGRAFEKAAESTSSRMLHNHFDLSVIELKAEDRSKFLDALISLLS

SEQ ID NO: 22558 - protein, 749 aa, Homo sapiens
MNDVEELTALLRSAGEYEERKLIRAAIRRVRAQEIEAATLAGRLYSGRPNSGSREDSKGLAAHRLEQCEVPEREEQEQQAEVSKPTPTPEGTSQDVTTVTLLLRAPPGSTSSSPASPSSSPTPASPEPPLEPAEAQCLTAEVPGSPEPPPSPPKTTSPEPQESPTLPSTEGQVVNKLLSGPKETPAAQSPTRGPSDTKRADVAGPRPCQRSLSVLSPRQPAQNRESTPLASGPSSFQRAGSVRDRVHKFTSDSPMAARLQDGTPQAALSPLTPARLLGPSLTSTTPASSSSGSSSRGPSDTSSRFSKEQRGVAQPLAQLRSCPQEEGPRGRGLAARPLENRAGGPVARSEEPGAPLPVAVGTAEPGGSMKTTFTIEIKDGRGQASTGRVLLPTGNQRAELTLGLRAPPTLLSTSSGGKSTITRVNSPGTLARLGSVTHVTSFSHAPPSSRGGCSIKMEAEPAEPLAAAVEAANGAEQTRVNKAPEGRSPLSAEELMTIEDEGVLDKMLDQSTDFEERKLIRAALRELRQRKRDQRDKERERRLQEARGRPGEGRGNTATETTTRHSQRAADGSAVSTVTKTERLVHSNDGTRTARTTTVESSFVRRSESKATWCRPVPACLSAHLLRLFLELSLRVFNCAVTFSSLPAAITTPPYSLPSHLLMSSPGPHLVPLPLFCRWQWQHHDANQDLLLFLLIQEDGQHLRPRGPGQPTGRQPGGARETAGREEERADEGAESAQDLSLPGAQGHD

SEQ ID NO: 22559 - protein, 294 aa, Homo sapiens
MASPQLCRALVSAQWVAEALRAPRAGQPLQLLDASWYLPKLGRDARREFEERHIPGAAFFDIDQCSDRTSPYDHMLPGAEHFAEYAGRLGVGAATHVVIYDASDQGLYSAPRVWWMFRAFGHHAVSLLDGGLRHWLRQNLPLSSGKSQPAPAEFRAQLDPAFIKTYEDIKENLESRRFQVVDSRATGRFRGTEPEPRDGNAGEGGRRSSGARPLRPEQCPGLDLSFIFLIYLAFISFPFFFPFLPFPFPPFPLFPTLAFFSQGLALPPRLECSGTIMAHCSLNLLGSGDPPRSA

SEQ ID NO: 22560 - protein, 371 aa, Homo sapiens
MYRDTFYDNFENEPILYGRSYTWLCYEVKIKRGRSNLLWDTGVFRGQVYFKPQYHAEMCFLSWFCGNQLPAYKCFQITWFVSWTPCPDCVAKLAEFLSEHPNVTLTISAARLYYYWERDYRRALCRLSQAGARVTIMDYEEFAYCWENFVYNEGQQFMPWYKFDENYAFLHRTLKEILRYLMDPDTFTFNFNNDPLVLRRRQTYLCYEVERLDNGTWVLMDQHMGFLCNEAKNLLCGFYGRHAELRFLDLVPSLQLDPAQIYRVTWFISWSPCFSWGCAGEVRAFLQENTHVRLRIFAARIYDYDPLYKEALQMLRDAGAQVSIMTYDEFEYCWDTFVYRQGCPFQPWDGLEEHSQALSGRLRAILQNQGN

SEQ ID NO: 22561 - protein, 254 aa, Homo sapiens
MKEKRNKNLAEIGKRRSFIAAPCQIITNTSTLLKNYQDNNKMLVLALENEKSKVKEAQDIILQLRKECYYLTCQLYALKGKLTSQQTVEPAQNQEICSSGMDPNSDDSSRNLFVKDLPQIPLEETELPGQGESFQIEDQIPTIPQDTLGVDFDSATPPETQQSPHLSLKDITNVSLYPVVKIRRLSLSPKKNKASPAVALPKRRCTASVNYKEPTLASKLRRGDPFTDLCFLNSPIFKQKKDLRRSKKSMKQIQ

SEQ ID NO: 22562 - protein, 516 aa, Homo sapiens
MLPPGGFPAAVCPPGRAQFGPGAGAGSGAGGSSGGGGGPGTYQYSQGAPLYGPYPGAAAAGSCGGLGGLGVPGSGFRAHVYLCNRPLWLKFHRHQTEMIITKQGRRMFPFLSFNINGLNPTAHYNVFVEVVLADPNHWRFQGGKWVTCGKADNNMQGNKMYVHPESPNTGSHWMRQEISFGKLKLTNNKGANNNNTQMIVLQSLHKYQPRLHIVEVTEDGVEDLNEPSKTQTFTFSETQFIAVTAYQNTDITQLKIDHNPFAKGFRDNYDSMYTASENDRLTPSPTDSPRSHQIVPGGRYGVQSFFPEPFVNTLPQARYYNGERTVPQTNGLLSPQQSEEVANPPQRWLVTPVQQPGTNKLDISSYESEYTSSTLLPYGIKSLPLQTSHALGYYPDPTFPAMAGWGGRGSYQRKMAAGLPWTSRTSPTVFSEDQLSKEKVKEEIGSSWIETPPSIKSLDSNDSGVYTSACKRRRLSPSNSSNENSPSIKCEDINAEEYSKDTSKGMGGYYAFYTTP

SEQ ID NO: 22563 - protein, 131 aa, Homo sapiens
MPIRALCTICSDFFDHSRDVAAIHCGHTFHLQCLIQWFETAPSRTCPQCRIQEEENVLDAEFLKNELDNVRAQLSQKDKEKRDSQVIIDTLRDTLEERNATVVSLQQALGKAEMLCSTLKVGPQVLWVQNS

SEQ ID NO: 22564 - protein, 183 aa, Homo sapiens
MVAPGYVVTVLTWPGTNPTLSSILLNSHTDVVPVFKEHWSHDPFEAFKDSEGYIYARGAQDMKCVSIQYLEAVRRLKVEGHRFPRTIHMTFVPDEEVGGHQGMELFVQRPEFHALRAGFALDEGIANPTDAFTVFYSERSPWWVRVTSTGRPGHASRFMEDTAAEKLVRGTPGGSLGVQEALS

SEQ ID NO: 22565 - protein, 242 aa, Homo sapiens
MKRPKLKKASKRMTCHKRYKIQKKVREHHRKLRKEAKKRGHKKPRKDPGVPNSAPFKEALLREAELRKQRLEELKQQQKLDRQKELEKKRKLETNPDIKPSNVEPMEKEFGLCKTENKAKSGKQNSKKLYCQELKKVIEASDVVLEVLDARDPLGCRCPQVEEAIVQSGQKKLVLILNKSDLVPKENLESWLNYLKKELPTVVFRASTKPKDKGKITKVSFISGKKCDSFRFWLKYDECTKS

SEQ ID NO: 22566 - protein, 198 aa, Homo sapiens
MEKVASAVLFPCKYATTGCSLTLHHTEKPEHEDICEYRPYSCPCPGASCKWQGSLEAVMSHLMHAHKSITTLQGEDIVFLATDINLPGAVDWVMMQSCFGHHFMLVLEKQEKYEGHQQFFAIVLLIGTRKQAENFAYRLELNGNRRRLTWEATPRSIHDGVAAAIMNSDCLVFDTAIAHLFADNGNLGINVTISTCCP

SEQ ID NO: 22567 - protein, 327 aa, Homo sapiens
MPRKGTQPSTARRREEGPPPPSPDGASSDAEPEPPSGRTESPATAAETASEELDNRSLEEILNSIPPPPPPAMTNEAGAPRLMITHIVNQNFKSYAGEKILGPFHKRFSCIIGPNGSGKSNVIDSMLFVFGYRAQKIRSKKLSVLIHNSDEHKDIQSCTVEVHFQKIIDKEGDDYEVIPNSNFYVSRTACRDNTSVYHISGKKKTFKDVGNLLRSHGIDLDHNRFLILQGEVEQIAMMKPKGQTEHDEGMLEYLEDIIGCGRLNEPIKVLCRRVEILNEHRGEKLNRVKMVEKEKDALEGEKNIAIEFLTLENEIFRKKNHVCQYYM

SEQ ID NO: 22568 - protein, 19 aa, Homo sapiens
MDLILDVNIQIYPVDLGKY

SEQ ID NO: 22569 - protein, 120 aa, Homo sapiens
MSGGSADYNREHGGPEGMDPDGVIESNWNEIVDNFDDMNLKESLLRGIYAYGFEKPSAIQQRAIIPCIKGYDVIAQAQSGTGKTATFAISILQQLEIEFKETQALVLAPTRELAQQVLIV

SEQ ID NO: 22570 - protein, 121 aa, Homo sapiens
MSGGSADYNSREHGGPEGMDPDGVIESNWNEIVDNFDDMNLKESLLRGIYAYGFEKPSAIQQRAIIPCIKGYDVIAQAQSGTGKTATFAISILQQLEIEFKETQALVLAPTRELAQQVLIV

SEQ ID NO: 22571 - protein, 77 aa, Homo sapiens
MPQLTKHLSENIKDKLKEMGFDRYKMVVQVVIGEQRGEGVFMASRCFWDADTDNYTHDVFMNDSLFCVVAAFGCFYY

SEQ ID NO: 22572 - protein, 113 aa, Homo sapiens
MSGRLWSKAIFAGYKRGLRNQREHTALLKIEGVYARDETEFYLGKRCAYVYKAKNNTVTPGGKPNKTRVIWGKVTRAHGNSGMVRAKFRSNLPAKAIGHRIRVVSMVFSKMDV

SEQ ID NO: 22573 - protein, 99 aa, Homo sapiens
MGKGDPNKPRGKMSSYAFFVQTCREEHKKKHPDSSVNFAEFSKKCSERWKTMSAKEKSKFEDMAKSDKARYDREMKNYVPPKGDKKGKKKDPNAPKRPP

SEQ ID NO: 22574 - protein, 133 aa, Homo sapiens
MKYPCNTFGKPHTEVKINRKTAFGTTTLVLTDFSNKSSTLERKTKQNQILDEEFQNSPPASVCLNDIQHPSKKTTNDITQPSSKVNISPTISSESKLFSPAHKKPKTAQYSSPELKSCNPGYSNRYDAFNLGL

SEQ ID NO: 22575 - protein, 164 aa, Homo sapiens [sequence omitted]

SEQ ID NO: 22576 - protein, 153 aa, Homo sapiens [sequence omitted]

SEQ ID NO: 22577 - protein, 275 aa, Homo sapiens
MSIVLCFHFREEVNEKLRDTADGTFLVRDASTKMHGDYTLTLRKGGNNKLIKIFHRDGKYGFSDPLTFSSVVELINHYRNESLAQYNPKLDVKLLYPVSKYQQDQVVKEDNIEAVGKKLHEYNTQFQEKSREYDRLYEEYTRTSQEIQMKRTAIEAFNETIKIFEEQCQTQERYSKEYIEKFKREGNEKEIQRIMHNYDKLKSRISEIIDSRRRLEEDLKKQAAEYREIDKRMNSIKPDLIQLRKTRDQYLMWLTQKGVRQKKLNEWLGNENTEE

SEQ ID NO: 22578 - protein, 148 aa, Homo sapiens
MIGLKAKLYHKQRHAEKIQMKKTIKMHEKRNTKQKNDEKTPQGAVPAYLLDREGQSRAKVLSNMIKQKRKEKAGKWEVPLPKVRAQGETEVLKVIRTGKRKKKAWKRMVTKVCFVGDGFTRKPPKYERFIRPMENMPRLPTILKMMDV

SEQ ID NO: 22579 - protein, 97 aa, Homo sapiens
MYKETVYSAFNLLMHYPPPSGAGQHPQPQPPLHKANQPPHGVPQLSLYEHFNSPHPTPAPADISQKQVHRPLQTPDLSGFYSLTSGSMGQLPHTVSW

SEQ ID NO: 22580 - protein, 244 aa, Homo sapiens
MYKETVYSAFNLLMHYPPPSGAGQHPQPQPPLHKANQPPHGVPQLSLYEHFNSPHPTPAPADISQKQVHRPLQTPDLSGFYSLTSGSMGQLPHTVSWPSPPLYPLSPSCGYRQHFPAPTAAPGAPYPRFTHPSLMLGSGVPGHPAAIPHPAIVPPSGKQELQPFDRNLKTQAESKAEKEAKKPTIKKPLNAFMLYMKEMRAKVIAECTLKESAAINQILGRRVRPWAGGLAGMLPDHLQPGAAC

SEQ ID NO: 22581 - protein, 15 aa, Homo sapiens
MSCSREDIQTMRFHS

SEQ ID NO: 22582 - protein, 50 aa, Homo sapiens
MAPRKGKEKKEEQVISLGPQVAEGENVFGVCHIFASFNDTFVHVTDLSGK

SEQ ID NO: 22583 - protein, 148 aa, Homo sapiens
MSFPKAPLKRFNDPSGCAPSPGAYDVKTLEVLKGPVSFQKSQRFKQQKESKQNLNVDKDTTLPASARKVKSSESKIRVLLQERGAQDRRIQDLETELEKMEARLNAALREKTSLSANNATLEKQLIELTRTNELLKSKVSEPHDNIYN

SEQ ID NO: 22584 - protein, 142 aa, Homo sapiens
MPKAKGKTRRQKFGYSVNRKRLNRNARRKAAPRIECSHIRHAWDHAKSVRQNLAEMGLAVDPNRAVPLRKRKVKAMEVDIEERPKELVRKPYVLNGGCGPYIPLGHCPALWEAGKGPKMSSFCRWRNQVSEGRSELVQSSQS

SEQ ID NO: 22585 - protein, 6 aa, Homo sapiens
MLVCFQ

SEQ ID NO: 22586 - protein, 63 aa, Homo sapiens
MEPCASGISQRKGTTTRRFVGHTKDVLSVAFSSDNRQIVSGSRDKTIKLWNTLGVCKYTVQVK

SEQ ID NO: 22587 - protein, 145 aa, Homo sapiens
MTEQMTLRGTLKGHNGWVTQIATTPQFPDMILSASRDKTIIMWKLTRDETNYGIPQRALRGHSHFVSDVVISSDGQFALSGSWDGTLRLWDLTTGTTTRRFVGHTKDVLSVAFSSDNRQIVSGSRDKTIKLWNTLGVCKYTVQVK

SEQ ID NO: 22588 - protein, 232 aa, Homo sapiens
MDENNGLLLLELNPPNPWDLQPRSPEELAFGEVQITYLTHACMDLKLGDKRMVFDPWLIGPAFARGWWLLHEPPSDWLERLCQADLIYISHLHSDHLSYPTLKKLAGRRPDIPIYVGNTERPVFWNLNQSGVQLTNINVVPFGIWQQVDKNLRFMILMDGVHPEMDTCIIVEYKGHKILNIVDCTRPNGGRLPMKVALMMSDFAGGASGFPMTFSGGKFTVYIHCLPECVTT

SEQ ID NO: 22589 - protein, 137 aa, Homo sapiens
MERKVLALQARKKRTKAKKDKAQRKSETQHRGSAPHSESDLPEQEEEILGSDDDEQEDPNDYCKGGYHLVKIGDLFNGRYHVIRKLGWGHFSTVWLSWDIQGKKFVAMKVVKSAEHYTETALDEIRLLKSVSIRLYV

SEQ ID NO: 22590 - protein, 136 aa, Homo sapiens
MELLCCEGTRHAPRAGPDPRLLGDQRVLQSLLRLEERYVPRASYFQCVQREIKPHMRKMLAYWMLEDWEVLVLGKLKWDLAAVIAHDFLAFILHRLSLPRDRQALVKKHAQTFLALCATGKSPMHIFAKLEKSEDL

SEQ ID NO: 22591 - protein, 150 aa, Homo sapiens
MAASQAVEEMRSRVVLGEFGVRNVHTTDFPGNYSGYDDAWDQDRFEKNFRVDVVHMDENSLEFDMVGIDAAIANAFRRILLAEVPTMAVEKVLVYNNTSIVQDEILAHRLGLIPIHADPRLFEYRNQGEKMKFWEKWTIWVQILVDCDVG

SEQ ID NO: 22592 - protein, 142 aa, Homo sapiens
MTVKTEAAKGTLTYSRMRGMVAILIAFMKQRRMGLNDFIQKIANNSYACKHPEVQSILKISQPQEPELMNANPSPPPSPSQQINLGPSSNPHAKPSDFHFLKVIGKGSFGKVISNLKIFWYTSFMSSFVFSLDEDRKMIFLN

SEQ ID NO: 22593 - protein, 176 aa, Homo sapiens
MFSEQAAQRAHTLLSPPSANNATFARVPVATYTNSSQPFRLGERSFSRQYAHIYATRLIQMRPFLENRAQQHWGSGVGVKKLCELQPEEKCCVVGTLFKAMPLQPSILREVSEEHNLLPQPPRSKYIHPDDELVLEDELQRIKLKGTIDVSKLVTGREPNERMWVMQGLSWLCLAP

SEQ ID NO: 22594 - protein, 131 aa, Homo sapiens
MFSEQAAQRAHTLLSPPSANNATFARVPVATYTNSSQPFRLGERSFSRQYAHIYATRLIQMRPFLENRAQQHWGSGVGVKKLCELQPEEKCCVVGTLFKAMPLQPSILREVSEEVRQGATQWGRQADLASH

SEQ ID NO: 22595 - protein, 73 aa, Homo sapiens
MAEALIKHKPSVKGRAQLGVQAFADALLIIPKVLAQNSGFDLQETLVKIQAEHSESGQLVGVDLNTGKRMQLL

SEQ ID NO: 22596 - protein, 152 aa, Homo sapiens [sequence omitted]

SEQ ID NO: 22597 - protein, 109 aa, Homo sapiens
MVIVAAAADMEPKQWRRESQGSSLTIFYCPCARLSYELRFGFFLQSLQGHKFLALKTGWPITDSVIPSVTTIHTGVKLSDSHTSWRTGDSLELLTVMFSKLTWKILHEA

SEQ ID NO: 22598 - protein, 657 aa, Homo sapiens
MNSTTTTAVSASSTSSSAVSTPPLIKPVLMSKSVPPSPEKILNGKGILPTTIDKKHQNGTKNSNKPYRRLSEREFDPNKHCGVLDPETKKPCTRSLTCKTHSLSHRRAVPGRKKQFDLLLAEHKAKSREKEVKDKEHLLTSTREILPSQSGPAQDSLLGSSGSSGPEPKVASPAKSRPPNSVLPRPSSANSISSSTSSNHSGHTPEPPLPPVGGDLASRLSSDEGEMDGADESEKLDCQFSTHHPRPLAFCSFGSRLMGRGYYVFDRRWDRFRFALNSMVEKHLNSQMWKKIPPAADSPLPSPAAHITTPVPASVLQPFSNPSAVYLPSAPISSRLTSSYIMTSAMLSNAAFVTSPDPSALMSHTTAFPHVAATLSIMDSTFKAPSAVSPIPAVIPSPSHKPSKTKTSKSSKVKDLSTRSDESPSNKKRKPQSSTSSSSSSSSSSLQTSLSSPLSGPHKKNCVLNASSALNSYQAAPPYNSLSVHNSNNGVSPLSAKLEPSGRTSLPGGPADIVRQVGAVGGSSDSCPLSVPSLALHAGDLSLASHNAVSSLPLSFDKSEGKKRKNSSSSSKACKITKMPGMNSVHKKNPPSLLAPVPDPVNSTSSRQVRDLLAPPSPALGGRGSWAAPLLSRAAPTGNTSLIPVLVFPEGSFHPLL

SEQ ID NO: 22599 - protein, 431 aa, Homo sapiens
MGQTGKKSEKGPVCWRKRVKSEYMRLRQLKRFRRADEVKSMFSSNRQKILERTEILNQEWKQRRIQPVHILTSVSSLRGTRECSVTSDLDFPTQVIPLKTLNAVASVPIMYSWSPLQQNFMVEDETVLHNIPYMGDEVLDQDGTFIEELIKNYDGKVHGDRECGFINDEIFVELVNALGQYNDDDDDDDGDDPEEREEKQKDLEDHRDDKESRPPRKFPSDKIFEAISSMFPDKGTAEELKEKYKELTEQQLPGALPPECTPNIDGPNAKSVQREQSLHSFHTLFCRRCFKYDCFLHPFHATPNTYKRKNTETALDNKPCGPQCYQHLEGAKEFAAALTAERIKTPPKRPGGRRRGRLPNNSSRPSTPTINVLESKDTDSDREAGTETGGENNDKEEEEKKDETSSSSGKTRLITGFYCSVKVRVVRIKDV

SEQ ID NO: 22600 - protein, 545 aa, Homo sapiens
MGNIQKKLTGKAEGGKRPARGAPQRGQTPEAGADKRSPRRASAAAAAGGGATGHPGGGQGAENPAGLKSQGNELFRSGQFAEAAGKYSAAIALLEPAGSEIADDLSILYSNRAACYLKEGNCSGCIQDCNRALELHPFSMKPLLRRAMAYETLEQYGKAYVDYKTVLQIDCGLQLANDSVNRLSRILMELDGPNWREKLSPIPAVPASVPLQAWHPAKEMISKQAGDSSSHRQQGITDEKTFKALKEEGNQCVNDKNYKDALSKYSECLKINNKECAIYTNRALCYLKLCQFEEAKQDCDQALQLADGNVKAFYRRALAHKGLKNYQKSLIDLNKVILLDPSIIEAKMELEEVTRLLNLKDKTAPFNKEKERRKIEIQEVNEGKEEPGRPAGEVSMGCLASEKGGKSSRSPEDPEKLPIAKPNNAYEFGQIINALSTRKDKEACAHLLAITAPKDLPMFLSNKLEGDTFLLLIQSLKNNLIEKDPSLVYQHLLYLSKAERFKMMLTLISKGQKELIEQLFEDLSDTPNNHFTLEDIQALKRQYEL

SEQ ID NO: 22601 - protein, 63 aa, Homo sapiens
MQNWDAAMEDLTRLKETIDNNSVSSPLQSLQQRTWLIHWSLFVFFNHPKGRDNIIDLFLYQPQ

SEQ ID NO: 22602 - protein, 123 aa, Homo sapiens
MVDFAMDVYKNLYSDDIPHALREKRTTVVAQLKQLQAETEPIVKMFEDPETTRQMQSTRDGRMLFDYLADKHGFRQEYLDTLYRYAKFQYECGNYSGAAEYLYFFRVLMESCYVAQADLKLLA

SEQ ID NO: 22603 - protein, 91 aa, Homo sapiens
MRHPLTGGGMTVAFKDIKLWRKLLKGIPDLYDDAAIFEAKKSFYWARKTSHSFVVNILAQALYELFSATDGKCRHFLVNITQLQIFSVGKE

SEQ ID NO: 22604 - protein, 217 aa, Homo sapiens
MGVFAQADGSAYIEQGNTKALAVVYGPHEIRGSRARALPDRALVNCQYSSATFSTGERKRRPHGDRKSCEMGLQLRQTFEAAILTQLHPRSQIDIYVQVLQADGGTYAACVNAATLAVLDAGIPMRDFVCACSAGFVDGTALADLSHVEEAAGGPQLALALLPASGQIALLEMDARLHEDHLERVLEAAAQAARDVHTLLDRVVRQHVREASILLGD

SEQ ID NO: 22605 - protein, 833 aa, Homo sapiens
MKDHHGAVRHYEEELRLRSGNVLEEAKTWLNIALSREEAGDAYELLAPCFQKALSCAQQAQRPQLQRQVLQHLHTVQLRLQPQEAPETETRLRELSVAEDEDEEEEAEEAAATAESEALEAGEVELSEGEDDTDGLTPQLEEDEELQGHLGRRKGSKWNRRNDMGETLLHRACIEGQLRRVQDLVRQGHPLNPRDYCGWTPLHEACNYGHLEIVRFLLDHGAAVDDPGGQGCEGITPLHDALNCGHFEVAELLLERGASVTLRTRKGLSPLETLQQWVKLYRRDLDLETRQKARAMEMLLQAAASGQDPHSSQAFHTPSSLLFDPETSPPLSPCPEPPSNSTRLPEASQAHVRVSPGQAAPAMARPRRSRHGPASSSSSSEGEDSAGPARPSQKRPRCSATAQRVAAWTPGPASNREAATASTSRAAYQAAIRGVGSAQSRLGPGPPRGHSKALAPQAALIPEEECLAGDWLELDMPLTRSRRPRPRGTGDNRRPSSTSGSDSEESRPRARAKQVRLTCMQSCSAPVNAGPSSLASEPPGSPSTPRVSEPSGDSSAAGQPLGPAPPPPIRVRVQVQDHLFLIPVPHSSDTHSVAWLAEQAAQRYYQTCGLLPRLTLRKEGALLAPQDLIPDVLQSNDEVLAEVTSWDLPPLTDRYRRACQSLGQGEHQQVLQAVELQGLGLSFSACSLALDQAQLTPLLRALKLHTALRELRLAGNRLGDKCVAELVAALGTMPSLALLDLSSNHLGPEGLRQLAMGLPGQATLQSLEELDLSMNPLGDGCGQSLASLLHACPLLSTLRLQACGFGPSFFLSHQTALGSAFQGELTRHSLSTP

SEQ ID NO: 22606 - protein, 78 aa, Homo sapiens
MNQADPRLRAVCLWTLTSAAMSRGDNCTDLLALALESLWKRSRCMGTCIIYRQDGCLKTQSQTSRIQLLEALPGLQRR

SEQ ID NO: 22607 - protein, 22 aa, Homo sapiens
MEGNQARKEREQILLQPITVEL

SEQ ID NO: 22608 - protein, 115 aa, Homo sapiens
MDDKKKKRSPKPCLAQPAQAPGTLRRVPVPTSHSGSLALGLPHLPSPKQRAKFKRVGKEKCRPVLAGGGSGSAGTPLQHSFLTEVTDVYEMEGGLLNLLNDFHSGRLQAFAGRPQ

SEQ ID NO: 22609 - protein, 497 aa, Homo sapiens
MKYILVTGGVISGIGKGIIASSVGTILKSCGLHVTSIKIDPYINIDAGTFSPYEHGEVFVLDDGGEVDLDLGNYERFLDIRLTKDNNLTTGKIYQYVINKERKGDYLGKTVQVVPHITDAIQEWVMRQALIPVDEDGLEPQVCVIELGGTVGDIESMPFIEAFRQFQFKVKRENFCNIHVSLVPQPSSTGEQKTKPTQNSVRELRGLGLSPDLVVCRCSNPLDTSVKEKISMFCHVEPEQVICVHDVSSIYRVPLLLEEQGVVDYFLRRLDLPIERQPRKMLMKWKEMADRYDRLLETCSIALVGKYTKFSDSYASVIKALEHSALAINHKLEIKYIDSADLEPITSQEEPVRYHEAWQKLCSAHGVLVPGGFGVRGTEGKIQAIAWARNQKKPFLGVCLGMQLAVVEFSRNVLGWQDANSTEFDPTTSHPVVVDMPEHNPGQMGGTMRLGKRRTLFQTKNSVMRKLYGDADYLEERHRHRFEVRIPACWYSGKIVS

SEQ ID NO: 22610 - protein, 24 aa, Homo sapiens
MTGLALLYSGVFVAFWACALAVGS

SEQ ID NO: 22611 - protein, 36 aa, Homo sapiens
MPQPAPRREEVRRPRFALTLAMVEFPSSRQPRRRSS

SEQ ID NO: 22612 - protein, 102 aa, Homo sapiens
MPGGPIPPGFFQPFMSPRYAGGPRPPIRMGNQPPGGVPGTQPLLPNSMDPTRQQGHPNMGGSMQRMNPPRGMGPMGPGPQNYGSGMRPPPNSLGPAMPGINM

SEQ ID NO: 22613 - protein, 89 aa, Homo sapiens
MDLMGQLHRMNREEILAFIKSCQHECGGISASIGHDPHLLYTLSAVQILTLYDSINVIDVNKVVEYVKGLQKEDGSFAGDIWGPTKQLV

SEQ ID NO: 22614 - protein, 68 aa, Homo sapiens
MDLMGQLHRMNREEILAFIKSCQHECGGISASIGHDPHLLYTLSAVQVNTNQNCNDLDSMFSYFRVGN

SEQ ID NO: 22615 - protein, 669 aa, Homo sapiens
MYKGRLLSLGMKGRARGTAPKVTGTQAASPNVGALKVRENRVLSVPPDQRITLTDLFENAYGSSMKGRELEELKDNIEFRGHKPLNSITVSKKRNWLYQSTLRPLNLEEENKKCQDRSHLSISPVSLPKHQLSQSFLKSSKEYCTYVVCNATNSSLSKNCALDFNEENDADDEGEIWYNPIPEDDDLGISSALSFGEADSAVLKLPAVNLSMLSGSDLMKAERHTEDSLCSSEHAGDIQTTRSNGMNPIHPAHSTEFVQQYKQKLGHKTQEGIMVEDSPMLKSPFAGSGILAATNSTELGIMEPSSPNPSPVKKGSSINWSLPDKIKSPRTVRKLSMKMKKLPEFSRKLSVKGTLNYINSPDNTPSLSKYNCREVHHTDILPSGNTTTAAKRNVISRYHLDTSVSSQQSYQKKNSMSSKYSCKGGYLSDGDSPELTTKASKHGSENKFGKGKEIISNSCSKNEIDIDAFRHYSFSDQPKCSQYISGLMSVHFYGAEDLKPPRIDSKDVFCAIQVDSVNKARTALLTCRTTFLDMDHTFNIEIENAQHLKLVVFSWEPTPRKNRVCCHGTVVLPTLFRVTKTHQLAVKLEPRGLIYVKVTLMEQWENSLHGLDINQEPIIFGVDIQKVVEKENIGLMVPLLIQKCIMEIEKRGCQVLSYYGSLLLPLLID

SEQ ID NO: 22616 - protein, 75 aa, Homo sapiens
MAPLSEPNAVGIVIAHGSVGDAISVMVPDVYISDDGGYSWTKMLEGPHYYTILDSGGIIVAIEHSSRPINVIKYA

SEQ ID NO: 22617 - protein, 41 aa, Homo sapiens
MAVIYPFMQGLREAAFPAPGKTVTLKSFIPDSGTEVKVQRN

SEQ ID NO: 22618 - protein, 119 aa, Homo sapiens
MAFANLRKVLISDSLDPCCRKILQDGGLQVVEKQNLSKEELIAELQDCEGLIVRSATKVTADVINAAEKLQVVGRAGTGVDNVDLEAATRKGILVMNTPNGNSLSAAELTCGMIMCLAR

SEQ ID NO: 22619 - protein, 41 aa, Homo sapiens
MSFKREGDDWSQLNVLKKRRVGDLLASYIPEDEALMLRDGR

SEQ ID NO: 22620 - protein, 18 aa, Homo sapiens
MEFPLAQICPQAPSRSQT

SEQ ID NO: 22621 - protein, 167 aa, Homo sapiens
MTCELVEILGGANTPYEKGVFKLEVIIPERYPFEPPQIRFLTPIYHPNIDSAGRICLDVLKLPPKGAWRPSLNIATVLTSIQLLMSEPNPDDPLMADISSEFKYNKPAFLKNARQWTEKHARQKQKADEEEMLDNLPEAGDSRVHNSTQKRKASQLVGIEKKFHPDV

SEQ ID NO: 22622 - protein, 43 aa, Homo sapiens
MLDITMKESLTTREIRRQEAIYEMSRGEQDLIEDLKLARKVSK

SEQ ID NO: 22623 - protein, 217 aa, Homo sapiens
MTPKLGRGVLEGDDVLFYDESPPPRPKLSALAEAKKLAAITKLRAKGQVLTKTNPNSIKKKQKDPQDILEVKERVEKNTMFSSQAEDELEPARKKRREQLAYLESEEFQKILKAKSKHTGILKEAEAEMQERYFEPLVKKEQMEEKMRNIREVKCRVVTCKTVGEGGGCSNPWALCGAFVTRQHVENLWDLGPYLVMCQLIRLESKGRRWPRTRLPA

SEQ ID NO: 22624 - protein, 20 aa, Homo sapiens
MQLKLILWIEKLLELLYKVF

SEQ ID NO: 22625 - protein, 116 aa, Homo sapiens
MPSLWDRFSSSSTSSSPSSLPRTPTPDRPPRSAWGSATREEGFDRSTSLESSDCESLDSSNSGFGPEEGERWAGADATRGAGKVGKPRCWKGSEPPWLPIPSGPRLLGGRGNWSIR

SEQ ID NO: 22626 - protein, 10 aa, Homo sapiens
MSITWELAAL

SEQ ID NO: 22627 - protein, 83 aa, Homo sapiens
MQFEDDDHGPPAPPNPFSHLTEGELEEYKRTIERKQQGLEDAEQELLSDDASSVSQIQSQTQSPQNVPEKLEGTQCNFPHSIH

SEQ ID NO: 22628 - protein, 158 aa, Homo sapiens
MEEERLRMREHVMNEVDTNKDRLVTLEEFLKATEKKEFLEPDSWETLDQQQFFTEEELKEYENIIALQENELKKKADELQKQKEELQRQHDQLEAQKLEYHQVIQQMEQKKLQQGIPPSGPAGELKFEPPMKYNQEEIEKQSELDDELHRLSCRIFIP

SEQ ID NO: 22629 - protein, 129 aa, Homo sapiens
MHKKKVTHVALNPCCDWFLATASVDQTVKIWDLRQVRGKASFLYSLPHRHPVNAACFSPDGARLLTTDQKSEIRVYSASQWDCPLGLIPHPHRHFQHLTPIKVSGGGKELAEGGCDHEAGAGLPTVGKG

SEQ ID NO: 22630 - protein, 372 aa, Homo sapiens
MGTTAPGPIHLLELCDQKLMEFLCNMDNKDLVWLEEIQEEAERMFTREFSKEPELMPKTPSQKNRRKKRRISYVQDENRDPIRRRLSRRKSRSSQLSSRRLRSKDSVEKLATVVGENGSVLRRVTRAAAAAAAATMALAAPSSPTPESPTMLTKKPEDNHTQCQLVPVVEIGISERQNAEQHVTQLMSTEPLPRTLSPTPASATAPTSQGIPTSDEESTPKKSKARILESITVSSLMATPQDPKGQGVGTGRSASKLRIAQVSPGPRDSPAFPDSPWRERVLAPILPDNFSTPTGSRTDSQSVRHSPIAPSSPSPQVLAQKYSLVAKQESVVRRASRRLAKKTAEEPAASGRIICHSYLERLLNVEVPQKVG

SEQ ID NO: 22631 - protein, 569 aa, Homo sapiens
MHPWYIPSSQLAAKLLHIYQQSRKDNSNSLQVKTCHLVRYWISAFPAEFDLNPELAEQIKELKALLDQEGNRRHSSLIDIDSVPTYKWKRQVTQRNPVGQKKRKMSLLFDHLEPMELAEHLTYLEYRSFCKILFQDYHSFVTHGCTVDNPVLERFISLFNSVSQWVQLMILSKPTAPQRALVITHFVHVAEKLLQLQNFNTLMAVVGGLSHSSISRLKETHSHVSPETIKLWEGLTELVTATGNYGNYRRRLAACVGFRFPILGVHLKDLVALQLALPDWLDPARTRLNGAKMKQLFSILEELAMVTSLRPPVQANPDLLSLLTVSLDQYQTEDELYQLSLQREPRSKSSPTSPTSCTPPPRPPVLEEWTSAAKPKLDQALVVEHIEKMVESVFRNFDVDGDGHISQEEFQIIRGNFPYLSAFGDLDQNQDGCISREEMVSYFLRSSSVLGGRMGFVHNFQESNSLRPVACRHCKALILGIYKQGLKCRACGVNCHKQCKDRLSVECRRRAQSVSLEGSAPSPSPMHSHHHRAFSFSLPRPGRRGSRPPAEIREEEVQTVEDGVFDIHL

SEQ ID NO: 22632 - protein, 568 aa, Homo sapiens
MHPWYIPSSQLAAKLLHIYQQSRKDNSNSLQVKTCHLVRYWISAFPAEFDLNPELAEQIKELKALLDQEGNRRHSSLIDIDSVPTYKWKRQVTQRNPVGQKKRKMSLLFDHLEPMELAEHLTYLEYRSFCKILFQDYHSFVTHGCTVDNPVLERFISLFNSVSQWVQLMILSKPTAPQRALVITHFVHVAEKLLQLQNFNTLMAVVGGLSHSSISRLKETHSHVSPETIKLWEGLTELVTATGNYGNYRRRLAACVGFRFPILGVHLKDLVALQLALPDWLDPARTRLNGAKMKQLFSILEELAMVTSLRPPVQANPDLLSLLTVSLDQYQTEDELYQLSLQREPRSKSSPTSPTSCTPPPRPPVLEEWTSAAKPKLDQALVVEHIEKMVESVFRNFDVDGDGHISQEEFQIIRGNFPYLSAFGDLDQNQDGCISREEMVSYFLRSSSVLGGRMGFVHNFQESNSLRPVACRHCKALILGIYKQGLKCRACGVNCHKQCKDRLSVECRRRAQSVSLEGSAPSPSPMHSHHHRAFSFSLPRPGRRGSRPPEIREEEVQTVEDGVFDIHL

SEQ ID NO: 22633 - protein, 258 aa, Homo sapiens [sequence omitted]

SEQ ID NO: 22634 - protein, 286 aa, Homo sapiens
MASIFKNFVITYNRTYESKEEARWRLSVFVNNMVRAQKIQALDRGTAQYGVTKFSDLTEEEFRTIYLNTLLRKEPGNKMKQAKSVGDLAPPEWDWRSKGAVTKVKDQGMCGSCWAFSVTGNVEGQWFLNQGTLLSLSEQELLDCDKMDKACMGGLPSNAYSAIKNLGGLETEDDYSYQGHMQSCNFSAEKAKVYINDSVELSQNEQKLAAWLAKRGPISVAINAFGMQFYRHGISRPLRPLCSPWLIDHAVLLVGYGNREFRCLSCIQPGHRQGWDHSISGPLEGK

SEQ ID NO: 22635 - protein, 102 aa, Homo sapiens
METVSGYEAKVYSATNVELVTRTRTEHLSDQDKSRSKAGKTPFQSFLGMAQQHSSHTGAPVQQAASPTNPTAISPEEYFDPNFSLESRNIGRPIEMSSKVQR

SEQ ID NO: 22636 - protein, 114 aa, Homo sapiens
MKWVEMTSHWEKTMSRRYKKVKMQCRKGIPSALRARCWPLLCGAHVCQKNSPGTYQELAEAPGDPQWMETIGRDLHRQFPLHEMFVSPQGHGYEAGDAQGPPAPQAPGAPAHFP

SEQ ID NO: 22637 - protein, 241 aa, Homo sapiens
MAVPFVEDWDLVQTLGEGAYGEVQLAVNRVTEEAVAVKIVDMKRAVDCPENIKKEICINKMLNHENVVKFYGHRREGNIQYLFLEYCSGGELFDRIEPDIGMPEPDAQRFFHQLMAGVVYLHGIGITHRDIKPENLLLDERDNLKISDFGLATVFRYNNRERLLNKMCGTLPYVAPELLKRREFHAEPVDVWSCGIVLTAMLAGELPWDQPSDSCQEYSDWKEKKTYLNPWKKIDSAPLGN

SEQ ID NO: 22638 - protein, 341 aa, Homo sapiens
MSNNLSELDTKIQEKAMKVDMDICRRIDITAKLCDVAQQRNCEDMIQMFQVPSMGGRKRERKAAVEEDTSLSESEGPRQPDGDEEESTALSINEEMQRMLNQLREYDFEDDCDSLTWEETEETLLLWEDFSGYAMAAAEAQGEVTSAPGLRALWLCLSSLKPTPPLLSLLCPPMWLSSSTCVSPLPLSFCFSFSSFFNQTSSLSLSLTWPFGMRPIPSLLGWPPPLPFLLQQQEDSLEKVIKDTESLFKTREKEYQETIDQIELELATAKNDMNRHLHEYMEMCSMKRGLDVQMETCRRLITQSGDRKSPAFTAVPLSDPPPPPSEAEDSDRDVSSDSSMR

SEQ ID NO: 22639 - protein, 101 aa, Homo sapiens
MGSAKSVPVTPARPPPHNKHLARVADPRSPSAGILRTPIQVESSPQPGLPAGEQLEGLKHAQDSDPRSPTLGIARTPMKTSSGGKRWAQGMLMKLSSIILG

SEQ ID NO: 22640 - protein, 60 aa, Homo sapiens
MNGRYSSNEFIVEVNVLHSMNRVAHPSHVLSSQQFLHRGHQPPPEMAGHSLASSHRNSST

SEQ ID NO: 22641 - protein, 107 aa, Homo sapiens
MPSPAPVAQPLPGHVVPCPSPFGRAQRVPSPGPPTLTSYSVLRRLTVQPKTRFTPMPSTPRVQQAQWLRGVSPQSCSEDPALPWVSIRSFPLLRSLALCCQPGGPGV

SEQ ID NO: 22642 - protein, 34 aa, Homo sapiens [sequence omitted]

SEQ ID NO: 22643 - protein, 32 aa, Homo sapiens
MGSFRINPDGSQSVVEVTVTVPPNKVAHSGFG

SEQ ID NO: 22644 - protein, 7 aa, Homo sapiens
MGPGSAR

SEQ ID NO: 22645 - protein, 283 aa, Homo sapiens
MEVNCLTLKDLISPRQPRLDFAVEDGENAQKENIFVDRSRMAPKTPIKNEPIDLSKQKKFTPERNPITPVKFVDRQQAEPWTPTANLKMLISAASPDIRDREKKKGLFRPIENKDDAFTDSLQLDVVGDSAVDEFEKQRPSRKQKSLGLLCQKFLARYPSYPLSTEKTTISLDEVAVSLGVERRRIYDIVNVLESLHLVSRVAKNQYGWHGRHSLPKTLRNLQRLGEEQKYEEQMAYLQQKELDLIDYKFGERKKDGDPDSQEQQLLDFSEPDCPSCESIVTS

SEQ ID NO: 22646 - protein, 1972 aa, Homo sapiens
MSGLHLVKRGREHKKLDLHRDFTVASPAEFVTRFGGDRVIEKVLIANNGIAAVKCMRSIRRWAYEMFRNERAIRFVVMVTPEDLKANAEYIKMADHYVPVPGGPNNNNYANVELIVDIAKRIPVQAVWAGWGHASENPKLPELLCKNGVAFLGPPSEAMWALGDKIASTVVAQTLQVPTLPWSGSGLTVEWTEDDLQQGKRISVPEDVYDKGCVKDVDEGLEAAERIGFPLMIKASEGGGGKGIRKAESAEDFPILFRQVQSEIPGSPIFLMKLAQHARHLEVQILADQYGNAVSLFGRDCSIQRRHQKIVEEAPATIAPLAIFEFMEQCAIRLAKTVGYVSAGTVEYLYSQDGSFHFLELNPRLQVEHPCTEMIADVNLPAAQLQIAMGVPLHRLKDIRLLYGESPWGVTPISFETPSNPPLARGHVIAARITSENPDEGFKPSSGTVQELNFRSSKNVWGYFSVAATGGLHEFADSQFGHCFSWGENREEAISNMVVALKELSIRGDFRTTVEYLINLLETESFQNNDIDTGWLDYLIAEKVQAEKPDIMLGVVCGALNVADAMFRTCMTDFLHSLERGQVLPADSLLNLVDVELIYGGVKYILKVARQSLTMFVLIMNGCHIEIDAHRLNDGGLLLSYNGNSYTTYMKEEVDSYRITIGNKTCVFEKENDPTVLRSPSAGKLTQYTVEDGGHVEAGSSYAEMEVMKMIMTLNVQERGRVKYIKRPGAVLEAGCVVARLELDDPSKVHPAEPFTGELPAQQTLPILGEKLHQVFHSVLENLTNVMSGFCLPEPVFSIKLKEWVQKLMMTLRHPSLPLLELQEIMTSVAGRIPAPVEKSVRRVMAQYASNITSVLCQFPSQQIATILDCHAATLQRKADREVFFINTQSIVQLVQRYRSGIRGYMKTVVLDLLRRYLRVEHHFQQAHYDKCVINLREQFKPDMSQVLDCIFSHAQVAKKNQLVIMLIDELCGPDPSLSDELISILNELTQLSKSEHCKVALRARQILIASHLPSYELRHNQVESIFLSAIDMYGHQFCPENLKKLILSETTIFDVLPTFFYHANKVVCMASLEVYVRRGYIAYELNSLQHRQLPDGTCVVEFQFMLPSSHPNRMTVPISITNPDLLRHSTELFMDSGFSPLCQRMGAMVAFRRFEDFTRNFDEVISCFANVPKDTPLFSEARTSLYSEDDCKSLREEPIHILNVSIQCADHLEDEALVPILRTFVQSKKNILVDYGLRRITFLIAQEKEFPKFFTFRARDEFAEDRIYRHLEPALAFQLELNRMRNFDLTAVPCANHKMHLYLGAAKVKEGVEVTDHRFFIRAIIRHSDLITKEASFEYLQNEGERLLLEAMDELEVAFNNTSVRTDCNHIFLNFVPTVIMDPFKIEESVRYMVMRYGSRLWKLRVLQAEVKINIRQTTTGSAVPIRLFITNESGYYLDISLYKEVTDSRSGNIMFHSFGNKQGPQHGMLINTPYVTKDLLQAKRFQAQTLGTTYIYDFPEMFRQALFKLWGSPDKYPKDILTYTELVLDSQGQLVEMNRLPGGNEVGMVAFKMRFKTQEYPEGRDVIVIGNDITFRIGSFGPGEDLLYLRASEMARAEGIPKIYVAANSGARIGMAEEIKHMFHVAWVDPEDPHKGFKYLYLTPQDYTRISSLNSVHCKHIEEGGESRYMITDIIGKDDGLGVENLRGSGMIAGESSLAYEEIVTISLVTCRAIGIGAYLVRLGQRVIQVENSHIILTGASALNKVLGREVYTSNNQLGGVQIMHYNGVSHITVPDDFEGVYTILEWLSYMPKDNHSPVPIITPTDPIDREIEFLPSRAPYDPRWMLAGRPHPTLKGTWQSGFFDHGSFKEIMAPWAQTVVTGRARLGGIPVGVIAVETRTVEVAVPADPANLDSEAKIIQQAGQVWFPDSAYKTAQAVKDFNREKLPLMIFANWRGFSGGMKGCLGTWRDVSWWKIRAMLPMHIGEGSV

SEQ ID NO: 22647 - protein, 115 aa, Homo sapiens
MPSSSVGPARPSLRGSSEQLAWLRGIFSYRSSPPPSPQQSSPNQTRSRQVGLGFCQPPGQQGWVGRLGPVSAVLPGPRPGWEGTLVLISRLHFCASLCCHKQRSQPHFLDGESGH

SEQ ID NO: 22648 - protein, 207 aa, Homo sapiens
MKPVETHSLQMLHTILSTGSPLKAQSYEYVYRCIKSSILLGSISGGTDIISCFMGHNFSLPVYKGEIQARNLGMAVEAWNEEGKAVWGESGELVCTKPIPCQPTHFWNDENGNKYRKAYFSKFPGIWAHGDYCRINPKTGGIVMLGRSDGTLNPNGVRFGSSEIYNIVYAQRQESGSCRQTDHRWKSRGARRCFLEPRDPGSVPGHP

SEQ ID NO: 22649 - protein, 195 aa, Homo sapiens
MRRGESLDNLDSPRSNSWRQPPWLNQPTGFYASSSVQDFSRPPPQLVSTSNRAYMRNPSSSVPPPSAGSVKTSTTGVATTQSPTPRSHSPSASQSGSQLRNRSVSGKRICSYCNNILGKGAAMIIESLGLCYHLHCFKCVACECDLGGSSSGAEVRIRNHQLYCNDCYLRFKCKRANQRENFLPFKEATGSHAFP

SEQ ID NO: 22650 - protein, 17 aa, Homo sapiens
MQMICIRGRILTRSSVP

SEQ ID NO: 22651 - protein, 281 aa, Homo sapiens
MYVLPFSMGPVGSPLSRIGVQLTDSAYVVASMRIMTRLGTPVLQALGDGDFVKCLHSVGQPLTGQGEPVSQWPCNPEKTLIGHVPDQREIISFGSGYGGNSLLGKKCFALRIASRLARDEGWLAEHMLILGITSPAGKKRYVAAAFPSACGKTNLAMMRPALPGWKVECVGDDIAWMRFDSEGEGLSDHTLGSGSCQSLGVSSLVFTMTLSVRKFPEHPTLLHSSGSPATRETAFPHQILGPSQDRGGWSRTFFGLTSQVFLVWSFLSFTSPNRSTPGHQP

SEQ ID NO: 22652 - protein, 58 aa, Homo sapiens
METDKQEKKEVHKCGFLPGNEKVLSLLALVKPEVWTLKEKCILVSLGNGGSRKRRHTR

SEQ ID NO: 22653 - protein, 26 aa, Homo sapiens
MMTVLINTEKRKLRRNGISLYITTVC

SEQ ID NO: 22654 - protein, 38 aa, Homo sapiens
MVMAAVTRTTPVKLRSGRYIQKVPRRNFLLEKMKKQYL

SEQ ID NO: 22655 - protein, 32 aa, Homo sapiens
MLSRSFWAHDGRYIQKVPRRNFLLEKMKKQYL

SEQ ID NO: 22656 - protein, 88 aa, Homo sapiens
MNLPNVLMIGRDPLSGKSMEEIKKVLLLVLGCAVQCERKEEFIERIKQLDIETQAGIVAHIQEVGAWPRGGLSCGLLLLWWPGGKTSL

SEQ ID NO: 22657 - protein, 7 aa, Homo sapiens
MTSDFGS

SEQ ID NO: 22658 - protein, 21 aa, Homo sapiens
MPQSSQPKTRGSSPSPREALN

SEQ ID NO: 22659 - protein, 42 aa, Homo sapiens
MRLYLRKGRGETRICKIYDSPCLPEAEAMFAINADGVGDAKD

SEQ ID NO: 22660 - protein, 44 aa, Homo sapiens
MESTCGPSAQGWILFCSLIAKHCLIWNKSSWVIPISPYHMSTTS

SEQ ID NO: 22661 - protein, 46 aa, Homo sapiens
MRMAWREDKSHNQFCDMSNNGPEDFISSSRKNSRQTARISSNPERR

SEQ ID NO: 22662 - protein, 120 aa, Homo sapiens
MFKDVPLTAEEVEFVVEKALSMFSKMNLQEIPPLVYQLLVLSSKGSRKSVLEGIIAFFSALDKQHNEEQSGDELLDVVTVPSGELRHVEGTIILHIVFAIKLDYELGRELVKHLKVASNL

SEQ ID NO: 22663 - protein, 483 aa, Homo sapiens
MWEEYPDVYGVRRSNRSRQEPSRFNIKEEASSGSESGSPKRRGQRQLKKQEKWKQEPSEDEQEQGTSAESEPEQKKVKARRPVPRRTVPKPRVKKQPKTQRGKRKKQDSSDEDDDDDEAPKRQTRRRAAKNVSYKEDDDFETDSDDLIEMTGEGVDEQQDNSETIEKVLDSRLGKKGATGASTTVYAIEANGDPSGDFDTEKDEGEIQYLIKWKGWSYIHSTWESEESLQQQKVKGLKKLENFKKKEDEIKQWLGKVSPEDVEYFNCQQELASELNKQYQIVERVIAVKTSKSTLGQTDFPAHSRKPAPSNEPEYLCKWMGLPYSECSWEDEALIGKKFQNCIDSFHSRNNSKTIPTRECKALKQRPRFVALKKQPAYLGGENLELRDYQLEGLNWLAHSWCKNNSVILADEMGLGKTIQTISFLSYLFHQHQLYGPFLIVVPLSTLTSWQREFEIWAPEINVVVYIGDLMSRNTVCKQKELG

SEQ ID NO: 22664 - protein, 142 aa, Homo sapiens
MGRKKIQITRIMDERNRQVTFTKRKFGLMKKAYELSVLCDCEIALIIFNSSNKLFQYASTDMDKVLLKYTEYNEPHESRTNSDIVETLRKKGLNGCESPDADDYFEHSPLSEDRFSKLNEDSDFIFKRGPVSTFTLPLLFIC

SEQ ID NO: 22665 - protein, 172 aa, Homo sapiens
MRGEQGAAGARVLQFTNCRILRGGKLLREDLWVRGGRILDPEKLFFEERRVADERRDCGGRILAPGFIDVQINGGFGVDFSQATEDVGSGVALVARRILSHGVTSFCPTLVTSPPEVYHKVVPQIPVKSGGPHGAGVLGEWLTSSPPPPWEAPAGPVGSPHPSRCPAGGEGR

SEQ ID NO: 22666 - protein, 27 aa, Homo sapiens
MKHLNEGLITLNSAFVNLICRYVQTTS

SEQ ID NO: 22667 - protein, 152 aa, Homo sapiens
MGPPSLHSPTPSLGPLGALVLSSQHTSPDSCKSPWTLKAVRAARQAADFTLKVEVECSSLQEAVQAAEAGADLVLLDNFKPEELHPTATVLKAQFPSVAVEASGGITLDNLPQFCGPHIDVISMGMLTQAAPALDFSLKLFAKEVAPVPKIH

SEQ ID NO: 22668 - protein, 19 aa, Homo sapiens
MRPHERGAPGGLQQQRLRG

SEQ ID NO: 22669 - protein, 23 aa, Homo sapiens
MAAVQAAEVKVDGSEPKLSKKWW

SEQ ID NO: 22670 - protein, 165 aa, Homo sapiens
MKQKALSAAVADSLTNSPRDSPAVSLSEPATQQASLDVEKPVGVAASLSDIPKAAEPGKLEQVRPQELSRVQELAPASGEKARLSEAPGGKKSLSMLHYIRGAAPKDIPVPLSHSTNGKSKPWEPFVAEEFAHQFHESVLQSTQKALQKHKGNEAASPCSALGCG

SEQ ID NO: 22671 - protein, 235 aa, Homo sapiens
MHVETCACLRLLARLHYIMGDYAEALSNQQKAVLMSERVMGTEHPNTIQEYMHLALYCFASSQLSTALSLLYRARYLMLLVFGEDHPEMALLDNNIGLVLHGVMEYDLSLRFLENALAVSTKYHGPKALKVALSHHLVARVYESKAEFRSALQHEKEGYTIYKTQLGEDHEKTKESSEYLKCLTQQAVALQRTMNEIYRNGSSANIPPLKFTAPSMASVLEQLNVINGILFIPLR

SEQ ID NO: 22672 - protein, 70 aa, Homo sapiens [sequence omitted]

SEQ ID NO: 22673 - protein, 23 aa, Homo sapiens
MGNMNSHPKTVWGGLNETTFPKL

SEQ ID NO: 22674 - protein, 92 aa, Homo sapiens
MRGKTFRFEMQRDLVSFPLSPAVRVKLVSAGFQTAEELLEVKPSELSKEHCRWEPLHPETYKYEAGGGHLLCTSLYDMSGPVLFTEEDGTEF

SEQ ID NO: 22675 - protein, 10 aa, Homo sapiens
MGIREKHPQN

SEQ ID NO: 22676 - protein, 95 aa, Homo sapiens
MPSRTIGRSRGAIISQYYNRTVQLRCRSSRPLLGNFVRSAWPSLRLYDLELDPTALEEEEKQSLLVKELQSLAVAQRDHMLRGMPLSLAEKRSLR

SEQ ID NO: 22677 - protein, 97 aa, Homo sapiens
MSANGAVWGRVRSRLRAFPERLAACGAEAAAYGRCVQASTAPGGRLSKDFCAREFEALRSCFAAAVGGRGPLPPFPALPLQEPAGPGFPLLSRWFKV

SEQ ID NO: 22678 - protein, 186 aa, Homo sapiens
MPVAGSELPRRPLPPAAQERDAEPRPPHGELQYLGQIQHILRCGVRKDDRTGTGTLSVFGMQARYSLRDEFPLLTTKRVFWKGVLEELLWFIKGSTNAKELSSKGVKIWDANGSRDFLDSLGFSTREEGDLGPVYGFQWRHFGAEYRDMESDYSGQGVDQLQRVIDTIKTNPDDRRIIMCAWNPRG

SEQ ID NO: 22679 - protein, 210 aa, Homo sapiens
MKPPAACAGDMADAASPCSVVNDLRWDLSAQQIEERTRELIEQTKRVYDQVGTQEFEDVSYESTLKALADVEVTYTVQRNILDFPQHVSPSKDIRTASTEADKKLSEFDVEMSMREDVYQRIVWLQEKVQKDSLRPEAARYLERLIKLGRRNGLHLPRETQENIKRIKKKLSLLCIDFNKNLNEDTTFLPFTLQELVAGPPFPPPSSLHT

SEQ ID NO: 22680 - protein, 55 aa, Homo sapiens
MTLPLPEFPALFHLIQLQLALRHGLAARRAGPAAGPAAAQRLTVAQHSHSAHRAG

SEQ ID NO: 22681 - protein, 532 aa, Homo sapiens
MENGTGPYGEERPREVQETTVTEGAAKIAFPSANEVFYNPVQEFNRDLTCAVITEFARIQLGAKGIQIKVPGEKDTQKVVVDLSEQEEEKVELKESENLASGDQPRTAAVGEICEEGLHVLEGLAASGLRSIRFALEVPGLRSVVANDASTRAVDLIRRNVQLNDVAHLVQPSQADARMLMYQHQRVSERFDVIDLDPYGSPATFLDAAVQAVSEGGLLCVTCTDMAVLAGNSGETCYSKYGAMALKSRACHEMALRIVLHSLDLRANCYQRFVVPLLSISADFYVRVFVRVFTGQAKVKASASKQALVFQCVGCGAFHLQRLGKASGVPSGRAKFSAACGPPVTPECEHCGQRHQLGGPMWAEPIHDLDFVGRVLEAVSANPGRFHTSERIRGVLSVITEELPDVPLYYTLDQLSSTIHCNTPSLLQLRSALLHADFRVSLSHACKNAVKTDAPASALWDIMRCWEKECPVKRERLSETSPAFRILSVEPRLQANFTIREDANPSSRQRGLKRFQANPEANWGPRPRARPG

SEQ ID NO: 22682 - protein, 152 aa, Homo sapiens
MAGLNSLEAVKRKIQALQQQADEAEDRAQGLQRELDGERERREKAEGDVAALNRRIQLVEEELDRAQERLATALQKLEEAEKAADESERGMKVIENRAMKDEEKMEIQEMQLKEAKHIAEEADRKYEEVARKLVILEGELERAEERAEVSEL

SEQ ID NO: 22683 - protein, 35 aa, Homo sapiens
MRVFLSGMPELRLGLNDKVLFDNTGREYPCQGPCP

SEQ ID NO: 22684 - protein, 131 aa, Homo sapiens
MARGGWRRLRRLLSAGQLLFQGRALLVTNTLGCGALMAAGDGVRQSWEIRARPGQVFDPRRSASMFAVGCSMGPFLHYWYLSLDRLFPASGLRGFPNVLKKVLVDQLVASPLLGVWYFLGKEPPKPRLCLS

SEQ ID NO: 22685 - protein, 15 aa, Homo sapiens
MSSGKTADSMTTAIS

SEQ ID NO: 22686 - protein, 7 aa, Homo sapiens
MMWLWKA

SEQ ID NO: 22687 - protein, 266 aa, Homo sapiens [sequence omitted]

SEQ ID NO: 22688 - protein, 23 aa, Homo sapiens
MKKPRREGRGKQRSQGWLFLRDT

SEQ ID NO: 22689 - protein, 61 aa, Homo sapiens
MRERRDLEVLDVPVDNLKEHGTWDMTAPSIPSGGRQSLSVRQHPAFMRTVCCLLTEPPVVY

SEQ ID NO: 22690 - protein, 13 aa, Homo sapiens
MKVALSPPQGSRT

SEQ ID NO: 22691 - protein, 146 aa, Homo sapiens
MYSEANRRETFTSWPHVGYRWAQPDPMAQAGFYHQPASSGDDRAMCFTCSVCLVCWEPTDEPWSEHERHSPNCPFVKGEHTQNVPLSVTLATSPAQFPCTDGTDRISCFGSGSCPHFLAAATKRGKICIWDVSKLMKVCLNFEVTN

SEQ ID NO: 22692 - protein, 120 aa, Homo sapiens
MECDLMETDILESLEDLGYKGPLLEDGALSQAVSAGASSPEFTKLCAWLVSELRVLCKLEENVQATNSPSEAEEFQLEVSGLLGEMNCPYLSLTSGDVTKRLLIQKNCLLLLSKFMATRI

SEQ ID NO: 22693 - protein, 542 aa, Homo sapiens
MALGERIGWPLLEPQSSCQTAVLRVPARAAGAARTPPPGGARRPRPHEVPLQVTGRRLWKNVYDELGGSPGSTSAATCTRRHYERLVLPYVRHLKGEDDKPLPTSKPRKQYKMAKENRGDDGATERPKKAKEERRMDQMMPGKTKADAADPAPLPSQEPPRNSTEQQGLASGSSVSFVGASGCPEAYKRLLSSFYCKGTHGIMSPLAKKKLLAQVSKVEALQCQEEGCRHGAEPQASPAVHLPESPQSPKGLTENSRHRLTPQEGLQAPGGSLREEAQAGPCPAAPIFKGCFYTHPTEVLKPVSQHPRDFFSRLKDGVLLGPPGKEGLSVKEPQLVWGGDANRPSAFHKGGSRKGILYPKPKACWVSPMAKVPAESPTLPPTFPSSPGLGSKRSLEEEGAAHSGKRLRAVSPFLKEADAKKCGAKPAGSGLVSCLLGPALGPVPPEAYRGTMLHCPLNFTGTPGPLKGQAALPFSPLVIPAFPAHFLATAGPSPMAAGLMHFPPTSFDSALRHRLCPASSAWHAPPVTTYAAPHFFHLNTKL

SEQ ID NO: 22694 - protein, 406 aa, Homo sapiens
MDTPENVLQMLEAHMQSYKGNDPLGEWERYIQWVEENFPENKEYLITLLEHLMKEFLDKKKYHNDPRFISYCLKFAEYNSDLHQFFEFLYNHGIGTLSSPLYIAWAGHLEAQGELQHASAVLQRGIQNQAEPREFLQQQYRLFQTRLTETHLPAQARTSEPLHNVQVLNQMITSKSNPGNNMACISKNQGSELSGVISSACDKESNMERRVITISKSEYSVHSSLASKVDVEQVVMYCKEKLIRGESEFSFEELRAQKYNQRRKHEQWVNEDRHYMKRKEANAFEEQLLKQKMDELHKKLHQVVETSHEDLPASQERSEVNPARMGPSVGSQQELRAPCLPVTYQQTPVNMEKNPREAPPVVPPLANAISAALVSPATSQSIAPPVPLKAQTVTDSMFAVASKDAG

SEQ ID NO: 22695 - protein, 58 aa, Homo sapiens
MAQSCKDGCGSLISPWLTCVCNAAAVARGKDTASDSNSDSLLQCVTLSQSQISAFSQL

SEQ ID NO: 22696 - protein, 108 aa, Homo sapiens
MLRREARLRREYLYRKAREEAQRSAQERKERLRRALEENRLIPTELRREALALQGSLEFDDAGGEGVTSHVDDEYRWAGVEDPKVMITTSRDPSSRLKMFAKVLVSRE

SEQ ID NO: 22697 - protein, 77 aa, Homo sapiens
MKSEDEVGSLIEYEFRVINLGKPLTNLGTATLNIQWPKEISNGKWLLYLVKVESKGLEKVTCEPQKEINSLNLTVCR

SEQ ID NO: 22698 - protein, 550 aa, Homo sapiens [sequence omitted]

SEQ ID NO: 22699 - protein, 1065 aa, Homo sapiens
MIGVGDMVLLEPLNEETFINNLKKRFDHSEIYTYIGSVVISVNPYRSLPIYSPEKVEEYRNRNFYELSPHIFALSDEAYRSLRDQDKDQCILITGESGAGKTEASKLVMSYVAAVCGKGAEVNQVKEQLLQSNPVLEAFGNAKTVRNDNSSRFGKYMDIEFDFKGDPLGGVISNYLLEKSRVVKQPRGERNFHVFYQLLSGASEELLNKLKLERDFSRYNYLSLDSAKVNGVDDAANFRTVRNAMQIVGFMDHEAESVLAVVAAVLKLGNIEFKPESRVNGLDESKIKDKNELKEICELTGIDQSVLERAFSFRTVEAKQEKVSTTLNVAQAYYARDALAKNLYSRLFSWLVNRINESIKAQTKVRKKVMGVLDIYGFEIFEDNSFEQFIINYCNEKLQQIFIELTLKEEQEEYIREDIEWTHIDYFNNAIICDLIENNTNGILAMLDEECLRPGTVTDETFLEKLNQVCATHQHFESRMSKCSRFLNDTSLPHSCFRIQHYAGKVLYQVEGFVDKNNDLLYRDLSQAMWKASHALIKSLFPEGNPAKINLKRPPTAGSQFKASVATLMKNLQTKNPNYIRCIKPNDKKAAHIFNEALVCHQIRYLGLLENVRVRRAGYAFRQAYEPCLERYKMLCKQTWPHWKGPARSGVEVLFNELEIPVEEYSFGRSKIFIRNPRTLFKLEDLRKQRLEDLATLIQKIYRGWKCRTHFLLMKKSQIVIAAWYRRYAQQKRYQQTKSSALVIQSYIRGWKARKILRELKHQKRCKEAVTTIAAYWHGTQVRREYRKFFRANAGKKIYEFTLQRIVQKYFLEMKNKMPSLSPIDKNWPSRPYLFLDSTHKELKRIFHLWRCKKYRDQFTDQQKLIYEEKLEASELFKDKKALYPSSVGQPFQGAYLEINKNPKYKKLKDAIEEKIIIAEVVNKINRANGKSTSRIFLLTNNNLLLADQKSGQIKSEVPLVDVTKVSMSSQNDGFFAVHLKEGSEAASKGDFLFSSDHLIEMATKLYRTTLSQTKQKLNIEISDEFLVQFRQDKVCVKFIQGNQKNGSVPTCKRKNNRLLEVAVP

SEQ ID NO: 22700 - protein, 140 aa, Homo sapiens
MDRKAVETHLLRNPHLVSDYRVLMAEIGEDLDKSDVSSLIFLMKDYMGRGKISKEKSFLDLVVELEKLNLVAPDQLDLLEKCLKNIHRIDLKTKIQKYKQSVQGAGTSYRNVLQAAIQKSLKDPSNNFRVSLEKTYGIPA

SEQ ID NO: 22701 - protein, 69 aa, Homo sapiens
MNLKDLSKIRGRKRGKPGTHFTQSDRAPQKRVRSRGKKEKRNALSITKHLISCALCCIFSNKPISLIVL

SEQ ID NO: 22702 - protein, 30 aa, Homo sapiens
MAAETQTLNFGPECLLQMCLDPEYGILMEF

SEQ ID NO: 22703 - protein, 43 aa, Homo sapiens [sequence omitted]

SEQ ID NO: 22704 - protein, 148 aa, Homo sapiens
MTLFYSKKSQRPERKTFQVKLETRQITWSRGADKIEGAIDIREIKEIRPGKTSRDFDRYQEDPAFRPDQSHCFVILYGMEFRLKTLSLQATSEDEVNMWIKGLTWLMEDTLQAPTPLQIERWLRKQFYSVDRNREDRPRWARPTGQRS

SEQ ID NO: 22705 - protein, 58 aa, Homo sapiens
MKNEIAAVVFFFTRLVRKHDKLKKEAVERFAEKLTLILQEKYKNHWYPEKPSKGQAYR

SEQ ID NO: 22706 - protein, 554 aa, Homo sapiens
MLPHWRVLLFVASDVDALCACKILQALFQCDHVQYTLVPVSGWQELETAFLEHKEQFHYFILINCGANVDLLDILQPDEDTIFFVCDTHRPVNVVNVYNDTQIKLLIKQDDDLEVPAYEDIFRDEEEDEEHSGNDSDGSEPSEKRTRLEEEIVEQTMRRRQRREWEARRRDILFDYEQYEYHGTSSAMVMFELAWMLSKDLNDMLWWAIVGLTDQWVQDKITQMKYVTDVGVLQRHVSRHNHRNEDEENTLSVDCTRISFEYDLRLVLYQHWSLHDSLCNTSYTAARFKLWSVHGQKRLQEFLADMGLPLKQVKQKFQAMDISLKENLREMIEESANKFGMKDMRVQTFSIHFGFKHKFLASDVVFATMSLMESPEKDGSGTDHFIQALDSLSRSNLDKLYHGLELAKKQLRATQQTIASCLCTNLVISQGPFLYCSLMEGTPDVMLFSRPASLSLLSKHLLKSFVCSTKNRRCKLLPLVMAAPLSMEHGTVTVVGIPPETDSSDRKNFFGRAFEKAAESTSSRMLHNHFDLSVIELKAEDRSKFLDALISLLS

SEQ ID NO: 22707 - protein, 98 aa, Homo sapiens [sequence omitted]

SEQ ID NO: 22708 - protein, 347 aa, Homo sapiens
MVKNIKRYRKELEKEGSPLAEKDENGKYLYLDFVPVTYMLPADYNLFVEEFRKSPSSTWIMKPCGKAQGKGIFLINKLSQIKKWSRDSKTSSFVSQSNKEAYVISLYINNPLLIGGRKFDLRLYVLVSTYRPLRCYMYKLGFCRFCTVKYTPSTSELDNMFVHLTNVAIQKHGEDYNHIHGGKWTVSNLRLYLESTRGKEVTSKLFDEIHWIIVQSLKAVAPVMNNDKHCFECYGYDIIIDDKLKPWLIEVNASPSLTSSTANDRILKYNLINDTLNIAVPNGEIPDCKWNKSPPKEVLGNYEILYDEELAQGDGADRELRSRQGQSLGPRAGRSRDSGRAVLTTWK

SEQ ID NO: 22709 - protein, 278 aa, Homo sapiens
MRRIECYENSYESLDEDLDRDLSYIKIMDVGQSYVVNRVADHIQSRIVYYLMNIHVTPRSIYLCRHGESELNLKGRIGGDPGLSPRGREFAKSLAQFISDQNIKDLKVWTSQMKRTIQTAEALGVPYEQWKVLNEIDAGVCEEMTYEEIQDNYPLEFALRDQDKYRYRYPKGESYEDLVQRLEPVIMELERQENVLVICHQAVMRCLLAYFLDKAAEQLPYLKCPLHTVLKLTPVAYGCKVESIFLNVAAVNTHRDRPQNVDISRPPEEALVTVPAHQ

SEQ ID NO: 22710 - protein, 147 aa, Homo sapiens
MPIRALCTICSDFFDHSRDVAAIHCGHTFHLQCLIQWFETAPSRTCPQCRIQVGKRTIINKLFFDLAQEEENVLDAEFLKNELDNVRAQLSQKDKEKRDSQVIIDTLRDTLEERNATVVSLQQALGKAEMLCSTLKVGPQVLWVQNS

SEQ ID NO: 22711 - protein, 97 aa, Homo sapiens [sequence omitted]

SEQ ID NO: 22712 - protein, 135 aa, Homo sapiens
MEALCSVLRTLATDSNKYRAKADRRRQRSTFRAVLHSVEGGECEEEIVRFGFEVLYMDSWARHRIYAAFKEVLGSGMHHHLQNNELLRDIFGLGPVLLLDATALKACKVPRFEKVCTLGHLSLPPIPISWRPGIL

SEQ ID NO: 22713 - protein, 41 aa, Homo sapiens
MAGRLAKMVARVACGSRRLAKSQRSAPAGVSLAWSPHPPGP

SEQ ID NO: 22714 - protein, 43 aa, Homo sapiens
MNKTGFVPSNYVERKNSARKASIVKNLKDTLGKIFFKRKATLF

SEQ ID NO: 22715 - protein, 668 aa, Homo sapiens
MTSSVCSPAGINSVSSTTASFGSFPVHSPITQGTPLTCSPNVENRGSRSHSPAHASNVGSPLSSPLSSMKSSISSPPSHCSVKSPVSSPNNVTLRSSVSSPANINNSRCSVSSPSNTNNRSTLSSPAASTVGSICSPVNNAFSYTASGTSAGSSTLRDVVPSPDTQEKGAQEVPFPKTEEVESAISNGVTGQLNIVQYIKPEPDGAFSSSCLGGNSKINSDSSFSVPIKQESTKHSCSGTSFKGNPTVNPFPFMDGSYFSFMDDKDYYSLSGILGPPVPGFDGNCEGSGFPVGIKQEPDDGSYYPEASIPSSAIVGVNSGGQSFHYRIGAQGTISLSRSARDQSFQHLSSFPPVNTLVESWKSHGDLSSRRSDGYPVLEYIPENVSSSTLRSVSTGSSRPSKICLVCGDEASGCHYGVVTCGSCKVFFKRAVEGQHNYLCAGRNDCIIDKIRRKNCPACRLQKCLQAGMNLGGFKNLPLEDQITLIQYSWMCLSSFALSWRSYKHTNSQFLYFAPDLVFNEEKMHQSAMYELCQGMHQISLQFVRLQLTFEEYTIMKVLLLLSTIPKDGLKSQAAFEEMRTNYIKELRKMVTKCPNNSGQSWQRFYQLTKLLDSMHDLVSDLLEFCFYTFRESHALKVEFPAMLVEIISDQLPKVESGNAKPLYFHRK

SEQ ID NO: 22716 - protein, 65 aa, Homo sapiens [sequence omitted]

SEQ ID NO: 22717 - protein, 82 aa, Homo sapiens
MLLNDFLNDQNRDKNSIYSGLEAFGDVKLEDTYFDRDVEKAFMKASSELFSQKTKASLLVSNQNGNMYTSSVYGSLASVLAQ

SEQ ID NO: 22718 - protein, 123 aa, Homo sapiens
MSMKCASQLKEEEEKEKKHQKERQRQFKLKLLLESYTQQKKEQEEFLRLEKEIREKAEKAEKRKNAADEISRFQERDLHKLELKILDRQAKEDEKSQKQRRLAKLKEKVLCTEIIFIVIILIP

SEQ ID NO: 22719 - protein, 44 aa, Homo sapiens [sequence omitted]

SEQ ID NO: 22720 - protein, 29 aa, Homo sapiens
MWLQDLCQRMKHSSHELTKSKGEFAEILI

SEQ ID NO: 22721 - protein, 36 aa, Homo sapiens
MPKAKGKTRRQKFGYSVNRKRLNRNARRKAAPRIEW

SEQ ID NO: 22722 - protein, 73 aa, Homo sapiens
MEQSIEQTTEILLCLSPVEVASLKEGINFFRNKSTGKDYVLYKNKSRLRACKNMCKHQGGLFIKDIEDLAGSC

SEQ ID NO: 22723 - protein, 6 aa, Homo sapiens
MAPAQG

SEQ ID NO: 22724 - protein, 1202 aa, Homo sapiens [sequence omitted]

SEQ ID NO: 22725 - protein, 390 aa, Homo sapiens
MFPQELAQKIKGYQEQIASLNSKCKMLTMKAKHATMLLTVTEVEGLAEGTEDLDGELLPTPSAHPSVVMDIAYYQALSAERLQTDAAKIHPSTSASQEFYEPGLEPSATAKLGDLQRSWETLKNVISEKQRTLYEALERQQKYQDSLQSISTKMEAIELKLSESPEPGRSPESQMAEHQSFLQALMDEILMLQDEINELQSSLAEELVSESCEADPAEQLALQSTLTVLAERMSTIRMKASGKRQLLEEKLNDQLEEQRQEQALQRYRCEADELDSWLLSTKATLDTALSPPKEPMDMEAQLMDCQNMLVEIEQKVVALSELSVHNENLLLEGKAHTKDEAEQLAGKLRRLKGSLLELQRALHDKQLNMQVRVPAAGPQLKVGTLFTCSF

SEQ ID NO: 22726 - protein, 98 aa, Homo sapiens
MERSLHDALCVVKRVLESKSVVPGGGAVEAALSIYLENYATSMGSREQLAIAEFARSLLVIPNTLAVNAAQDSTDLVAKLRAFHNEAQVNPERKNLKW

SEQ ID NO: 22727 - protein, 134 aa, Homo sapiens
MALKDYALEKEKVKKFLQEFYQDDELGKKQFKYGNQLVRLAHREQVALYVDLDDVAEDDPELVDSICENARRYAKLFADAVQELLPQYKEREVVNKDVLDVYIEHRLMMEQRSRDPGMVRSPQNQYPAELMRRL

SEQ ID NO: 22728 - protein, 18 aa, Homo sapiens
MSQDGGQCGIDVSILEAL

SEQ ID NO: 22729 - protein, 628 aa, Homo sapiens
MSKSVPPSPEKILNGKGILPTTIDKKHQNGTKNSNKPYRRLSEREFDPNKHCGVLDPETKKPCTRSLTCKTHSLSHRRAVPGRKKQFDLLLAEHKAKSREKEVKDKEHLLTSTREILPSQSGPAQDSLLGSSGSSGPEPKVASPAKSRPPNSVLPRPSSANSISSSTSSNHSGHTPEPPLPPVGGDLASRLSSDEGEMDGADESEKLDCQFSTHHPRPLAFCSFGSRLMGRGYYVFDRRWDRFRFALNSMVEKHLNSQMWKKIPPAADSPLPSPAAHITTPVPASVLQPFSNPSAVYLPSAPISSRLTSSYIMTSAMLSNAAFVTSPDPSALMSHTTAFPHVAATLSIMDSTFKAPSAVSPIPAVIPSPSHKPSKTKTSKSSKVKDLSTRSDESPSNKKRKPQSSTSSSSSSSSSSLQTSLSSPLSGPHKKNCVLNASSALNSYQAAPPYNSLSVHNSNNGVSPLSAKLEPSGRTSLPGGPADIVRQVGAVGGSSDSCPLSVPSLALHAGDLSLASHNAVSSLPLSFDKSEGKKRKNSSSSSKACKITKMPGMNSVHKKNPPSLLAPVPDPVNSTSSRQVRDLLAPPSPALGGRGSWAAPLLSRAAPTGNTSLIPVLVFPEGSFHPLL

SEQ ID NO: 22730 - protein, 26 aa, Homo sapiens
MSKRKAPQETLNGGITDMLTEKQHLL

SEQ ID NO: 22731 - protein, 531 aa, Homo sapiens [sequence omitted]

SEQ ID NO: 22732 - protein, 20 aa, Homo sapiens
MPRIPLGSREAKLRGTASCR

SEQ ID NO: 22733 - protein, 227 aa, Homo sapiens
MATNFLAHEKIWFDKFKYDDAERRFYEQMNGPVAGASRQENGASVILRDIARARENIQKSLAGSSGPGASSGTSGDHGELVVRIASLEVENQSLRGVVQELQQAISKLEARLNVLEKSSPGHRATAPQTQHVSPMRQVEPPAKKPATPAEDDEDDDIDLFGSDNEEEDKEAAQLREERLRQYAEKKAKKPALVAKSSILLDVKPVSGRGGASGGQALPWCPPSRLSL

SEQ ID NO: 22734 - protein, 101 aa, Homo sapiens
MEELIWEQYTVTLQKDSKRGFGIAVSGGRDNPHFENGETSIVISDVLPGGPADGLLQENDRVVMVNGTPMEDVLHSFAVQQLRKSGKVAAIVSTGFAFSLP

SEQ ID NO: 22735 - protein, 69 aa, Homo sapiens
MTDQTYCDRLVQDTPFLTGHGRLSEQQVDRIILQLNRYYPQILTNKEAEKVLRSSGTPRHPCVCGSVTS

SEQ ID NO: 22736 - protein, 104 aa, Homo sapiens
MEETRPEGSYFSKYSEAAELRSTASLLATQESDVMVGPFKLRSRKQRTLSMIEEEIRAAQEREEELKRQRQVLQSTQSPRTKNAPSLPSRTCYKTAPGPRGHTG

SEQ ID NO: 22737 - protein, 605 aa, Homo sapiens
MPGSDLERRAHLLLAQLEHSEPIEAEPEALSPVPALKPTPELELALTPARAPSPVPAPAPEPEPAPTPAPGSELEVAPAPAPELQQAPEPAVGLESAPAPALELEPAPEQDPAPSQTLELEPAPAPVPSLQPSWPSPVVAENGLSEEKPHLLVFPPDLVAEQFTLMDAELFKKVVPYHCLGSIWSQRDKKGKEHLAPTIRATVTQFNSVANCVITTCLGNRSTKAPDRARVVEHWIEVARECRILKNFSSLYAILSALQSNSIHRLKKTWEDVSRDSFRIFQKLSEIFSDENNYSLSRELLIKEGTSKFATLEMNPKRAQKRPKETGIIQGTVPYLGTFLTDLVMLDTAMKDYLYGRLINFEKRRKEFEVIAQIKLLQSACNNYSIAPDEQFGAWFRAVERLSETESYNLSCELEPPSESASNTLRTKKNTAIVKRWSDRQAPSTELSTSGSSHSKSCDQLRCGPYLSSGDIADALSVHSAGSSSSDVEEINISFVPESPDGQEKKFWESASQSSPETSGISSASSSTSSSSASTTPVAATRTHKRSVSGLCNSSSALPLYNQQVGDCCIIRVSLDVDNGNMYKSILVSRRGWPGCLPPLAANAP

SEQ ID NO: 22738 - protein, 329 aa, Homo sapiens
MRRRAEVELEYSRGLEKLAERFSSRGGRLGSSREHQSFRKEPSLLSPLHCWAVLLQHTRQQSRESAALSEVLAGPLAQRLSHIAEDVGRLVKKCCDTGFHLALGQVLRSYTAAESRTQASQVQGLGSLEEAVEALDPPGDKAKVLEVHATVFCPPLRFDYHPHDGDEVAEICVEMELRDEILPRAQNIQSRLDRQTIETEEVNKTLKATLQALLEVVASDDGDVLDSFQTSPSTESLKSTSSDPGSRQAGRRRGQQQETETFYLTVGRAGLVGGTRGGIAGAEGGAQARANTWGSSWGCPEAPGVSEWTEHPRQAAGQAREAAGGPSAR

SEQ ID NO: 22739 - protein, 74 aa, Homo sapiens [sequence omitted]

SEQ ID NO: 22740 - protein, 139 aa, Homo sapiens
MPQRSAPAARGGLAPRATPTAVEEEEPIDLSLADGKRLSDYSIGPNSKLNLVVKPLEKVLLEEGEAQRLADSPPPQVWQLISKVLARHFSAADASRVLEQLQRDYERSLSRLTLDDIERLASRFLHPEVTETMEKGFSK

SEQ ID NO: 22741 - protein, 40 aa, Homo sapiens
MGLGRCIWEVTAARTDRHCCRELATVFHAVAGGSRLHAPF

SEQ ID NO: 22742 - protein, 50 aa, Homo sapiens
MCGHLQVPFHLLCGQHEEQQAEGHPERLEAQPDVLWQKQGDDGGLGSEPI

SEQ ID NO: 22743 - protein, 220 aa, Homo sapiens
LHRSITRDPKPPGLRPSQRPMDDKKKKRSPKPCLAQPAQAPGTLRRVPVPTSHSGSLALGLPHLPSPKQRAKFKRVGKEKCRPVLAGGGSGSAGTPLQHSFLTEVTDVYEMEGGLLNLLNDFHSGRLQAFGKECSFEQLEHVREMQEKLARLHFSLDVCGEEEDDEEEEDGVTEGLPEEQKKTMADRNLDQLLSNLEDLSNSIQKLHLAENAEPEEQSAA

SEQ ID NO: 22744 - protein, 15 aa, Homo sapiens
LRPAPRRLVVRLCLG

SEQ ID NO: 22745 - protein, 18 aa, Homo sapiens
LPLSPPLLLPSFPSQNIP

SEQ ID NO: 22746 - protein, 6 aa, Homo sapiens
MSTAVS

SEQ ID NO: 22747 - protein, 21 aa, Homo sapiens
LAVFSSCSAVGGGGRNQSLGD

SEQ ID NO: 22748 - protein, 6 aa, Homo sapiens
KKTPWR

SEQ ID NO: 22749 - protein, 23 aa, Homo sapiens
TCTPMLCGGGLKYSRREWELLEF

SEQ ID NO: 22750 - protein, 6 aa, Homo sapiens
MRAFVV

SEQ ID NO: 22751 - protein, 40 aa, Homo sapiens
KSSFKSRFIGKDINEETPNLLLAVISIFVEVGSENRYTVD

SEQ ID NO: 22752 - protein, 16 aa, Homo sapiens
KTVPRRDVLMGPRPMD

SEQ ID NO: 22753 - protein, 33 aa, Homo sapiens
MSLLKAVPCFQAARLAFLCSRGLQVFLSVAAEL

SEQ ID NO: 22754 - protein, 20 aa, Homo sapiens
LPRRRPLAASPGLRAMPRAV

SEQ ID NO: 22755 - protein, 32 aa, Homo sapiens
IMVPLGRGEAAAAAVAGSRGDKSLRFHFSQLG

SEQ ID NO: 22756 - protein, 585 aa, Homo sapiens
VIKGKPIRIMWSQRDPSLRKSGVGNVFIKNLDKSIDNKALYDTFSAFGNILSCKVVCDENGSKGYAFVHFETQEAADKAIEKMNGMLLNDRKVFVGRFKSRKEREAELGAKAKEFTNVYIKNFGEEVDDESLKELFSQFGKTLSVKVMRDPNGKSKGFGFVSYEKHEDANKAVEEMNGKEISGKIIFVGRAQKKVERQAELKRKFEQLKQERISRYQGVNLYIKNLDDTIDDEKLRKEFSPFGSITSAKVMLEDGRSKGFGFVCFSSPEEATKAVTEMNGRIVGSKPLYVALAQRKEERKAHLTNQYMQRVAGMRALPANAILNQFQPAAGGYFVPAVPQAQGRPPYYTPNQLAQMRPNPRWQQGGRPQGFQGMPSAIRQSGPRPTLRHLAPTGNAPASRGLPTTTQRVGSECPDRLAMDFGGAGAAQQGLTDSCQSGGVPTAVQNLAPRAAVAAAAPRAVAPYKYASSVRSPHPAIQPLQAPQPAVHVQGQEPLTASMLAAAPPQEQKQMLGERLFPLIQTMHSNLAGKITGMLLEIDNSELLHMLESPESLRSKVDEAVAVLQAHHAKKEAAQKVGAVAAATS

SEQ ID NO: 22757 - protein, 201 aa, Homo sapiens
RKMSSGNAKIGHPAPNFKATAVMPDGQFKDISLSDYKGKYVVFFFYPLDFTFVCPTEIIAFSDRAEEFKKLNCQVIGASVDSHFCHLAWVNTPKKQGGLGPMNIPLVSDPKRTIAQDYGVLKADEGISFRGLFIIDDKGILRQITVNDLPVGRSVDETLRLVQAFQFTDKHGEVCPAGWKPGSDTIKPDVQKSKEYFSKQK

SEQ ID NO: 22758 - protein, 6 aa, Homo sapiens
MATCKT

SEQ ID NO: 22759 - protein, 15 aa, Homo sapiens
VVFPERVLSIALRIC

SEQ ID NO: 22760 - protein, 24 aa, Homo sapiens
MCVRACVRVCARASVWTRRWGQLS

SEQ ID NO: 22761 - protein, 199 aa, Homo sapiens
IARRGGPMAPLGGAPRLVLLFSGKRKSGKDFVTEALQSRLGADVCAVLRLSGPLKEQYAQEHGLNFQRLLDTSTYKEAFRKDMIRWGEEKRQADPGFFCRKIVEGISQPIWLVSDTRRVSDIQWFREAYGAVTQTVRVVALEQSRQQRGWVFTPGVDDAESECGLDNFGDFDWVIENHGVEQRLEEQLENLIEFIRSRL

SEQ ID NO: 22762 - protein, 24 aa, Homo sapiens
LVLSLQKVLPVPPALGTRLCIASP

SEQ ID NO: 22763 - protein, 19 aa, Homo sapiens
KMAAHKSGPAHVSAERTQQ

SEQ ID NO: 22764 - protein, 26 aa, Homo sapiens
LLHASRPPHLLPHSLDPALWAFTSVL

SEQ ID NO: 22765 - protein, 36 aa, Homo sapiens
MSPPAAAAAASASRARAPASRSRSRCLGHWPPDPRL

SEQ ID NO: 22766 - protein, 198 aa, Homo sapiens
IMQRASRLKRELHMLATEPPPGITCWQDKDQMDDLRAQILGGANTPYEKGVFKLEVIIPERYPFEPPQIRFLTPIYHPNIDSAGRICLDVLKLPPKGAWRPSLNIATVLTSIQLLMSEPNPDDPLMADISSEFKYNKPAFLKNARQWTEKHARQKQKADEEEMLDNLPEAGDSRVHNSTQKRKASQLVGIEKKFHPDV

SEQ ID NO: 22767 - protein, 18 aa, Homo sapiens
VALPLPFSLHGLAPRPST

SEQ ID NO: 22768 - protein, 15 aa, Homo sapiens
LRGFVRLPGGVNRGP

SEQ ID NO: 22769 - protein, 61 aa, Homo sapiens
LTDVNRLCNAVVQRVEAREEEEEETHMATLGQYLVHGRGFLLLTKLNSIIDQRWGFTVLTS

SEQ ID NO: 22770 - protein, 13 aa, Homo sapiens
ILEKPQTPSTVKT

SEQ ID NO: 22771 - protein, 17 aa, Homo sapiens
MEDCHQTCNLWSRFGEL

SEQ ID NO: 22772 - protein, 6 aa, Homo sapiens
LRRSPG

SEQ ID NO: 22773 - protein, 17 aa, Homo sapiens
KVCMCEGRERERRAPQR

SEQ ID NO: 22774 - protein, 24 aa, Homo sapiens
MQLPVGVTRPGAGDLRGEGTQLKA

SEQ ID NO: 22775 - protein, 187 aa, Homo sapiens
LNRCTAKRINPSETYPAFCTTCFPSEPGLVGPSVRAQAEDYALVSAVATLPKQVADHYDNFRIYKALEAVSSCVRQTNGFVQRHAPWKLNWESPVDAPWLGTVLHVALECLRVFGTLLQPVTPSLADKLLSRLGVSASERSLGELYFLPRFYGHPCPFEGRRLGPETGLLFPRLDQSRTWLVKAHRT

SEQ ID NO: 22776 - protein, 27 aa, Homo sapiens
ITPPLERILKEMKSALRNEVDCLLAFC

SEQ ID NO: 22777 - protein, 29 aa, Homo sapiens
VERLVWKRETISGWGSHFPDSQEKMDPSW

SEQ ID NO: 22778 - protein, 20 aa, Homo sapiens
MDFKNYYSLEKRPRTLEWTS

SEQ ID NO: 22779 - protein, 16 aa, Homo sapiens
MGPRLRGDLLWIKQWW

SEQ ID NO: 22780 - protein, 29 aa, Homo sapiens
LSLPASTLAAACQSSAASPSPTTEARGRQ

SEQ ID NO: 22781 - protein, 6 aa, Homo sapiens
MNPAYL

SEQ ID NO: 22782 - protein, 37 aa, Homo sapiens
MSFIFISSFFLMVKPCENELQYYSFNSHGHSHSEERS

SEQ ID NO: 22783 - protein, 7 aa, Homo sapiens
KSQLGRS

SEQ ID NO: 22784 - protein, 751 aa, Homo sapiens
RMSQWYELQQLDSKFLEQVHQLYDDSFPMEIRQYLAQWLEKQDWEHAANDVSFATIRFHDLLSQLDDQYSRFSLENNFLLQHNIRKSKRNLQDNFQEDPIQMSMIIYSCLKEERKILENAQRFNQAQSGNIQSTVMLDKQKELDSKVRNVKDKVMCIEHEIKSLEDLQDEYDFKCKTLQNREHETNGVAKSDQKQEQLLLKKMYLMLDNKRKEVVHKIIELLNVTELTQNALINDELVEWKRRQQSACIGGPPNACLDQLQNWFTIVAESLQQVRQQLKKLEELEQKYTYEHDPITKNKQVLWDRTFSLFQQLIQSSFVVERQPCMPTHPQRPLVLKTGVQFTVKLRLLVKLQELNYNLKVKVLFDKDVNERNTVKGFRKFNILGTHTKVMNMEESTNGSLAAEFRHLQLKEQKNAGTRTNEGPLIVTEELHSLSFETQLCQPGLVIDLETTSLPVVVISNVSQLPSGWASILWYNMLVAEPRNLSFFLTPPCARWAQLSEVLSWQFSSVTKRGLNVDQLNMLGEKLLGPNASPDGLIPWTRFCKENINDKNFPFWLWIESILELIKKHLLPLWNDGCIMGFISKERERALLKDQQPGTFLLRFSESSREGAITFTWVERSQNGGEPDFHAVEPYTKKELSAVTFPDIIRNYKVMAAENIPENPLKYLYPNIDKDHAFGKYYSRPKEAPEPMELDGPKGTGYIKTELISVSEVHPSRLQTTDNLLPMSPEEFDEVSRIVGSVEFDSMMNTV

SEQ ID NO: 22785 - protein, 10 aa, Homo sapiens
MCSTLKGWQQ

SEQ ID NO: 22786 - protein, 141 aa, Homo sapiens
LDKHMEMENISSEEVVEIEYVEKYTAPQPEQCMFHDDWISSIKGAEEWILTGSYDKTSRIWSLEGKSIMTIVGHTDVVKDVAWVKKDSLSCLLLSASMDQTILLWEWNVERNKVKALHCCRGHAGSVDSIAVDGSGTKVSS

SEQ ID NO: 22787 - protein, 810 aa, Homo sapiens
LAGFESLACSFPVVSRGFLASRSARSLSSEGGTMPDNRQPRNRQPRIRSGNEPRSAPAMEPDGRGAWAHSRAALDRLEKLLRCSRCTNILREPVCLGGCEHIFCSNCVSDCIGTGCPVCYTPAWIQDLKINRQLDSMIQLCSKLRNLLHDNELSDLKEDKPRKSLFNDAGNKKNSIKMWFSPRSKKVRYVVSKASVQTQPAIKKDASAQQDSYEFVSPSPPADVSERAKKASARSGKKQKKKTLAEINQKWNLEAEKEDGEFDSKEESKQKLVSFCSQPSVISSPQINGEIDLLASGSLTESECFGSLTEVSLPLAEQIESPDTKSRNEVVTPEKVCKNYLTSKKSLPLENNGKRGHHNRLSSPISKRCRTSILSTSGDFVKQTVPSENIPLPECSSPPSCKRKVGGTSGRKNSNMSDEFISLSPGTPPSTLSSSSYRRVMSSPSAMKLLPNMAVKRNHRGETLLHIASIKGDIPSVEYLLQNGSDPNVKDHAGWTPLHEACNHGHLKVVELLLQHKALVNTTGYQNDSPLHDAAKNGHVDIVKLLLSYGASRNAVNIFGLRPVDYTDDESMKSLLLLPEKNESSSASHCSVMNTGQRRDGPLVLIGSGLSSEQQKMLSELAVILKAKKYTEFDSTVTHVVVPGDAVQSTLKCMLGILNGCWILKFEWVKACLRRKVCEQEEKYEIPEGPRRSRLNREQLLPKLFDGCYFYLWGTFKHHPKDNLIKLVTAGGGQILSRKPKPDSDVTQTINTVAYHARPDSDQRFCTQYIIYEDLCNYHPERVRQGKVWKAPSSWFIDCVMSFELLPLDS

SEQ ID NO: 22788 - protein, 181 aa, Homo sapiens
TPCRRPAEMLRLPTVFRQMRPVSRVLAPHLTRAYAKDVKFGADARALMLQGVDLLADAVAVTMGPKGRTVIIEQSWGSPKVTKDGVTVAKSIDLKDKYKNIGAKLVQDVANNTNEEAGDGTTTATVLARSIAKEGFEKISKGANPVEIRRGVMLAVDAVIAELKKQSKPVTTPEEIAQVRT

SEQ ID NO: 22789 - protein, 42 aa, Homo sapiens
MWRPTCSTSSDCCTSKGGSTCLPLRWSSPGTALIRVTSSCWT

SEQ ID NO: 22790 - protein, 16 aa, Homo sapiens
MTTLKMNFLYSPDILI

SEQ ID NO: 22791 - protein, 1398 aa, Homo sapiens
LFSGSRGEGAMAPGCKTELRSVTNGQSNQPSNEGDAIKVFVRIRPPAERSGSADGEQNLCLSVLSSTSLRLHSNPEPKTFTFDHVADVDTTQESVFATVAKSIVESCMSGYNGTIFAYGQTGSGKTFTMMGPSESDNFSHNLRGVIPRSFEYLFSLIDREKEKAGAGKSFLCKCSFIEIYNEQIYDLLDSASAGLYLREHIKKGVFVVGAVEQVVTSAAEAYQVLSGGWRNRRVASTSMNRESSRSHAVFTITIESMEKSNEIVNIRTSLLNLVDLAGSERQKDTHAEGMRLKEAGNINRSLSCLGQVITALVDVGNGKQRHVCYRDSKLTFLLRDSLGGNAKTAIIANVHPGSRCFGETLSTLNFAQRAKLIKNKAVVNEDTQGNVSQLQAEVKRLKEQLAELASGQTPPESFLTRDKKKTNYMEYFQEAMLFFKKSEQEKKSLIEKVTQLEDLTLKKEKFIQSNKMIVKFREDQIIRLEKLHKESRGGFLPEEQDRLLSELRNEIQTLREQIEHHPRVAKYAMENHSLREENRRLRLLEPVKRAQEMDAQTIAKLEKAFSEISGMEKSDKNQQGFSPKAQKEPCLFANTEKLKAQLLQIQTELNNSKQEYEEFKELTRKRQLELESELQSLQKANLNLENLLEATKACKRQEVSQLNKIHAETLKIITTPTKAYQLHSRPVPKLSPEMGSFGSLYTQNSSILDNDILNEPVPPEMNEQAFEAISEELRTVQEQMSALQAKLDEEEHKNLKLQQHVDKLEHHSTQMQELFSSERIDWTKQQEELLSQLNVLEKQLQETQTKNDFLKSEVHDLRVVLHSADKELSSVKLEYSSFKTNQEKEFNKLSERHMHVQLQLDNLRLENEKLLESKACLQDSYDNLQEIMKFEIDQLSRNLQNFKKENETLKSDLNNLMELLEAEKERNNKLSLQFEEDKENSSKEILKVLEAVRQEKQKETAKCEQQMAKVQKLEESLLATEKVISSLEKSRDSDKKVVADLMNQIQELRTSVCEKTETIDTLKQELKDINCKYNSALVDREESRVLIKKQEVDILDLKETLRLRILSEDIERDMLCEDLAHATEQLNMLTEASKKHSGLLQSAQEELTKKEALIQELQHKLNQKKEEVEQKKNEYNFKMRQLEHVMDSAAEDPQSPKTPPHFQTHLAKLLETQEQEIEDGRASKTSLEHLVTKLNEDREVKNAEILRMKEQLREMENLRLESQQLIEKNWLLQGQLDDIKRQKENSDQNHPDNQQLKNEQEESIKERLAKSKIVEEMLKMKADLEEVQSALYNKEMECLRMTDEVERTQTLESKAFQEKEQLRSKLEEMYEERERTSQEMEMLRKQVECLAEENGKLVGHQNLHQKIQYVVRLKKENVRLAEETEKLRAENVFLKEKKRSES

SEQ ID NO: 22792 - protein, 8 aa, Homo sapiens
LTASGSRS

SEQ ID NO: 22793 - protein, 58 aa, Homo sapiens
LTWPGTNPTLSSILLNSHTDVVPVFKEHWSHDPFEAFKDSEGYIYARGAQDMKCVSIQ

SEQ ID NO: 22794 - protein, 12 aa, Homo sapiens
LAHATMLSGYNH

SEQ ID NO: 22795 - protein, 35 aa, Homo sapiens
MWNLWKRSLGFAKLRTKPSRANRIQRSCTAKNLKR

SEQ ID NO: 22796 - protein, 29 aa, Homo sapiens
LQRLPVFPTSRDGFAHYQASFPCRHREEG

SEQ ID NO: 22797 - protein, 98 aa, Homo sapiens
IMSGGSADYNSREHGGPEGMDPDGVIESNWNEIVDNFDDMNLKESLLRGIYAYGFEKPSAIQQRAIIPCIKDPKGNSGTWRLYGSHLSCLHWWNKCSK

SEQ ID NO: 22798 - protein, 10 aa, Homo sapiens
TRWHSETALT

SEQ ID NO: 22799 - protein, 20 aa, Homo sapiens
RSYRCSHRLIICLNVIGDAL

SEQ ID NO: 22800 - protein, 306 aa, Homo sapiens
LPPLPAAMAELGLNEHHQNEVINYMRFARSKRGLRLKTVDSCFQDLKESRLVEDTFTIDEVSEVLNGLQAVVHSEVESELINTAYTNVLLLRQLFAQAEKWYLKLQTDISELENRELLEQVAEFEKAEITSSNKKPILDVTKPKLAPLNEGGTAELLNKEILRLQEENEKLKSRLKTIEIQATNALDEKSKLEKALQDLQLDQGNQKDFIKAQDLSNLENTVAALKSEFQKTLNDKTENQKSLEENLATAKHDLLRVQEQLHMAEKELEKKFQQTAAYRNMKEILTKKNDQIKDLRKRLAQYEPED

SEQ ID NO: 22801 - protein, 63 aa, Homo sapiens
LGSGMHHHLQNNELLRDIFGLGPVLLLDATALKACKVPRFEKVCTLGHLSLPPIPISWRPGIL

SEQ ID NO: 22802 - protein, 10 aa, Homo sapiens
MALRGRPAGR

SEQ ID NO: 22803 - protein, 482 aa, Homo sapiens
VHDLLPPEVCSLLNPAAIYANNEISLRDVEVYGFDYDYTLAQYADALHPEIFSTARDILIEHYKYPEGIRKYDYNPSFAIRGLHYDIQKSLLMKIDAFHYVQLGTAYRGLQPVPDEEVIELYGGTQHIPLYQMSGFYGKGPSIKQFMDIFSLPEMALLSCVVDYFLGHSLEFDQAHLYKDVTDAIRDVHVKGLMYQWIEQDMEKYILRGDETFAVLSRLVAHGKQLFLITNSPFSFVDKGMRHMVGPDWRQLFDVVIVQADKPSFFTDRRKPFRKLDEKGSLQWDRITRLEKGKIYRQGNLFDFLRLTEWRGPRVLYFGDHLYSDLADLMLRHGWRTGAIIPELEREIRIINTEQYMHSLTWQQALTGLLERMQTYQDAESRQVLAAWMKERQELRCITKALFNAQFGSIFRTFHNPTYFSRRLVRFSDLYMASLSCLLNYRVDFTFYPRRTPLQHEAPLWMDQLCTGCMKTPFLGDMAHIR

SEQ ID NO: 22804 - protein, 9 aa, Homo sapiens
LTTLKCVNS

SEQ ID NO: 22805 - protein, 123 aa, Homo sapiens
KMAPQKDRKPKRSTWRFNLDLTHPVEDGIFDSGNFEQFLREKVKVNGKTGNLGNVVHIERFKNKITVVSEKQFSKRYLKYLTKKYLKKNNLRDWLRVVASDKETYELRYFQISQDEDESESED

SEQ ID NO: 22806 - protein, 150 aa, Homo sapiens
TPGPRSPGMATSIGVSFSVGDGVPEAEKNAGEPENTYILRPVFQQRFRPSVVKDCIHAVLKEELANAEYSPEEMPQLTKHLSENIKDKLKEMGFDRYKMVVQVVIGEQRGEGVFMASRCFWDADTDNYTHDVFMNDSLFCVVAAFGCFYY

SEQ ID NO: 22807 - protein, 28 aa, Homo sapiens
LAGCSRARAGLVPAGFQSHGSGKEAAVD

SEQ ID NO: 22808 - protein, 426 aa, Homo sapiens
IMATAEVLNIGKKLYEGKTKEVYELLDSPGKVLLQSKDQITAGNAARKNHLEGKAAISNKITSCIFQLLQEAGIKTAFTRKCGETAFIAPQCEMIPIEWVCRRIATGSFLKRNPGVKEGYKFYPPKVELFFKDDANNDPQWSEEQLIAAKFCFAGLLIGQTEVDIMSHATQAIFEILEKSWLPQNCTLVDMKIEFGVDVTTKEIVLADVIDNDSWRLWPSGDRSQQKDKQSYRDLKEVTPEGLQMVKKNFEWVAERVELLLKSESQCRVVVLMGSTSDLGHCEKIKKACGNFGIPCELRVTSAHKGPDETLRIKAEYEGDGIPTVFVAVAGRSNGLGPVMSGNTAYPVISCPPLTPDWGVQDVWSSLRLPSGLGCSTVLSPEGSAQFAAQIFGLSNHLVWSKLRASILNTWISLKQADKKIRECNL

SEQ ID NO: 22809 - protein, 21 aa, Homo sapiens
MLKSICRHIGKKRSASRMSVF

SEQ ID NO: 22810 - protein, 28 aa, Homo sapiens
LEHLASPRCRWPAVISRPFRIIRLSAEI

SEQ ID NO: 22811 - protein, 79 aa, Homo sapiens
ILTRPCNRWATVPATEMVEGPGCTLNGEKIRARVLPGQAVTGVRGSALRSLQGRALRLAASTVVVSPQDSFRNERLHHD

SEQ ID NO: 22812 - protein, 495 aa, Homo sapiens
IMFEIKKICCIGAGYVGGPTCSVIAHMCPEIRVTVVDVNESRINAWNSPTLPIYEPGLKEVVESCRGKNLFFSTNIDDAIKEADLVFISVNTPTKTYGMGKGRAADLKYIEACARRIVQNSNGYKIVTEKSTVPVRAAESIRRIFDANTKPNLNLQVLSNPEFLAEGTAIKDLKNPDRVLIGGDETPEGQRAVQALCAVYEHWVPREKILTTNTWSSELSKLAANAFLAQRISSINSISALCEATGADVEEVATAIGMDQRIGNKFLKASVGFGGSCFQKDVLNLVYLCEALNLPEVARYWQQVIDMNDYQRRRFASRIIDSLFNTVTDKKIAILGFAFKKDTGDTRESSSIYISKYLMDEGAHLHIYDPKVPREQIVVDLSHPGVSEDDQVSRLVTISKDPYEACDGAHAVVICTEWDMFKELDYERIHKKMLKPAFIFDGRRVLDGLHNELQTIGFQIETIGKKVSSKRIPYAPSGEIPKFSLQDPPNKKPKV

SEQ ID NO: 22813 - protein, 9 aa, Homo sapiens
LARMDPEPR

SEQ ID NO: 22814 - protein, 119 aa, Homo sapiens
LFVPQLGKRHMSLAAPDANPVVGFLAYSRPSVLPGWHRPHRTSRVGLSGSSTAGPRNSRFGAAPSRLGHTGARCRSPVLRHLVWNFRLAVSSRSGALCGVVWWKNGPCVGLTPSVCVSE

SEQ ID NO: 22815 - protein, 109 aa, Homo sapiens
IQAGLQETIMVRKRRGRERNYRNLHQVENEAHSQRAKPRQRPQDLFWRWKLVENPDCLHGLPSRPQRNTDINFTLRSLLETLIHKDNHCQPLFRLLQEPSSKIKHKKVF

SEQ ID NO: 22816 - protein, 226 aa, Homo sapiens
LRDSEEKLAPGGRGSVNMGKGDPNKPRGKMSSYAFFVQTCREEHKKKHPDSSVNFAEFSKKCSERWKTMSAKEKSKFEDMAKSDKARYDREMKNYVPPKGDKKGKKKDPNAPKRPPSAFFLFCSEHRPKIKSEHPGLSIGDTAKKLGEMWSEQSAKDKQPYEQKAAKLKEKYEKDIAAYRAKGKSEAGKKGPGRPTGSKKKNEPEDEEEEEEEEDEDEEEEDEDEE

SEQ ID NO: 22817 - protein, 34 aa, Homo sapiens
MGRVCMWLQDLCQRMKHSSHELTKSKGEFAEILI

SEQ ID NO: 22818 - protein, 20 aa, Homo sapiens
IQLPMKMTNEQRIRMTVPCL

SEQ ID NO: 22819 - protein, 51 aa, Homo sapiens
MQRPPAWSAGPGAATRAGRGGSTPWAPHSPPQVLRMASRETRKWTPWLLES

SEQ ID NO: 22820 - protein, 27 aa, Homo sapiens
LSGTCEQRGRQPGGSVRDHVWRTTTKH

SEQ ID NO: 22821 - protein, 37 aa, Homo sapiens
KLVAKGRRRGLSFRGSLPFLCCRSVTLALSPCLDHFL

SEQ ID NO: 22822 - protein, 34 aa, Homo sapiens
MCVLPLAECVESCSGVRYSVFDRGGLRGTRCSEL

SEQ ID NO: 22823 - protein, 24 aa, Homo sapiens
VVLVSLSHPVPSSSLQRHTLSPPP

SEQ ID NO: 22824 - protein, 14 aa, Homo sapiens
LLLVHFLGSHVWTW

SEQ ID NO: 22825 - protein, 131 aa, Homo sapiens
VTSMSGRGKQGGKARAKAKTRSSRAGLQFPVGRVHRLLRKGNYAERVGAGAPVYLAAVLEYLTAEILELAGNAARDNKKTRIIPRHLQLAIRNDEELNKLLGKVTIAQGGVLPNIQAVLLPKKTESHHKAK

SEQ ID NO: 22826 - protein, 69 aa, Homo sapiens
LAAPIAWATGPTCVMWPCGPSRSLASSLGSTPNCMPSPGVMTGGSAWKTTAAKVLWSIMSDSQEVTGWN

SEQ ID NO: 22827 - protein, 136 aa, Homo sapiens
IYRFFVMSGRGKQGGKARAKAKTRSSRAGLQFPVGRVHRLLRKGNYAERVGAGAPVYLAAVLEYLTAEILELAGNAARDNKKTRIIPRHLQLAIRNDEELNKLLGKVTIAQGGVLPNIQAVLLPKKTESHHKAKGK

SEQ ID NO: 22828 - protein, 19 aa, Homo sapiens
LEMAFVPAYDWSQRAVQTP

SEQ ID NO: 22829 - protein, 6 aa, Homo sapiens
MTPMSH

SEQ ID NO: 22830 - protein, 53 aa, Homo sapiens
KDEFEHKRKELEQVCNPIISGLYQGAGGPGPGGFGAQGPKGGSGSGPTIEEVD

SEQ ID NO: 22831 - protein, 53 aa, Homo sapiens
IRICYQRRPRRSQAGPQRPAPPLPATRSAHRRPAAELAHPSHHSSTCSLEKGR

SEQ ID NO: 22832 - protein, 698 aa, Homo sapiens
TRVPGSPAPSSLPLHSPGACGTEVDMDPQRSPLLEVKGNIELKRPLIKAPSQLPLSGSRLKRRPDQMEDGLEPEKKRTRGLGATTKITTSHPRVPSLTTVPQTQGQTTAQKVSKKTGPRCSTAIATGLKNQKPVPAVPVQKSGTSGVPPMAGGKKPSKRPAWDLKGQLCDLNAELKRCRERTQTLDQENQQLQDQLRDAQQQVKALGTERTTLEGHLAKVQAQAEQGQQELKNLRACVLELEERLSTQEGLVQELQKKQVELQEERRGLMSQLEEKERRLQTSEAALSSSQAEVASLRQETVAQAALLTEREERLHGLEMERRRLHNQLQELKGNIRVFCRVRPVLPGEPTPPPGLLLFPSGPGGPSDPPTRLSLSRSDERRGTLSGAPAPPTRHDFSFDRVFPPGSGQDEVFEEIAMLVQSALDGYPVCIFAYGQTGSGKTFTMEGGPGGDPQLEGLIPRALRHLFSVAQELSGQGWTYSFVASYVEIYNETVRDLLATGTRKGQGGECEIRRAGPGSEELTVTNARYVPVSCEKEVDALLHLARQNRAVARTAQNERSSRSHSVFQLQISGEHSSRGLQCGAPLSLVDLAGSERLDPGLALGPGERERLRETQAINSSLSTLGLVIMALSNKESHVPYRNSKLTYLLQNSLGGSAKMLMFVNISPLEENVSESLNSLRFASKVNQCVIGTAQANRK

SEQ ID NO: 22833 - protein, 31 aa, Homo sapiens
RLQAARGPAAPPRLGLADSRGSRPCRGGMLL

SEQ ID NO: 22834 - protein, 172 aa, Homo sapiens
IAADTMPKRKKQNHHQPPTQQQPPLPEREETGDEEDGSPIALHRGPPGSRGPLIPPLLSLPPPPWGRGPIRRGLGPRSSPYGRGWWGVNAEPPFPGPGHGGPTRGSFHKEQRNPRRLKSWSLIKNTCPPKDDPQVMEDKSDRPVCRHFAKKGHCRYEDLCAFYHPGVNGPPL

SEQ ID NO: 22835 - protein, 57 aa, Homo sapiens
IPEKAGGRRMWMMMEKRKSSWSVLRSSQCQPVMRRMKYPPQNPAEGRKPRVVMFLQP

SEQ ID NO: 22836 - protein, 866 aa, Homo sapiens
ISPAQLSVEMESEDLSGRELTIDSIMNKVRDIKNKFKNEDLTDELSLNKISADTTDNSGTVNQIMMMANNPEDWLSLLLKLEKNSVPLSDALLNKLIGRYSQAIEALPPDKYGQNESFARIQVRFAELKAIQEPDDARDYFQMARANCKKFAFVHISFAQFELSQGNVKKSKQLLQKAVERGAVPLEMLEIALRNLNLQKKQLLSEEEKKNLSASTVLTAQESFSGSLGHLQNRNNSCDSRGQTTKARFLYGENMPPQDAEIGYRNSLRQTNKTKQSCPFGRVPVNLLNSPDCDVKTDDSVVPCFMKRQTSRSECRDLVVPGSKPSGNDSCELRNLKSVQNSHFKEPLVSDEKSSELIITDSITLKNKTESSLLAKLEETKEYQEPEVPESNQKQWQSKRKSECINQNPAASSNHWQIPELARKVNTEQKHTTFEQPVFSVSKQSPPISTSKWFDPKSICKTPSSNTLDDYMSCFRTPVVKNDFPPACQLSTPYGQPACFQQQQHQILATPLQNLQVLASSSANECISVKGRIYSILKQIGSGGSSKVFQVLNEKKQIYAIKYVNLEEADNQTLDSYRNEIAYLNKLQQHSDKIIRLYDYEITDQYIYMVMECGNIDLNSWLKKKKSIDPWERKSYWKNMLEAVHTIHQHGIVHSDLKPANFLIVDGMLKLIDFGIANQMQPDTTSVVKDSQVGTVNYMPPEAIKDMSSSRENGKSKSKISPKSDVWSLGCILYYMTYGKTPFQQIINQISKLHAIIDPNHEIEFPDIPEKDLQDVLKCCLKRDPKQRISIPELLAHPYVQIQTHPVNQMAKGTTEEMKYVLGQLVGLNSPNSILKAAKTLYEHYSGGESHNSSSSKTFEKKRGKK

SEQ ID NO: 22837 - protein, 16 aa, Homo sapiens
LRRENRNSMKILKMPC

SEQ ID NO: 22838 - protein, 9 aa, Homo sapiens
MSAVIVEEI

SEQ ID NO: 22839 - protein, 988 aa, Homo sapiens
VSPENQPSRAMGTRLPLVLRQLRRPPQPPGPPRRLRVPCRASSGGGGGGGGGREGLLGQRRPQDGQARSSCSPGGRTPAARDSIVREVIQNSKEVLSLLQEKNPAFKPVLAIIQAGDDNLMQEINQNLAEEAGLNITHICLPPDSSEAEIIDEILKINEDTRVHGLALQISENLFSNKVLNALKPEKDVDGVTDINLGKLVRGDAHECFVSPVAKAVIELLEKSGVNLDGKKILVVGAHGSLEAALQCLFQRKGSMTMSIQWKTRQLQSKLHEADIVVLGSPKPEEIPLTWIQPGTTVLNCSHDFLSGKVGCGSPRIHFGGLIEEDDVILLAAALRIQNMVSSGRRWLREQQHRRWRLHCLKLQPLSPVPSDIEISRGQTPKAVDVLAKEIGLLADEIEIYGKSKAKVRLSVLERLKDQADGKYVLVAGITPTPLGEGKSTVTIGLVQALTAHLNVNSFACLRQPSQGPTFGVKGGAAGGGYAQVIPMEEFNLHLTGDIHAITAANNLLAAAIDTRILHENTQTDKALYNRLVPLVNGVREFSEIQLARLKKLGINKTDPSTLTEEEVSKFARLDIDPSTITWQRVLDTNDRFLRKITIGQGNTEKGHYRQAQFDIAVASEIMAVLALTDSLADMKARLGRMVVASDKSGQPVTADDLGVTGALTVLMKDAIKPNLMQTLEGTPVFVHAGPFANIAHGNSSVLADKIALKLVGEEGFVVTEAGFGADIGMEKFFNIKCRASGLVPNVVVLVATVRALKMHGGGPSVTAGVPLKKEYTEENIQLVADGCCNLQKQIQITQLFGVPVVVALNVFKTDTRAEIDLVCELAKRAGAFDAVPCYHWSVGGKGSVDLARAVREAASKRSRFQFLYDVQVPIVDKIRTIAQAVYGAKDIELSPEAQAKIDRYTQQGFGNLPICMAKTHLSLSHQPDKKGVPRDFILPISDVRASIGAGFIYPLVGTMSTMPGLPTRPCFYDIDLDTETEQVKGLF

SEQ ID NO: 22840 - protein, 37 aa, Homo sapiens
LRSSLDMSWQQAVGRILLDKPVWVQEFPTLFQHGAAR

SEQ ID NO: 22841 - protein, 20 aa, Homo sapiens
TARSASAAARRAIPSMCTRF

SEQ ID NO: 22842 - protein, 17 aa, Homo sapiens
MMWRKTTAVSNLVSRAW

SEQ ID NO: 22843 - protein, 139 aa, Homo sapiens
KFAMARTKQTARKSTGGKAPRKQLATKAARKSAPATGGVKKPHRYRPGTVALREIRRYQKSTELLIRKLPFQRLVREIAQDFKTDLRFQSSAVMALQEACEAYLVGLFEDTNLCAIHAKRVTIMPKDIQLARRIRGERA

SEQ ID NO: 22844 - protein, 223 aa, Homo sapiens
IMAARPKLHYPNGRGRMESVRWVLAAAGVEFDEEFLETKEQLYKLQDGNHLLFQQVPMVEIDGMKLVQTRSILHYIADKHNLFGKNLKERTLIDMYVEGTLDLLELLIMHPFLKPDDQQKEVVNMAQKAIIRYFPVFEKILRGHGQSFLVGNQLSLADVILLQTILALEEKIPNILSAFPFLQEYTVKLSNIPTIKRFLEPGSKKKPPPDEIYVRTVYNIFRP

SEQ ID NO: 22845 - protein, 30 aa, Homo sapiens
LEPLMIRRTPSVSEHEVNNGELFCCIDVPD

SEQ ID NO: 22846 - protein, 19 aa, Homo sapiens
MVSRGCNCRQVSPRSHKFL

SEQ ID NO: 22847 - protein, 40 aa, Homo sapiens
IYFSSVSKVSTTWKKILEDDKGAFQLYSKAIQRVTVSVCR

SEQ ID NO: 22848 - protein, 173 aa, Homo sapiens
TPATSSRELCPGDRARVMTTNPKPNKALKVKKEAGENAPVLSDDELVSMSVRELNQHLRGLTKEEVTRLKQRRRTLKNRGYAASCRIKRVTQKEELERQRVELQQEVEKLARENSSMRLELDALRSKYEALQTFARTVARGPVAPSKVATTSVITIVKSTELSSTSVPFSAAS

SEQ ID NO: 22849 - protein, 20 aa, Homo sapiens
KNYWEMYSKIGPRKQMESIR

SEQ ID NO: 22850 - protein, 1128 aa, Homo sapiens
TPGAMDPFTEKLLERTRARRENLQRKMAERPTAAPRSMTHAKRARQPLSEASNQQPLSGGEEKSCTKPSPSKKRCSDNTEVEVSNLENKQPVESTSAKSCSPSPVSPQVQPQAADTISDSVAVPASLLGMRRGLNSRLEATAASSVKTRMQKLAEQRRRWDNDDMTDDIPESSLFSPMPSEEKAASPPRPLLSNASATPVGRRGRLANLAATICSWEDDVNHSFAKQNSVQEQPGTACLSKFSSASGASARINSSSVKQEATFCSQRDGDASLNKALSSSADDASLVNASISSSVKATSPVKSTTSITDAKSCEGQNPELLPKTPISPLKTGVSKPIVKSTLSQTVPSKGELSREICLQSQSKDKSTTPGGTGIKPFLERFGERCQEHSKESPARSTPHRTPIITPNTKAIQERLFKQDTSSSTTHLAQQLKQERQKELACLRGRFDKGNIWSAEKGGNSKSKQLETKQETHCQSTPLKKHQGVSKTQSLPVTEKVTENQIPAKNSSTEPKGFTECEMTKSSPLKITLFLEEDKSLKVTSDPKVEQKIEVIREIEMSVDDDDINSSKVINDLFSDVLEEGELDMEKSQEEMDQALAESSEEQEDALNISSMSLLAPLAQTVGVVSPESLVSTPRLELKDTSRSDESPKPGKFQRTRVPRAESGDSLGSEDRDLLYSIDAYRSQRFKETERPSIKQVIVRKEDVTSKLDEKNNAFPCQVNIKQKMQELNNEINMQQTVIYQASQALNCCVDEEHGKGSLEEAEAERLLLIATGKRTLLIDELNKLKNEGPQRKNKASPQSEFMPSKGSVTLSEIRLPLKADFVCSTVQKPDAANYYYLIILKAGAENMVATPLASTSNSLNGDALTFTTTFTLQDVSNDFEINIEVYSLVQKKDPSGLDKKKKTSKSKAITPKRLLTSITTKSNIHSSVMASPGGLSAVRTSNFALVGSYTLSLSSVGNTKFVLDKVPFLSSLEGHIYLKIKCQVNSSVEERGFLTIFEDVSGFGAWHRRWCVLSGNCISYWTYPDDEKRKNPIGRINLANCTSRQIEPANREFCARRNTFELITVRPQREDDRETLVSQCRDTLCVTKNWLSADTKEERDLWMQKLNQVLVDIRLWQPDACYKPIGKP

SEQ ID NO: 22851 - protein, 33 aa, Homo sapiens
LMSEPAGGRGSEKRIGSWASVMRQAHLSVLACC

SEQ ID NO: 22852 - protein, 26 aa, Homo sapiens
ISRSLRLNMSQDGGQCGIDVSILEAL

SEQ ID NO: 22853 - protein, 201 aa, Homo sapiens
TQLFTLRMAKQKRKVPEVTEKKNKKLKKASAEGPLLGPEAAPSGEGAGSKGEAVLRPGLDAEPELSPEEQRVLERKLKKERKKEERQRLREAGLVAQHPPARRSGAELALDYLCRWAQKHKNWRFQKTRQTWLLLHMYDSDKVPDEHFSTLLAYLEGLQGRARELTVQKAEALMRELDEEGSDPPLPGRAQRIRQVLQLLS

SEQ ID NO: 22854 - protein, 127 aa, Homo sapiens
LQSPAMEDTPLVISKQKTEVVCGVPTQVVCTAFSSHILVVVTQFGKMGTLVSLEPSSVASDVSKPVLTTKVLLGQDEPLIHVFAKNLVAFVSQEAGNRAVLLAVAVKDKSMEGLKALREVIRVCQVW

SEQ ID NO: 22855 - protein, 8 aa, Homo sapiens
TGFRLEAP

SEQ ID NO: 22856 - protein, 725 aa, Homo sapiens
LERIWSSARKALLLPGRPSRWLIQVAFAALLRPNQSAGHLAAQLTPRPRSQAPGFLKCFLGALKMEMTEMTGVSLKRGALVVEDNDSGVPVEETKKQKLSECSLTKGQDGLQNDFLSISEDVPRPPDTVSTGKGGKNSEAQLEDEEEEEEDGLSEECEEEESESFADMMKHGLTEADVGITKFVSSHQGFSGILKERYSDFVVHEIGKDGRISHLNDLSIPVDEEDPSEDIFTVLTAEEKQRLEELQLFKNKETSVAIEVIEDTKEKRTIIHQAIKSLFPGLETKTEDREGKKYIVAYHAAGKKALANPRKHSWPKSRGSYCHFVLYKENKDTMDAINVLSKYLRVKPNIFSYMGTKDKRAITVQEIAVLKITAQRLAHLNKCLMNFKLGNFSYQKNPLKLGELQGNHFTVVLRNITGTDDQVQQAMNSLKEIGFINYYGMQRFGTTAVPTYQVGRAILQNSWTEVMDLILKPRSGAEKGYLVKCREEWAKTKDPTAALRKLPVKRCVEGQLLRGLSKYGMKNIVSAFGIIPRNNRLMYIHSYQSYVWNNMVSKRIEDYGLKPVPGDLVLKGATATYIEEDDVNNYSIHDVVMPLPGFDVIYPKHKIQEAYREMLTADNLDIDNMRHKIRDYSLSGAYRKIIIRPQNVSWEVVAYDDPKIPLFNTDVDNLEGKTPPVFASEGKYRALKMDFSLPPSTYATMAIREVLKMDTSIKNQTQLNTTWLR

SEQ ID NO: 22857 - protein, 22 aa, Homo sapiens
VPPEPARGMDFTSWSSLPQVWR

SEQ ID NO: 22858 - protein, 623 aa, Homo sapiens
TERLARLRRARRALRRRNSIKKMAALTPRKRKQDSLKCDSLLHFTENLFPSPNKKHCFYQNSDKNEENLHCSQQEHFVLSALKTTEINRLPSANQGSPFKSALSTVSFYNQNKWYLNPLERKLIKESRSTCLKTNDEDKSFPIVTEKMQGKPVCSKKNNKKPQKSLTAKYQPKYRHIKPVSRNSRNSKQNRVIYKPIVEKENNCHSAENNSNAPRVLSQKIKPQVTLQGGAAFFVRKKSSLRKSSLENEPSLGRTQKSKSEVIEDSDVETVSEKKTFATRQVPKCLVLEEKLKIGLLSASSKNKEKLIKDSSDDRVSSKEHKVDKNEAFSSEDSLGENKTISPKSTVYPIFSASSVNSKRSLGEEQFSVGSVNFMKQTNIQKNTNTRDTSKKTKDQLIIDAGQKHFGATVCKSCGMIYTASNPEDEMQHVQHHHRFLEGIKYVGWKKERVVAEFWDGKIVLVLPHDPSFAIKKVEDVQELVDNELGFQQVVPKCPNKIKTFLFISDEKRVVGCLIAEPIKQAFRVLSEPIGPESPSSTECPRAWQCSDVPEPAVCGISRIWVFRLKRRKRIARRLVDTLRNCFMFGCFLSTDEIAFSDPTPDGKLFATKYCNTPNFLVYNFNS

SEQ ID NO: 22859 - protein, 460 aa, Homo sapiens
LKSKPGKKDKERGEIEVDIQFMRNNMTASMFDLSMKDKSRNPFGKLKDKIKGKNKDSGSDTASAIIPSTTPSVDSDDESVVKDKKKKSKIKTLLSKSNLQKTPLSQSMSVLPTSKPEKVLLRPGDFQSQWDEDDNEDESSSASDVMSHKRTASTDLKQLNQVNFTLPKKEGLSFLGGLRSKNDVLSRSNVCINGNHVYLEQPEAKGEIKDSSPSSSPSPKGFRKKHLFSSTENLAAGSWKEPAEGGGLSSDRQLSESSTKDSLKSMTLPSYRPAPLVSGDLRENMAPANSEATKEAKESKKPESRRSSLLSLMTGKKDVAKGSEGENPLTVPGREKEGMLMGVKPGEDASGPAEDLVRRSEKDTAAVVSRQGSSLNLFEDVQITEPEAEPESKSEPRPPISSPRAPQTRAVKPRLHPVKPMNAMATKVANCSLGTATIISENLNNEVMMKVCPLRSWCVR

SEQ ID NO: 22860 - protein, 406 aa, Homo sapiens
KRMSRRSSRLQAKQQPQPSQTESPQEAQIIQAKKRKTTQDVKKRREEVTKKHQYEIRNCWPPVLSGGISPCIIIETPHKEIGTSDFSRFTNYRFKNLFINPSPLPDLSWGCSKEVWLNMLKKESRYVHDKHFEVLHSDLEPQMRSILLDWLLEVCEVYTLHRETFYLAQDFFDRFMLTQKDINKNMLQLIGITSLFIASKLEEIYAPKLQEFAYVTDGACSEEDILRMELIILKALKWELCPVTIISWLNLFLQVDALKDAPKVLLPQYSQETFIQIAQLLDLCILAIDSLEFQYRILTAAALCHFTSIEVVKKASGLEWDSISECVDWMVPFVNVVKSTSPVKLKTFKKIPMEDRHNIQTHTNYLAMLEEVNYINTFRKGGQLSPVCNGGIMTPPKSTEKPPGKH

SEQ ID NO: 22861 - protein, 29 aa, Homo sapiens
IAAFDVIVRVVPLLPGLVIGGNPVSAERL

SEQ ID NO: 22862 - protein, 32 aa, Homo sapiens
ILEQQQLTDGEAVTLHPAIPLQTAPTGVMPSV

SEQ ID NO: 22863 - protein, 756 aa, Homo sapiens
VRVAAGARWGMAGSRGAGRTAAPSVRPEKRRSEPELEPEPEPEPPLLCTSPLSHSTGSDSGVSDSEESVFSGLEDSGSDSSEDDDEGDEEGEDGALDDEGHSGIKKTTEEQVQASTPCPRTEMASARIGDEYAEDSSDEEDIRNTVGNVPLEWYDDFPHVGYDLDGRRIYKPLRTRDELDQFLDKMDDPDYWRTVQDPMTGRDLRLTDEQVALVRRLQSGQFGDVGFNPYEPAVDFFSGDVMIHPVTNRPADKRSFIPSLVEKEKVSRMVHAIKMGWIQPRRPRDPTPSFYDLWAQEDPNAVLGRHKMHVPAPKLALPGHAESYNPPPEYLLSEEERLAWEQQEPGERKLSFLPRKFPSLRAVPAYGRFIQERFERCLDLYLCPRQRKMRVNVDPEDLIPKLPRPRDLQPFPTCQALVYRGHSDLVRCLSVSPGGQWLVSGSDDGSLRLWEVATARCVRTVPVGGVVKSVAWNPSPAVCLVAAAVEDSVLLLNPALGDRLVAGSTDQLLSAFVPPEEPPLQPARWLEASEEERQVGLRLRICHGKPVTQVTWHGRGDYLAVVLATQGHTQVLIHQLSRRRSQSPFRRSHGQVQRVAFHPARPFLLVASQRSVRLYHLLRQELTKKLMPNCKWVSSLAVHPAGDNVICGSYDSKLVWFDLDLSTKPYRMLRHHKKALRAVAFHPRYPLFASGSDDGSVIVCHGMVYNDLLQNPLLVPVKVLKGHVLTRDLGVLDVIFHPTQPWVFSSGADGTVRLFT

SEQ ID NO: 22864 - protein, 18 aa, Homo sapiens
MGYACVQRTRRCAPASLS

SEQ ID NO: 22865 - protein, 80 aa, Homo sapiens
RMAHKQIYYSDKYFDEHYEYRHVMLPRELSKQVPKTHLMSEEEWRRLGVQQSLGWVHYMIHEPEPHILLFRRPLPKDQQK

SEQ ID NO: 22866 - protein, 19 aa, Homo sapiens
LSKSKKLENMRYISSLVNT

SEQ ID NO: 22867 - protein, 12 aa, Homo sapiens
MARPWPPTSTTS

SEQ ID NO: 22868 - protein, 653 aa, Homo sapiens
VRVATMEVKGKKQFTGKSTKTAQEKNRFHKNSDSGSSKTFPTRKVAKEGGPKVTSRNFEKSITKLGKKGVKQFKNKQQGDKSPKNKFQPANKFNKKRKFQPDGRSDESAAKKPKWDDFKKKKKELKQSRQLSDKTNYDIVVRAKQMWEILRRKDCDKEKRVKLMSDLQKLIQGKIKTIAFAHDSTRVIQCYIQYGNEEQRKQAFEELRDDLVELSKAKYSRNIVKKFLMYGSKPQIAEIIRSFKGHVRKMLRHAEASAIVEYAYNDKAILEQRNMLTEELYGNTFQLYKSADHRTLDKVLEVQPEKLELIMDEMKQILTPMAQKEAVIKHSLVHKVFLDFFTYAPPKLRSEMIEAIREAVVYLAHTHDGARVAMHCLWHGTPKDRKVIVKTMKTYVEKVANGQYSHLVLLAAFDCIDDTKLVKQIIISEIISSLPSIVNDKYGRKVLLYLLSPRDPAHTVREIIEVLQKGDGNAHSKKDTEVRRRELLESISPALLSYLQEHAQEVVLDKSACVLVSDILGSATGDVQPTMNAIASLAATGLHPGGKDGELHIAEHPAGHLVLKWLIEQDKKMKENGREGCFAKTLVEHVGMKNLKSWASVNRGAIILSSLLQSCDLEVANKVKAALKSLIPTLEKTKSTSKGIEILLEKLST

SEQ ID NO: 22869 - protein, 13 aa, Homo sapiens
KIKCSICSYKFNI

SEQ ID NO: 22870 - protein, 245 aa, Homo sapiens
LPRPTPSSVLSPPRPTSACPSLTRSVLALRPPQLSALGLPRLAGSARASGPMAKRRAAEPVTFHVPWKRLLLCDFAEQPPPPPLWIRPPGVAHAGQLLGVPEQHRKRKIDAGTMAEPSASPSKRRDSGDNSAPSGQEREDHGLETGDPPLPPPPVLPGPGEELPGARLPGGGGDDGAGRAGPPRGDWGVASRQHNEEFWQYNTFQYWRNPLPPIDLADIEDLSEDTLTEATLQGRNEGAEVDMES

SEQ ID NO: 22871 - protein, 67 aa, Homo sapiens
TEVAERVSKGGRGRSPRATREAAGRRAGGRGAEPGSAGIARLEKRSCHHGCTFTEDQHWECGEDDAV

SEQ ID NO: 22872 - protein, 310 aa, Homo sapiens
LDTKWYQWKATHRRLYGANEEGWRRAVWEKNMKMIELHNGEYSQGKHGFTMAMNAFGDMTNEEFRQMMGCFRNQKFRKGKVFREPLFLDLPKSVDWRKKGYVTPVKNQKQCGSCWAFSATGALEGQMFRKTGKLVSLSEQNLVDCSRPQGNQGCNGGFMARAFQYVKENGGLDSEESYPYVAVDEICKYRPENSVANDTGFTVVAPGKEKALMKAVATVGPISVAMDAGHSSFQFYKSGIYFEPDCSSKNLDHGVLVVGYGFEGANSNNSKYWLVKNSWGPEWGSNGYVKIAKDKNNHCGIATAASYPNV

SEQ ID NO: 22873 - protein, 23 aa, Homo sapiens
VGQGAMETGGSLGLEQRIHRQVP

SEQ ID NO: 22874 - protein, 7 aa, Homo sapiens
MKNLQNL

SEQ ID NO: 22875 - protein, 24 aa, Homo sapiens
TWLPRVAELWEEKPVCLCIASLQR

SEQ ID NO: 22876 - protein, 15 aa, Homo sapiens
METTSCILPSIWDLG

SEQ ID NO: 22877 - protein, 39 aa, Homo sapiens
RMDEDVLHPEEPHHRLLLRFTDDTFDPELAATIDNAGIT

SEQ ID NO: 22878 - protein, 561 aa, Homo sapiens
VTRPTRAPRFASAASWPKGGDRGGWRGAARTRSPGAGPVRTAREGRSVGRSRPRDSISARSDNSPFPWRSLRAWHPAGRLKTVVSSIASLDLATISEMSSRSTKDLIKSKWGSKPSNSKSETTLEKLKGEIAHLKTSVDEITSGKGKLTDKERHRLLEKIRVLEAEKEKNAYQLTEKDKEIQRLRDQLKARYSTTTLLEQLEETTREGERREQVLKALSEEKDVLKQQLSAATSRIAELESKTNTLRLSQTVAPNCFNSSINNIHEMEIQLKDALEKNQQWLVYDQQREVYVKGLLAKIFELEKKTETAAHSLPQQTKKPESEGYLQEEKQKCYNDLLASAKKDLEVERQTITQLSFELSEFRRKYEETQKEVHNLNQLLYSQRRADVQHLEDDRHKTEKIQKLREENDIARGKLEEEKKRSEELLSQVQFLYTSLLKQQEEQTRVALLEQQMQACTLDFENEKLDRQHVQHQLHVILKELRKARNQITQLESLKQLHEFAITEPLVTFQGETENREKVAASPKSPTAALNESLVECPKCNIQYPATEHRDLLVHVEYCSK

SEQ ID NO: 22879 - protein, 80 aa, Homo sapiens
KKRSEELLSQVQFLYTSLLKQQEEQTRVALLEQQMQACTLDFENEKLDRQHVQHQLHVILKELRKARNQITQLESLVSLE

SEQ ID NO: 22880 - protein, 136 aa, Homo sapiens
IAIMNDTVTIRTRKFMTNRLLQRKQMVIDVLHPGKATVPKTEIREKLAKMYKTTPDVIFVFGFRTHFGGGKTTGFGMIYDSLDYAKKNEPKHRLARHGLYEKKKTSRKQRKERKNRMKKVRGTAKANVGAGKKPKE

SEQ ID NO: 22881 - protein, 1115 aa, Homo sapiens
TARVPGRERGRRPACVGPPGHASAREGPGRLRPLSAAKPLRPSQRPGPRPGLDFLAGTVMASQPNSSAKKKEEKGKNIQVVVRCRPFNLAERKASAHSIVECDPVRKEVSVRTGGLADKSSRKTYTFDMVFGASTKQIDVYRSVVCPILDEVIMGYNCTIFAYGQTGTGKTFTMEGERSPNEEYTWEEDPLAGIIPRTLHQIFEKLTDNGTEFSVKVSLLEIYNEELFDLLNPSSDVSERLQMFDDPRNKRGVIIKGLEEITVHNKDEVYQILEKGAAKRTTAATLMNAYSSRSHSVFSVTIHMKETTIDGEELVKIGKLNLVDLAGSENIGRSGAVDKRAREAGNINQSLLTLGRVITALVERTPHVPYRESKLTRILQDSLGGRTRTSIIATISPASLNLEETLSTLEYAHRAKNILNKPEVNQKLTKKALIKEYTEEIERLKRDLAAAREKNGVYISEENFRVMSGKLTVQEEQIVELIEKIGAVEEELNRVTELFMDNKNELDQCKSDLQNKTQELETTQKHLQETKLQLVKEEYITSALESTEEKLHDAASKLLNTVEETTKDVSGLHSKLDRKKAVDQHNAEAQDIFGKNLNSLFNNMEELIKDGSSKQKAMLEVHKTLFGNLLSSSVSALDTITTVALGSLTSIPENVSTHVSQIFNMILKEQSLAAESKTVLQELINVLKTDLLSSLEMILSPTVVSILKINSQLKHIFKTSLTVADKIEDQKKELDGFLSILCNNLHELQENTICSLVESQKQCGNLTEDLKTIKQTHSQELCKLMNLWTERFCALEEKCENIQKPLSSVQENIQQKSKDIVNKMTFHSQKFCADSDGFSQELRNFNQEGTKLVEESVKHSDKLNGNLEKISQETEQRCESLNTRTVYFSEQWVSSLNEREQELHNLLEVVSQCCEASSSDITEKSDGRKAAHEKQHNIFLDQMTIDEDKLIAQNLELNETIKIGLTKLNCFLEQDLKLDIPTGTTPQRKSYLYPSTLVRTEPREHLLDQLKRKQPELLMMLNCSENNKEETIPDVDVEEAVLGQYTEEPLSQEPSVDAGVDCSSIGGVPFFQHKKSHGKDKENRGINTLERSKVEETTEHLVTKSRLPLRAQINL

SEQ ID NO: 22882 - protein, 35 aa, Homo sapiens
VSSYSTPKISFCYSKDQMLRLPFQVVLRIRVVVIH

SEQ ID NO: 22883 - protein, 53 aa, Homo sapiens
VAVGLALSPAPFSSLSLPLSFAPKSASQPRRVVTEPLRLFLARVLRPRLPRHE

SEQ ID NO: 22884 - protein, 179 aa, Homo sapiens
IFPLKEWRRPGQFALEMEGPSLRGPALRLAGLPTQQDCNIQEKIDLEIRMREGIWKLLSLSTQKDQVLHAVKNLMVCNARLMAYTSELQKLEEQIANQTGRCDVKFESKERTACKGKIAISDIRIPLMWKDSDHFSNKERSRRYAIFCLFKMGANVFDTDVVNVDKTITDICFENVTIL

SEQ ID NO: 22885 - protein, 1305 aa, Homo sapiens
IPRHGLVNMGRSGKLPSGVSAKLKRWKKGHSSDSNPAICRHRQAARSRFFSRPSGRSDLTVDAVKLHNELQSGSLRLGKSEAPETPMEEEAELVLTEKSSGTFLSGLSDCTNVTFSKVQRFWESNSAAHKEICAVLAAVTEVIRSQGGKETETEYFAALMTTMEAVESPESLAAVAYLLNLVLKRVPSPVLIKKFSDTSKAFMDIMSAQASSGSTSVLRWVLSCLATLLRKQDLEAWGYPVTLQVYHGLLSFTVHPKPKIRKAAQHGVCSVLKGSEFMFEKAPAHHPAAISTAKFCIQEIEKSGGSKEATTTLHMLTLLKDLLPCFPEGLVKSCSETLLRVMTLSHVLVTACAMQAFHSLFHARPGLSTLSAELNAQIITALYDYVPSENDLQPLLAWLKVMEKAHINLVRLQWDLGLGHLPRFFGTAVTCLLSPHSQVLTAATQSLKEILKECVAPHMADIGSVTSSASGPAQSVAKMFRAVEEGLTYKFHAAWSSVLQLLCVFFEACGRQAHPVMRKCLQSLCDLRLSPHFPHTAALDQAVGAAVTSMGPEVVLQAVPLEIDGSEETLDFPRSWLLPVIRDHVQETRLGFFTTYFLPLANTLKSKAMDLAQAGSTVESKIYDTLQWQMWTLLPGFCTRPTDVAISFKGLARTLGMAISERPDLRVTVCQALRTLITKGCQAEADRAEVSRFAKNFLPILFNLYGQPVAAGDTPAPRRAVLETIRTYLTITDTQLVNSLLEKASEKVLDPASSDFTRLSVLDLVVALAPCADEAAISKLYSTIRPYLESKAHGVQKKAYRVLEEVCASPQGPGALFVQSHLEDLKKTLLDSLRSTSSPAKRPRLKCLLHIVRKLSAEHKEFITALIPEVILCTKEVSVGARKNAFALLVEMGHAFLRFGSNQEEALQCYLVLIYPGLVGAVTMVSCSILALTHLLFEFKGLMGTSTVEQLLENVCLLLASRTRDVVKSALGFIKVAVTVMDVAHLAKHVQLVMEAIGKLSDDMRRHFRMKLRNLFTKFIRKFGFELVKRLLPEEYHRVLVNIRKAEARAKRHRALSQAAVEEEEEEEEEEEPAQGKGDSIEEILADSEDEEDNEEEERSRGKEQRKLARQRSRAWLKEGGGDEPLNFLDPKVAQRVLATQPGPGRGRKKDHGFKVSADGRLIIREEADGNKMEEEEGAKGEDEEMADPMEDVIIRNKKHQKLKHQKEAEEEELEIPPQYQAGGSGIHRPVAKKAMPGAEYKAKKAKGDVKKKGRPDPYAYIPLNRSKLNRRKKMKLQGQFKGLVKAARRGSQVGHKNRRKDRRP

SEQ ID NO: 22886 - protein, 300 aa, Homo sapiens
MSSCRTSWRPLGSKVWTPVEKRRCYSGGSVQRYSNGFSTMQRSSSFSLPSRANVLSSPCDQAGLHHRFGGQPCQGVPGSAPCGQAGDTWSPDLHPVGGGRLDLQRSLSCSHEQFSFVEYCPPSANSTPASTPELARRSSGLSRSRSQPCVLNDKKVGVKRRRPEEVQEQRPSLDLAKMAQNCQTFSSLSCLSAGTEDCGPQSPFARHVSNTRAWTALLSASGPGGRTPAGTPVPEPLPPSFDDHLACQEDLSCEESDSCALDEDCGRRAEPAAAWRDRGAPGNSLCSLDGELDIEQIEKN

SEQ ID NO: 22887 - protein, 27 aa, Homo sapiens
MRRRRSLKSQMMTWDLAFLIKFLLPCK

SEQ ID NO: 22888 - protein, 35 aa, Homo sapiens
LSSAWNLTLPTLSPSRSRRRFRAAVQSWILQSLSH

SEQ ID NO: 22889 - protein, 32 aa, Homo sapiens
LPPIPDLIATRPRRPPDVHSRFLLVPSPIWQL

SEQ ID NO: 22890 - protein, 9 aa, Homo sapiens
MCFPSFEIF

SEQ ID NO: 22891 - protein, 54 aa, Homo sapiens
LLLPSSHFLVCSAAVWAWAMRQGRFPIRAPTCPQSLERDSNPASMSRSLQPPSS

SEQ ID NO: 22892 - protein, 625 aa, Homo sapiens
LCVSAEPSVHLQAIMSCKKQRSRKHSVNEKCNMKIEHYFSPVSKEQQNNCSTSLMRMESRGDPRATTNTQAQRFHSPKKNPEDQTMPQNRTIYVTLKVNHRRNQDMKLKLTHSENSSLYMALNTLQAVRKEIETHQGQEMLVRGTEGIKEYINLGMPLSCFPEGGQVVITFSQSKSKQKEDNHIFGRQDKASTECVKFYIHAIGIGKCKRRIVKCGKLHKKGRKLCVYAFKGETIKDALCKDGRFLSFLENDDWKLIENNDTILESTQPVDELEGRYFQVEVEKRMVPSAAASQNPESEKRNTCVLREQIVAQYPSLKRESEKIIENFKKKMKVKNGETLFELHRTTFGKVTKNSSSIKVVKLLVRLSDSVGYLFWDSATTGYATCFVFKGLFILTCRHVIDSIVGDGIEPSKWATIIGQCVRVTFGYEELKDKETNYFFVEPWFEIHNEELDYAVLKLKENGQQVPMELYNGITPVPLSGLIHIIGHPYGEKKQIDACAVIPQGQRAKKCQERVQSKKAESPEYVHMYTQRSFQKIVHNPDVITYDTEFFFGASGSPVFDSKGSLVAMHAAGFAYTYQNETRSIIEFGSTMESILLDIKQRHKPWYEEVFVNQQDVEMMSDEDL

SEQ ID NO: 22893 - protein, 926 aa, Homo sapiens
VAQSNRATMGTTAPGPIHLLELCDQKLMEFLCNMDNKDLVWLEEIQEEAERMFTREFSKEPELMPKTPSQKNRRKKRRISYVQDENRDPIRRRLSRRKSRSSQLSSRRLRSKDSVEKLATVVGENGSVLRRVTRAAAAAAAATMALAAPSSPTPESPTMLTKKPEDNHTQCQLVPVVEIGISERQNAEQHVTQLMSTEPLPRTLSPTPASATAPTSQGIPTSDEESTPKKSKARILESITVSSLMATPQDPKGQGVGTGRSASKLRIAQVSPGPRDSPAFPDSPWRERVLAPILPDNFSTPTGSRTDSQSVRHSPIAPSSPSPQVLAQKYSLVAKQESVVRRASRRLAKKTAEEPAASGRIICHSYLERLLNVEVPQKVGSEQKEPPEEAEPVAAAEPEVPENNGNNSWPHNDTEIANSTPNPKPAASSPETPSAGQQEAKTDQADGPREPPQSARRKRSYKQAVSELDEEQHLEDEELQPPRSKTPSSPCPASKVVRPLRTFLHTVQRNQMLMTPTSAPRSVMKSFIKRNTPLRMDPKCSFVEKERQRLENLRRKEEAEQLRRQKVEEDKRRRLEEVKLKREERLRKVLQARERVEQMKEEKKKQIEQKFAQIDEKTEKAKEERLAEEKAKKKAAAKKMEEVEARRKQEEEARRLRWLQQEEEERRHQELLQKKKEEEQERLRKAAEAKRLAEQREQERREQERREQERREQERREQERREQERQLAEQERRREQERLQAERELQEREKALRLQKEQLQRELEEKKKKEEQQRLAERQLQEEQEKKAKEAAGASKALNVTVDVQSPACTSYQMTPQGHRAPPKINPDNYGMDLNSDDSTDDEAHPRKPIPTWARGTPLSQAIIHQYYHPPNLLELFGTILPLDLEDIFKKSKPRYHKRTSSAVWNSPPLQGARVPSSLAYSLKKH

SEQ ID NO: 22894 - protein, 66 aa, Homo sapiens
KNSPGTYQELAEAPGDPQWMETIGRDLHRQFPLHEMFVSPQGHGYEAGDAQGPPAPQAPGAPAHFP

SEQ ID NO: 22895 - protein, 39 aa, Homo sapiens
LYRPEQGYCQAQGPVAAVLLMHLPPEVSDLDPALGTLVT

SEQ ID NO: 22896 - protein, 39 aa, Homo sapiens
VPQFPPRQMGLQRLATHIDGAYVQAPVHRKEQNRHSSWS

SEQ ID NO: 22897 - protein, 18 aa, Homo sapiens
LTGLLGKASSGGASRCAA

SEQ ID NO: 22898 - protein, 129 aa, Homo sapiens
LTSVKFLMTSPEIASLSWGQMKVKGSNTTYKDCKVWPGGSRTWDWRETGTEHSPGVQPADVKEVVEKGVQTLVIGRGMSEALKVPSSTVEYLKKHGIDVRVLQTEQAVKEYNALVAQGVRVGGVFHSTC

SEQ ID NO: 22899 - protein, 34 aa, Homo sapiens
LRGQAVTGSMCGILGGSAADLAKWTGLLRRLCRW

SEQ ID NO: 22900 - protein, 56 aa, Homo sapiens
LDDRDLLPRAEPSADLLVNLSRCRRLIVVLSDAFLSRAWCSHSFRWVPRGVGWAPA

SEQ ID NO: 22901 - protein, 14 aa, Homo sapiens
LTMGPERPAPNSRG

SEQ ID NO: 22902 - protein, 152 aa, Homo sapiens
IMGRMHAPGKGLSQSALPYRRSVPTWLKLTSDDVKEQIYKLAKKGLTPSQIGVILRDSHGVAQVRFVTGNKILRILKSKGLAPDLPEDLYHLIKKAVAVRKHLERNRKDKDAKFRLILIESRIHRLARYYKTKRVLPPNWKYESSTASALVA

SEQ ID NO: 22903 - protein, 21 aa, Homo sapiens
MKRSIQVFIQIGIKIINNVCH

SEQ ID NO: 22904 - protein, 27 aa, Homo sapiens
TVFRIRAQELRFSTCSRGAIGIQRITR

SEQ ID NO: 22905 - protein, 6 aa, Homo sapiens
MTVYFC

SEQ ID NO: 22906 - protein, 26 aa, Homo sapiens
LLQERKIGIVQPENIQPPLQCQKSHG

SEQ ID NO: 22907 - protein, 28 aa, Homo sapiens
MTPVAYHGHGVSAFRCCSPLLLQAKARR

SEQ ID NO: 22908 - protein, 226 aa, Homo sapiens
LVWVTGCRMNCRSEVLEVSVEGRQVEEAMLAVLHTVLLHRSTGKFHYKKEGTYSIGTVGTQDVDCDFIDFTYVRVSSEELDRALRKVVGEFKDALRNSGGDGLGQMSLEFYQKKKSRWPFSDECIPWEVWTVKVHVVALATEQERQICREKVGEKLCEKIINIVEVMNRHEYLPKMPTQSEVDNVFDTGLRDVQPYLYKISFQITDALGTSVTTTMRRLIKDTLAL

SEQ ID NO: 22909 - protein, 8 aa, Homo sapiens
MWVWPRPT

SEQ ID NO: 22910 - protein, 145 aa, Homo sapiens
IMTTRQATKDPLLRGVSPTPSKIPVRSQKRTPFPTVTSCAVDQENQDPRRWVQKPPLNIQRPLVDSAGPRPKARHQAETSQRLVGISQPRNPLEELRPSPRGQNVGPGPPAQTVLVPAPGKLFALRRSPFPPAKCHLARCHGLYL

SEQ ID NO: 22911 - protein, 19 aa, Homo sapiens
ISAEMLNVKEYLSKVSCRS

SEQ ID NO: 22912 - protein, 32 aa, Homo sapiens
KMTYFTSWILDSDSTHYIPSCNRKSCYKRMWS

SEQ ID NO: 22913 - protein, 6 aa, Homo sapiens
IRPWLR

SEQ ID NO: 22914 - protein, 59 aa, Homo sapiens
KTTSAGSGTCRLRRSGQNECIHPFPHPCHLEEFSQACSAPCPSSLSTAGSLFNTATFPY

SEQ ID NO: 22915 - protein, 46 aa, Homo sapiens
RTSNLLPSSKIGVIKTATAEDCCEAQRKGLVIGSGFQVLNLHFLHG

SEQ ID NO: 22916 - protein, 42 aa, Homo sapiens
KMDTMMLNVRNLFEQLVRRVEILSEGNEVRTTDSADSRDAHV

SEQ ID NO: 22917 - protein, 42 aa, Homo sapiens
LSRRGNLQVPDHVSVGSGLQDAPRKSAAALCRLSPTPAASSG

SEQ ID NO: 22918 - protein, 13 aa, Homo sapiens
MLGGCWRVAAAKR

SEQ ID NO: 22919 - protein, 28 aa, Homo sapiens
LSHCLRSSGRLAPHTSRRYLEFLQHGRH

SEQ ID NO: 22920 - protein, 397 aa, Homo sapiens
IWSSYNMADIDNKEQSELDQDLDDVEEVEEEETGEETKLKARQLTVQMMQNPQILAALQERLDGLVETPTGYIESLPRVVKRRVNALKNLQVKCAQIEAKFYEEVHDLERKYAVLYQPLFDKRFEIINAIYEPTEEECEWKPDEEDEISEELKEKAKIEDEKKDEEKEDPKGIPEFWLTVFKNVDLLSDMVQEHDEPILKHLKDIKVKFSDAGQPMSFVLEFHFEPNEYFTNEVLTKTYRMRSEPDDSDPFSFDGPEIMGCTGCQIDWKKGKNVTLKTIKKKQKHKGRGTVRTVTKTVSNDSFFNFFAPPEVPESGDLDDDAEAILAADFEIGHFLRERIIPRSVLYFTGEAIEDDDDDYDEEGEEADEEGEEEGDEENDPDYDPKKDQNPAECKQQ

SEQ ID NO: 22921 - protein, 97 aa, Homo sapiens
KALGILGRSESVVSGLDSPAKTSSMEKKLLIKSKELQDSQDKCHKMEQEMTRLHRRVSEVEAVLSQKEVELKASETQRSLLEQDLATYITECSVSLP

SEQ ID NO: 22922 - protein, 38 aa, Homo sapiens
RRKRFLLKDWSSWAMAKKSLKILLDLDSHLEGFRKSRN

SEQ ID NO: 22923 - protein, 27 aa, Homo sapiens
ILGVESALHKYTLYANDDKLVRMSRAA

SEQ ID NO: 22924 - protein, 128 aa, Homo sapiens
LAPPRPARPPPGGMSYKPNLAAHMPAAALNAAGSVHSPSTSMATSSQYRQLLSDYGPPSLGYTQGTGNSQVPQSKYAELLAIIEELGKEIRPTYAGSKSAMERLKRGIIHARGLVRECLAETERNARS

SEQ ID NO: 22925 - protein, 228 aa, Homo sapiens [sequence omitted]

SEQ ID NO: 22926 - protein, 22 aa, Homo sapiens
INKNNIYAVLKTVRRPLRNISS

SEQ ID NO: 22927 - protein, 10 aa, Homo sapiens
MMPSATGKDS

SEQ ID NO: 22928 - protein, 162 aa, Homo sapiens
RLLVFPLFFHEGVFGCNCMKSQWCRPVAMDLGVYQLRHFSISFLSSLLGTENASVRLDNSSSGASVVAIDNKIEQAMDLVKSHLMYAVREEVEVLKEQIKELIEKNSQLEQENNLLKTLASPEQLAQFQAQLQTGSPPATTQPQGTTQPPAQPASQGSGPTA

SEQ ID NO: 22929 - protein, 23 aa, Homo sapiens
LDTFGTLVSVYAILAQMFHYSAG

SEQ ID NO: 22930 - protein, 9 aa, Homo sapiens
MAASSSGNL

SEQ ID NO: 22931 - protein, 9 aa, Homo sapiens
VPTPLLVRR

SEQ ID NO: 22932 - protein, 13 aa, Homo sapiens
MLLRLLTRVALHQ

SEQ ID NO: 22933 - protein, 49 aa, Homo sapiens
IPATVMTSLRQPRLAQLGPPLCQSYLGFTLTLKRNATSACSLDITTATP

SEQ ID NO: 22934 - protein, 121 aa, Homo sapiens [sequence omitted]

SEQ ID NO: 22935 - protein, 29 aa, Homo sapiens
LLTQHRLFYVLNLDSPRGWEGLWTALGEA

SEQ ID NO: 22936 - protein, 292 aa, Homo sapiens
ISTMSFVAYEELIKEGDTAILSLGHGAMVAVRVQRGAQTQTRHGVLRHSVDLIGRPFGSKVTCGRGGWVYVLHPTPELWTLNLPHRTQILYSTDIALITMMLELRPGSVVCESGTGSGSVSHAIIRTIAPTGHLHTVEFHQQRAEKAREEFQEHRVGRWVTVRTQDVCRSGFGVSHVADAVFLDIPSPWEAVGHAWDALKVEGGRFCSFSPCIEQVQRTCQALAARGFSELSTLEVLPQVYNVRTVSLPPPDLGTGTDGPAGSDTSPFRSGTPMKEAVGHTGYLTFATKTPG

SEQ ID NO: 22937 - protein, 42 aa, Homo sapiens
MWKGLCLSATENFILAVFVETAFGKRKEMNFTDLTFLHLPFF

SEQ ID NO: 22938 - protein, 6 aa, Homo sapiens
MKVRTI

SEQ ID NO: 22939 - protein, 34 aa, Homo sapiens
MEMTLTRVPIRVLLKDARPEPLRRLRSIVPFLQP

SEQ ID NO: 22940 - protein, 35 aa, Homo sapiens
LGREVAIAERQEGRGGPGRRPGGGAPLGPARTGFI

SEQ ID NO: 22941 - protein, 12 aa, Homo sapiens
ITRKCRSSEYEK

SEQ ID NO: 22942 - protein, 13 aa, Homo sapiens
KLCLHNHMRKKEQ

SEQ ID NO: 22943 - protein, 51 aa, Homo sapiens
MTTCGEITWIPGLAKSPGIGRTPMRWATAWPSECIYSIRTGSLSLHIGLWD

SEQ ID NO: 22944 - protein, 232 aa, Homo sapiens
MDLVDGIFLNQIMLQIDPRPTNQRINKHVNNDVNLRIQNLTILVRNIKTYYQEVLQQLIVMNLPNVLMIGRDPLSGKSMEEIKKVLLLVLGCAVQCERKEEFIERIKQLDIETQAGIVAHIQEVTHNQENVFDLQWLELPDVAPEELEALSRSMVLHLRRLIDQRDECTELIVDLTQERDYLQAQHPPSPIKSSSADSTPSPTSSLSSEDKQHLAVELADTKARLRRVRQEL

SEQ ID NO: 22945 - protein, 7 aa, Homo sapiens
MRLIGTI

SEQ ID NO: 22946 - protein, 18 aa, Homo sapiens
MPQSSQPKTRGSSPSPRE

SEQ ID NO: 22947 - protein, 1052 aa, Homo sapiens
LRAFGNWKTWWRTRVRTCILPQRVIDVSGMWDQRLVRLALLQHLRAFYGIKVKGVRGQCDRRRHETAATEIGGKIFGVPFNALPHSAVPEYGHIPSFLVDACTSLEDHIHTEGLFRKSGSVIRLKALKNKVDHGEGCLSSAPPCDIAGLLKQFFRELPEPILPADLHEALLKAQQLGTEEKNKATLLLSCLLADHTVHVLRYFFNFLRNVSLRSSENKMDSSNLAVIFAPNLLQTSEGHEKMSSNTEKKLRLQAAVVQTLIDYASDIGRVPDFILEKIPAMLGIDGLCATPSLEGFEEGEYETPGEYKRKRRQSVGDFVSGALNKFKPNRTPSITPQEERIAQLSESPVILTPNAKRTLPVDSSHGFSSKKRKSIKHNFNFELLPSNLFNSSSTPVSVHIDTSSEGSSQSSLSPVLIGGNHLITAGVPRRSKRIAGKKVCRVESGKAGCFSPKISHKEKVRRSLRLKFNLGKNGREVNGCSGVNRYESVGWRLANQQSLKNRIESVKTGLLFSPDVDEKLPKKGSEKISKSEETLLTPERLVGTNYRMSWTGPNNSSFQEVDANEASSMVENLEVENSLEPDIMVEKSPATSCELTPSNLNNKHNSNITSSPLSGDENNMTKETLVKVQKAFSESGSNLHALMNQRQSSVTNVGKVKLTEPSYLEDSPEENLFETNDLTIVESKEKYEHHTGKGEKCFSERDFSPLQTQTFNRETTIKCYSTQMKMEHEKDIHSNMPKDYLSKQEFSSDEEIKKQQSPKDKLNNKLKENENMMEGNLPKCAAHSKDEARSSFSQQSTCVVTNLSKPRPMRIAKQQSLETCEKTVSESSQMTEHRKVSDHIQWFNKLSLNEPNRIKVKSPLKFQRTPVRQSVRRINSLLEYSRQPTGHKLASLGDTASPLVKSVSCDGALSSCIESASKDSSVSCIKSGPKEQKSMSCEESNIGAISKSSMELPSKSFLKMRKHPDSVNASLRSTTVYKQKILSDGQVKVPLDDLTNHDIVKPVVNNNMGISSGINNRVLRRPSERGRAWYKGSPKHPIGKTQLLPTSKPVDL

SEQ ID NO: 22948 - protein, 44 aa, Homo sapiens
LGQASREVERKPGALGAVRVGRVPRPRGEVGARGLLERGALRTE

SEQ ID NO: 22949 - protein, 2340 aa, Homo sapiens
VWTPNKSAQNLSRRFAAAEKFSSKMDGVSSEANEENDNIERPVRRRHSSILKPPRSPLQDLRGGNERVQESNALRNKKNSRRVSFADTIKVFQTESHMKIVRKSEMEETETGENLLLIQNKKLEDNYCEITGMNTLLSAPIHTQMQQKEFSIIEHTRERKHANDQTVIFSDENQMDLTSSHTVMITKGLLDNPISEKSTKIDTTSFLANLKLHTEDSRMKKEVNFSVDQNTSSENKIDFNDFIKRLKTGKCSAFPDVPDKENFEIPIYSKEPNSASSTHQMHVSLKEDENNSNITRLFREKDDGMNFTQCHTANIQTLIPTSSETNSRESKGNDITIYGNDFMDLTFNHTLQILPATGNFSEIENQTQNAMDVTTGYGTKASGNKTVFKSKQNTAFQDLSINSADKIHITRSHIMGAETHIVSQTCNQDARILAMTPESIYSNPSIQGCKTVFYSSCNDAMEMTKCLSNMREEKNLLKHDSNYAKMYCNPDAMSSLTEKTIYSGEENMDITKSHTVAIDNQIFKQDQSNVQIAAAPTPEKEMMLQNLMTTSEDGKMNVNCNSVPHVSKERIQQSLSNPLSISLTDRKTELLSGENMDLTESHTSNLGSQVPLAAYNLAPESTSESHSQSKSSSDECEEITKSRNEPFQRSDIIAKNSLTDTWNKDKDWVLKILPYLDKDSPQSADCNQEIATSHNIVYCGGVLDKQITNRNTVSWEQSLFSTTKPLFSSGQFSMKNHDTAISSHTVKSVLGQNSKLAEPLRKSLSNPTPDYCHDKMIICSEEEQNMDLTKSHTVVIGFGPSELQELGKTNLEHTTGQLTTMNRQIAVKVEKCGKSPIEKSGVLKSNCIMDVLEDESVQKPKFPKEKQNVKIWGRKSVGGPKIDKTIVFSEDDKNDMDITKSYTIEINHRPLLEKRDCHLVPLAGTSETILYTCRQDDMEITRSHTTALECKTVSPDEITTRPMDKTVVFVDNHVELEMTESHTVFIDYQEKERTDRPNFELSQRKSLGTPTVICTPTEESVFFPGNGESDRLVANDSQLTPLEEWSNNRGPVEVADNMELSKSATCKNIKDVQSPGFLNEPLSSKSQRRKSLKLKNDKTIVFSENHKNDMDITQSCMVEIDNESALEDKEDFHLAGASKTILYSCGQDDMEITRSHTTALECKTLLPNEIAIRPMDKTVLFTDNYSDLEVTDSHTVFIDCQATEKILEENPKFGIGKGKNLGVSFPKDNSCVQEIAEKQALAVGNKIVLHTEQKQQLFAATNRTTNEIIKFHSAAMDEKVIGKVVDQACTLEKAQVESCQLNNRDRRNVDFTSSHATAVCGSSDNYSCLPNVISCTDNLEGSAMLLCDKDEEKANYCPVQNDLAYANDFASEYYLESEGQPLSAPCPLLEKEEVIQTSTKGQLDCVITLHKDQDLIKDPRNLLANQTLVYSQDLGEMTKLNSKRVSFKLPKDQMKVYVDDIYVIPQPHFSTDQPPLPKKGQSSINKEEVILSKAGNKSLNIIENSSAPICENKPKILNSEEWFAAACKKELKENIQTTNYNTALDFHSNSDVTKQVIQTHVNAGEAPDPVITSNVPCFHSIKPNLNNLNGKTGEFLAFQTVHLPPLPEQLLELGNKAHNDMHIVQATEIHNINIISSNAKDSRDEENKKSHNGAETTSLPPKTVFKDKVRRCSLGIFLPRLPNKRNCSVTGIDDLEQIPADTTDINHLETQPVSSKDSGIGSVAGKLNLSPSQYINEENLPVYPDEINSSDSINIETEEKALIETYQKEISPYENKMGKTCNSQKRTWVQEEEDIHKEKKIRKNEIKFSDTTQDREIFDHHTEEDIDKSANSVLIKNLSRTPSSCSSSLDSIKADGTSLDFSTYRSSQMESQFLRDTICEESLREKLQDGRITIREFFILLQVHILIQKPRQSNLPGNFTVNTPPTPEDLMLSQYVYRPKIQIYREDCEARRQKIEELKLSASNQDKLLVDINKNLWEKMRHCSDKELKAFGIYLNKIKSCFTKMTKVFTHQGKVALYGKLVQSAQNEREKLQIKIDEMDKILKKIDNCLTEMETETKNLEDEEKNNPVEEWDSEMRAAEKELEQLKTEEEELQRNLLELEVQKEQTLAQIDFMQKQRNRTEELLDQLSLSEWDVVEWSDDQAVFTFVYDTIQLTITFEESVVGFPFLDKRYRKIVDVNFQSLLDEDQAPPSSLLVHKLIFQYVEEKESWKKTCTTQHQLPKMLEEFSLVVHHCRLLGEEIEYLKRWGPNYNLMNIDINNNELRLLFSSSAAFAKFEITLFLSAYYPSVPLPSTIQNHVGNTSQDDIATILSKVPLENNYLKNVVKQIYQDLFQDCHFYH

SEQ ID NO: 22950 - protein, 28 aa, Homo sapiens
LNNYRAGLGGTDSIFRSLMGCWVDGAGK

SEQ ID NO: 22951 - protein, 74 aa, Homo sapiens
IFASLSSLNSTRAMCNSRITIHLNRAKVGYMESTCGPSAQGWILFCSLIAKHCLIWNKSSWVIPISPYHMSTTS

SEQ ID NO: 22952 - protein, 24 aa, Homo sapiens
TLIVRSPLPPVVSSLAFWLCHALL

SEQ ID NO: 22953 - protein, 13 aa, Homo sapiens
VLGPSEEAKAALG

SEQ ID NO: 22954 - protein, 14 aa, Homo sapiens
KRALMVPSDRLALL

SEQ ID NO: 22955 - protein, 39 aa, Homo sapiens
MRGGHISSGYSVSGGGLFFRGVKGSVDISGLQGLPSGTI

SEQ ID NO: 22956 - protein, 12 aa, Homo sapiens
MSLIWKARAPLE

SEQ ID NO: 22957 - protein, 10 aa, Homo sapiens
LTLLVFTVWN

SEQ ID NO: 22958 - protein, 359 aa, Homo sapiens
LRPRAKMATEGLHENETLASLKSEAESLKGKLEEERAKLHDVELHQVAERVEALGQFVMKTRRTLKGHGNKVLCMDWCKDKRRIVSSSQDGKVIVWDSFTTNKEHAVTMPCTWVMACAYAPSGCAIACGGLDNKCSVYPLTFDKNENMAAKKKSVAMHTNYLSACSFTNSDMQILTASGDGTCALWDVESGQLLQSFHGHGADVLCLDLAPSETGNTFVSGGCDKKAMVWDMRSGQCVQAFETHESDINSVRYYPSGDAFASGSDDATCRLYDLRADREVAIYSKESIIFGASSVDFSLSGRLLFAGYNDYTINVWDVLKGSRVSILFGHENRVSTLRVSPDGTAFCSGSWDHTLRVWA

SEQ ID NO: 22959 - protein, 25 aa, Homo sapiens
LSWTTVGRMKANSKASQMNLKNWNS

SEQ ID NO: 22960 - protein, 46 aa, Homo sapiens
KMRTKKRRCRTPRPWTCSRRVWLWWCRTRCSAICRSRLLWKKSTPK

SEQ ID NO: 22961 - protein, 16 aa, Homo sapiens
VAINVRASIALSSSLR

SEQ ID NO: 22962 - protein, 23 aa, Homo sapiens
IVNGCGSKWLWVLLRLVRRRSSQ

SEQ ID NO: 22963 - protein, 153 aa, Homo sapiens
LMGPPSLHSPTPSLGPLGALVLSSQHTSPDSCKSPWTLKAVRAARQAADFTLKVEVECSSLQEAVQAAEAGADLVLLDNFKPEELHPTATVLKAQFPSVAVEASGGITLDNLPQFCGPHIDVISMGMLTQAAPALDFSLKLFAKEVAPVPKIH

SEQ ID NO: 22964 - protein, 111 aa, Homo sapiens
VTEVRADTGGLGRSITSPTTLYDRYSSPPASTTRRRLFVENDSPSDGGTPGRMPPQPLVNAVPVQNVSGETVSVTPVPGQTLVTMATATVTANNGQTVTIPVQGKEGRVGY

SEQ ID NO: 22965 - protein, 6 aa, Homo sapiens
MKMTYR

SEQ ID NO: 22966 - protein, 189 aa, Homo sapiens
IRCSNPGGKMRPLTEEETRVMFEKIAKYIGENLQLLVDRPDGTYCFRLHNDRVYYVSEKIMKLAANISGDKLVSLGTCFGKFTKTHKFRLHVTALDYLAPYAKYKVWIKPGAEQSFLYGNHVLKSGLGRITENTSQYQGVVVYSMADIPLGFGVAAKSTQDCRKVDPMAIVVFHQADIGEYVRHEETLT

SEQ ID NO: 22967 - protein, 26 aa, Homo sapiens
VKSAAALPGRNLPSTGKGGQQMCRAW

SEQ ID NO: 22968 - protein, 240 aa, Homo sapiens
KMAATLLAARGAGPAPAWGPEAFTPDWESREVSTGTTIMAVQFDGGVVLGADSRTTTGSYIANRVTDKLTPIHDRIFCCRSGSAADTQAVADAVTYQLGFHSIELNEPPLVHTAASLFKEMCYRYREDLMAGIIIAGWDPQEGGQVYSVPMGGMMVRQSFAIGGSGSSYIYGYVDATYREGMTKEECLQFTANALALAMERDGSSGGVIRLAAIAESGVERQVLLGDQIPKFAVATLPPA

SEQ ID NO: 22969 - protein, 12 aa, Homo sapiens
VLGPGGARSPLD

SEQ ID NO: 22970 - protein, 272 aa, Homo sapiens
VQVKEQSILELGSLLAKTGQAAELGGLLKYVRPFLNSISKAKAARLVRSLLDLFLDMEAATGQEVELCLECIEWAKSEKRTFLRQALEARLVSLYFDTKRYQEALHLGSQLLRELKKMDDKALLVEVQLLESKTYHALSNLPKARAALTSARTTANAIYCPPKLQATLDMQSGIIHAAEEKDWKTAYSYFYEAFEGYDSIDSPKAITSLKYMLLCKIMLNTPEDVQALVSGKLALRYAGRQTEALKCVAQASKNRSLADFEKVSMILGWYGM

SEQ ID NO: 22971 - protein, 9 aa, Homo sapiens
LVLPPTMQV

SEQ ID NO: 22972 - protein, 8 aa, Homo sapiens
IALAIEGS

SEQ ID NO: 22973 - protein, 408 aa, Homo sapiens
RIMSASQDSRSRDNGPDGMEPEGVIESNWNEIVDSFDDMNLSESLLRGIYAYGFEKPSAIQQRAILPCIKGYDVIAQAQSGTGKTATFAISILQQIELDLKATQALVLAPTRELAQQIQKVVMALGDYMGASCHACIGGTNVRAEVQKLQMEAPHIIVGTPGRVFDMLNRRYLSPKYIKMFVLDEADEMLSRGFKDQIYDIFQKLNSNTQVVLLSATMPSDVLEVTKKFMRDPIRILVKKEELTLEGIRQFYINVEREEWKLDTLCDLYETLTITQAVIFINTRRKVDWLTEKMHARDFTVSAMHGDMDQKERDVIMREFRSGSSRVLITTDLLARGIDVQQVSLVINYDLPTNRENYIHRIGRGGRFGRKGVAINMVTEEDKRTLRDIETFYNTSIEEMPLNVADLI

SEQ ID NO: 22974 - protein, 19 aa, Homo sapiens
MKSPMPTPVSRSGSSSKMG

SEQ ID NO: 22975 - protein, 26 aa, Homo sapiens
LAATYPILSCEQGPRAALTKATVNTV

SEQ ID NO: 22976 - protein, 24 aa, Homo sapiens
LMMAPQIAPTAMLWWLELTATPAK

SEQ ID NO: 22977 - protein, 8 aa, Homo sapiens
MFCDPGVK

SEQ ID NO: 22978 - protein, 225 aa, Homo sapiens
RDMTGTPGAVATRDGEAPERSPPCSPSYDLTGKVMLLGDTGVGKTCFLIQFKDGAFLSGTFIATVGIDFRNKVVTVDGVRVKLQIWDTAGQERFRSVTHAYYRDAQALLLLYDITNKSSFDNIRAWLTEIHEYAQRDVVIMLLGNKADMSSERVIRSEDGETLAREYGVPFLETSAKTGMNVELAFLAIAKELKYRAGHQADEPSFQIRDYVESQKKRSSCCSFM

SEQ ID NO: 22979 - protein, 73 aa, Homo sapiens
MGRLRPWLCVPLRVGAGLGPNSTAAGFSLISEPRRWQSGRPGQVNPRAAGAQAPTPAQRGRKGPPPAQRAQRP

SEQ ID NO: 22980 - protein, 28 aa, Homo sapiens
IMQAPGSTEDHLRKFFLSKLWSNMSHEW

SEQ ID NO: 22981 - protein, 42 aa, Homo sapiens
TASSLRPLVMMIKGGGCGLENSHVKTHHLKVLSVRIFMMKFL

SEQ ID NO: 22982 - protein, 12 aa, Homo sapiens
IVSWVFVTYKLS

SEQ ID NO: 22983 - protein, 39 aa, Homo sapiens
VALSFFIFERWECTTYWYIFVFCRCGSIQYLGMREEGWP

SEQ ID NO: 22984 - protein, 1981 aa, Homo sapiens
IVPFTMAQRTGLEDPERYLFVDRAVIYNPATQADWTAKKLVWIPSERHGFEAASIKEERGDEVMVELAENGKKAMVNKDDIQKMNPPKFSKVEDMAELTCLNEASVLHNLKDRYYSGLIYTYSGLFCVVINPYKNLPIYSENIIEMYRGKKRHEMPPHIYAISESAYRCMLQDREDQSILCTGESGAGKTENTKKVIQYLAHVASSHKGRKDHNIPGELERQLLQANPILESFGNAKTVKNDNSSRFGKFIRINFDVTGYIVGANIETYLLEKSRAVRQAKDERTFHIFYQLLSGAGEHLKSDLLLEGFNNYRFLSNGYIPIPGQQDKDNFQETMEAMHIMGFSHEEILSMLKVVSSVLQFGNISFKKERNTDQASMPENTVAQKLCHLLGMNVMEFTRAILTPRIKVGRDYVQKAQTKEQADFAVEALAKATYERLFRWLVHRINKALDRTKRQGASFIGILDIAGFEIFELNSFEQLCINYTNEKLQQLFNHTMFILEQEEYQREGIEWNFIDFGLDLQPCIDLIERPANPPGVLALLDEECWFPKATDKTFVEKLVQEQGSHSKFQKPRQLKDKADFCIIHYAGKVDYKADEWLMKNMDPLNDNVATLLHQSSDRFVAELWKDVDRIVGLDQVTGMTETAFGSAYKTKKGMFRTVGQLYKESLTKLMATLRNTNPNFVRCIIPNHEKRAGKLDPHLVLDQLRCNGVLEGIRICRQGFPNRIVFQEFRQRYEILTPNAIPKGFMDGKQACERMIRALELDPNLYRIGQSKIFFRAGVLAHLEEERDLKITDIIIFFQAVCRGYLARKAFAKKQQQLSALKVLQRNCAAYLKLRHWQWWRVFTKVKPLLQVTRQEEELQAKDEELLKVKEKQTKVEGELEEMERKHQQLLEEKNILAEQLQAETELFAEAEEMRARLAAKKQELEEILHDLESRVEEEEERNQILQNEKKKMQAHIQDLEEQLDEEEGARQKLQLEKVTAEAKIKKMEEEILLLEDQNSKFIKEKKLMEDRIAECSSQLAEEEEKAKNLAKIRNKQEVMISDLEERLKKEEKTRQELEKAKRKLDGETTDLQDQIAELQAQIDELKLQLAKKEEELQGALARGDDETLHKNNALKVVRELQAQIAELQEDFESEKASRNKAEKQKRDLSEELEALKTELEDTLDTTAAQQELRTKREQEVAELKKALEEETKNHEAQIQDMRQRHATALEELSEQLEQAKRFKANLEKNKQGLETDNKELACEVKVLQQVKAESEHKRKKLDAQVQELHAKVSEGDRLRVELAEKASKLQNELDNVSTLLEEAEKKGIKFAKDAASLESQLQDTQELLQEETRQKLNLSSRIRQLEEEKNSLQEQQEEEEEARKNLEKQVLALQSQLADTKKKVDDDLGTIESLEEAKKKLLKDAEALSQRLEEKALAYDKLEKTKNRLQQELDDLTVDLDHQRQVASNLEKKQKKFDQLLAEEKSISARYAEERDRAEAEAREKETKALSLARALEEALEAKEEFERQNKQLRADMEDLMSSKDDVGKNVHELEKSKRALEQQVEEMRTQLEELEDELQATEDAKLRLEVNMQAMKAQFERDLQTRDEQNEEKKRLLIKQVRELEAELEDERKQRALAVASKKKMEIDLKDLEAQIEAANKARDEVIKQLRKLQAQMKDYQRELEEARASRDEIFAQSKESEKKLKSLEAEILQLQEELASSERARRHAEQERDELADEITNSASGKSALLDEKRRLEARIAQLEEELEEEQSNMELLNDRFRKTTLQVDTLNAELAAERSAAQKSDNARQQLERQNKELKAKLQELEGAVKSKFKATISALEAKIGQLEEQLEQEAKERAAANKLVRRTEKKLKEIFMQVEDERRHADQYKEQMEKANARMKQLKRQLEEAEEEATRANASRRKLQRELDDATEANEGLSREVSTLKNRLRRGGPISFSSSRSGRRQLHLEGASLELSDDDTESKTSDVNETQPPQSE

SEQ ID NO: 22985 - protein, 240 aa, Homo sapiens
LTERPHRSRRPRARYAPGIMGEKSRRKGPAPRHADGKLGRTCDHPYAPWSFTPSSRAPTAWVRPPCPVWASRLQEHSPEPRRARAPPTRRAQAALYAPALRLRDHLDRFSILMTSCTSWLQAPQAPGLCRDEQSSRISVPQLSGAPILLPDLEGTKLSNFQESSPLPHKHERKDKRSTPEEEGRSAPEKIIQSLKLCPGGHRPASLSSGCPAGCRLSFNLPPSMLLSVQKCCMPSSLKTC

SEQ ID NO: 22986 - protein, 1195 aa, Homo sapiens
LKMWRVKKLSLSLSPSPQTGKPSMRTPLRELTLQPGALTNSGKRSPACSSLTPSLCKLGLQEGSNNSSPVDFVNNKRTDLSSEHFSHSSKWLETCQHESDEQPLDPIPQISSTPKTSEEAVDPLGNYMVKTIVLVPSPLGQQQDMIFEARLDTMAETNSISLNGPLRTDDLVREEVAPCMGDRFSEVAAVSEKPIFQESPSHLLEESPPNPCSEQLHCSKESLSSRTEAVREDLVPSESNAFLPSSVLWLSPSTALAADFRVNHVDPEEEIVEHGAMEEREMRFPTHPKESETEDQALVSSVEDILSTCLTPNLVEMESQEAPGPAVEDVGRILGSDTESWMSPLAWLEKGVNTSVMLENLRQSLSLPSMLRDAAIGTTPFSTCSVGTWFTPSAPQEKSTNTSQTGLVGTKHSTSETEQLLCGRPPDLTALSRHDLEDNLLSSLVILEVLSRQLRDWKSQLAVPHPETQDSSTQTDTSHSGITNKLQHLKESHEMGQALQQARNVMQSWVLISKELISLLHLSLLHLEEDKTTVSQESRRAETLVCCCFDLLKKLRAKLQSLKAEREEARHREEMALRGKDAAEIVLEAFCAHASQRISQLEQDLASMREFRGLLKDAQTQLVGLHAKQEELVQQTVSLTSTLQQDWRSMQLDYTTWTALLSRSRQLTEKLTVKSQQALQERDVAIEEKQEVSRVLEQVSAQLEECKGQTEQLELENSRLATDLRAQLQILANMDSQLKELQSQHTHCAQDLAMKDELLCQLTQSNEEQAAQWQKEEMALKHMQAELQQQQAVLAKEVRDLKETLEFADQENQVAHLELGQVECQLKTTLEVLRERSLQCENLKDTVENLTAKLASTIADNQEQDLEKTRQYSQKLGLLTEQLQSLTLFLQTKLKEKTEQETLLLSTACPPTQEHPLPNDRTFLGSILTAVADEEPESTPVPLLGSDKSAFTRVASMVSLQPAETPGMEESLAEMSIMTTELQSLCSLLQESKEEAIRTLQRKICELQARLQAQEEQHQEVQKAKEADIEKLNQALCLRYKNEKELQEVIQQQNEKILEQIDKSGELISLREEVTHLTRSLRRAETETKVLQEALAGQLDSNCQPMATNWIQEKVWLSQEVDKLRVMFLEMKNEKEKLMIKFQSHRNILEENLRRSDKELEKLDDIVQHIYKTLLSIPEVVRGCKELQGLLEFLS

SEQ ID NO: 22987 - protein, 1539 aa, Homo sapiens
LSPFTTVTMEVSPLQPVNENMQVNKIKKNEDAKKRLSVERIYQKKTQLEHILLRPDTYIGSVELVTQQMWVYDEDVGINYREVTFVPGLYKIFDEILVNAADNKQRDPKMSCIRVTIDPENNLISIWNNGKGIPVVEHKVEKMYVPALIFGQLLTSSNYDDDEKKVTGGRNGYGAKLCNIFSTKFTVETASREYKKMFKQTWMDNMGRAGEMELKPFNGEDYTCITFQPDLSKFKMQSLDKDIVALMVRRAYDIAGSTKDVKVFLNGNKLPVKGFRSYVDMYLKDKLDETGNSLKVIHEQVNHRWEVCLTMSEKGFQQISFVNSIATSKGGRHVDYVADQIVTKLVDVVKKKNKGGVAVKAHQVKNHMWIFVNALIENPTFDSQTKENMTLQPKSFGSTCQLSEKFIKAAIGCGIVESILNWVKFKAQVQLNKKCSAVKHNRIKGIPKLDDANDAGGRNSTECTLILTEGDSAKTLAVSGLGVVGRDKYGVFPLRGKILNVREASHKQIMENAEINNIIKIVGLQYKKNYEDEDSLKTLRYGKIMIMTDQDQDGSHIKGLLINFIHHNWPSLLRHRFLEEFITPIVKVSKNKQEMAFYSLPEFEEWKSSTPNHKKWKVKYYKGLGTSTSKEAKEYFADMKRHRIQFKYSGPEDDAAISLAFSKKQIDDRKEWLTNFMEDRRQRKLLGLPEDYLYGQTTTYLTYNDFINKELILFSNSDNERSIPSMVDGLKPGQRKVLFTCFKRNDKREVKVAQLAGSVAEMSSYHHGEMSLMMTIINLAQNFVGSNNLNLLQPIGQFGTRLHGGKDSASPRYIFTMLSSLARLLFPPKDDHTLKFLYDDNQRVEPEWYIPIIPMVLINGAEGIGTGWSCKIPNFDVREIVNNIRRLMDGEEPLPMLPSYKNFKGTIEELAPNQYVISGEVAILNSTTIEISELPVRTWTQTYKEQVLEPMLNGTEKTPPLITDYREYHTDTTVKFVVKMTEEKLAEAERVGLHKVFKLQTSLTCNSMVLFDHVGCLKKYDTVLDILRDFFELRLKYYGLRKEWLLGMLGAESAKLNNQARFILEKIDGKIIIENKPKKELIKVLIQRGYDSDPVKAWKEAQQKVPDEEENEESDNEKETEKSDSVTDSGPTFNYLLDMPLWYLTKEKKDELCRLRNEKEQELDTLKRKSPSDLWKEDLATFIEELEAVEAKEKQDEQVGLPGKGGKAKGKKTQMAEVLPSPRGQRVIPRITIEMKAEAEKKNKKKIKNENTEGSPQEDGVELEGLKQRLEKKQKREPGTKTKKQTTLAFKPIKKGKKRNPWSDSESDRSSDESNFDVPPRETEPRRAATKTKFTMDLDSDEDFSDFDEKTDDEDFVPSDASPPKTKTSPKLSNKELKPQKSVVSDLEADDVKGSVPLSSSPPATHFPDETEITNPVPKKNVTVKKTAAKSQSSTSTTGAKKRAAPKGTKRDPALNSGVSQKPDPAKTKNRRKRKPSTSDDSDSNFEKIVSKAVTSKKSKGESDDFHMDFDSAVAPRAKSVRAKKPIKYLEESDEDDLF

SEQ ID NO: 22988 - protein, 280 aa, Homo sapiens
LESTRVRELPGGAMSCINLPTVLPGSPSKTRGQIQVILGPMFSGKSTELMRRVRRFQIAQYKCLVIKYAKDTRYSSSFCTHDRNTMEALPACLLRDVAQEALGVAVIGIDEGQFFPDIVEFCEAMANAGKTVIVAALDGTFQRKPFGAILNLVPLAESVVKLTAVCMECFREAAYTKRLGTEKEVAPPAFPAGRRGGGMALPPSCPGPSPIPCPCGQVEVIGGADKYHSVCRLCYFKKASGQPAGPDNKENCPVPGKPGEAVAARKLFAPQQILQCSPAN

SEQ ID NO: 22989 - protein, 6 aa, Homo sapiens
LGSRVV

SEQ ID NO: 22990 - protein, 898 aa, Homo sapiens
KMNISGSSCGSPNSADTSSDFKDLWTKLKECHDREVQGLQVKVTKLKQERILDAQRLEEFFTKNQQLREQQKVLHETIKVLEDRLRAGLCDRCAVTEEHMRKKQQEFENIRQQNLKLITELMNERNTLQEENKKLSEQLQQKIENDQQHQAAELECEEDVIPDSPITAFSFSGVNRLRRKENPHVRYIEQTHTKLEHSVCANEMRKVSKSSTHPQHNPNENEILVADTYDQSQSPMAKAHGTSSYTPDKSSFNLATVVAETLGLGVQEESETQGPMSPLGDELYHCLEGNHKKQPFEESTRNTEDSLRFSDSTSKTPPQEELPTRVSSPVFGATSSIKSGLDLNTSLSPSLLQPGKKKHLKTLPFSNTCISRLEKTRSKSEDSALFTHHSLGSEVNKIIIQSSNKQILINKNISESLGEQNRTEYGKDSNTDKHLEPLKSLGGRTSKRKKTEEESEHEVSCPQASFDKENAFPFPMDNQFSMNGDCVMDKPLDLSDRFSAIQRQEKSQGSETSKNKFRQVTLYEALKTIPKGFSSSRKASDGNCTLPKDSPGEPCSQECIILQPLNKCSPDNKPSLQIKEENAVFKIPLRPRESLETENVLDDIKSAGSHEPIKIQTRSDHGGCELASVLQLNPCRTGKIKSLQNNQDVSFENIQWSIDPGADLSQYKMDVTVIDTKDGSQSKLGGETVDMDCTLVSETVLLKMKKQEQKGEKSSNEERKMNDSLEDMFDRTTHEEYESCLADSFSQAADEEEELSTATKKLHTHGDKQDKVKQKAFVEPYFKGDERETSLQNFPHIEVVRKKEERRKLLGHTCKECEIYYADMPAEEREKKLASCSRHRFRYIPPNTPENFWEVGFPSTQTCMERGYIKEDLDPCPRPKRRQPYNAIFSPKGKEQKT

SEQ ID NO: 22991 - protein, 6 aa, Homo sapiens
ITCLMK

SEQ ID NO: 22992 - protein, 11 aa, Homo sapiens
MQSTSNKIAGL

SEQ ID NO: 22993 - protein, 20 aa, Homo sapiens
IVFSFSFKASGVAATLPGSL

SEQ ID NO: 22994 - protein, 6 aa, Homo sapiens
MKTTTL

SEQ ID NO: 22995 - protein, 10 aa, Homo sapiens
LQVRYKRLFS

SEQ ID NO: 22996 - protein, 55 aa, Homo sapiens
VDYNCNMTLEELVACDNAAQKMQTVTAAVEELLVAAQRQDRLTVGVYESAKLMNV

SEQ ID NO: 22997 - protein, 208 aa, Homo sapiens
RAMARGGWRRLRRLLSAGQLLFQGRALLVTNTLGCGALMAAGDGVRQSWEIRARPGQVFDPRRSASMFAVGCSMGPFLHYWYLSLDRLFPASGLRGFPNVLKKVLVDQLVASPLLGVWYFLGLGCLEGQTVGESCQELREKFWEFYKADWCVWPAAQFVNFLFVPPQFRVTYINGLTLGWDTYLSYLKYRSPVPLTPPGCVALDTRAD

SEQ ID NO: 22998 - protein, 24 aa, Homo sapiens
KQQPPPDRSWILKIDPRDCINFRN

SEQ ID NO: 22999 - protein, 13 aa, Homo sapiens
TEGLSVSSMRACG

SEQ ID NO: 23000 - protein, 54 aa, Homo sapiens
RPSWTSTTASWRRQRFSGCRSLPTSPLNLTALGLTSSPRMSSGGSCRRWCKASR

SEQ ID NO: 23001 - protein, 457 aa, Homo sapiens
KLVLKSRQLFLGRPVDRASAAETMSADGAEADGSTQVTVEEPVQQPSVVDRVASMPLISSTCDMVSAAYASTKESYPHIKTVCDAAEKGVRTLTAAAVSGAQPILSKLEPQIASASEYAHRGLDKLEENLPILQQPTEKVLADTKELVSSKVSGAQEMVSSAKDTVATQLSEAVDATRGAVQSGVDKTKSVVTGGVQSVMGSRLGQMVLSGVDTVLGKSEEWADNHLPLTDAELARIATSLDGFDVASVQQQRQEQSYFVRLGSLSERLRQHAYEHSLGKLRATKQRAQEALLQLSQVLSLMETVKQGVDQKLVEGQEKLHQMWLSWNQKQLQGPEKEPPKPEQVESRALTMFRDIAQQLQATCTSLGSSIQGLPTNVKDQVQQARRQVEDLQATFSSIHSFQDLSSSILAQSRERVASAREALDHMVEYVAQNTPVTWLVGPFAPGITEKAPEEKK

SEQ ID NO: 23002 - protein, 149 aa, Homo sapiens
IKVPGEKDTQKVVVDLSEQEEEKVELKESENLASGDQPRTAAVGEICEEGLHVLEGLAASGLRSIRFALEVPGLRSVVANDASTRAVDLIRRNVQLNDVAHLVQPSQADARMLMYQHQRVSERFDVIDLDPYGSPATFLDAAVQAGCCV

SEQ ID NO: 23003 - protein, 277 aa, Homo sapiens
LRIVLHSLDLRANCYQRFVVPLLSISADFYVRVFVRVFTGQAKVKASASKQALVFQCVGCGAFHLQRLGKASGVPSGRAKFSAACGPPVTPECEHCGQRHQLGGPMWAEPIHDLDFVGRVLEAVSANPGRFHTSERIRGVLSVITEELPDVPLYYTLDQLSSTIHCNTPSLLQLRSALLHADFRVSLSHACKNAVKTDAPASALWDIMRCWEKECPVKRERLSETSPAFRILSVEPRLQANFTIREDANPSSRQRGLKRFQANPEANWGPRPRARPG

SEQ ID NO: 23004 - protein, 49 aa, Homo sapiens
MQPQPRCVSSLWTSSRPTSTSMRYTMRRRSGGPSRRHPRIRATRRRRRS

SEQ ID NO: 23005 - protein, 31 aa, Homo sapiens
ILASQPSVSKTQAARVPASRIQASGICATRT

SEQ ID NO: 23006 - protein, 17 aa, Homo sapiens
LGNLNTPASKSQGTSVL

SEQ ID NO: 23007 - protein, 939 aa, Homo sapiens
KEQLTDEEKCWTGRENSDANMQRSIMSFFHPKKEGKAKKPEKEASNSSRETEPPPKAALKEWNGVVSESDSPVKRPGRKAARVLGSEGEEEDEALSPAKGQKPALDCSQVSPPRPATSPENNASLSDTSPMDSSPSGIPKRRTARKQLPKRTIQEVLEEQSEDEDREAKRKKEEEEEETPKESLTEAEVATEKEGEDGDQPTTPPKPLKTSKAETPTESVSEPEVATKQELQEEEEQTKPPRRAPKTLSSFFTPRKPAVKKEVKEEEPGAPGKEGAAEGPLDPSGYNPAKNNYHPVEDACWKPGQKVPYLAVARTFEKIEEVSARLRMVETLSNLLRSVVALSPPDLLPVLYLSLNHLGPPQQGLELGVGDGVLLKAVAQATGRQLESVRAEAAEKGDVGLVAENSRSTQRLMLPPPPLTASGVFSKFRDIARLTGSASTAKKIDIIKGLFVACRHSEARFIARSLSGRLRLGLAEQSVLAALSQAVSLTPPGQEFPPAMVDAGKGKTAEARKTWLEEQGMILKQTFCEVPDLDRIIPVLLEHGLERLPEHCKLSPGIPLKPMLAHPTRGISEVLKRFEEAAFTCEYKYDGQRAQIHALEGGEVKIFSRNQEDNTGKYPDIISRIPKIKLPSVTSFILDTEAVAWDREKKQIQPFQVLTTRKRKEVDASEIQVQVCLYAFDLIYLNGESLVREPLSRRRQLLRENFVETEGEFVFATSLDTKDIEQIAEFLEQSVKDSCEGLMVKTLDVDATYEIAKRSHNWLKLKKDYLDGVGDTLDLVVIGAYLGRGKRAGRYGGFLLASYDEDSEELQAICKLGTGFSDEELEEHHQSLKALVLPSPRPYVRIDGAVIPDHWLDPSAVWEVKCADLSLSPIYPAARGLVDSDKGISLRFPRFIRVREDKQPEQATTSAQVACLYRKQSQIQNQQGEDSGSDPEDTY

SEQ ID NO: 23008 - protein, 43 aa, Homo sapiens
RDTELAISALRARTATGSPGSCRCTAGPLPCASALESCCCRVT

SEQ ID NO: 23009 - protein, 67 aa, Homo sapiens
VGEQQAMRERRDLEVLDVPVDNLKEHGTWDMTAPSIPSGGRQSLSVRQHPAFMRTVCCLLTEPPVVY

SEQ ID NO: 23010 - protein, 57 aa, Homo sapiens
TATTTTPARVPSLFPPQPPFSSLPYVPECGSTASFPAARLPPDLSARVSPIPRGRWC

SEQ ID NO: 23011 - protein, 21 aa, Homo sapiens
IATLSQTCRPDRLIKPQKVTC

SEQ ID NO: 23012 - protein, 19 aa, Homo sapiens
TLTPSSAARGPERPEQPGS

SEQ ID NO: 23013 - protein, 18 aa, Homo sapiens
LTPSSAARGPERPEQPGS

SEQ ID NO: 23014 - protein, 26 aa, Homo sapiens
IPTRSYSNGTQRCKSANTNRIFKENT

SEQ ID NO: 23015 - protein, 30 aa, Homo sapiens
VMRWGAQPRAAQRPSWPAPDRAEDPWPWAW

SEQ ID NO: 23016 - protein, 36 aa, Homo sapiens
MQKDPTATSTLMRSCMTRWSWSPRRVTAAFWSRLAS

SEQ ID NO: 23017 - protein, 8 aa, Homo sapiens
ISRNLQTS

SEQ ID NO: 23018 - protein, 45 aa, Homo sapiens
LMQEPSAVVGEVSAGAALPPGPGADPSDFPSVPSPLEPQPCLGTR

SEQ ID NO: 23019 - protein, 231 aa, Homo sapiens
KMGKVRGLRARVHQAAVRPKGEAAPGPAPPAPEATPPPASAAGKDWAFINTNIFARTKIDPSALVQKLELDVRSVTSVRRGEAGSSARSVPSIRRGAEAKTVLPKKEKMKLRREQWLQKIEAIKLAEQKHREERRRRATVVVGDLHPLRDALPELLGLEAGSRRQARSRESNKPRPSELSRMSAAQRQQLLEEERTRFQELLASPAYRASPLVAIGQTLARQMQLEDGGQL

SEQ ID NO: 23020 - protein, 310 aa, Homo sapiens
TRAWPPDDAGAARAGRGSLRSLLPSAGPLRRSPQFPARTRSGPPNLRPKSGGGSGGKKMKNEIAAVVFFFTRLVRKHDKLKKEAVERFAEKLTLILQEKYKNHWYPEKPSKGQAYRCIRVNKFQRVDPDVLKACENSCILYSDLGLPKELTLWVDPCEVCCRYGEKNNAFIVASFENKDENKDEISRKVTRALDKVTSDYHSGSSSSDEETSKEMEVKPSSVTAAASPVYQISELIFPPLPMWHPLPRKKPGMYRGNGHQNHYPPPVPFGYPNQGRKNKPYRPIPVTWVPPPGMHCDRNHWINPHMLAPH

SEQ ID NO: 23021 - protein, 10 aa, Homo sapiens
VAAEALAARD

SEQ ID NO: 23022 - protein, 77 aa, Homo sapiens
RPCSSVTTCNIRWFQFLGGKNLKLHFLSIKNRSNYSLNKMMTLKFPPMKTSSGMKRRMKSIQEMTVMGQSLLRSAHG

SEQ ID NO: 23023 - protein, 21 aa, Homo sapiens
TTDPAEPPPPPRPHGGRQGHS

SEQ ID NO: 23024 - protein, 316 aa, Homo sapiens
VPESPPFGPLQARSPSVAAMASPQLCRALVSAQWVAEALRAPRAGQPLQLLDASWYLPKLGRDARREFEERHIPGAAFFDIDQCSDRTSPYDHMLPGAEHFAEYAGRLGVGAATHVVIYDASDQGLYSAPRVWWMFRAFGHHAVSLLDGGLRHWLRQNLPLSSGKSQPAPAEFRAQLDPAFIKTYEDIKENLESRRFQVVDSRATGRFRGTEPEPRDGIEPGHIPGTVNIPFTDFLSQEGLEKSPEEIRHLFQEKKVDLSKPLVATCGSGVTACHVALGAYLCGKPDVPIYDGSWVEWYMRARPEDVISEGRGKTH

SEQ ID NO: 23025 - protein, 50 aa, Homo sapiens
MTLRRKTFFFWPMKNLTSIFHCLLRVQMKMMKSSSDPLDIKKDVLLPAWN

SEQ ID NO: 23026 - protein, 525 aa, Homo sapiens
VESPSEPFPSPGIPMLVDGPSERPALCFLLLAVAMSFFGSALSIDETRAHLLLKEKMMRLGGRLVLNTKEELANERLMTLKIAEMKEAMRTLIFPPSMHFFQAKHLIERSQVFNILRMMPKGAALHLHDIGIVTMDWLVRNVTYRPHCHICFTPRGIMQFRFAHPTPRPSEKCSKWILLEDYRKRVQNVTEFDDSLLRNFTLVTQHPEVIYTNQNVVWSKFETIFFTISGLIHYAPVFRDYVFRSMQEFYEDNVLYMEIRARLLPVYELSGEHHDEEWSVKTYQEVAQKFVETHPEFIGIKIIYSDHRSKDVAVIAESIRMAMGLRIKFPTVVAGFDLVGHEDTGHSLHDYKEALMIPAKDGVKLPYFFHAGETDWQGTSIDRNILDALMLNTTRIGHGFALSKHPAVRTYSWKKDIPIEVCPISNQVLKLVSDLRNHPVATLMATGHPMVISSDDPAMFGAKGLSYDFYEVFMGIGGMKADLRTLKQLAMNSIKYSTLLESEKNTFMEIWKKRWDKFIADVATK

SEQ ID NO: 23027 - protein, 328 aa, Homo sapiens
LESRTRSRHRAPRLPPAMPAPRAPRALAAAAPASGKAKLTHPGKAILAGGLAGGIEICITFPTEYVKTQLQLDERSHPPRYRGIGDCVRQTVRSHGVLGLYRGLSSLLYGSIPKAAVRFGMFEFLSNHMRDAQGRLDSTRGLLCGLGAGVAEAVVVVCPMETIKVKFIHDQTSPNPKYRGFFHGVREIVREQGLKGTYQGLTATVLKQGSNQAIRFFVMTSLRNWYRGDNPNKPMNPLITGVFGAIAGAASVFGNTPLDVIKTRMQGLEAHKYRNTWDCGLQILKKEGLKAFYKGTVPRLGRVCLDVAIVFVIYDEVVKLLNKVWKTD

SEQ ID NO: 23028 - protein, 26 aa, Homo sapiens
LVKLGHPALSDDQQILSGRNICSAVR

SEQ ID NO: 23029 - protein, 392 aa, Homo sapiens
TPSQRLGLEPGRSPPSFAHHLPTMDPRKVNELRAFVKMCKQDPSVLHTEEMRFLREWVESMGGKVPPATQKAKSEENTKEEKPDSKKVEEDLKADEPSSEESDLEIDKEGVIEPDTDAPQEMGDENAEITEEMMDQANDKKVAAIEALNDGELQKAIDLFTDAIKLNPRLAILYAKRASVFVKLQKPNAAIRDCDRAIEINPDSAQPYKWRGKAHRLLGHWEEAAHDLALACKLDYDEDASAMLKEVQPRAQKIAEHRRKYERKREEREIKERIERVKKAREEHERAQREEEARRQSGAQYGSFPGGFPGGMPGNFPGGMPGMGGGMPGMAGMPGLNEILSDPEVLAAMQDPEVMVAFQDVAQNPANMSKYQSNPKVMNLISKLSAKFGGQA

SEQ ID NO: 23030 - protein, 42 aa, Homo sapiens
RRRRSAASTCRRRRRRCSRTSRSLRSSWRRRRAPGRSCSWRR

SEQ ID NO: 23031 - protein, 25 aa, Homo sapiens
MPFLTMKTRNPLQSPRNPVLGMTLT

SEQ ID NO: 23032 - protein, 375 aa, Homo sapiens
RHGTGPRLTMAAARHSTLDFMLGAKADGETILKGLQSIFQEQGMAESVHTWQDHGYLATYTNKNGSFANLRIYPHGLVLLDLQSYDGDAQGKEEIDSILNKVEERMKELSQDSTGRVKRLPPIVRGGAIDRYWPTADGRLVEYDIDEVVYDEDSPYQNIKILHSKQFGNILILSGDVNLAESDLAYTRAIMGSGKEDYTGKDVLILGGGDGGILCEIVKLKPKMVTMVEIDQMVIDGCKKYMRKTCGDVLDNLKGDCYQVLIEDCIPVLKRYAKEGREFDYVINDLTAVPISTSPEEDSTWEFLRLILDLSMKVLKQDGKYFTQGNCVNLTEALSLYEEQLGRLYCPVEFSKEIVCVPSYLELWVFYTVWKKAKP

SEQ ID NO: 23033 - protein, 44 aa, Homo sapiens
VAPSQNFIQKTIRKMVFYGKYLSVGLNVKERGRERNPFIMFSLP

SEQ ID NO: 23034 - protein, 183 aa, Homo sapiens
RLRPQKEISILCPEQNRMAMSQESLTFKDVFVDFTLEEWQQLDSAQKNLYRDVMLENYSHLVSVGYLVAKPDVIFRLGPGEESWMADGGTPVRTCAEVWQVDEQIDHYKESQDKLPWQAAFIGKETLKDESGQESRTCRKSIYLSTEFDSVRQRLPKYYSWEKAFKTSFKLSWSKWKLCKKER

SEQ ID NO: 23035 - protein, 13 aa, Homo sapiens
LILAGISGLSAGP

SEQ ID NO: 23036 - protein, 776 aa, Homo sapiens
KLAAEMTANRLAESLLALSQQEELADLPKDYLLSESEDEGDNDGERKHQKLLEAISSLDGKNRRKLAERSEASLKVSEFNVSSEGSGEKLVLADLLEPVKTSSSLATVKKQLSRVKSKKTVELPLNKEEIERIHREVAFNKTAQVLSKWDPVVLKNRQAEQLVFPLEKEEPAIAPIEHVLSGWKARTPLEQEIFNLLHKNKQPVTDPLLTPVEKASLRAMSLEEAKMRRAELQRARALQSYYEAKARREKKIKSKKYHKVVKKGKAKKALKEFEQLRKVNPAAALEELEKIEKARMMERMSLKHQNSGKWAKSKAIMAKYDLEARQAMQEQLSKNKELTQKLQVASESEEEEGGTEDVEELLVPDVVNEVQMNADGPNPWMLRSCTSDTKEAATQEDPEQLPELEAHGVSESEGEERPVAEEEILLREFEERRSLRKRSELSQDAEPAGSQETKDSGSQEVLSELRVLSQKLKENHQSRKQKASSEGTIPQVQREEPAPEEEEPLLLQRPERVQTLEELEELGKEECFQNKELPRPVLEGQQSERTPNNRPDAPKEKKKKEQMIDLQNLLTTQSPSVKSLAVPTIEELEDEEERNHRQMIKEAFAGDDVIRDFLKEKREAVEASKPKDVDLTLPGWGEWGGVGLKPSAKKRRRFLIKAPEGPPRKDKNLPNVIINEKRNIHAAAHQVRVLPYPFTHHWQFERTIQTPIGSTWNTQRAFQKLTTPKVVTKPGHIINPIKAEDVGYRSSSRSDLSVIQRNPKRITTRHKKQLKKCSVD

SEQ ID NO: 23037 - protein, 10 aa, Homo sapiens
IEVFQKMIKK

SEQ ID NO: 23038 - protein, 6 aa, Homo sapiens
RIMNTL

SEQ ID NO: 23039 - protein, 26 aa, Homo sapiens
MSCLIVWWEVGWCPLSLPSSPLAMVS

SEQ ID NO: 23040 - protein, 337 aa, Homo sapiens
LDMKSSRIRSAKPQTTVFRGMIGHSMVNSKILLLKKPRVWWELEGPQVPLRPDCLAIVNNFVFLLGGEELGPDGEFHASSKVFRYDPRQNSWLQMADMSVPRSEFAVGVIGKFIYAVAGRTRDETFYSTERYDITNDKWEFVDPYPVNKYGHEGTVLNNKLFITGGITSSSTSKQVCVFDPSKEGTIEQRTRRTQVVTNCWENKSKMNYARCFHKMISYNGKLYVFGGVCVILRASFESQGCPSTEVYNPETDQWTILASMPIGRSGHGVTVLDKQIMVLGGLCYNGHYSDSILTFDPDENKWKEDEYPRMPCKLDGLQVCNLHFPDYVLDEVRRCN

SEQ ID NO: 23041 - protein, 484 aa, Homo sapiens
LSFPALPCLAFQCSSFCEMTLKASEGESGGSMHTALSDLYLEHLLQKRSRPEAVSHPLNTVTEDMYTNGSPAPGSPAQVKGQEVRKVRLIQFEKVTEEPMGITLKLNEKQSCTVARILHGGMIHRQGSLHVGDEILEINGTNVTNHSVDQLQKAMKETKGMISLKVIPNQQSRLPALQMFMRAQFDYDPKKDNLIPCKEAGLKFATGDIIQIINKDDSNWWQGRVEGSSKESAGLIPSPELQEWRVASMAQSAPSEAPSCSPFGKKKKYKDKYLAKHSSIFDQLDVVSYEEVVRLPAFKRKTLVLIGASGVGRSHIKNALLSQNPEKFVYPVPYTTRPPRKSEEDGKEYHFISTEEMTRNISANEFLEFGSYQGNMFGTKFETVHQIHKQNKIAILDIEPQTLKIVRTAELSPFIVFIAPTDQGTQTEALQQLQKDSEAIRSQYAHYFDLSLVNNGVDETLKKLQEAFDQACSSPQWVPVSWVY

SEQ ID NO: 23042 - protein, 29 aa, Homo sapiens
MRKCRPTEAVGTRPAELIRLPGWCLLVLE

SEQ ID NO: 23043 - protein, 28 aa, Homo sapiens
VLLKGPEMQGFGIHFEPLSCLTLTSFHY

SEQ ID NO: 23044 - protein, 26 aa, Homo sapiens
TAERREEEEEEVEEVEEVEEAPDRGG

SEQ ID NO: 23045 - protein, 398 aa, Homo sapiens
IIWDSRTRFGSTDFSFHPSIAGVVVLLLLQGGSAYKLVCYFTNWSQDRQEPGKFTPENIDPFLCSHLIYSFASIENNKVIIKDKSEVMLYQTINSLKTKNPKLKILLSIGGYLFGSKGFHPMVDSSTSRLEFINSIILFLRNHNFDGLDVSWIYPDQKENTHFTVLIHELAEAFQKDFTKSTKERLLLTAGVSAGRQMIDNSYQVEKLAKDLDFINLLSFDFHGSWEKPLITGHNSPLSKGWQDRGPSSYYNVEYAVGYWIHKGMPSEKVVMGIPTYGHSFTLASAETTVGAPASGPGAAGPITESSGFLAYYEICQFLKGAKITRLQDQQVPYAVKGNQWVGYDDVKSMETKVQFLKNLNLGGAMIWSIDMDDFTGKSCNQGPYPLVQAVKRSLGSL

SEQ ID NO: 23046 - protein, 57 aa, Homo sapiens
KSPSPTPNSTPFGTMCGGWDPVAHPCRSCPSHARRRVFVVTPCCHLFSSLCEDLDWQ

SEQ ID NO: 23047 - protein, 92 aa, Homo sapiens
IKPLGPARASGLSKKPASIQKRKHHNAENKPGLQIKLNELWKNFGFKKDSEKLPPCKKPLSPVRDNIQLTPEAEEDIFNKPECGRVQRAIFQ

SEQ ID NO: 23048 - protein, 178 aa, Homo sapiens
KDRDPEFYKFLQENDQSLLNFSDSDSSEEEEGPFHSLPDVLEEASEEEDGAEEGEDGDRVPRGLKGKKNSVPVTVAMVERWKQAAKQRLTPKLFHEVVQAFRAAVATTRGDQESAEANKFQVTDSAAFNALVTFCIRDLIGCLQKLLFGKVAKDSSSKCGPKETSLRQLVVPGRPQRC

SEQ ID NO: 23049 - protein, 20 aa, Homo sapiens
MSDFLIPQSHRHANVQEVQM

SEQ ID NO: 23050 - protein, 374 aa, Homo sapiens
RTLQSSVTLDKEVWILRFHLFQLQGAMAEKVLVTGGAGYIGSHTVLELLEAGYLPVVIDNFHNAFRGGGSLPESLRRVQELTGRSVEFEEMDILDQGALQRLFKKYSFMAVIHFAGLKAVGESVQKPLDYYRVNLTGTIQLLEIMKAHGVKNLVFSSSATVYGNPQYLPLDEAHPTGGCTNPYGKSKFFIEEMIRDLCQADKTWNAVLLRYFNPTGAHASGCIGEDPQGIPNNLMPYVSQVAIGRREALNVFGNDYDTEDGTGVRDYIHVVDLAKGHIAALRKLKEQCGCRIYNLGTGTGYSVLQMVQAMEKASGKKIPYKVVARREGDVAACYANPSLAQEELGWTAALGLDRMCEDLWRWQKQNPSGFGTQA

SEQ ID NO: 23051 - protein, 8 aa, Homo sapiens
LFLPGVGG

SEQ ID NO: 23052 - protein, 83 aa, Homo sapiens
LKQVHPDTGISSKAMGIMNSFVNDIFERIAGEASRLAHYNKRSTITSREIQTAVRLLLPGKLAKHAVSEGTKAVTKYTSSNIF

SEQ ID NO: 23053 - protein, 42 aa, Homo sapiens
KTEMDVSTPKPQISISRCPWPCSSSSFDTSLSCTWLHHWLPS

SEQ ID NO: 23054 - protein, 17 aa, Homo sapiens
LLPHSLDPALWAFTSVL

SEQ ID NO: 23055 - protein, 33 aa, Homo sapiens
LGCSWRRCLFRKGLYQGRPFSCLCCSLGGKIPC

SEQ ID NO: 23056 - protein, 31 aa, Homo sapiens
KTNNFESGSLKQAIYPGINSWTKQTLLLHYY

SEQ ID NO: 23057 - protein, 23 aa, Homo sapiens
LTGFFVLSTGFCFTTGHKHVRQK

SEQ ID NO: 23058 - protein, 11 aa, Homo sapiens
MRNFPEKISSL

SEQ ID NO: 23059 - protein, 69 aa, Homo sapiens
LFSAAGVLKGGRGSDASGCGRERRPLTTCTAWRRLRLCLLHWHKWIEKRSISGSMSCPVLRLGKMLCWS

SEQ ID NO: 23060 - protein, 39 aa, Homo sapiens
TNLRSRDLKTACTQPFPRVALHSQAQCRIQACMCGGWRS

SEQ ID NO: 23061 - protein, 19 aa, Homo sapiens
KKTVLVVVIINIWTSVMVK

SEQ ID NO: 23062 - protein, 43 aa, Homo sapiens
ICGALRENLAEAVHWNAFTVIVMEAKYMKEKLLFVSLLIAPDD

SEQ ID NO: 23063 - protein, 11 aa, Homo sapiens
IMLKRDMEYLQ

SEQ ID NO: 23064 - protein, 38 aa, Homo sapiens
VSFGRRDAAGSAPDGNLAVTVSEFCSCRMCSTLKGWQQ

SEQ ID NO: 23065 - protein, 581 aa, Homo sapiens
TPCRRPAEMLRLPTVFRQMRPVSRVLAPHLTRAYAKDVKFGADARALMLQGVDLLADAVAVTMGPKGRTVIIEQSWGSPKVTKDGVTVAKSIDLKDKYKNIGAKLVQDVANNTNEEAGDGTTTATVLARSIAKEGFEKISKGANPVEIRRGVMLAVDAVIAELKKQSKPVTTPEEIAQVATISANGDKEIGNIISDAMKKVGRKGVITVKDGKTLNDELEIIEGMKFDRGYISPYFINTSKGQKCEFQDAYVLLSEKKISSIQSIVPALEIANAHRKPLVIIAEDVDGEALSTLVLNRLKVGLQVVAVKAPGFGDNRKNQLKDMAIATGGAVFGEEGLTLNLEDVQPHDLGKVGEVIVTKDDAMLLKGKGDKAQIEKRIQEIIEQLDVTTSEYEKEKLNERLAKLSDGVAVLKVGGTSDVEVNEKKDRVTDALNATRAAVEEGIVLGGGCALLRCIPALDSLTPANEDQKIGIEIIKRTLKIPAMTIAKNAGVEGSLIVEKIMQSSSEVGYDAMAGDFVNMVEKGIIDPTKVVRTALLDAAGVASLLTTAEVVVTEIPKEEKDPGMGAMGGMGGGMGGGMF

SEQ ID NO: 23066 - protein, 6 aa, Homo sapiens
MRRKRF

SEQ ID NO: 23067 - protein, 22 aa, Homo sapiens
VRSEQWAPEILAHATMLSGYNH

SEQ ID NO: 23068 - protein, 27 aa, Homo sapiens
IGLVKKPVLPSCHSCLSMAPFPKSRCL

SEQ ID NO: 23069 - protein, 184 aa, Homo sapiens
VLLVLSGLVHARGCTYSQLWSRSHPFCCSRGPLAMAGILFEDIFDVKDIDPEGKKFDRVSRLHCESESFKMDLILDVNIQIYPVDLGDKFRLVIASTLYEDGTLDDGEYNPTDDRPSRADQFEYVMYGKVYRIEGDETSTEAATRLSAYVSYGGLLMRLQGDANNLHGFEVDSRVYLLMKKLAF

SEQ ID NO: 23070 - protein, 117 aa, Homo sapiens
TGLLKGTMSGRLWSKAIFAGYKRGLRNQREHTALLKIEGVYARDETEFYLGKRCAYVYKAKNNTVTPGGKPNKTRVIWGKVTRAHGNSGMVRAKFRSNLPAKAIGHRIRVMLYPSRI

SEQ ID NO: 23071 - protein, 31 aa, Homo sapiens
VFGLYSSFYPVFIYFLFGTSRHISVGKWRQA

SEQ ID NO: 23072 - protein, 21 aa, Homo sapiens
VIVALATDREAVAEDTCHGRL

SEQ ID NO: 23073 - protein, 17 aa, Homo sapiens
LGGGLKRRALGRRHCSR

SEQ ID NO: 23074 - protein, 206 aa, Homo sapiens
TPSIRNLAMEKVASAVLFPCKYATTGCSLTLHHTEKPEHEDICEYRPYSCPCPGASCKWQGSLEAVMSHLMHAHKSITTLQGEDIVFLATDINLPGAVDWVMMQSCFGHHFMLVLEKQEKYEGHQQFFAIVLLIGTRKQAENFAYRLELNGNRRRLTWEATPRSIHDGVAAAIMNSDCLVFDTAIAHLFADNGNLGINVTISTCCP

SEQ ID NO: 23075 - protein, 13 aa, Homo sapiens
VFFCVAVQNDGSS

SEQ ID NO: 23076 - protein, 46 aa, Homo sapiens
VKPVQPSVSCGHLESTLSLLCPSTPRTVSLSQMEAELNTLRWMMET

SEQ ID NO: 23077 - protein, 25 aa, Homo sapiens
LASPRCRWPAVISRPFRIIRLSAEI

SEQ ID NO: 23078 - protein, 32 aa, Homo sapiens
KWKSMCLFAETVNAFLALTAVKISGAMTIKTT

SEQ ID NO: 23079 - protein, 71 aa, Homo sapiens
RQRPQDLFWRWKLVENPDCLHGLPSRPQRNTDINFTLRSLLETLIHKDNHCQPLFRLLQEPSSKIKHKKVF

SEQ ID NO: 23080 - protein, 24 aa, Homo sapiens
IKITEKKPTPSCAVLLEFGLAMRC

SEQ ID NO: 23081 - protein, 14 aa, Homo sapiens
IISNTNSKIVTLGQ

SEQ ID NO: 23082 - protein, 42 aa, Homo sapiens
IMRFLMRRTNVLCASPNNFLNDSYSLKKEQNFSRCLFTDTWK

SEQ ID NO: 23083 - protein, 20 aa, Homo sapiens
MKHSSHELTKSKGEFAEILI

SEQ ID NO: 23084 - protein, 20 aa, Homo sapiens
VSGAACTLLRPWTHHMMVLR

SEQ ID NO: 23085 - protein, 52 aa, Homo sapiens
VETGEAVRFFSVTSLTGQHGGEVRELWGSRGSVKWFEGYRYSGSRVCWPSSS

SEQ ID NO: 23086 - protein, 19 aa, Homo sapiens
MTGALLSMTFPLKHQHIFW

SEQ ID NO: 23087 - protein, 29 aa, Homo sapiens
LAECVESCSGVRYSVFDRGGLRGTRCSEL

SEQ ID NO: 23088 - protein, 28 aa, Homo sapiens
LAHLDPGQLGIEFVPGLRRPVLLSGRSL

SEQ ID NO: 23089 - protein, 97 aa, Homo sapiens
KRCLERLKQQMPLGADCARYTTLSLLRRARMHIQKLEDQEQRARQLKERLRSKQQSLQRQLEQLRGLAGAAERERLRADSLDSSGLSSERSDSDQGP

SEQ ID NO: 23090 - protein, 41 aa, Homo sapiens
LAAVSRGLRSVVDSAGLRQMQAWGSLLSGLRREEWRSPSSH

SEQ ID NO: 23091 - protein, 146 aa, Homo sapiens
LGVPLCCFSVMARTKQTARKSTGGKAPRKQLATKAARKSAPATGGVKKPHRYRPGTVALREIRRYQKSTELLIRKLPFQRLVREIAQDFKTDLRFQSSAVMALQEACEAYLVGLFEDTNLCAIHAKRVTIMPKDIQLARRIRGERA

SEQ ID NO: 23092 - protein, 106 aa, Homo sapiens
IGIMSGRGKGGKGLGKGGAKRHRKVLRDNIQGITKPAIRRLARRGGVKRISGLIYEETRGVLKVFLENVIRDAVTYTEHAKRKTVTAMDVVYALKRQGRTLYGFGG

SEQ ID NO: 23093 - protein, 127 aa, Homo sapiens
IMPEPAKSAPAPKKGSKKAVTKAQKKDGKKRKRSRKESYSVYVYKVLKQVHPDTGISSKAMGIMNSFVNDIFERIAGEASRLAHYNKRSTITSREIQTAVRLLLPGELAKHAVSEGTKAVTKYTSSK

SEQ ID NO: 23094 - protein, 193 aa, Homo sapiens
IAADTMPKRKKQNHHQPPTQQQPPLPEREETGDEEDGSPIGPPSLLGPPPMANGKPGDPKSALHRGPPGSRGPLIPPLLSLPPPPWGRGPIRRGLGPRSSPYGRGWWGVNAEPPFPGPGHGGPTRGSFHKEQRNPRRLKSWSLIKNTCPPKDDPQVMEDKSDRPVCRHFAKKGHCRYEDLCAFYHPGVNGPPL

SEQ ID NO: 23095 - protein, 56 aa, Homo sapiens
VMWPCGPSRSLASSLGSTPNCMPSPGVMTGGSAWKTTAAKVLWSIMSDSQEVTGWN

SEQ ID NO: 23096 - protein, 48 aa, Homo sapiens
ILLSWEPTAGGSFSGSLGGRWMGSRGPRGTGPGKRRRRRRRSRSPGEA

SEQ ID NO: 23097 - protein, 58 aa, Homo sapiens
LCAIQRAPRKLRQLVLDREDGAVDHSLPEEADKAEGSPWLSKASLQAKEASTSSGEKW

SEQ ID NO: 23098 - protein, 20 aa, Homo sapiens
MAYLAWRLARRSCPRSLVSR

SEQ ID NO: 23099 - protein, 11 aa, Homo sapiens
RRAIPSMCTRF

SEQ ID NO: 23100 - protein, 138 aa, Homo sapiens
IPMARTKQTARKSTGGKAPRKQLATKAARKSAPATGGVKKPHRYRPGTVALREIRRYQKSTELLIRKLPFQRLVREIAQDFKTDLRFQSSAVMALQEACEAYLVGLFEDTNLCAIHAKRVTIMPKDIQLARRIRGERA

SEQ ID NO: 23101 - protein, 35 aa, Homo sapiens
MALSSVAQWSSSEDAKIHEKTSRTSGRIFNGKSLG

SEQ ID NO: 23102 - protein, 26 aa, Homo sapiens
KRNSNPQSSGIHLSRGLMRLVMTLKL

SEQ ID NO: 23103 - protein, 339 aa, Homo sapiens
TVSERWPLARATPFCFGSAMPMYQVKPYHGGGAPLRVELPTCMYRLPNVHGRSYGPAPGAGHVQEESNLSLQALESRQDDILKRLYELKAAVDGLSKMIQTPDADLDVTNIIQADEPTTLTTNALDLNSVLGKDYGALKDIVINANPASPPLSLLVLHRLLCEHFRVLSTVHTHSSVKSVPENLLKCFGEQNKKQPRQDYQLGFTLIWKNVPKTQMKFSIQTMCPIEGEGNIARFLFSLFGQKHNAVNATLIDSWVDIAIFQLKEGSSKEKAAVFRSMNSALGKSPWLAGNELTVADVVLWSVLQQIGGCSVTVPANVQRWMRSCENLAPFNTALKLLK

SEQ ID NO: 23104 - protein, 19 aa, Homo sapiens
KMPRPGIVAEHPRPAEVPP

SEQ ID NO: 23105 - protein, 675 aa, Homo sapiens
MLLRRSLETKTGADVCRLWRIHQALYCFDYDLEESGEIKDMLLECFININYIKKEEGRRFLSCLFNWNINFIKMIHGTIKNQLQGLQKSLMVYIAEIYFRAWKKASGKILEAIENDCIQDFMFHGIHLPRRSPVHSKVREVLSYFHHQKKVRQGVEEMLYRLYKPILWRGLKARNSEVRSNAALLFVEAFPIRDPNLHAIEMDSEIQKQFEELYSLLEDPYPMVRSTGILGVCKITSKYWEMMPPTILIDLLKKVTGELAFDTSSADVRCSVFKCLPMILDNKLSHPLLEQLLPALRYSLHDNSEKVRVAFVDMLLKIKAVRAAKFWKICPMEHILVRLETDSRPVSRRLVSLIFNSFLPVNQPEEVWCERCVTLVQMNHAAARRFYQYAHEHTACTNIAKLIHVIRHCLNACIQRAVREPPEDEEEEDGREKENVTVLDKTLSVNDVACMAGLLEIIVILWKSIDRSMENNKEAKLYTINKFASVLPEYLKVFKDDRCKIPLFMLMSFMPASAVPPFSCGVISTLRSREEGAVDKSYCTLLDCLCSWGQVGHILELVDNWLPTEHAQAKSNTASKGRVQIHDTRPVKPELALVYIEYLLTHPKNRECLLSAPRKKLNHLLKALETSKADLESLLQTPGGKPRGFSEAAAPRAFGLHCRLSIHLQHKVCLLLALY

SEQ ID NO: 23106 - protein, 752 aa, Homo sapiens
IMGQTGKKSEKGPVCWRKRVKSEYMRLRQLKRFRRADEVKSMFSSNRQKILERTEILNQEWKQRRIQPVHILTSVSSLRGTRECSVTSDLDFPTQVIPLKTLNAVASVPIMYSWSPLQQNFMVEDETVLHNIPYMGDEVLDQDGTFIEELIKNYDGKVHGDRECGFINDEIFVELVNALGQYNDDDDDDDGDDPEEREEKQKDLEDHRDDKESRPPRKFPSDKIFEAISSMFPDKGTAEELKEKYKELTEQQLPGALPPECTPNIDGPNAKSVQREQSLHSFHTLFCRRCFKYDCFLHRKCNYSFHATPNTYKRKNTETALDNKPCGPQCYQHLEGAKEFAAALTAERIKTPPKRPGGRRRGRLPNNSSRPSTPTINVLESKDTDSDREAGTETGGENNDKEEEEKKDETSSSSEANSRCQTPIKMKPNIEPPENVEWSGAEASMFRVLIGTYYDNFCAIARLIGTKTCRQVYEFRVKESSIIAPAPAEDVDTPPRKKKRKHRLWAAHCRKIQLKKDGSSNHVYNYQPCDHPRQPCDSSCPCVIAQNFCEKFCQCSSECQNRFPGCRCKAQCNTKQCPCYLAVRECDPDLCLTCGAADHWDSKNVSCKNCSIQRGSKKHLLLAPSDVAGWGIFIKDPVQKNEFISEYCGEIISQDEADRRGKVYDKYMCSFLFNLNNDFVVDATRKGNKIRFANHSVNPNCYAKVMMVNGDHRIGIFAKRAIQTGEELFFDYRYSQADALKYVGIEREMEIP

SEQ ID NO: 23107 - protein, 22 aa, Homo sapiens
LVSTPGLAGLYLETRSEFFRAV

SEQ ID NO: 23108 - protein, 13 aa, Homo sapiens
LYLETRSEFFRAV

SEQ ID NO: 23109 - protein, 24 aa, Homo sapiens
MPAFKIELDCVVVVLFLKVKLAIN

SEQ ID NO: 23110 - protein, 61 aa, Homo sapiens
LTAGNLGDPSALPAVAAADPRLRREGRPRCARPEVTRPGPSSLPSTIPLRLRAPASSCESL

SEQ ID NO: 23111 - protein, 47 aa, Homo sapiens
TSSAAEEPSASAPAPLSSAAPIPGSSLRGVELFPMTVLIRLHYTFVC

SEQ ID NO: 23112 - protein, 34 aa, Homo sapiens
RKKREEPLVMPVWWRRRRLRARSWALRGARKPLR

SEQ ID NO: 23113 - protein, 75 aa, Homo sapiens
KEILRADERACVRSIQLDGLVWGASKLVPVGYGIRKLQIQCVVEDDKVGTDLLEEEITKFEEHVQSVDIAAFNKI

SEQ ID NO: 23114 - protein, 56 aa, Homo sapiens
TPFLTGHGRLSEQQVDRIILQLNRYYPQILTNKEAEKVLRSSGTPRHPCVCGSVTS

SEQ ID NO: 23115 - protein, 10 aa, Homo sapiens
LQTPWLALGA

SEQ ID NO: 23116 - protein, 58 aa, Homo sapiens
KDGLNQRYFRKRALYLAHLAHHLAQDPLFGSVCFSYTNGCHLKPSLLLRPRGERHTLG

SEQ ID NO: 23117 - protein, 10 aa, Homo sapiens
VAPMKNLQNL

SEQ ID NO: 23118 - protein, 20 aa, Homo sapiens
RVAELWEEKPVCLCIASLQR

SEQ ID NO: 23119 - protein, 14 aa, Homo sapiens
KSSSQRLKTSKSLD

SEQ ID NO: 23120 - protein, 23 aa, Homo sapiens
LDSLYSTDTVTQGSQMNGSPKPH

SEQ ID NO: 23121 - protein, 47 aa, Homo sapiens
LSPAPFSSLSLPLSFAPKSASQPRRVVTEPLRLFLARVLRPRLPRHE

SEQ ID NO: 23122 - protein, 13 aa, Homo sapiens
LPLGDGLTLAFKI

SEQ ID NO: 23123 - protein, 35 aa, Homo sapiens
LTIHRRKRRRRRRRRPSGGTQQALLPAPAVAASES

SEQ ID NO: 23124 - protein, 28 aa, Homo sapiens
RRRTSAPHLREFWRKCVLQCTECSKTAI

SEQ ID NO: 23125 - protein, 10 aa, Homo sapiens
KMVLPTGSHA

SEQ ID NO: 23126 - protein, 38 aa, Homo sapiens
TEVEMKLLHGVKNVFKRKLRERTTEPRINTNRRAMLLD

SEQ ID NO: 23127 - protein, 10 aa, Homo sapiens
IPNKQQSSRN

SEQ ID NO: 23128 - protein, 523 aa, Homo sapiens
LGKGRSQEAAREGARARPFFSSVAGSHARPPRRLGAICDSGGGGGGGGGSGNFAASSGRACLTAVWRRPRPRRQEPGGRRRNMSEREVSTAPAGTDMPAAKKQKLSSDENSNPDLSGDENDDAVSIESGTNTERPDTPTNTPNAPGRKSWGKGKWKSKKCKYSFKCVNSLKEDHNQPLFGVQFNWHSKEGDPLVFATVGSNRVTLYECHSQGEIRLLQSYVDADADENFYTCAWTYDSNTSHPLLAVAGSRGIIRIINPITMQCIKHYVGHGNAINELKFHPRDPNLLLSVSKDHALRLWNIQTDTLVAIFGGVEGHRDEVLSADYDLLGEKIMSCGMDHSLKLWRINSKRMMNAIKESYDYNPNKTNRPFISQKIHFPDFSTRDIHRNYVDCVRWLGDLILSKSCENAIVCWKPGKMEDDIDKIKPSESNVTILGRFDYSQCDIWYMRFSMDFWQKMLALGNQVGKLYVWDLEVEDPHKAKCTTLTHHKCGAAIRQTSFSRDSSILIAVCDDASIWRWDRLR

SEQ ID NO: 23129 - protein, 71 aa, Homo sapiens
ILKPQLERRRGYKLFLDDRDLLPRAEPSADLLVNLSRCRRLIVVLSDAFLSRAWCSHSFRWVPRGVGWAPA

SEQ ID NO: 23130 - protein, 17 aa, Homo sapiens
VHLSTIPRLLATGVVNM

SEQ ID NO: 23131 - protein, 19 aa, Homo sapiens
LKLQVSKPKCKVDYAKNSQ

SEQ ID NO: 23132 - protein, 6 aa, Homo sapiens
VVMASV

SEQ ID NO: 23133 - protein, 8 aa, Homo sapiens
IQSYVCSL

SEQ ID NO: 23134 - protein, 90 aa, Homo sapiens
VRTRDPEKLASCDIVVDVGGEYDPRRHRYDHHQRSFTETMSSLSPGKPWQTKLSSAGLIYLHFGHKLLAQLLGTSEEDSMVGTLYDKVGT

SEQ ID NO: 23135 - protein, 6 aa, Homo sapiens
LAAGTR

SEQ ID NO: 23136 - protein, 15 aa, Homo sapiens
LMSSSFSNSCKLCVG

SEQ ID NO: 23137 - protein, 850 aa, Homo sapiens
IARGGPPEGHSRTLTRILVGLEEIGGRRVAALTWSGTWGEGTMGRKLDPTKEKRGPGRKARKQKGAETELVRFLPAVSDENSKRLSSRARKRAAKRRLGSVEAPKTNKSPEAKPLPGKLPKGAVQTAGKKGPQSLFNAPRGKKRPAPGSDEEEEEEDSEEDGMVNHGDLWGSEDDADTVDDYGADSNSEDEEEGEALLPIERAARKQKAREAAAGIQWSEEETEDEEEEKEVTPESGPPKVEEADGGLQINVDEEPFVLPPAGEMEQDAQAPDLQRVHKRIQDIVGILRDFGAQREEGRSRSEYLNRLKKDLAIYYSYGDFLLGKLMDLFPLSELVEFLEANEVPRPVTLRTNTLKTRRRDLAQALINRGVNLDPLGKWSKTGLVVYDSSVPIGATPEYLAGHYMLQGASSMLPVMALAPQEHERILDMCCAPGGKTSYMAQLMKNTGVILANDANAERLKSVVGNLHRLGVTNTIISHYDGRQFPKVVGGFDRVLLDAPCSGTGVISKDPAVKTNKDEKDILRCAHLQKELLLSAIDSVNATSKTGGYLVYCTCSITVEENEWVVDYALKKRNVRLVPTGLDFGQEGFTRFRERRFHPSLRSTRRFYPHTHNMDGFFIAKFKKFSNSIPQSQTGNSETATPTNVDLPQVIPKSENSSQPAKKAKGAAKTKQQLQKQQHPKKASFQKLNGISKGADSELSTVPSVTKTQASSSFQDSSQPAGKAEGIREPKVTGKLKQRSPKLQSSKKVAFLRQNAPPKGTDTQTPAVLSPSKTQATLKPKDHHQPLGRAKGVEKQQLPEQPFEKAAFQKQNDTPKGPQPPTVSPIRSSRPPPAKRKKSQSRGNSQLLLS

SEQ ID NO: 23138 - protein, 26 aa, Homo sapiens
KGGGASRASLELAGQSYRPMGPGSAR

SEQ ID NO: 23139 - protein, 15 aa, Homo sapiens
ITSSRSQSSVMSVPG

SEQ ID NO: 23140 - protein, 57 aa, Homo sapiens
VANFERPRMNANSLLASPTGLSPYLRFGCLSCRLFYFKLTDLYKKVFSKIRAYCLIL

SEQ ID NO: 23141 - protein, 140 aa, Homo sapiens
KSDDDTSNFDEPEKNSWVSSSPCQLSPSGFSGEELPFVGFSYSKALGILGRSESVVSGLDSPAKTSSMEKKLLIKSKELQDSQDKCHKMEQEMTRLHRRVSEVEAVLSQKEVELKASETQRSLLEQDLATYITECSVSLP

SEQ ID NO: 23142 - protein, 25 aa, Homo sapiens
MRCLVIDQMLLNPLIHRFYRKHVLH

SEQ ID NO: 23143 - protein, 9 aa, Homo sapiens
LDSEMSAYL

SEQ ID NO: 23144 - protein, 42 aa, Homo sapiens
LFSSAGTGCQPLRLRAPYRAPRLVICGWPPCSPNERPASKKS

SEQ ID NO: 23145 - protein, 217 aa, Homo sapiens
VGRPAMKPPSSIQTSEFDSSDEEPIEDEQTPIHISWLSLSRVNCSQFLGLCALPGCKFKDVRRNVQKDTEELKSCGIQDIFVFCTRGELSKYRVPNLLDLYQQCGIITHHHPIADGGTPDIASCCEIMEELTTCLKNYRKTLIHCYGGLGRSCLVAACLLLYLSDTISPEQAIDSLRDLRGSGAIQTIKQYNYLHEFRDKLAAHLSSRDSQSRSVSR

SEQ ID NO: 23146 - protein, 15 aa, Homo sapiens
TDLSGSQPPKTPSGR

SEQ ID NO: 23147 - protein, 28 aa, Homo sapiens
LTQHRLFYVLNLDSPRGWEGLWTALGEA

SEQ ID NO: 23148 - protein, 638 aa, Homo sapiens
KMAAMAVGGAGGSRVSSGRDLNCVPEIADTLGAVAKQGFDFLCMPVFHPRFKREFIQEPAKNRPGPQTRSDLLLSGRDWNTLIVGKLSPWIRPDSKVEKIRRNSEAAMLQELNFGAYLGLPAFLLPLNQEDNTNLARVLTNHIHTGHHSSMFWMRVPLVAPEDLRDDIIENAPTTHTEEYSGEEKTWMWWHNFRTLCDYSKRIAVALEIGADLPSNHVIDRWLGEPIKAAILPTSIFLTNKKGFPVLSKMHQRLIFRLLKLEVQFIITGTNHHSEKEFCSYLQYLEYLSQNRPPPNAYELFAKGYEDYLQSPLQPLMDNLESQTYEVFEKDPIKYSQYQQAIYKCLLDRVPEEEKDTNVQVLMVLGAGRGPLVNASLRAAKQADRRIKLYAVEKNPNAVVTLENWQFEEWGSQVTVVSSDMREWVAPEKADIIVSELLGSFADNELSPECLDGAQHFLKDDGVSIPGEYTSFLAPISSSKLYNEVRACREKDRDPEAQFEMPYVVRLHNFHQLSAPQPCFTFSHPNRDPMIDNNRYCTLEFPVEVNTVLHGFAGYFETVLYQDITLSIRPETHSPGMFSWFPILFPIKQPITVREGQTICVRFWRCSNSKKVWYEWAVTAPVCSAIHNPTGRSYTIGL

SEQ ID NO: 23149 - protein, 14 aa, Homo sapiens
MNFTDLTFLHLPFF

SEQ ID NO: 23150 - protein, 32 aa, Homo sapiens
MTLTRVPIRVLLKDARPEPLRRLRSIVPFLQP

SEQ ID NO: 23151 - protein, 42 aa, Homo sapiens
LSFLLSKYLKVGLLEFYYPWMLLLTWKRLRNNLLICTLLNVP

SEQ ID NO: 23152 - protein, 62 aa, Homo sapiens
RTASAEGTGLFMTTCGEITWIPGLAKSPGIGRTPMRWATAWPSECIYSIRTGSLSLHIGLWD

SEQ ID NO: 23153 - protein, 36 aa, Homo sapiens
TSTRSRLLDLGTLTRFLWGTAEDYFEFRWSPVVWHI

SEQ ID NO: 23154 - protein, 10 aa, Homo sapiens
VPPRYDDQCG

SEQ ID NO: 23155 - protein, 27 aa, Homo sapiens
IPLCTAPPGDPCAPPLPPDRMDRPAGR

SEQ ID NO: 23156 - protein, 30 aa, Homo sapiens
MSNNGPEDFISSSRKNSRQTARISSNPERR

SEQ ID NO: 23157 - protein, 30 aa, Homo sapiens
MSNNGPEDFISSSRKNSRQTARISSNPERS

SEQ ID NO: 23158 - protein, 36 aa, Homo sapiens
VARLGQSPGMAEREDAAGVRAALLDAEQSPVALRPL

SEQ ID NO: 23159 - protein, 21 aa, Homo sapiens
LVPTCPLLPAGSGPHPIFIWP

SEQ ID NO: 23160 - protein, 648 aa, Homo sapiens
KIGATRRPPPARVRVAVRLRPFVDGTAGASDPPCVRGMDSCSLEIANWRNHQETLKYQFDAFYGERSTQQDIYAGSVQPILRHLLEGQNASVLAYGPTGAGKTHTMLGSPEQPGVIPRALMDLLQLTREEGAEGRPWALSVTMSYLEIYQEKVLDLLDPASGDLVIREDCRGNILIPGLSQKPISSFADFERHFLPASRNRTVGATRLNQRSSRSHAVLLVKVDQRERLAPFRQREGKLYLIDLAGSEDNRRTGNKGLRLKESGAINTSLFVLGKVVDALNQGLPRVPYRDSKLTRLLQDSLGGSAHSILIANIAPERRFYLDTVSALNFAARSKEVINRPFTNESLQPHALGPVKLSQKELLGPPEAKRARGPEEEEIGSPEPMAAPASASQKLSPLQKLSSMDPAMLERLLSLDRLLASQGSQGAPLLSTPKRERMVLMKTVEEKDLEIERLKTKQKELEAKMLAQKAEEKENHCPTMLRPLSHRTVTGAKPLKKAVVMPLQLIQEQAASPNAEIHILKNKGRKRKVKVAGGLGYTWSPELESLDALEPEEKAEDCWELQISPELLAHGRQKILDLLNEGSARDLRSLQRIGPKKAQLIVGWRELHGPFSQVEDLERVEGITGKQMESFLKANILGLAAGQRCGAS

SEQ ID NO: 23161 - protein, 191 aa, Homo sapiens
TRIRCSNPGGKMRPLTEEETRVMFEKIAKYIGENLQLLVDRPDGTYCFRLHNDRVYYVSEKIMKLAANISGDKLVSLGTCFGKFTKTHKFRLHVTALDYLAPYAKYKVWIKPGAEQSFLYGNHVLKSGLGRITENTSQYQGVVVYSMADIPLGFGVAAKSTQDCRKVDPMAIVVFHQADIGEYVRHEETLT

SEQ ID NO: 23162 - protein, 31 aa, Homo sapiens
MDAPRPPSLAVPGAASRPGRTVDNGRLSPIH

SEQ ID NO: 23163 - protein, 175 aa, Homo sapiens
RIMSASQDSRSRDNGPDGMEPEGVIESNWNEIVDSFDDMNLSESLLRGIYAYGFEKPSAIQQRAILPCIKGYDVIAQAQSGTGKTATFAISILQQIELDLKATQALVLAPTRELAQQIQKVVMALGDYMGASCHACIGGTNVRAEVQKLQMEAPHIIVGTPGRVFDMLNRRYLCE

SEQ ID NO: 23164 - protein, 42 aa, Homo sapiens
MPAVSAEERRWRLTDQSRWSWRRGRQAADSANIICPRLKNSS

SEQ ID NO: 23165 - protein, 24 aa, Homo sapiens
TFHSATLGNGDRGSMGIREKHPQN

SEQ ID NO: 23166 - protein, 486 aa, Homo sapiens
RMAAAVPDEAVARDVQRLLVQFQDEGGQLLGSPFDVPVDITPDRLQLVCNALLAQEDPLPLAFFVHDAEIVSSLGKTLESQAVETEKVLDIIYQPQAIFRVRAVTRCTSSLEGHSEAVISVAFSPTGKYLASGSGDTTVRFWDLSTETPHFTCKGHRHWVLSISWSPDGRKLASGCKNGQILLWDPSTGKQVGRTLAGHSKWITGLSWEPLHANPECRYVASSSKDGSVRIWDTTAGRCERILTGHTQSVTCLRWGGDGLLYSASQDRTIKVWRAHDGVLCRTLQGHGHWVNTMALSTDYALRTGAFEPAEASVNPQDLQGSLQELKERALSRYNLVRGQGPERLVSGSDDFTLFLWSPAEDKKPLTRMTGHQALINQVLFSPDSRIVASASFDKSIKLWDGRTGKYLASLRGHVAAVYQIAWSADSRLLVSGSSDSTLKVWDVKAQKLAMDLPGHADEVYAVDWSPDGQRVASGGKDKCLRIWRR

SEQ ID NO: 23167 - protein, 55 aa, Homo sapiens
MTAVLSSRYLHGLQKFGPWVVSGNWKKGHKHEAQFSFQRWCWPPLHAGVKIPGCK

SEQ ID NO: 23168 - protein, 44 aa, Homo sapiens
RPPGGELLGLLNPRWRRWLLMREDVAEGLTLGAGVICENGSLFT

SEQ ID NO: 23169 - protein, 10 aa, Homo sapiens
TCLWGTVSFV

SEQ ID NO: 23170 - protein, 146 aa, Homo sapiens
TMPGVTVKDVNQQEFVRALAAFLKKSGKLKVPEWVDTVKLAKHKELAPYDENWFYTRAASTARHLYLRGGAGVGSMTKIYGGRQRNGVMPSHFSRGSKSVARRVLQALEGLKMVEKDQDGGRKLTPQGQRDLDRIAGQVAAANKKH

SEQ ID NO: 23171 - protein, 372 aa, Homo sapiens
KMAAAEAANCIMENFVATLANGMSLQPPLEEVSCGQAESSEKPNAEDMTSKDYYFDSYAHFGIHEEMLKDEVRTLTYRNSMFHNRHLFKDKVVLDVGSGTGILCMFAAKAGARKVIGIECSSISDYAVKIVKANKLDHVVTIIKGKVEEVELPVEKVDIIISEWMGYCLFYESMLNTVLYARDKWLAPDGLIFPDRATLYVTAIEDRQYKDYKIHWWENVYGFDMSCIKDVAIKEPLVDVVDPKQLVTNACLIKEVDIYTVKVEDLTFTSPFCLQVKRNDYVHALVAYFNIEFTRCHKRTGFSTSPESPYTHWKQTVFYMEDYLTVKTGEEIFGTIGMRPNAKNNRDLDFTIDLDFKGQLCELSCSTDYRMR

SEQ ID NO: 23172 - protein, 466 aa, Homo sapiens
VSIMATVTATTKVPEIRDVTRIERIGAHSHIRGLGLDDALEPRQASQGMVGQLAARRAAGVVLEMIREGKIAGRAVLIAGQPGTGKTAIAMGMAQALGPDTPFTAIAGSEIFSLEMSKTEALTQAFRRSIGVRIKEETEIIEGEVVEIQIDRPATGTGSKVGKLTLKTTEMETIYDLGTKMIESLTKDKVQAGDVITIDKATGKISKLGRSFTRARDYDAMGSQTKFVQCPDGELQKRKEVVHTVSLHEIDVINSRTQGFLALFSGDTGEIKSEVREQINAKVAEWREEGKAEIIPGVLFIDEVHMLDIESFSFLNRALESDMAPVLIMATNRGITRIRGTSYQSPHGIPIDLLDRLLIVSTTPYSEKDTKQILRIRCEEEDVEMSEDAYTVLTRIGLETSLRYAIQLITAASLVCRKRKGTEVQVDDIKRVYSLFLDESRSTQYMKEYQDAFLFNELKGETMDTS

SEQ ID NO: 23173 - protein, 60 aa, Homo sapiens
VELHRRLMALRERNVLQQIVNLIEETGHFNVTNTTFDFDLFSLDETTVRKLQSCLEAVAT

SEQ ID NO: 23174 - protein, 203 aa, Homo sapiens
LEPGVVMAAFRDIEEVSQGLLSLLGANRAEAQQRRLLGRHEQVVERLLETQDGAEKQLREILTMEKEVAQSLLNAKEQVHQGGVELQQLEAGLQEAGEEDTRLKASLLQLTRELEELKEIEADLERQEKEVDEDTTVTIPSAVYVAQLYHQVSKIEWDYECEPGMVKGIHHGPSVAQPIHLDSTQLSRKFISDYLWSLVDTEW

SEQ ID NO: 23175 - protein, 6 aa, Homo sapiens
MTTAIS

SEQ ID NO: 23176 - protein, 661 aa, Homo sapiens
VEVAAATRGFPGWCLSPASLAPRPPRIPLLPRAWPCGSSSLPPSPPPHPSPAASLGPASCAGVCWLPCARPSSQPSAGPAAMEVPQPEPAPGSALSPAGVCGGAQRPGHLPGLLLGSHGLLGSPVRAAASSPVTTLTQTMHDLAGLGSETPKSQVGTLLFRSRSRLTHLSLSRRASESSLSSESSESSDAGLCMDSPSPMDPHMAEQTFEQAIQAASRIIRNEQFAIRRFQSMPVRLLGHSPVLRNITNSQAPDGRRKSEAGSGAASSSGEDKENDGFVFKMPWKPTHPSSTHALAEWASRREAFAQRPSSAPDLMCLSPDRKMEVEELSPLALGRFSLTPAEGDTEEDDGFVDILESDLKDDDAVPPGMESLISAPLVKTLEKEEEKDLVMYSKCQRLFRSPSMPCSVIRPILKRLERPQDRDTPVQNKRRRSVTPPEEQQEAEEPKARVLRSKSLCHDEIENLLDSDHRELIGDYSKAFLLQTVDGKHQDLKYISPETMVALLTGKFSNIVDKFVIVDCRYPYEYEGGHIKTAVNLPLERDAESFLLKSPIAPCSLDKRVILIFHCEFSSERGPRMCRFIRERDRAVNDYPSLYYPEMYILKGGYKEFFPQHPNFCEPQDYRPMNHEAFKDELKTFRLKTRSWAGERSRRELCSRLQDQ

SEQ ID NO: 23177 - protein, 16 aa, Homo sapiens
LVLTVVGVGLRFFTVS

SEQ ID NO: 23178 - protein, 29 aa, Homo sapiens
LRARSAGPADTLTPSSAARGPERPEQPGS

SEQ ID NO: 23179 - protein, 659 aa, Homo sapiens
LRALVRQFGQQDWKFLASHFPNRTDQQCQYRWLRVLNPDLVKGPWTKEEDQKVIELVKKYGTKQWTLIAKHLKGRLGKQCRERWHNHLNPEVKKSCWTEEEDRIICEAHKVLGNRWAEIAKMLPGRTDNAVKNHWNSTIKRKVDTGGFLSESKDCKPPVYLLLELEDKDGLQSAQPTEGQGSLLTNWPSVPPTIKEEENSEEELAAATTSKEQEPIGTDLDAVRTPEPLEEFPKREDQEGSPPETSLPYKWVVEAANLLIPAVGSSLSEALDLIESDPDAWCDLSKFDLPEEPSAEDSINNSLVQLQASHQQQVLPPRQPSALVPSVTEYRLDGHTISDLSRSSRGELIPISPSTEVGGSGIGTPPSVLKRQRKRRVALSPVTENSTSLSFLDSCNSLTPKSTPVKTLPFSPSQFLNFWNKQDTLELESPSLTSTPVCSQKVVVTTPLHRDKTPLHQKHAAFVTPDQKYSMDNTPHTPTPFKNALEKYGPLKPLPQTPHLEEDLKEVLRSEAGIELIIEDDIRPEKQKRKPGLRRSPIKKVRKSLALDIVDEDVKLMMSTLPKSLSLPTTAPSNSSSLTLSGIKEDNSLLNQGFLQAKPEKAAVAQKPRSHFTTPAPMSSAWKTVACGGTRDQLFMQEKARQLLGRLKPSHTSRTLILS

SEQ ID NO: 23180 - protein, 195 aa, Homo sapiens
LQSCSPSSCLSANAARMASQNRDPAATSVAAARKGAEPSGGAARGPVGKRLQQELMTLMMSGDKGISAFPESDNLFKWVGTIHGAAGTVYEDLRYKLSLEFPSGYPYNAPTVKFLTPCYHPNVDTQGNICLDILKEKWSALYDVRTILLSIQSLLGEPNIDSPLNTHAAELWKNPTAFKKYLQETYSKQVTSQEP

SEQ ID NO: 23181 - protein, 55 aa, Homo sapiens
LWALCTACRRPEDAVAPRKRARRQRARLQGSATAAEAQVGHQTARAAPGPAQQQG

SEQ ID NO: 23182 - protein, 47 aa, Homo sapiens
MKTLCGYMTLLLKQQTMLGLLFHLLLRSPTLMVLERRCRNWEKVKGL

SEQ ID NO: 23183 - protein, 13 aa, Homo sapiens
VFWTMDWLSPSLL

SEQ ID NO: 23184 - protein, 38 aa, Homo sapiens
ILIFPTLSVRSPPPLDARAPGESTAGRMVGSTLTIGGN

SEQ ID NO: 23185 - protein, 251 aa, Homo sapiens
KNEIAAVVFFFTRLVRKHDKLKKEAVERFAEKLTLILQEKYKNHWYPEKPSKGQAYRCIRVNKFQRVDPDVLKACENSCILYSDLGLPKELTLWVDPCEVCCRYGEKNNAFIVASFENKDENKDEISRKVTRALDKVTSDYHSGSSSSDEETSKEMEVKPSSVTAAASPVYQISELIFPPLPMWHPLPRKKPGMYRGNGHQNHYPPPVPFGYPNQGRKNKPYRPIPVTWVPPPGMHCDRNHWINPHMLAPH

SEQ ID NO: 23186 - protein, 33 aa, Homo sapiens
LVICHGLVVQLVRSFRINMHFITVKCSFNSESK

SEQ ID NO: 23187 - protein, 86 aa, Homo sapiens
MLCVRARSFRPCSSVTTCNIRWFQFLGGKNLKLHFLSIKNRSNYSLNKMMTLKFPPMKTSSGMKRRMKSIQEMTVMGQSLLRSAHG

SEQ ID NO: 23188 - protein, 88 aa, Homo sapiens
KKLPRKTHRGLRKVACIGAWHPARVAFSVARAGQKGYHHRTEINKKIYKIGQGYLIKDGKLIKNNASTDYDLSDKSINPLVSNGCSAL

SEQ ID NO: 23189 - protein, 31 aa, Homo sapiens
IGYFQNRQPKLMHKSVASFLEWPSHEFFGDL

SEQ ID NO: 23190 - protein, 64 aa, Homo sapiens
LPLPPSLPEDTISTLTQHDRNIQPNFSPICGHWTAHQHENFYVFTYCFSYHPDDWVSTFCCVSS

SEQ ID NO: 23191 - protein, 122 aa, Homo sapiens
MVRVGGGWMALDEFLVKNDPCRARGRTNIELREKFILPEGASQGMTPFRSRGRRSKPSSRAASPTRSSSSASQSNHSCTSMPSSPATPASGTKVCTDLHYALLPQSHPHRCSLFTVASERLQ

SEQ ID NO: 23192 - protein, 306 aa, Homo sapiens
MPGGPIPPGFFQPFMSPRYAGGPRPPIRMGNQPPGGVPGTQPLLPNSMDPTRQQGHPNMGGSMQRMNPPRGMGPMGPGPQNYGSGMRPPPNSLGPAMPGINMGPGAGRPWPNPNSANSIPYSSSSPGTYVGPPGGGGPPGTPIMPSPADSTNSSDNIYTMINPVPPGGSRSNFPMGPGSDGPMGGMGGMEPHHMNGSLGSGDIDGLPKNSPNNISGISNPPGTPRDDGELGGNFLHSFQNDNYSPSMTMSVSPLLRDAERAGIAGGKMPEIMQEVRCHYPGAGGEGISLLPSTPSHPIHAPYLSQF

SEQ ID NO: 23193 - protein, 659 aa, Homo sapiens
MKGRARGTAPKVTGTQAASPNVGALKVRENRVLSVPPDQRITLTDLFENAYGSSMKGRELEELKDNIEFRGHKPLNSITVSKKRNWLYQSTLRPLNLEEENKKCQDRSHLSISPVSLPKHQLSQSFLKSSKEYCTYVVCNATNSSLSKNCALDFNEENDADDEGEIWYNPIPEDDDLGISSALSFGEADSAVLKLPAVNLSMLSGSDLMKAERHTEDSLCSSEHAGDIQTTRSNGMNPIHPAHSTEFVQQYKQKLGHKTQEGIMVEDSPMLKSPFAGSGILAATNSTELGIMEPSSPNPSPVKKGSSINWSLPDKIKSPRTVRKLSMKMKKLPEFSRKLSVKGTLNYINSPDNTPSLSKYNCREVHHTDILPSGNTTTAAKRNVISRYHLDTSVSSQQSYQKKNSMSSKYSCKGGYLSDGDSPELTTKASKHGSENKFGKGKEIISNSCSKNEIDIDAFRHYSFSDQPKCSQYISGLMSVHFYGAEDLKPPRIDSKDVFCAIQVDSVNKARTALLTCRTTFLDMDHTFNIEIENAQHLKLVVFSWEPTPRKNRVCCHGTVVLPTLFRVTKTHQLAVKLEPRGLIYVKVTLMEQWENSLHGLDINQEPIIFGVDIQKVVEKENIGLMVPLLIQKCIMEIEKRGCQVLSYYGSLLLPLLID

SEQ ID NO: 23194 - protein, 36 aa, Homo sapiens
MRAAAGTRRARLGRRRLLRLRRGGRSGCRAVLEFPA

SEQ ID NO: 23195 - protein, 73 aa, Homo sapiens
MSTDSNSLAREFLTDVNRLCNAVVQRVEAREEEEEETHMATLGQYLVHGRGFLLLTKLNSIIDQRWGFTVLTS

SEQ ID NO: 23196 - protein, 72 aa, Homo sapiens
MTPSSVGSVTGSSSAPSPGQAPGSPQGLWCWPGCRPWAGMGRCWRCRSWRSGCPGPQLACSSCCACASMMAS

SEQ ID NO: 23197 - protein, 108 aa, Homo sapiens [sequence omitted]

SEQ ID NO: 23198 - protein, 277 aa, Homo sapiens
MQALEVLLLLRIVSERLKDHSKAAGSSCHITQLLLTLGCPSYAQLHLEEAASSLKHLDQTTDTYLLLSLTCDLLRSQLYWTHQKVTKGVSLLLSVLRDPALQKSSKAWYLLRVQVLQLVAAYLSLPSNNLSHSLWEQLCAQGWQTPEIALIDSHKLLRSIILLLMGSDILSTQKAAVETSFLDYGENLVQKWQVLSEVLSCSEKLVCHLGRLGSVSEAKAFCLEALKLTTKLQIPRQCALFLVLKGELELARNDIDLCQSDLQQVLFLLESCTGELQ

SEQ ID NO: 23199 - protein, 17 aa, Homo sapiens
MRRKKIQEWIPPSTPYK

SEQ ID NO: 23200 - protein, 193 aa, Homo sapiens
MPGQGPGSDWTERSSSAEPPAVAGTEGGGGGSAGYSCYQNSKGSDRIKDGYKVNSHIAKLQELWKTPQNQTIHLSKSMMEASFFKHPDLTTGQKRYLCSIAKIYNANYLKMLMKRQYMHVLQHSSQKPGVLTHHRSRLSSRYSQKQHYPCTTWRHQLEREDSGSSDIAAASAPEMLIQHSLWRPVRNKEGSVS

SEQ ID NO: 23201 - protein, 29 aa, Homo sapiens
MSYFRPIDTTMDEEQVELSRKEKLRCACH

SEQ ID NO: 23202 - protein, 465 aa, Homo sapiens
MVYYQGVMQQIQRHCQSVRDPAIKGKWQQVRQELLEEYEQVKSIVSTLESFKIDKPPDFPVSCQDEPFRDPAVWPPPVPAEHRAPPQIRRPNREVRPLRKEMAGVGARGPVGRAHPISKSEKPSTSRDKDYRARGRDDKGRKNMQDGASDGEMPKFDGAGYDKDLVEALERDIVSRNPSIHWDDIADLEEAKKLLREAVVLPMWMPDFFKGIRRPWKGVLMVGPPGTGKTMLAKAVATECGTTFFNVSSSTLTSKYRGESEKLVRLLFEMARFYAPTTIFIDEIDSICSRRGTSDEHEASRRVKSELLIQMDGVGGALENDDPSKMVMVLAATNFPWDIDEALRRRLEKRIYIPLPTAKGRAELLKINLREVELDPDIQLEDIAEKIEGYSGADITNVCRDASLMAMRRRINGLSPEEIRALSKEELQMPVTKGDFELALKKIAKSVSAADLEKYEKWMVEFGSA

SEQ ID NO: 23203 - protein, 17 aa, Homo sapiens
MLIFTESKRKLEMIGSL

SEQ ID NO: 23204 - protein, 274 aa, Homo sapiens
MGPVGSPLSRIGVQLTDSAYVVASMRIMTRLGTPVLQALGDGDFVKCLHSVGQPLTGQGEPVSQWPCNPEKTLIGHVPDQREIISFGSGYGGNSLLGKKCFALRIASRLARDEGWLAEHMLILGITSPAGKKRYVAAAFPSACGKTNLAMMRPALPGWKVECVGDDIAWMRFDSEGEGLSDHTLGSGSCQSLGVSSLVFTMTLSVRKFPEHPTLLHSSGSPATRETAFPHQILGPSQDRGGWSRTFFGLTSQVFLVWSFLSFTSPNRSTPGHQP

SEQ ID NO: 23205 - protein, 88 aa, Homo sapiens
MSLPLLAGGVADDINTNKKEGISDVVEGMELNSSITSQDVLMSSPEKNTASQNSILEEGETKISQSELFDNKSLTTECHLLDSVSFPT

SEQ ID NO: 23206 - protein, 183 aa, Homo sapiens
MRRSEVLAEESIVCLQKALNHLREIWELIGIPEDQRLQRTEVVKKHIKELLDMMIAEEESLKERLIKSISVCQKELNTLCSELHVEPFQEEGETTILQLEKDLRTQVELMRKQKKERKQELKLLQEQDQELCEILCMPHYDIDSASVPSLEELNQFRQHVTTLRETKVHCLHLFFLKVTLVFL

SEQ ID NO: 23207 - protein, 39 aa, Homo sapiens
MDAPRPPSLAVPGAASRPGRAAISSSEPSPLLATLCFFS

SEQ ID NO: 23208 - protein, 141 aa, Homo sapiens
MDPGERGPGSHEPPSSATLLPLYPFSEKIMKLAANISGDKLVSLGTCFGKFTKTHKFRLHVTALDYLAPYAKYKVWIKPGAEQSFLYGNHVLKSGLGRITENTSQYQGVVVYSMADIPLVSRDGSCYRTQVLLFKKGMSSI

SEQ ID NO: 23209 - protein, 280 aa, Homo sapiens
MVSNRLLSVAGRVKREKYNPERAQKLKESAVRLLRSHQDLNALLLEVEGPLCKKLSLSKVIDCDSSEAYANHSSSFIGSALQDQASRLGVPVGILSAGMVASSVGQICTAPAETSHPVLLTVEQRKKLSSLLEFAQYLLAHSMFSRLSFCQELWKIQSSLLLEAVWHLHVQGIVSLQELLESHPDMHAVGSWLFRNLCCLCEQMEASCQHADVARAMLSDFVQMFVLRGFQKNSDLRRTVEPEKMPQVTVDVLQRMLIFALDALAAGVQEESSTHKIVRC

SEQ ID NO: 23210 - protein, 63 aa, Homo sapiens [sequence omitted]

SEQ ID NO: 23211 - protein, 384 aa, Homo sapiens
MFHSLDRNQDGHIDVSEIQQSFRALGISISLEQAEKILHSMDRDGTMTIDWQEWRDHFLLHSLENVEDVLYFWKHSTVLDIGECLTVPDEFSKQEKLTGMWWKQLVAGAVAGAVSRTGTAPLDRLKVFMQVHASKTNRLNILGGLRSMVLEGGIRSLWRGNGINVLKIAPESAIKFMAYEQIKRAILGQQETLHVQERFVAGSLAGATAQTIIYPMEVLKTRLTLRRTGQYKGLLDCARRILEREGPRAFYRGYLPNVLGIIPYAGIDLAVYETLKNWWLQQYSHDSADPGILVLLACGTISSTCGQIASYPLALVRTRMQAQASIEGGPQLSMLGLLRHILSQEGMRGLYRGIAPNFMKVIPAVSISYVVYENMKQALGVTSR

SEQ ID NO: 23212 - protein, 7 aa, Homo sapiens
MNERSRD

SEQ ID NO: 23213 - protein, 132 aa, Homo sapiens
MEIQEMQLKEAKHIAEEADRKYEEVARKLVILEGELERAEERAEVSELKCGDLEEELKNVTNNLKSLEAASEKVGGWLELEGGLLDFVLFFSRGMQEPVRLWGICPLFNSSVGAWQPGFFPYRKSWISPAHS

SEQ ID NO: 23214 - protein, 44 aa, Homo sapiens
MDKKAYFLGMMNGERLHGELLTIQCPSLLWYREDLDRVFMETVK

SEQ ID NO: 23215 - protein, 100 aa, Homo sapiens [sequence omitted]

SEQ ID NO: 23216 - protein, 68 aa, Homo sapiens
MKDYMGRGKISKEKSFLDLVVELEKLNLVAPDQLDLLEKCLKNIHRIDLKTKIQKYKQSGKNFGLSVV

SEQ ID NO: 23217 - protein, 110 aa, Homo sapiens
MIDVIGVTKGKGYKGVTSRWHTKKLPRKTHRGLRKVACIGAWHPARVAFSVARAGQKGYHHRTEINKKIYKIGQGYLIKDGKLIKNNASTDYDLSDKSINPLVSNGCSAL

SEQ ID NO: 23218 - protein, 186 aa, Homo sapiens
MNWRSAGESQSCPDSASPQGPLPSGLPSPAIPVAGKVGLALPSRPLPHRRAQLKRCLERLKQQMPLGADCARYTTLSLLRRARMHIQKLEDQEQRARQLKERLRSKQQSLQRQLEQLRGLAGAAERERLRADSLDSSGLSSERSDSDQEELEVDVESLVFGGEAELLRGFVAGQEHSYSHGGGAWL

SEQ ID NO: 23219 - protein, 172 aa, Homo sapiens
MAGVSFSGHRLELLAAYEEVIREESAADWALYTYEDGSDDLKLAASGEGGLQELSGHFENQKVMYGFCSVKDSQAALPKYVLINWVGEDVPDARKCACASHVAKVAEFFQVRVRGQRSWGWGQPPGSACWGGDGGRMVPPEHCRLLAEGCRRDRERQQRGRHRRGCHRAAAL

SEQ ID NO: 23220 - protein, 102 aa, Homo sapiens
MCDEMERSLHDALCVVKRVLESKSVVPGGGAVEAALSIYLENYATSMGSREQLAIAEFARSLLVIPNTLAVNAAQDSTDLVAKLRAFHNEAQVNPERKNLKW

SEQ ID NO: 23221 - protein, 46 aa, Homo sapiens
MWALHELKGHYAITRKAFSDAIKKWQELSPETSGKRKKRKEMNQYS

SEQ ID NO: 23222 - protein, 152 aa, Homo sapiens
MTFTSQLIVERSSKGTRASVKEQDYLCHVYVRNDSLAGVVIADNEYPSRVAFTLLEKVLDEFSKQVDRIDWPVGSPATIHYPALDGHLSRYQNPREADPMTKVQAELDETKIILHNTMESLLERGEKLDDLVSKSEVLGTQSKAFYKTKIFN

SEQ ID NO: 23223 - protein, 408 aa, Homo sapiens
MRLRQLKRFRRADEVKSMFSSNRQKILERTEILNQEWKQRRIQPVHILTSVSSLRGTRECSVTSDLDFPTQVIPLKTLNAVASVPIMYSWSPLQQNFMVEDETVLHNIPYMGDEVLDQDGTFIEELIKNYDGKVHGDRECGFINDEIFVELVNALGQYNDDDDDDDGDDPEEREEKQKDLEDHRDDKESRPPRKFPSDKIFEAISSMFPDKGTAEELKEKYKELTEQQLPGALPPECTPNIDGPNAKSVQREQSLHSFHTLFCRRCFKYDCFLHPFHATPNTYKRKNTETALDNKPCGPQCYQHLEGAKEFAAALTAERIKTPPKRPGGRRRGRLPNNSSRPSTPTINVLESKDTDSDREAGTETGGENNDKEEEEKKDETSSSSGKTRLITGFYCSVKVRVVRIKDV

SEQ ID NO: 23224 - protein, 243 aa, Homo sapiens
MPVAPYWTSPEKMEKKLHAVPAAKTVKFKCPSSGTPNPTLRWLKNGKEFKPDHRIGGYKVRYATWSIIMDSVVPSDKGNYTCIVENEYGSINHTYQLDVVERSPHRPILQAGLPANKTVALGSNVEFMCKVYSDPQPHIQWLKHIEVNGSKIGPDNLPYVQILKVIMAPVFVGQSTGKETTVSGAQVPVGRLSCPRMGSFLTLQAHTLHLSRDLATSPRTSNRGHKVEVSWEQRAAGMGGAGL

SEQ ID NO: 23225 - protein, 66 aa, Homo sapiens
MGLGRCIWEGPGGDSNPALTYPKSRLTAFPIPTFPVTAARTDRHCCRELATVFHAVAGGSRLHAPF

SEQ ID NO: 23226 - protein, 161 aa, Homo sapiens
MREDGLSPNESKLCTESEGISPNNSAWNGPQLSSSNNNFQQTVSDKNMPDSENPTSVFSRISDHSETPNMELSCRNGGSHKSSCEMRSLVVSTSSNKDVLNKDSGKMKGHERRLGKVIPVLQTKTRTNVPTFSQSNLEQQKQLYLRSVIAHIEDPEDTNQG

SEQ ID NO: 23227 - protein, 5918 aa, Homo sapiens
MSGLIAPETGENLSLEEGIARNLINPQMYQQLRELQDALALISRLTESRGPLSVVEAIEKRIISETVGLKILEAHLATGGFSLSPSENCINLEEAFHQGLISAWLHSVLESYLRTSKNLIDPNTAEKIGLLDLMQRCIVHQESGFKLLPVKQLAGGMVSLKSGRKVSIFRAVQEGLIDRQVTVRLLEAQLFAGGIVDPRTGHRLTVEEAVRHNLIDQDMACAILIRQLQTGGIIDTVTGQRLTIDEAVSNDLVAAKIALVILESLWSFMGLLWPESGEILPITDALEQGIVSTELAHKILSNRQHIKALFLPATTEILSWKKAIESGILDRDLANNLKSICIPDVMPHMQLADSAEQNINPGAAVLPCSKSHPKATASQSENLLFQLMTHSYINVQNGQRLLLLDKELMETLTSRDEYQTSPPKVVEIGHQRQKTPEGLQESANVKISGTFSSGWTVRLPEFQFSSQNKEYPDREDCTTEKGKKTTVETEDSSVENPEQDLFVEQKERNPNIDALKVINKVKLEVQRQLIGTQREDQTAVSVRENASRGHLLTIPPAEAEGVPLVVDKDVFSVETPKKEHQPLRNTSFTCQNEQAHTLETEYIHDETGGSHIKPQSKKLQVQVKKTLGIKLELKSETDGNVHPLDKKEMLKKTFLAKDDHKESQEAQNIAGGSMMMSEKTDEEDSGREIFLSCSHPLELLEEATLNVLSAQLLDGGIFHEQTGQKLLLNEAISRGIVPSHTAVKLMEKLNMFQGFFDSQTCESLTTEEVINEGLMDEKLLHNVLMADKAISGVLDPRTQTLCSVKDAVTVGLLDKETATRILERQVVTGGIIDLKRGKKVSVTLASTLGLVDVADQPELINLEKASKGRDAEKTVRERLISLQMETTGLIDPDSKAPLTVVQSIDRGLLEREEAVRLLTKQVVDGGIIHHISGMRLSVDNAFRHGLIGEDLAEKLKRVENLNIHQIFNPETKENISLPKAIKLDLITSDLKREIQEVQAFTGNFVDLISGQRLTLAEAKKEGLLTNEAVLSPGMMHGIVDPENCRIVPYSELVKKCKIDIESGQRYLEVIPFSDIKDGVSDKVLTLSQAIQLGKVDFASTLKVLEAQANTGGIIDTATGKRLTLASALEEKLVDENMVRIIASHQVLNGGIVDIFSDQRVTLVEAIEKRLISPELANMIQIDSSEFSDHRAQIEKQEGIEVCALQNEFLGKDMLIACNQTAEMSCNKVEESERLFQVENQSAQEKVKVRVSDGEQAKKSREISLKEFGCKDQRKPRMSSDAKEFISIINPHNLKGKSLGQVSLTHPYSECDFKLKEVARNNMGNDTNEEQEKAVTKIEIISHMKQSTSCLDSEEIRENQGEVILEVQETYCETSGKLPSEQVLQQPMNARVKSKREKREVIVEESIRTCKPAFLSEEKLYQETAIRDEHDSHIKSQPREMTSSEKGKEADTEMGFSITFKIEESSSQVVPQGISVKHLDALTLFSSKQANEGKVNNLSLCLTLKPEENLSREIACGAQSEPFPCMTPRPEGLHYQESDGKAQVTGPSQISKTDKSFQGTTRQETNYQDSWVTSKTKETKHQISSSNECKEKSYQEVSFDPARGLKLEEITVSRPDSKEVRYLEFSDRKDLHHQGSKSDDKLCGTLKSEIATQELTGEKFLEMANPNVAGLEAGSIEDIVTQRGSRVLGSFLPEKLFKGVSQKENTGQQNAIISPTVLETSEEKTVSLTVCSAVKTEKTPQEKLRESPGSEQTPFMTAPEGKGNGGVNPEPFRATQNVFTRQLCLEHDEKLVSYLSLLRNIEMRTKQIQPLELNLAELQDLLCQAKVLERELKDLTTLVSQELECVNQIIISQPQEVPAQLLKALEKDAKNLQKSLSSVSDTWNSRLLHFQNAVEIEKTKVLNQHTQLEGRLQDLRAWVGNKNLILNSKGSNSEIDVDSLNLCLQQYEDLKQPMAERKAQLDALAFDIQFFISEHAQDLSPQQNRQMLRLLNELQRSFQDILEQTAAQVDALQGHLQQMEQEALVKTLQKQQNTCHQQLEDLCSWVGQAERALAGHQGRTTQQDLSALQKNQSDLKDLQDDIQNRATSFATVVKDIEGFMEENQTKLSPRELTALREKLHQAKEQYEALQEETRVAQKELEEAVTSALQQETEKSKAAKELAENKKKIDALLDWVTSVGSSGGQLLTNLPGMEQLSGASLEKGALDTTDGYMGVNQAPEKLDKQCEMMKARHQELLSQQQNFILATQSAQAFLDQHGHNLTPEEQQMLQQKLGELKEQYSTSLAQSEAELKQVQTLQDELQKFLQDHKEFESWLERSEKELENMHKGGSSPETLPSLLKRQGSFSEDVISHKGDLRFVTISGQKVLDMENSFKEGKEPSEIGNLVKDKLKDATERYTALHSKCTRLGSHLNMLLGQYHQFQNSADSLQAWMQACEANVEKLLSDTVASDPGVLQEQLATTKQLQEELAEHQVPVEKLQKVARDIMEIEGEPAPDHRHVQETTDSILSHFQSLSYSLAERSSLLQKAIAQSQSVQESLESLLQSIGEVEQNLEGKQVSSLSSGVIQEALATNMKLKQDIARQKSSLEATREMVTRFMETADSTTAAVLQGKLAEVSQRFEQLCLQQQEKESSLKKLLPQAEMFEHLSGKLQQFMENKSRMLASGNQPDQDITHFFQQIQELNLEMEDQQENLDTLEHLVTELSSCGFALDLCQHQDRVQNLRKDFTELQKTVKEREKDASSCQEQLDEFRKLVRTFQKWLKETEGSIPPTETSMSAKELEKQIEHLKSLLDDWASKGTLVEEINCKGTSLENLIMEITAPDSQGKTGSILPSVGSSVGSVNGYHTCKDLTEIQCDMSDVNLKYEKLGGVLHERQESLQAILNRMEEVHKEANSVLQWLESKEEVLKSMDAMSSPTKTETVKAQAESNKAFLAELEQNSPKIQKVKEALAGLLVTYPNSQEAENWKKIQEELNSRWERATEVTVARQRQLEESASHLACFQAAESQLRPWLMEKELMMGVLGPLSIDPNMLNAQKQQVQFMLKEFEARRQQHEQLNEAAQGILTGPGDVSLSTSQVQKELQSINQKWVELTDKLNSRSSQIDQAIVKSTQYQELLQDLSEKVRAVGQRLSVQSAISTQPEAVKQQLEETSEIRSDLEQLDHEVKEAQTLCDELSVLIGEQYLKDELKKRLETVALPLQGLEDLAADRINRLQAALASTQQFQQMFDELRTWLDDKQSQQAKNCPISAKLERLQSQLQENEEFQKSLNQHSGSYEVIVAEGESLLLSVPPGEEKRTLQNQLVELKNHWEELSKKTADRQSRLKDCMQKAQKYQWHVEDLVPWIEDCKAKMSELRVTLDPVQLESSLLRSKAMLNEVEKRRSLLEILNSAADILINSSEADEDGIRDEKAGINQNMDAVTEELQAKTGSLEEMTQRLREFQESFKNIEKKVEGAKHQLEIFDALGSQACSNKNLEKLRAQQEVLQALEPQVDYLRNFTQGLVEDAPDGSDASQLLHQAEVAQQEFLEVKQRVNSGCVMMENKLEGIGQFHCRVREMFSQLADLDDELDGMGAIGRDTDSLQSQIEDVRLFLNKIHVLKLDIEASEAECRHMLEEEGTLDLLGLKRELEALNKQCGKLTERGKARQEQLELTLGRVEDFYRKLKGLNDATTAAEEAEALQWVVGTEVEIINQQLADFKMFQKEQVDPLQMKLQQVNGLGQGLIQSAGKDCDVQGLEHDMEEINARWNTLNKKVAQRIAQLQEALLHCGKFQDALEPLLSWLADTEELIANQKPPSAEYKVVKAQIQEQKLLQRLLDDRKATVDMLQAEGGRIAQSAELADREKITGQLESLESRWTELLSKAAARQKQLEDILVLAKQFHETAEPISDFLSVTEKKLANSEPVGTQTAKIQQQIIRHKALEEDIENHATDVHQAVKIGQSLSSLTSPAEQGVLSEKIDSLQARYSEIQDRCCRKAALLDQALSNARLFGEDEVEVLNWLAEVEDKLSSVFVKDFKQDVLHRQHADHLALNEEIVNRKKNVDQAIKNGQALLKQTTGEEVLLIQEKLDGIKTRYADITVTSSKALRTLEQARQLATKFQSTYEELTGWLREVEEELATSGGQSPTGEQIPQFQQRQKELKKEVMEHRLVLDTVNEVSRALLELVPWRAREGLDKLVSDANEQYKLVSDTIGQRVDEIDAAIQRSQQYEQAADAELAWVAETKRKLMALGPIRLEQDQTTAQLQVQKAFSIDIIRHKDSMDELFSHRSEIFGTCGEEQKTVLQEKTESLIQQYEAISLLNSERYARLERAQVLVNQFWETYEELSPWIEETRALIAQLPSPAIDHEQLRQQQEEMRQLRESIAEHKPHIDKLLKIGPQLKELNPEEGEMVEEKYQKAENMYAQIKEEVRQRALALDEAVSQSTQITEFHDKIEPMLETLENLSSRLRMPPLIPAEVDKIRECISDNKSATVELEKLQPSFEALKRRGEELIGRSQGADKDLAAKEIQDKLDQMVFFWEDIKARAEEREIKFLDVLELAEKFWYDMAALLTTIKDTQDIVHDLESPGIDPSIIKQQVEAAETIKEETDGLHEELEFIRILGADLIFACGETEKPEVRKSIDEMNNAWENLNKTWKERLEKLEDAMQAAVQYQDTLQAMFDWLDNTVIKLCTMPPVGTDLNTVKDQLNEMKEFKVEVYQQQIEMEKLNHQGELMLKKATDETDRDIIREPLTELKHLWENLGEKIAHRQHKLEGALLALGQFQHALEELMSWLTHTEELLDAQRPISGDPKVIEVELAKHHVLKNDVLAHQATVETVNKAGNELLESSAGDDASSLRSRLEAMNQCWESVLQKTEEREQQLQSTLQQAQGFHSEIEDFLLELTRMESQLSASKPTGGLPETAREQLDTHMELYSQLKAKEETYNQLLDKGRLMLLSRDDSGSGSKTEQSVALLEQKWHVVSSKMEERKSKLEEALNLATEFQNSLQEFINWLTLAEQSLNIASPPSLILNTVLSQIEEHKVFANEVNAHRDQIIELDQTGNQLKFLSQKQDVVLIKNLLVSVQSRWEKVVQRSIERGRSLDDARKRAKQFHEAWKKLIDWLEDAESHLDSELEISNDPDKIKLQLSKHKEFQKTLGGKQPVYDTTIRTGRALKEKTLLPEDSQKLDNFLGEVRDKWDTVCGKSVERQHKLEEALLFSGQFMDALQALVDWLYKVEPQLAEDQPVHGDLDLVMNLMDAHKVFQKELGKRTGTVQVLKRSGRELIENSRDDTTWVKGQLQELSTRWDTVCKLSVSKQSRLEQALKQAEVFRDTVHMLLEWLSEAEQTLRFRGALPDDTEALQSLIDTHKEFMKKVEEKRVDVNSAVAMGEVILAVCHPDCITTIKHWITIIRARFEEVLTWAKQHQQRLETALSELVANAELLEELLAWIQWAETTLIQRDQEPIPQNIDRVKALIAEHQTFMEEMTRKQPDVDRVTKTYKRKNIEPTHAPFIEKSRSGGRKSLSQPTPPPMPILSQSEAKNPRINQLSARWQQVWLLALERQRKLNDALDRLEELKEFANFDFDVWRKKYMRWMNHKKSRVMDFFRRIDKDQDGKITRQEFIDGILASKFPTTKLEMTAVADIFDRDGDGYIDYYEFVAALHPNKDAYRPTTDADKIEDEVTRQVAQCKCAKRFQVEQIGENKYRFFLGNQFGDSQQLRLVRILRSTVMVRVGGGWMALDEFLVKNDPCRARGRTNIELREKFILPEGASQGMTPFRSRGRRSKPSSRAASPTRSSSSASQSNHSCTSMPSSPATPASGTKVIPSSGSKLKRPTPTFHSSRTSLAGDTSNSSSPASTGAKTNRADPKKSASRPGSRAGSRAGSRASSRRGSDASDFDLLETQSACSDTSESSAAGGQGNSRRGLNKPSKIPTMSKKTTTASPRTPGPKR

SEQ ID NO: 23228 - protein, 215 aa, Homo sapiens
MCSKPEDPVEYLESCLQKVKELGGCDKVKWDTFVSQEKKTLPPLNGGQSRRSFLRNESDTDLSETAELIEEYEVFDPTRPRPKIILVIGGPGSGKGTQSLKIAERYGFQYISVGELLRKKIHSTSSNRKWSLIAKIITTGELAPQETTITEIKQKLMQIPDEEGIVIDGFPRDVAQALSFEDQYSLRPQTKMPVQSDPLPYAAPCGVCPVRQDSP

SEQ ID NO: 23229 - protein, 121 aa, Homo sapiens
MSSQLIDYGKLGDTNERAMRMADFWLTEKDLIPKLFQVLAPRYKDQTGGYTRMLQIPNRSLDRAKMAVIEYKGNCLPPLPLPRRDSHLTLLNQLLQGLRQDLRQSQEASNHSSHTAQTPGI

SEQ ID NO: 23230 - protein, 419 aa, Homo sapiens
MDKSAVGHEYQSKLSKHCSQVDSVRGFGGKFGVQMDRVDQSAVGFEYQGKTEKHASQKDYSSGFGGKYGVQADRVDKSAVGFDYQGKTEKHESQRDYSKGFGGKYGIDKDKVDKSAVGFEYQGKTEKHESQKDYVKGFGGKFGVQTDRQDKCALGWDHQEKLQLHESQKDYSKGFGGKYGVQKDRMDKNASTFEDVTQVSSAYQKTVPVEAVTSKTSNIRANFENLAKEKEQEDRRKAEAERAQRMAKERQEQEEARRKLEEQARAKTQTPPVSPAPQPTEERLPSSPVYEDAASFKAELSYRGPVSGTEPEPVYSMEAADYREASSQQGLAYATEAVYESAEAPGHYPAEDSTYDEYENDLGITAVALYDYQAAGDDEISFDPDDIITNIEMIDDGWWRGVCKGRYGLFPANYVELRQ

SEQ ID NO: 23231 - protein, 68 aa, Homo sapiens
MPVKKKRKSPGVAAAVAEDGGLKKCKISRYHLPPPFKLPSSLLCWTTGGKGVGPGLPGWGWRQIPTPC

SEQ ID NO: 23232 - protein, 7 aa, Homo sapiens
MGRCRTF

SEQ ID NO: 23233 - protein, 22 aa, Homo sapiens
MEGGLADGEPDRTSQTVTNLSF

SEQ ID NO: 23234 - protein, 325 aa, Homo sapiens
MSSKAMLKVQEDIKALKQLLSLAANGIQRNTLNIDKLKIETAQELKNAEIALRTQKTPPGLQHEYAAPADYFRILVQQFEVQLQQYRQQIEELENHLATQANNSHITPQDLSMAMQKIYQTFVALAAQLQSIHENVKVLKEQYLGYRKMFLGDAVDVFETRRAEAKKWQNTPRVTTGPTPFSTMPNAAAVAMAATLTQQQQPATGPQPSLGVSFGTPFGSGIGTGLQSSGLGSSNLGGFGTSSGFGCSTTGASTFGFGTTNKPSGSLSAGFGSSSTSGFNFSNPGITASAGLTFGVSNPASAGFGTGGQLLQLKKPPAGNKRGKR

SEQ ID NO: 23235 - protein, 562 aa, Homo sapiens [sequence omitted]

SEQ ID NO: 23236 - protein, 65 aa, Homo sapiens
MACARPLISVYSEKGESSGKNVTLPAVFKAPIRPDIVNFVHTNLRKNNRQPYAVSELAATVACCQ

SEQ ID NO: 23237 - protein, 632 aa, Homo sapiens
MAETAAGVGRFKTNYAVERKIEPFYKGGKAQLDQTGQHLFCVCGTRVNILEVASGAVLRSLEQEDQEDITAFDLSPDNEVLVTASRALLLAQWAWQEGSVTRLWKAIHTAPVATMAFDPTSTLLATGGCDGAVRVWDIVRHYGTHHFRGSPGVVHLVAFHPDPTRLLLFSSATDAAIRVWSLQDRSCLAVLTAHYSAVTSLAFSADGHTMLSSGRDKICIIWDLQSCQATRTVPVFESVEAAVLLPEEPVSQLGVKSPGLYFLTAGDQGTLRVWEAASGQCVYTQAQPPGPGQELTHCTLAHTAGVVLTATADHNLLLYEARSLRLQKQFAGYSEEVLDVRFLGPEDSHVVVASNSPCLKVFELQTSACQILHGHTDIVLALDVFRKGWLFASCAKDQSVRIWRMNKAGQVMCVAQGSGHTHSVGTVCCSRLKESFLVTGSQDCTVKLWPLPKALLSKNTAPDNGPILLQAQTTQRCHDKDINSVAIAPNDKLLATGSQDRTAKLWALPQCQLLGVFSGHRVASGASSSLPWTRCWPRPQLMAPSSSGHSRTSAVSRHLRGTMLCLKVAFVSRGTQLLSSGSDGLVKLWTIKNNECVRTLDAHEDKVWGLHAGWTTTPSLGPVTPESSSGRM

SEQ ID NO: 23238 - protein, 25 aa, Homo sapiens
MDPNCSCATGGSCSCASSCKCKECK

SEQ ID NO: 23239 - protein, 298 aa, Homo sapiens
MWPSLLRTATRWGPGRASHLSQACPFAGPQGSWVRSSFHLQPRMIGDVLSEDENDKKQNAQSSDESFEPYPERKVSGKKSESKEAKKSEEPRIRKKPGPKPGWKKKLRCEREELPTIYKCPYQGCTAVYRGADGMKKHIKEHHEEVRERPCPHPGCNKVFMIDRYLQRHVKLIHTEVRNYICDECGQTFKQRKHLLVHQMRHSGAKPLQCEVCGFQCRQRASLKYHMTKHKAETELDFACDQCGRRFEKAHNLNVHMSMVHPLTQTQDKALPLEAEPPPGPPSPSVTTEGQAVKPEPT

SEQ ID NO: 23240 - protein, 1249 aa, Homo sapiens
MNYSSQMSQGPIAMQAGIPMGPMPAAGMPYLGQAPFLGMRPPGPQYTPDMQKQFAEEQQKRFEQQQKLLEEERKRRQFEEQKQKLRLLSSVKPKTGEKSRDDALEAIKGNLDGFSRDAKMHPTPASHPKKPGPSLEEKFLVSCDISTSGQEQIKLNTSEVGHKALGPGSSKKYPSLMASNGVAVDGCVSGTTTAEAENTSDQNLSIEESGVGVFPSQDPAQPRMPPWIYNESLVPDAYKKILETTMTPTGIDTAKLYPILMSSGLPRETLGQIWALANRTTPGKLTKEELYTVLAMIAVTQRGVPAMSPDALNQFPAAPIPTLSGFSMTLPTPVSQPTVIPSGPAGSMPLSLGQPVMGINLVGPVGGAAAQASSGFIPTYPANQVVKPEEDDFQDFQDASKSGSLDDSFSDFQELPASSKTSNSQHGNSAPSLLMPLPGTKALPSMDKYAVFKGIAADKSSENTVPPGDPGDKYSAFRELEQTAENKPLGESFAEFRSAGTDDGFTDFKTADSVSPLEPPTKDKTFPPSFPSGTIQQKQQTQVKNPLNLADLDMFSSVNCSSEKPLSFSAVFSTSKSVSTPQSTGSAATMTALAATKTSSLADDFGEFSLFGEYSGLAPVGEQDDFADFMAFSNSSISSEQKPDDKYDALKEEASPVPLTSNVGSTVKGGQNSTAASTKYDVFRQLSLEGSGLGVEDLKDNTPSGKSDDDFADFHSSKFSSINSDKSLGEKAVAFRHTKEDSASVKSLDLPSIGGSSVGKEDSEDALSVQFDMKLADVGGDLKHVMSDSSLDLPTVSGQHPPAADIEDLKYAAFGSYSSNFAVSTLTSYDWSDRDDATQGRKLSPFVLSAGSGSPSATSILQKKETSFGSSENITMTSLSKVTTFVSEDALPETTFPALASFKDTIPQTSEQKEYENRDYKDFTKQDLPTAERSQEATCPSPASSGASQETPNECSDDFGEFQSEKPKISKFDFLVATSQSKMKSSEEMIKSELATFDLSVQGSHKRSLSLGDKEISRSSPSPALEQPFRDRSNTLNEKPALPVIRDKYKDLTGEVEENERYAYEWQRCLGSALNVIKKANDTLNGISSSSVCTEVIQSAQGMEYLLGVVEVYRVTKRVELGIKATAVCSEKLQQLLKDIDKVWNNLIGFMSLATLTPDENSLDFSSCMLRPGIKNAQELACGVCLLNVDSRSRKEEKPAEEHPKKAFNSETDSFKLAYGGHQYHASCANFWINCVEPKPPGLVLPDLL

SEQ ID NO: 23241 - protein, 1159 aa, Homo sapiens
MNYSSQMSQGPIAMQAGIPMGPMPAAGMPYLGQAPFLGMRPPGPQYTPDMQKQFAEEQQKRFEQQQKLLEEERKRRQFEEQKQKLRLLSSVKPKTGEKSRDDALEAIKGNLDGFSRDAKMHPTPASHPKKPGVGVFPSQDPAQPRMPPWIYNESLVPDAYKKILETTMTPTGIDTAKLYPILMSSGLPRETLGQIWALANRTTPGKLTKEELYTVLAMIAVTQRGVPAMSPDALNQFPAAPIPTLSGFSMTLPTPVSQPTVIPSGPAGSMPLSLGQPVMGINLVGPVGGAAAQASSGFIPTYPANQVVKPEEDDFQDFQDASKSGSLDDSFSDFQELPASSKTSNSQHGNSAPSLLMPLPGTKALPSMDKYAVFKGIAADKSSENTVPPGDPGDKYSAFRELEQTAENKPLGESFAEFRSAGTDDGFTDFKTADSVSPLEPPTKDKTFPPSFPSGTIQQKQQTQVKNPLNLADLDMFSSVNCSSEKPLSFSAVFSTSKSVSTPQSTGSAATMTALAATKTSSLADDFGEFSLFGEYSGLAPVGEQDDFADFMAFSNSSISSEQKPDDKYDALKEEASPVPLTSNVGSTVKGGQNSTAASTKYDVFRQLSLEGSGLGVEDLKDNTPSGKSDDDFADFHSSKFSSINSDKSLGEKAVAFRHTKEDSASVKSLDLPSIGGSSVGKEDSEDALSVQFDMKLADVGGDLKHVMSDSSLDLPTVSGQHPPAADIEDLKYAAFGSYSSNFAVSTLTSYDWSDRDDATQGRKLSPFVLSAGSGSPSATSILQKKETSFGSSENITMTSLSKVTTFVSEDALPETTFPALASFKDTIPQTSEQKEYENRDYKDFTKQDLPTAERSQEATCPSPASSGASQETPNECSDDFGEFQSEKPKISKFDFLVATSQSKMKSSEEMIKSELATFDLSVQGSHKRSLSLGDKEISRSSPSPALEQPFRDRSNTLNEKPALPVIRDKYKDLTGEVEENERYAYEWQRCLGSALNVIKKANDTLNGISSSSVCTEVIQSAQGMEYLLGVVEVYRVTKRVELGIKATAVCSEKLQQLLKDIDKVWNNLIGFMSLATLTPDENSLDFSSCMLRPGIKNAQELACGVCLLNVDSRSRAFNSETDSFKLAYGGHQYHASCANFWINCVEPKPPGLVLPDLL

SEQ ID NO: 23242 - protein, 58 aa, Homo sapiens
MKPGKVVLVLAGRYSGRKAVIVKVSASRDSASLHAGTRLAAAGRAGLEFKACFWGSSQ

SEQ ID NO: 23243 - protein, 80 aa, Homo sapiens
MGKKKIAKRSKIKSFVKVYNYNHLMPTRYSVDIPLDKTVVNKDVFRDPALKRKARREAKVKFEERYKTGKNKWFFQKLRF

SEQ ID NO: 23244 - protein, 256 aa, Homo sapiens
MAVKRIRATVNSQEQKRLLMDLDISMRTVDCPFTVTFYGALFREGDVWICMELMDTSLDKFYKQVIDKGQTIPEDILGKIAVSIVKALEHLHSKLSVIHRDVKPSNVLINALGQVKMCDFGISGYLVDSVAKTIDAGCKPYMAPERINPELNQKGYSVKSDIWSLGITMIELAILRFPYDSWGTPFQQLKQVVEEPSPQLPADKFSAEFVDFTSQCLKKNSKERPTYPELMQHPFFTLHESKGTDVASFVKLILGD

SEQ ID NO: 23245 - protein, 168 aa, Homo sapiens
MTGKSKPLEFGVIYHCTEERLYTGRRGRGAFCNGQRLRVSGETDLSKALVLTEIGPKRDPATLKLFLSNMERLLHAKAHGVRVIGSSTLALCHLASGAADAYYQFGLHCWDLAAATVIIREAGGIVIDTSGGPLDLMACRVVAASTREMAMLIAQALQTINYGRDDEK

SEQ ID NO: 23246 - protein, 24 aa, Homo sapiens
MREDVAEGLTLGAGVICENGSLFT

SEQ ID NO: 23247 - protein, 205 aa, Homo sapiens
MGMGGFTNVNFGRSRSAQEPARKKQDPPVTHDLRVSLEEIYSGCTKKMKISHKRLNPDGKSIRNEDKILTIEVKKGWKEGTKITFPKEGDQTSNNIPADIVFVLKDKPHNIFKRDGSDVIYPARISLREALCGCTVNVPTLDGRTIPVVFKDVIRPGMRRKVPGEGLPLPKTPEKRGDLIIEFEVIFPERIPQTSRTVLEQVLPI

SEQ ID NO: 23248 - protein, 44 aa, Homo sapiens [sequence omitted]

SEQ ID NO: 23249 - protein, 99 aa, Homo sapiens [sequence omitted]

SEQ ID NO: 23250 - protein, 877 aa, Homo sapiens
MAEIAAAENNGNESGVRELLKRIVQKENWFSAFLNVLRQTGNNELVQELTGSDCSESNAEIENLSQVDGPQVEEQLLSTTVQPNLEKEVWGMENNSSESSFADSSVVSESDTSLAEGSVSCLDESLGHNSNMGSDSGTMGSDSDEENVAARASPEPELQLRPYQMEVAQPALEGKNIIICLPTGSGKTRVAVYIAKDHLDKKKKASEPGKVIVLVNKVLLVEQLFRKEFQPFLKKWYRVIGLSGDTQLKISFPEVVKSCDIIISTAQILENSLLNLENGEDAGVQLSDFSLIIIDECHHTNKEAVYNNIMRHYLMQKLKNNRLKKENKPVIPLPQILGLTASPGVGGATKQAKAEEHILKLCANLDAFTIKTVKENLDQLKNQIQEPCKKFAIADATREDPFKEKLLEIMTRIQTYCQMSPMSDFGTQPYEQWAIQMEKKAAKEGNRKERVCAEHLRKYNEALQINDTIRMIDAYTHLETFYNEEKDKKFAVIEDDSDEGGDDEYCDGDEDEDDLKKPLKLDETDRFLMTLFFENNKMLKRLAENPEYENEKLTKLRNTIMEQYTRTEESARGIIFTKTRQSAYALSQWITENEKFAEVGVKAHHLIGAGHSSEFKPMTQNEQKEVISKFRTGKINLLIATTVAEEGLDIKECNIVIRYGLVTNEIAMVQARGRARADESTYVLVAHSGSGVIEHETVNDFREKMMYKAIHCVQNMKPEEYAHKILELQMQSIMEKKMKTKRNIAKHYKNNPSLITFLCKNCSVLACSGEDIHVIEKMHHVNMTPEFKELYIVRENKALQKKCADYQINGEIICKCGQAWGTMMVHKGLDLPCLKIRNFVVVFKNNSTKKQYKKWVELPITFPNLDYSECCLFSDED

SEQ ID NO: 23251 - protein, 68 aa, Homo sapiens; identical to SEQ ID NO: 6289

SEQ ID NO: 23252 - protein, 40 aa, Homo sapiens
MSEDLLNFDDPLNIEAAEHHLRDKEDFRNKVDDYIKRYAR

SEQ ID NO: 23253 - protein, 522 aa, Homo sapiens [sequence omitted]

SEQ ID NO: 23254 - protein, 127 aa, Homo sapiens
MGSLLTASSHTWLYSASLQAVDILKTERLGHGYHTLEDQALYNRLRQENMHFEICPWSSYLTGAWKPDTEHAVIRLKNDQANYSLNTDDPLIFKSTLDTDYQMTKRDMGFTEEEFKRLVSGCEPYWP

SEQ ID NO: 23255 - protein, 261 aa, Homo sapiens
MCQSEARQGPELRAAKWLHFPQLALRRRLGQLSCMSRPALKLRSWPLTVLYYLLPFGALRPLSRVGWRPVSRVALYKSVPTRLLSRAWGRLNQVELPHWLRRPVYSLYIWTFGVNMKEAAVEDLHHYRNLSEFFRRKLKPQARPVCGLHSVISPSDGRILNFGQVKNCEVEQVKGVTYSLESFLGPRMCTEDLPFPPAASCDSFKNQLVTREGNELYHCVIYLAPGDYHCFHSPTDWTVSHRRHFPGPAHKQPKAQQGLLQ

SEQ ID NO: 23256 - protein, 349 aa, Homo sapiens
MGHRTEGLEKFARDVPEDRCFSIVFKDQRNTLDLIAPSPADAQHWVLGLHKIIHHSGSMDQRQKLQHWIHSCLRKADKNKDNKMSFKELQNFLKELNIQVDDSYARKIFRECDHSQTDSLEDEEIEAFYKMLTQRVEIDRTFAEAAGSGETLSVDQLVTFLQHQQREEAAGPALALSLIERYEPSETAKAQRQMTKDGFLMYLLSADGSAFSLAHRRVYQDMGQPLSHYLVSSSHNTYLLEDQLAGPSSTEAYIRALCKGCRCLELDCWDGPNQEPIIYHGYTFTSKILFCDVLRAIRDYAFKVGVPLAGEEWDARGGPPLLMCPWASRRPPTLSSYPWRTTAHWSSSA

SEQ ID NO: 23257 - protein, 230 aa, Homo sapiens
MTCHKRYKIQKKVREHHRKLRKEAKKRGHKKPRKDPGVPNSAPFKEALLREAELRKQRLEELKQQQKLDRQKELEKKRKLETNPDIKPSNVEPMEKEFGLCKTENKAKSGKQNSKKLYCQELKKVIEASDVVLEVLDARDPLGCRCPQVEEAIVQSGQKKLVLILNKSDLVPKENLESWLNYLKKELPTVVFRASTKPKDKGKITKVSFISGKKCDSFRFWLKYDECTKS

SEQ ID NO: 23258 - protein, 92 aa, Homo sapiens
MKVKADRDESSPYAAMLAAQDVAQRCKELGITALHIKLRATGGNRTKTPGPGAQSALRALARSGMKIGRIEDVTPIPSDSTRRKGGRRGRRL

SEQ ID NO: 23259 - protein, 75 aa, Homo sapiens [sequence omitted]

SEQ ID NO: 23260 - protein, 35 aa, Homo sapiens
MPSPGVMTGGSAWKTTAAKVLWSIMSDSQEVTGWN

SEQ ID NO: 23261 - protein, 23 aa, Homo sapiens
MACRVSGKLPLPGVCHLQPTFQA

SEQ ID NO: 23262 - protein, 438 aa, Homo sapiens
MRVLRLLRLPPPLLPLPRGLRLGKLRASAGLASAARAPAACRWTPRRPSAPPSGPEPRPGLRLGLASSPGTRPATAAAASPDAPPACAATMERPEAGGINSNECENVSRKKKMSEEFEANTMDSLVDMPFATVDIQDDCGITDEPQINLKRSQENEWVKSDQVKKRKKKRKDYQPNYFLSIPITNKEIIKGIKILQNAIIQQDERLAKAMVSDGSFHITLLVMQLLNEDEVNIGIDALLELKPFIEELLQGKHLTLPFQGIGTFGNQVGFVKLAEGDHVNSLLEIAETANRTFQEKGILVGESRSFKPHLTFMKLSKSPWLRKNGVKKIDPDLYEKFISHRFGEEILYRIDLCSMLKKKQSNGYYHCESSIVIGEKNGGEPDDAELVRLSKRLVENAVLKAVQQYLEETQNKNKPGEGSSVKTEAADQNGNDNENNRK

SEQ ID NO: 23263 - protein, 1030 aa, Homo sapiens
MKQVPNPLPKVLSRRGVGAGLEAAERESFERTQTVSINKAINTQEVAVKEKHARTCILGTHHEKGAQTFWSVVNRLPLSSNAVLCWKFCHVFHKLLRDGHPNVLKDSLRYRNELSDMSRMWGHLSEGYGQLCSIYLKLLRTKMEYHTKNPRFPGNLQMSDRQLDEAGESDVNNFFQLTVEMFDYLECELNLFQTVFNSLDMSRSVSVTAAGQCRLAPLIQVILDCSHLYDYTVKLLFKLHSCLPADTLQGHRDRFMEQFTKLKDLFYRSSNLQYFKRLIQIPQLPENPPNFLRASALSEHISPVVVIPAEASSPDSEPVLEKDDLMDMDASQQNLFDNKFDDIFGSSFSSDPFNFNSQNGVNKDEKDHLIERLYREISGLKAQLENMKTESQRVVLQLKGHVSELEADLAEQQHLRQQAADDCEFLRAELDELRRQREDTEKAQRSLSEIERKAQANEQRYSKLKEKYSELVQNHADLLRKNAEVTKQVSMARQAQVDLEREKKELEDSLERISDQGQRKTQEQLEVLESLKQELATSQRELQVLQGSLETSAQSEANWAAEFAELEKERDSLVSGAAHREEELSALRKELQDTQLKLASTEESMCQLAKDQRKMLLVGSRKAAEQVIQDALNQLEEPPLISCAGSADHLLSTVTSISSCIEQLEKSWSQYLACPEDISGLLHSITLLAHLTSDAIAHGATTCLRAPPEPADSLTEACKQYGRETLAYLASLEEEGSLENADSTAMRNCLSKIKAIGEELLPRGLDIKQEELGDLVDKEMAATSAAIETATARIEEMLSKSRAGDTGVKLEVNERILGCCTSLMQAIQVLIVASKDLQREIVESGRGTASPKEFYAKNSRWTEGLISASKAVGWGATVMVDAADLVVQGRGKFEELMVCSHEIAASTAQLVAASKVKADKDSPNLAQLQQASRGVNQATAGVVASTISGKSQIEETDNMDFSSMTLTQIKRQEMDSQVRVLELENELQKERQKLGELRKKHYELAGVAEGWEEGTEASPPTLQEVVTEKE

SEQ ID NO: 23264 - protein, 288 aa, Homo sapiens [sequence omitted]

SEQ ID NO: 23265 - protein, 112 aa, Homo sapiens
MPLNFTGGQLHSRMFQNFPTELLLSLAVEPLTANFHKWSLSVKNFTMNEKLKKFFNVLTTNTDGKIEFISTMEVFLGIFLNGVVKKKSKRIKGARMKKEMKKMTSVSSNIAD

SEQ ID NO: 23266 - protein, 69 aa, Homo sapiens
MNDNVLHSAFEVGARKVVSCLSTCIFPDKTTYPIDETMIHNGPPHNSNFGYSYAKRMIDVQNRSSRPSC

SEQ ID NO: 23267 - protein, 628 aa, Homo sapiens
MLENYGNVASLGFPVPKPELISQLEQGKELWVLNLLGAEEPDILKSCQKDSEVGTKKELSILNQKFSEEVKTPEFVSRRLLRDNAQAAEFREAWGREGKLKERVGNSAGQSLNKPNIHKRVLTEATVGRERSLGERTQECSAFDRNLNLDQNVVRLQRNKTGERVFKCDICSKTFKYNSDLSRHQRSHTGEKPYECGRCGRAFTHSSNLVLHHHIHTGNKPFKCDECGKTFGLNSHLRLHRRIHTGEKPFGCGECGKAFSRSSTLIQHRIIHTGEKPYKCNECGRGFSQSPQLTQHQRIHTGEKPHECSHCGKAFSRSSSLIQHERIHTGEKPHKCNQCGKAFSQSSSLFLHHRVHTGEKPYVCNECGRAFGFNSHLTEHVRIHTGEKPYVCNECGKAFRRSSTLVQHRRVHTGEKPYQCVECGKAFSQSSQLTLHQRVHTGEKPYDCGDCGKAFSRRSTLIQHQKVHSGETRKCRKHGPAFVHGSSLTADGQIPTGEKHGRAFNHGANLILRWTVHTGEKSFGCNEYGKAFSPTSRPTEDQIMHAGEKPYKCQECGNAFSGKSTLIQHQVTHTGQKPCHCSVYGKAFSQSSQLTPPQQTRVGEKPALNDGSKRYFIHIKKIFQERHF

SEQ ID NO: 23268 - protein, 18 aa, Homo sapiens
MKRCLVIWCTLIPVTFGL

SEQ ID NO: 23269 - protein, 242 aa, Homo sapiens
MKAHGVKNLVFSSSATVYGNPQYLPLDEAHPTGGCTNPYGKSKFFIEEMIRDLCQADKTWNAVLLRYFNPTGAHASGCIGEDPQGIPNNLMPYVSQVAIGRREALNVFGNDYDTEDGTGVRDYIHVVDLAKGHIAALRKLKEQCGCRVGREGRSEGGEGPDPGRAAQRRGQSSPLHKPCSPWARSTTWARAQAIQCCRWSRLWRRPLGRRSRTRWWHGGKVMWQPVTPTPAWPKRSWGGQQP

SEQ ID NO: 23270 - protein, 135 aa, Homo sapiens
MQRVAGMRALPANAILNQFQPAAGGYFVPAVPQAQGRPPYYTPNQLAQMRPNPRWQQGGRPQGFQGMPSAIRQSGPRPTLRHLAPTGSECPDRLAMDFGGAGAAQQGLTDSCQSGGGIGCTQKGERWDLTGLCPD

SEQ ID NO: 23271 - protein, 389 aa, Homo sapiens [sequence omitted]

SEQ ID NO: 23272 - protein, 71 aa, Homo sapiens
MPTSARCDDLEALKKKGCPPDDIENPRGSKDIKKNKNVTNRSKGTAEKLKPEDITQIQPQQLDLAHLWKRL

SEQ ID NO: 23273 - protein, 332 aa, Homo sapiens
MKDSFHHNVAALRASVETGFAKKTFISYSVTFKDNFRQGLVVGIDLKNQMVLLQGGEALPFSHLILATGSTGPFPGKFNEVSSQQAAIQAYEDMVRQVQRSRFIVVVGGGSAGVEMAAEIKTEYPEKEVTLIHSQVALADKELLPSVRQEVKEILLRKGVQLLLSERVSNLEELPLNEYREYIKVQTDKGTEVATNLVILCTGIKINSSAYRKAFESRLASSGALRVNEHLQVEGHSNVYAIGDCADVRTPKMAYLAGLHANIAVANIVNSVKQRPLQAYKPGALTFLLSMGRNDGVGQISGFYVGRLMVRLTKSRDLFVSTSWKTMRQSPP

SEQ ID NO: 23274 - protein, 45 aa, Homo sapiens
MATSAHSWPQERARLRMIYPLFTDEESEAQRTVMKCDQTLRSPKR

SEQ ID NO: 23275 - protein, 1167 aa, Homo sapiens [sequence omitted]

SEQ ID NO: 23276 - protein, 435 aa, Homo sapiens
MKRAVDCPENIKKEICINKMLNHENVVKFYGHRREGNIQYLFLEYCSGGELFDRIEPDIGMPEPDAQRFFHQLMAGVVYLHGIGITHRDIKPENLLLDERDNLKISDFGLATVFRYNNRERLLNKMCGTLPYVAPELLKRREFHAEPVDVWSCGIVLTAMLAGELPWDQPSDSCQEYSDWKEKKTYLNPWKKIDSAPLALLHKILVENPSARITIPDIKKDRWYNKPLKKGAKRPRVTSGGVSESPSGFSKHIQSNLDFSPVNSASSEENVKYSSSQPEPRTGLSLWDTSPSYIDKLVQGISFSQPTCPDHMLLNSQLLGTPGSSQNPWQRLVKRMTRFFTKLDADKSYQCLKETCEKLGYQWKKSCMNQVTISTTDRRNNKLIFKVNLLEMDDKILVDFRLSKGDGLEFKRHFLKIKGKLIDIVSSQKIWLPAT

SEQ ID NO: 23277 - protein, 200 aa, Homo sapiens
MKRAVDCPENIKKEICINKMLNHENVVKFYGHRREGNIQYLFLEYCSGGELFDRIEPDIGMPEPDAQRFFHQLMAGVVYLHGIGITHRDIKPENLLLDERDNLKISDFGLATVFRYNNRERLLNKMCGTLPYVAPELLKRREFHAEPVDVWSCGIVLTAMLAGELPWDQPSDSCQEYSDWKEKKTYLNPWKKIDSAPLGN

SEQ ID NO: 23278 - protein, 346 aa, Homo sapiens
MGAISPTATCLTSSGYQPRPSSSSLCPISSTALAVCVSVQPKTGLIDYNQLALTARLFRPRLIIAGTSAYARLIDYARMREVCDEVKAHLLADMAHISGLVAAKVIPSPFKHADIVTTTTHKTLRGARSGLIFYRKGVKAVDPKTGREIPYTFEDRINFAVFPSLQGGPHNHAIAAVAVALKQACTPMFREYSLQVLKNARAMADALLERGYSLVSGGTDNHLVLVDLRPKGLDGARAERVLELVSITANKNTCPGDRSAITPGGLRLGAPALTSRQFREDDFRRVVDFIDEGVNIGLEVKSKTAKLQDFKSFLLKDSETSQRLANLRQRVEQFARAFPMPGFDEH

SEQ ID NO: 23279 - protein, 197 aa, Homo sapiens [sequence omitted]

SEQ ID NO: 23280 - protein, 755 aa, Homo sapiens
MYMGEEHLFSVEQITAMLLTKLKETAENSLKKPVTDCVISVPSFFTDAERRSVLDAAQIVGLNCLRLMNDMTAVALNYGIYKQDLPSLDEKPRIVVFVDMGHSAFQVSACAFNKGKLKVLGTAFDPFLGGKNFDEKLVEHFCAEFKTKYKLDAKSKIRALLRLYQECEKLKKLMSSNSTDLPLNIECFMNDKDVSGKMNRSQFEELCAELLQKIEVPLYSLLEQTHLKVEDVSAVEIVGGATRIPAVKERIAKFFGKDISTTLNADEAVARGCALQCAILSPAFKVREFSVTDAVPFPISLIWNHDSEDTEGVHEVFSRNHAAPFSKVLTFLRRGPFELEAFYSDPQGVPYPEAKIGRFVVQNVSAQKDGEKSRVKVKVRVNTHGIFTISTASMVEKVPTEENEMSSEADMECLNQRPPENPDTDKNVQQDNSEAGTQPQVQTDAQQTSQSPPSPELTSEENKIPDADKANEKKVDQPPEAKKPKIKVVNVELPIEANLVWQLGKDLLNMYIETEGKMIMQDKLEKERNDAKNAVEEYVYEFRDKLCGPYEKFICEQDHQNFLRLLTETEDWLYEEGEDQAKQAYVDKLEELMKIGTPVKVRFQEAEERPKMFEELGQRLQHYAKIAADFRNKDEKYNHIDESEMKKVEKSVNEVMEWMNNVMNAQAKKSLDQDPVVRAQEIKTKIKELNNTCEPVVTQPKPKIESPKLERTPNGPNIDKKEEDLEDKNNFGAEPPHQNGECYPNEKNSVNMDLD

SEQ ID NO: 23281 - protein, 161 aa, Homo sapiens
MKDEEYEQMVKELQEIRLEPQEVPRGSEPWKQQLTEDGDSFLHLAIIHEEKALTMEVIRQVKGDLAFLNFQNNLQQTPLHLAVITNQPEIAEALLGAGCDPELRDFRGNTPLHLACEQGCLASVGVLTQSCTTPHLHSILKATNYNGMSASLPCPTPSEGR

SEQ ID NO: 23282 - protein, 106 aa, Homo sapiens
MACARPLISVYSEKGESSGKNVTLPAVFKAPIRPDIVNFVHTNLRKNNRQPYAVSELAGHQTSAESWGTGRAVARIPRVRGGGTHRSGQGAFGNVSFVSLPKTGHL

SEQ ID NO: 23283 - protein, 236 aa, Homo sapiens
MQKSSLEFHKANECQERPVECKFCKLDMQLSKLELHESYCGSRTELCQGCGQFIMHRMLAQHRDVCRSEQAQLGKGERISAPEREIYCHYCNQMIPENKYFHHMGKCCPDSEFKKHFPVGNPEILPSSLPSQAAENQTSTMEKDVRPKTRSINRFPLHSESSSKKAPRSKNKTLDPLLMSEPKPRTSSPRGDKAAYDILRRCSQCGILLPLPILNQHQVLSLCSLLTFLGTIRTVS

SEQ ID NO: 23284 - protein, 1792 aa, Homo sapiens
MSLQESTRFSQLVEELLKIICAFQLDTGLEYANSYNFAKKENNSPEHLKDEVSIIQSMGYRNRAKRLLQSEPENPSLETSLSVQLSNLGTVRTLRTKQRIQPQKTSVYIELGSDSSEDTVNKATYCSVGDQELLQITPQGTRDEISLDSAKKAACEFSETDVTNTEHHQPSNNDLNTTEKRAAERHPEKYQGSSVSNLHVEPCGTNTHASSLQHENSSLLLTKDRMNVEKAEFCNKSKQPGLARSQHNRWAGSKETCNDRRTPSTEKKVDLNADPLCERKEWNKQKLPCSENPRDTEDVPWITLNSSIQKVNEWFSRSDELLGSDDSHDGESESNAKVADVLDVLNEVDEYSGSSEKIDLLASDPHEALICKSERVHSKSVESNIEDKIFGKTYRKKASLPNLSHVTENLIIGAFVTEPQIIQERPLTNKLKRKRRPTSGLHPEDFIKKADLAVQKTPEMINQGTNQTEQNGQVMNITNSGHENKTKGDSIQNEKNPNPIESLEKESAFKTKAEPISSSISNMELELNIHNSKAPKKNRLRRKSSTRHIHALELVVSRNLSPPNCTELQIDSCSSSEEIKKKKYNQMPVRHSRNLQLMEGKEPATGAKKSNKPNEQTSKRHDSDTFPELKLTNAPGSFTKCSNTSELKEFVNPSLPREEKEEKLETVKVSNNAEDPKDLMLSGERVLQTERSVESSSISLVPGTDYGTQESISLLEVSTLGKAKTEPNKCVSQCAAFENPKGLIHGCSKDNRNDTEGFKYPLGHEVNHSRETSIEMEESELDAQYLQNTFKVSKRQSFAPFSNPGNAEEECATFSAHSGSLKKQSPKVTFECEQKEENQGKNESNIKPVQTVNITAGFPVVGQKDKPVDNAKCSIKGGSRFCLSSQFRGNETGLITPNKHGLLQNPYRIPPLFPIKSFVKTKCKKNLLEENFEEHSMSPEREMGNENIPSTVSTISRNNIRENVFKEASSSNINEVGSSTNEVGSSINEIGSSDENIQAELGRNRGPKLNAMLRLGVLQPEVYKQSLPGSNCKHPEIKKQEYEEVVQTVNTDFSPYLISDNLEQPMGSSHASQVCSETPDDLLDDGEIKEDTSFAENDIKESSAVFSKSVQKGELSRSPSPFTHTHLAQGYRRGAKKLESSEENLSSEDEELPCFQHLLFGKVNNIPSQSTRHSTVATECLSKNTEENLLSLKNSLNDCSNQVILAKASQEHHLSEETKCSASLFSSQCSELEDLTANTNTQDPFLIGSSKQMRHQSESQGVGLSDKELVSDDEERGTGLEENNQEEQSMDSNLGEAASGCESETSVSEDCSGLSSQSDILTTQQRDTMQHNLIKLQQEMAELEAVLEQHGSQPSNSYPSIISDSSALEDLRNPEQSTSEKAVLTSQKSSEYPISQNPEGLSADKFEVSADSSTSKNKEPGVERSSPSKCPSLDDRWYMHSCSGSLQNRNYPSQEELIKVVDVEEQQLEESGPHDLTETSYLPRQDLEGTPYLESGISLFSDDPESDPSEDRAPESARVGNIPSSTSALKVPQLKVAESAQSPAAAHTTDTAGYNAMEESVSREKPELTASTERVNKRMSMVVSGLTPEEFMLVYKFARKHHITLTNLITEETTHVVMKTDAEFVCERTLKYFLGIAGGKWVVSYFWVTQSIKERKMLNEHDFEVRGDVVNGRNHQGPKRARESQDRKIFRGLEICCYGPFTNMPTDQLEWMVQLCGASVVKELSSFTLGTGVHPIVVVQPDAWTEDNGFHAIGQMCEAPVVTREWVLDSVALYQCQELDTYLIPQIPHSHY

SEQ ID NO: 23285 - protein, 581 aa, Homo sapiens
MGQNVKKLVEQLLDAKIEAEEFTRKLYVELKSSPQPHLVPFLKKSVVALRQLLPNSQSFIQQCVQQTSSDMVIATCTTTVTTSPVVTTTVSSSQSEKSIIVSGATAPRTVSVQTLNPLAGPVGAKAGVVTLHSVGPTAATGGTTAGTGLLQTSKPLVTSVANTVTTVSLQPEKPVVSGTAVTLSLPAVTFGETSGAAICLPSVKPVVSSAGTTSDKPVIGTPVQIKLAQPGPVLSQPAGIPQAVQVKQLVVQQPSGGNEKQVTTISHSSTLTIQKCGQKTMPVNTIIPTSQFPPASILKQITLPGNKILSLQASPTQKNRIKENVTSCFRDEDDINDVTSMAGVNLNEENACILATNSELVGTLIQSCKDEPFLFIGALQKRILDIGKKHDITELNSDAVNLISQATQERLRGLLEKLTAIAQHRMTTYKASENYILCSDTRSQLKFLEKLDQLEKQRKDLEEREMLLKAAKSRSNKEDPEQLRLKQKAKELQQLELAQIQHRDANLTALAAIGPRKKRPLESGIEGLKDNLLASGTSSLTATKQLHRPRITRICLRDLIFCMEQEREMKYSRALYLALLK

SEQ ID NO: 23286 - protein, 26 aa, Homo sapiens
MKRRAVGIWHCGSCMKTVAGGAWTYK

SEQ ID NO: 23287 - protein, 289 aa, Homo sapiens [sequence omitted]

SEQ ID NO: 23288 - protein, 486 aa, Homo sapiens [sequence omitted]

SEQ ID NO: 23289 - protein, 67 aa, Homo sapiens
MRHWEGLGRGSVPLLLRATSWVIPGPGAGLGLTRGLPRGRLGACVTSPPAGCGDYVGPLWPVRSASL

SEQ ID NO: 23290 - protein, 864 aa, Homo sapiens
MQSPCGCGLSSRPALEAAPHLCIEHRMSLQVLNDKNVSNEKNTENCDFLFSPPEVTGRSSVLRVSQKENVPPKNLAKAMKVTFQTPLRDPQTHRILSPSMASKLEAPFTQDDTLGLENSHPVWTQKENQQLIKEVDAKTTHGILQKPVEADTDLLGDASPAFGSGSSSESGPGALADLDCSSSSQSPGSSENQMVSPGKVSGSPEQAVEENLSSYSLDRRVTPASETLEDPCRTESQHKAETPHGAEEECKAETPHGAEEECRHGGVCAPAAVATSPPGAIPKEACGGAPLQGLPGEALGCPAGVGTPVPADGTQTLTCAHTSAPESTAPTNHLVAGRAMTLSPQEEVAAGQMASSSRSGPVKLEFDVSDGATSKRAPPPRRLGERSGLKPPLRKAAVRQQKAPQEVEEDDGRSGAGEDPPMPASRGSYHLDWDKMDDPNFIPFGGDTKSGCSEAQPPESPETRLGQPAAEQLHAGPATEEPGPCLSQQLHSASAEDTPVVQLAAETPTAESKERALNSASTSLPTSCPGSEPVPTHQQGQPALELKEESFRDPAEVLGTGAEVDYLEQFGTSSFKESALRKQSLYLKFDPLLRDSPGRPVPVATETSSMHGANETPSGRPREAKLVEFDFLGALDIPVPGPPPGVPAPGGPPLSTGPIVDLLQYSQKDLDAVVKATQEENRELRSRCEELHGKNLELGKIMDRFEEVVYQAMEEVQKQKELSKAEIQKVLKEKDQLTTDLNSMEKSFSDLFKRFEKQKEVIEGYRKNEESLKKCVEDYLARITQEGQRYQALKAHAEEKLQLANEEIAQVRSKAQAEALALQASLRKEQMRIQSLEKTVEQKTKENEELTRICDDLISKMEKI

SEQ ID NO: 23291 - protein, 713 aa, Homo sapiens
MESPNHPLLNSPSNLLPGGALGAGAFSSLQSPDLPHPGGGGGGGGGGPPGGGGGGGSASPPPLPGFGTPWSVQTASPPPQPQQPPPTQPQQQPPPPQQPPQPQPQPPGSSATTPGGGSGGSLSAMPPPSPDSENGFYPGLPSSMNPAFFPSFSPVSPHGCTGLSVPTSGGGGGGFGGPFSATAVPPPPPPAMNIPQQQPPPPAAPQQPQSRRSPVSPQLQQQHQAAAAAFLQQRNSYNHHQPLLKQSPWSNHQSSGWGTGSMSWGAMHGRDHRRTGNMGIPGTMNQISPLKKPFSGNVIAPPKFTRSTPSLTPKSWIEDNVFRTDNNSNTLLPLQVRSSLQLPAWGSDSLQDSWCTAAGTSRIDQDRSRMYDSLNMHSLENSLIDIMRAEHDPLKGRLSYPHPGTDNLLMLNGRSSLFPIDDGLLDDGHSDQVGVLNSPTCYSAHQNGERIERFSRKVFVGGLPPDIDEDEITASFRRFGPLVVDWPHKAESKSYFPPKGYAFLLFQEESSVQALIDACIEEDGKLYLCVSSPTIKDKPVQIRPWNLSDSDFVMDGSQPLDPRKTIFVGGVPRPLRAVELAMIMDRLYGGVCYAGIDTDPELKYPKGAGRVAFSNQQSYIAAISARFVQLQHGDIDKRVEVKPYVLDDQMCDECQGARCGGKFAPFFCANVTCLQYYCEFCWANIHSRAGREFHKPLVKEGADRPRQIHFRWN

SEQ ID NO: 23292 - protein, 344 aa, Homo sapiens
MPSNQNVSPSQRDEVIQWLAKLKYQFNLYPETFALASSLLDRFLATVKAHPKYLSCIAISCFFLAAKTVEEDERIPVLKVLARDSFCGCSSSEILRMERIILDKLNWDLHTATPLDFLHIFHAIAVSTRPQLLFSLPKLSPSQHLAVLTKQLLHCMACNQLLQFRGSMLALAMVSLEMEKLIPDWLSLTIELLQKAQMDSSQLIHCRELVAHHLSTLQSSLPLNSVYVYRPLKHTLVTCDKGVFRLHPSSVPGPDFSKDNSKPEVPVRGTAAFYHHLPAASGCKQTSTKRKVEEMEVDDFYDGIKRLYNEDNVSENVGSVCGTDLSRQEGHASPCPPLQPVSVM

SEQ ID NO: 23293 - protein, 451 aa, Homo sapiens
MDERNRQVTFTKRKFGLMKKAYELSVLCDCEIALIIFNSTNKLFQYASTDMDKVLLKYTEYNEPHESRTNSDIVETLRKKGLNGCDSPDPDADDSVGHSPESEDKYRKINEDIDLMISRQRLCAVPPPNFEMPVSIPVSSHNSLVYSNPVSSLGNPNLLPLAHPSLQRNSMSPGVTHRPPSAGGLMGGDLTSGAGTSAGNGYGNPRNSPGLLVSPGNLNKNMQAKSPPPMNLGMNNRKPDLRVLIPPGSKNTMPSVNQRINNSQSAQSLATPVVSVATPTLPGQGMGGYPSAISTTYGTEYSLSSADLSSLSGFNTASALHLGSVTGWQQQHLHNMPPSALSQLGACTSTHLSQSSNLSLPSTQSLNIKSEPVSPPRDRTTTPSRYPQHTRHEAGRSPVDSLSSCSSSYDGSDREDHRNEFHSPIGLTRPSPDERESPSVKRMRLSEGWAT

SEQ ID NO: 23294 - protein, 383 aa, Homo sapiens
MIGGPILPSERSGHALIEQWNPVGLVGIITAFNFPVAVYGWNNAIAMICGNVCLWKGAPTTSLISVAVTKIIAKVLEDNKLPGAICSLTCGGADIGTAMAKDERVNLLSFTGSTQVGKQVGLMVQERFGRSLLELGGNNAIIAFEDADLSLVVPSALFAAVGTAGQRCTTARRLFIHESIHDEVVNRLKKAYAQIRVGNPWDPNVLYGPLHTKQAVSMFLGAVEEAKKEGGTVVYGGKVMDRPGNYVEPTIVTGLGHDASIAHTETFAPILYVFKFKNEEEVFAWNNEVKQGLSSSIFTKDLGRIFRWLGPKGSDCGIVNVNIPTSGAEIGGAFGGEKHTGGGRESGSDAWKQYMRRSTWKMYTKRVYWDDFSFILITVAASS

SEQ ID NO: 23295 - protein, 58 aa, Homo sapiens
MQNPRQYKIPDWFLNRQKDVKDGKYSQVLANGLDNKLREDLERLKKIRAHRGLRHFWG

SEQ ID NO: 23296 - protein, 294 aa, Homo sapiens
MVTTAPPPLPRIPDPRALPPTLFLPHFLGGDGPCLTPQPRAPAALPNRSLAVAGGTPRAAPKKRRKKKVRASPAGQLPSRFHQYQQHRPSLEGGRSPATGPSGAQEVPGPAAALAPSPAAAAGTEGASPDLAPLRPAAPGQTPLRKEVLKSKMGKSEKIALPHGQLVHGIHLYEQPKINRQKSKYNLPLTKITSAKRNENNFWQDSVSSDRIQKQEKKPFKNTENIKNSHLKKSAFLTEVSQKENYAGAKFSDPPSPSVLPKPPSHWMGSTVENSNQNRELMAVHLKTLLKVQT

SEQ ID NO: 23297 - protein, 116 aa, Homo sapiens
MKSNKEGTRCIQVEITPTSSRISRNAVTSMSIRGHRWKRHEQPDNNNDATELGILVIPEISVTNVAGERTGNGEKGRTLGEIDAQHIQGVQETATDPRTESKGLPEIRRQKSEIQN

SEQ ID NO: 23298 - protein, 15 aa, Homo sapiens
MRAGLLPSFWMHIPL

SEQ ID NO: 23299 - protein, 418 aa, Homo sapiens [sequence omitted]

SEQ ID NO: 23300 - protein, 241 aa, Homo sapiens
MNTNDAKEYLARREIPQLFESLLNGLMCSKPEDPVEYLESCLQKVKELGGCDKVKWDTFVSQEKKTLPPLNGGQSRRSFLRNESDTDLSETAELIEEYEVFDPTRPRPKIILVIGGPGSGKGTQSLKIAERYGFQYISVGELLRKKIHSTSSNRKWSLIAKIITTGELAPQETTITEIKQKLMQIPDEEGIVIDGFPRDVAQALSFEDQYSLRPQTKMPVQSDPLPYAAPCGVCPVRQDSP

SEQ ID NO: 23301 - protein, 93 aa, Homo sapiens
MQIPDEEGIVIDGFPRDVAQALSFEDQICTPDLVVFLACANQRLKERLLKRAEQQGRPDDNVKATQRRLMNFKQNAAPLVKYFQEKGLIMTVS

SEQ ID NO: 23302 - protein, 259 aa, Homo sapiens
MATLTSGGEKPNKDLESCSDDDNQGSKSPKILTDEMLLQACEGRTAHKAARLGITMKAKLARLEAQEQAFLARLKGQDPGAPQLQSESKPPKKKKKKRRQKEEEEATASERNDADEKHPEHAEQNIRKSKKKKRRHQEGKVSDEREGTTKGNEKEDAAGTSGLGELNSREQTNQSLRKGKKKKRWHHEEEKMGVLEEGGKGKEAAGSVRTEEVESRAYADPCSRRKKRQQQEEEDLNLEDRGEETFRWWNQGSREQSMQ

SEQ ID NO: 23303 - protein, 165 aa, Homo sapiens
MAVQEVKKVRAAPGRVAASETIPTCKLENLSAGWIFMFHSGETGPGKRCYKKNDTVTIRTRKFMTNRLLQRKQMVIDVLHPGKATVPKTEIREKLAKMYKTTPDVIFVFGFRTHFGGGKTTGFGMIYDSLDYAKKNEPKHRLARVGVFSFVDQLLKTYFFNSVVL

SEQ ID NO: 23304 - protein, 809 aa, Homo sapiens
MLEEEEQLEAAGLERERKMLEKARMSWDRESTEIRYRRLQHLLEKSNIYSKFLLTKMEQQQLEEQKKKEKLERKKESLKVKKGKNSIDASEEKPVMRKKRGREDESYNISEVMSKEEILSVAKKNKKENEDENSSSTNLCVEDLQKNKDSNSIIKDRLSETVRQNTKFFFDPVRKCNGQPVPFQQPKHFTGGVMRWYQVEGMEWLRMLWENGINGILADEMGLGKTVQCIATIALMIQRGVPGPFLVCGPLSTLPNWMAEFKRFTPDIPTMLYHGTQEERQKLVRNIYKRKGTLQIHPVVITSFEIAMRDRNALQHCYWKYLIVDEGHRIKNMKCRLIRELKRFNADNKLLLTGTPLQNNLSELWSLLNFLLPDVFDDLKSFESWFDITSLSETAEDIIAKEREQNVLHMLHQILTPFLLRRLKSDVALEVPPKREVVVYAPLSKKQEIFYTAIVNRTIANMFGSSEKETIELSPTGRPKRRTRKSINYSKIDDFPNELEKLISQIQPEVDRERAVVEVNIPVESEVNLKLQNIMMLLRKCCNHPYLIEYPIDPVTQEFKIDEELVTNSGKFLILDRMLPELKKRGHKVLLFSQMTSMLDILMDYCHLRDFNFSRLDGSMSYSEREKNMHSFNTDPEVFIFLVSTRAGGLGINLTAADTVIIYDSDWNPQSDLQAQDRCHRIGQTKPVVVYRLVTANTIDQKIVERAAAKRKLEKLIIHKNHFKGGQSGLNLSKNFLDPKELMELLKSRDYEREIKGSREKVISDKDLELLLDRSDLIDQMNASGPIKEKMGIFKILENSEDSSPECLF

SEQ ID NO: 23305 - protein, 216 aa, Homo sapiens [sequence omitted]

SEQ ID NO: 23306 - protein, 316 aa, Homo sapiens
MEKLAPKGPSPTPEDVSMKEENLCQAFSDALLCKIEDIDNEDWENPQLCSDYVKDIYQYLRQLEVLQSINPHFLDGRDINGRMRAILVDWLVQVHSKFRLLQETLYMCVGIMDRFLQVQPVSRKKLQLVGITALLLASKYEEMFSPNIEDFVYITDNAYTSSQIREMETLILKELKFELGRPLPLHFLRRASKAGEVDVEQHTLAKYLMELTLIDYDMVHYHPSKVAAAASCLSQKVLGQGKWNLKQQYYTGYTENEVLEVMQHMAKNVVKVNENLTKFIAIKNKYASSKLLKISMIPQLNSKAVKDLASPLIGRS

SEQ ID NO: 23307 - protein, 51 aa, Homo sapiens
MAGSGRLVLRPWIRELILGSETPSSPRAGQLLEVSPHSGPGDRGGGPGWWD

SEQ ID NO: 23308 - protein, 128 aa, Homo sapiens
MTSCTSWLQAPQAPGLCRDEQSSRISVPQLSGAPILLPDLEGTKLSNFQESSPLPHKHERKDKRSTPEEEGRSAPEKIIQSLKLCPGGHRPASLSSGCPAGCRLSFNLPPSMLLSVQKCCMPSSLKTC

SEQ ID NO: 23309 - protein, 713 aa, Homo sapiens
MTPTGIDTAKLYPILMSSGLPRETLGQIWALANRTTPGKLTKEELYTVLAMIAVTQRGVPAMSPDALNQFPAAPIPTLSGFSMTLPTPVSQPTVIPSGPAGSMPLSLGQPVMGINLVGPVGGAAAQASSGFIPTYPANQVVKPEEDDFQDFQDASKSGSLDDSFSDFQELPASSKTSNSQHGNSAPSLLMPLPGTKALPSMDKYAVFKGIAADKSSENTVPPGDPGDKYSAFRELEQTAENKPLGESFAEFRSAGTDDGFTDFKTADSVSPLEPPTKDKTFPPSFPSGTIQQKQQTQVKNPLNLADLDMFSSVNCSSEKPLSFSAVFSTSKSVSTPQSTGSAATMTALAATKTSSLADDFGEFSLFGEYSGLAPVGEQDDFADFMAFSNSSISSEQKPDDKYDALKEEASPVPLTSNVGSTVKGGQNSTAASTKYDVFRQLSLEGSGLGVEDLKDNTPSGKSDDDFADFHSSKFSSINSDKSLGEKAVAFRHTKEDSASVKSLDLPSIGGSSVGKEDSEDALSVQFDMKLADVGGDLKHVMSDSSLDLPTVSGQHPPAAGSGSPSATSILQKKETSFGSSENITMTSLSKVTTFVSEDALPETTFPALASFKDTIPQTSEQKEYENRDYKDFTKQDLPTAERSQEATCPSPASSGASQETPNECSDDFGEFQSEKPKISKFDFLVATSQSKMKSSEEMIKSELATFDLSVQGE

SEQ ID NO: 23310 - protein, 170 aa, Homo sapiens
MTLQLIKVQEGVGEGKVMFHSFVSKTEEELQAILEAKEKKLRLKAQRQAQQAQNVQRKQEQREAHRKKSLEGMKKARVGGSDEEASGIPSRTASLELDLFPEAKQKRLAKSPGRKRKRWEMDRGRGRLCDQKFPKTKDKSQGAQARRGPRGASRDGGRGRGRGRPGKRVA

SEQ ID NO: 23311 - protein, 474 aa, Homo sapiens
MSPECDGLGTADGVCSRIGQEQVSPGDRVRSHNSCESGKDPMIQEEENNFKCSECGKVFNKKHLLAGHEKIHSGVKPYECTECGKTFIKSTHLLQHHMIHTGERPYECMECGKAFNRKSYLTQHQRIHSGEKPYKCNECGKAFTHRSNFVLHNRRHTGEKSFVCTECGQVFRHRPGFLRHYVVHSGENPYECLECGKVFKHRSYLMWHQQTHTGEKPYECSECGKVFLESAALIHHYVIHTGEKPFECLECGKAFNHRSYLKRHQRIHTGEKPFVCSECGKAFTHCSTFILHKRAHTGEKPFECKECGKAFSNRKDLIRHFSIHTGEKPYECVECGKAFTRMSGLTRHKRIHSGEKPYECVECGKSFCWSTNLIRHAIIHTGEKPYKCSECGKAFSRSSSLTQHQRMHTGKNPISVTDVGRPFTSGQTSVTLRELLLGKDFLNVTTEANILPEETSSSASDQPYQRETPQVSSL

SEQ ID NO: 23312 - protein, 72 aa, Homo sapiens; identical to SEQ ID NO: 9197

SEQ ID NO: 23313 - protein, 367 aa, Homo sapiens
MRTPESQLFSIEDIQEVRMGHRTEGLEKFARDVPEDRCFSIVFKDQRNTLDLIAPSPADAQHWVLGLHKIIHHSGSMDQRQKLQHWIHSCLRKADKNKDNKMSFKELQNFLKELNIQVDDSYARKIFRECDHSQTDSLEDEEIEAFYKMLTQRVEIDRTFAEAAGSGETLSVDQLVTFLQHQQREEAAGPALALSLIERYEPSETAKAQRQMTKDGFLMYLLSADGSAFSLAHRRVYQDMGQPLSHYLVSSSHNTYLLEDQLAGPSSTEAYIRALCKGCRCLELDCWDGPNQEPIIYHGYTFTSKILFCDVLRAIRDYAFKVGVPLAGEEWDARGGPPLLMCPWASRRPPTLSSYPWRTTAHWSSSA

SEQ ID NO: 23314 - protein, 59 aa, Homo sapiens
MSKWHCGRSCAPIATEVAARAGREGEKSGVLMTSLVDHVRDLFCLRGTGKGWTAPLSLY

SEQ ID NO: 23315 - protein, 691 aa, Homo sapiens
MESPNHPLLNSPSNLLPGGALGAGAFSSLQSPDLPHPGGGGGGGGGGPPGGGGGGGSASPPPLPGFGTPWSVQTASPPPQPQQPPPTQPQQQPPPPQQPPQPQPQPPGSSATTPGGGSGGSLSAMPPPSPDSENGFYPGLPSSMNPAFFPSFSPVSPHGCTGLSVPTSGGGGGGFGGPFSATAVPPPPPPAMNIPQQQPPPPAAPQQPQSRRSPVSPQLQQQHQAAAAAFLQQRNSYNHHQPLLKQSPWSNHQSSGWGTGSMSWGAMHGRDHRRTGNMGIPGTMNQISPLKKPFSGNVIAPPKFTRSTPSLTPKSWIEDNVFRTDNNSNTLLPLQDRSRMYDSLNMHSLENSLIDIMRAEHDPLKGRLSYPHPGTDNLLMLNARSYGRRRGRSSLFPIDDGLLDDGHSDQVGVLNSPTCYSAHQNGERIERFSRKVFVGGLPPDIDEDEITASFRRFGPLVVDWPHKAESKSYFPPKGYAFLLFQEESSVQALIDACIEEDGKLYLCVSSPTIKDKPVQIRPWNLSDSDFVMDGSQPLDPRKTIFVGGVPRPLRAVELAMIMDRLYGGVCYAGIDTDPELKYPKGAGRVAFSNQQSYIAAISARFVQLQHGDIDKRVEVKPYVLDDQMCDECQGARCGGKFAPFFCANVTCLQYYCEFCWANIHSRAGREFHKPLVKEGADRPRQIHFRWN

SEQ ID NO: 23316 - protein, 502 aa, Homo sapiens
MGSPGRGAGLYFSSSQGLGLIPSPGLSMWRLPRALCVHAAKTSKLSGPWSRPAAFMSTLLINQPQYAWLKELGLREENEGVYNGSWGGRGEVITTYCPANNEPIARVRQASVADYEETVKKAREAWKIWADIPAPKRGEIVRQIGDALREKIQVLGSLVSLEMGKILVEGVGEVQEYVDICDYAVGLSRMIGGPILPSERSGHALIEQWNPVGLVGIITAFNFPVAVYGWNNAIAMICGNVCLWKGAPTTSLISVAVTKIIAKVLEDNKLPGAICSLTCGGADIGTAMAKDERVNLLSFTGSTQVGKQVGLMVQERFGRSLLELGGNNAIIAFEDADLSLVVPSALFAAVGTAGQRCTTARRLVMDRPGNYVEPTIVTGLGHDASIAHTETFAPILYVFKFKNEEEVFAWNNEVKQGLSSSIFTKDLGRIFRWLGPKGSDCGIVNVNIPTSGAEIGGAFGGEKHTGGGRESGSDAWKQYMRRSTCTINYSKDLPLAQGIKFQ

SEQ ID NO: 23317 - protein, 8 aa, Homo sapiens
MKTTDFCF

SEQ ID NO: 23318 - protein, 132 aa, Homo sapiens
MAELLPSSRAELEDPGGDGAIPAMYLDCISDLRQKEITDGIHSSSDINILYNDAVESCIQDPSAEGLSEEVPVVFEELPVVFEDVAVYFTREEWGMLDKRQKELYRDVMRMNYELLASLGKDAPSLLFTTLL

SEQ ID NO: 23319 - protein, 218 aa, Homo sapiens [sequence omitted]

SEQ ID NO: 23320 - protein, 328 aa, Homo sapiens
ITATMSSEAETQQPPAAPPAAPALSAADTKPGTTGSGAGSGGPGGLTSAAPAGGDKKVIATKVLGTVKWFNVRNGYGFINRNDTKEDVFVHQTAIKKNNPRKYLRSVGDGETVEFDVVEGEKGAEAANVTGPGGVPVQGSKYAADRNHYRRYPRRRGPPRNYQQNYQNSESGEKNEGSESAPEGQAQQRRPYRRRRFPPYYMRRPYGRRPQYSNPPVQGEVMEGADNQGAGEQGRPVRQNMYRGYRPRFRRGPPRQRQPREDGNEEDKENQGDETQGQQPPQRRYRRNFNYRRRRPENPKPQDGKETKAADPPAENSSAPEAEQGGAE

SEQ ID NO: 23321 - protein, 46 aa, Homo sapiens
LVRHLRGTMAMESTATAAVAAELVSADKIEDVPAPSTSADKVESNH

SEQ ID NO: 23322 - protein, 20 aa, Homo sapiens
LLSCNMLIRTTWHLPEQDFQ

SEQ ID NO: 23323 - protein, 140 aa, Homo sapiens
KDVIIKSDAPDTLLLEKHADYIASYGSKKDDYEYCMSEYLRMSGIYWGLTVMDLMGQLHRMNREEILAFIKSCQHECGGISASIGHDPHLLYTLSAVQILTLYDSINVIDVNKVVEYVKGLQKEDGSFAGDIWGPTKQLV

SEQ ID NO: 23324 - protein, 132 aa, Homo sapiens
ISVMSGRGKQGGKARAKAKSRSSRAGLQFPVGRVHRLLRKGNYAERVGAGAPVYMAAVLEYLTAEILELAGNAARDNKKTRIIPRHLQLAIRNDEELNKLLGKVTIAQGGVLPNIQAVLLPKKTESHKAKSK

SEQ ID NO: 23325 - protein, 103 aa, Homo sapiens
IILVGTQSDLREDVKVLIELDKCKEKPVPEEAAKLCAEEIKAASYIECSALTQKNLKEVFDAAIVAGIQYSDTQQQPKKSKSRTPDKMKNLSKSWWKKYCCFV

SEQ ID NO: 23326 - protein, 48 aa, Homo sapiens
LVTFCIRDLIGCLQKLLFGKVAKDSSSKCGPKETSLRQLVVPGRPQRC

SEQ ID NO: 23327 - protein, 10 aa, Homo sapiens
LETRPEALLN

SEQ ID NO: 23328 - protein, 14 aa, Homo sapiens
ISMSCCGAFTAFGL

SEQ ID NO: 23329 - protein, 16 aa, Homo sapiens
IAMGSPTACKSNLERL

SEQ ID NO: 23330 - protein, 336 aa, Homo sapiens
VTDCSMTAKMETTFYDDALNASFLPSESGPYGYSNPKILKQSMTLNLADPVGSLKPHLRAKNSDLLTSPDVGLLKLASPELERLIIQSSNGHITTTPTPTQFLCPKNVTDEQEGFAEGFVRALAELHSQNTLPSVTSAAQPVNGAGMVAPAVASVAGGSGSGGFSASLHSEPPVYANLSNFNPGALSSGGGAPSYGAAGLAFPAQPQQQQQPPHHLPQQMPVQHPRLQALKEEPQTVPEMPGETPPLSPIDMESQERIKAERKRMRNRIAASKCRKRKLERIARLEEKVKTLKAQNSELASTANMLREQVAQLKQKVMNHVNSGCQLMLTQQLQTF

SEQ ID NO: 23331 - protein, 74 aa, Homo sapiens
ISSKAMGIMNSFVNDIFERIAGEASRLAHYNKRSTITSREIQTAVRLLLPGKLAKHAVSEGTKAVTKYTSSNIF

SEQ ID NO: 23332 - protein, 12 aa, Homo sapiens
LGMKCNRTDFTT

SEQ ID NO: 23333 - protein, 392 aa, Homo sapiens
IMVMFKKIKSFEVVFNDPEKVYGSGEKVAGRVIVEVCEVTRVKAVRILACGVAKVLWMQGSQQCKQTSEYLRYEDTLLLEDQPTGENEMVIMRPGNKYEYKFGFELPQGPLGTSFKGKYGCVDYWVKAFLDRPSQPTQETKKNFEVVDLVDVNTPDLMAPVSAKKEKKVSCMFIPDGRVSVSARIDRKGFCEGDEISIHADFENTCSRIVVPKAAIVARHTYLANGQTKVLTQKLSSVRGNHIISGTCASWRGKSLRVQKIRPSILGCNILRVEYSLLIYVSVPGSKKVILDLPLVIGSRSGLSSRTSSMASRTSSEMSWVDLNIPDTPEAPPCYMDVIPEDHRLESPTTPLLDDMDGSQDSPIFMYAPEFKFMPPPTYTEVDPCILNNNVQ

SEQ ID NO: 23334 - protein, 107 aa, Homo sapiens
LILTAVMACPLEKALDVMVSTFHKYSGKEGDKFKLNKSELKELLTRELPSFLGKRTDEAAFQKLMSNLDSNRDNEVDFQEYCVFLSCIAMMCNEFFEGFPDKQPRKK

SEQ ID NO: 23335 - protein, 191 aa, Homo sapiens
LGAPTPPHRQPGAEGRGVGARSSQGAGGQRARPASPGRQNPALRGREGRRARRSLELSANLGAPMTAAATATVLKEGVLEKRSGGLLQLWKRKRCVLTERGLQLFEAKGTGGRPKELSFARIKAVECVESTGRHIYFTLVTEGGGEIDFRCPLEDPGWNAQITLGLVKFKNQQAIQTVRARQSLGTGTLVS

SEQ ID NO: 23336 - protein, 19 aa, Homo sapiens
LGWRKSILWCVKRLQRRSQ

SEQ ID NO: 23337 - protein, 2369 aa, Homo sapiens
LRQFKMTTTVATDYDNIEIQQQYSDVNNRWDVDDWDNENSSARLFERSRIKALADEREAVQKKTFTKWVNSHLARVSCRITDLYTDLRDGRMLIKLLEVLSGERLPKPTKGRMRIHCLENVDKALQFLKEQRVHLENMGSHDIVDGNHRLTLGLIWTIILRFQIQDISVETEDNKEKKSAKDALLLWCQMKTAGYPNVNIHNFTTSWRDGMAFNALIHKHRPDLIDFDKLKKSNAHYNLQNAFNLAEQHLGLTKLLDPEDISVDHPDEKSIITYVVTYYHYFSKMKALAVEGKRIGKVLDNAIETEKMIEKYESLASDLLEWIEQTIIILNNRKFANSLVGVQQQLQAFNTYRTVEKPPKFTEKGNLEVLLFTIQSKMRANNQKVYMPREGKLISDINKAWERLEKAEHERELALRNELIRQEKLEQLARRFDRKAAMRETWLSENQRLVSQDNFGFDLPAVEAATKKHEAIETDIAAYEERVQAVVAVARELEAENYHDIKRITARKDNVIRLWEYLLELLRARRQRLEMNLGLQKIFQEMLYIMDWMDEMKVLVLSQDYGKHLLGVEDLLQKHTLVEADIGIQAERVRGVNASAQKFATDGEGYKPCDPQVIRDRVAHMEFCYQELCQLAAERRARLEESRRLWKFFWEMAEEEGWIREKEKILSSDDYGKDLTSVMRLLSKHRAFEDEMSGRSGHFEQAIKEGEDMIAEEHFGSEKIRERIIYIREQWANLEQLSAIRKKRLEEASLLHQFQADADDIDAWMLDILKIVSSSDVGHDEYSTQSLVKKHKDVAEEIANYRPTLDTLHEQASALPQEHAESPDVRGRLSGIEERYKEVAELTRLRKQALQDTLALYKMFSEADACELWIDEKEQWLNNMQIPEKLEDLEVIQHRFESLEPEMNNQASRVAVVNQIARQLMHSGHPSEKEIKAQQDKLNTRWSQFRELVDRKKDALLSALSIQNYHLECNETKSWIREKTKVIESTQDLGNDLAGVMALQRKLTGMERDLVAIEAKLSDLQKEAEKLESEHPDQAQAILSRLAEISDVWEEMKTTLKNREASLGEASKLQQFLRDLDDFQSWLSRTQTAIASEDMPNTLTEAEKLLTQHENIKNEIDNYEEDYQKMRDMGEMVTQGQTDAQYMFLRQRLQALDTGWNELHKMWENRQNLLSQSHAYQQFLRDTKQAEAFLNNQEYVLAHTEMPTTLEGAEAAIKKQEDFMTTMDANEEKINAVVETGRRLVSDGNINSDRIQEKVDSIDDRHRKNRETASELLMRLKDNRDLQKFLQDCQELSLWINEKMLTAQDMSYDEARNLHSKWLKHQAFMAELASNKEWLDKIEKEGMQLISEKPETEAVVKEKLTGLHKMWEVLESTTQTKAQRLFDANKAELFTQSCADLDKWLHGLESQIQSDDYGKDLTSVNILLKKQQMLENQMEVRKKEIEELQSQAQALSQEGKSTDEVDSKRLTVQTKFMELLEPLNERKHNLLASKEIHQFNRDVEDEILWVGERMPLATSTDHGHNLQTVQLLIKKNQTLQKEIQGHQPRIDDIFERSQNIVTDSSSLSAEAIRQRLADLKQLWGLLIEETEKRHRRLEEAHRAQQYYFDAAEAEAWMSEQELYMMSEEKAKDEQSAVSMLKKHQILEQAVEDYAETVHQLSKTSRALVADSHPESERISMRQSKVDKLYAGLKDLAEERRGKLDERHRLFQLNREVDDLEQWIAEREVVAGSHELGQDYEHVTMLQERFREFARDTGNIGQERVDTVNHLADELINSGHSDAATIAEWKDGLNEAWADLLELIDTRTQILAASYELHKFYHDAKEIFGRIQDKHKKLPEELGRDQNTVETLQRMHTTFEHDIQALGTQVRQLQEDAARLQAAYAGDKADDIQKRENEVLEAWKSLLDACESRRVRLVDTGDKFRFFSMVRDLMLWMEDVIRQIEAQEKPRDVSSVELLMNNHQGIKAEIDARNDSFTTCIELGKSLLARKHYASEEIKEKLLQLTEKRKEMIDKWEDRWEWLRLILEVHQFSRDASVAEAWLLGQEPYLSSREIGQSVDEVEKLIKRHEAFEKSAATWDERFSALERLTTLELLEVRRQQEEEERKRRPPSPEPSTKVSEEAESQQQWDTSKGEQVSQNGLPAEQGSPRMAETVDTSEMVNGATEQRTSSKESSPIPSPTSDRKAKTALPAQSAATLPARTQETPSAQMEGFLNRKHEWEAHNKKASSRSWHNVYCVINNQEMGFYKDAKTAASGIPYHSEVPVSLKEAVCEVALDYKKKKHVFKLRLNDGNEYLFQAKDDEEMNTWIQAISSAISSDKHEVSASTQSTPASSRAQTLPTSVVTITSESSPGKREKDKEKDKEKRFSLFGKKK

SEQ ID NO: 23338 - protein, 70 aa, Homo sapiens
IAQCTSSHPIIRQIRQACAQPFEAFEECLRQNEAAVGNCAEHMRRFLQCAEQVQPPRSPATVEAQPLPAS

SEQ ID NO: 23339 - protein, 63 aa, Homo sapiens
MITTSRDPSSRLKMFAKELKLVFPGAQRMNRGRHEVGALVRACKANGVTDLLVVHEHRGTPGL

SEQ ID NO: 23340 - protein, 119 aa, Homo sapiens
VLMAEIGEDLDKSDVSSLIFLMKDYMGRGKISKEKSFLDLVVELEKLNLVAPDQLDLLEKCLKNIHRIDLKTKIQKYKQSVQGAGTSYRNVLQAAIQKSLKDPSNNFRVSLEKTYGIPA

SEQ ID NO: 23341 - protein, 57 aa, Homo sapiens
LSPMCSLKQMLCLIPAGESHRLELLGRERPSCTLLRDCHAPPGGLRTFDMLQSWPRQ

SEQ ID NO: 23342 - protein, 78 aa, Homo sapiens
IEEWSHALYLKLRKETFILEGKENREKRMIKRACEQLSSRYLEVLINLYRTHIDIIGSSSDTYLFKKGVMKLIGQKVS

SEQ ID NO: 23343 - protein, 54 aa, Homo sapiens
IMPAAPARPCNGERSSWGWCSSGLASMEYCGSSSGWGPAWASTSAFRSASASSV

SEQ ID NO: 23344 - protein, 23 aa, Homo sapiens
LAKSQRSAPAGVSLAWSPHPPGP

SEQ ID NO: 23345 - protein, 36 aa, Homo sapiens
TALPGALLAPFCPSSVSAAAGSCSGAEWLTSVLQMH

SEQ ID NO: 23346 - protein, 19 aa, Homo sapiens
KRLDSDSLPEQWLPSGRNW

SEQ ID NO: 23347 - protein, 36 aa, Homo sapiens
TRLRPLTLSTPKPLVDFCNKPILLHQVEALAAAWTT

SEQ ID NO: 23348 - protein, 115 aa, Homo sapiens
KPKRSTWRFNLDLTHPVEDGIFDSGNFEQFLREKVKVNGKTGNLGNVVHIERFKNKITVVSEKQFSKRYLKYLTKKYLKKNNLRDWLRVVASDKETYELRYFQISQDEDESESED

SEQ ID NO: 23349 - protein, 52 aa, Homo sapiens
LASGSLCRDNRCGSRFRGSSCGRFSPERDLRLPASLCCADPSLRGPHAKQRP

SEQ ID NO: 23350 - protein, 64 aa, Homo sapiens
LEPSANMPWFKGWKVTRKDGNASGTTLLEALDCILPPTRPTDKPLCLPLQDVYKIGGIGTVPVG

SEQ ID NO: 23351 - protein, 38 aa, Homo sapiens
LLTEEQIGPNRLPSFNYPSDHLSLVCDFSFTEESDGLS

SEQ ID NO: 23352 - protein, 91 aa, Homo sapiens
IYLPVRSTNSSVRKMAGNSILLAAVSILSACQQSYFALQVGKARLKYKVTPPAVTGSPEFERVFRAHFCYLSGSGVHIWPSPILLGIFRSC

SEQ ID NO: 23353 - protein, 24 aa, Homo sapiens
REPPPNPGSSGGGLRPGVIMELIR

SEQ ID NO: 23354 - protein, 733 aa, Homo sapiens
LLHGSRFANMSAEGYQYRALYDYKKEREEDIDLHLGDILTVNKGSLVALGFSDGQEARPEEIGWLNGYNETTGERGDFPGTYVEYIGRKKISPPTPKPRPPRPLPVAPGSSKTEADVEQQALTLPDLAEQFAPPDIAPPLLIKLVEAIEKKGLECSTLYRTQSSSNLAELRQLLDCDTPSVDLEMIDVHVLADAFKRYLLDLPNPVIPAAVYSEMISLAPEVQSSEEYIQLLKKLIRSPSIPHQYWLTLQYLLKHFFKLSQTSSKNLLNARVLSEIFSPMLFRFSAASSDNTENLIKVIEILISTEWNERQPAPALPPKPPKPTTVANNGMNNNMSLQDAEWYWGDISREEVNEKLRDTADGTFLVRDASTKMHGDYTLTLRKGGNNKLIKIFHRDGKYGFSDPLTFSSVVELINHYRNESLAQYNPKLDVKLLYPVSKYQQDQVVKEDNIEAVGKKLHEYNTQFQEKSREYDRLYEEYTRTSQEIQMKRTAIEAFNETIKIFEEQCQTQERYSKEYIEKFKREGNEKEIQRIMHNYDKLKSRISEIIDSRRRLEEDLKKQAAEYREIDKRMNSIKPDLIQLRKTRDQYLMWLTQKGVRQKKLNEWLGNENTEDQYSLVEDDEDLPHHDEKTWNVGSSNRNKAENLLRGKRDGTFLVRESSKQGCYACSVVVDGEVKHCVINKTATGYGFAEPYNLYSSLKELVLHYQHTSLVQHNDSLNVTLAYPVYAQQRR

SEQ ID NO: 23355 - protein, 40 aa, Homo sapiens
LLPNILLTGTPGVGKTTLGKELASKSGLKYINVGDLAREV

SEQ ID NO: 23356 - protein, 205 aa, Homo sapiens [sequence omitted]

SEQ ID NO: 23357 - protein, 478 aa, Homo sapiens
TRLPGARRRAAPWPGQAGAGIMDSFKVVLEGPAPWGFRLQGGKDFNVPLSISRLTPGGKAAQAGVAVGDWVLSIDGENAGSLTHIEAQNKIRACGERLSLGLSRAQPVQSKPQKASAPAADPPRYTFAPSVSLNKTARPFGAPPPADSAPQQNGQPLRPLVPDASKQRLMENTEDWRPRPGTGQSRSFRILAHLTGTEFMQDPDEEHLKKSSQVPRTEAPAPASSTPQEPWPGPTAPSPTSRPPWAVDPAFAERYAPDKTSTVLTRHSQPATPTPLQSRTSIVQAAAGGVPGGGSNNGKTPVCHQCHKVIRGRYLVALGHAYHPEEFVCSQCGKVLEEGGFFEEKGAIFCPPCYDVRYAPSCAKCKKKITGEIMHALKMTWHVHCFTCAACKTPIRNRAFYMEEGVPYCERDYEKMFGTKCHGCDFKIDAGDRFLEALGFSWHDTCFVCAICQINLEGKTFYSKKDRPLCKSHAFSHV

SEQ ID NO: 23358 - protein, 376 aa, Homo sapiens
ITLGALRPAMVMEVGTLDAGGLRALLGERAAQCLLLDCRSFFAFNAGHIAGSVNVRFSTIVRRRAKGAMGLEHIVPNAELRGRLLAGAYHAVVLLDERSAALDGAKRDGTLALAAGALCREARAAQVFFLKGGYEAFSASCPELCSKQSTPMGLSLPLSTSVPDSAESGCSSCSTPLYDQGGPVEILPFLYLGSAYHASRKDMLDALGITALINVSANCPNHFEGHYQYKSIPVEDNHKADISSWFNEAIDFIDSIKNAGGRVFVHCQAGISRSATICLAYLMRTNRVKLDEAFEFVKQRRSIISPNFSFMGQLLQFESQVLAPHCSAEAGSPAMAVLDRGTSTTTVFNFPVSIPVHSTNSALSYLQSPITTSPSC

SEQ ID NO: 23359 - protein, 23 aa, Homo sapiens
VLVSLSHPVPSSSLQRHTLSPPP

SEQ ID NO: 23360 - protein, 210 aa, Homo sapiens
IMNPSMKQKQEEIKENIKNSSVPRRTLKMIQPSASGSLVGRENELSAGLSKRKHRNDHLTSTTSSPGVIVPESSENKNLGGVTQESFDLMIKENPSSQYWKEVAEKRRKALYEALKENEKLHKEIEQKDNEIARLKKENKELAEVAEHVQYMAELIERLNGEPLDNFESLDNQEFDSEEETVEDSLVEDSEIGTCAEGTVSSSTDAKPCI

SEQ ID NO: 23361 - protein, 127 aa, Homo sapiens
TMPEPTKSAPAPKKGSKKAVTKAQKKDGKKRKRSRKESYSVYVYKVLKQVHPDTGISSKAMGIMNSFVNDIFERIAGEASRLAHYNKRSTITSREIQTAVRLLLPGELAKHAVSEGTKAVTKYTSSK

SEQ ID NO: 23362 - protein, 103 aa, Homo sapiens
VGRVHRLLRKGNYAERVGAGAPVYLAAVLEYLTAEILELAGNAARDNKKTRIIPRHLQLAIRNDEELNKLLGKVTIAQGGVLPNIQAVLLPKKTESHHKAKGK

SEQ ID NO: 23363 - protein, 21 aa, Homo sapiens
IRLEMAFVPAYDWSQRAVQTP

SEQ ID NO: 23364 - protein, 736 aa, Homo sapiens
LLTITYNPFLFKMPEEVHHGEEEVETFAFQAEIAQLMSLIINTFYSNKEIFLRELISNASDALDKIRYESLTDPSKLDSGKELKIDIIPNPQERTLTLVDTGIGMTKADLINNLGTIAKSGTKAFMEALQAGADISMIGQFGVGFYSAYLVAEKVVVITKHNDDEQYAWESSAGGSFTVRADHGEPIGRGTKVILHLKEDQTEYLEERRVKEVVKKHSQFIGYPITLYLEKEREKEISDDEAEEEKGEKEEEDKDDEEKPKIEDVGSDEEDDSGKDKKKKTKKIKEKYIDQEELNKTKPIWTRNPDDITQEEYGEFYKSLTNDWEDHLAVKHFSVEGQLEFRALLFIPRRAPFDLFENKKKKNNIKLYVRRVFIMDSCDELIPEYLNFIRGVVDSEDLPLNISREMLQQSKILKVIRKNIVKKCLELFSELAEDKENYKKFYEAFSKNLKLGIHEDSTNRRRLSELLRYHTSQSGDEMTSLSEYVSRMKETQKSIYYITGESKEQVANSAFVERVRKRGFEVVYMTEPIDEYCVQQLKEFDGKSLVSVTKEGLELPEDEEEKKKMEESKAKFENLCKLMKEILDKKVEKVTISNRLVSSPCCIVTSTYGWTANMERIMKAQALRDNSTMGYMMAKKHLEINPDHPIVETLRQKAEADKNDKAVKDLVVLLFETALLSSGFSLEDPQTHSNRIYRMIKLGLGIDEDEVAAEEPNAAVPDEIPPLEGDEDASRMEEVD

SEQ ID NO: 23365 - protein, 180 aa, Homo sapiens
ITKAVAASKERNGLSLAALKKALAAGGYDVEKNNSRIKLGLKSLVSKGTLVQTKGTGASGSFKLNKKAASGEAKPKAKKAGAAKAKKPAGATPKKAKKAAGAKKAVKKTPKKAKKPAAAGVKKVAKSPKKAKAAAKPKKATKSPAKPKAVKPKAAKPKAAKPKAAKPKAAKAKKAAAKKK

SEQ ID NO: 23366 - protein, 53 aa, Homo sapiens
LECDISARMLKYRFPAGTMALSSVAQWSSSEDAKIHEKTSRTSGRIFNGKSLG

SEQ ID NO: 23367 - protein, 21 aa, Homo sapiens
VEAPEQYRFCYDVALEYLESS

SEQ ID NO: 23368 - protein, 49 aa, Homo sapiens
VKTEAAKGTLTYSRMRGMVAILIAFMKQRRMGLNDFIQKIANNSYACKQ

SEQ ID NO: 23369 - protein, 32 aa, Homo sapiens
RERCFLEPRARFYAAEIASALGYLHSLNIVYR

SEQ ID NO: 23370 - protein, 136 aa, Homo sapiens
KRLFEYILLYKDGVMFQIDQATKQCSKMTLTQPWDPLDIPQNSTFEDQYSIGGPQEQITVQEWSDRKSARSYETWIGIYTVKDCYPVQETFTINYSVILSTRFFDIQLGIKDPSVFTPPSTCQMAQLEKMSEDCSW

SEQ ID NO: 23371 - protein, 6 aa, Homo sapiens
IALRMC

SEQ ID NO: 23372 - protein, 575 aa, Homo sapiens
RREMSYQGKKNIPRITSDRLLIKGGKIVNDDQSFYADIYMEDGLIKQIGENLIVPGGVKTIEAHSRMVIPGGIDVHTRFQMPDQGMTSADDFFQGTKAALAGGTTMIIDHVVPEPGTSLLAAFDQWREWADSKSCCDYSLHVDISEWHKGIQEEMEALVKDHGVNSFLVYMAFKDRFQLTDCQIYEVLSVIRDIGAIAQVHAENGDIIAEEQQRILDLGITGPEGHVLSRPEEVEAEAVNRAITIANQTNCPLYITKVMSKSSAEVIAQARKKGTVVYGEPITASLGTDGSHYWSKNWAKAAAFVTSPPLSPDPTTPDFLNSLLSCGDLQVTGSAHCTFNTAQKAVGKDNFTLIPEGTNGTEERMSVIWDKAVVTGKMDENQFVAVTSTNAAKVFNLYPRKGRIAVGSDADLVIWDPDSVKTISAKTHNSSLEYNIFEGMECRGSPLVVISQGKIVLEDGTLHVTEGSGRYIPRKPFPDFVYKRIKARSRLAELRGVPRGLYDGPVCEVSVTPKTVTPASSAKTSPAKQQAPPVRNLHQSGFSLSGAQIDDNIPRRTTQRIVAPPGGRANITSLG

SEQ ID NO: 23373 - protein, 28 aa, Homo sapiens
LGCRLSAAALGWCAVVRPRLTAASATQM

SEQ ID NO: 23374 - protein, 26 aa, Homo sapiens
TVPVLQSGTPRRRGLRRAMEPGLQGK

SEQ ID NO: 23375 - protein, 330 aa, Homo sapiens
LDEKSGSFVSDLSSYCNKEVYNKENLFNSLNYDVAAKKRKKDMLNSKTKTQYFHQEKWIYVHKGSTKERHGYCTLGEAFNRLDFSTAILDSRRFNYVVRLLELIAKSQLTSLSGIAQKNFMNILEKVVLKVLEDQQNIRLIRELLQTLYTSLCTLVQRVGKSVLVGNINMWVYRMETILHWQQQLNNIQITRPAFKGLTFTDLPLCLQLNIMQRLSDGRDLVSLGQAAPDLHVLSEDRLLWKKLCQYHFSERQIRKRLILSDKGQLDWKKMYFKLVRCYPRKEQYGDTLQLCKHCHILSWKGTDHPCTANNPESCSVSLSPQDFINLFKF

SEQ ID NO: 23376 - protein, 243 aa, Homo sapiens
VFRAHVKHRKGAARLRAVDFAERHGYIKGIVKDIIHDPGRGAPLAKVVFRDPYRFKKRTELFIAAEGIHTGQFVYCGKKAQLNIGNVLPVGTMPEGTIVCCLEEKPGDRGKLARASGNYATVISHNPETKKTRVKLPSGSKKVISSANRAVVGVVAGGGRIDKPILKAGRAYHKYKAKRNCWPRVRGVAMNPVEHPFGGGNHQHIGKPSTIRRDAPAGRKVGLIAARRTGRLRGTKTVQEKEN

SEQ ID NO: 23377 - protein, 33 aa, Homo sapiens
ICIWDRPPGLADQRGSSSNVCCGGCNSIPASSW

SEQ ID NO: 23378 - protein, 71 aa, Homo sapiens
VHMNDNVLHSAFEVGARKVVSCLSTCIFPDKTTYPIDETMIHNGPPHNSNFGYSYAKRMIDVQNRSSRPSC

SEQ ID NO: 23379 - protein, 35 aa, Homo sapiens
LNRYYPQILTNKEAEKVLRSSGTPRHPCVCGSVTS

SEQ ID NO: 23380 - protein, 60 aa, Homo sapiens
KAKDSLRKVRTNSMNKLKKSKDTVSEDTIRLIEKQISQMADDTVAELDRHLAVKTKELLG

SEQ ID NO: 23381 - protein, 19 aa, Homo sapiens
VARALAGSQAPRRALGGGA

SEQ ID NO: 23382 - protein, 10 aa, Homo sapiens
LEFPRSPLRG

SEQ ID NO: 23383 - protein, 25 aa, Homo sapiens
IKRYSSEVATESPLDFTKYLKTSLH

SEQ ID NO: 23384 - protein, 54 aa, Homo sapiens
LLWTTFSLSAGRATQSPFACGWTTRRTTSTRGTIMASPPCTGPAERAALLWLRC

SEQ ID NO: 23385 - protein, 91 aa, Homo sapiens
KSRYTTEFHELEKIGSGEFGSVFKCVKRLDGCIYAIKRSKKPLAGSVDEQNALREVYAHAVLGQHSHVVRYFSAWAEDDHMLIQNEYCNGE

SEQ ID NO: 23386 - protein, 25 aa, Homo sapiens
IATRPRRPPDVHSRFLLVPSPIWQL

SEQ ID NO: 23387 - protein, 70 aa, Homo sapiens
KWFSQKPCYWKRLQSGFSPIPLPNGGKAGSSPIKLSWVGPWGTWRFQCACMEWNECCWCLSEDSAPRFRD

SEQ ID NO: 23388 - protein, 8 aa, Homo sapiens
VSVSAFPA

SEQ ID NO: 23389 - protein, 27 aa, Homo sapiens
IFAVAGTAVQSPICSSLSAPRSYTPSR

SEQ ID NO: 23390 - protein, 12 aa, Homo sapiens
LGLAPAMAVPWG

SEQ ID NO: 23391 - protein, 16 aa, Homo sapiens
KKTTPILRASARRHRS

SEQ ID NO: 23392 - protein, 118 aa, Homo sapiens
IMKFQYKEDHPFEYRKKEGEKIRKKYPDRVPVIVEKAPKARVPDLDKRKYLVPSDLTVGQFYFLIRKRIHLRPEDALFFFVNNTIPPTSATMGQLYEDNHEEDYFLYVAYSDESVYGK

SEQ ID NO: 23393 - protein, 25 aa, Homo sapiens
MEGEEEAAAAKGGVWGRLQGPLCHS

SEQ ID NO: 23394 - protein, 7 aa, Homo sapiens
TLAAGTR

SEQ ID NO: 23395 - protein, 146 aa, Homo sapiens
VYKGEIQARNLGMAVEAWNEEGKAVWGESGELVCTKPIPCQPTHFWNDENGNKYRKAYFSKFPGIWAHGDYCRINPKTGGIVMLGRSDGTLNPNGVRFGSSEIYNIVYAQRQESGSCRQTDHRWKSRGARRCFLEPRDPGSVPGHP

SEQ ID NO: 23396 - protein, 385 aa, Homo sapiens
KDCSNGCSAECTGEGGSKEVVGTFKAKDLIVTPATILKEKPDPNNLVFGTVFTDHMLTVEWSSEFGWEKPHIKPLQNLSLHPGSSALHYAVELFEGLKAFRGVDNKIRLFQPNLNMDRMYRSAVRATLPVFDKEELLECIQQLVKLDQEWVPYSTSASLYIRPTFIGTEPSLGVKKPTKALLFVLLSPVGPYFSSGTFNPVSLWANPKYVRAWKGGTGDCKMGGNYGSSLFAQCEAVDNGCQQVLWLYGEDHQITEVGTMNLFLYWINEDGEEELATPPLDGIILPGVTRRCILDLAHQWGEFKVSERYLTMDDLTTALEGNRVREMFGSGTACVVCPVSDILYKGETIHIPTMENGPKLASRILSKLTDIQYGREESDWTIVLS

SEQ ID NO: 23397 - protein, 34 aa, Homo sapiens
KCYPCENSYSTRGSASVLYQHFCLQHCTSSATSS

SEQ ID NO: 23398 - protein, 228 aa, Homo sapiens
IPWFQYPIIYDIRARPRKISSPTGSKDLQMVNISLRVLSRPNAQELPSMYQRLGLDYEERVLPSIVNEVLKSVVAKFNASQLITQRAQVSLLIRRELTERAKDFSLILDDVAITELSFSREYTAAVEAKQVAQQEAQRAQFLVEKAKQEQRQKIVQAEGEAEAAKMLGEALSKNPGYIKLRKIRAAQNISKTIATSQNRIYLTADNLVLNLQDESFTRGSDSLIKGKK

SEQ ID NO: 23399 - protein, 34 aa, Homo sapiens
IRMLSRSFWAHDGRYIQKVPRRNFLLEKMKKQYL

SEQ ID NO: 23400 - protein, 44 aa, Homo sapiens
MSEGQGDWLSQRFGLGSVFFRRRTSECTTTGKSYYRWSKGPGSH

SEQ ID NO: 23401 - protein, 13 aa, Homo sapiens
LAESLFPDSASLR

SEQ ID NO: 23402 - protein, 46 aa, Homo sapiens
LEPPAKIRPGFSLLSCLFKPARSDPEIWPQYVPPVFPSVREGYRFH

SEQ ID NO: 23403 - protein, 19 aa, Homo sapiens
IDNRTNFDGPSAKRPKTPS

SEQ ID NO: 23404 - protein, 536 aa, Homo sapiens
RTSAAMSKPHSEAGTAFIQTQQLHAAMADTFLEHMCRLDIDSPPITARNTGIICTIGPASRSVETLKEMIKSGMNVARLNFSHGTHEYHAETIKNVRTATESFASDPILYRPVAVALDTKGPEIRTGLIKGSGTAEVELKKGATLKITLDNAYMEKCDENILWLDYKNICKVVEVGSKIYVDDGLISLQVKQKGADFLVTEVENGGSLGSKKGVNLPGAAVDLPAVSEKDIQDLKFGVEQDVDMVFASFIRKASDVHEVRKVLGEKGKNIKIISKIENHEGVRRFDEILEASDGIMVARGDLGIEIPAEKVFLAQKMMIGRCNRAGKPVICATQMLESMIKKPRPTRAEGSDVANAVLDGADCIMLSGETAKGDYPLEAVRMQHLIAREAEAAIYHLQLFEELRRLAPITSDPTEATAVGAVEASFKCCSGAIIVLTKSGRSAHQVARYRPRAPIIAVTRNPQTARQAHLYRGIFPVLCKDPVQEAWAEDVDLRVNFAMNVGKARGFFKKGDVVIVLTGWRPGSGFTNTMRVVPVP

SEQ ID NO: 23405 - protein, 127 aa, Homo sapiens
LDTPRSRERSPSPLRGNVVPSPLPTRRTRTFSATVRASQGPVYKGVCKCFCRSKGHGFITPADGGPDIFLHISDVEGEYVPVEGDEVTYKMCSIPPKNEKLQAVEVVITHLAPGTKHETWSGHVISS

SEQ ID NO: 23406 - protein, 242 aa, Homo sapiens
KPTSPAPAAQSTNGTHASYGPFYLEYSLLAEFTLVVKQKLPGVYVQPSYRSALMWFGVIFIRHGLYQDGVFKFTVYIPDNYPDGDCPRLVFDIPVFHPLVDPTSGELDVKRAFAKWRRNHNHIWQVLMYARRVFYKIDTASPLNPEAAVLYEKDIQLFKSKVVDSVKVCTARLFDQPKIEDPYAISFSPWNPSVHDEAREKMLTQKKKPEEQHNKSVHVAGLSWVKPGSVQPFSKEEKTVAT

SEQ ID NO: 23407 - protein, 32 aa, Homo sapiens
MNSAAPSNKDMYTEMLKSIIEEGEYTPQVSLT

SEQ ID NO: 23408 - protein, 49 aa, Homo sapiens
ICQSLESAKAGTRFPGPQWGCANPRELGCKFVKNQHHVWQLSIGARSLP

SEQ ID NO: 23409 - protein, 36 aa, Homo sapiens
MLPCGTCHGAGTAALSRPAVVAAAAAAAGPERRSCH

SEQ ID NO: 23410 - protein, 531 aa, Homo sapiens
ITMSTNENANTPAARLHRFKNKGKDSTEMRRRRIEVNVELRKAKKDDQMLKRRNVSSFPDDATSPLQENRNNQGTVNWSVDDIVKGINSSNVENQLQATQAARKLLSREKQPPIDNIIRAGLIPKFVSFLGRTDCSPIQFESAWALTNIASGTSEQTKAVVDGGAIPAFISLLASPHAHISEQAVWALGNIAGDGSVFRDLVIKYGAVDPLLALLAVPDMSSLACGYLRNLTWTLSNLCRNKNPAPPIDAVEQILPTLVRLLHHDDPEVLADTCWAISYLTDGPNERIGMVVKTGVVPQLVKLLGASELPIVTPALRAIGNIVTGTDEQTQVVIDAGALAVFPSLLTNPKTNIQKEATWTMSNITAGRQDQIQQVVNHGLVPFLVSVLSKADFKTQKEAVWAVTNYTSGGTVEQIVYLVHCGIIEPLMNLLTAKDTKIILVILDAISNIFQAAEKLGETEKLSIMIEECGGLDKIEALQNHENESVYKASLSLIEKYFSVEEEEDQNVVPETTSEGYTFQVQDGAPGTFNF

SEQ ID NO: 23411 - protein, 9 aa, Homo sapiens
VFVMKNIRL

SEQ ID NO: 23412 - protein, 46 aa, Homo sapiens
KLCPGGHRPASLSSGCPAGCRLSFNLPPSMLLSVQKCCMPSSLKTC

SEQ ID NO: 23413 - protein, 48 aa, Homo sapiens
IPYRYLHGTQRYPMPQNLMWQKDRIRQMQEIHRHALNMRRVPSSQIEC

SEQ ID NO: 23414 - protein, 63 aa, Homo sapiens
INSPDRASGPEGSLSQTMAGSSPNTPQPVPEQSALCQGLYFHINQTLREAHFHSLQHRGRPLT

SEQ ID NO: 23415 - protein, 12 aa, Homo sapiens
KWPKTSALGRRS

SEQ ID NO: 23416 - protein, 166 aa, Homo sapiens
VDYNCNMTLEELVACDNAAQKMQTVTAAVEELLVAAQRQDRLTVGVYESAKLMNVDPDSVVLCLLAIDEEEEDDIALQIHFTLIQSFCCDNDINIVRVSGMQRLAQLLGEPAETQGTTEARDLHCLLVTNPHTDAWKSHGLVEVASYCEESRGNNQWVPYISLQER

SEQ ID NO: 23417 - protein, 215 aa, Homo sapiens
VTEDFSHLPPEQQRKRLQQQLEERSRELQKEVDQREALKKMKDVYEKTPQMGDPASLEPQIAETLSNIERLKLEVQKYEAWLAEAESRVLSNRGDSLSRHARPPDPPASAPPDSSSNSASQDTKESSEEPPSEESQDTPIYTEFDEDFEEEPTSPIGHCVAIYHFEGSSEGTISMAEGEDLSLMEEDKGDGWTRVRRKEGGEGYVPTSYLRVTLN

SEQ ID NO: 23418 - protein, 358 aa, Homo sapiens
RDPPQTAWAARMCTKMEQPFYHDDSYTATGYGRAPGGLSLHDYKLLKPSLAVNLADPYRSLKAPGARGPGPEGGGGGSYFSGQGSDTGASLKLASSELERLIVPNSNGVITTTPTPPGQYFYPRGGGSGGGAGGAGGGVTEEQEGFADGFVKALDDLHKMNHVTPPNVSLGATGGPPAGPGGVYAGPEPPPVYTNLSSYSPASASSGGAGAAVGTGSSYPTTTISYLPHAPPFAGGHPAQLGLGRGASTFKEEPQTVPEARSRDATPPVSPINMEDQERIKVERKRLRNRLAATKCRKRKLERIARLEDKVKTLKAENAGLSSTAGLLREQVAQLKQKVMTHVSNGCQLLLGVKGHAF

SEQ ID NO: 23419 - protein, 57 aa, Homo sapiens
IAQGWRFWTQRQGRSCVSWTRWSPTPPLRRSRTSSLRPIRSGTPPASPSAWTPRASP

SEQ ID NO: 23420 - protein, 19 aa, Homo sapiens
RRKRWTSRTRPRGSSAAAS

SEQ ID NO: 23421 - protein, 26 aa, Homo sapiens
ILSMITFPLKPYPLLCIWEIIHREAL

SEQ ID NO: 23422 - protein, 39 aa, Homo sapiens
VSVEARTRGGAGTAAAAAAAGGTLIPVLRTPRASPWLTS

SEQ ID NO: 23423 - protein, 97 aa, Homo sapiens
KQHVAPVTSVEWHPQDSGVFAASGADHQITQWDLAVERDPEAGDVEADPGLADLPQQLLFVHQGETELKELHWHPQCPGLLVSTALSGFTIFRTISV

SEQ ID NO: 23424 - protein, 69 aa, Homo sapiens
RPPPPLLAAAMESSTFALVPVFAHLSILQSLVPAAGAASPVAISAQHLCYSHVTPGDPGAGAGQGPAPS

SEQ ID NO: 23425 - protein, 204 aa, Homo sapiens
KMAEVQVLVLDGRGHLLGRLAAIVAKQVLLGRKVVVVRCEGINISGNFYRNKLKYLAFLRKRMNTNPSRGPYHFRAPSRIFWRTVRGMLPHKTKRGQAALDRLKVFDGIPPPYDKKKRMVVPAALKVVRLKPTRKFAYLGRLAHEVGWKYQAVTATLEEKRKEKAKIHYRKKKQLMRLRKQAEKNVEKKIDKYTEVLKTHGLLV

SEQ ID NO: 23426 - protein, 203 aa, Homo sapiens
RRRRGSGANMPVARSWVCRKTYVTPRRPFEKSRLDQELKLIGEYGLRNKREVWRVKFTLAKIRKAARELLTLDEKDPRRLFEGNALLRRLVRIGVLDEGKMKLDYILGLKIEDFLERRLQTQVFKLGLAKSIHHARVLIRQRHIRVRKQVVNIPSFIVRLDSQKHIDFSLRSPYGGGRPGRVKRKNAKKGQGGAGAGDDEEED

SEQ ID NO: 23427 - protein, 21 aa, Homo sapiens
LPGRMIPPAGAGFFASHREAG

SEQ ID NO: 23428 - protein, 172 aa, Homo sapiens
IVSLPEQEIKTLEEDEEELFKMRAKLFRFASENDLPEWKERGTGDVKLLKHKEKGAIRLLMRRDKTLKICANHYITPMMELKPNAGSDRAWVWNTHADFADECPKPELLAIRFLNAENAQKFKTKFEECRKEIEEREKKAGSGKNDHAEKVAEKLEALSVKEETKEDAEEKQ

SEQ ID NO: 23429 - protein, 20 aa, Homo sapiens
LPRCLLVCRLKYCMRPRATL

SEQ ID NO: 23430 - protein, 136 aa, Homo sapiens
IMACGLVASNLNLKPGECLRVRGEVAPDAKSFVLNLGKDSNNLCLHFNPRFNAHGDANTIVCNSKDGGAWGTEQREAVFPFQPGSVAEVCITFDQANLTVKLPDGYEFKFPNRLNLEAINYMAADGDFKIKCVAFD

SEQ ID NO: 23431 - protein, 54 aa, Homo sapiens
IICGRVPMSLLLPPLALLLLLAALVAPATAATAYRPDWNRLSGLTRARVETCGG

SEQ ID NO: 23432 - protein, 176 aa, Homo sapiens
KQKTKMAKFVIRPATAADCSDILRLIKELAKYEYMEEQVILTEKDLLEDGFGEHPFYHCLVAEVPKEHWTPEGHSIVGFAMYYFTYDPWIGKLLYLEDFFVMSDYRGFGIGSEILKNLSQVAMRCRCSSMHFLVAEWNEPSINFYKRRGASDLSSEEGWRLFKIDKEYLLKMATEE

SEQ ID NO: 23433 - protein, 31 aa, Homo sapiens
KMVFYGKYLSVGLNVKERGRERNPFIMFSLP

SEQ ID NO: 23434 - protein, 256 aa, Homo sapiens
KQITADKQYKGIIDCVVRIPKEQGVLSFWRGNLANVIRYFPTQALNFAFKDKYKQIFLGGVDKRTQFWLYFAGNLASGGAAGATSLCFVYPLDFARTRLAADVGKAGAEREFRGLGDCLVKIYKSDGIKGLYQGFNVSVQGIIIYRAAYFGIYDTAKGMLPDPKNTHIVISWMIAQTVTAVAGLTSYPFDTVRRRMMMQSGRKGTDIMYTGTLDCWRKIARDEGGKAFFKGAWSNVLRGMGGAFVLVLYDEIKKYT

SEQ ID NO: 23435 - protein, 17 aa, Homo sapiens
LERLLGFGFVLQPSPRS

SEQ ID NO: 23436 - protein, 607 aa, Homo sapiens
LSLTGGSEAGRRSKSKMKYILVTGGVISGIGKGIIASSVGTILKSCGLHVTSIKIDPYINIDAGTFSPYEHGEVFVLDDGGEVDLDLGNYERFLDIRLTKDNNLTTGKIYQYVINKERKGDYLGKTVQVVPHITDAIQEWVMRQALIPVDEDGLEPQVCVIELGGTVGDIESMPFIEAFRQFQFKVKRENFCNIHVSLVPQPSSTGEQKTKPTQNSVRELRGLGLSPDLVVCRCSNPLDTSVKEKISMFCHVEPEQVICVHDVSSIYRVPLLLEEQGVVDYFLRRLDLPIERQPRKMLMKWKEMADRYDRLLETCSIALVGKYTKFSDSYASVIKALEHSALAINHKLEIKYIDSADLEPITSQEEPVRYHEAWQKLCSAHGVLVPGGFGVRGTEGKIQAIAWARNQKKPFLGVCLGMQLAVVEFSRNVLGWQDANSTEFDPTTSHPVVVDMPEHNPGQMGGTMRLGKRRTLFQTKNSVMRKLYGDADYLEERHRHRFEVNPVWKKCLEEQGLKFVGQDVEGERMEIVELEDHPFFVGVQYHPEFLSRPIKPSPPYFGLLLASVGRLSHYLQKGCRLSPRDTYSDRSGSSSPDSEITELKFPSINHD

SEQ ID NO: 23437 - protein, 344 aa, Homo sapiens
ITPREEPQLPQPAPVTITATMSSEAETQQPPAAPPAAPALSAADTKPGTTGSGAGSGGPGGLTSAAPAGGDKKVIATKVLGTVKWFNVRNGYGFINRNDTKEDVFVHQTAIKKNNPRKYLRSVGDGETVEFDVVEGEKGAEAANVTGPGGVPVQGSKYAADRNHYRRYPRRRGPPRNYQQNYQNSESGEKNEGSESAPEGQAQQRRPYRRRRFPPYYMRRPYGRRPQYSNPPVQGEVMEGADNQGAGEQGRPVRQNMYRGYRPRFRRGPPRQRQPREDGNEEDKENQGDETQGQQPPQRRYRRNFNYRRRRPENPKPQDGKETKAADPPAENSSAPEAEQGGAE

SEQ ID NO: 23438 - protein, 43 aa, Homo sapiens
KCLSSGPGLLLRLFSFSPCNAGKSQSRHRNMPLIQCLCLAVTC

SEQ ID NO: 23439 - protein, 221 aa, Homo sapiens
VQLLGQNEVDYRQKQVVILSQDSFYRVLTSEQKAKALKGQFNFDHPDAFDNELILKTLKEITEGKTVQIPVYDFVSHSRKEETVTVYPADVVLFEGILAFYSQEVRDLFQMKLFVDTDADTRLSRRVLRDISERGRDLEQILSQYITFVKPAFEEFCLPTKKYADVIIPRGADNLVAINLIVQHIQDILNGGPSKRQTNGCLNGYTPSRKRQASESSSRPH

SEQ ID NO: 23440 - protein, 43 aa, Homo sapiens
TAAPRRATRPPKVSRGRENGKLPTSWKRKLLISLDEYASTLEF

SEQ ID NO: 23441 - protein, 437 aa, Homo sapiens
KFTMSILKIHAREIFDSRGNPTVEVDLFTSKGLFRAAVPSGASTGIYEALELRDNDKTRYMGKGVSKAVEHINKTIAPALVSKKLNVTEQEKIDKLMIEMDGTENKSKFGANAILGVSLAVCKAGAVEKGVPLYRHIADLAGNSEVILPVPAFNVINGGSHAGNKLAMQEFMILPVGAANFREAMRIGAEVYHNLKNVIKEKYGKDATNVGDEGGFAPNILENKEGLELLKTAIGKAGYTDKVVIGMDVAASEFFRSGKYDLDFKSPDDPSRYISPDQLADLYKSFIKDYPVVSIEDPFDQDDWGAWQKFTASAGIQVVGDDLTVTNPKRIAKAVNEKSCNCLLLKVNQIGSVTESLQACKLAQANGWGVMVSHRSGETEDTFIADLVVGLCTGQIKTGAPCRSERLAKYNQLLRIEEELGSKAKFAGRNFRNPLAK

SEQ ID NO: 23442 - protein, 21 aa, Homo sapiens
VVKKEPRVTVFLDGRRSVCCN

SEQ ID NO: 23443 - protein, 7 aa, Homo sapiens
ISISSMS

SEQ ID NO: 23444 - protein, 21 aa, Homo sapiens
MAILSVRADFCQAQHSIFADK

SEQ ID NO: 23445 - protein, 71 aa, Homo sapiens
KAMGIMNSFVNDIFERIAGEASRLAHYNKRSTITSREIQTAVRLLLPGKLAKHAVSEGTKAVTKYTSSNIF

SEQ ID NO: 23446 - protein, 206 aa, Homo sapiens
VSAMAKAYDHLFKLLLIGDSGVGKTCLIIRFAEDNFNNTYISTIGIDFKIRTVDIEGKKIKLQVWDTAGQERFKTITTAYYRGAMGIILVYDITDEKSFENIQNWMKSIKENASAGVERLLLGNKCDMEAKRKVQKEQADKLAREHGIRFFETSAKSSMNVDEAFSSLARDILLKSGGRRSGNGNKPPSTDLKTCDKKNTNKCSLG

SEQ ID NO: 23447 - protein, 137 aa, Homo sapiens
LELSANLGAPMTAAATATVLKEGVLEKRSGGLLQLWKRKRCVLTERGLQLFEAKGTGGRPKELSFARIKAVECVESTGRHIYFTLVTEGGGEIDFRCPLEDPGWNAQITLGLVKFKNQQAIQTVRARQSLGTGTLVS

SEQ ID NO: 23448 - protein, 66 aa, Homo sapiens
VLCKLEENVQATNSPSEAEEFQLEVSGLLGEMNCPYLSLTSGDVTKRLLIQKNCLLLLSKFMATRI

SEQ ID NO: 23449 - protein, 14 aa, Homo sapiens
MPCGELVLQRVLPS

SEQ ID NO: 23450 - protein, 754 aa, Homo sapiens
LRAEMSQWYELQQLDSKFLEQVHQLYDDSFPMEIRQYLAQWLEKQDWEHAANDVSFATIRFHDLLSQLDDQYSRFSLENNFLLQHNIRKSKRNLQDNFQEDPIQMSMIIYSCLKEERKILENAQRFNQAQSGNIQSTVMLDKQKELDSKVRNVKDKVMCIEHEIKSLEDLQDEYDFKCKTLQNREHETNGVAKSDQKQEQLLLKKMYLMLDNKRKEVVHKIIELLNVTELTQNALINDELVEWKRRQQSACIGGPPNACLDQLQNWFTIVAESLQQVRQQLKKLEELEQKYTYEHDPITKNKQVLWDRTFSLFQQLIQSSFVVERQPCMPTHPQRPLVLKTGVQFTVKLRLLVKLQELNYNLKVKVLFDKDVNERNTVKGFRKFNILGTHTKVMNMEESTNGSLAAEFRHLQLKEQKNAGTRTNEGPLIVTEELHSLSFETQLCQPGLVIDLETTSLPVVVISNVSQLPSGWASILWYNMLVAEPRNLSFFLTPPCARWAQLSEVLSWQFSSVTKRGLNVDQLNMLGEKLLGPNASPDGLIPWTRFCKENINDKNFPFWLWIESILELIKKHLLPLWNDGCIMGFISKERERALLKDQQPGTFLLRFSESSREGAITFTWVERSQNGGEPDFHAVEPYTKKELSAVTFPDIIRNYKVMAAENIPENPLKYLYPNIDKDHAFGKYYSRPKEAPEPMELDGPKGTGYIKTELISVSEVHPSRLQTTDNLLPMSPEEFDEVSRIVGSVEFDSMMNTV

SEQ ID NO: 23451 - protein, 40 aa, Homo sapiens
ITSTVLAPNVLCVAAPLVESPGPCWGTRWQDVSVVRTSAA

SEQ ID NO: 23452 - protein, 588 aa, Homo sapiens
TTCLAERTPCRRPAEMLRLPTVFRQMRPVSRVLAPHLTRAYAKDVKFGADARALMLQGVDLLADAVAVTMGPKGRTVIIEQSWGSPKVTKDGVTVAKSIDLKDKYKNIGAKLVQDVANNTNEEAGDGTTTATVLARSIAKEGFEKISKGANPVEIRRGVMLAVDAVIAELKKQSKPVTTPEEIAQVATISANGDKEIGNIISDAMKKVGRKGVITVKDGKTLNDELEIIEGMKFDRGYISPYFINTSKGQKCEFQDAYVLLSEKKISSIQSIVPALEIANAHRKPLVIIAEDVDGEALSTLVLNRLKVGLQVVAVKAPGFGDNRKNQLKDMAIATGGAVFGEEGLTLNLEDVQPHDLGKVGEVIVTKDDAMLLKGKGDKAQIEKRIQEIIEQLDVTTSEYEKEKLNERLAKLSDGVAVLKVGGTSDVEVNEKKDRVTDALNATRAAVEEGIVLGGGCALLRCIPALDSLTPANEDQKIGIEIIKRTLKIPAMTIAKNAGVEGSLIVEKIMQSSSEVGYDAMAGDFVNMVEKGIIDPTKVVRTALLDAAGVASLLTTAEVVVTEIPKEEKDPGMGAMGGMGGGMGGGMF

SEQ ID NO: 23453 - protein, 8 aa, Homo sapiens
MDSKMDFI

SEQ ID NO: 23454 - protein, 16 aa, Homo sapiens
MKMTNEQRIRMTVPCL

SEQ ID NO: 23455 - protein, 26 aa, Homo sapiens
LEGLRRSRGHRKPLSSLGPRGLLSTR

SEQ ID NO: 23456 - protein, 32 aa, Homo sapiens
LYYPRCCGAELVPLQLSRVGLDIFDSFPPRLN

SEQ ID NO: 23457 - protein, 81 aa, Homo sapiens
KAFMKASSELFSQKTKASLLVSNQNGNMYTSSVYGSLASVLAQYSPQQLAGKRIGVFSYGSGLAATLYSLKVTQDATPGKC

SEQ ID NO: 23458 - protein, 41 aa, Homo sapiens
MLLPNILLTGTPGVGKTTLGKELASKSGLKYINVGDLAREV

SEQ ID NO: 23459 - protein, 21 aa, Homo sapiens
LRMTGALLSMTFPLKHQHIFW

SEQ ID NO: 23460 - protein, 10 aa, Homo sapiens
IASDLMNLSL

SEQ ID NO: 23461 - protein, 82 aa, Homo sapiens
VLRDNIQGITKPAIRRLARRGGVKRISGLIYEETRGVLKVFLENVIRDAVTYTEHAKRKTVTAMDVVYALKRQGRTLYGFGG

SEQ ID NO: 23462 - protein, 254 aa, Homo sapiens
LGDLWARARATMTDYGEEQRNELEALESIYPDSFTVLSENPPSFTITVTSEAGENDETVQTTLKFTYSEKYPDEAPLYEIFSQENLEDNDVSDILKLLALQAEENLGMVMIFTLVTAVQEKLNEIVDQIKTRREEEKKQKEKEAEEAEKQLFHGTPVTIENFLNWKAKFDAELLEIKKKRMKEEEQAGKNKLSGKQLFETDHNLDTSDIQFLEDAGNNVEVDESLFQEMDDLELEDDEDDPDYNPADPESDSAD

SEQ ID NO: 23463 - protein, 10 aa, Homo sapiens
LGAFKIQLHP

SEQ ID NO: 23464 - protein, 35 aa, Homo sapiens
VPSVTEKCCGITSKASPNRPFGALLGVVGLSEFPV

SEQ ID NO: 23465 - protein, 19 aa, Homo sapiens
IPTAMGPTSHSHLPSIGRG

SEQ ID NO: 23466 - protein, 54 aa, Homo sapiens
ISKIDLMVNSGKLGTTVKPKSLVTSSSGALKKQHKKPFDAMNNIVANLLLNLTR

SEQ ID NO: 23467 - protein, 278 aa, Homo sapiens
IAKTEGLEMADHMMAMNHGRFPDGTNGLHHHPAHRMGMGQFPSPHHHQQQQPQHAFNALMGEHIHYGAGNMNATSGIRHAMGPGTVNGGHPPSALAPAARFNNSQFMGPPVASQGGSLPASMQLQKLNNQYFNHHPYPHNHYMPDLHPAAGHQMNGTNQHFRDCNPKHSGGSSTPGGSGGSSTPGGSGSSSGGGAGSSNSGGGSGSGNMPASVAHVPAAMLPPNVIDTDFIDEEVLMSLVIEMGLDRIKELPELWLGQNEFDFMTDFVCKQQPSRVSC

SEQ ID NO: 23468 - protein, 31 aa, Homo sapiens
KAFSDAIKKWQELSPETSGKRKKRKEMNQYS

SEQ ID NO: 23469 - protein, 74 aa, Homo sapiens
LPIAAGGHFALELTTPEQGRDSPDAGRLFCPFGDTSPPLPGPASLKGSPCSCLDAGFFSGSGKPAASRDDAPQR

SEQ ID NO: 23470 - protein, 146 aa, Homo sapiens [sequence omitted]

SEQ ID NO: 23471 - protein, 6 aa, Homo sapiens
RSTLGP

SEQ ID NO: 23472 - protein, 489 aa, Homo sapiens
LPPAAKQPTMLNFGASLQQTAEERMEMISERPKESMYSWNKTAEKSDFEAVEALMSMSCSWKSDFKKYVENRPVTPVSDLSEEENLLPGTPDFHTIPAFCLTPPYSPSDFEPSQVSNLMAPAPSTVHFKSLSDTAKPHIAAPFKEEEKSPVSAPKLPKAQATSVIRHTADAQLCNHQTCPMKAASILNYQNNSFRRRTHLNVEAARKNIPCAAVSPNRSKCERNTVADVDEKASAALYDFSVPSSETVICRSQPAPVSPQQKSVLVSPPAVSAGGVPPMPVICQMVPLPANNPVVTTVVPSTPPSQPPAVCPPVVFMGTQVPKGAVMFVVPQPVVQSSKPPVVSPNGTRLSPIAPAPGFSPSAAKVTPQIDSSRIRSHICSHPGCGKTYFKSSHLKAHTRTHTGEKPFSCSWKGCERRFARSDELSRHRRTHTGEKKFACPMCDRRFMRSDHLTKHARRHLSAKKLPNWQMEVSKLNDIALPPTPAPTQ

SEQ ID NO: 23473 - protein, 57 aa, Homo sapiens
IPFFHRCAPVNISCYAKFAEALITFVSDNSVLHRLISGVMTSKEIILGLCLLSLGST

SEQ ID NO: 23474 - protein, 700 aa, Homo sapiens
LKKEAKFELRAFHEDKKPSKLFEDDEHEKEQYCIRKVRPSEEMLELEKERRELIRSQAVKKNPGIAAKWWNPPQEKTIEEQLDEEHLESHKKYKERKERRAQQEQLLLQKQLQQQQQQPPSQLCTAPASSHERASMIDKAKEDIVTEQIDFSAARKQFQLMENSRQAVAKGQSTPRLFSIKPFYRPLGSVNSDKPLTNPRPPSVGGPPEDSGASAAKGQKSPGALETPSAAGSQGNTASQGKEGPYSEPSKRGPLSKLWAEDGEFTSARAVLTVVKDDDHGILDQFSRSVNVSLTQEELDSGLDELSVRSQDTTVLETLSNDFSMDNISDSGASNETTNALQENSLADFSLPQTPQTDNPSEGRGEGVSKSFSDHGFYSPSSTLGDSPLVDDPLEYQAGLLVQNAIQQAIAEQVDKAVSKTSRDGAEQQGPEATVEEAEAAAFGSEKPQSMFEPPQVSSPVQEKRDVLPKILPAEDRALRERGPPQPLPAVQPSGPINMEETRPEGSYFSKYSEAAELRSTASLLATQESDVMVGPFKLRSRKQRTLSMIEEEIRAAQEREEELKRQRQVLQSTQSPRTKNAPSLPSRTCYKTAPGKIEKVKPPPSPTTEGPSLQPDLAPEEAAGTQRPKNLMQTLMEDYETHKSKRRERMDDSSYTSKLLSCKVTSEVLEATRVNRRKSALALRWEAGIYANQEEEDNE

SEQ ID NO: 23475 - protein, 12 aa, Homo sapiens
RPGAKNEPFSST

SEQ ID NO: 23476 - protein, 429 aa, Homo sapiens
VKTDSRRRELTPPIPDAMSSKGSVVLAYSGGLDTSCILVWLKEQGYDVIAYLANIGQKEDFEEARKKALKLGAKKVFIEDVSREFVEEFIWPAIQSSALYEDRYLLGTSLARPCIARKQVEIAQREGAKYVSHGATGKGNDQVRFELSCYSLAPQIKVIAPWRMPEFYNRFKGRNDLMEYAKQHGIPIPVTPKNPWSMDENLMHISYEAGILENPKNQAPPGLYTKTQDPAKAPNTPDILEIEFKKGVPVKVTNVKDGTTHQTSLELFMYLNEVAGKHGVGRIDIVENRFIGMKSRGIYETPAGTILYHAHLDIEAFTMDREVRKIKQGLGLKFAELVYTGFWHSPECEFVRHCIAKSQERVEGKVQVSVLKGQVYILGRESPLSLYNEELVSMNVQGDYEPTDATGFININSLRLKEYHRLQSKVTAK

SEQ ID NO: 23477 - protein, 748 aa, Homo sapiens
LAMGDVLSTHLDDARRQHIAEKTGKILTEFLQFYEDQYGVALFNSMRHEIEGTGLPQAQLLWRKVPLDERIVFSGNLFQHQEDSKKWRNRFSLVPHNYGLVLYENKAAYERQVPPRAVINSAGYKILTSVDQYLELIGNSLPGTTAKSGSAPILKCPTQFPLILWHPYARHYYFCMMTEAEQDKWQAVLQDCIRHCNNGIPEDSKVEGPAFTDAIRMYRQSKELYGTWEMLCGNEVQILSNLVMEELGPELKAELGPRLKGKPQERQRQWIQISDAVYHMVYEQAKARFEEVLSKVQQVQPAMQAVIRTDMDQIITSKEHLASKIRAFILPKAEVCVRNHVQPYIPSILEALMVPTSQGFTEVRDVFFKEVTDMNLNVINEGGIDKLGEYMEKLSRLAYHPLKMQSCYEKMESLRLDGLQQRFDVSSTSVFKQRAQIHMREQMDNAVYTFETLLHQELGKGPTKEELCKSIQRVLERVLKKYDYDSSSVRKRFFREALLQISIPFLLKKLAPTCKSELPRFQELIFEDFARFILVENTYEEVVLQTVMKDILQAVKEAAVQRKHNLYRDSMVMHNSDPNLHLLAEGAPIDWGEEYSNSGGGGSPSPSTPESATLSEKRRRAKQVVSVVQDEEVGLPFEASPESPPPASPDGVTEIRGLLAQGLRPESPPPAGPLLNGAPAGESPQPKAAPEASSPPASPLQHLLPGKAVDLGPPKPSDQETGEQVSSPSSHPALHTTTEDSAGVQTEF

SEQ ID NO: 23478 - protein, 6 aa, Homo sapiens
TMPRKQ

SEQ ID NO: 23479 - protein, 784 aa, Homo sapiens
KMPGKLRSDAGLESDTAMKKGETLRKQTEEKEKKEKPKSDKTEEIAEEEETVFPKAKQVKKKAEPSEVDMNSPKSKKAKKKEEPSQNDISPKTKSLRKKKEPIEKKVVSSKTKKVTKNEEPSEEEIDAPKPKKMKKEKEMNGETREKSPKLKNGFPHPEPDCNPSEAASEESNSEIEQEIPVEQKEGAFSNFPISEETIKLLKGRGVTFLFPIQAKTFHHVYSGKDLIAQARTGTGKTFSFAIPLIEKLHGELQDRKRGRAPQVLVLAPTRELANQVSKDFSDITKKLSVACFYGGTPYGGQFERMRNGIDILVGTPGRIKDHIQNGKLDLTKLKHVVLDEVDQMLDMGFADQVEEILSVAYKKDSEDNPQTLLFSATCPHWVFNVAKKYMKSTYEQVDLIGKKTQKTAITVEHLAIKCHWTQRAAVIGDVIRVYSGHQGRTIIFCETKKEAQELSQNSAIKQDAQSLHGDIPQKQREITLKGFRNGSFGVLVATNVAARGLDIPEVDLVIQSSPPKDVESYIHRSGRTGRAGRTGVCICFYQHKEEYQLVQVEQKAGIKFKRIGVPSATEIIKASSKDAIRLLDSVPPTAISHFKQSAEKLIEEKGAVEALAAALAHISGATSVDQRSLINSNVGFVTMILQCSIEMPNISYAWKELKEQLGEEIDSKVKGMVFLKGKLGVCFDVPTASVTEIQEKWHDSRRWQLSVATEQPELEGPREGYGGFRGQREGSRGFRGQRDGNRRFRGQREGSRGPRGQRSGGGNKSNRSQNKGQKRSFSKAFGQ

SEQ ID NO: 23480 - protein, 42 aa, Homo sapiens
LGRVWAALGGWHGFAHPFKRQDALVLAVLADRASCGFYAPAL

SEQ ID NO: 23481 - protein, 10 aa, Homo sapiens
LRAAGHGGLD

SEQ ID NO: 23482 - protein, 11 aa, Homo sapiens
IFENITTLVEE

SEQ ID NO: 23483 - protein, 6 aa, Homo sapiens
KLEGKA

SEQ ID NO: 23484 - protein, 439 aa, Homo sapiens
ITMAAGTLYTYPENWRAFKALIAAQYSGAQVRVLSAPPHFHFGQTNRTPEFLRKFPAGKVPAFEGDDGFCVFESNAIAYYVSNEELRGSTPEAAAQVVQWVSFADSDIVPPASTWVFPTLGIMHHNKQATENAKEEVRRILGLLDAYLKTRTFLVGERVTLADITVVCTLLWLYKQVLEPSFRQAFPNTNRWFLTCINQPQFRAVLGEVKLCEKMAQFDAKKFAETQPKKDTPRKEKGSREEKQKPQAERKEEKKAAAPAPEEEMDECEQALAAEPKAKDPFAHLPKSTFVLDEFKRKYSNEDTLSVALPYFWEHFDKDGWSLWYSEYRFPEELTQTFMSCNLITGMFQRLDKLRKNAFASVILFGTNNSSSISGVWVFRGQELAFPLSPDWQVDYESYTWRKLDPGSEETQTLVREYFSWEGAFQHVGKAFNQGKIFK

SEQ ID NO: 23485 - protein, 31 aa, Homo sapiens
ITGTSQADCAVLIFAAGVGEFEAGISKNGQT

SEQ ID NO: 23486 - protein, 42 aa, Homo sapiens
TASAEMWAAGQDGHSGSAQQRSPDSDWGSKQGLDRPGEPVGQ

SEQ ID NO: 23487 - protein, 18 aa, Homo sapiens
LAPHTSRRYLEFLQHGRH

SEQ ID NO: 23488 - protein, 6 aa, Homo sapiens
ILVNCF

SEQ ID NO: 23489 - protein, 94 aa, Homo sapiens
LVPRSLHKMPGEATETVPATEQELPQPQAETGSGTESDSDESVPELEEQDSTQATTQQAQLAAAAEIDEEPVSKAKQSRSEKKMSTRALLQILT

SEQ ID NO: 23490 - protein, 70 aa, Homo sapiens
KMNLHFLCQRASLNLNFIMAQRRTVQLQANSQKKNLLRYKRKITEKKRKEPQRSCSVQSQILLLLLWLIG

SEQ ID NO: 23491 - protein, 170 aa, Homo sapiens
IFAGAARAADNKKCAGARRALGRARGCSATARPRRRRRRPRGLAPPRPARPPPGGMSYKPNLAAHMPAAALNAAGSVHSPSTSMATSSQYRQLLSDYGPPSLGYTQGTGNSQVPQSKYAELLAIIEELGKEIRPTYAGSKSAMERLKRGIIHARGLVRECLAETERNARS

SEQ ID NO: 23492 - protein, 406 aa, Homo sapiens
LKTLNAVQYHHAAKAKFLCIMCCSNISYERDGEQDNCEIETSNGLSALLEEFEIVSCPSMAATLYTIKQKIDEKNLSSIKVIVPRHRKTLMKAFIDQLFTDVYNFEFEDLQVTFRGGLFKQSIEINVITAQELRGIQNEIETFLRSLPALRGKLTIITSSLIPDIFIHGFTTRTGGISYIPTLSSFNLFSSSKRRDPKVVVQENLRRLANAAGFNVEKFYRIKTHHSNDIWIMGRKEPDSYDGITTNQRGVTIAALGADCIPIVFADPVKKACGVAHAGWKGTLLGVAMATVNAMIAEYGCSLEDIVVVLGPSVGPCCFTLPRESAEAFHNLHPACVQLFDSPNPCIDIRKATRILLEQGGILPQNIQDQNQDLNLCTSCHPDKFFSHVRDGLNFGTQIGFISIKE

SEQ ID NO: 23493 - protein, 118 aa, Homo sapiens
KMSSNVPADMINLRLILVSGKTKEFLFSPNDSASDIAKHVYDNWPMDWEEEQVSSPNILRLIYQGRFLHGNVTLGALKLPFGKTTVMHLVARETLPEPNSQGQRNREKTGESNCCVIL

SEQ ID NO: 23494 - protein, 29 aa, Homo sapiens
RSFWAHDGRYIQKVPRRNFLLEKMKKQYL

SEQ ID NO: 23495 - protein, 729 aa, Homo sapiens
ILLLRKQLNCLRRRDAGLLNQLQELDKQISDLRLDVEKTSEEHLETDSRPSSGFYELSDGASGSLSNSSNSVFSECLSSCHSSTCFCSPLEATLSLSDGCPKSADLIGLLEYKEGHCEDQASGAVCRSLSTPQFNSLDVIADVNPKYQCDLVSKNGNDVYRYPSPLHAVAVQSPMFLLCLTGNPLREEDRLGNHASDICGGSELDAVKTDSSLPSPSSLWSASHPSSSKKMDGYILSLVQKKTHPVRTNKPRTSVNADPTKGLLRNGSVCVRAPGGVSQGNSVNLKNSKQACLPSGGIPSLNNGTFSPPKQWSKESKAEQAESKRVPLPEGCPSGAASDLQSKHLPKTAKPASQEHARCSAIGTGESPKESAQLSGASPKESPSRGPAPPQENKVVQPLKKMSQKNSLQGVPPATPPLLSTAFPVEERPALDFKSEGSSQSLEEAHLVKAQFIPGQQPSVRLHRGHRNMGVVKNSSLKHRGPALQGLENGLPTVREKTRAGSKKCRFPDDLDTNKKLKKASSKGRKSGGGPEAGVPGRPAGGGHRAGSRAHGHGREAVVAKPKHKRTDYRRWKSSAEISYEEALRRARRGRRENVGLYPAPVPLPYASPYAYVASDSEYSAECESLFHSTVVDTSEDEQSNYTTNCFGDSESSVSEGEFVGESTTTSDSEESGGLIWSQFVQTLPIQTVTAPDLHNHPAKTFVKIKASHNLKKKILRFRSGSLKLMTTV

SEQ ID NO: 23496 - protein, 53 aa, Homo sapiens
LACGTPDRRGCAFPAPGPSRHTRSSPLARANAQDDHHPRVCHHLRLERSFMQG

SEQ ID NO: 23497 - protein, 11 aa, Homo sapiens
KILDATPACLP

SEQ ID NO: 23498 - protein, 28 aa, Homo sapiens
LAKDLFLLTTKGLRLDFQGRISSEAPAR

SEQ ID NO: 23499 - protein, 7 aa, Homo sapiens
LDSVLLV

SEQ ID NO: 23500 - protein, 45 aa, Homo sapiens
LESAKAGTRFPGPQWGCANPRELGCKFVKNQHHVWQLSIGARSLP

SEQ ID NO: 23501 - protein, 913 aa, Homo sapiens
TRCRGEPSGRTFQDRNRPSAEKMSLRIDVDTNFPECVVDAGKVTLGTQQRQEMDPRLREKQNEIILRAVCALLNSGGGIIKAEIENKGYNYERHGVGLDVPPIFRSHLDKMQKENHFLIFVKSWNTEAGVPLATLCSNLYHRERTSTDVMDSQEALAFLKCRTQTPTNINVSNSLGPQAAQGSVQYEGNINVSAAALFDRKRLQYLEKLNLPESTHVEFVMFSTDVSHCVKDRLPKCVSAFANTEGGYVFFGVHDETCQVIGCEKEKIDLTSLRASIDGCIKKLPVHHFCTQRPEIKYVLNFLEVHDKGALRGYVCAIKVEKFCCAVFAKVPSSWQVKDNRVRQLPTREWTAWMMEADPDLSRCPEMVLQLSLSSATPRSKPVCIHKNSECLKEQQKRYFPVFSDRVVYTPESLYKELFSQHKGLRDLINTEMRPFSQGILIFSQSWAVDLGLQEKQGVICDALLISQNNTPILYTIFSKWDAGCKGYSMIVAYSLKQKLVNKGGYTGRLCITPLVCVLNSDRKAQSVYSSYLQIYPESYNFMTPQHMEALLQSLVIVLLGFKSFLSEELGSEVLNLLTNKQYELLSKNLRKTRELFVHGLPGSGKTILALRIMEKIRNVFHCEPANILYICENQPLKKLVSFSKKNICQPVTRKTFMKNNFEHIQHIIIDDAQNFRTEDGDWYGKAKFITQTARDGPGVLWIFLDYFQTYHLSCSGLPPPSDQYPREEINRVVRNAGPIANYLQQVMQEARQNPPPNLPPGSLVMLYEPKWAQGVPGNLEIIEDLNLEEILIYVANKCRFLLRNGYSPKDIAVLFTKASEVEKYKDRLLTAMRKRKLSQLHEESDLLLQIGDASDVLTDHIVLDSVCRFSGLERNIVFGINPGVAPPAGAYNLLLCLASRAKRHLYILKASV

SEQ ID NO: 23502 - protein, 8 aa, Homo sapiens
LMITIKRN

SEQ ID NO: 23503 - protein, 169 aa, Homo sapiens
LSVLLRRQPTSLLGAMTTTTTFKGVDPNSRNSSRVLRPPGGGSNFSLGFDEPTEQPVRKNKMASNIFGTPEENQASWAKSAGAKSSGGREDLESSGLQRRNSSEASSGDFLDLKGEGDIHENVDTDLPGSLGQSEEKPVPAAPVPSPVAPAPVPSRRNPPGGKSSLVLG

SEQ ID NO: 23504 - protein, 27 aa, Homo sapiens
RCASLRSPSVLFCGKAFPSVPTRKATA

SEQ ID NO: 23505 - protein, 187 aa, Homo sapiens
LGSLARILQFLPGDCRGAASTVDYNCNMTLEELVACDNAAQKMQTVTAAVEELLVAAQRQDRLTVGVYESAKLMNVDPDSVVLCLLAIDEEEEDDIALQIHFTLIQSFCCDNDINIVRVSGMQRLAQLLGEPAETQGTTEARDLHCLLVTNPHTDAWKSHGLVEVASYCEESRGNNQWVPYISLQER

SEQ ID NO: 23506 - protein, 405 aa, Homo sapiens
LTGLLRTAAGWLLPARASPRERATRHPVRSPQRRARRSLQRGPERPRRDPPQTAWAARMCTKMEQPFYHDDSYTATGYGRAPGGLSLHDYKLLKPSLAVNLADPYRSLKAPGARGPGPEGGGGGSYFSGQGSDTGASLKLASSELERLIVPNSNGVITTTPTPPGQYFYPRGGGSGGGAGGAGGGVTEEQEGFADGFVKALDDLHKMNHVTPPNVSLGATGGPPAGPGGVYAGPEPPPVYTNLSSYSPASASSGGAGAAVGTGSSYPTTTISYLPHAPPFAGGHPAQLGLGRGASTFKEEPQTVPEARSRDATPPVSPINMEDQERIKVERKRLRNRLAATKCRKRKLERIARLEDKVKTLKAENAGLSSTAGLLREQVAQLKQKVMTHVSNGCQLLLGVKGHAF

SEQ ID NO: 23507 - protein, 456 aa, Homo sapiens
LVLKSRQLFLGRPVDRASAAETMSADGAEADGSTQVTVEEPVQQPSVVDRVASMPLISSTCDMVSAAYASTKESYPHIKTVCDAAEKGVRTLTAAAVSGAQPILSKLEPQIASASEYAHRGLDKLEENLPILQQPTEKVLADTKELVSSKVSGAQEMVSSAKDTVATQLSEAVDATRGAVQSGVDKTKSVVTGGVQSVMGSRLGQMVLSGVDTVLGKSEEWADNHLPLTDAELARIATSLDGFDVASVQQQRQEQSYFVRLGSLSERLRQHAYEHSLGKLRATKQRAQEALLQLSQVLSLMETVKQGVDQKLVEGQEKLHQMWLSWNQKQLQGPEKEPPKPEQVESRALTMFRDIAQQLQATCTSLGSSIQGLPTNVKDQVQQARRQVEDLQATFSSIHSFQDLSSSILAQSRERVASAREALDHMVEYVAQNTPVTWLVGPFAPGITEKAPEEKK

SEQ ID NO: 23508 - protein, 35 aa, Homo sapiens
LAHGAEQRSLSAQPGEFKHSSFQEPRNFSAVNSQL

SEQ ID NO: 23509 - protein, 28 aa, Homo sapiens
MPPVLKPTTTPVEEQPCHQNRAKNGSPK

SEQ ID NO: 23510 - protein, 17 aa, Homo sapiens
LPPFFMFFPQDLNCHVL

SEQ ID NO: 23511 - protein, 8 aa, Homo sapiens
VFQKMIKK

SEQ ID NO: 23512 - protein, 184 aa, Homo sapiens
VAGAARTPRSLPGRPAVCNMTLEEFSAGEQKTERMDKVGDALEEVLSKALSQRTITVGVYEAAKLLNVDPDNVVLCLLAADEDDDRDVALQIHFTLIQAFCCENDINILRVSNPGRLAELLLLETDAGPAASEGAEQPPDLHCVLVTNPHSSQWKDPALSQLICFCRESRYMDQWVPVINLPER

SEQ ID NO: 23513 - protein, 33 aa, Homo sapiens
MIMKALFSWSRLIHCVPDVLTSAISPNVGNSTA

SEQ ID NO: 23514 - protein, 265 aa, Homo sapiens
KMEAFLGSRSGLWAGGPAPGQFYRIPSTPDSFMDPASALYRGPITRTQNPMVTGTSVLGVKFEGGVVIAADMLGSYGSLARFRNISRIMRVNNSTMLGASGDYADFQYLKQVLGQMVIDEELLGDGHSYSPRAIHSWLTRAMYSRRSKMNPLWNTMVIGGYADGESFLGYVDMLGVAYEAPSLATGYGAYLAQPLLREVLEKQPVLSQTEARDLVERCMRVLYYRDARSYNRFQIATVTEKGVEIEGPLSTETNWDIAHMISGFE

SEQ ID NO: 23515 - protein, 322 aa, Homo sapiens
LAPSGNPAPSPGSERLAGERQRPQPRQRPAAAAESGGSPTRARAGSVRPFAQAAGGGAARTMAGDSEQTLQNHQQPNGGEPFLIGVSGGTASGKSSVCAKIVQLLGQNEVDYRQKQVVILSQDSFYRVLTSEQKAKALKGQFNFDHPDAFDNELILKTLKEITEGKTVQIPVYDFVSHSRKEETVTVYPADVVLFEGILAFYSQEVRDLFQMKLFVDTDADTRLSRRVLRDISERGRDLEQILSQYITFVKPAFEEFCLPTKKYADVIIPRGADNLVAINLIVQHIQDILNGGPSKRQTNGCLNGYTPSRKRQASESSSRPH

SEQ ID NO: 23516 - protein, 10 aa, Homo sapiens
ITVFKKTPWR

SEQ ID NO: 23517 - protein, 50 aa, Homo sapiens
LADPVCKNGISSSSDGSRWRISDDRPNFQHSQTSASSWEQTFNLVPIEPA

SEQ ID NO: 23518 - protein, 8 aa, Homo sapiens
LMTLFVHT

SEQ ID NO: 23519 - protein, 20 aa, Homo sapiens
VQISMSYLIKQHHSAITQGS

SEQ ID NO: 23520 - protein, 390 aa, Homo sapiens
LVRRAQRGRQPAGACALRETFPVKGSGGRGCPPLATALLRPRNLCAQPKLTSREVTDCSMTAKMETTFYDDALNASFLPSESGPYGYSNPKILKQSMTLNLADPVGSLKPHLRAKNSDLLTSPDVGLLKLASPELERLIIQSSNGHITTTPTPTQFLCPKNVTDEQEGFAEGFVRALAELHSQNTLPSVTSAAQPVNGAGMVAPAVASVAGGSGSGGFSASLHSEPPVYANLSNFNPGALSSGGGAPSYGAAGLAFPAQPQQQQQPPHHLPQQMPVQHPRLQALKEEPQTVPEMPGETPPLSPIDMESQERIKAERKRMRNRIAASKCRKRKLERIARLEEKVKTLKAQNSELASTANMLREQVAQLKQKVMNHVNSGCQLMLTQQLQTF

SEQ ID NO: 23521 - protein, 21 aa, Homo sapiens
LSSRSMLERMVITTLSPRQSS

SEQ ID NO: 23522 - protein, 24 aa, Homo sapiens
LWLFCWLEDRPGAATPPLGKAETL

SEQ ID NO: 23523 - protein, 60 aa, Homo sapiens
LRPGARSGLFALWMEWRCGPLWSANKALGWRGRLAAFLVVGPSEQSSWFWRWLRRLDCGV

SEQ ID NO: 23524 - protein, 1708 aa, Homo sapiens
LRREKNILEYLEWAKPFTSKVKQMRLHREDFEILKVIGRGAFGEVAVVKLKNADKVFAMKILNKWEMLKRAETACFREERDVLVNGDNKWITTLHYAFQDDNNLYLVMDYYVGGDLLTLLSKFEDRLPEDMARFYLAEMVIAIDSVHQLHYVHRDIKPDNILMDMNGHIRLADFGSCLKLMEDGTVQSSVAVGTPDYISPEILQAMEDGKGRYGPECDWWSLGVCMYEMLYGETPFYAESLVETYGKIMNHKERFQFPAQVTDVSENAKDLIRRLICSREHRLGQNGIEDFKKHPFFSGIDWDNIRNCEAPYIPEVSSPTDTSNFDVDDDCLKNSETMPPPTHTAFSGHHLPFVGFTYTSSCVLSDRSCLRVTAGPTSLDLDVNVQRTLDNNLATEAYERRIKRLEQEKLELSRKLQESTQTVQALQYSTVDGPLTASKDLEIKNLKEEIEKLRKQVTESSHLEQQLEEANAVRQELDDAFRQIKAYEKQIKTLQQEREDLNKELVQASERLKNQSKELKDAHCQRKLAMQEFMEINERLTELHTQKQKLARHVRDKEEEVDLVMQKVESLRQELRRTERAKKELEVHTEALAAEASKDRKLREQSEHYSKQLENELEGLKQKQISYSPGVCSIEHQQEITKLKTDLEKKSIFYEEELSKREGIHANEIKNLKKELHDSEGQQLALNKEIMILKDKLEKTRRESQSEREEFESEFKQQYEREKVLLTEENKKLTSELDKLTTLYENLSIHNQQLEEEVKDLADKKESVAHWEAQITEIIQWVSDEKDARGYLQALASKMTEELEALRNSSLGTRATDMPWKMRRFAKLDMSARLELQSALDAEIRAKQAIQEELNKVKASNIITECKLKDSEKKNLELLSEIEQLIKDTEELRSEKGIEHQDSQHSFLAFLNTPTDALDQFETDPVENTYVWNPSVKFHIQSRSTSPSTSSEAEPVKTVDSTPLSVHTPTLRKKGCPGSTGFPPKRKTHQFFVKSFTTPTKCHQCTSLMVGLIRQGCSCEVCGFSCHITCVNKAPTTCPVPPEQTKGPLGIDPQKGIGTAYEGHVRIPKPAGVKKGWQRALAIVCDFKLFLYDIAEGKASQPSVVISQVIDMRDEEFSVSSVLASDVIHASRKDIPCIFRVTASQLSASNNKCSILMLADTENEKNKWVGVLSELHKILKKNKFRDRSVYVPKEAYDSTLPLIKTTQAAAIIDHERIALGNEEGLFVVHVTKDEIIRVGDNKKIHQIELIPNDQLVAVISGRNRHVRLFPMSALDGRETDFYKLSETKGCQTVTSGKVRHGALTCLCVAMKRQVLCYELFQSKTRHRKFKEIQVPYNVQWMAIFSEQLCVGFQSGFLRYPLNGEGNPYSMLHSNDHTLSFIAHQPMDAICAVEISSKEYLLCFNSIGIYTDCQGRRSRQQELMWPANPSSCCYNAPYLSVYSENAVDIFDVNSMEWIQTLPLKKVRPLNNEGSLNLLGLETIRLIYFKNKMAEGDELVVPETSDNSRKQMVRNINNKRRYSFRVPEEERMQQRREMLRDPEMRNKLISNPTNFNHIAHMGPGDGIQILKDLPMNPRPQESRTVFSGSVSIPSITKSRPEPGRSMSASSGLSARSSAQNGSALKREFSGGSYSAKRQPMPSPSEGSLSSGGMDQGSDAPARDFDGEDSDSPRHSTASNSSNLSSPPSPASPRKTKSLSLESTDRGSWDP

SEQ ID NO: 23525 - protein, 16 aa, Homo sapiens
LLSCMLSEARRDPGES

SEQ ID NO: 23526 - protein, 22 aa, Homo sapiens
MSDSDSRTEKRKKKRPNGKATF

SEQ ID NO: 23527 - protein, 118 aa, Homo sapiens
LRRYTRAEYESEAEGVMAGQAFRKFLPLFDRVLVERSAAETVTKGGIMLPEKSQGKVLQATVVAVGSGSKGKGGEIQPVSVKVGDKVLLPEYGGTKVVLDDKDYFLFRDGDILGKYVD

SEQ ID NO: 23528 - protein, 516 aa, Homo sapiens
TPPQGLLPTSRPAAPATAGSRNMSTTLLSAFYDVDFLCKTEKSLANLNLNNMLDKKAVGTPVAAAPSSGFAPGFLRRHSASNLHALAHPAPSPGSCSPKFPGAANGSSCGSAAAGGPTSYGTLKEPSGGGGTALLNKENKFRDRSFSENGDRSQHLLHLQQQQKGGGGSQINSTRYKTELCRPFEESGTCKYGEKCQFAHGFHELRSLTRHPKYKTELCRTFHTIGFCPYGPRCHFIHNADERRPAPSGGASGDLRAFGTRDALHLGFPREPRPKLHHSLSFSGFPSGHHQPPGGLESPLLLDSPTSRTPPPPSCSSASSCSSSASSCSSASAASTPSGAPTCCASAAAAAAAALLYGTGGAEDLLAPGAPCAACSSASCANNAFAFGPELSSLITPLAIQTHNFAAVAAAAYYRSQQQQQQQGLAPPAQPPAPPSATLPAGAAAPPSPPFSFQLPRRLSDSPVFDAPPSPPDSLSDRDSYLSGSLSSGSLSGSESPSLDPGRRLPIFSRLSISDD

SEQ ID NO: 23529 - protein, 11 aa, Homo sapiens
KMAAAPLEERD

SEQ ID NO: 23530 - protein, 755 aa, Homo sapiens
ILRAEMSQWYELQQLDSKFLEQVHQLYDDSFPMEIRQYLAQWLEKQDWEHAANDVSFATIRFHDLLSQLDDQYSRFSLENNFLLQHNIRKSKRNLQDNFQEDPIQMSMIIYSCLKEERKILENAQRFNQAQSGNIQSTVMLDKQKELDSKVRNVKDKVMCIEHEIKSLEDLQDEYDFKCKTLQNREHETNGVAKSDQKQEQLLLKKMYLMLDNKRKEVVHKIIELLNVTELTQNALINDELVEWKRRQQSACIGGPPNACLDQLQNWFTIVAESLQQVRQQLKKLEELEQKYTYEHDPITKNKQVLWDRTFSLFQQLIQSSFVVERQPCMPTHPQRPLVLKTGVQFTVKLRLLVKLQELNYNLKVKVLFDKDVNERNTVKGFRKFNILGTHTKVMNMEESTNGSLAAEFRHLQLKEQKNAGTRTNEGPLIVTEELHSLSFETQLCQPGLVIDLETTSLPVVVISNVSQLPSGWASILWYNMLVAEPRNLSFFLTPPCARWAQLSEVLSWQFSSVTKRGLNVDQLNMLGEKLLGPNASPDGLIPWTRFCKENINDKNFPFWLWIESILELIKKHLLPLWNDGCIMGFISKERERALLKDQQPGTFLLRFSESSREGAITFTWVERSQNGGEPDFHAVEPYTKKELSAVTFPDIIRNYKVMAAENIPENPLKYLYPNIDKDHAFGKYYSRPKEAPEPMELDGPKGTGYIKTELISVSEVHPSRLQTTDNLLPMSPEEFDEVSRIVGSVEFDSMMNTV

SEQ ID NO: 23531 - protein, 14 aa, Homo sapiens
KMAACPCFATVPTL

SEQ ID NO: 23532 - protein, 28 aa, Homo sapiens
IRIIQYAVCRISMTTLKMNFLYSPDILI

SEQ ID NO: 23533 - protein, 27 aa, Homo sapiens
VSSPLPPRPDPLFCPKELALTASGSRS

SEQ ID NO: 23534 - protein, 57 aa, Homo sapiens
ISFPAPLYIGEVVLASAEVKKLKRFIAIIAVSCSVIESKKTVMEGWVKVMVPEASKS

SEQ ID NO: 23535 - protein, 11 aa, Homo sapiens
LKSMDSKMDFI

SEQ ID NO: 23536 - protein, 7 aa, Homo sapiens
VGLLLSL

SEQ ID NO: 23537 - protein, 171 aa, Homo sapiens
TEMCHRKPGTPGVGKTTLGKELASKSGLKYINVGDLAREEQLYDGYDEEYDCPILDEDRVVDELDNQMREGGVIVDYHGCDFFPERWFHIVFVLRTDTNVLYERLETRGYNEKKLTDNIQCEIFQVLYEEATASYKEEIVHQLPSNKPEELENNVDQILKWIEQWIKDHNS

SEQ ID NO: 23538 - protein, 32 aa, Homo sapiens
VLPLAECVESCSGVRYSVFDRGGLRGTRCSEL

SEQ ID NO: 23539 - protein, 226 aa, Homo sapiens
LTAAGPRPGLLCFTIYIMNPSMKQKQEEIKENIKNSSVPRRTLKMIQPSASGSLVGRENELSAGLSKRKHRNDHLTSTTSSPGVIVPESSENKNLGGVTQESFDLMIKENPSSQYWKEVAEKRRKALYEALKENEKLHKEIEQKDNEIARLKKENKELAEVAEHVQYMAELIERLNGEPLDNFESLDNQEFDSEEETVEDSLVEDSEIGTCAEGTVSSSTDAKPCI

SEQ ID NO: 23540 - protein, 115 aa, Homo sapiens
KTRSSRAGLQFPVGRVHRLLRKGNYAERVGAGAPVYLAAVLEYLTAEILELAGNAARDNKKTRIIPRHLQLAIRNDEELNKLLGKVTIAQGGVLPNIQAVLLPKKTESHHKAKGK

SEQ ID NO: 23541 - protein, 45 aa, Homo sapiens
TSWRILPTDTEPSSRPGPPLQSTSIRLEMAFVPAYDWSQRAVQTP

SEQ ID NO: 23542 - protein, 9 aa, Homo sapiens
LCCSHVYCV

SEQ ID NO: 23543 - protein, 1260 aa, Homo sapiens
IVDPPSKMEDGKPVWAPHPTDGFQMGNIVDIGPDSLTIEPLNQKGKTFLALINQVFPAEEDSKKDVEDNCSLMYLNEATLLHNIKVRYSKDRIYTYVANILIAVNPYFDIPKIYSSEAIKSYQGKSLGTRPPHVFAIADKAFRDMKVLKMSQSIIVSGESGAGKTENTKFVLRYLTESYGTGQDIDDRIVEANPLLEAFGNAKTVRNNNSSRFGKFVEIHFNEKSSVVGGFVSHYLLEKSRICVQGKEERNYHIFYRLCAGASEDIREKLHLSSPDNFRYLNRGCTRYFANKETDKQILQNRKSPEYLKAGSMKDPLLDDHGDFIRMCTAMKKIGLDDEEKLDLFRVVAGVLHLGNIDFEEAGSTSGGCNLKNKSAQSLEYCAELLGLDQDDLRVSLTTRVMLTTAGGTKGTVIKVPLKVEQANNARDALAKTVYSHLFDHVVNRVNQCFPFETSSYFIGVLDIAGFEYFEHNSFEQFCINYCNEKLQQFFNERILKEEQELYQKEGLGVNEVHYVDNQDCIDLIEAKLVGILDILDEENRLPQPSDQHFTSAVHQKHKDHFRLTIPRKSKLAVHRNIRDDEGFIIRHFAGAVCYETTQFVEKNNDALHMSLESLICESRDKFIRELFESSTNNNKDTKQKAGKLSFISVGNKFKTQLNLLLDKLRSTGASFIRCIKPNLKMTSHHFEGAQILSQLQCSGMVSVLDLMQGGYPSRASFHELYNMYKKYMPDKLARLDPRLFCKALFKALGLNENDYKFGLTKVFFRPGKFAEFDQIMKSDPDHLAELVKRVNHWLTCSRWKKVQWCSLSVIKLKNKIKYRAEACIKMQKTIRMWLCKRRHKPRIDGLVKVGTLKKRLDKFNEVVSVLKDGKPEMNKQIKNLEISIDTLMAKIKSTMMTQEQIQKEYDALVKSSEELLSALQKKKQQEEEAERLRRIQEEMEKERKRREEDEKRRRKEEEERRMKLEMEAKRKQEEEERKKREDDEKRIQAEVEAQLARQKEEESQQQAVLEQERRDRELALRIAQSEAELISDEAQADLALRRGPAVLATKAAAGTKKYDLSKWKYAELRDTINTSCDIELLAACREEFHRRLKVYHAWKSKNKKRNTETEQRAPKSVTDYAQQNPAAQIPARQREIEMNRQQRFFRIPFIRPADQYKDPQSKKKGWWYAHFDGPWIARQMELHPDKPPILLVAGKDDMEMCELNLEETGLTRKRGAEILPRQFEEIWERCGGIQYLQNAIESRQARPTYATAMLQSLLK

SEQ ID NO: 23544 - protein, 128 aa, Homo sapiens
IAMPEPSKSAPAPKKGSKKAITKAQKKDGKKRKRSRKESYSIYVYKVLKQVHPDTGISSKAMGIMNSFVNDIFERIAGEASRLAHYNKRSTITSREIQTAVRLLLPGELAKHAVSEGTKAVTKYTSSK

SEQ ID NO: 23545 - protein, 1208 aa, Homo sapiens
VALGMAMDQVNALCEQLVKAVTVMMDPNSTQRYRLEALKFCEEFKEKCPICVPCGLRLAEKTQVAIVRHFGLQILEHVVKFRWNGMSRLEKVYLKNSVMELIANGTLNILEEENHIKDALSRIVVEMIKREWPQHWPDMLIELDTLSKQGETQTELVMFILLRLAEDVVTFQTLPPQRRRDIQQTLTQNMERIFSFLLNTLQENVNKYQQVKTDTSQESKAQANCRVGVAALNTLAGYIDWVSMSHITAENCKLLEILCLLLNEQELQLGAAECLLIAVSRKGKLEDRKPLMVLFGDVAMHYILSAAQTADGGGLVEKHYVFLKRLCQVLCALGNQLCALLGADSDVETPSNFGKYLESFLAFTTHPSQFLRSSTQMTWGALFRHEILSRDPLLLAIIPKYLRASMTNLVKMGFPSKTDSPSCEYSRFDFDSDEDFNAFFNSSRAQQGEVMRLACRLDPKTSFQMAGEWLKYQLSTFLDAGSVNSCSAVGTGEGSLCSVFSPSFVQWEAMTLFLESVITQMFRTLNREEIPVNDGIELLQMVLNFDTKDPLILSCVLTNVSALFPFVTYRPEFLPQVFSKLFSSVTFETVEESKAPRTRAVRNVRRHACSSIIKMCRDYPQLVLPNFDMLYNHVKQLLSNELLLTQMEKCALMEALVLISNQFKNYERQKVFLEELMAPVASIWLSQDMHRVLSDVDAFIAYVGTDQKSCDPGLEDPCGLNRARMSFCVYSILGVVKRTCWPTDLEEAKAGGFVVGYTSSGNPIFRNPCTEQILKLLDNLLALIRTHNTLYAPEMLAKMAEPFTKALDMLDAEKSAILGLPQPLLELNDSPVFKTVLERMQRFFSTLYENCFHILGKAGPSMQQDFYTVEDLATQLLSSAFVNLNNIPDYRLRPMLRVFVKPLVLFCPPEHYEALVSPILGPLFTYLHMRLSQKWQVINQRSLLCGEDEAADENPESQEMLEEQLVRMLTREVMDLITVCCVSKKGADHSSAPPADGDDEEMMATEVTPSAMAELTDLGKCLMKHEDVCTALLITAFNSLAWKDTLSCQRTTSQLCWPLLKQVLSGTLLADAVTWLFTSVLKGLQMHGQHDGCMASLVHLAFQIYEALRPRYLEIRAVMEQIPEIQKDSLDQFDCKLLNPSLQKVADKRRKDQFKRLIAGCIGKPLGEQFRKEVHIKNLPSLFKKTKPMLETEVLDNDGGGLATIFEP

SEQ ID NO: 23546 - protein, 275 aa, Homo sapiens
TEGLEMADHMMAMNHGRFPDGTNGLHHHPAHRMGMGQFPSPHHHQQQQPQHAFNALMGEHIHYGAGNMNATSGIRHAMGPGTVNGGHPPSALAPAARFNNSQFMGPPVASQGGSLPASMQLQKLNNQYFNHHPYPHNHYMPDLHPAAGHQMNGTNQHFRDCNPKHSGGSSTPGGSGGSSTPGGSGSSSGGGAGSSNSGGGSGSGNMPASVAHVPAAMLPPNVIDTDFIDEEVLMSLVIEMGLDRIKELPELWLGQNEFDFMTDFVCKQQPSRVSC

SEQ ID NO: 23547 - protein, 27 aa, Homo sapiens
MRRAAREPPWPGRSCVDQASQECGHVF

SEQ ID NO: 23548 - protein, 35 aa, Homo sapiens
VTVSKWKSLLSQQLLCKMPRPGIVAEHPRPAEVPP

SEQ ID NO: 23549 - protein, 8 aa, Homo sapiens
VAAAVGAA

SEQ ID NO: 23550 - protein, 46 aa, Homo sapiens
VTGGGCGCHCTAPTATAAPDLGDHVLPLQKELPFVTRRGRRSTLGP

SEQ ID NO: 23551 - protein, 48 aa, Homo sapiens
RPAFGCISRGLPAPGICIWDRPPGLADQRGSSSNVCCGGCNSIPASSW

SEQ ID NO: 23552 - protein, 47 aa, Homo sapiens
LDTAGLFRGGAPAGICIWDRPPGLADQRGSSSNVCCGGCNSIPASSW

SEQ ID NO: 23553 - protein, 133 aa, Homo sapiens
LKEIIKILEKLNGNGRWKWLLHYRENKKLKEDERVDSTAHKKNIMLKSFQSANIIELLHYHQCDSRSSTKAEILKCLLNLQIQHIDARFAVLLTDKPTIPREVFENSGILVTDVNNFIENIEKIAAPFRSSYW

SEQ ID NO: 23554 - protein, 12 aa, Homo sapiens
IEKSNKEMNYLP

SEQ ID NO: 23555 - protein, 71 aa, Homo sapiens
MATSAHSWPQAGWSGAAGRLLDRRGVTAAEEEVLRDTRGWTRQGNTRPTTAGDKIAQPHPAVQRLPACAPS

SEQ ID NO: 23556 - protein, 35 aa, Homo sapiens
LARRAIPQVSSVLQPKCWIPRDWKGKSLKITSSGV

SEQ ID NO: 23557 - protein, 1379 aa, Homo sapiens
RTMDALNRNQIGPGCQTQTMVQKGPLDLIETGKGLKVQTDKPHLVSLGSGRLSTAITLLPLEEGRTVIGSAARDISLQGPGLAPEHCYIENLRGTLTLYPCGNACTIDGLPVRQPTRLTQGCMLCLGQSTFLRFNHPAEAKWMKSMIPAGGRAPGPPYSPVPAESESLVNGNHTPQTATRGPSACASHSSLVSSIEKDLQEIMDSLVLEEPGAAGKKPAATSPLSPMANGGRYLLSPPTSPGAMSVGSSYENTSPAFSPLSSPASSGSCASHSPSGQEPGPSVPPLVPARSSSYHLALQPPQSRPSGARSESPRLSRKGGHERPPSPGLRGLLTDSPAATVLAEARRATESPRLGGQLPVVAISLSEYPASGALSQPTSIPGSPKFQPPVPAPRNKIGTLQDRPPSPFREPPGSERVLTTSPSRQLVGRTFSDGLATRTLQPPESPRLGRRGLDSMRELPPLSPSLSRRALSPLPTRTTPDPKLNREVAESPRPRRWAAHGASPEDFSLTLGARGRRTRSPSPTLGESLAPHKGSFSGRLSPAYSLGSLTGASPCQSPCVQRKLSSGDLRVPVTRERKNSITEISDNEDDLLEYHRRQRQERLREQEMERLERQRLETILNLCAEYSRADGGPEAGELPSIGEATAALALAGRRPSRGLAGASGRSSEEPGVATQRLWESMERSDEENLKEECSSTESTQQEHEDAPSTKLQGEVLALEEERAQVLGHVEQLKVRVKELEQQLQESAREAEMERALLQGEREAERALLQKEQKAVDQLQEKLVALETGIQKERDKEAEALETETKLFEDLEFQQLERESRVEEERELAGQGLLRSKAELLRSIAKRKERLAILDSQAGQIRAQAVQESERLARDKNASLQLLQKEKEKLTVLERRYHSLTGGRPFPKTTSTLKEMEKLLLPAVDLEQWYQELMAGLGTGPAAASPHSSPPPLPAKASRQLQVYRSKMDGEATSPLPRTRSGPLPSSSGSSSSSSQLSVATLGRSPSPKSALLTQNGTGSLPRNLAATLQDIETKRQLALQQKGQQVIEEQRRRLAELKQKAAAEAQCQWDALHGAAPFPAGPSGFPPLMHHSILHHLPAGRERGEEGEHAYDTLSLESSDSMETSISTGGNSACSPDNMSSASGLDMGKIEEMEKMLKEAHAEKNRLMESREREMELRRQALEEERRRREQVERRLQSESARRQQLVEKEVKMREKQFSQARPLTRYLPIRKEDFDLKTHIESSGHGVDTCLHVVLSSKVCRGYLVKMGGKIKSWKKRWFVFDRLKRTLSYYVDKHETKLKGVIYFQAIEEVYYDHLRSAAKKRFFRFTMVTESPNPALTFCVKTHDRLYYMVAPSAEAMRIWMDVIVTGAEGYTQFMN

SEQ ID NO: 23558 - protein, 74 aa, Homo sapiens
MMADMYNRMTSACHRKCVPPHYKEAELSKGESVCLDRCVSKYLDIHERMGKKLTELSMQDEELMKRVQQSSGPA

SEQ ID NO: 23559 - protein, 1517 aa, Homo sapiens
LAGPWARTGAVAPLCVGAMRILANKTRLPHPRRREAPGSPPLSPRGHCPPAPAKPMHPENKLTNHGKTGNGGAQSQHQNVNQGPTCNVGSKGVGAGNHGAKANQISPSNSSLKNPQAGVPPFSSLKGKVKRDRSVSVDSGEQREAGTPSLDSEAKEVAPRSKRRCVLERKQPYSGDEWCSGPDSEEDDKPIGATHNCNVADPAMAAPQLGPGQTTQLPLSESSVPGAPHGPPPGLRPDAPGGGGGGGGVPGKPPSQFVYVFTTHLANTAAEAVLQGRADSILAYHQQNVPRAKLDQAPKVPPTPEPLPLSTPSAGTPQSQPPPLPPPPPPAPGSAPPALPPEGPPEDSSQDLAPNSVGAASTGGGTGGTHPNTPTATTANNPLPPGGDPSSAPGPALLGEAAAPGNGQRSLVGSEGLSKEQLEHRERSLQTLRDIERLLLRSGETEPFLKGPPGGAGEGGPPAQAPPPPQQPPTAPPSGLKKYEEPLQSMISQTQSLGGPPLEHEVPGHPPGGDMGQQMNMMIQRLGQDSLTPEQVAWRKLQEEYYEEKRRKEEQIGLHGSRPLQDMMGMGGMMVRGPPPPYHSKPGDQWPPGMGAQLRGPMDVQDPMQLRGGPPFPGPRFPGNQIQRVPGFGGMQSMPMEVPMNAMQRPVRPGMGWTEDLPPMGGPSNFAQNTMPYPGGQGEAERFMTPRVREELLRHQLLEKRSMGMQRPLGMAGSGMGQSMEMERMMQAHRQMDPAMFPGQMAGGEGLAGTPMGMEFGGGRGLLSPPMGQSGLREVDPPMGPGNLNMNMNVNMNMNMNLNVQMTPQQQMLMSQKMRGPGDLMGPQGLSPEEMARVRAQNSSGVMGGPQKMLMPSQFPNQGQQGFSGGQGPYQAMSQDMGNTQDMFSPDQSSMPMSNVGTTRLSHMPLPPASNPPGTVHSAPNRGLGRRPSDLTISINQMGSPGMGHLKSPTLSQVHSPLVTSPSANLKSPQTPSQMVPLPSANPPGPLKSPQVLGSSLSVRSPTGSPSRLKSPSMAVPSPGWVASPKTAMPSPGVSQNKQPPLNMNSSTTLSNMEQGTLPPSGPRSSSSAPPANPPSGLMNPSLPFTSSPDPTPSQNPLSLMMTQMSKYAMPSSTPLYHNAIKTIATSDDELLPDRPLLPPPPPPQGSGPGISNSQPSQMHLNSAAAQSPMGMNLPGQQPLSHEPPPAMLPSPTPLGSNIPLHPNAQGTGGPPQNSMMMAPGGPDSLNAPCGPVPSSSQMMPFPPRLQQPHGAMAPTGGGGGGPGLQQHYPSGMALPPEDLPNQPPGPMPPQQHLMGKAMAGRMGDAYPPGVLPGVASVLNDPELSEVIRPTPTGIPEFDLSRIIPSEKPSSTLQYFPKSENQPPKAQPPNLHLMNLQNMMAEQTPSRPPNLPGQQGVQRGLNMSMCHPGQMSLLGRTGVPPQQGMVPHGLHQGVMSPPQGLMTQQNFMLMKQRGVGGEVYSQPPHMLSPQGSLMGPPPQQNLMVSHPLRQRSVSLDSQMGYLPAPGGMANLPF

SEQ ID NO: 23560 - protein, 21 aa, Homo sapiens
VQIPERVAAVRSWSLPMQPGF

SEQ ID NO: 23561 - protein, 16 aa, Homo sapiens
VPRRNFLLEKMKKQYL

SEQ ID NO: 23562 - protein, 666 aa, Homo sapiens
LQSTSEAESEASMSEASSEDLVPPLEAGAAPYREEEEAAKKKKEKKKKSKGLANVFCVFTKGKKKKGQPSSAEPEDAAGSRQGLDGPPPTVEELKAALERGQLEAARPLLALERELAAAAAAGGVSEEELVRRQSKVEALYELLRDQVLGVLRRPLEAPPERLRQALAVVAEQEREDRQAAAAGPGTSGLAATRPRRWLQLWRRGVAEAAEERMGQRPAAGAEVPESVFLHLGRTMKEDLEAVVERLKPLFPAEFGVVAAYAESYHQHFAAHLAAVAQFELCERDTYMLLLWVQNLYPNDIINSPKLVGELQGMGLGSLLPPRQIRLLEATFLSSEAANVRELMDRALELEARRWAEDVPPQRLDGHCHSELAIDIIQITSQAQAKAESITLDLGSQIKRVLLVELPAFLRSYQRAFNEFLERGKQLTNYRANVIANINNCLSFRMSMEQNWQVPQDTLSLLLGPLGELKSHGFDTLLQNLHEDLKPLFKRFTHTRWAAPVETLENIIATVDTRLPEFSELQGCFREELMEALHLHLVKEYIIQLSKGRLVLKTAEQQQQLAGYILANADTIQHFCTQHGSPATWLQPALPTLAEIIRLQDPSAIKIEVATYATCYPDFSKGHLSAILAIKGNLSNSEVKRIRSILDVSMGAQEPSRPLFSLIKVG

SEQ ID NO: 23563 - protein, 42 aa, Homo sapiens
IPGLAKSPGIGRTPMRWATAWPSECIYSIRTGSLSLHIGLWD

SEQ ID NO: 23564 - protein, 99 aa, Homo sapiens
LAILESKGLDPALGSETLASRQESTTDHMDSMLLLETLQEELKLFNETAKKQMEELQALKVKLEMKEERVRFLEQQTLCNNQVNDLTTALKEMEQLLEM

SEQ ID NO: 23565 - protein, 226 aa, Homo sapiens
VPGTMKQESAAPNTPPTSQSPTPSAQFPRNDGDPQALWIFGYGSLVWRPDFAYSDSRVGFVRGYSRRFWQGDTFHRGSDKMPGRVVTLLEDHEGCTWGVAYQVQGEQVSKALKYLNVREAVLGGYDTKEVTFYPQDAPDQPLKALAYVATPQNPGYLGPAPEEAIATQILACRGFSGHNLEYLLRLADFMQLCGPQAQDEHLAAIVDAVGTMLPCFCPTEQALALV

SEQ ID NO: 23566 - protein, 35 aa, Homo sapiens
LERYFIALNRTVFQENVKVKWKSSGISLPPVDKKR

SEQ ID NO: 23567 - protein, 27 aa, Homo sapiens
VDLLWWSWMRPHERGAPGGLQQQRLRG

SEQ ID NO: 23568 - protein, 10 aa, Homo sapiens
LLLSSSRGPS

SEQ ID NO: 23569 - protein, 123 aa, Homo sapiens
KLMVQIVISSARAGGLAEWVLMELQGEIEARYSTGLAGNLLGDLHYTTEGIPVLIVGHHILYGKIIHLEKPFAVLVKHTPGDQDCDELGRETGTRYLVTALIKDKILFKTRPKPIITSVPKKV

SEQ ID NO: 23570 - protein, 31 aa, Homo sapiens
LGSLRGGTMASEKPLAAVTCTAPVNIAVIKY

SEQ ID NO: 23571 - protein, 161 aa, Homo sapiens
LESKPLKMADDLDFETGDAGASATFPMQCSALRKNGFVVLKGRPCKIVEMSTSKTGKHGHAKVHLVGIDIFTGKKYEDICPSTHNMDVPNIKRNDFQLIGIQDGYLSLLQDSGEVREDLRLPEGDLGKEIEQKYDCGEEILITVLSAMTEEAAVAIKAMAK

SEQ ID NO: 23572 - protein, 43 aa, Homo sapiens
IPVVMEGHICQSLESAKAGTRFPGPQWGCANPRELGSAVRSDN

SEQ ID NO: 23573 - protein, 50 aa, Homo sapiens
IPVVMEGHICQSLESAKAGTRFPGPQWGCCKFVKNQHHVWQLSIGARSLP

SEQ ID NO: 23574 - protein, 41 aa, Homo sapiens
RTRAQSAQTTSYTGYAHPNRINERPQCSCSRYSCMDCRQNL

SEQ ID NO: 23575 - protein, 761 aa, Homo sapiens
VRKELSRVDQRHRASQLRKQKKEAVLAEKRQLGGKDGPPHQVLVVPLHSRISLPEAMQLLQDRDTGTVHLNELGNTQNFMLLCPRLKHRWFFTSARPGDLHVVLDMAKVADTILFLLDPLEGWDSTGDYCLSCLFAQGLPTYTLAVQGISGLPLKKQIDTRKKLSKAVEKRFPHDKLLLLDTQQEAGMLLRQLANQKQQHLAFRDRRAYLFAHAVDFVPSEENNLVGTLKISGYVRGQTLNVNRLLHIVGYGDFQMKQIDAPGDPFPLNPRGIKPQKDPDMAMEICATDAVDDMEEGLKVLMKADPGRQESLQAEVIPDPMEGEQTWPTEEELSEAKDFLKESSKVVKKVPKGTSSYQAEWILDGGSQSGGEGDEYEYDDMEHEDFMEEESQDESSEEEEEYETMTIGESVHDDLYDKKVDEEAEAKMLEKYKQERLEEMFPDEVDTPRDVAARIRFQKYRGLKSFRTSPWDPKENLPQDYARIFQFQNFTNTRKSIFKEVEEKEVEGAEVGWYVTLHVSEVPVSVVECFRQGTPLIAFSLLPHEQKMSVLNMVVRRDPGNTEPVKAKEELIFHCGFRRFRASPLFSQHTAADKHKLQRFLTADMALVATVYAPITFPPASVLLFKQKSNGMHSLIATGHLMSVDPDRMVIKRVVLSGHPFKIFTKMAVVRYMFFNREDVLWFKPVELRTKWGRRGHIKEPLGTHGHMKCSFDGKLKSQDTVLMNLYKRVFPKWTYDPYVPEPVPWLKSEISSTVPQGGME

SEQ ID NO: 23576 - protein, 36 aa, Homo sapiens
RFCHYRTSSKGVCRLVAPDCIQCWQHCMILQYICKK

SEQ ID NO: 23577 - protein, 41 aa, Homo sapiens
LPCARLGGKACSRVRAFRHRHVGRWCDSWPRREQRLPHLRG

SEQ ID NO: 23578 - protein, 196 aa, Homo sapiens
LGLELLMEKVPGEMEIERRERSEELSEAERKAVQAMWARLYANCEDVGVAILVRFFVNFPSAKQYFSQFKHMEDPLEMERSPQLRKHACRVMGALNTVVENLHDPDKVSSVLALVGKAHALKHKVEPVYFKILSGVILEVVAEEFASDFPPETQRAWAKLRGLIYSHVTAAYKEVGWVQQVPNATTPPATLPSSGP

SEQ ID NO: 23579 - protein, 33 aa, Homo sapiens
LGPVTVASGWASKAGRSPATPEASRPGPLDLSL

SEQ ID NO: 23580 - protein, 179 aa, Homo sapiens
RPKQLPDKWQHDLFDSGFGGGAGVETGGKLLVSNLDFGVSDADIQELFAEFGTLKKAAVHYDRSGRSLGTADVHFERKADALKAMKQYNGVPLDGRPMNIQLVTSQIDAQRRPAQSVNRGGMTRNRGAGGFGGGGGTRRGTRGGARGRGRGAGRNSKQQLSAEELDAQLDAYNARMDTS

SEQ ID NO: 23581 - protein, 28 aa, Homo sapiens
LLLLLSPAPAAPTRRPTSSWCAEVMFAP

SEQ ID NO: 23582 - protein, 433 aa, Homo sapiens
KMAAPMEVAVCTDSAAPMWSCIVWELHSGANLLTYRGGQAGPRGLALLNGEYLLAAQLGKNYISAWELQRKDQLQQKIMCPGPVTCLTASPNGLYVLAGVAESIHLWEVSTGNLLVILSRHYQDVSCLQFTGDSSHFISGGKDCLVLVWSLCSVLQADPSRIPAPRHVWSHHALPITDLHCGFGGPLARVATSSLDQTVKLWEVSSGELLLSVLFDVSIMAVTMDLAEHHMFCGGSEGSIFQVDLFTWPGQRERSFHPEQDAGKVFKGHRNQVTCLSVSTDGSVLLSGSHDETVRLWDVQSKQCIRTVALKGPVTNAAILLAPVSMLSSDFRPSLPLPHFNKHLLGAEHGDEPRHGGLTLRLGLHQQGSEPSYLDRTEQLQAVLCSTMEKSVLGGQDQLRVRVTELEDEVRNLRKINRDLFDFSTRFITRPAK

SEQ ID NO: 23583 - protein, 58 aa, Homo sapiens
RLRMRSQHCPCPGPRPACPSWALSLRTWRTCTAATRSCSKSWSSWRCRRNTSKMSKRT

SEQ ID NO: 23584 - protein, 16 aa, Homo sapiens
LIPVLRTPRASPWLTS

SEQ ID NO: 23585 - protein, 26 aa, Homo sapiens
ISSKGSLSSTTKSLLSPATSEGPLAK

SEQ ID NO: 23586 - protein, 13 aa, Homo sapiens
LAVSPVDLNLPLD

SEQ ID NO: 23587 - protein, 19 aa, Homo sapiens
MVMKTTWPKTAGVTSGERI

SEQ ID NO: 23588 - protein, 103 aa, Homo sapiens
IVDCGFEHPSEVQHECIPQAILGMDVLCQAKSGMGKTAVFVLATLQQIEPVNGQVTVLVMCHTRELAFQISKEYERFSKYMPSVKVSPSGQTGPGATWFLQLC

SEQ ID NO: 23589 - protein, 69 aa, Homo sapiens
TLHGLQQYYVKLKDSEKNRKLFDLLDVLEFNQVIIFVKSVQRCMALAQLLVEQNFPAIAIHRGMAQEER

SEQ ID NO: 23590 - protein, 25 aa, Homo sapiens
TGRDASHPSGCSCGFPVQEEAVGVG

SEQ ID NO: 23591 - protein, 10 aa, Homo sapiens
VPSTSWTRST

SEQ ID NO: 23592 - protein, 41 aa, Homo sapiens
MSYKTLMNHDGYTDIKYRQLSRWATDASSNRVKDRTRSKLL

SEQ ID NO: 23593 - protein, 165 aa, Homo sapiens
VTAIGIGDMFHEKHESENLYSIACDKPQQVRNMTLFSDLVAEKFIDDMEDVLCPDPQIVCPDLPCQTDAPWPGGEPPVTFLRTEEGPDATFPRTIPLIQQLLNATELTQDPAAYSQLVAVLVYTAERAKFATGVERQDWMELFIDTFKLVHRDIVGDPETALALC

SEQ ID NO: 23594 - protein, 49 aa, Homo sapiens
LFVPQESDTLFYHAPPLSAITFKRQFMCKLCHRTFKTAFSLWSHEQTHN

SEQ ID NO: 23595 - protein, 13 aa, Homo sapiens
MVALRPVQQLQGG

SEQ ID NO: 23596 - protein, 151 aa, Homo sapiens
IICGRVPMSLLLPPLALLLLLAALVAPATAATAYRPDWNRLSGLTRARVETCGGQLNRLKEVKAFVTQDIPFYHNLVMKHLPGADPELVLLGRRYEELERIPLSEMTREEINALVQELGFYRKAAPDAQVPPEYVWAPAKPPEETSDHADL

SEQ ID NO: 23597 - protein, 190 aa, Homo sapiens
TGRSKPLPGARGPSWPPSPRVPMEPPNLYPVKLYVYDLSKGLARRLSPIMLGKQLEGIWHTSIVVHKDEFFFGSGGISSCPPGGTLLGPPDSVVDVGSTEVTEEIFLEYLSSLGESLFRGEAYNLFEHNCNTFSNEVAQFLTGRKIPSYITDLPSEVLSTPFGQALRPLLDSIQIQPPGGSSVGRPNGQS

SEQ ID NO: 23598 - protein, 15 aa, Homo sapiens
LSSPTSTPSATTAPA

SEQ ID NO: 23599 - protein, 178 aa, Homo sapiens
MIKEAFAGDDVIRDFLKEKREAVEASKPKDVDLTLPGWGEWGGVGLKPSAKKRRRFLIKAPEGPPRKDKNLPNVIINEKRNIHAAAHQVRVLPYPFTHHWQFERTIQTPIGSTWNTQRAFQKLTTPKVVTKPGHIINPIKAEDVGYRSSSRSDLSVIQRNPKRITTRHKKQLKKCSVD

SEQ ID NO: 23600 - protein, 118 aa, Homo sapiens
MGARNFVLVLSPGALDKCMQDHDCKDWVHKEIVTALSCGKNIVPIIDGFEWPEPQVLPEDMQAVLTFNGIKWSHEYQEATIEKIIRFLQGRSSRDSSAGSDTSLEAQVLTGARARAWI

SEQ ID NO: 23601 - protein, 61 aa, Homo sapiens
MFIFFQVTEYLYANKMAFRYPEPEDKAKYVKERTWRSEYDSLLPDVYEWPESASSPPVITE

SEQ ID NO: 23602 - protein, 24 aa, Homo sapiens
MRRRLSRVFSSCHRFTAKLTGAKT

SEQ ID NO: 23603 - protein, 17 aa, Homo sapiens
MAYKGLVWSQDVTGSPA

SEQ ID NO: 23604 - protein, 45 aa, Homo sapiens
MRCRLSVPPLCKLNLMTCSFLKTAVEEVLGVFIEPNGYHRTRRWL

SEQ ID NO: 23605 - protein, 83 aa, Homo sapiens [sequence omitted]

SEQ ID NO: 23606 - protein, 34 aa, Homo sapiens
MAVGGAGGSRVSSGRDLNCVPEIADTLGAVAKQG

SEQ ID NO: 23607 - protein, 37 aa, Homo sapiens
MAAMAVGGAGGSRVSSGRDLNCVPEIADTLGAVAKQG

SEQ ID NO: 23608 - protein, 513 aa, Homo sapiens
MGLSGSDNSCDPTPPPGPLAMALFGALFLALLAGAHAEFPGCKIRVTSKALELVKQEGLRFLEQELETITIPDLRGKEGHFYYNISEVKVTELQLTSSELDFQPQQELMLQITNASLGLRFRRQLLYWFFYDGGYINASAEGVSIRTGLELSRDPAGRMKVSNVSCQASVSRMHAAFGGTFKKVYDFLSTFITSGMRFLLNQQICPVLYHAGTVLLNSLLDTVPVRSSVDELVGIDYSLMKDPVASTSNLDMDFRGAFFPLTERNWSLPNRAVEPQLQEEERMVYVAFSEFFFDSAMESYFRAGALQLLLVGDKVPHDLDMLLRATYFGSIVLLSPAVIDSPLKLELRVLAPPRCTIKPSGTTISVTASVTIALVPPDQPEVQLSSMTMDARLSAKMALRGKALRTQLDLRRFRIYSNHSALESLALIPLQAPLKTMLQIGVMPMLNERTWRGVQIPLPEGINFVHEVVTNHAGFLTIGADLHFAKGLREVIEKNRPADVRASTAPTPSTAAV

SEQ ID NO: 23609 - protein, 10 aa, Homo sapiens
MRRLIKEEAS

SEQ ID NO: 23610 - protein, 43 aa, Homo sapiens
MLRNVGPSLSRVASLSVGCGTTPGKRRGRNLILIGGGRFEGLL

SEQ ID NO: 23611 - protein, 81 aa, Homo sapiens
MVPSLASQGPRSTRRYCLMCGYCLGGCPWPSGMQPQPRCVSSLWTSSRPTSTSMRYTMRRRSGGPSRRHPRIRATRRRRRS

SEQ ID NO: 23612 - protein, 9 aa, Homo sapiens
MPVLKWESC

SEQ ID NO: 23613 - protein, 32 aa, Homo sapiens
MAGTVVLDDVELREAQRDYLDFLDDEASEQCL

SEQ ID NO: 23614 - protein, 54 aa, Homo sapiens
MERDTAASPHDPSCMTPKPPPDSASDSMQNLGSGDLPQPREEASSSGDRLRTGV

SEQ ID NO: 23615 - protein, 53 aa, Homo sapiens
MQAELLSSQRMCNWPGGSGALRRDSAELLHPVFLSVFPAQPGGMIPGTLQSHD

SEQ ID NO: 23616 - protein, 22 aa, Homo sapiens
MPSAARGCGVVRSRCAIYQQDC

SEQ ID NO: 23617 - protein, 47 aa, Homo sapiens
MRLWAVPPPSMLPLFKMKRKPRKGKTTRTEMCLAMSIGSNQWKRSNT

SEQ ID NO: 23618 - protein, 59 aa, Homo sapiens [sequence omitted]

SEQ ID NO: 23619 - protein, 38 aa, Homo sapiens
MVPRVFIGKDCIGGCSDLVSMQQIGELLTRLKQIGALQ

SEQ ID NO: 23620 - protein, 43 aa, Homo sapiens
MQAFWLPTLQQNNCTNSLVPIPPTESPGATVFFALHCRRGTKC

SEQ ID NO: 23621 - protein, 44 aa, Homo sapiens [sequence omitted]

SEQ ID NO: 23622 - protein, 47 aa, Homo sapiens [sequence omitted]

SEQ ID NO: 23623 - protein, 28 aa, Homo sapiens
MGLVHPEDHKLNKYHDWLWENHEKLSLS

SEQ ID NO: 23624 - protein, 47 aa, Homo sapiens
MEWRCGPLWSANKALGWRGRLAAFLVVGPSEQSSWFWRWLRRLDCGV

SEQ ID NO: 23625 - protein, 65 aa, Homo sapiens
MIVQKAAIKGAWEAGWRREQKKPNSADLGTVRAASRNCGQRLCVLAGRACSFLPWQPRAMAIIAL

SEQ ID NO: 23626 - protein, 96 aa, Homo sapiens
MVPASPLGGRKLQPLPLPRRAFRVLSPSGPPRAARAPAAAAQCPLPAAVDGMMVRGRHRGLGQLSRDGRRGGGSGRGSGGGSGLPSGMPVPPGRDG

SEQ ID NO: 23627 - protein, 20 aa, Homo sapiens
MKKRRRRERGGGGGGAVKLR

SEQ ID NO: 23628 - protein, 43 aa, Homo sapiens
MCGILGGSAADLAKWTGLLRNSFSGSSTAEPPPQEVELRLCRW

SEQ ID NO: 23629 - protein, 37 aa, Homo sapiens
MIRLWVFLNNYQAAEDHPRMVILRLLRYIVRLVWRMH

SEQ ID NO: 23630 - protein, 88 aa, Homo sapiens
MALHVPKAPGFAQMLKEGAKHFSGLEEAVYRNIQACKELAQTTRTAYGPNGTASCCKNDCNGFSYARARSWRWHKLCSGICWSSPGIS

SEQ ID NO: 23631 - protein, 35 aa, Homo sapiens
MRQGRFPIRAPTCPQSLERDSNPASMSRSLQPPSS

SEQ ID NO: 23632 - protein, 34 aa, Homo sapiens
MAVRRAGTWRALWDWRCAGRRWWCGAAADSWPPP

SEQ ID NO: 23633 - protein, 226 aa, Homo sapiens
MGFPRGRAEKALALTGNQGIEAAMDWMLELVAQKQREREEREEREALERERQRRRQGQELSAARQRLQEDEMRRAAEERRREKAEELAARQRVREKIERDKAERAKKYGGSVGSQPPPVAPEPGPVPSSPSQEPPTKREYDQCRIQVRLPDGTSLTQTFRAREQLAAVRLYVELHRGEELGGGQDPVQLLSGFPRRAFSEADMERPLQELGLVPSAVLIVAKKCPS

SEQ ID NO: 23634 - protein, 37 aa, Homo sapiens
MATPVGVEHGEQSQAFSDDEAFLCLASAETVKSRAPG

SEQ ID NO: 23635 - protein, 19 aa, Homo sapiens
MPALFYREPWRSWDRGHID

SEQ ID NO: 23636 - protein, 20 aa, Homo sapiens
MWAVPKRWMRLLLSSSRGPS

SEQ ID NO: 23637 - protein, 27 aa, Homo sapiens
MMEQRSRDPGMVRSPQNQYPAELMRRL

SEQ ID NO: 23638 - protein, 444 aa, Homo sapiens
MDLKLGDKRMVFDPWLIGPAFARGWWLLHEPPSDWLERLCQADLIYISHLHSDHLSYPTLKKLAGRRPDIPIYVGNTERPVFWNLNQSGVQLTNINVVPFGIWQQVDKNLRFMILMDGVHPEMDTCIIVEYKGHKILNIVDCTRPNGGRLPMKVALMMSDFAGGASGFPMTFSGGKFTEEWKAQFIKTERKKLLNYKARLVKNLQPRIYCPFAGYFVESHPSDKYIKETNTKNDPNELNNLIKKNSDVITWTPRPGATLDLGRMLKDRTDSKGIIEPPEGTKIYKDSWDFEPYLEILNAALGDEIFLHSSWIKEYFTWAGFKDYNLVVRMIETDEDFNPFPGGYDYLVDFLDLSFPKERPQREHPYEEIHSRVDVIRHVVKNGLLWDELYIGFQTRLQRDPDIYHHLFWNHFQIKLPLTPPNWKSFLMCCEQNGPVILQECKTT

SEQ ID NO: 23639 - protein, 459 aa, Homo sapiens
MDLKLGDKRMVFDPWLIGPAFARGWWLLHEPPSDWLERLCQADLIYISHLHSDHLSYPTLKKLAGRRPDIPIYVGNTERPVFWNLNQSGVQLTNINVVPFGIWQQVDKNLRFMILMDGVHPEMDTCIIVEYKGHKILNIVDCTRPNGGRLPMKVALMMSDFAGGASGFPMTFSGGKFTEEWKAQFIKTERKKLLNYKARLVKNLQPRIYCPFAGYFVESHPSDKYIKETNTKNDPNELNNLIKKNSDVITWTPRPGATLDLGRMLKDRTDSKGIIEPPEGTKIYKDSWDFEPYLEILNAALGDEIFLHSSWIKEYFTWAGFKDYNLVVRMIETDEDFNPFPGGYDYLVDFLDLSFPKERPQREHPYEEIHSRVDVIRHVVKNGLLWDELYIGFQTRLQRDPDIYHHLFWNHFQIKLPLTPPNWKSFLMCCEQNGPVILQFSTERTNEPNRNKFSVENKA

SEQ ID NO: 23640 - protein, 95 aa, Homo sapiens
MSNRNDMSNCCSFKIPRQRNRQTMGSIEQTTEILLCLSPVEVASLKEGINFFRNKSTGKDYVLYKNKSRLRACKNMCKHQGGLFIKDIEDLAGSF

SEQ ID NO: 23641 - protein, 80 aa, Homo sapiens
MVVAETSQGSWSAPTSPSTSCPPPNTTTTLAPLPHDRLDPPACQPVSVLHHWHMDCVCHGCDEPPCMPCGELVLQRVLPS

SEQ ID NO: 23642 - protein, 14 aa, Homo sapiens
MCEGRERERRAPQR

SEQ ID NO: 23643 - protein, 39 aa, Homo sapiens
MEGHICQSLESAKAGTRFPGPQWGCANPRELDCVPTAEC

SEQ ID NO: 23644 - protein, 49 aa, Homo sapiens
MEGHICQSLESAKAGTRFPGPQWGCANPRELGKLGSACSLGYPEGGVRR

SEQ ID NO: 23645 - protein, 19 aa, Homo sapiens
MTLRGWSFQVLPERNVPSL

SEQ ID NO: 23646 - protein, 1317 aa, Homo sapiens
MQLFFSCEGKWYHRRQAVKELHSTLIRLLNELLPWEPKLMKAFQRNRSRLKKDYDDFRRQPDHDTFNRELWTTDEGEGDLGKDSPKGEISKSIDSTEPLDILEKDHFDSDDMKLSEIDFPMARSKLLKKELPSKDLPKTLLKTLKRQSKQTDYVDDSTKELSPRKKAKLSTNETTVENLESDVQIDCFSESKHTEPSFPESFASLDSVPVSTLQKGTKPIQALLAKNIGNKVTLTNQLPPSTGRNALAVEKPVLSPPEASPIKPALTCHTNTKGPLQMVYKMPCGQWLPIDLQNSSVKIQVQPMVDPKTGEKIMQQVLILPKNFVIQHKEGKAVAKEVPPLQQKGTEQHCSSFPQTTNINSSLASVFVNSPGTVSTQLPNTAFNKTITPLSNISSARPQPLSPVTSVSNLLTPSVKTSQSEAGKAKNAVSAATFSLPSASPTISSTGQPLSSTTTLNGSTNPGSSFNCFAQQTADSSEAKQELKTVCIRDSQSILVRTRGGNTGVVKVQTNPDQNSPNTVSSSSVFTFAPQLQAFLVPKSTTSSSAFSPVAGTTTTSSLSPFSQTPTSVSIPASFAPSMGKNLKLTLGHTTGSGDLGHVIDKTSHMPSSPLKSSICSSTLLPSTTSSSVSVISISAANFGQNNANIIHTPTKQQQVDYITKSYPVTRSEATAATNGDVISGTPVQKLMLVSAPSILSSGNGTAINMTPALTSTGVSAQKLVFINAPVPSGTSTPTLVAESLKQTLPPPLHKAYVKTPEQPQIVLIPSTVGTPIKINSSPAVSQIKDVKIGLNIGQAIVNTSGTVPAIPSINILQNVTPKGEDKSSKGYILPLSTSGNSVPVSSNFVSQNITPVNESVVSSARAVNVLSVTGANLSLGSFPVTSASASAGAQPPVLVSGNDTSSRIMPILSNRLCSSSLGNTVAISTVKTGHLASSVLISTTQPVVSPKCLTSALQIPVTVALPTPATTSPKIINTVPHSAAVPGATRSVSISKRQSRTSLQFHSPGISTTVPTNVNTNKPQTELSSLSTSPGKITNTSNFASLPNQQALVKTPSYSSAPGGTTIHTASAPSNVTSLVGSQFSEPCIQQKIVINTSTPLAPGTQIMINGTRFIVPPQGLGAGSHVLLISTNPKYGAPLVLNSGQGIQSTPIDNSAQKITLASNNSLSGQPLQHPLRSPTKFINSFGNASSIPTVHTSPQLINTTAKVPVPPPVPTVSLTSVIKSPATLLAKTSLVSAICPSNPPLPSSTSVFHLDPPVKKLLVSPEGAILNTINTPASKVSSLSPSLSQIVVSASRSPASVFPAFQSSGLEKPDRAAS

SEQ ID NO: 23647 - protein, 10 aa, Homo sapiens
MGCWVDGAGK

SEQ ID NO: 23648 - protein, 58 aa, Homo sapiens [sequence omitted]

SEQ ID NO: 23649 - protein, 844 aa, Homo sapiens
MPTKRQLSEDETTTQGVRAPEASLSLSTTADKQTAWNSLFPLPILEEKRWPQLCSTQSDIVPINISGHSNSPAGSVAHSTTSDIRPSHSVPEGVHGRVAVGQDARFPSLTSPVLRTPSSEPDEPHQARSGPNPPGMESMGMVYSVPSSCNGPTESTFSTSWKGDAFTYMTPSATSQSNQVNENGKNPSCGNSWVSLNKVPPLVPKEAATLLVARDNPAGCSGSAGYPERLIQQRHMPERPSKIGLLTSGTSRLETGPGGASRFRERSLSVPTDSGTTDVDYDEEQKANEACALPFASTSSEGSNSADNIASLSAQQEAQHRRQRSKSISLRKAKKKPSPPTRSVSLVKDEPGLLPEGGSALPKDQRPKSLCLSLEHQGHHSSHPDAQGHPAIPNHKDPESTQFSHHWYLTDWKSGDTYQSLSSSSTATGTTVIECTQVQGSSESLASPSTSRATTPSQLSIEVEAREISSPGRPPGLMSPSSGYSSQSETPTPTVSMSLTLGHLPPPSSSVRVRPVVPERKSSLPPTSPMEKFPKSRLSFDLPLTSSPNLDLSGMSISIRSKTKVSRHHSETNFGVKLAQKTNPNQPIMPMVTQSDLRSVRLRSVSKSEPEDDIESPEYAEEPRAEEVFTLPERKTKPPVAEKPPVARRPPSLVHKPPSVPEEYALTSPTLAMPPRSSIQHARPLPQDSYTVVRKPKPSSFPDGRSPGESTAPSSLVFTPFASSSDAFFSGTQQPPQGSVEDEGPKVRVLPERISLQSQEEAEKKKGKIPPPVPKKPSVLYLPLTSPTAQMEAYVAEPRLPLSPIITLEEDTKCPATGDDLQSLGQRVTSTPQADSEREASPLG

SEQ ID NO: 23650 - protein, 40 aa, Homo sapiens
MVGHEALPLAFTQKTIDRLAGKPTHVNVSVVMAEVDGTCY

SEQ ID NO: 23651 - protein, 34 aa, Homo sapiens
MVARVACGSRRLAKSQRSAPAGVSLAWSPHPPGP

SEQ ID NO: 23652 - protein, 134 aa, Homo sapiens
MPKDANMQIFVKTLTGKTITLEVEPSDTIENVKAKIQDKEGIPPDQQRLIFAGKQLEDGRTLSDYNIQKESTLHLVLRLRGGIIEPSLRQLAQKYNCDKMICRKCYARLHPRAVNCRKKKCGHTNNLRPKKKVK

SEQ ID NO: 23653 - protein, 54 aa, Homo sapiens [sequence omitted]

SEQ ID NO: 23654 - protein, 9 aa, Homo sapiens
MDLSGKRSR

SEQ ID NO: 23655 - protein, 88 aa, Homo sapiens
MGENSQLTCDTKGHFAVQRITPEEAKYMLCKLRKIFVGTKGIPHLVTLDTHAICYPDPLIKVNDTIQIDLETGKITDFIKIDTGTCVW

SEQ ID NO: 23656 - protein, 73 aa, Homo sapiens [sequence omitted]

SEQ ID NO: 23657 - protein, 38 aa, Homo sapiens
MCHRKPGTPGVGKTTLGKELASKSGLKYINVGDLAREV

SEQ ID NO: 23658 - protein, 464 aa, Homo sapiens
MWPSLLLAIKTANFVAVDTELSGLGDRKSLLNQCIEERYKAVCHAARTRSILSLGLACFKRQPDKGEHSYLAQVFNLTLLCMEEYVIEPKSVQFLIQHGFNFNQQYAQGIPYHKGNDKGDESQSQSVRTLFLELIRARRPLVLHNGLIDLVFLYQNFYAHLPESLGTFTADLCEMFPAGIYDTKYAAEFHARFVASYLEYAFRKCERENGKQRAAGSPHLTLEFCNYPSSMRDHIDYRCCLPPATHRPHPTSICDNFSAYGWCPLGPQCPQSHDIDLIIDTDEAAAEDKRRRRRRREKRKRALLNLPGTQTSGEAKDGPPKKQVCGDSIKPEETEQEVAADETRNLPHSKQGNKNDLEMGIKAARPEIADRATSEVPGSQASPNPVPGDGLHRAGFDAFMTGYVMAYVEVSQGPQPCSSGPWLPECHNKVYLSGKAVPLTVAKSQFSRSSKAHNQKMKLTWGSS

SEQ ID NO: 23659 - protein, 93 aa, Homo sapiens
MYNDESVLENHHLAVGFKLLQEEHCDIFMNLTKKQRQTLRKMVIDMVLATDMSKHMSLLADLKTMVETKKVTSSGVLLLDNYTDRIQVFEESL

SEQ ID NO: 23660 - protein, 208 aa, Homo sapiens
MAFANLRKVLISDSLDPCCRKILQDGGLQVVEKQNLSKEELIAELQDCEGLIVRSATKVTADVINAAEKLQVVGRAGTGVDNVDLEAATRKGILVMNTPNGNSLSAAELTCGMIMCLARQIPQATASMKDGKWERKKFMGTELNGKTLGILGLGRIGREVATRMQSFGMKASFSVAPLHINIPGNILHHGDFGSDFNQMKSPTSFLND

SEQ ID NO: 23661 - protein, 119 aa, Homo sapiens
MVTGAVASVLEDEATDTSDSEGSCGSEKDHFYSDDDAIEADSEGDAEPCDKENENDGESSVGTNMGWADAMAKVLNKKTPESKPTILVKNKKLEKEKEKLKQERLEKIKQVCSTSSLVD

SEQ ID NO: 23662 - protein, 191 aa, Homo sapiens
MERAREVIPRSQHQETPVYLGATAGMRLLRMESEELADRVLDVVERSLSNYPFDFQGARIITGQEEGAYGWITINYLLGKFSQKTRWFSIVPYETNNQETFGALDLGGASTQVTFVPQNQTIESPDNALQFRLYGKDYNVYTHSFLCYGKDQALWQKLAKDIQASITQSRPAPFTSAPPAPTSCCFLFQIQ

SEQ ID NO: 23663 - protein, 298 aa, Homo sapiens
MNLGNIILSERSQIYRLPEGTFSIPASAVPCTKMALDDKLYQRDLEVALALSVKELPTVTTNVQNSQDKSIEKHGSSKIETMNKSPHISNCSVASDYLDLDKITVEDDVGGVQGKRKAASKAAAQQRKILLEGSDGDSANDTEPDFAPGEDSEDDSDFCESEDNDEDFSMRKSKVKEIKKKEVKVKSPVEKKEKKSKSKCNALVTSVDSAPAAVKSESQSLPKKVSLSSDTTRKPLEIRSPSAESKKPKWVPPAASGGSRSSSSPLVVVSVKSPNQSLRLGLSRLARVKPLHPNATST

SEQ ID NO: 23664 - protein, 268 aa, Homo sapiens
MVLSPSPPHPHRRDPSKIKWGDAGAEYVVESTGVFTTMEKAGAHLQGGAKRVIISAPSADAPMFVMGVNHEKYDNSLKIISNASCTTNCLAPLAKVIHDNFGIVEGLMTTVHAITATQKTVDGPSGKLWRDGRGALQNIIPASTGAAKAVGKVIPELNGKLTGMAFRVPTANVSVVDLTCRLEKPAKYDDIKKVVKQASEGPLKGILGYTEHQVVSSDFNSDTHSSTFDAGAGIALNDHFVKLISWYDNEFGYSNRVVDLMAHMASKE

SEQ ID NO: 23665 - protein, 40 aa, Homo sapiens
MGFFPVVVGFIRRVPVLGSLLNLPGIRSFVDKVGESNNMV

SEQ ID NO: 23666 - protein, 19 aa, Homo sapiens
MTLHVMDQLTPSRSVNWFI

SEQ ID NO: 23667 - protein, 44 aa, Homo sapiens
MCHHAPLARLVSNTLPQVILPPLGLQTLHVMDQLTPSRSVNWFI

SEQ ID NO: 23668 - protein, 322 aa, Homo sapiens [sequence omitted]

SEQ ID NO: 23669 - protein, 970 aa, Homo sapiens
MSPPNQKHICALFLKECEVSSDDVNKFLTWVKEVSNYKNLNFENLRETLRTFHKETGRKDQKQPTQNGQEELFLDNEMSLPLENTIPFRNVMTALQFPKIMEFLPVLLPRHFKWIIGSGSKEMLKEIEEILGTHPWKLGFSKITYREWKLLRCEASWIAFCQCESLLQLMTDLEKNALIMYSRLKQICREDGHTYVEVNDLTLTLSNHMSFHAASESLKFLKDIGVVTYEKSCVFPYDLYHAERAIAFSICDLMKKPPWHLCVDVEKVLASIHTTKPENSSDDALNESKPDEVRLENPVDVVDTQDNGDHIWTNGENEINAEISEVQLDQDQVEVPLDRDQVAALEMICSNPVTVISGKGGCGKTTIVSRLFKHIEQLEEREVKKACEDFEQDQNASEEWITFTEQSQLEADKAIEVLLTAPTGKAAGLLRQKTGLHAYTLCQVNYSFYSWTQTMMTTNKPWKFSSVRVLVVDEGSLVSVGIFKSVLNLLCEHSKLSKLIILGDIRQLPSIEPGNLLKDLFETLKSRNCAIELKTNHRAESQLIVDNATRISRRQFPKFDAELNISDNPTLPISIQDKTFIFVRLPEEDASSQSSKTNHHSCLYSAVKTLLQENNLQNAKTSQFIAFRRQDCDLINDCCCKHYTGHLTKDHQSRLVFGIGDKICCTRNAYLSDLLPENISGSQQNNDLDASSEDFSGTLPDFAKNKRDFESNVRLCNGEIFFITNDVTDVTFGKRRSLTINNMAGLEVTVDFKKLMKYCRIKHAWARTIHTFQGSEEQTVVYVVGKAGRQHWQHVYTAVTRGRCRVYVIAEESQLRNAIMKNSFPRKTRLKHFLQSKLSSSGAPPADFPSPRKSSGDSGGPSTPSASPLPVVTDHAMTNDVTWSEASSPDERTLTFAERWQLSSPDGVDTDDDLPKSRASKRTCGVNDDESPSKIFMVGESPQVSSRLQNLRLNNLIPRQLFKPTDNQET

SEQ ID NO: 23670 - protein, 27 aa, Homo sapiens
MSRGSSAGFDRHITIFSPEGRLYQVGE

SEQ ID NO: 23671 - protein, 16 aa, Homo sapiens
MSSIGTGACVSGDRDS

SEQ ID NO: 23672 - protein, 209 aa, Homo sapiens
MACARPLISVYSEKGESSGKNVTLPAVFKAPIRPDIVNFVHTNLRKNNRQPYAVSELAGHQTSAESWGTGRAVARIPRVRGGGTHRSGQGAFGNMCRGGRMFAPTKTWRRWHRRVNTTQKRYAICSALAASALPALVMSKGHRIEEVPELPLVVEDKVEGYKKTKEAVLLLKKLKAWNDIKKVRSMSTFTVWYSLFTVCHFEFQKIRAV

SEQ ID NO: 23673 - protein, 58 aa, Homo sapiens [sequence omitted]

SEQ ID NO: 23674 - protein, 25 aa, Homo sapiens
MDDREDLVYQAKLAEQAERYDVLWN

SEQ ID NO: 23675 - protein, 98 aa, Homo sapiens
MRLKRLKNRLESKPLKMADDLDFETGDAGASATFPMQCSALRKNGFVVLKGRPCKIVEMSTSKTGKHGHAKVRISPPHLAFPMPPVSLALPAASCQQC

SEQ ID NO: 23676 - protein, 1467 aa, Homo sapiens
MQRLCDKYNRAIDSIHQLWKGTTQPMKLNTRPSTGLLRHILQQVYNHSVTDPEKLNNYEPFSPEVYGETSFDLVAQMIDEIKMTDDDLFVDLGSGVGQVVLQVAAATNCKHHYGVEKADIPAKYAETMDREFRKWMKWYGKKHAEYTLERGDFLSEEWRERIANTSVIFVNNFAFGPEVDHQLKERFANMKEGGRIVSSKPFAPLNFRINSRNLSDIGTIMRVVELSPLKGSVSWTGKPVSYYLHTIDRTILENYFSSLKNPKLREEQEAARRRQQRESKSNAATPTKGPEGKVAGPADAPMDSGAEEEKAGAATVKKPSPSKARKKKLNKKGRKMAGRKRGRPKKMNTANPERKPKKNQTALDALHAQTVSQTAASSPQDAYRSPHSPFYQLPPSVQRHSPNPLLVAPTPPALQKLLESFKIQYLQFLAYTKTPQYKASLQELLGQEKEKNAQLLGAAQQLLSHCQAQKEEIRRLFQQKLDELGVKALTYNDLIQAQKEISAHNQQLREQSEQLEQDNRALRGQSLQLLKARCEELQLDWATLSLEKLLKEKQALKSQISEKQRHCLELQISIVELEKSQRQQELLQLKSCVPPDDALSLHLRGKGALGRELEPDASRLHLELDCTKFSLPHLSSMSPELSMNGQAAGYELCGVLSRPSSKQNTPQYLASPLDQEVVPCTPSHVGRPRLEKLSGLAAPDYTRLSPAKIVLRRHLSQDHTVPGRPAASELHSRAEHTKENGLPYQSPSVPGSMKLSPQDPRPLSPGALQLAGEKSSEKGLRERAYGSSGELITSLPISIPLSTVQPNKLPVSIPLASVVLPSRAERARSTPSPVLQPRDPSSTLEKQIGANAHGAGSRSLALAPAGFSYAGSVAISGALAGSPASLTPGAEPATLDESSSSGSLFATVGSRSSTPQHPLLLAQPRNSLPASPAHQLSSSPRLGGAAQGPLPEASKGDLPSDSGFSDPESEAKRRIVFTITTGAGSAKQSPSSKHSPLTASARGDCVPSHGQDSRRRGRRKRASAGTPSLSAGVSPKRRALPSVAGLFTQPSGSPLNLNSMVSNINQPLEITAISSPETSLKSSPVPYQDHDQPPVLKKERPLSQTNGAHYSPLTSDEEPGSEDEPSSARIERKIATISLESKSPPKTLENGGGLAGRKPAPAGEPVNSSKWKSTFSPISDIGLAKSADSPLQASSALSQNSLFTFRPALEEPSADAKLAAHPRKGFPGSLSGADGLSPGTNPANGCTFGGGLAADLSLHSFSDGASLPHKGPEAAGLSSPLSFPSQRGKEGSDANPFLSKRQLDGLAGLKGEGSRGKEAGEGGLPLCGPTDKTPLLSGKAAKARDREVDLKNGHNLFISAAAVPPGSLLSGPGLAPAASSAGGAASSAQTHRSFLGPFPPGPQFALGPMSLQANLGSVAGSSVLQSLFSSVPAAAGLVHVSSAATRLTNSHAMGSFSGVAGGTVGGN

SEQ ID NO: 23677 - protein, 295 aa, Homo sapiens
MRGSRMSQPPQCLRRAQSSCCHFMVKLLDDGTFMIPGEKVAHTSLDALVTFHQQKPIEPRRELLTQPCRQKDPANVDYEDLFLYSNAVAEEAACPVSAPEEASPKPVLCHQSKERKPSAEMNRITTKEATSSCPPKSPLGETRQKLWRSLKMLPERGQRVRQQLKSHLATVNLSSLLDVRRSTVISGPGTGKGSQDHSGDPTSGDRGYTDPCVATSLKSPSQPQAPKDRKVPTRKAERSVSCIEVTPGDRSWHQMVVRALSSQESKPEHQGLAEPENDQLPEEYQQPPPFAPGYC

SEQ ID NO: 23678 - protein, 228 aa, Homo sapiens [sequence omitted]

SEQ ID NO: 23679 - protein, 167 aa, Homo sapiens
MSETYMLIKQVDEEAALEQAVKFCQVHLGAAAQRQASGDTPTTPKHPKDSRENFFPVTVVPTAPDPVPADSVQRPSDAHTKPRPALAAATTIITCPPSASASTLDQSKDPGPPRPHRPEATPSMASLGPGPPLLLPPCLKDPACFLAADPALAHSLCHPWRLTCLPS

SEQ ID NO: 23680 - protein, 349 aa, Homo sapiens
MGAPCTSKVLSESEPGLFCLRSKQRVQGEGAGSRSGDFLEPQDDGSGRVLSSTEHLLYAGLCSGHWDVGDFEQLPDDVAISANIADIEEKRGFTSHFVFVIEVKTKGGSKYLIYRRYRQFHALQSKLEERFGPDSKSSALACTLPTLPAKVYVGVKQEIAEMRIPALNAYMKSLLSLPVWVLMDEDVRIFFYQSPYDSEQVPQALRRLRPRTRKVKSVSPQGNSVDRMAAPRAEALFDFTGNSKLELNFKAGDVIFLLSRINKDWLEGTVRGATGIFPLSFVKILKDFPEEDDPTNWLRCYYYEDTISTIKSGHRGGGRSQQHSPIERPAGAHKAGVPERGHSSELPGR

SEQ ID NO: 23681 - protein, 14 aa, Homo sapiens
MCSTFSSVHPSSSC

SEQ ID NO: 23682 - protein, 136 aa, Homo sapiens
MIFQIPWKHAAKHGWDINKDACLFRSWAIHTGRYKAGEKEPDPKTWKANFRCAMNSLPDIEEVKDQSRNKGSSAVRVYRMLPPLTKNQRKGIQGLWVLGKPSGREGRRRSAGAGEPAPRLTARLPHRKKVEVQPRC

SEQ ID NO: 23683 - protein, 158 aa, Homo sapiens
MHPLLNPLLLALGLMALLLTTVIALTCLGGFASPGPVPPSTALRELIEELVNITQNQKAPLCNGSMVWSINLTAGMYCAALESLINVSGCSAIEKTQRMLSGFCPHKVSAGQFSSLHVRDTKIEVAQFVKDLLLHLKKLFREGQFNNFESIIICRDRT

SEQ ID NO: 23684 - protein, 291 aa, Homo sapiens
MRYFSAAVSRPGRGEPRFIAMGYVDDTQFVRFDSDSACPRMEPRAPWVEQEGPEYWEEETRNTKAHAQTDRMNLQTLRGYYNQSEASSHTLQWMIGCDLGSDGRLLRGYEQYAYDGKDYLALNEDLRSWTAADTAAQISKRKCEAANVAEQRRAYLEGTCVEWLHRYLENGKEMLQRADPPKTHVTHHPVFDYEATLRCWALGFYPAEIILTWQRDGEDQTQDVELVETRPAGDGTFQKWAAVVVPSGEEQRYTCHVQHEGLPEPLMLRWSKEGDGGIMSVRESRSLSEDL

SEQ ID NO: 23685 - protein, 142 aa, Homo sapiens [sequence omitted]

SEQ ID NO: 23686 - protein, 148 aa, Homo sapiens
MANNPEDWLSLLLKLEKNSVPLSDALLNKLIGRYSQAIEALPPDKYGQNESFARIQVRFAELKAIQEPDDARDYFQMARANCKKFAFVHISFAQFELSQGNVKKSKQLLQKAVERGAVPLEMLEIALRNLNLQKKQLLSEEEKKNLSE

SEQ ID NO: 23687 - protein, 6 aa, Homo sapiens
MSLLSP

SEQ ID NO: 23688 - protein, 361 aa, Homo sapiens
MTVKTEAAKGTLTYSRMRGMVAILIAFMKQRRMGLNDFIQKIANNSYACKHPEVQSILKISQPQEPELMNANPSPPPSPSQQINLGPSSNPHAKPSDFHFLKVIGKGSFGKVLLARHKAEEVFYAVKVLQKKAILKKKEEKHIMSERNVLLKNVKHPFLVGLHFSFQTADKLYFVLDYINGGELFYHLQRERCFLEPRARFYAAEIASALGYLHSLNIVYRDLKPENILLDSQGHIVLTDFGLCKENIEHNSTTSTFCGTPEYLAPEVLHKQPYDRTVDWWCLGAVLYEMLYGLPPFYSRNTAEMYDNILNKPLQLKPNITNSARHLLEGLLQKDRTKRLGAKDDFVSDVFLSSWAGRDVH

SEQ ID NO: 23689 - protein, 51 aa, Homo sapiens [sequence omitted]

SEQ ID NO: 23690 - protein, 147 aa, Homo sapiens [sequence omitted]

SEQ ID NO: 23691 - protein, 75 aa, Homo sapiens
MLGTAPPGGCEAWGSWPGWLCSLPSGSCGCWGQPLGVPRHPSPRSPSLSGTGPSLTSPQSCPATPAPATASPAAT

SEQ ID NO: 23692 - protein, 150 aa, Homo sapiens [sequence omitted]

SEQ ID NO: 23693 - protein, 46 aa, Homo sapiens
MYYFTYDPWIGKLLYLEDFFVMSDYRGTIEFGAEGLKRVQSYKCLQ

SEQ ID NO: 23694 - protein, 6 aa, Homo sapiens
MAALLF

SEQ ID NO: 23695 - protein, 21 aa, Homo sapiens
LRAESTSRDFGSIIFWYLGSW

SEQ ID NO: 23696 - protein, 10 aa, Homo sapiens
LLLLVLNLEP

SEQ ID NO: 23697 - protein, 49 aa, Homo sapiens [sequence omitted]

SEQ ID NO: 23698 - protein, 61 aa, Homo sapiens
KKQRQTLRKMVIDMVLATDMSKHMSLLADLKTMVETKKVTSSGVLLLDNYTDRIQVFEESL

SEQ ID NO: 23699 - protein, 266 aa, Homo sapiens
KLKISPVTLKEAYVQKLVKVCTDTDRWSLISLSNKNGKNVELKFVDSIRRQFEFSVDSFQIILDSLLFFYDCSNNPISEHFHPTVIGESMYGDFEEAFDHLQNRLIATKNPEEIRGGGLLKYSNLLVRDFRPTDQEEIKTLERYMCSRFFIDFPDILEQQRKLETYLQNHFAEEERSKYDYLMILRRVVNESTVCLMGHERRQTLNLISLLALRVLAEQNIIPSATNVTCYYQPAPYVSDGNFSNYYVAHPPVTYSQPYPTWLPCN

SEQ ID NO: 23700 - protein, 58 aa, Homo sapiens
IVIHIRNKILTGADGKNLTKNDLYPNPKPEVLHMIYMRALQIVYGIRLEHFYMEELPN

SEQ ID NO: 23701 - protein, 31 aa, Homo sapiens
TKVVFPGLRLIHCTPDVLTPAISPNVGNSTA

SEQ ID NO: 23702 - protein, 19 aa, Homo sapiens
MITKVVFPGRGLSIALRMC

SEQ ID NO: 23703 - protein, 23 aa, Homo sapiens
RLIHCTPDVLTSAISPTVGNSTA

SEQ ID NO: 23704 - protein, 10 aa, Homo sapiens
LLMAALERGR

SEQ ID NO: 23705 - protein, 12 aa, Homo sapiens
IVFTKVVFAGRS

SEQ ID NO: 23706 - protein, 12 aa, Homo sapiens
RRPMEPGSGRCC

SEQ ID NO: 23707 - protein, 19 aa, Homo sapiens
MITNVVFPGRGLSIALRMC

SEQ ID NO: 23708 - protein, 27 aa, Homo sapiens
LEGVVLLSQLSCLSAMFSGRVWLGLPP

SEQ ID NO: 23709 - protein, 12 aa, Homo sapiens
LDPALWAFTSVL

SEQ ID NO: 23710 - protein, 98 aa, Homo sapiens
ITKAQKKDGKKRKRGRKESYSIYVYKVLKQVHPDTGISSKAMGIMNSFVNDIFERIASEASRLAHYKQALHHHVPRSADGRAPAAARRAGQARRVRGH

SEQ ID NO: 23711 - protein, 15 aa, Homo sapiens
LSCMLSEARRDPGES

SEQ ID NO: 23712 - protein, 48 aa, Homo sapiens
TASCHHWPKRSSWPSALRHRLCPASSAWHAPPVTTYAAPHFFHLNTKL

SEQ ID NO: 23713 - protein, 62 aa, Homo sapiens
LILAATLRTLPHCDRIIAVFGSLRSRRHRLGALSWPLFPQMSDSDSRTEKRKKKRPNGKATF

SEQ ID NO: 23714 - protein, 26 aa, Homo sapiens
LLLSCYCFGFPATPRTVKAAQLWMVR

SEQ ID NO: 23715 - protein, 23 aa, Homo sapiens
LERILKEMKSALRNEVDCLLAFC

SEQ ID NO: 23716 - protein, 15 aa, Homo sapiens
VCVSFCVTRALGAAC

SEQ ID NO: 23717 - protein, 54 aa, Homo sapiens
MCSLKQMLCLIPAGESHRLELLGRERPSCTLLRDCHAPPGGLRTFDMLQSWPRQ

SEQ ID NO: 23718 - protein, 12 aa, Homo sapiens
LGALLLGTWDSA

SEQ ID NO: 23719 - protein, 56 aa, Homo sapiens
KCPHLLLSSSLTPSHPLASDPFSTGDLPLLRSSSSSFTSPPSSSLALIMLMLEENE

SEQ ID NO: 23720 - protein, 89 aa, Homo sapiens
LCKIGYRHVVDATLQEEACSLASLLVSVTSKGVVTCMRKVGKGSLDPESIFEMMETGKRVGKVLHASLQSVVHKEESLGPKRQKVGFLG

SEQ ID NO: 23721 - protein, 84 aa, Homo sapiens
VLHTWVSLPRAVCSGSFGPVGGCGAAGVACAVRPGILPVMEAAAAAAAGSRCAPSTAAREVGKFAARRPKARGAAPLCRELSPI

SEQ ID NO: 23722 - protein, 69 aa, Homo sapiens
IEFLTLENEIFRKKNHVCQYYIYELQKRIAEMETQKEKIHEDTKEINEKSNILSNEMKAKNKDVKDTEK

SEQ ID NO: 23723 - protein, 182 aa, Homo sapiens
LVLSGLVHARGCTYSQLWSRSHPFCCSRGPLAMAGILFEDIFDVKDIDPEGKKFDRVSRLHCESESFKMDLILDVNIQIYPVDLGDKFRLVIASTLYEDGTLDDGEYNPTDDRPSRADQFEYVMYGKVYRIEGDETSTEAATRLSAYVSYGGLLMRLQGDANNLHGFEVDSRVYLLMKKLAF

SEQ ID NO: 23724 - protein, 154 aa, Homo sapiens
IMAALRPLVKPKIVKKRTKKFIRHQSDRYVKIKEEFALCTDANPPVYYFLQRNWRKPRGIDNRVRRRFKGQILMPNIGYGSNKKTKHMLPSGFRKFLVHNVKELEVLLMCNKSYCAEIAHNVSSKNRKAIVERAAQLAIRVTNPNARLRSEENE

SEQ ID NO: 23725 - protein, 522 aa, Homo sapiens
TRRCPVLAMADYLISGGTSYVPDDGLTAQQLFNCGDGLTYNDFLILPGYIDFTADQVDLTSALTKKITLKTPLVSSPMDTVTEAGMAIAMALTGGIGFIHHNCTPEFQANEVRKVKKYEQGFITDPVVLSPKDRVRDVFEAKARHGFCGIPITDTGRMGSRLVGIISSRDIDFLKEEEHDCFLEEIMTKREDLVVAPAGITLKEANEILQRSKKGKLPIVNEDDELVAIIARTDLKKNRDYPLASKDAKKQLLCGAAIGTHEDDKYRLDLLAQAGVDVVVLDSSQGNSIFQINMIKYIKDKYPNLQVIGGNVVTAAQAKNLIDAGVDALRVGMGSGSICITQEVLACGRPQATAVYKVSEYARRFGVPVIADGGIQNVGHIAKALALGASTVMMGSLLAATTEAPGEYFFSDGIRLKKYRGMGSLDAMDKHLSSQNRYFSEADKIKVAQGVSGAVQDKGSIHKFVPYLIAGIQHSCQDIGAKSLTQVRAMMYSGELKFEKRTSSAQVEGGVHSLHSYEKRLF

SEQ ID NO: 23726 - protein, 36 aa, Homo sapiens
MQKTLSSSKSFVIVGPENPFATGTDMFCLSGLVKGG

SEQ ID NO: 23727 - protein, 9 aa, Homo sapiens
ITVDFWFGA

SEQ ID NO: 23728 - protein, 130 aa, Homo sapiens
LLSRPTRKMAPQKDRKPKRSTWRFNLDLTHPVEDGIFDSGNFEQFLREKVKVNGKTGNLGNVVHIERFKNKITVVSEKQFSKRYLKYLTKKYLKKNNLRDWLRVVASDKETYELRYFQISQDEDESESED

SEQ ID NO: 23729 - protein, 59 aa, Homo sapiens
VWLTLFLAMSSHKTFTIKRFLAKKQKQNRPIPQWIQMKPGSKIRYNSKRRHWRRTKLGL

SEQ ID NO: 23730 - protein, 253 aa, Homo sapiens
IGHVDSGKSTTTGHLIYKCGGVDKRTIEKFEKEAAEMGKCSFKYAWVLDKLKAEREHGITIDISLWKFETSKYYVTIIDAPGHRDLIKNMITGTSQADCAVLIVAAGFGEFEAGISKNGQTREHALLAYTLGVKQLIVGVNKMDSTEPPYSHKRYEEIVKEVSTYIKKIGHNTDTVAFVPVSGWNGDNTLEPSANMPWFKGWKVTRKDGNASGTTLLEALDCILPPTRPTDKPLCLPLQDVYKIGGIGTVPVG

SEQ ID NO: 23731 - protein, 20 aa, Homo sapiens
LDILSPSYGRQVNENCYCQP

SEQ ID NO: 23732 - protein, 53 aa, Homo sapiens
ISPRRRFPRAGAEPVSPPASPRPPPPYGEREPPPNPGSSGGGLRPGVIMELIR

SEQ ID NO: 23733 - protein, 80 aa, Homo sapiens
LFTNCLCGTFCFPCLGCQVAADMNECCLCGTSVAMRTLYRTRYGIPGSICDDYMATLCCPHCTLCQIKRDINRRRAMRTF

SEQ ID NO: 23734 - protein, 46 aa, Homo sapiens
MRTLYRTRYGIPGSICDDYMATLCCPHCTLCQIKRDINRRRAMRTF

SEQ ID NO: 23735 - protein, 231 aa, Homo sapiens
LGPAALRDSEEKLAPGGRGSVNMGKGDPNKPRGKMSSYAFFVQTCREEHKKKHPDSSVNFAEFSKKCSERWKTMSAKEKSKFEDMAKSDKARYDREMKNYVPPKGDKKGKKKDPNAPKRPPSAFFLFCSEHRPKIKSEHPGLSIGDTAKKLGEMWSEQSAKDKQPYEQKAAKLKEKYEKDIAAYRAKGKSEAGKKGPGRPTGSKKKNEPEDEEEEEEEEDEDEEEEDEDEE

SEQ ID NO: 23736 - protein, 11 aa, Homo sapiens
LTFFAPVFQKK

SEQ ID NO: 23737 - protein, 38 aa, Homo sapiens
IADCIALFLERLSILIQKVSIFITNEFETRAFFFFWVM

SEQ ID NO: 23738 - protein, 11 aa, Homo sapiens
MKYMYFMVRIL

SEQ ID NO: 23739 - protein, 9 aa, Homo sapiens
MTLDMQMTV

SEQ ID NO: 23740 - protein, 32 aa, Homo sapiens
MATANFGKIQIGIYVEIKRSDGKYEFTVYQQK

SEQ ID NO: 23741 - protein, 476 aa, Homo sapiens
TGTMGRKKIQITRIMDERNRQVTFTKRKFGLMKKAYELSVLCDCEIALIIFNSTNKLFQYASTDMDKVLLKYTEYNEPHESRTNSDIVETLRKKGLNGCDSPDPDADDSVGHSPESEDKYRKINEDIDLMISRQRLCAVPPPNFEMPVSIPVSSHNSLVYSNPVSSLGNPNLLPLAHPSLQRNSMSPGVTHRPPSAGNTGGLMGGDLTSGAGTSAGNGYGNPRNSPGLLVSPGNLNKNMQAKSPPPMNLGMNNRKPDLRVLIPPGSKNTMPSVSEDVDLLLNQRINNSQSAQSLATPVVSVATPTLPGQGMGGYPSAISTTYGTEYSLSSADLSSLSGFNTASALHLGSVTGWQQQHLHNMPPSALSQLGACTSTHLSQSSNLSLPSTQSLNIKSEPVSPPRDRTTTPSRYPQHTRHEAGRSPVDSLSSCSSSYDGSDREDHRNEFHSPIGLTRPSPDERESPSVKRMRLSEGWAT

SEQ ID NO: 23742 - protein, 33 aa, Homo sapiens
LANSGLSSFLVSEGPFCFQGGACEVRVSAGPAF

SEQ ID NO: 23743 - protein, 28 aa, Homo sapiens
LCPHRSPGPIHRRKKRPPQAPGAQDSGR

SEQ ID NO: 23744 - protein, 17 aa, Homo sapiens
LDSSGLSSERSDSDQGP

SEQ ID NO: 23745 - protein, 142 aa, Homo sapiens
LCCFSVMARTKQTARKSTGGKAPRKQLATKAARKSAPATGGVKKPHRYRPGTVALREIRRYQKSTELLIRKLPFQRLVREIAQDFKTDLRFQSSAVMALQEACEAYLVGLFEDTNLCAIHAKRVTIMPKDIQLARRIRGERA

SEQ ID NO: 23746 - protein, 104 aa, Homo sapiens; identical to SEQ ID NO: 22223

SEQ ID NO: 23747 - protein, 138 aa, Homo sapiens
LQMARTKQTARKSTGGKAPRKQLATKAARKSAPATGGVKKPHRYRPGTVALREIRRYQKSTELLIRKLPFQRLVREIAQDFKTDLRFQSSAVMALQEACEAYLVGLFEDTNLCAIHAKRVTIMPKDIQLARRIRGERA

SEQ ID NO: 23748 - protein, 28 aa, Homo sapiens
LCATEMQDFLTPPLCVLGDSGFSFCKGL

SEQ ID NO: 23749 - protein, 37 aa, Homo sapiens
LPSRLHLAAPASGAHSNLPACDLRRKKITYFLAPYIP

SEQ ID NO: 23750 - protein, 157 aa, Homo sapiens
LLPAAAAAEPGRSSAPSTAAPGNPERAPQAGGRARASQPSLFHLLLREGKMSESSSKSSQPLASKQEKDGTEKRGRGRPRKQPPVSPGTALVGSQKEPSEVPTPKRPRGRPKGSKNKGAAKTRKTTTTPGRKPRGRPKKLEKEEEEGISQESSEEEQ

SEQ ID NO: 23751 - protein, 363 aa, Homo sapiens
IFSGSPSSIHRRHPIFTGFIHLLLLSSLLSDKLPSAMTVVSVPQREPLVLGGRLAPLGFSSRGYFGALPMVTTAPPPLPRIPDPRALPPTLFLPHFLGGDGPCLTPQPRAPAALPNRSLAVAGGTPRAAPKKRRKKKVRASPAGQLPSRFHQYQQHRPSLEGGRSPATGPSGAQEVPGPAAALAPSPAAAAGTEGASPDLAPLRPAAPGQTPLRKEVLKSKMGKSEKIALPHGQLVHGIHLYEQPKINRQKSKYNLPLTKITSAKRNENNFWQDSVSSDRIQKQEKKPFKNTENIKNSHLKKSAFLTEVSQKENYAGAKFSDPPSPSVLPKPPSHWMGSTVENSNQNRELMAVHLKTLLKVQT

SEQ ID NO: 23752 - protein, 39 aa, Homo sapiens
TQNLLFRFRAYSLLAVSCHHVGNRSCRDSHPSAGGEIPG

SEQ ID NO: 23753 - protein, 142 aa, Homo sapiens
RYVYLAMARTKQTARKSTGGKAPRKQLATKAARKSAPATGGVKKPHRYRPGTVALREIRRYQKSTELLIRKLPFQRLVREIAQDFKTDLRFQSSAVMALQEACEAYLVGLFEDTNLCAIHAKRVTIMPKDIQLARRIRGERA

SEQ ID NO: 23754 - protein, 13 aa, Homo sapiens
KQKSPELRSPRRG

SEQ ID NO: 23755 - protein, 37 aa, Homo sapiens
VTKYLNRRGLRRDLNSSCPTNSISAFLLTSCENYSSG

SEQ ID NO: 23756 - protein, 6 aa, Homo sapiens
VAVAGQ

SEQ ID NO: 23757 - protein, 37 aa, Homo sapiens
MVAPRAAPPAGAFLSGQAVFHGRELLAELPLFAMDFG

SEQ ID NO: 23758 - protein, 17 aa, Homo sapiens
LAAAGRSCRAVRATEGK

SEQ ID NO: 23759 - protein, 301 aa, Homo sapiens
RSPLCAAEPVLDATSPPSVFGAEIAKTEGLEMADHMMAMNHGRFPDGTNGLHHHPAHRMGMGQFPSPHHHQQQQPQHAFNALMGEHIHYGAGNMNATSGIRHAMGPGTVNGGHPPSALAPAARFNNSQFMGPPVASQGGSLPASMQLQKLNNQYFNHHPYPHNHYMPDLHPAAGHQMNGTNQHFRDCNPKHSGGSSTPGGSGGSSTPGGSGSSSGGGAGSSNSGGGSGSGNMPASVAHVPAAMLPPNVIDTDFIDEEVLMSLVIEMGLDRIKELPELWLGQNEFDFMTDFVCKQQPSRVSC

SEQ ID NO: 23760 - protein, 52 aa, Homo sapiens
ILLNYIQKVKMINMEVMKMLFTLEPLMIDLMFLLFITMLNAIVLYLELSITH

SEQ ID NO: 23761 - protein, 264 aa, Homo sapiens
RPPQCPPPSPARPSPAKMVDREQLVQKARLAEQAERYDDMAAAMKNVTELNEPLSNEERNLLSVAYKNVVGARRSSWRVISSIEQKTSADGNEKKIEMVRAYREKIEKELEAVCQDVLSLLDNYLIKNCSETQYESKVFYLKMKGDYYRYLAEVATGEKRATVVESSEKAYSEAHEISKEHMQPTHPIRLGLALNYSVFYYEIQNAPEQACHLAKTAFDDAIAELDTLNEDSYKDSTLIMQLLRDNLTLWTSDQQDDDGGEGNN

SEQ ID NO: 23762 - protein, 24 aa, Homo sapiens
VRLNLVRARETAGPRAQGYKINAI

SEQ ID NO: 23763 - protein, 18 aa, Homo sapiens
LAEQRQALGVEVFGFIRA

SEQ ID NO: 23764 - protein, 27 aa, Homo sapiens
LGPRRAGESRRPRGMLVRKPSGAAAAI

SEQ ID NO: 23765 - protein, 69 aa, Homo sapiens
KDMLNSKTKTQYFHQEKWIYVHKGSTKERHGYCTLGEAFNRLDFSTAILDSRRFNYVVRALPLASEGNR

SEQ ID NO: 23766 - protein, 287 aa, Homo sapiens
LRPNRKMATNFLAHEKIWFDKFKYDDAERRFYEQMNGPVAGASRQENGASVILRDIARARENIQKSLAGSSGPGASSGTSGDHGELVVRIASLEVENQSLRGVVQELQQAISKLEARLNVLEKSSPGHRATAPQTQHVSPMRQVEPPAKKPATPAEDDEDDDIDLFGSDNEEEDKEAAQLREERLRQYAEKKAKKPALVAKSSILLDVKPWDDETDMAQLEACVRSIQLDGLVWGASKLVPVGYGIRKLQIQCVVEDDKVGTDLLEEEITKFEEHVQSVDIAAFNKI

SEQ ID NO: 23767 - protein, 7 aa, Homo sapiens
IVPISKM

SEQ ID NO: 23768 - protein, 20 aa, Homo sapiens
TCPAAQTAAYCSEEAAYQEK

SEQ ID NO: 23769 - protein, 7 aa, Homo sapiens
MLKAIKT

SEQ ID NO: 23770 - protein, 39 aa, Homo sapiens
ISGGKGIAGEGDQRAAPAARSAPSRPLHHELGHRALGSV

SEQ ID NO: 23771 - protein, 22 aa, Homo sapiens
RQTTSPFFELDPASTRVGVTIA

SEQ ID NO: 23772 - protein, 14 aa, Homo sapiens
MMLAVATVDFSQEH

SEQ ID NO: 23773 - protein, 785 aa, Homo sapiens
LKMPGKLRSDAGLESDTAMKKGETLRKQTEEKEKKEKPKSDKTEEIAEEEETVFPKAKQVKKKAEPSEVDMNSPKSKKAKKKEEPSQNDISPKTKSLRKKKEPIEKKVVSSKTKKVTKNEEPSEEEIDAPKPKKMKKEKEMNGETREKSPKLKNGFPHPEPDCNPSEAASEESNSEIEQEIPVEQKEGAFSNFPISEETIKLLKGRGVTFLFPIQAKTFHHVYSGKDLIAQARTGTGKTFSFAIPLIEKLHGELQDRKRGRAPQVLVLAPTRELANQVSKDFSDITKKLSVACFYGGTPYGGQFERMRNGIDILVGTPGRIKDHIQNGKLDLTKLKHVVLDEVDQMLDMGFADQVEEILSVAYKKDSEDNPQTLLFSATCPHWVFNVAKKYMKSTYEQVDLIGKKTQKTAITVEHLAIKCHWTQRAAVIGDVIRVYSGHQGRTIIFCETKKEAQELSQNSAIKQDAQSLHGDIPQKQREITLKGFRNGSFGVLVATNVAARGLDIPEVDLVIQSSPPKDVESYIHRSGRTGRAGRTGVCICFYQHKEEYQLVQVEQKAGIKFKRIGVPSATEIIKASSKDAIRLLDSVPPTAISHFKQSAEKLIEEKGAVEALAAALAHISGATSVDQRSLINSNVGFVTMILQCSIEMPNISYAWKELKEQLGEEIDSKVKGMVFLKGKLGVCFDVPTASVTEIQEKWHDSRRWQLSVATEQPELEGPREGYGGFRGQREGSRGFRGQRDGNRRFRGQREGSRGPRGQRSGGGNKSNRSQNKGQKRSFSKAFGQ

SEQ ID NO: 23774 - protein, 172 aa, Homo sapiens
LGAAAGAGSELGGSRAPLCARRDSPPEDIDHKDSYLITRSIMAEPDYIEDDNPELIRPQKLINPVKTSRNHQDLHRELLMNQKRGLAPQNKPELQKVMEKRKRDQVIKQKEEEAQKKKSDLEIELLKRQQKLEQLELEKQKLQEEQENAPEFVKVKGNLRRTGQEVAQAQES

SEQ ID NO: 23775 - protein, 13 aa, Homo sapiens
VVERRFCGLGPNG

SEQ ID NO: 23776 - protein, 348 aa, Homo sapiens
TTARRAFPIPFGSKSNMATLKDQLIYNLLKEEQTPQNKITVVGVGAVGMACAISILMKDLADELALVDVIEDKLKGEMMDLQHGSLFLRTPKIVSGKDYNVTANSKLVIITAGARQQEGESRLNLVQRNVNIFKFIIPNVVKYSPNCKLLIVSNPVDILTYVAWKISGFPKNRVIGSGCNLDSARFRYLMGERLGVHPLSCHGWVLGEHGDSSVPVWSGMNVAGVSLKTLHPDLGTDKDKEQWKEVHKQVVESAYEVIKLKGYTSWAIGLSVADLAESIMKNLRRVHPVSTMIKGLYGIKDDVFLSVPCILGQNGISDLVKVTLTSEEEARLKKSADTLWGIQKELQF

SEQ ID NO: 23777 - protein, 31 aa, Homo sapiens
IFPSALFWGGGYSSFGITFPPPMCFPSFEIF

SEQ ID NO: 23778 - protein, 10 aa, Homo sapiens
MSRSLQPPSS

SEQ ID NO: 23779 - protein, 7 aa, Homo sapiens
IQRMLIL

SEQ ID NO: 23780 - protein, 10 aa, Homo sapiens
MRASQGANFK

SEQ ID NO: 23781 - protein, 45 aa, Homo sapiens
IPAVVGKGQSAEVLGGVMAVPFVEDWDLVQTLGEGAYGEARHRHA

SEQ ID NO: 23782 - protein, 155 aa, Homo sapiens
IAAIMGRMHAPGKGLSQSALPYRRSVPTWLKLTSDDVKEQIYKLAKKGLTPSQIGVILRDSHGVAQVRFVTGNKILRILKSKGLAPDLPEDLYHLIKKAVAVRKHLERNRKDKDAKFRLILIESRIHRLARYYKTKRVLPPNWKYESSTASALVA

SEQ ID NO: 23783 - protein, 9 aa, Homo sapiens
IKIINNVCH

SEQ ID NO: 23784 - protein, 154 aa, Homo sapiens
ITHSVFPFQSYYFDRDDVALKNFAKYFLHQSHEEREHAEKLMKLQNQRGGRIFLQDIKKPDCDDWESGLNAMECALHLEKNVNQSLLELHKLATDKNDPHLCDFIETHYLNEQVKAIKELGDHVTNLRKMGAPESGLAEYLFDKHTLGDSDNES

SEQ ID NO: 23785 - protein, 11 aa, Homo sapiens
MAAAAARWNHG

SEQ ID NO: 23786 - protein, 17 aa, Homo sapiens
LGPLRGRFRKLFKTKSN

SEQ ID NO: 23787 - protein, 20 aa, Homo sapiens
IDNLGLKLEENLQETHSAVL

SEQ ID NO: 23788 - protein, 21 aa, Homo sapiens
LSDILTRLRCLLLFSELRNAA

SEQ ID NO: 23789 - protein, 31 aa, Homo sapiens
LQDMTPVAYHGHGVSAFRCCSPLLLQAKARR

SEQ ID NO: 23790 - protein, 49 aa, Homo sapiens
MLPELKSTLQQLLQLPQGEEEIPEQIANTETTEDVKGRIYQLLAKASYK

SEQ ID NO: 23791 - protein, 34 aa, Homo sapiens
RKFWRQKLWPLWRWRPILCKTTKPRWLWRFQQQQ

SEQ ID NO: 23792 - protein, 24 aa, Homo sapiens
ITRATDRLQTPVSMESRGLSPGSS

SEQ ID NO: 23793 - protein, 12 aa, Homo sapiens
VRSWSLPMQPGF

SEQ ID NO: 23794 - protein, 18 aa, Homo sapiens
KEGLMSSSFSNSCKLCVG

SEQ ID NO: 23795 - protein, 220 aa, Homo sapiens
RNAAMAAQGEPQVQFKLVLVGDGGTGKTTFVKRHLTGEFEKKYVATLGVEVHPLVFHTNRGPIKFNVWDTAGQEKFGGLRDGYYIQAQCAIIMFDVTSRVTYKNVPNWHRDLVRVCENIPIVLCGNKVDIKDRKVKAKSIVFHRKKNLQYYDISAKSNYNFEKPFLWLARKLIGDPNLEFVAMPALAPPEVVMDPALAAQYEHDLEVAQTTALPDEDDDL

SEQ ID NO: 23796 - protein, 19 aa, Homo sapiens
IMGKIENNIIKCKTSKVLF

SEQ ID NO: 23797 - protein, 8 aa, Homo sapiens
LLVWYVHG

SEQ ID NO: 23798 - protein, 26 aa, Homo sapiens
ILPPLGLQTLHVMDQLTPSRSVNWFI

SEQ ID NO: 23799 - protein, 10 aa, Homo sapiens
LLLSPSPPNP

SEQ ID NO: 23800 - protein, 7 aa, Homo sapiens
LLLPLPP

SEQ ID NO: 23801 - protein, 103 aa, Homo sapiens
VESLQKVQEQVHTLLSQDQAQAARLPPQDFLDRLSSLDNLKASVSQVEADLKMLRTAVDSLVAYSVKIETNENNLESAKGLLDDLRNDLDRLFVKVEKIHEKV

SEQ ID NO: 23802 - protein, 273 aa, Homo sapiens
IMSGCRVFIGRLNPAAREKDVERFFKGYGRIRDIDLKRGFGFVEFEDPRDADDAVYELDGKELCSERVTIEHARARSRGGRGRGRYSDRFSSRRPRNDRRNAPPVRTENRLIVENLSSRVSWQDLKDFMRQAGEVTFADAHRPKLNEGVVEFASYGDLKNAIEKLSGKEINGRKIKLIEGSKRHSRSRSRSRSRTRSSSRSRSRSRSRSRKSYSRSRSRSRSRSRSKSRSVSRSPVPEKSQKRGSSSRSKSPASVDRQRSRSRSRSRSVDSGN

SEQ ID NO: 23803 - protein, 433 aa, Homo sapiens
LSPLSAMACARPLISVYSEKGESSGKNVTLPAVFKAPIRPDIVNFVHTNLRKNNRQPYAVSELAGHQTSAESWGTGRAVARIPRVRGGGTHRSGQGAFGNMCRGGRMFAPTKTWRRWHRRVNTTQKRYAICSALAASALPALVMSKGHRIEEVPELPLVVEDKVEGYKKTKEAVLLLKKLKAWNDIKKVYASQRMRAGKGKMRNRRRIQRRGPCIIYNEDNGIIKAFRNIPGITLLNVSKLNILKLAPGGHVGRFCIWTESAFRKLDELYGTWRKAASLKSNYNLPMHKMINTDLSRILKSPEIQRALRAPRKKIHRRVLKKNPLKNLRIMLKLNPYAKTMRRNTILRQARNHKLRVDKAAAAAAALQAKSDEKAAVAGKKPVVGKKGKKAAVGVKKQKKPLVGKKAAATKKPAPEKKPAEKKPTTEEKKPAA

SEQ ID NO: 23804 - protein, 12 aa, Homo sapiens
ICEMLSLLKQYC

SEQ ID NO: 23805 - protein, 24 aa, Homo sapiens
ISSSLQRSPSRSAPEDLSSHVEAP

SEQ ID NO: 23806 - protein, 41 aa, Homo sapiens
KRRCRTPRPWTCSRRVWLWWCRTRCSAICRSRLLWKKSTPK

SEQ ID NO: 23807 - protein, 63 aa, Homo sapiens
LKEVDDVLGGAAAWENVDSTAESCPKCEHPRAYFMQLQTRSADEPMTTFYKCCNAQCGHRWRD

SEQ ID NO: 23808 - protein, 43 aa, Homo sapiens
MRESRPGAPRSPPPSRPRRPAPRRQRTPGRYGPPLRLAPSVGW

SEQ ID NO: 23809 - protein, 7 aa, Homo sapiens
MFLKPQD

SEQ ID NO: 23810 - protein, 99 aa, Homo sapiens
VSWNRSLLKWQMTWTSRQEMQGPQPPSQCSAQHYVRMALWCSKAGHVRSSRCLLRRLASTATPRSIWLVLTSLLGRNMKISARQLIIWMSPTSKGMTSS

SEQ ID NO: 23811 - protein, 33 aa, Homo sapiens
LESTAPPVSRGSDTARPGHGLVAEGGSGSEAQG

SEQ ID NO: 23812 - protein, 32 aa, Homo sapiens
LLSTACPPTQEHPLPNDRTFLGSILTAVADEG

SEQ ID NO: 23813 - protein, 13 aa, Homo sapiens
TEGSGVVVWVGGR

SEQ ID NO: 23814 - protein, 13 aa, Homo sapiens
MDIVWARGRDGWL

SEQ ID NO: 23815 - protein, 144 aa, Homo sapiens
LLRCCRFGPARSQPPAARPAQLPPRPLAAVPLLVPSRLVRGCAGGRAGAQGKLEGRAREGSFVDFTAANIWAQRGPPLAVSPPRRLGDPRGLSPKDGDFDSGPAPRDAVAAAVRRPRSSCSRRRADPRWLRAPWSPTASFPPPG

SEQ ID NO: 23816 - protein, 25 aa, Homo sapiens
RRFGDKLNFRQKLLNLISKLFCSGT

SEQ ID NO: 23817 - protein, 8 aa, Homo sapiens
TELDPWAT

SEQ ID NO: 23818 - protein, 81 aa, Homo sapiens
VTFPPPQEAMTEAGKLPLPLPPRLDWFVHTQMGQLAQDGVPEWFHGAISREDAENLLESQPLGSFLIRVSHSHVGYTLSYK

SEQ ID NO: 23819 - protein, 55 aa, Homo sapiens
MRAAFTAFEEAQLPRLKQENPNMRLSQLKQLLKKEWLRSPDNPMNQRAVPFNAPK

SEQ ID NO: 23820 - protein, 21 aa, Homo sapiens
VQVMLKRNPVLLRSIDKPLAR

SEQ ID NO: 23821 - protein, 236 aa, Homo sapiens
VDLVSPTPLTPPDPGAASATATAPAPAAARRGEAMAKVSVLNVAVLENPSPFHSPFRFEISFECSEALADDLEWKIIYVGSAESEEFDQILDSVLVGPVPAGRHMFVFQADAPNPSLIPETDAVGVTVVLITCTYHGQEFIRVGYYVNNEYLNPELRENPPMKPDFSQLQRNILASNPRVTRFHINWDNNMDRLEAIETQDPSLGCGLPLNCTPIKGLGLPGCIPGLLPENSMDCI

SEQ ID NO: 23822 - protein, 428 aa, Homo sapiens
IMAEQDVENDLLDYDEEEEPQAPQESTPAPPKKDIKGSYVSIHSSGFRDFLLKPELLRAIVDCGFEHPSEVQHECIPQAILGMDVLCQAKSGMGKTAVFVLATLQQIEPVNGQVTVLVMCHTRELAFQISKEYERFSKYMPSVKVSVFFGGLSIKKDEEVLKKNCPHVVVGTPGRILALVRNRSFSLKNVKHFVLDECDKMLEQLDMRRDVQEIFRLTPHEKQCMMFSATLSKDIRPVCRKFMQDPMEVFVDDETKLTLHGLQQYYVKLKDSEKNRKLFDLLDVLEFNQVIIFVKSVQRCMALAQLLVEQNFPAIAIHRGMAQEERLSRYQQFKDFQRRILVATNLFGRGMDIERVNIVFNYDMPEDSDTYLHRVARAGRFGTKGLAITFVSDENDAKILNDVQDRFEVNVAELPEEIDISTYIEQSR

SEQ ID NO: 23823 - protein, 10 aa, Homo sapiens
LIFMNERSRD

SEQ ID NO: 23824 - protein, 13 aa, Homo sapiens
RNISPNTIRLANG

SEQ ID NO: 23825 - protein, 33 aa, Homo sapiens
TLRVSRTPRSLSQGHGEPEAAGNGAKRGGGDRC

SEQ ID NO: 23826 - protein, 39 aa, Homo sapiens
LAISALRARTATGSPGSCRCTAGPLPCASALESCCCRVT

SEQ ID NO: 23827 - protein, 54 aa, Homo sapiens
TTTPARVPSLFPPQPPFSSLPYVPECGSTASFPAARLPPDLSARVSPIPRGRWC

SEQ ID NO: 23828 - protein, 26 aa, Homo sapiens
RSAGPADTLTPSSAARGPERPEQPGS

SEQ ID NO: 23829 - protein, 52 aa, Homo sapiens
LCTACRRPEDAVAPRKRARRQRARLQGSATAAEAQVGHQTARAAPGPAQQQG

SEQ ID NO: 23830 - protein, 385 aa, Homo sapiens
RLNMNPQIRNPMERMYRDTFYDNFENEPILYGRSYTWLCYEVKIKRGRSNLLWDTGVFRGQVYFKPQYHAEMCFLSWFCGNQLPAYKCFQITWFVSWTPCPDCVAKLAEFLSEHPNVTLTISAARLYYYWERDYRRALCRLSQAGARVTIMDYEEFAYCWENFVYNEGQQFMPWYKFDENYAFLHRTLKEILRYLMDPDTFTFNFNNDPLVLRRRQTYLCYEVERLDNGTWVLMDQHMGFLCNEAKNLLCGFYGRHAELRFLDLVPSLQLDPAQIYRVTWFISWSPCFSWGCAGEVRAFLQENTHVRLRIFAARIYDYDPLYKEALQMLRDAGAQVSIMTYDEFEYCWDTFVYRQGCPFQPWDGLEEHSQALSGRLRAILQNQGN

SEQ ID NO: 23831 - protein, 168 aa, Homo sapiens
REMAQRLLLRRFLASVISRKPSQGQWPPLTSRALQTPQCSPGGLTVTPNPARTIYTTRISLTTFNIQDGPDFQDRVVNSETPVVVDFHAQWCGPCKILGPRLEKMVAKQHGKVVMAKVDIDDHTDLAIEYEVSAVPTVLAMKNGDVVDKFVGIKDEDQLEAFLKKLIG

SEQ ID NO: 23832 - protein, 55 aa, Homo sapiens
LSPPTLSRLRTRCRPSSVWWWEMGPWARPAFSSATPPTPFPESTSPPCLTTIQPM

SEQ ID NO: 23833 - protein, 66 aa, Homo sapiens
VATAQTRLRSYSCASLRFSSATMSDKPDMAEIEKFDKSKLKKTETQEKNPLPSKETIEQEKQAGES

SEQ ID NO: 23834 - protein, 14 aa, Homo sapiens
IDQQQLTQQQLNGN

SEQ ID NO: 23835 - protein, 190 aa, Homo sapiens
LIVAAGVGEFEAGISKNGQTSEHALLAYTLDVKQLIVGVNKMDSTEPPCSQKRYEEIVKEVSTYIKKIGYNPNTVAFVPISGWNDDNMLEATANVPSFKGWKVTCKDGNASGTTLLEALDYILPPSGPTDKPLRLPLQDVHKIGGIGTVLGGQVKTGVLKPGMVVSFAAVDVTTEIKSVEMHQEALSEIK

SEQ ID NO: 23836 - protein, 284 aa, Homo sapiens [sequence omitted]

SEQ ID NO: 23837 - protein, 137 aa, Homo sapiens
MYIQECEGLIRQLQVDLQILRDENYYQLEELAFRVMRLQDELVTLRLECTNLYRKGHFTSLELVPPSTLTTTHLKAEPLTKATHSSSTSWFRKPMTRAELVAISSSEDEGNLRFVYELLSWVEEMQVGAYPKAYAVH

SEQ ID NO: 23838 - protein, 307 aa, Homo sapiens
MKYILVTGGVISGIGKGIIASSVGTILKSCGLHVTSIKIDPYINIDAGTFSPYEHGEVFVLDDGGEVDLDLGNYERFLDIRLTKDNNLTTGKIYQYVINKERKGDYLGKTVQVVPHITDAIQEWVMRQALIPVDEDGLEPQVCVIELGGTVGDIESMPFIEAFRQFQFKVKRENFCNIHVSLVPQPSSTGEQKTKPTQNSVRELRGLGLSPDLVVCRCSNPLDTSVKEKISMFCHVEPEQVICVHDVSSIYRVPLLLEEQGVVDYFLRRLDLPIERQPRKMLMKWKEMADRFACNEELGVLASFTLL

SEQ ID NO: 23839 - protein, 172 aa, Homo sapiens
MESMFSSPAEAALQRETGVPGLLTPLPDLDGVYELERVAGFVRDLGCERVALQFPDQLLGDAVAVAARLEETTGSKMFILGDTAYGSCCVDVLGAEQAGAQALIHFGPACLSPPARPLPVAFVLRQRSVALELCVKAFEAQNPDPKAPVVLLSEPACAHALGKGFCLCMHKG

SEQ ID NO: 23840 - protein, 105 aa, Homo sapiens
MSEYLRMSGIYWGLTVMDLMGQLHRMNREEILAFIKSCQHECGGISASIGHDPHLLYTLSAVQILTLYDSINVIDVNKVVEYVKGLQKEDGSFAGDIWGPTKQLV

SEQ ID NO: 23841 - protein, 84 aa, Homo sapiens [sequence omitted]

SEQ ID NO: 23842 - protein, 25 aa, Homo sapiens
MNFDGGFGCRPGSESHAGQVIYEYR

SEQ ID NO: 23843 - protein, 51 aa, Homo sapiens
MGYKAGKICSLKVYLLIPPPGITILLPKRPPKTTEDKEETIQKLEVRRKCA

SEQ ID NO: 23844 - protein, 69 aa, Homo sapiens
MGTVKAQKEKRFLFWWGFVSEFWPMEPRGGLAQNISLWILSSGNWMPTRRVILESCVGDHKAFVSQVPE

SEQ ID NO: 23845 - protein, 144 aa, Homo sapiens
MGHPEIGDAIARLKEVLEYNAIGGKYNRGLTVVVAFRELVEPRKQDADSLQRAWTVGWCVELLQAFFLVADDIMDSSLTRRGQICWYQKPGVGLDAINDANLLEACIYRLLKLYCREQPYYLNLIELFLQVYCRQGPMPRGCPW

SEQ ID NO: 23846 - protein, 117 aa, Homo sapiens
MAGIDGEKEHANAKKILLEMGEFFQIQDNKCSWLVVQCLQRATPEQYQILKENYGQKEAEKVARVKALYEELDLPAVFLQYEEDSYSHIMALIEQYAAPLPPAVFLGLARKIYKRRK

SEQ ID NO: 23847 - protein, 255 aa, Homo sapiens [sequence omitted]

SEQ ID NO: 23848 - protein, 211 aa, Homo sapiens
MKSVKVSENFSCNITLMCSVKGAEKSVLYSWTPREPHASESNGGSILTVSRTPCDPDLPYICTAQNPVSQRSSLPVHVGQFCTDPGASRGGTTGETVVGVLGEPVTLPLALPACRDTEKVVWLFNTSIISKEREEAATADPLIKSRDPYKNRVWVSSQDCSLKISQLKIEDAGPYHAYVCSEASSVTSMTHVTLLIYRESLGRAPITRFLL

SEQ ID NO: 23849 - protein, 341 aa, Homo sapiens
MTEAEKQMLVSEVNLLRELKHPNIVRYYDRIIDRTNTTLYIVMEYCEGGDLASVITKGTKERQYLDEEFVLRVMTQLTLALKECHRRSDGGHTVLHRDLKPANVFLDGKQNVKLGDFGLARILNHDTSFAKTFVGTPYYMSPEQMNRMSYNEKSDIWSLGCLLYELCALMPPFTAFSQKELAGKIREGKFRRIPYRYSDELNEIITRMLNLKDYHRPSVEEILENPLIADLVADEQRRNLERRGRQLGEPEKSQDSSPVLSELKLKEIQLQERERALKAREERLEQKEQELCVRERLAEDKLARAENLLKNYSLLKERKFLSLASNPGMRINLVNRSWCYK

SEQ ID NO: 23850 - protein, 59 aa, Homo sapiens
MAALGAVGRPQPNPGRGLGGGVSAGRSLWSRKVWLWRQMGLGGSSAGGGGGRSGSSWPC

SEQ ID NO: 23851 - protein, 366 aa, Homo sapiens
MHAHYRKHRKLQTSSRDCLPPAACFRRRRLARRPGYMRSSTGPGIGFLSPAVGTLFRFPGGVSGEESHHSESRARQCGLDSRGLLVRSPVSKSAAAPTVTSVRGTSAHFGIQLRGGTRLPDRLSWPCGPGSAGWQQEFAAMDSSETLDASWEAACSDGARRVRAAGSLPSAELSSNSCSPGCGPEVPPTPPGSHSAFTSSFSFIRLSLGSAGERGEAEGCPPSREAESHCQSPQEMGAKAASLDGPHEDPRCLSRPFSLLATRVSADLAQAARNSSRPERDMHSLPDMDPGSSSSLDPSLAGCGGDGSSGSGDAHSWDTLLRKWEPVLRDCLLRNRRQMEVISLRLKLQKLQEDAVENDDYDKGEF

SEQ ID NO: 23852 - protein, 98 aa, Homo sapiens
MLEMRRRKSEEIQKRFLQSSSEVESPAVPSSSRQPPAQPPRTGSEFPRLEGAPATMTPKLGRGVLEGDDVLFYDESPPPRPKLSALAEAKKVTGISSL

SEQ ID NO: 23853 - protein, 916 aa, Homo sapiens
MAARSGQAEVVRYLVQDGAQVEAKAKDDQTPLHISARLGKADIVQQLLQQGASPNAATTSGYTPLHLSAREGHEDVAAFLLDHGASLSITTKKGFTPLHVAAKYGKLEVANLLLQKSASPDAAGKSGLTPLHVAAHYDNQKVALLLLDQGASPHAAAKNGYTPLHIAAKKNQMDIATTLLEYGADANAVTRQGIASVHLAAQEGHVDMVSLLLGRNANVNLSNKSGLTPLHLAAQEDRVNVAEVLVNQGAHVDAQTKMGYTPLHVGCHYGNIKIVNFLLQHSAKVNAKTKNGYTPLHQAAQQGHTHIINVLLQNNASPNELTVNGNTALGIARRLGYISVVDTLKIVTEETMTTTTVTEKHKMNVPETMNEVLDMSDDEGEDAMTGDTDKYLGPQDLKELGDDSLPAEGYMGFSLGARSASPKISSDRSYTLNRSSYARDSMMIEELLVPSKEQHLTFTREFDSDSLRHYSWAADTLDNVNLVSSPIHSGYSSPLPQYDSRFLVSFMVDARGGSMRGSRHHGMRIIIPPRKCTAPTRITCRLVKRHKLANPPPMVEGEGLASRLVEMGPAGAQFLGPVIVEIPHFGSMRGKERELIVLRSENGETWKEHQFDSKNEDLTELLNGMDEELDSPEELGKKRICRIITKDFPQYFAVVSRIKQESNQIGPEGGILSSTTVPLVQASFPEGALTKRIRVGLQAQPVPDEIVKKILGNKATFSPIVTVEPRRRKFHKPITMTIPVPPPSGEGVSNGYKGDTTPNLRLLCSITGGTSPAQWEDITGTTPLTFIKDCVSFTTNVSARFWLADCHQVLETVGLATQLYRELICVPYMAKFVVFAKMNDPVESSLRCFCMTDDKVDKTLEQQENFEEVARSKDIEVPCSQKQVHFITYSRYEVLFCGLNSTHYKIPSALLILLLL

SEQ ID NO: 23854 - protein, 78 aa, Homo sapiens
MKKIRLESEEEGVPSTAIREISLLKELRHPNIVSLQDVLMQDSRLYLIFEFLSMDLKKYLDSIPPGQYMDSSLVKVKA

SEQ ID NO: 23855 - protein, 438 aa, Homo sapiens
MYNLLAYIKHLDGNNEAALECLRQAEELIQQEHADQAEIRSLVTWGNYAWVYYHLGRLSDAQIYVDKVKQTCKKFSNPYSIEYSELDCEEGWTQLKCGRNERAKVCFEKALEEKPNNPEFSSGLAIAMYHLDNHPEKQFSTDVLKQAIELSPDNQYVKVLLGLKLQKMNKEAEGEQFVEEALEKSPCQTDVLRSAAKFYRRKGDLDKAIELFQRVLESTPNNGYLYHQIGCCYKAKVRQMQNTGESEASGNKEMIEALKQYAMDYSNKALEKGLNPLNAYSDLAEFLETECYQTPFNKEVPDAEKQQSHQRYCNLQKYNGKSEDTAVQHGLEGLSISKKSTDKEEIKDQPQNVSENLLPQNAPNYWYLQGLIHKQNGDLLQAAKCYEKELGRLLRDAPSGIGSIFLSASELEDGSEEMGQGAVSSSPRELLSNSEQLN

SEQ ID NO: 23856 - protein, 267 aa, Homo sapiens
MHCSGLAWHPDIATQLVLCSEDDRLPVIQLWDLRFASSPLKVLESHSRGILSVSWSQADAELLLTSAKDSQILCRNLGSSEVVYKLPTQSSWCFDVQWCPRDPSVFSAASFNGWISLYSVMGRSWEVQHMRQADKISSSFSKGQPLPPLQVPEQVAQAPLIPPLKKPPKWIRRPTGVSFAFGGKLVTFGLPSTPAHLVPQPCPRLVFISQVTTESEFLMRSAELQEALGSGNLLNYCQNKSQQALLQSEKMLWQFLKPARDSSGARR

SEQ ID NO: 23857 - protein, 226 aa, Homo sapiens
MKIERPVTVFLQLKRKRGGDVSDSKQFTYYPLVEDKEEVQRKRRKALPTFSQPFGGGSHMGGGSGGAAGGYGGAGGGGSLGFFPSSLAYSPYQSGAGPMGCYPGGGGGAQMAATVPSRDSGEEAAEPSAPSRTPQCEPQAPEMLQRAREYNARLFGLAQRSARALLDYGVTADARALLAGQRHLLTAQDENGDTCCETLSAGTAMPWATCWVPWAPARETMRAVGP

SEQ ID NO: 23858 - protein, 177 aa, Homo sapiens [sequence omitted]

SEQ ID NO: 23859 - protein, 125 aa, Homo sapiens
MNFCSRENFWLLINSTDPAGQLQWLVGELQAAEDRGDKVHIIGHIPPGHCLKSWSWNYYRIVARYENTLAAQFFGHTHVDEFEVFYDEETLSRPLAVAFLAPSATTYIGLNPVSPTSLQVTVCTK

SEQ ID NO: 23860 - protein, 122 aa, Homo sapiens [sequence omitted]

SEQ ID NO: 23861 - protein, 784 aa, Homo sapiens
MQLSADRHSCQDTDECLGTPCQQRCKNSIGSYKCSCRTGFHLHGNRHSCVDVNECRRPLERRVCHHSCHNTVGSFLCTCRPGFRLRADRVSCEAFPKAVLAPSAILQPRQHPSKMLLLLPEAGRPALSPGHSPPSGAPGPPAGVRTTRLPSPTPRLPTSSPSAPVWLLSTLLATPVPTASLLGNLRPPSLLQGEVMGTPSSPRGPESPRLAAGPSPCWHLGAMHESRSRWTEPGCSQCWCEDGKVTCEKVRCEAACSHPIPSRDGGCCPSCTGCFHSGVVRAEGDVFSPPNENCTVCVCLAGNVSCISPECPSGPCQTPPQTDCCTCVPVRCYFHGRWYADGAVFSGGGDECTTCVCQNGEVECSFMPCPELACPREEWRLGPGQCCFTCQEPTPSTGCSLDDNGVEFPIGQIWSPGDPCELCICQADGSVSCKRTDCVDSCPHPIRIPGQCCPDCSAGCTYTGRIFYNNETFPSVLDPCLSCICLLGSVACSPVDCPITCTYPFHPDGECCPVCRDCNYEGRKVANGQVFTLDDEPCTRCTCQLGEVSCEKVPCQRACADPALLPGDCCSSCPGFPVSSGRKAGALPSRKCHSAKLVGACMETEAPVNCSSCPGPPTASPSRPVLHLLQLLLRTNLMKTQTLPTSPAGAHGPHSLALGLTATFPGEPGASSTLTRAFDPSRSPHSTSSFPRGSSATSCDSRALVLSLWGPDSVQVASSAWHPPDGSFSTFHDGPQPLEDPITLLGPRVLSPTTSRLSTALAATTHPGPQQPPVGASRGEESTM

SEQ ID NO: 23862 - protein, 40 aa, Homo sapiens
MLMTPTSAPRSVMKSFIKRNTPLRMDPKCSFVVSKAFSCR

SEQ ID NO: 23863 - protein, 9 aa, Homo sapiens
MRKEKIKGF

SEQ ID NO: 23864 - protein, 13 aa, Homo sapiens
MRRAREARPSKKK

SEQ ID NO: 23865 - protein, 66 aa, Homo sapiens
MIFQLQNKVRPLVLFSRTESPSPLQRPLVPVAAMIPFRIHGALFHIWIKRVQQKSWVKNLAYKLRS

SEQ ID NO: 23866 - protein, 131 aa, Homo sapiens
MTLHEPANSSASQSTDLCDFSGDLDPAPNPPHFPSHVIKATFAYISNCHKTKLKSILEILSKSPDSYQKILLAICEQAAETNNVYKKHRILKIYHLFVSLLLKDIKSGLGGAWAFVLRDVIYTLIHYINQR

SEQ ID NO: 23867 - protein, 53 aa, Homo sapiens
MKAFLSLARFSDTQYQRIENYMKSSEFENKQALLKRAKEEVGLLREHKIQTNR

SEQ ID NO: 23868 - protein, 28 aa, Homo sapiens
MRRAQDAAVPRSAAGGAPQPPSWLRRSW

SEQ ID NO: 23869 - protein, 37 aa, Homo sapiens
MRRAQDAAVPRSAAGGAPQPPSWLRRSWLTCCGSGRG

SEQ ID NO: 23870 - protein, 13 aa, Homo sapiens
MPMSEVMLEKRSS

SEQ ID NO: 23871 - protein, 71 aa, Homo sapiens
MAQNLKDLAGRLPAGPRGMGTALKLLLGAGAVAYGVRESVFTVEGGHRAIFFNRIGGVQQDTILAEGLHFR

SEQ ID NO: 23872 - protein, 98 aa, Homo sapiens
MILAHGKLRLPGSSDSPASASRVAGITGMCHHAPLARLVSNTLPQVILPPLGLQQAEELPRRQEVEQNTPSLVPIIDNIMTLHVMDQLTPSRSVNWFI

SEQ ID NO: 23873 - protein, 72 aa, Homo sapiens
MILAHGKLRLPGSSDSPASASRVAGITGMCHHAPLARLVSNTLPQVILPPLGLQTLHVMDQLTPSRSVNWFI

SEQ ID NO: 23874 - protein, 36 aa, Homo sapiens [sequence omitted]

SEQ ID NO: 23875 - protein, 119 aa, Homo sapiens
MSKEAVRNDRNKKKKEVKEEGSPDSYELSPQLEELITKVSKAHQETFPSLCQLGKYTTNSSADHRVQLDLGLWDKFSELATKCIIKIVEFAKRLPGFTGLSIADQITLLKAACLDILVS

SEQ ID NO: 23876 - protein, 100 aa, Homo sapiens [sequence omitted]

SEQ ID NO: 23877 - protein, 1701 aa, Homo sapiens
MKLAQHARHLEVQILADQYGNAVSLFGRDCSIQRRHQKIVEEAPATIAPLAIFEFMEQCAIRLAKTVGYVSAGTVEYLYSQDGSFHFLELNPRLQVEHPCTEMIADVNLPAAQLQIAMGVPLHRLKDIRLLYGESPWGVTPISFETPSNPPLARGHVIAARITSENPDEGFKPSSGTVQELNFRSSKNVWGYFSVAATGGLHEFADSQFGHCFSWGENREEAISNMVVALKELSIRGDFRTTVEYLINLLETESFQNNDIDTGWLDYLIAEKVQAEKPDIMLGVVCGALNVADAMFRTCMTDFLHSLERGQVLPADSLLNLVDVELIYGGVKYILKVARQSLTMFVLIMNGCHIEIDAHRLNDGGLLLSYNGNSYTTYMKEEVDSYRITIGNKTCVFEKENDPTVLRSPSAGKLTQYTVEDGGHVEAGSSYAEMEVMKMIMTLNVQERGRVKYIKRPGAVLEAGCVVARLELDDPSKVHPAEPFTGELPAQQTLPILGEKLHQVFHSVLENLTNVMSGFCLPEPVFSIKLKEWVQKLMMTLRHPSLPLLELQEIMTSVAGRIPAPVEKSVRRVMAQYASNITSVLCQFPSQQIATILDCHAATLQRKADREVFFINTQSIVQLVQRYRSGIRGYMKTVVLDLLRRYLRVEHHFQQAHYDKCVINLREQFKPDMSQVLDCIFSHAQVAKKNQLVIMLIDELCGPDPSLSDELISILNELTQLSKSEHCKVALRARQILIASHLPSYELRHNQVESIFLSAIDMYGHQFCPENLKKLILSETTIFDVLPTFFYHANKVVCMASLEVYVRRGYIAYELNSLQHRQLPDGTCVVEFQFMLPSSHPNRMTVPISITNPDLLRHSTELFMDSGFSPLCQRMGAMVAFRRFEDFTRNFDEVISCFANVPKDTPLFSEARTSLYSEDDCKSLREEPIHILNVSIQCADHLEDEALVPILRTFVQSKKNILVDYGLRRITFLIAQEKEFPKFFTFRARDEFAEDRIYRHLEPALAFQLELNRMRNFDLTAVPCANHKMHLYLGAAKVKEGVEVTDHRFFIRAIIRHSDLITKEASFEYLQNEGERLLLEAMDELEVAFNNTSVRTDCNHIFLNFVPTVIMDPFKIEESVRYMVMRYGSRLWKLRVLQAEVKINIRQTTTGSAVPIRLFITNESGYYLDISLYKEVTDSRSGNIMFHSFGNKQGPQHGMLINTPYVTKDLLQAKRFQAQTLGTTYIYDFPEMFRQALFKLWGSPDKYPKDILTYTELVLDSQGQLVEMNRLPGGNEVGMVAFKMRFKTQEYPEGRDVIVIGNDITFRIGSFGPGEDLLYLRASEMARAEGIPKIYVAANSGARIGMAEEIKHMFHVAWVDPEDPHKGFKYLYLTPQDYTRISSLNSVHCKHIEEGGESRYMITDIIGKDDGLGVENLRGSGMIAGESSLAYEEIVTISLVTCRAIGIGAYLVRLGQRVIQVENSHIILTGASALNKVLGREVYTSNNQLGGVQIMHYNGVSHITVPDDFEGVYTILEWLSYMPKDNHSPVPIITPTDPIDREIEFLPSRAPYDPRWMLAGRPHPTLKGTWQSGFFDHGSFKEIMAPWAQTVVTGRARLGGIPVGVIAVETRTVEVAVPADPANLDSEAKIIQQAGQVWFPDSAYKTAQAVKDFNREKLPLMIFANWRGFSGGMKGCLGTWRDVSWWKIRAMLPMHIGEGSV

SEQ ID NO: 23878 - protein, 415 aa, Homo sapiens [sequence omitted]

SEQ ID NO: 23879 - protein, 185 aa, Homo sapiens [sequence omitted]

SEQ ID NO: 23880 - protein, 55 aa, Homo sapiens
MSESLVVCDVAEDLVEKLRKFRFRKETNNAAIIMKIDKDKRLVVLDEELEVCSMN

SEQ ID NO: 23881 - protein, 499 aa, Homo sapiens
MDGYILSLVQKKTHPVRTNKPRTSVNADPTKGLLRNGSVCVRAPGGVSQGNSVNLKNSKQACLPSGGIPSLNNGTFSPPKQWSKESKAEQAESKRVPLPEGCPSGAASDLQSKHLPKTAKPASQEHARCSAIGTGESPKESAQLSGASPKESPSRGPAPPQENKVVQPLKKMSQKNSLQGVPPATPPLLSTAFPVEERPALDFKSEGSSQSLEEAHLVKAQFIPGQQPSVRLHRGHRNMGVVKNSSLKHRGPALQGLENGLPTVREKTRAGSKKCRFPDDLDTNKKLKKASSKGRKSGGGPEAGVPGRPAGGGHRAGSRAHGHGREAVVAKPKHKRTDYRRWKSSAEISYEEALRRARRGRRENVGLYPAPVPLPYASPYAYVASDSEYSAECESLFHSTVVDTSEDEQSNYTTNCFGDSESSVSEGEFVGESTTTSDSEESGGLIWSQFVQTLPIQTVTAPDLHNHPAKTFVKIKASHNLKKKILRFRSGSLKLMTTV

SEQ ID NO: 23882 - protein, 74 aa, Homo sapiens
MEKRRCREELSHICRGPCTCQVMSYEVDLLTHEWVTTRSLETAGWTPTCAFQLLLEPQGPRKAVWSLQPASRDF

SEQ ID NO: 23883 - protein, 248 aa, Homo sapiens
MGIYGSVPYLLAHKLGRTIGIFWLNASETLVEINTEPAVEYTLTQMGPVAAKQKVRSRTHVHWMSESGIIDVFLLTGPTPSDVFKQYSHLTGTQAMPPLFSLGYHQCRWNYEDEQDVKAVDAGFDEHDIPYDAMWLDIEHTEGKRYFTWDKNRFPNPKRMQELLRSKKRKLVVISDPHIKIDPDYSVYVKAKDQGFFVKNQEGEDFEGVCWPGLSSYLDFTNPKVREWYSSLFAFPVYQVGFYSFVLF

SEQ ID NO: 23884 - protein, 40 aa, Homo sapiens
MPSRMSNLSATRQVFLWSLGQATCLFYCKSCHEILRCEIG

SEQ ID NO: 23885 - protein, 266 aa, Homo sapiens
MLSGIEAAAGEYEDSELRCRVAVEELSPGGQPRRRQALRTAELSLGRNERRELMLRLQAPGPAGRPRCFPLRAARLFTRFAEAGRSTLRLPAHDTPGAGAVQLLLSDCPPDRLRRFLRTLRLKLAAAPGPGPASARAQLLGPRPRDFVTISPVQPEERRLRAATRVPDTTLVKRPVEPQAGAEPSTEAPRWPLPVKRLSLPSTKPQLSEEQAAVLRAVLKGQSIFFTGSAGSGGREEVGGQWWGGIEEQGDLSNFAPVQEQGSHIC

SEQ ID NO: 23886 - protein, 24 aa, Homo sapiens
MWERLNCAAEDFYSRLLQLMSKCS

SEQ ID NO: 23887 - protein, 34 aa, Homo sapiens
MPPAARWPGPQCPKRVFMLFPTALMVPSDRLALL

SEQ ID NO: 23888 - protein, 30 aa, Homo sapiens
MLFIFQQRELSKASKSDATSGILNSTNIQS

SEQ ID NO: 23889 - protein, 90 aa, Homo sapiens
MGRKKIQITRIMDERNRQVTFTKRKFGLMKKAYELSVLCDCEIALIIFNSSNKLFQYASTDMDKVLLKYTEYNEPHESRTNSDIVEVTHI

SEQ ID NO: 23890 - protein, 365 aa, Homo sapiens
MPVIPALWEAKAGGSLEVGSSRPAWPTCLQGNTVRDDGARSMAEALASNRTLSMLHLQKNSIGPMGAQRMADALKQNRSLKELMFSSNSIGDGGAKALAEALKVNQGLESLDLQSNSISDAGVAALMGALCTNQTLLSLSLRENSISPEGAQAIAHALCANSTLKNLDLTANLLHDQGARAIAVAVRENRTLTSLHLQWNFIQAGAAQALGQALQLNRSLTSLDLQENAIGDDGACAVARALKVNTALTALYLQVASIGASGAQVLGEALAVNRTLEILDLRGNAIGVAGAKALANALKVNSSLRRLNLQENSLGMDGAICIATALSGNHRLQHINLQGNHIGDSGARMISEAIKTNAPTCTVEM

SEQ ID NO: 23891 - protein, 933 aa, Homo sapiens
MRCLAPRPAGSYLSEPQGSSQCATMELGPLEGGYLELLNSDADPLCLYHFYDQMDLAGEEEIELYSEPDTDTINCDQFSRLLCDMEGDEETREAYANIAELDQYVFQDSQLEGLSKDIFKHIGPDEVIGESMEMPAEVGQKSQKRPFPEELPADLKHWKPAEPPTVVTGSLLVGPVSDCSTLPCLPLPALFNQEPASGQMRLEKTDQIPMPFSSSSLSCLNLPEGPIQFVPTISTLPHGLWQISEAGTGVSSIFIYHGEVPQASQVPPPSGFTVHGLPTSPDRPGSTSPFAPSATDLPSMPEPALTSRANMTEHKTSPTQCPAAGEVSNKLPKWPEPVEQFYRSLQDTYGAEPAGPDGILVEVDLVQARLERSSSKSLERELATPDWAERQLAQGGLAEVLLAAKEHRRPRETRVIAVLGKAGQGKSYWAGAVSRAWACGRLPQYDFVFSVPCHCLNRPGDAYGLQDLLFSLGPQPLVAADEVFSHILKRPDRVLLILDGFEELEAQDGFLHSTCGPAPAEPCSLRGLLAGLFQKKLLRGCTLLLTARPRGRLVQSLSKADALFELSGFSMEQAQAYVMRYFESSGMTEHQDRALTLLRDRPLLLSHSHSPTLCRAVCQLSEALLELGEDAKLPSTLTGLYVGLLGRAALDSPPGALAELAKLAWELGRRHQSTLQEDQFPSADVRTWAMAKGLVQHPPRAAESELAFPSFLLQCFLGALWLALSGEIKDKELPQYLALTPRKKRPYDNWLEGVPRFLAGLIFQPPARCLGALLGPSAAASVDRKQKVLARYLKRLQPGTLRARQLLELLHCAHEAEEAGIWQHVVQELPGRLSFLGTRLTPPDAHVLGKALEAAGQDFSLDLRSTGICPSGLGSLVGLSCVTRFRWGEGLGEETSLCWALTAVLVPSPVLCGVSFSMQSSRVGQNGFSPFLR

SEQ ID NO: 23892 - protein, 106 aa, Homo sapiens
MFEIYSQHFQPDEDFSNCAKEIASKHFRFAEMLYYKVLESVIEQEQKRLGDMDLSGILEQDAFHRSLLACCLEVVTFSYKPPGNFPFITEIFDVPLYHFYKVFLKI

SEQ ID NO: 23893 - protein, 574 aa, Homo sapiens
MKAWFYGIPPGIGPDCQELLPPPPAPMAHIPSGGAPAAGAAPMGPQYCVCKVELSVSGQNLLDRDVTSKSDPFCVLFTENNGRWIEYDRTETAINNLNPAFSKKFVLDYHFEEVQKLKFALFDQDKSSMRLDEHDFLGQFSCSLGTIVSSKKITRPLLLLNDKPAGKGLITIAAQELSDNRVITLSLAGRRLDKKDLFGKSDPFLEFYKPGDDGKWMLVHRTEVIKYTLDPVWKPFTVPLVSLCDGDMEKPIQVMCYDYDNDGGHDFIGEFQTSVSQMCEARDSVPLEFECINPKKQRKKKNYKNSGIIILRSCKINRDYSFLDYILGGCQLMFTVGIDFTASNGNPLDPSSLHYINPMGTNEYLSAIWAVGQIIQDYDSDKMFPALGFGAQLPPDWKVSHEFAINFNPTNPFCSGVDGIAQAYSACLPHIRFYGPTNFSPIVNHVARFAAQATQQRTATQYFILLIITDGVISDMEETRHAVVQASKLPMSIIIVGVGNADFAAMEFLDGDSRMLRSHTGEEAARDIVQFVPFREFRNAAKETLAKAVLAELPQQVVQYFKHKNLPPTNSEPA

SEQ ID NO: 23894 - protein, 129 aa, Homo sapiens
MSLPSTSTPPTPSAQQYFILLIITDGVISDMEETRHAVVQASKLPMSIIIVGVGNADFAAMEFLDGDSRMLRSHTGEEAARDIVQFVPFREFRNAAKETLAKAVLAELPQQVVQYFKHKNLPPTNSEPA

SEQ ID NO: 23895 - protein, 33 aa, Homo sapiens
MGVHATPSLHPFTDGHLSCFRFSCHECLSMGVP

SEQ ID NO: 23896 - protein, 452 aa, Homo sapiens
MATLILCRVGAQPPTGAEEGACLVDLITSSPQCLHGLVGWVHGHAASCGALPHLQRTLSSEYCGVIQVVWGCDQGHDYTMDTSSSCKAFLLDSALAVKWPWDKETAPRLPQHRGWNPGDAPQTSQGRGTGTPVGAETKTLPSTDVAQPPSDSDAVGPRSGFPPQPSLPLCRAPGQLGEKQLPSSTSDDRVKDEFSDLSEGDVLSEDENDKKQNAQSSDESFEPYPERKVSGKKSESKEAKKSEEPRIRKKPGPKPGWKKKLRCEREELPTIYKCPYQGCTAVYRGADGMKKHIKEHHEEVRERPCPHPGCNKVFMIDRYLQRHVKLIHTEVRNYICDECGQTFKQRKHLLVHQMRHSGAKPLQCEVCGFQCRQRASLKYHMTKHKAETELDFACDQCGRRFEKAHNLNVHMSMVHPLTQTQDKALPLEAEPPPGPPSPSVTTEGQAVKPEPT

SEQ ID NO: 23897 - protein, 6 aa, Homo sapiens
MIDHEA

SEQ ID NO: 23898 - protein, 768 aa, Homo sapiens
MQLWGPGGCGRASLRRRPRGPRPVRPRARCGRLLPPPSGVFVCGGVGGERESAQRRRVPAPSQGGWGPLRAARRRRLARTPVARAARTAPGAPPPPAAARTCPSRSPASRQRRPPAPRPRAPAPAPSLLPGRAPRPRHEERAMIPANASARKGPEGKYPLHYLVWHNRHRELEKEVRAGQVDIEQLDPRGRTPLHLATTLGHLECARVLLAHGADVGRENRSGWTVLQEAVSTRDLELVQLVLRYRDYQRVVKRLAGIPVLLEKLRKAQDFYVEMKWEFTSWVPLVSKICPSDTYKVWKSGQNLRVDTTLLGFDHMTWQRGNRSFVFRGQDTSAVVMEIDHDRRVVYTETLALAGQDRELLLAAAQPTEEQVLSRLTAPVVTTQLDTKNISFERNKTGILGWRSEKTEMVNGYEAKVYGASNVELITRTRTEHLSEQHKGKVKGCKTPLQSFLGIAEQHGGPQNGTLITQTLSQANPTAITAEEYFNPNFELGNRDMGRPMELTTKTQKFKAKLWLCEEHPLSLCEQVAPIIDLMAVSNALFAKLRDFITLRLPPGFPVKIEIPIFHILNARITFGNLNGCDEPVPSVRGSPSSETPSPGSDSSSVSSSSSTTSCRGCEISPALFEAPRGYSMMGGQREAATRDDDDDLLQFAIQQSLLEAGSEYDQVTIWEALTNSKPGTHPMSYEGRRQDRSAPPTPQRQPAPPASVPSPRPSSGPGSGGHVFRSYDEQLRLAMELSAQEQEERRRRARQEEEELERILRLSLTEQ

SEQ ID NO: 23899 - protein, 1208 aa, Homo sapiens
MFPVAGGIRPPQGLMPMQQQGFPMVSVMQPNMQGIMGMNYSSQMSQGPIAMQAGIPMGPMPAAGMPYLGQAPFLGMRPPGPQYTPDMQKQFAEEQQKRFEQQQKLLEEERKRRQFEEQKQKLRLLSSVKPKTGEKSRDDALEAIKGNLDGFSRDAKMHPTPASHPKKPGVGVFPSQDPAQPRMPPWIYNESLVPDAYKKILETTMTPTGIDTAKLYPILMSSGLPRETLGQIWALANRTTPGKLTKEELYTVLAMIAVTQRGVPAMSPDALNQFPAAPIPTLSGFSMTLPTPVSQPTVIPSGPAGSMPLSLGQPVMGINLVGPVGGAAAQASSGFIPTYPANQVVKPEEDDFQDFQDASKSGSLDDSFSDFQELPASSKTSNSQHGNSAPSLLMPLPGTKALPSMDKYAVFKGIAADKSSENTVPPGDPGDKYSAFRELEQTAENKPLGESFAEFRSAGTDDGFTDFKTADSVSPLEPPTKDKTFPPSFPSGTIQQKQQTQVKNPLNLADLDMFSSVNCSSEKPLSFSAVFSTSKSVSTPQSTGSAATMTALAATKTSSLADDFGEFSLFGEYSGLAPVGEQDDFADFMAFSNSSISSEQKPDDKYDALKEEASPVPLTSNVGSTVKGGQNSTAASTKYDVFRQLSLEGSGLGVEDLKDNTPSGKSDDDFADFHSSKFSSINSDKSLGEKAVAFRHTKEDSASVKSLDLPSIGGSSVGKEDSEDALSVQFDMKLADVGGDLKHVMSDSSLDLPTVSGQHPPAADIEDLKYAAFGSYSSNFAVSTLTSYDWSDRDDATQGRKLSPFVLSAGSGSPSATSILQKKETSFGSSENITMTSLSKVTTFVSEDALPETTFPALASFKDTIPQTSEQKEYENRDYKDFTKQDLPTAERSQEATCPSPASSGASQETPNECSDDFGEFQSEKPKISKFDFLVATSQSKMKSSEEMIKSELATFDLSVQGSHKRSLSLGDKEISRSSPSPALEQPFRDRSNTLNEKPALPVIRDKYKDLTGEVEENERYAYEWQRCLGSALNVIKKANDTLNGISSSSVCTEVIQSAQGMEYLLGVVEVYRVTKRVELGIKATAVCSEKLQQLLKDIDKVWNNLIGFMSLATLTPDENSLDFSSCMLRPGIKNAQELACGVCLLNVDSRSRKEEKPAEEHPKKAFNSETDSFKLAYGGHQYHASCANFWINCVEPKPPGLVLPDLL

SEQ ID NO: 23900 - protein, 56 aa, Homo sapiens
MANCERTFIAIKPDGVQRGLVGEIIKRFEQKGFRLVGLKFMQVSGLHCSHFDSFIV

SEQ ID NO: 23901 - protein, 57 aa, Homo sapiens
MAWERPQPGLHRLPRLLDYFSLCVPGWSTVAQSWVTAASSSCAHVSLPPHPSEWLGL

SEQ ID NO: 23902 - protein, 54 aa, Homo sapiens [sequence omitted]

SEQ ID NO: 23903 - protein, 82 aa, Homo sapiens
MSSGGRMQRMGRLRPWLCVPLRVGAGLGPNSTAAGFSLISEPRRWQSGRPGQVNPRAAGAQAPTPAQRGRKGPPPAQRAQRP

SEQ ID NO: 23904 - protein, 270 aa, Homo sapiens [sequence omitted]

SEQ ID NO: 23905 - protein, 366 aa, Homo sapiens
MEDLSLDLGALQGSEYLQDLGLGAPSHSQPGETPDSRPTGEEPGRDSLFSSLAGSQDLSRRRSWERSRSCSESWRRLSLDASAVDEEPCLPRTLASLALNLPGGGLKTWTQGCLSGGGTPAESPGKECDSPKKRGRSRSVPVSFYEIRSPEISPGLEVPTPPVQGLEPPVLECMEKDHVEPDHVLIVQQVLQELRQYHGARQRACMSASPGGAHSNLTWFEFLSESEDGAGKNEKSDKSTSVKRRLSCLRSRVTRQKEKGKSPAHLKDKGQDARERRECVNGHQLLQGTFSGPSSCPLCGKPFLSSGKSGGPIHPPGGQPLSLLHVLSIILLGSLLMCASSFCFALSSAAPWREPGISPWAQGPLG

SEQ ID NO: 23906 - protein, 583 aa, Homo sapiens
MSVLNLERASPGSHSSRHHRIHTGEKLYECSECGKGFPYNSDLSIHEKIHTGERHHECTDCGKAFTQKSTLKIHQKIHTGERSYICIECGQAFIQKTQLIAHRRIHSGEKPYECNNCGKSFISKSQLQVHQRVHTRVKPYICTEYGKVFSNNSNLITHEKIQSREKSSICTECGKAFTYRSELIIHQRIHTGEKPYECSDCGRAFTQKSALTVHQRIHTGEKSYICMKCGLAFIRKAHLITHQIIHTGEKPYKCGHCGKLFTSKSQLHVHKRIHTGEKPYVCNKCGKAFTNRSNLITHQKTHTGEKSYICSKCGKAFTQRSDLITHQRIHTGEKPYECNTCGKAFTQKSNLNIHQKIHTGERQYECHECGKAFNQKSILIVHQKIHTGEKPYVCTECGRAFIRKSNFITHQRIHTGEKPYECSDCGKSFTSKSQLLVHQPVHTGEKPYVCAECGKAFSGRSNLSKHQKTHTGEKPYICSECGKTFRQKSELITHHRIHTGEKPYECSDCGKSFTKKSQLQVHQRIHTGEKPYVCAECGKAFSNRSNLNKHQTTHTGDKPYKCGICGKGFVQKSVFSVHQSSHA

SEQ ID NO: 23907 - protein, 179 aa, Homo sapiens
MCTDIHSKCHKGEVETQPEPPSMRLKARPSSPGFSVLTCSAFSFYPPELQLRFLRNGLAAGTGQGDFGPNSDGSFHASSSLTVKSGDEHHYCCIVQHAGLAQPLRVELGEVPPGGDAPGFPLPCLTAAPVLPESDLPPHCCHLLESDCLEPHACQCPQNLMACPSQGQLPSVSCCFWPH

SEQ ID NO: 23908 - protein, 37 aa, Homo sapiens
MTAPSIPSGGRQSLSVRQHPAFMRTVCCLLTEPPVVY

SEQ ID NO: 23909 - protein, 81 aa, Homo sapiens [sequence omitted]

SEQ ID NO: 23910 - protein, 7 aa, Homo sapiens
MIFKLLH

SEQ ID NO: 23911 - protein, 635 aa, Homo sapiens
MQSKLQEVQGKKSSTVSTLKLSEGQRLSSLTFGCFLSRARSPPQVVKSEEMSKISSKEPEFTEGKDMEEMEIPEKSVDNQVLENNRGQRTLHQTPCGSEQNRKTRTSFATDGGISQNSGAPVSDWSSDEEDGSKGRSKSRCTSTLSSHTSEEGVQCSRMGSEMYLTASDDSSSIFEEETFGIKRPEHKKLYSWQQEAQWKALNSPLGKGNSELSKKEQDSSSDELNKKFQSQRLDYSSSSSEANTPSPILTPALMPKHPNSLSGKGTQLVPSSHLPPPKLRIPNVFSISVALAKRHLSQPQLSSDRMFGTNRNAISMIRPLRPQETDLDLVDGDSTEVLENMDTSCDDGLFSYDSLDSPNSDDQEHCDSAKKVAYSKPPTPPLHRFPSWESRIYAVAKSGIRMSEAFNMESVNKNSAATLSYTTSGLYTSLIYKNMTTPVYTTLKGKATQISSSPFLDDSSGSEEEDSSRSSSRTSESDSRSRSGPGSPRAMKRGVSLSSVASESDYAIPPDAYSTDTEYSQPEQKLPKTCSSSSDNGKNEPLEKSGYLLKMSGKVKSWKRRWFVLKGGELLYYKSPSDVIRKPQGHIELSASCSILRGDNKQTVQVLNFFFFFFFFVSCQTQFSIIQPNGKEIG

SEQ ID NO: 23912 - protein, 379 aa, Homo sapiens
MSRGYSENNNFLNNNNQMVLDMILYPLIGIPQTINWETIARLVPGLTPKECAKRFDELKSSGSSPVDNQYNSLMAAGESPVETLATYIKSSLLDIHGEFQETPVGHDAVSKTGRHSIASTRNCSSESENCTTHNGGEMTEESEGPNMVIHVCDEAKNLKEDFTCPRDLLISEMKYFAEYLSMDAQRWEEVDISVHCDVHIFNWLIKYIKRNTKENKDCEMPTLEPGNVISILISSEFLKMDSLVEQCIQYCHKNMNAIVATPCNMNCINANLLTRIADLFSHNEVDDLKDKKDKFKSKLFCKKIERLFDPEYLNPDSRSNAATLYRCCLCKKLLTKETERRIPCIPGKINVDRRGNIVYIHIRCREDKIHTCIFVYIYI

SEQ ID NO: 23913 - protein, 669 aa, Homo sapiens
MTSVRRCSYLKSCLKAPLLLGNVLRGRTLQLNCPSLWGCPGSLAACVLRVGQVGTSLWLSPEQGLPLVLLSTHKTLLDGILLPFMLLSQGLGVLRVAWDSRACSPALRALLRKLGGLFLPPEASLSLDSSEGLLARAVVQAVIEQLLVSGQPLLIFLEEPPGALGPRLSALGQAWVGFVVQAVQVGIVPDALLVPVAVTYDLVPDAPCDIDHASAPLGLWTGALAVLRSLWSRWGCSHRICSRVHLAQPFSLQEYIVSARSCWGGRQTLEQLLQPIVLGQCTAVPDTEKEQEWTPITGPLLALKEEDQLLVRRLSCHVLSASVGSSAVMSTAIMATLLLFKHQKGVFLSQLLGEFSWLTEEILLRGFDVGFSGQLRSLLQHSLSLLRAHVALLRIRQGDLLVVPQPGPGLTHLAQLSAELLPVFLSEAVGACAVRGLLAGRVPPQGPWELQGILLLSQNELYRQILLLMHLLPQDLLLLKPCQSSYCYCQEVLDRLIQCGLLVAEETPGSRPACDTGRQRLSRKLLWKPSGDFTDSDSDDFGEADGRYFRLSQQSHCPDFFLFLCRLLSPLLKAFAQAAAFLRQGQLPDTELGYTEQLFQFLQATAQEEGIFECADPKLAISAVWTFRDLGVLQQTPSPAGPRLHLSPTFASLDNQEKLEQFIRQFICS

SEQ ID NO: 23914 - protein, 20 aa, Homo sapiens
MAGILRLVVQWPPGRLQACF

SEQ ID NO: 23915 - protein, 512 aa, Homo sapiens
MTSNAKPCRTEEVVHKIIELLNVTELTQNALINDELVEWKRRQQSACIGGPPNACLDQLQNWFTIVAESLQQVRQQLKKLEELEQKYTYEHDPITKNKQVLWDRTFSLFQQLIQSSFVVERQPCMPTHPQRPLVLKTGVQFTVKLRLLVKLQELNYNLKVKVLFDKDVNERNTVKGFRKFNILGTHTKVMNMEESTNGSLAAEFRHLQLKEQKNAGTRTNEGPLIVTEELHSLSFETQLCQPGLVIDLETTSLPVVVISNVSQLPSGWASILWYNMLVAEPRNLSFFLTPPCARWAQLSEVLSWQFSSVTKRGLNVDQLNMLGEKLLGPNASPDGLIPWTRFCKENINDKNFPFWLWIESILELIKKHLLPLWNDGCIMGFISKERERALLKDQQPGTFLLRFSESSREGAITFTWVERSQNGGEPDFHAVEPYTKKELSAVTFPDIIRNYKVMAAENIPENPLKYLYPNIDKDHAFGKYYSRPKEAPEPMELDGPKGTGYIKTELISVSEV

SEQ ID NO: 23916 - protein, 101 aa, Homo sapiens
MNIEDWGGFKQVETDGMDTGLGSSASPTSAEEHRKFCSTGFLCSSTYASSFSLVACRAWLALRPEVLKSAGILHLCNLLLSPSHHRNQSLEAFGLGAAFTV

SEQ ID NO: 23917 - protein, 57 aa, Homo sapiens
MVSISLKFYKELQAHGADEVRSTSFSLGLLFPHLSLAVCHSWKIHGTKSPPHDYLLT

SEQ ID NO: 23918 - protein, 173 aa, Homo sapiens
MPGSSGAGMEAAVAPGRDAPAPAASQPSGCGKHNSPERKVYMDYNATTPLEPEVIQAMTKAMWEAWGNPSSPYSAGRKAKDIINAARESLAKMIGGKPQDIIFTSGGTESNNLVIHSVVKHFHANQTSKGHTGGHHSPVKGAKPHFITSSVEHDSIRLPLEHLVEEQVAAYSM

SEQ ID NO: 23919 - protein, 156 aa, Homo sapiens
MGSLLTASSHTWLYSASLQAVDILKTERLGHGYHTLEDQALYNRLRQENMHFEICPWSSYLTGAWKPDTEHAVIRLKNDQANYSLNTDDPLIFKSTLDTDYQMTKRDMGFTEEEFKRLNINAAKSSFLPEDEKRELLDLLYKAYGMPPSASAGQNL

SEQ ID NO: 23920 - protein, 97 aa, Homo sapiens
MQKSPSSASLTLGAVDQSCSYSAILAPYSHYLLELWLRHYNRALSPLSKSWEMVIVNASPILEAPGCRGPQLDPSHPWSLTLDLSQKAEKRSSLESL

SEQ ID NO: 23921 - protein, 36 aa, Homo sapiens
MCMAVRRAGTWRALWDWRCAGRRWWCGAAADSWPPP

SEQ ID NO: 23922 - protein, 55 aa, Homo sapiens
MSSMYTTIPRSNYSLNKMMTLKFPPMKTSSGMKRRMKSIQEMTVMGQSLLRSAHG

SEQ ID NO: 23923 - protein, 399 aa, Homo sapiens
MRRRQRREWEARRRDILFDYEQYEYHGTSSAMVMFELAWMLSKDLNDMLWWAIVGLTDQWVQDKITQMKYVTDVGVLQRHVSRHNHRNEDEENTLSVDCTRISFEYDLRLVLYQHWSLHDSLCNTSYTAARFKLWSVHGQKRLQEFLADMGLPLKQVKQKFQAMDISLKENLREMIEESANKFGMKDMRVQTFSIHFGFKHKFLASDVVFATMSLMESPEKDGSGTDHFIQALDSLSRSNLDKLYHGLELAKKQLRATQQTIASCLCTNLVISQGPFLYCSLMEGTPDVMLFSRPASLSLLSKHLLKSFVCSTKNRRCKLLPLVMAAPLSMEHGTVTVVGIPPETDSSDRKNSFFGRAFEKAAESTSSRMLHNHFDLSVIELKAEDRSKFLDALISLLS

SEQ ID NO: 23924 - protein, 85 aa, Homo sapiens
MCFLFSTFPRTGKCHVQTIQLCRRLTVEFMHYIIAARALRKVFLSIKGIYYQAEVLGQPIVWITPYAFSHDVSVPVGRGRACAAS

SEQ ID NO: 23925 - protein, 129 aa, Homo sapiens [sequence omitted]

SEQ ID NO: 23926 - protein, 124 aa, Homo sapiens
MMGSLLAATTEAPGEYFFSDGIRLKKYRGMGSLDAMDKHLSSQNRYFSEADKIKVAQGVSGAVQDKGSIHKFVPYLIAGIQHSCQDIGAKSLTQVRAMMYSGELKFEKRTSSAQVEGGVHSLHS

SEQ ID NO: 23927 - protein, 96 aa, Homo sapiens
MMGSLLAATTEAPGEYFFSDGIRLKKYRGMGSLDAMDKHLSSQNRYFSEADKIKVAQGVSGAVQDKGSIHKFVPYLIAGIQHSCQDIGAKSLTQVR

SEQ ID NO: 23928 - protein, 66 aa, Homo sapiens
MGVPLKVSPTGATRSARLGPPLSAPRGPWMVKQQRSRGALCPRQLHPADPAWAVLRGGGGSPRSTQ

SEQ ID NO: 23929 - protein, 58 aa, Homo sapiens
MVMWNILKPRTHLLCMTNMFCTRHEGTDSTVFLPHSHNISEWISRHIPFGFLHLCSYE

SEQ ID NO: 23930 - protein, 101 aa, Homo sapiens
MEPGGWASGWGERLQTGSSPWLCPPLSLLEWWGPCILSCPPPPFSPNCRRLLSPGDTVPASSGLGKHGLSSPALAPAPPASWTWAFLHPVEPHSQERCLEG

SEQ ID NO: 23931 - protein, 484 aa, Homo sapiens
MEFSIKQSPLSVQSVVKCIKMKQAPEILGSANGKTPSCEVNRECSVFLSKAQLSSSLQEGVMQKFNGHDALPFIPADKLKDLTSRVFNGEPGAHDAKLRFESQEMKGIGTPPNTTPIKNGSPEIKLKITKTYMNGKPLFESSICGDSAADVSQSEENGQKPENKARRNRKRSIKYDSLLEQGLVEAALVSKISSPSDKKIPAKKESCPNTGRDKDHLLKYNVGDLVWSKVSGYPWWPCMVSADPLLHSYTKLKGQKKSARQYHVQFFGDAPERAWIFEKSLVAFEGEGQFEKLCQESAKQAPTKAEKIKLLKPISGKLRAQWEMGIVQAEEAASMSVEERKAKFTFLYVGDQLHLNPQVAKEAGIAAESLGEMAESSGVSEEAAENPKSVREECIPMKRRRRAKLCSSAETLESHPDIGKSTPQKTAEADPRRGVGSPPGRKKTTVSMPRSRKGDAASQFLVFCQKHRDEVSTKLCFMLASFRI

SEQ ID NO: 23932 - protein, 135 aa, Homo sapiens
MGKNIGAQSNDDSEYVRAVYRMSEMIFRRIKMPWLWLDLWYLMFKEGWEHKKSLQILHTFTNSVIAERANEMNANEDCRGDGRGSAPSKNKRRAFLDLLLSVTDDEGNRLSHEDIREEVDTFMFEVLYIVRFRYH

SEQ ID NO: 23933 - protein, 521 aa, Homo sapiens
MQTFVTQQWKQSKEKSNCLHNKKLSEKKVKSPLHLFSTLRRSPSYPPPGCGKSKSKLKSEQDGISKTHKLLRRTCSSTVKTDDVCVTKSHRTFGRSLSSDPRAEQAMTAIKSHKLLNRPCPAAVKSEECLTLKSHRLLTRSCSGDPRCEHNTNLKPHKLLSRSYSSNLRMEELYGLKNHKLLSKSYSSAPKSSKTELFKEPNAEGRRLSLTSGLIGILTPSSSSSSQLAPNGAKCIPVRDRGFLVQTIEFAEQRIPVLNEYCVVCDEPHVFQNGPMLRPTVCERELCVFAFQTLGVMNEAADEIATGAQKKNYDRVMKALDSITSIREMTQAPYLEIKKQMDKQDPLAHPLLQWVISSNRSHIVKLPVNRQLKFMHTPHQFLLLSSPPAKESNFRAAKKLFGSTFAFHGSHIENWHSILRNGLVVASNTRLQLHGAMYGSGIYLSPMSSISFGYSGMNKKQKVSAKDEPASSSKSSNTSQSQKKGQQSQFLQSRNLKCIALCEDFNEKRYIKSEWTRIPLE

SEQ ID NO: 23934 - protein, 75 aa, Homo sapiens
MSLRKMKAVVARTGAAAVSGEGRRMQRPPAWSAGPGAATRAGRGGSTPWAPHSPPQVLRMASRETRKWTPWLLES

SEQ ID NO: 23935 - protein, 103 aa, Homo sapiens
MEKRHNYVRKVAETAVQLFISGDKVNVAGLVLAGSADFKTELSQSDMFDQRLQSKVLKLVDISYGGENGFNQAIELSTEVLSNVKFIQEKKLIGIGEMQLLIL

SEQ ID NO: 23936 - protein, 231 aa, Homo sapiens
MTWVSLLNQVGDRVSRNNFLGFPASELQARIRTYNQHYNNLLRGAVSQRLYILLPLDCGVPDNLSMADPNIRFLDKLPQQTGDHAGIKDRVYSNSIYELLENGQRAGTCVLEYATPLQTLFAMSQYSQAGFSREDRLEQAKLFCRTLEDILADAPESQNNCRLIAYQEPADDSSFSLSQEVLRHLRQEEKEEVTVGSLKTSAVPSTSTMSQEPELLISGMEKPLPLRTDFS

SEQ ID NO: 23937 - protein, 16 aa, Homo sapiens
MGAGTSYGEGYSCVST

SEQ ID NO: 23938 - protein, 127 aa, Homo sapiens
MLWDLNEGKHLYTLDGGDIINALCFSPNRYWLCAATGPSIKIWDLEGKIIVDELKQEVISTSSKAEPPQCTSLAWSADGQEYITTTYKLAVEMRAVSYSLPGVVAHAYWRLRLCLLATRTTWCECGR

SEQ ID NO: 23939 - protein, 251 aa, Homo sapiens
MMSDFAGGASGFPMTFSGGKFTEEWKAQFIKTERKKLLNYKARLVKNLQPRIYCPFAGYFVESHPSDKYIKETNTKNDPNELNNLIKKNSDVITWTPRPGATLDLGRMLKDRTDSKGIIEPPEGTKIYKDSWDFEPYLEILNAALGDEIFLHSSWIKEYFTWAGFKDYNLVVRMIETDEDFNPFPGGYDYLVDFLDLSFPKERPQREHPYEEIHSRVDVIRHVVKNGLLWDELYIGFQTRLQRDPDIYHHL

SEQ ID NO: 23940 - protein, 271 aa, Homo sapiens
MGYVDDTQFVRFDSDSACPRMEPRAPWVEQEGPEYWEEETRNTKAHAQTDRMNLQTLRGYYNQSEASSHTLQWMIGCDLGSDGRLLRGYEQYAYDGKDYLALNEDLRSWTAADTAAQISKRKCEAANVAEQRRAYLEGTCVEWLHRYLENGKEMLQRADPPKTHVTHHPVFDYEATLRCWALGFYPAEIILTWQRDGEDQTQDVELVETRPAGDGTFQKWAAVVVPSGEEQRYTCHVQHEGLPEPLMLRWSKEGDGGIMSVRESRSLSEDL

SEQ ID NO: 23941 - protein, 208 aa, Homo sapiens [sequence omitted]

SEQ ID NO: 23942 - protein, 65 aa, Homo sapiens
MLVGTQSAQPSLRHCVSRAGPQTRPPLPHPSQGGACVGRTLNPAARPLDGRRRDGWPPCTAPAVS

SEQ ID NO: 23943 - protein, 48 aa, Homo sapiens
MKVPRHGKPLSPGQIKMTFSMHMQACHQEQSTEGQHSFCASSWLPSRS

SEQ ID NO: 23944 - protein, 221 aa, Homo sapiens [sequence omitted]

SEQ ID NO: 23945 - protein, 121 aa, Homo sapiens
MLAEQKCPDHSMRIRIIEFLQADMTKYLEGSLYPSTQQYNDVVNALLQAHPFLDEDGCGFFLWKRALKDRFKYVRRPIEDDEQVIRNKCKFGHRRGQTRKSLADIRFDEIKLVQIKVRLNS

SEQ ID NO: 23946 - protein, 82 aa, Homo sapiens [sequence omitted]

SEQ ID NO: 23947 - protein, 170 aa, Homo sapiens
MEFFQKLGYDREDVLRVLGKLGEGALVNDVLQELIRTGSRPGALEHPAAPRLVPRGSCGVPDSAQRGPGTALEEDFRTLASSLRPIVIDGSNVAMSHGNKETFSCRGIKLAVDWFRDRGHTYIKVFVPSWRKDPPRADTPIRGMLEQMYAQEVLDTFPWCTSNIDSQIST

SEQ ID NO: 23948 - protein, 94 aa, Homo sapiens
MLPEDKEADSLRGNISVKAVKKEVEKKLRCLLADLPLPPELPGGDDLSKSPEEKKTATQLHSKRRPNSIFSHKQIYSSLCKRWSRRSFEICILN

SEQ ID NO: 23949 - protein, 173 aa, Homo sapiens
MQRKLKVTSLEPGTVVITEQAVDTCFKAEFEQIVLGKRVIRKTDLNKKLVQELLLCSAELSEFTTVVGNTMCTLDFYEGQGRLDGALCSYTEKDKQAYLEAAYAAGVRNIEMESSVFAAMCSACGLQAAVVCVTLLNRLEGDQISSPRNVLSEYQQRPQRLVSYFIKKKLSKA

SEQ ID NO: 23950 - protein, 128 aa, Homo sapiens
MTTLSCCLCSVWFSDENSNQSSVSDVYQLKVDSSTNSSPSPQQSESLSPAHTSDFRTDDSQPPTLGQEILEEPSLPSSEVADEPPTLTKEEPVPLETQVVEEEEDSGAPPLKRFCVDQPTVPQTASES

SEQ ID NO: 23951 - protein, 124 aa, Homo sapiens [sequence omitted]

SEQ ID NO: 23952 - protein, 50 aa, Homo sapiens
MKPAWKIPSLETEPDRGRCTGRTLSGFSNQAAILAPQVWDFWVFSWLASC

SEQ ID NO: 23953 - protein, 328 aa, Homo sapiens
MPVFPPCVLQVRDEQHQCSLGNLKVPLSQLLTSEDMTVSQRFQLSNSGPNSTIKMKIALRVLHLEKRERPPDHQHSAQVKRPSVSKEGRKTSIKSHMSGSPGPGGSNTAPSTPVIGGSDKPGMEEKAQPPEAGPQGLHDLGRSSSSLLASPGHISVKEPTPSIASDISLPIATQELRQRLRQLENGTTLGQSPLGQIQLTIRHSSQRNKLIVVVHACRNLIAFSEDGSDPYVRMYLLPDKRRSGRRKTHVSKKTLNPVFDQSFDFSVSLPEVQRRTLDVAVKNSGGFLSKDKGLLGKVLVALASEELAKGWTQWYDLTEDGTRPQAMT

SEQ ID NO: 23954 - protein, 20 aa, Homo sapiens
MPDLKDSKTTDLCQHVKHMV

SEQ ID NO: 23955 - protein, 19 aa, Homo sapiens
MLLPHSYCNTPLLKKVFLD

SEQ ID NO: 23956 - protein, 252 aa, Homo sapiens
MSTLCPPPSPAVAKTEIALSGKSPLLAATFAYWDNILGPRVRHIWAPKTEQVLLSDGEITFLANHTLNGEILRNAESGAIDVKFFVLSEKGVIIVSLIFDGNWNGDRSTYGLSIILPQTELSFYLPLHRVCVDRLTHIIRKGRIWMHKERQENVQKIILEGTERMEDQGQSIIPMLTGEVIPVMELLSSMKSHSVPEEIDIADTVLNDDDIGDSCHEGFLLNAISSHLQTCGCSVVVGSSAEKVNKVVYFII

SEQ ID NO: 23957 - protein, 993 aa, Homo sapiens
MPVRGDRGFPPRRELSGWLRAPGMEELIWEQYTVTLQKDSKRGFGIAVSGGRDNPHFENGETSIVISDVLPGGPADGLLQENDRVVMVNGTPMEDVLHSFAVQQLRKSGKVAAIVVKRPRKVQVAALQASPPLDQDDRAFEVMDEFDGRSFRSGYSERSRLNSHGGRSRSWEDSPERGRPHERARSRERDLSRDRSRGRSLERGLDQDHARTRDRSRGRSLERGLDHDFGPSRDRDRDRSRGRSIDQDYERAYHRAYDPDYERAYSPEYRRGARHDARSRGPRSRSREHPHSRSPSPEPRGRPGPIGVLLMKSRANEEYGLRLGSQIFVKEMTRTGLATKDGNLHEGDIILKINGTVTENMSLTDARKLIEKSRGKLQLVVLRDSQQTLINIPSLNDSDSEIEDISEIESNRSFSPEERRHQYSDYDYHSSSEKLKERPSSREDTPSRLSRMGATPTPFKSTGDIAGTVVPETNKEPRYQEDPPAPQPKAAPRTFLRPSPEDEAIYGPNTKMVRFKKGDSVGLRLAGGNDVGIFVAGIQEGTSAEQEGLQEGDQILKVNTQDFRGLVREDAVLYLLEIPKGEMVTILAQSRADVYRDILACGRGDSFFIRSHFECEKETPQSLAFTRGEVFRVVDTLYDGKLGNWLAVRIGNELEKGLIPNKSRAEQMASVQNAQRDNAGDRADFWRMRGQRSGVKKNLRKSREDLTAVVSVSTKFPAYERVLLREAGFKRPVVLFGPIADIAMEKLANELPDWFQTAKTEPKDAGSEKSTGVVRLNTVRQIIEQDKHALLDVTPKAVDLLNYTQWFPIVIFFNPDSRQGVKTMRQRLNPTSNKSSRKLFDQANKLKKTCAHLFTATINLNSANDSWFGSLKDTIQHQQGEAVWVSEGKMEGMDDDPEDRMSYLTAMGADYLSCDSRLISDFEDTDGEGGAYTDNELDEPAEEPLVSSITRSSEPVQHEEVRRGRPRAGTGEPGVFLALSWTAVCSGCCGRHS

SEQ ID NO: 23958 - protein, 62 aa, Homo sapiens
MVVMNSLRVILQASPGKLLWRKFQIPRFMPARPCSLYTCTYKTRNRACEYTTSLKRTKRAPA

SEQ ID NO: 23959 - protein, 157 aa, Homo sapiens
MFMRAQFDYDPKKDNLIPCKEAGLKFATGDIIQIINKDDSNWWQGRVEGSSKESAGLIPSPELQEWRVASMAQSAPSEAPSCSPFGKKKKYKDKYLAKHSSIFDQLDVVSYEEVVRLPAFKRKTLVLIGASGVGRSHIKNALLSQNPEKFVYPVPCK

SEQ ID NO: 23960 - protein, 105 aa, Homo sapiens
IDSARSAYQEAMDISKKEMPPTNPIRLGLALNFSVFHYEIANSPEEAISLAKTTFDEAMADLHTLSEDSYKDSTLIMQLLRDNLTLWTADNAGEEGGEAPQEPQS

SEQ ID NO: 23961 - protein, 459 aa, Homo sapiens
TCTKDRKMSPKRIAKRRSPPADAIPKSKKVKDTRAAASRRVPGARSCQGACGPSPPDQKTRPVSHRSHSTEPGLVLTLGQGDVGQLGLGENVMERKKPALVSIPEDVVQAEAGGMHTVCLSKSGQVYSFGCNDEGALGRDTSVEGSEMVPGKVELQEKVVQVSAGDSHTAALTDDGRVFLWGSFRDNNGVIGLLEPMKKSMVPVQVQLDVPVVKVASGNDHLVMLTADGDLYTLGCGEQGQLGRVPELFANRGGRQGLERLLVPKCVMLKSRGSRGHVRFQDAFCGAYFTFAISHEGHVYGFGLSNYHQLGTPGTESCFIPQNLTSFKNSTKSWVGFSGGQHHTVCMDSEGKAYSLGRAEYGRLGLGEGAEEKSIPTLISRLPAVSSVACGASVGYAVTKDGRVFAWGMGTNYQLGTGQDEDAWSPVEMMGKQLENRVVLSVSSGGQHTVLLVKDKEQS

SEQ ID NO: 23962 - protein, 594 aa, Homo sapiens
KSKMKYILVTGGVISGIGKGIIASSVGTILKSCGLHVTSIKIDPYINIDAGTFSPYEHGEVFVLDDGGEVDLDLGNYERFLDIRLTKDNNLTTGKIYQYVINKERKGDYLGKTVQVVPHITDAIQEWVMRQALIPVDEDGLEPQVCVIELGGTVGDIESMPFIEAFRQFQFKVKRENFCNIHVSLVPQPSSTGEQKTKPTQNSVRELRGLGLSPDLVVCRCSNPLDTSVKEKISMFCHVEPEQVICVHDVSSIYRVPLLLEEQGVVDYFLRRLDLPIERQPRKMLMKWKEMADRYDRLLETCSIALVGKYTKFSDSYASVIKALEHSALAINHKLEIKYIDSADLEPITSQEEPVRYHEAWQKLCSAHGVLVPGGFGVRGTEGKIQAIAWARNQKKPFLGVCLGMQLAVVEFSRNVLGWQDANSTEFDPTTSHPVVVDMPEHNPGQMGGTMRLGKRRTLFQTKNSVMRKLYGDADYLEERHRHRFEVNPVWKKCLEEQGLKFVGQDVEGERMEIVELEDHPFFVGVQYHPEFLSRPIKPSPPYFGLLLASVGRLSHYLQKGCRLSPRDTYSDRSGSSSPDSEITELKFPSINHD

SEQ ID NO: 23963 - protein, 34 aa, Homo sapiens
KGSLSPVTLQPHDLFIAAESSPRRGCCGYRPSTL

SEQ ID NO: 23964 - protein, 17 aa, Homo sapiens
LKADCDSPYPHKAILTP

SEQ ID NO: 23965 - protein, 102 aa, Homo sapiens
KEKRVRRQQMLQVLVVFQFKAVNMQQTVTIIDAIHVVGVLHAITSKITRIVRVGKRTRDRRVLPKARPNNAGPTAGEGSHLTTCGDPMGVDHSIPTLLCREK

SEQ ID NO: 23966 - protein, 104 aa, Homo sapiens
VLPGSAPGHSWLAAALSAAKGHRPGTARGGKVAPGAEAAERSPRRRPDWLPRNCGDSPYSELGLRFPGLSPSPEAPTKPGKEGKDSGGSSSMSAYSRKPERARS

SEQ ID NO: 23967 - protein, 31 aa, Homo sapiens
LFSFSPCNAGKSQSRHRNMPLIQCLCLAVTC

SEQ ID NO: 23968 - protein, 39 aa, Homo sapiens
VQRWQVSKSPQKHAPDSVPLLSCNMLIRTTWHLPEQDFQ

SEQ ID NO: 23969 - protein, 54 aa, Homo sapiens
KLRIVGSLAGCRTEPRPQYPIHALCLCQGGNGGFLCSTAHWAEDASDWSGYLEE

SEQ ID NO: 23970 - protein, 15 aa, Homo sapiens
LMAVNKVPRLYGCER

SEQ ID NO: 23971 - protein, 42 aa, Homo sapiens
MSKHMSLLADLKTMVETKKVTSSGVLLLDNYTDRIQVFEESL

SEQ ID NO: 23972 - protein, 7 aa, Homo sapiens
IKKKQDP

SEQ ID NO: 23973 - protein, 30 aa, Homo sapiens
ITILLPKRPPKTTEDKEETIQKLEVRRKCA

SEQ ID NO: 23974 - protein, 403 aa, Homo sapiens
IAQFPQPEHPLKMAEESSCTRDCMSFSVLNWDQVSRLHEVLTEVVPIHGRGNFPTLEITLKDIVQTVRSRLEEAGIKVHDVRLNGSAAGHVLVKDNGLGCKDLDLIFHVALPTEAEFQLVRDVVLCSLLNFLPEGVNKLKISPVTLKEAYVQKLVKVCTDTDRWSLISLSNKNGKNVELKFVDSIRRQFEFSVDSFQIILDSLLFFYDCSNNPISEHFHPTVIGESMYGDFEEAFDHLQNRLIATKNPEEIRGGGLLKYSNLLVRDFRPTDQEEIKTLERYMCSRFFIDFPDILEQQRKLETYLQNHFAEEERSKYDYLMILRRVVNESTVCLMGHERRQTLNLISLLALRVLAEQNIIPSATNVTCYYQPAPYVSDGNFSNYYVAHPPVTYSQPYPTWLPCN

SEQ ID NO: 23975 - protein, 9 aa, Homo sapiens
RPPGIPGLK

SEQ ID NO: 23976 - protein, 59 aa, Homo sapiens
MPLSRWLRSVGVFLLPAPYWAPRERWLGSLRRPSLVHGYPVLAWHSARCWCQAWTEEPR

SEQ ID NO: 23977 - protein, 16 aa, Homo sapiens
MPSMMLTSWKHVSTAC

SEQ ID NO: 23978 - protein, 34 aa, Homo sapiens
LGRPRDAPARVPQMFSCVARTVRRSESCASGKSH

SEQ ID NO: 23979 - protein, 283 aa, Homo sapiens
TRARAGSVRPFAQAAGGGAARTMAGDSEQTLQNHQQPNGGEPFLIGVSGGTASGKSSVCAKIVQLLGQNEVDYRQKQVVILSQDSFYRVLTSEQKAKALKGQFNFDHPDAFDNELILKTLKEITEGKTVQIPVYDFVSHSRKEETVTVYPADVVLFEGILAFYSQEVRDLFQMKLFVDTDADTRLSRRVLRDISERGRDLEQILSQYITFVKPAFEEFCLPTKKYADVIIPRGADNLVAINLIVQHIQDILNGGPSKRQTNGCLNGYTPSRKRQASESSSRPH

SEQ ID NO: 23980 - protein, 22 aa, Homo sapiens
RHCSSVHTVSYDITVFKKTPWR

SEQ ID NO: 23981 - protein, 24 aa, Homo sapiens
TLGLAVFSSCSAVGGGGRNQSLGD

SEQ ID NO: 23982 - protein, 127 aa, Homo sapiens
TIVLQEGNSQKKSNISEKTKRLNELKLSVVSLKEIQESLKTKIVDSPEKLKNYKEKMKDTVQKLKNARQEVVEKYEIYGDSVDCLPSCQLEVQLYQKKIQDLSDNREKLASILKEVCIVWNFDVFII

SEQ ID NO: 23983 - protein, 37 aa, Homo sapiens
MVWPRAKSHLCSSSCSSPLSSRTAWGELVSKSLARVS

SEQ ID NO: 23984 - protein, 11 aa, Homo sapiens
RDVLMGPRPMD

SEQ ID NO: 23985 - protein, 83 aa, Homo sapiens
IAVGMAAPSMKERQVCWGARDEYWKCLDENLEDASQCKKLRSSFESSCPQQWIKYFDKRRDYLKFKEKFEAGQFEPSETTAKS

SEQ ID NO: 23986 - protein, 16 aa, Homo sapiens
LEKNDVVLKQPTEYHL

SEQ ID NO: 23987 - protein, 13 aa, Homo sapiens
KGMPRTQPWEVPV

SEQ ID NO: 23988 - protein, 57 aa, Homo sapiens
TRQPLAVPPPQPPGDLQAAISKRCSLLGRGPGGEGPALPRRRPLAASPGLRAMPRAV

SEQ ID NO: 23989 - protein, 366 aa, Homo sapiens
LDKEVWILRFHLFQLQGAMAEKVLVTGGAGYIGSHTVLELLEAGYLPVVIDNFHNAFRGGGSLPESLRRVQELTGRSVEFEEMDILDQGALQRLFKKYSFMAVIHFAGLKAVGESVQKPLDYYRVNLTGTIQLLEIMKAHGVKNLVFSSSATVYGNPQYLPLDEAHPTGGCTNPYGKSKFFIEEMIRDLCQADKTWNAVLLRYFNPTGAHASGCIGEDPQGIPNNLMPYVSQVAIGRREALNVFGNDYDTEDGTGVRDYIHVVDLAKGHIAALRKLKEQCGCRIYNLGTGTGYSVLQMVQAMEKASGKKIPYKVVARREGDVAACYANPSLAQEELGWTAALGLDRMCEDLWRWQKQNPSGFGTQA

SEQ ID NO: 23990 - protein, 40 aa, Homo sapiens
IHSPWHWRRPTLLCQLRSSSTLAAESPFPPSNDTLCIRFC

SEQ ID NO: 23991 - protein, 35 aa, Homo sapiens
LSAVLRPWEPAPASRFRPVSKPADSSSSSPRRCHL

SEQ ID NO: 23992 - protein, 24 aa, Homo sapiens
LMRNVGTQARWAAGVASGRVGGLN

SEQ ID NO: 23993 - protein, 51 aa, Homo sapiens
TGVGVRVAVGVPGPEHEPERESAARTPVATRVPGAARATSAALPWSPAARS

SEQ ID NO: 23994 - protein, 1289 aa, Homo sapiens
IMEPIYPFARPQMNTRFPSSRMVPFHFPPSKCALWNPTPTGDFIYLHLSYYRNPKLVVTEKTIRLAYRHAKQNKKNSSCFLLGSLTADEDEEGVTLTVDRFDPGREVPECLEITPTASLPGDFLIPCKVHTQELCSREMIVHSVDDFSSALKALQCHICSKDSLDCGKLLSLRVHITSRESLDSVEFDLHWAAVTLANNFKCTPVKPIPIIPTALARNLSSNLNISQVQGTYKYGYLTMDETRKLLLLLESDPKVYSLPLVGIWLSGITHIYSPQVWACCLRYIFNSSVQERVFSESGNFIIVLYSMTHKEPEFYECFPCDGKIPDFRFQLLTSKETLHLFKNVEPPDKNPIRCELSAESQNAETEFFSKASKNFSIKRSSQKLSSGKMPIHDHDSGVEDEDFSPRPIPSPHPVSQKISKIQPSVPELSLVLDGNFIESNPLPTPLEMVNNENPPLINHLEHLKPLQPQLYDEKHSPEVEAGEPSLRGIPNQLNQDKPALLRHCKVRQPPAYKKGNPHTRNSIKPSSHNGPSHDIFEKLQTVSAGNVQNEEYPIRPSTLNSRQSSLAPQSQPHDFVFSPHNSGRPMELQIPTPPLPSYCSTNVCRCCQHHSHIQYSPLNSWQGANTVGSIQDVQSEALQKHSLFHPSGCPALYCNAFCSSSSPIALRPQGDMGSCSPHSNIEPSPVARPPSHMDLCNPQPCTVCMHTPKTESDNGMMGLSPDAYRFLTEQDRQLRLLQAQIQRLLEAQSLMPCSPKTTAVEDTVQAGRQMELVSVEAQSSPGLHMRKGVSIAVSTGASLFWNAAGEDQEPDSQMKQDDTKISSEDMNFSVDINNEVTSLPGSASSLKAVDIPSFEESNIAVEEEFNQPLSVSNSSSLVVRKEPDVPVFFPSGQLAESVSMCLQTGPTGGASNNSETSEEPKIEHVMQPLLHQPSDNQKIYQDLLGQVNHLLNSSSKETEQPSTKAVIISHECTRTQNVYHTKKKTHHSRLVDKDCVLNATLKQLRSLGVKIDSPTKVKKNAHNVDHASVLACISPEAVISGLNCMSFANVGMSGLSPNGVDLSMEANAIALKYLNENQLSQLSVTRSNQNNCDPFSLLHINTDRSTVGLSLISPNNMSFATKKYMKRYGLLQSSDNSEDEEEPPDNADSKSEYLLNQNLRSIPEQLGGQKEPSKNDHEIINCSNCESVGTNADTPVLRNITNEVLQTKAKQQLTEKPAFLVKNLKPSPAVNLRTGKAEFTQHPEKENEGDITIFPESLQPSETLKQMNSMNSVGTFLDVKRLRQLPKLF

SEQ ID NO: 23995 - protein, 32 aa, Homo sapiens
RREPALPREMRLSQARGLSGSSCCAGGSWPPL

SEQ ID NO: 23996 - protein, 215 aa, Homo sapiens
ISAPEPALSSCSLGTSAGWSPTMAAIRKKLVIVGDGACGKTCLLIVFSKDQFPEVYVPTVFENYIADIEVDGKQVELALWDTAGQEDYDRLRPLSYPDTDVILMCFSIDSPDSLENIPEKWTPEVKHFCPNVPIILVGNKKDLRQDEHTRRELAKMKQEPVRSEEGRDMANRISAFGYLECSAKTKEGVREVFEMATRAGLQVRKNKRRRGCPIL

SEQ ID NO: 23997 - protein, 8 aa, Homo sapiens
LEQPSFQC

SEQ ID NO: 23998 - protein, 23 aa, Homo sapiens
MDIMGTLMVLQQHCVKLGLLKNC

SEQ ID NO: 23999 - protein, 8 aa, Homo sapiens
VRPPLFVF

SEQ ID NO: 24000 - protein, 52 aa, Homo sapiens
LFALWMEWRCGPLWSANKALGWRGRLAAFLVVGPSEQSSWFWRWLRRLDCGV

SEQ ID NO: 24001 - protein, 527 aa, Homo sapiens
IMSLVEAISLWNEGVLAADKKDWKGALDAFSAVQDPHSRICFNIGCMYTILKNMTEAEKAFTRSINRDKHLAVAYFQRGMLYYQTEKYDLAIKDLKEALIQLRGNQLIDYKILGLQFKLFACEVLYNIAFMYAKKEEWKKAEEQLALATSMKSEPRHSKIDKAMECVWKQKLYEPVVIPVGKLFRPNERQVAQLAKKDYLGKATVVASVVDQDSFSGFAPLQPQAAEPPPRPKTPEIFRALEGEAHRVLFGFVPETKEELQVMPGNIVFVLKKGNDNWATVMFNGQKGLVPCNYLEPVELRIHPQQQPQEESSPQSDIPAPPSSKAPGRPQLSPGQKQKEEPKEVKLSVPMPYTLKVHYKYTVVMKTQPGLPYSQVRDMVSKKLELRLEHTKLSYRPRDSNELVPLSEDSMKDAWGQVKNYCLTLWCENTVGDQGFPDEPKESEKADANNQTTEPQLKKGSQVEALFSYEATQPEDLEFQEGDIILVLSKVNEEWLEGECKGKVGIFPKVFVEDCATTDLESTRREV

SEQ ID NO: 24002 - protein, 29 aa, Homo sapiens
IFCLLHASRPPHLLPHSLDPALWAFTSVL

SEQ ID NO: 24003 - protein, 54 aa, Homo sapiens
LPRAGAGRAGRQEPRRREMRAAAGTRRARLGRRRLLRLRRGGRSGCRAVLEFPA

SEQ ID NO: 24004 - protein, 3483 aa, Homo sapiens
RGLESAMANRRVGRGCWEVSPTERRPPAGLRGPAAEEEASSPPVLSLSHFCRSPFLCFGDVLLGASRTLSLALDNPNEEVAEVKISHFPAADLGFSVSQRCFVLQPKEKIVISVNWTPLKEGRVREIMTFLVNDVLKHQAILLGNAEEQKKKKRSLWDTIKKKKISASTSHNRRVSNIQNVNKTFSVSQKVDRVRSPLQACENLAMNEGGPPTENNSLILEENKIPISPISPAFNECHGATCLPLSVRRSTTYSSLHASENRELLNVHSANVSKVSFNEKAVTETSFNSVNVNGQRGENSKLSLTPNCSSTLNITQSQIHFLSPDSFVNNSHGANNELELVTCLSSDMFMKDNSQPVHLESTIAHEIYQKILSPDSFIKDNYGLNQDLESESVNPILSPNQFLKDNMAYMCTSQQTCKVPLSNENSQVPQSPEDWRKSEVSPRIPECQGSKSPKAIFEELVEMKSNYYSFIKQNNPKFSAVQDISSHSHNKQPKRRPILSATVTKRKATCTRENQTEINKPKAKRCLNSAVGEHEKVINNQKEKEDFHSYLPIIDPILSKSKSYKNEVTPSSTTASVARKRKSDGSMEDANVRVAITEHTEVREIKRIHFSPSEPKTSAVKKTKNVTTPISKRISNREKLNLKKKTDLSIFRTPISKTNKRTKPIIAVAQSSLTFIKPLKTDIPRHPMPFAAKNMFYDERWKEKQEQGFTWWLNFILTPDDFTVKTNISEVNAATLLLGIENQHKISVPRAPTKEEMSLRAYTARCRLNRLRRAACRLFTSEKMVKAIKKLEIEIEARRLIVRKDRHLWKDVGERQKVLNWLLSYNPLWLRIGLETTYGELISLEDNSDVTGLAMFILNRLLWNPDIAAEYRHPTVPHLYRDGHEEALSKFTLKKLLLLVCFLDYAKISRLIDHDPCLFCKDAEFKASKEILLAFSRDFLSGEGDLSRHLGLLGLPVNHVQTPFDEFDFAVTNLAVDLQCGVRLVRTMELLTQNWDLSKKLRIPAISRLQKMHNVDIVLQVLKSRGIELSDEHGNTILSKDIVDRHREKTLRLLWKIAFAFQVDISLNLDQLKEEIAFLKHTKSIKKTISLLSCHSDDLINKKKGKRDSGSFEQYSENIKLLMDWVNAVCAFYNKKVENFTVSFSDGRVLCYLIHHYHPCYVPFDAICQRTTQTVECTQTGSVVLNSSSESDDSSLDMSLKAFDHENTSELYKELLENEKKNFHLVRSAVRDLGGIPAMINHSDMSNTIPDEKVVITYLSFLCARLLDLRKEIRAARLIQTTWRKYKLKTDLKRHQEREKAARIIQLAVINFLAKQRLRKRVNAALVIQKYWRRVLAQRKLLMLKKEKLEKVQNKAASLIQGYWRRYSTRQRFLKLKYYSIILQSRIRMIIAVTSYKRYLWATVTIQRHWRAYLRRKQDQQRYEMLKSSTLIIQSMFRKWKQRKMQSQVKATVILQRAFREWHLRKQAKEENSAIIIQSWYRMHKELRKYIYIRSCVVIIQKRFRCFQAQKLYKRRKESILTIQKYYKAYLKGKIERTNYLQKRAAAIQLQAAFRRLKAHNLCRQIRAACVIQSYWRMRQDRVRFLNLKKTIIKFQAHVRKHQQRQKYKKMKKAAVIIQTHFRAYIFAMKVLASYQKTRSAVIVLQSAYRGMQARKMYIHILTSVIKIQSYYRAYVSKKEFLSLKNATIKLQSTVKMKQTRKQYLHLRAAALFIQQCYRSKKIAAQKREEYMQMRESCIKLQAFVRGYLVRKQMRLQRKAVISLQSYFRMRKARQYYLKMYKAIIVIQNYYHAYKAQVNQRKNFLQVKKAATCLQAAYRGYKVRQLIKQQSIAALKIQSAFRGYNKRVKYQSVLQSIIKIQRWYRAYKTLHDTRTHFLKTKAAVISLQSAYRGWKVRKQIRREHQAALKIQSAFRMAKAQKQFRLFKTAALVIQQNFRAWTAGRKQCMEYIELRHAVLVLQSMWKGKTLRRQLQRQHKCAIIIQSYYRMHVQQKKWKIMKKAALLIQKYYRAYSIGREQNHLYLKTKAAVVTLQSAYRGMKVRKRIKDCNKAAVTIQSKYRAYKTKKKYATYRASAIIIQRWYRGIKITNHQHKEYLNLKKTAIKIQSVYRGIRVRRHIQHMHRAATFIKAMFKMHQSRISYHTMRKAAIVIQVRCRAYYQGKMQREKYLTILKAVKVLQASFRGVRVRRTLRKMQTAATLIQSNYRRYRQQTYFNKLKKITKTVQQRYWAMKERNIQFQRYNKLRHSVIYIQAIFRGKKARRHLKMMHIAATLIQRRFRTLMMRRRFLSLKKTAILIQRKYRAHLCTKHHLQFLQVQNAVIKIQSSYRRWMIRKRMREMHRAATFIQSTFRMHRLHMRYQALKQASVVIQQQYQANRAAKLQRQHYLRQRHSAVILQAAFRGMKTRRHLKSMHSSATLIQSRFRSLLVRRRFISLKKATIFVQRKYRATICAKHKLYQFLHLRKAAITIQSSYRRLMVKKKLQEMQRAAVLIQATFRMYRTYITFQTWKHASILIQQHYRTYRAAKLQRENYIRQWHSAVVIQAAYKGMKARQLLREKHKASIVIQSTYRMYRQYCFYQKLQWATKIIQEKYRANKKKQKVFQHNELKKETCVQAGFQDMNIKKQIQEQHQAAIIIQKHCKAFKIRKHYLHLRATVVSIQRRYRKLTAVRTQAVICIQSYYRGFKVRKDIQNMHRAATLIQSFYRMHRAKVDYETKKTAIVVIQNYYRLYVRVKTERKNFLAVQKSVRTIQAAFRGMKVRQKLKNVSEEKMAAIVNQSALCCYRSKTQYEAVQSEGVMIQEWYKASGLACSQEAEYHSQSRAAVTIQKAFCRMVTRKLETQKCAALRIQFFLQMAVYRRRFVQQKRAAITLQHYFRTWQTRKQFLLYRKAAVVLQNHYRAFLSAKHQRQVYLQIRSSVIIIQARSKGFIQKRKFQEIKNSTIKIQAMWRRYRAKKYLCKVKAACKIQAWYRCWRAHKEYLAILKAVKIIQGCFYTKLERTRFLNVRASAIIIQRKWRAILPAKIAHEHFLMIKRHRAACLIQAHYRGYKGRQVFLRQKSAALIIQKYIRAREAGKHERIKYIEFKKSTVILQALVRGWLVRKRFLEQRAKIRLLHFTAAAYYHLNAVRIQRAYKLYLAVKNANKQVNSVICIQRWFRARLQEKRFIQKYHSIKKIEHEGQECLSQRNRAASVIQKAVRHFLLRKKQEKFTSGIIKIQALWRGYSWRKKNDCTKIKAIRLSLQVVNREIREENKLYKRTALALHYLLTYKHLSAILEALKHLEVVTRLSPLCCENMAQSGAISKIFVLIRSCNRSIPCMEVIRYAVQVLLNVSKYEKTTSAVYDVENCIDILLELLQIYREKPGNKVADKGGSIFTKTCCLLAILLKTTNRASDVRSRSKVVDRIYSLYKLTAHKHKMNTERILYKQKKNSSISIPFIPETPVRTRIVSRLKPDWVLRRDNMEEITNPLQAIQMVMDTLGIPY

SEQ ID NO: 24005 - protein, 23 aa, Homo sapiens
MRAKALHSCSPLHTQELMACWLC

SEQ ID NO: 24006 - protein, 54 aa, Homo sapiens
LTNSLAQKMSTGIMEYKKTTKAMKKRRMFYLHPISKPLLSCYCMSLQAQYRASS

SEQ ID NO: 24007 - protein, 72 aa, Homo sapiens
LFPFSFCLASNALGLSRRRELPEDCTNYRGLLRPVCDSEAGLGVASGALALQLRTLAARVLIQIHAGDTHTE

SEQ ID NO: 24008 - protein, 16 aa, Homo sapiens
MGPMCFLHSPQRSFSL

SEQ ID NO: 24009 - protein, 18 aa, Homo sapiens
TILPQSMVAEYPELRGVF

SEQ ID NO: 24010 - protein, 20 aa, Homo sapiens
RKKQKFLPADSFSFRLFGPV

SEQ ID NO: 24011 - protein, 24 aa, Homo sapiens
MRRSSVVMEDCHQTCNLWSRFGEL

SEQ ID NO: 24012 - protein, 189 aa, Homo sapiens
RSREKMWVFGYGSLIWKVDFPYQDKLVGYITNYSRRFWQGSTDHRGVPGKPGRVVTLVEDPAGCVWGVAYRLPVGKEEEVKAYLDFREKGGYRTTTVIFYPKDPTTKPFSVLLYIGTCDNPDYLGPAPLEDIAEQIFNAAGPSGRNTEYLFELANSIRNLVPEEADEHLFALEKLVKERLEGKQNLNCI

SEQ ID NO: 24013 - protein, 24 aa, Homo sapiens
LPPTPPGRPSGAPRMERELRRSPG

SEQ ID NO: 24014 - protein, 8 aa, Homo sapiens
IMLYLNYL

SEQ ID NO: 24015 - protein, 16 aa, Homo sapiens
VCMCEGRERERRAPQR

SEQ ID NO: 24016 - protein, 324 aa, Homo sapiens
RKIGRRGQALMLVSGRRRLLTVLLQAQKWPFQPSRDMRLVQFRAPHLVGPHLGLETGNGGGVINLNAFDPTLPKTMTQFLEQGEATLSVARRALAAQLPVLPRSEVTFLAPVTRPDKVVCVGMNYVDHCKEQNVPVPKEPIIFSKFASSIVGPYDEVVLPPQSQEVDWEVELAVVIGKKGKHIKATDAMAHVAGFTVAHDVSARDWQMRRNGKQWLLGKTFDTFCPLGPALVTKDSVADPHNLKICCRVNGEVVQSGNTNQMVFKTEDLIAWVSQFVTFYPGDVILTGTPPGVGVFRKPPVFLKKGDEVQCEIEELGVIINKVV

SEQ ID NO: 24017 - protein, 19 aa, Homo sapiens
ISRKVLNLRMSGQLIPGHL

SEQ ID NO: 24018 - protein, 70 aa, Homo sapiens
RAGLRVSLRRYTRAEYESEAEGVMGGEIQPVSVKVGDKVLLPEYGGTKVVLDDKDYFLFRDGDILGKYVD

SEQ ID NO: 24019 - protein, 59 aa, Homo sapiens
ILVLRSSRSELVRRGWELVPAEIQWEEPAAARATPPLERILKEMKSALRNEVDCLLAFC

SEQ ID NO: 24020 - protein, 20 aa, Homo sapiens
LQISMGSSIIFQILMETKQK

SEQ ID NO: 24021 - protein, 86 aa, Homo sapiens
VTRSQQLPRSPEAGASSTHSSAVSAGMMGRPCLLTAGRPCLWRRMAPSLSRPQSNTCSLRPRPRTQTRSAWSSTWTRPWCTAPSSQ

SEQ ID NO: 24022 - protein, 524 aa, Homo sapiens
IRRGSSPATPPQGLLPTSRPAAPATAGSRNMSTTLLSAFYDVDFLCKTEKSLANLNLNNMLDKKAVGTPVAAAPSSGFAPGFLRRHSASNLHALAHPAPSPGSCSPKFPGAANGSSCGSAAAGGPTSYGTLKEPSGGGGTALLNKENKFRDRSFSENGDRSQHLLHLQQQQKGGGGSQINSTRYKTELCRPFEESGTCKYGEKCQFAHGFHELRSLTRHPKYKTELCRTFHTIGFCPYGPRCHFIHNADERRPAPSGGASGDLRAFGTRDALHLGFPREPRPKLHHSLSFSGFPSGHHQPPGGLESPLLLDSPTSRTPPPPSCSSASSCSSSASSCSSASAASTPSGAPTCCASAAAAAAAALLYGTGGAEDLLAPGAPCAACSSASCANNAFAFGPELSSLITPLAIQTHNFAAVAAAAYYRSQQQQQQQGLAPPAQPPAPPSATLPAGAAAPPSPPFSFQLPRRLSDSPVFDAPPSPPDSLSDRDSYLSGSLSSGSLSGSESPSLDPGRRLPIFSRLSISDD

SEQ ID NO: 24023 - protein, 56 aa, Homo sapiens
LTPLTDPQSQSQRCEETSTLPGPQGQRGSASEAPFSVPIPIQALLALTTPRDSSGS

SEQ ID NO: 24024 - protein, 11 aa, Homo sapiens
LEGRRTYEAEI

SEQ ID NO: 24025 - protein, 28 aa, Homo sapiens
RHQRVKTAKTIPSTVVNSIAARLLLQII

SEQ ID NO: 24026 - protein, 34 aa, Homo sapiens
IFISSFFLMVKPCENELQYYSFNSHGHSHSEERS

SEQ ID NO: 24027 - protein, 61 aa, Homo sapiens
IIARINHLLNLLLDPKMMLPTMLFCLSNLKGPSALNSSPDHLILQGPRSRSWSHQNFWAKG

SEQ ID NO: 24028 - protein, 1087 aa, Homo sapiens
LAMDTPENVLQMLEAHMQSYKGNDPLGEWERYIQWVEENFPENKEYLITLLEHLMKEFLDKKKYHNDPRFISYCLKFAEYNSDLHQFFEFLYNHGIGTLSSPLYIAWAGHLEAQGELQHASAVLQRGIQNQAEPREFLQQQYRLFQTRLTETHLPAQARTSEPLHNVQVLNQMITSKSNPGNNMACISKNQGSELSGVISSACDKESNMERRVITISKSEYSVHSSLASKVDVEQVVMYCKEKLIRGESEFSFEELRAQKYNQRRKHEQWVNEDRHYMKRKEANAFEEQLLKQKMDELHKKLHQVVETSHEDLPASQERSEVNPARMGPSVGSQQELRAPCLPVTYQQTPVNMEKNPREAPPVVPPLANAISAALVSPATSQSIAPPVPLKAQTVTDSMFAVASKDAGCVNKSTHEFKPQSGAEIKEGCETHKVANTSSFHTTPNTSLGMVQATPSKVQPSPTVHTKEALGFIMNMFQAPTLPDISDDKDEWQSLDQNEDAFEAQFQKNVRSSGAWGVNKIISSLSSAFHVFEDGNKENYGLPQPKNKPTGARTFGERSVSRLPSKPKEEVPHAEEFLDDSTVWGIRCNKTLAPSPKSPGDFTSAAQLASTPFHKLPVESVHILEDKENVVAKQCTQATLDSCEENMVVPSRDGKFSPIQEKSPKQALSSHMYSASLLRLSQPAAGGVLTCEAELGVEACRLTDTDAAIAEDPPDAIAGLQAEWMQMSSLGTVDAPNFIVGNPWDDKLIFKLLSGLSKPVSSYPNTFEWQCKLPAIKPKTEFQLGSKLVYVHHLLGEGAFAQVYEATQGDLNDAKNKQKFVLKVQKPANPWEFYIGTQLMERLKPSMQHMFMKFYSAHLFQNGSVLVGELYSYGTLLNAINLYKNTPEKVMPQGLVISFAMRMLYMIEQVHDCEIIHGDIKPDNFILGNGFLEQDDEDDLSAGLALIDLGQSIDMKLFPKGTIFTAKCETSGFQCVEMLSNKPWNYQIDYFGVAATVYCMLFGTYMKVKNEGGECKPEGLFRRLPHLDMWNEFFHVMLNIPDCHHLPSLDLLRQKLKKVFQQHYTNKIRALRNRLIVLLLECKRSRK

SEQ ID NO: 24029 - protein, 39 aa, Homo sapiens
TPARMPARPPACRVRPFPPGLPGQRIRLCRYRFLTLRTR

SEQ ID NO: 24030 - protein, 8 aa, Homo sapiens
LPAKHCPT

SEQ ID NO: 24031 - protein, 47 aa, Homo sapiens
ILQKICGALRENLAEAVHWNAFTVIVMEAKYMKEKLLFVSLLIAPDD

SEQ ID NO: 24032 - protein, 8 aa, Homo sapiens
MMASAAFS

SEQ ID NO: 24033 - protein, 42 aa, Homo sapiens
VYITSTVLAPNVLCVAAPLVESPGPCWGTRWQDVSVVRTSAA

SEQ ID NO: 24034 - protein, 28 aa, Homo sapiens
IPRPLLGHKVAGIHQCTESSTNIHPFKW

SEQ ID NO: 24035 - protein, 49 aa, Homo sapiens
IPRPLLGHKVAGCLSGTNFSSLTQNSWSRFTSFMMTVFPWKSDSTWHSG

SEQ ID NO: 24036 - protein, 751 aa, Homo sapiens
LGPMLGTLRAMEGEDVEDDQLLQKLRASRRRFQRRMQRLIEKYNQPFEDTPVVQMATLTYETPQGLRIWGGRLIKERNEGEIQDSSMKPADRTDGSVQAAAWGPELPSHRTVLGADSKSGEVDATSDQEESVAWALAPAVPQSPLKNELRRKYLTQVDILLQGAEYFECAGNRAGRDVRVTPLPSLASPAVPAPGYCSRISRKSPGDPAKPASSPREWDPLHPSSTDMALVPRNDSLSLQETSSSSFLSSQPFEDDDICNVTISDLYAGMLHSMSRLLSTKPSSIISTKTFIMQNWNSRRRHRYKSRMNKTYCKGARRSQRSSKENFIPCSEPVKGTGALRDCKNVLDVSCRKTGLKLEKAFLEVNRPQIHKLDPSWKERKVTPSKYSSLIYFDSSATYNLDEENRFRTLKWLISPVKIVSRPTIRQGHGENRQREIEIRFDQLHREYCLSPRNQPRRMCLPDSWAMNMYRGGPASPGGLQGLETRRLSLPSSKAKAKSLSEAFENLGKRSLEAGRCLPKSDSSSSLPKTNPTHSATRPQQTSDLHVQGNSSGIFRKSVSPSKTLSVPDKEVPGHGRNRYDEIKEEFDKLHQKYCLKSPGQMTVPLCIGVSTDKASMEVRYQTEGFLGKLNPDPHFQGFQKLPSSPLGCRKSLLGSTAIEAPSSTCVARAITRDGTRDHQFPAKRPRLSEPQGSGRQGNSLGASDGVDNTVRPGDQGSSSQPNSEERGENTSYRMEEKSDFMLEKLETKSV

SEQ ID NO: 24037 - protein, 44 aa, Homo sapiens
RSLCGWWVFNMLQSQTARTRESDRIGSEIYEPPSCPLGSQYVYT

SEQ ID NO: 24038 - protein, 70 aa, Homo sapiens
LAARQPPLPLNLVPMAARPSFTRTVGIWASPKPSRWLLGLLEPVSSPLPPRPDPLFCPKELALTASGSRS

SEQ ID NO: 24039 - protein, 49 aa, Homo sapiens
LGPPLSAPRGPWMVKQQRSRGALCPRQLHPADPAWAVLRGGGGSPRSTQ

SEQ ID NO: 24040 - protein, 15 aa, Homo sapiens
LCTHFSSMYSSSARL

SEQ ID NO: 24041 - protein, 27 aa, Homo sapiens
RLPVFPTSRDGFAHYQASFPCRHREEG

SEQ ID NO: 24042 - protein, 71 aa, Homo sapiens
LRKSMRHWEGLGRGSVPLLLRATSWVIPGPGAGLGLTRGLPRGRLGACVTSPPAGCGDYVGPLWPVRSASL

SEQ ID NO: 24043 - protein, 20 aa, Homo sapiens
LEGPVRGASRGWRASKSLEM

SEQ ID NO: 24044 - protein, 45 aa, Homo sapiens
IPARLAGDPGLSRPAAPLAHSPSGRRAGEQLFGPSRTATQSQRAP

SEQ ID NO: 24045 - protein, 115 aa, Homo sapiens
KADRRRQRSTFRAVLHSVEGGECEEEIVRFGFEVLYMDSWARHRIYAAFKEVLGSGMHHHLQNNELLRDIFGLGPVLLLDATALKACKVPRFEKVCTLGHLSLPPIPISWRPGIL

SEQ ID NO: 24046 - protein, 9 aa, Homo sapiens
TALWCSGHC

SEQ ID NO: 24047 - protein, 22 aa, Homo sapiens
LSSKMEDWKICFEELANTWCHM

SEQ ID NO: 24048 - protein, 7 aa, Homo sapiens
ITDMCRK

SEQ ID NO: 24049 - protein, 11 aa, Homo sapiens
LMRVGGSEDIF

SEQ ID NO: 24050 - protein, 11 aa, Homo sapiens
RMGEQSECQNG

SEQ ID NO: 24051 - protein, 36 aa, Homo sapiens
VSRVRRDFSSLRLGLGLRPQLQPPARTRSLTPNSVP

SEQ ID NO: 24052 - protein, 39 aa, Homo sapiens
ITTAATANSANHTSEFNSRPTPIPALYTTPEPWPSSSSQ

SEQ ID NO: 24053 - protein, 31 aa, Homo sapiens
KRLAASIEAHRPATAARSHERQRRAELRRAG

SEQ ID NO: 24054 - protein, 46 aa, Homo sapiens
LQRSPLPIWFWNHREELGHSNTRCYHAGHPPLQTPVTAPRKNPKCL

SEQ ID NO: 24055 - protein, 18 aa, Homo sapiens
TEDALVFFCVAVQNDGSS

SEQ ID NO: 24056 - protein, 13 aa, Homo sapiens
RFFCVAVQNDGSS

SEQ ID NO: 24057 - protein, 54 aa, Homo sapiens
VQKCPLPTRGGLHLVAGSEIARGRRKPKTVPGAAAAAGAALRPPQQQAESRSIR

SEQ ID NO: 24058 - protein, 12 aa, Homo sapiens
ICEPILLQLVSS

SEQ ID NO: 24059 - protein, 621 aa, Homo sapiens
ILTRPCNRWATVPATEMVEGPGCTLNGEKIRARVLPGQAVTGVRGSALRSLQGRALRLAASTVVVSPQAAALNNDSSQNVLSLFNGYVYSGVETLGKELFMYFGPKALRIHFGMKGFIMINPLEYKYKNGASPVLEVQLTKDLICFFDSSVELRNSMESQQRIRMMKELDVCSPEFSFLRAESEVKKQKGRMLGDVLMDQNVLPGVGNIIKNEALFDSGLHPAVKVCQLTDEQIHHLMKMIRDFSILFYRCRKAGLALSKHYKVYKRPNCGQCHCRITVCRFGDNNRMTYFCPHCQKENPQHVDICKLPTRNTIISWTSSRVDHVMDSVARKSEEHWTCVVCTLINKPSSKACDACLTSRPIDSVLKSEENSTVFSHLMKYPCNTFGKPHTEVKINRKTAFGTTTLVLTDFSNKSSTLERKTKQNQILDEEFQNSPPASVCLNDIQHPSKKTTNDITQPSSKVNISPTISSESKLFSPAHKKPKTAQYSSPELKSCNPGYSNSELQINMTDGPRTLNPDSPRCSKHNRLCILRVVGKDGENKGRQFYACPLPREAQCGFFEWADLSFPFCNHGKRSTMKTVLKIGPNNGKNFFVCPLGKEKQCNFFQWAENGPGIKIIPGC

SEQ ID NO: 24060 - protein, 40 aa, Homo sapiens
VAPRDGAWDMRREAPATAQAVAPPRRGAGQSRLVLQRNHP

SEQ ID NO: 24061 - protein, 51 aa, Homo sapiens
LGRKDNRRLSKGCLDSLLSQDSKYSNSCPVLVIPVDCISVKNTILPFCNSI

SEQ ID NO: 24062 - protein, 2709 aa, Homo sapiens
LGPVQPDRMAEEGAVAVCVRVRPLNSREESLGETAQVYWKTDNNVIYQVDGSKSFNFDRVFHGNETTKNVYEEIAAPIIDSAIQGYNGTIFAYGQTASGKTYTMMGSEDHLGVIPRAIHDIFQKIKKFPDREFLLRVSYMEIYNETITDLLCGTQKMKPLIIREDVNRNVYVADLTEEVVYTSEMALKWITKGEKSRHYGETKMNQRSSRSHTIFRMILESREKGEPSNCEGSVKVSHLNLVDLAGSERAAQTGAAGVRLKEGCNINRSLFILGQVIKKLSDGQVGGFINYRDSKLTRILQNSLGGNAKTRIICTITPVSFDETLTALQFASTAKYMKNTPYVNEVSTDEALLKRYRKEIMDLKKQLEEVSLETRAQAMEKDQLAQLLEEKDLLQKVQNEKIENLTRMLVTSSSLTLQQELKAKRKRRVTWCLGKINKMKNSNYADQFNIPTNITTKTHKLSINLLREIDESVCSESDVFSNTLDTLSEIEWNPATKLLNQENIESELNSLRADYDNLVLDYEQLRTEKEEMELKLKEKNDLDEFEALERKTKKDQEMQLIHEISNLKNLVKHAEVYNQDLENELSSKVELLREKEDQIKKLQEYIDSQKLENIKMDLSYSLESIEDPKQMKQTLFDAETVALDAKRESAFLRSENLELKEKMKELATTYKQMENDIQLYQSQLEAKKKMQVDLEKELQSAFNEITKLTSLIDGKVPKDLLCNLELEGKITDLQKELNKEVEENEALREEVILLSELKSLPSEVERLRKEIQDKSEELHIITSEKDKLFSEVVHKESRVQGLLEEIGKTKDDLATTQSNYKSTDQEFQNFKTLHMDFEQKYKMVLEENERMNQEIVNLSKEAQKFDSSLGALKTELSYKTQELQEKTREVQERLNEMEQLKEQLENRDSTLQTVEREKTLITEKLQQTLEEVKTLTQEKDDLKQLQESLQIERDQLKSDIHDTVNMNIDTQEQLRNALESLKQHQETINTLKSKISEEVSRNLHMEENTGETKDEFQQKMVGIDKKQDLEAKNTQTLTADVKDNEIIEQQRKIFSLIQEKNELQQMLESVIAEKEQLKTDLKENIEMTIENQEELRLLGDELKKQQEIVAQEKNHAIKKEGELSRTCDRLAEVEEKLKEKSQQLQEKQQQLLNVQEEMSEMQKKINEIENLKNELKNKELTLEHMETERLELAQKLNENYEEVKSITKERKVLKELQKSFETERDHLRGYIREIEATGLQTKEELKIAHIHLKEHQETIDELRRSVSEKTAQIINTQDLEKSHTKLQEEIPVLHEEQELLPNVKEVSETQETMNELELLTEQSTTKDSTTLARIEMERLRLNEKFQESQEEIKSLTKERDNLKTIKEALEVKHDQLKEHIRETLAKIQESQSKQEQSLNMKEKDNETTKIVSEMEQFKPKDSALLRIEIEMLGLSKRLQESHDEMKSVAKEKDDLQRLQEVLQSESDQLKENIKEIVAKHLETEEELKVAHCCLKEQEETINELRVNLSEKETEISTIQKQLEAINDKLQNKIQEIYEKEEQFNIKQISEVQEKVNELKQFKEHRKAKDSALQSIESKMLELTNRLQESQEEIQIMIKEKEEMKRVQEALQIERDQLKENTKEIVAKMKESQEKEYQFLKMTAVNETQEKMCEIEHLKEQFETQKLNLENIETENIRLTQILHENLEEMRSVTKERDDLRSVEETLKVERDQLKENLRETITRDLEKQEELKIVHMHLKEHQETIDKLRGIVSEKTNEISNMQKDLEHSNDALKAQDLKIQEELRIAHMHLKEQQETIDKLRGIVSEKTDKLSNMQKDLENSNAKLQEKIQELKANEHQLITLKKDVNETQKKVSEMEQLKKQIKDQSLTLSKLEIENLNLAQKLHENLEEMKSVMKERDNLRRVEETLKLERDQLKESLQETKARDLEIQQELKTARMLSKEHKETVDKLREKISEKTIQISDIQKDLDKSKDELQKKIQELQKKELQLLRVKEDVNMSHKKINEMEQLKKQFEAQNLSMQSVRMDNFQLTKKLHESLEEIRIVAKERDELRRIKESLKMERDQFIATLREMIARDRQNHQVKPEKRLLSDGQQHLTESLREKCSRIKELLKRYSEMDDHYECLNRLSLDLEKEIEFQKELSMRVKANLSLPYLQTKHIEKLFTANQRCSMEFHRIMKKLKYVLSYVTKIKEEQHESINKFEMDFIDEVEKQKELLIKIQHLQQDCDVPSRELRDLKLNQNMDLHIEEILKDFSESEFPSIKTEFQQVLSNRKEMTQFLEEWLNTRFDIEKLKNGIQKENDRICQVNNFFNNRIIAIMNESTEFEERSATISKEWEQDLKSLKEKNEKLFKNYQTLKTSLASGAQVNPTTQDNKNPHVTSRATQLTTEKIRELENSLHEAKESAMHKESKIIKMQKELEVTNDIIAKLQAKVHESNKCLEKTKETIQVLQDKVALGAKPYKEEIEDLKMKLVKIDLEKMKNAKEFEKEISATKATVEYQKEVIRLLRENLRRSQQAQDTSVISEHTDPQPSNKPLTCGGGSGIVQNTKALILKSEHIRLEKEISKLKQQNEQLIKQKNELLSNNQHLSNEVKTWKERTLKREAHKQVTCENSPKSPKVTGTASKKKQITPSQCKERNLQDPVPKESPKSCFFDSRSKSLPSPHPVRYFDNSSLGLCPEVQNAGAESVDSQPGPWHASSGKDVPECKTQ

SEQ ID NO: 24063 - protein, 12 aa, Homo sapiens
LGPTVWSCFTFP

SEQ ID NO: 24064 - protein, 34 aa, Homo sapiens
LQNKRLRIALEINQFTPEPREGSVSVGSGRSAGL

SEQ ID NO: 24065 - protein, 456 aa, Homo sapiens
VAATLGVRWRRPRPGWVPTALGGAMDEAVGDLKQALPCVAESPTVHVEVHQRGSSTAKKEDINLSVRKLLNRHNIVFGDYTWTEFDEPFLTRNVQSVSIIDTELKVKDSQPIDLSACTVALHIFQLNEDGPSSENLEEETENIIAANHWVLPAAEFHGLWDSLVYDVEVKSHLLDYVMTTLLFSDKNVNSNLITWNRVVLLHGPPGTGKTSLCKALAQKLTIRLSSRYRYGQLIEINSHSLFSKWFSESGKLVTKMFQKIQDLIDDKDALVFVLIDEVESLTAARNACRAGTEPSDAIRVVNAVLTQIDQIKRHSNVVILTTSNITEKIDVAFVDRADIKQYIGPPSAAAIFKIYLSCLEELMKCQIIYPRQQLLTLRELEMIGFIENNVSKLSLLLNDISRKSEGLSGRVLRKLPFLAHALYVQAPTVTIEGFLQALSLAVDKQFEERKKLAAYI

SEQ ID NO: 24066 - protein, 45 aa, Homo sapiens
LPPPWWCSSAPSRSWCEYSSTSYISQVWSEKSVKIQICRPSELLL

SEQ ID NO: 24067 - protein, 41 aa, Homo sapiens
LSASRPSDLPSRKLGSQKIGNSYQHGKPIENSGDWLLVSST

SEQ ID NO: 24068 - protein, 33 aa, Homo sapiens
LPSRKLGSQKIGNSYQHGKPIENSGDWLLVSST

SEQ ID NO: 24069 - protein, 8 aa, Homo sapiens
MAEYIKQW

SEQ ID NO: 24070 - protein, 42 aa, Homo sapiens
RDPLREQAKTYQSVNNLKPIGYPSKMMHPKQNIKRTKRKKST

SEQ ID NO: 24071 - protein, 11 aa, Homo sapiens
MLFPGTVVGCW

SEQ ID NO: 24072 - protein, 14 aa, Homo sapiens
MTNEQRIRMTVPCL

SEQ ID NO: 24073 - protein, 55 aa, Homo sapiens
LLLLSRLEPPLADSGERECASHPPRPAAGPSASGNVSGAACTLLRPWTHHMMVLR

SEQ ID NO: 24074 - protein, 31 aa, Homo sapiens
LPVEIRGGRQDSLAAVPAAVHWVKNDNQHQP

SEQ ID NO: 24075 - protein, 741 aa, Homo sapiens
LSRSASHLQFLELAVNMSFPKAPLKRFNDPSGCAPSPGAYDVKTLEVLKGPVSFQKSQRFKQQKESKQNLNVDKDTTLPASARKVKSSESKKESQKNDKDLKILEKEIRVLLQERGAQDRRIQDLETELEKMEARLNAALREKTSLSANNATLEKQLIELTRTNELLKSKFSENGNQKNLRILSLELMKLRNKRETKMRGMMAKQEGMEMKLQVTQRSLEESQGKIAQLEGKLVSIEKEKIDEKSETEKLLEYIEEISCASDQVEKYKLDIAQLEENLKEKNDEILSLKQSLEENIVILSKQVEDLNVKCQLLEKEKEDHVNRNREHNENLNAEMQNLKQKFILEQQEREKLQQKELQIDSLLQQEKELSSSLHQKLCSFQEEMVKEKNLFEEELKQTLDELDKLQQKEEQAERLVKQLEEEAKSRAEELKLLEEKLKGKEAELEKSSAAHTQATLLLQEKYDSMVQSLEDVTAQFESYKALTASEIEDLKLENSSLQEKAAKAGKNAEDVQHQILATESSNQEYVRMLLDLQTKSALKETEIKEITVSFLQKITDLQNQLKQQEEDFRKQLEDEEGRKAEKENTTAELTEEINKWRLLYEELYNKTKPFQLQLDAFEVEKQALLNEHGAAQEQLNKIRDSYAKLLGHQNLKQKIKHVVKLKDENSQLKSEVSKLRCQLAKKKQSETKLQEELNKVLGIKHFDPSKAFHHESKENFALKTPLKEGNTNCYRAPMECQESWK

SEQ ID NO: 24076 - protein, 26 aa, Homo sapiens
LVRKILFNLGSPSYGNLLKIHISLLE

SEQ ID NO: 24077 - protein, 34 aa, Homo sapiens
LDLEGKSSFTPLPKVSHRPLQHAFPAGSLYTFRL

SEQ ID NO: 24078 - protein, 19 aa, Homo sapiens
ITQMGAGTSYGEGYSCVST

SEQ ID NO: 24079 - protein, 42 aa, Homo sapiens
MPICPASTPQPPQGTSCPSAGAKEPVLCLNVATWCSGLMKGM

SEQ ID NO: 24080 - protein, 107 aa, Homo sapiens
INAFTQQSGKTSSILCRRGRWRWSDWFTSQLPQAEASPGPVKLEPGCKARRCCVAPEELARSHGIRRLHTHVHTPRSGEGTVLRGSNLYSSGGSRKSQNLLFSGWVM

SEQ ID NO: 24081 - protein, 454 aa, Homo sapiens
TRGMNLEGGGRGGEFGMSAVSCGNGKLRQWLIDQIDSGKYPGLVWENEEKSIFRIPWKHAGKQDYNREEDAALFKAWALFKGKFREGIDKPDPPTWKTRLRCALNKSNDFEELVERSQLDISDPYKVYRIVPEGAKKGAKQLTLEDPQMSMSHPYTMTTPYPSLPAQQVHNYMMPPLDRSWRDYVPDQPHPEIPYQCPMTFGPRGHHWQGPACENGCQVTGTFYACAPPESQAPGVPTEPSIRSAEALAFSDCRLHICLYYREILVKELTTSSPEGCRISHGHTYDASNLDQVLFPYPEDNGQRKNIEKLLSHLERGVVLWMAPDGLYAKRLCQSRIYWDGPLALCNDRPNKLERDQTCKLFDTQQFLSELQAFAHHGRSLPRFQVTLCFGEEFPDPQRQRKLITAHVEPLLARQLYYFAQQNSGHFLRGYDLPEHISNPEDYHRSIRHSSIQE

SEQ ID NO: 24082 - protein, 138 aa, Homo sapiens
LWSFDGITSAANMPEPAKSAPAPKKGSKKAVTKAQKKDGKKRKRSRKESYSVYVYKVLKQVHPDTGISSKAMGIMNSFVNDIFERIAGEASRLAHYNKRSTITSREIQTAVRLLLPGELAKHAVSEGTKAVTKYTSSK

SEQ ID NO: 24083 - protein, 241 aa, Homo sapiens
TTRFPSGQPLKPRPTLTAAGPRPGLLCFTIYIMNPSMKQKQEEIKENIKNSSVPRRTLKMIQPSASGSLVGRENELSAGLSKRKHRNDHLTSTTSSPGVIVPESSENKNLGGVTQESFDLMIKENPSSQYWKEVAEKRRKALYEALKENEKLHKEIEQKDNEIARLKKENKELAEVAEHVQYMAELIERLNGEPLDNFESLDNQEFDSEEETVEDSLVEDSEIGTCAEGTVSSSTDAKPCI

SEQ ID NO: 24084 - protein, 20 aa, Homo sapiens
MFYIFLDFVCFLVSLGRWFW

SEQ ID NO: 24085 - protein, 11 aa, Homo sapiens
RRAIQCMCTRC

SEQ ID NO: 24086 - protein, 20 aa, Homo sapiens
MVRSASVAARRAIPCTCTRC

SEQ ID NO: 24087 - protein, 8 aa, Homo sapiens
LQMNYGAY

SEQ ID NO: 24088 - protein, 9 aa, Homo sapiens
VFLRCSWRM

SEQ ID NO: 24089 - protein, 63 aa, Homo sapiens
LAVKQMQQRRLLPRSPRGPGIRRTGWHCLKRRLLGDCAARIGGSPNILRSEDPAQVRCHRTCS

SEQ ID NO: 24090 - protein, 137 aa, Homo sapiens
RASAPMLLRMSEHRNEALGNYLEMRLKSSFLRGLGSWKSNPLRLGGWTILLTLTMGQGEPGGPQGDPWVPHELLLPSLCDSSHASSWGSGSITCAWRGGDSSSHPLVSGHILSNSPVAAVMCSSMGTHLSPFKGTLL

SEQ ID NO: 24091 - protein, 40 aa, Homo sapiens
KSSWSVLRSSQCQPVMRRMKYPPQNPAEGRKPRVVMFLQP

SEQ ID NO: 24092 - protein, 10 aa, Homo sapiens
LKTTLRRHIP

SEQ ID NO: 24093 - protein, 17 aa, Homo sapiens
ISQTRVSDAGHDVKTKF

SEQ ID NO: 24094 - protein, 60 aa, Homo sapiens
LARLQEGIRICYQRRPRRSQAGPQRPAPPLPATRSAHRRPAAELAHPSHHSSTCSLEKGR

SEQ ID NO: 24095 - protein, 8 aa, Homo sapiens
VDLSRRIF

SEQ ID NO: 24096 - protein, 181 aa, Homo sapiens
TSPTSRSPRRSQRCPTPLARPPAASPGSALSCPPTRPRPSAPAAATAATPPAATATATAPGIAFGTAPAPAPAAAPLGTVPAPTSWRLGCSCPKSTRLPTCAPRPATTCTPPSWRPARRRSPWSRSTRWARYWAAAASARSTQASASPTTCRWPSNTWRRTGFPTGESCLMALECPWKWSC

SEQ ID NO: 24097 - protein, 212 aa, Homo sapiens
IDTLQFRLQVRCTRNPHAAKDSSDPNELYVNHKVYTRHMTWIPLGNQADLFPEGTIRPVHDDILIAQLRPGQEIDLLMHCVKGIGKDHAKFSPVATASYRLLPDITLLEPVEGEAAEELSRCFSPGVIEVQEVQGKKVARVANPRLDTFSREIFRNEKLKKVVRLARVRDHYIFSVESTGVLPPDVLVSEAIKVLMGKCRRFLDELDAVQMD

SEQ ID NO: 24098 - protein, 130 aa, Homo sapiens
LFSTMPEPVKSAPVPKKGSKKAINKAQKKDGKKRKRSRKESYSVYVYKVLKQVHPDTGISSKAMGIMNSFVNDIFERIAGEASRLAHYNKRSTITSREIQTAVRLLLPGELAKHAVSEGTKAVTKYTSSK

SEQ ID NO: 24099 - protein, 869 aa, Homo sapiens
ISPAQLSVVFFLEMESEDLSGRELTIDSIMNKVRDIKNKFKNEDLTDELSLNKISADTTDNSGTVNQIMMMANNPEDWLSLLLKLEKNSVPLSDALLNKLIGRYSQAIEALPPDKYGQNESFARIQVRFAELKAIQEPDDARDYFQMARANCKKFAFVHISFAQFELSQGNVKKSKQLLQKAVERGAVPLEMLEIALRNLNLQKKQLLSEEEKKNLSASTVLTAQESFSGSLGHLQNRNNSCDSRGQTTKARFLYGENMPPQDAEIGYRNSLRQTNKTKQSCPFGRVPVNLLNSPDCDVKTDDSVVPCFMKRQTSRSECRDLVVPGSKPSGNDSCELRNLKSVQNSHFKEPLVSDEKSSELIITDSITLKNKTESSLLAKLEETKEYQEPEVPESNQKQWQSKRKSECINQNPAASSNHWQIPELARKVNTEKHTTFEQPVFSVSKQSPPISTSKWFDPKSICKTPSSNTLDDYMSCFRTPVVKNDFPPACQLSTPYGQPACFQQQQHQILATPLQNLQVLASSSANECISVKGRIYSILKQIGSGGSSKVFQVLNEKKQIYAIKYVNLEEADNQTLDSYRNEIAYLNKLQQHSDKIIRLYDYEITDQYIYMVMECGNIDLNSWLKKKKSIDPWERKSYWKNMLEAVHTIHQHGIVHSDLKPANFLIVDGMLKLIDFGIANQMQPDTTSVVKDSQVGTVNYMPPEAIKDMSSSRENGKSKSKISPKSDVWSLGCILYYMTYGKTPFQQIINQISKLHAIIDPNHEIEFPDIPEKDLQDVLKCCLKRDPKQRISIPELLAHPYVQIQTHPVNQMAKGTTEEMKYVLGQLVGLNSPNSILKAAKTLYEHYSGGESHNSSSSKTFEKKRGKK

SEQ ID NO: 24100 - protein, 6 aa, Homo sapiens
TCMPPG

SEQ ID NO: 24101 - protein, 11 aa, Homo sapiens
LKMSAVIVEEI

SEQ ID NO: 24102 - protein, 10 aa, Homo sapiens
LPPAPSFCQG

SEQ ID NO: 24103 - protein, 17 aa, Homo sapiens
LAWRLARRSCPRSLVSR

SEQ ID NO: 24104 - protein, 8 aa, Homo sapiens
LPNSASWV

SEQ ID NO: 24105 - protein, 63 aa, Homo sapiens
MQDGSRAAAVQPFLPHHGLHLPAPAQRAPGHPAGPGEFCGMPACCSVCCFLVSHLLTSWYNQL

SEQ ID NO: 24106 - protein, 8 aa, Homo sapiens
IPSMCTRF

SEQ ID NO: 24107 - protein, 20 aa, Homo sapiens
MVRSVSAAARRAILSMCTRF

SEQ ID NO: 24108 - protein, 475 aa, Homo sapiens
LNPPNPWDLQPRSPEELAFGEVQITYLTHACMDLKLGDKRMVFDPWLIGPAFARGWWLLHEPPSDWLERLCQADLIYISHLHSDHLSYPTLKKLAGRRPDIPIYVGNTERPVFWNLNQSGVQLTNINVVPFGIWQQVDKNLRFMILMDGVHPEMDTCIIVEYKGHKILNIVDCTRPNGGRLPMKVALMMSDFAGGASGFPMTFSGGKFTEEWKAQFIKTERKKLLNYKARLVKNLQPRIYCPFAGYFVESHPSDKYIKETNTKNDPNELNNLIKKNSDVITWTPRPGATLDLGRMLKDRTDSKGIIEPPEGTKIYKDSWDFEPYLEILNAALGDEIFLHSSWIKEYFTWAGFKDYNLVVRMIETDEDFNPFPGGYDYLVDFLDLSFPKERPQREHPYEEIHSRVDVIRHVVKNGLLWDELYIGFQTRLQRDPDIYHHLFWNHFQIKLPLTPPNWKSFLMCCEQNGPVILQECKTT

SEQ ID NO: 24109 - protein, 141 aa, Homo sapiens
IAFSTMARTKQTARKSTGGKAPRKQLATKAARKSAPATGGVKKPHRYRPGTVALREIRRYQKSTELLIRKLPFQRLVREIAQDFKTDLRFQSSAVMALQEACEAYLVGLFEDTNLCAIHAKRVTIMPKDIQLARRIRGERA

SEQ ID NO: 24110 - protein, 19 aa, Homo sapiens
RFQPSSQIPATPPPPVSPL

SEQ ID NO: 24111 - protein, 33 aa, Homo sapiens
LNRRGLRRDLNSSCPTNSISAFLLTSCENYSSG

SEQ ID NO: 24112 - protein, 69 aa, Homo sapiens
VSGDHLPRLGLLGQARTHGPWKSWSRGLNSRHLYRAEHDHIPAAAAGAQPGLHRSRWLRGPCGKHLSVG

SEQ ID NO: 24113 - protein, 32 aa, Homo sapiens [sequence omitted]

SEQ ID NO: 24114 - protein, 28 aa, Homo sapiens
VQSVVVAAAVRRARRRRGCHGRAAVPVR

SEQ ID NO: 24115 - protein, 21 aa, Homo sapiens
MNPVSPELLIFQEKPRFQICR

SEQ ID NO: 24116 - protein, 745 aa, Homo sapiens
TGVKSTPGQSAAILMKLRSSHNASKTLNANNMETLIECQSEGDIKEHPLLASCESEDSICQLIEVKKRKKVLSWPFLMRRLSPASDFSGALETDLKASLFDQPLSIICGDSDTLPRPIQDILTILCLKGPSTEGIFRRAANEKARKELKEELNSGDAVDLERLPVHLLAVVFKDFLRSIPRKLLSSDLFEEWMGALEMQDEEDRIEALKQVADKLPRPNLLLLKHLVYVLHLISKNSEVNRMDSSNLAICIGPNMLTLENDQSLSFEAQKDLNNKVKTLVEFLIDNCFEIFGENIPVHSSITSDDSLEHTDSSDVSTLQNDSAYDSNDPDVESNSSSGISSPSRQPQVPMATAAGLDSAGPQDAREVSPEPIVSTVARLKSSLAQPDRRYSEPSMPSSQECLESRVTNQTLTKSEGDFPVPRVGSRLESEEAEDPFPEEVFPAVQGKTKRPVDLKIKNLAPGSVLPRALVLKAFSSSSLDASSDSSPVASPSSPKRNFFSRHQSFTTKTEKGKPSREIKKHSMSFTFAPHKKVLTKNLSAGSGKSQDFTRDHVPRGVRKESQLAGRIVQENGCETHNQTARGFCLRPHALSVDDVFQGADWERPGSPPSYEEAMQGPAARLVASESQTVGSMTVGSMRARMLEAHCLLPPLPPAHHVEDSRHRGSKEPLPGHGLSPLPERWKQSRTVHASGDSLGHVSGPGRPELLPLRTVSESVQRNKRDCLVRRCSQPVFEADQFQYAKESYI

SEQ ID NO: 24117 - protein, 65 aa, Homo sapiens
TPSQPLLWSPVGRGAAILVARGVSRIRRVSLPSRWRGLCPCSVTAALGKRSAPKTLWLQLRLPIL

SEQ ID NO: 24118 - protein, 540 aa, Homo sapiens
LRPFPETDSSFGEQKAPAMQPWHGKAMQRASEAGATAPKASARNARGAPMDPTESPAAPEAALPKAGKFGPARKSGSRQKKSAPDTQERPPVRATGARAKKAPQRAQDTQPSDATSAPGAEGLEPPAAREPALSRAGSCRQRGARCSTKPRPPPGPWDVPSPGLPVSAPILVRRDAAPGASKLRAVLEKLKLSRDDISTAAGMVKGVVDHLLLRLKCDSAFRGVGLLNTGSYYEHVKISAPNEFDVMFKLEVPRIQLEEYSNTRAYYFVKFKRNPKENPLSQFLEGEILSASKMLSKFRKIIKEEINDIKDTDVIMKRKRGGSPAVTLLISEKISVDITLALESKSSWPASTQEGLRIQNWLSAKVRKQLRLKPFYLVPKHAKEGNGFQEETWRLSFSHIEKEILNNHGKSKTCCENKEEKCCRKDCLKLMKYLLEQLKERFKDKKHLDKFSSYHVKTAFFHVCTQNPQDSQWDRKDLGLCFDNCVTYFLQCLRTEKLENYFIPEFNLFSSNLIDKRSKEFLTKQIEYERNNEFPVFDEF

SEQ ID NO: 24119 - protein, 21 aa, Homo sapiens
RKNYWEMYSKIGPRKQMESIR

SEQ ID NO: 24120 - protein, 11 aa, Homo sapiens
TSRLLSQFRAW

SEQ ID NO: 24121 - protein, 10 aa, Homo sapiens
LQIILWKENA

SEQ ID NO: 24122 - protein, 48 aa, Homo sapiens
LGSRLLGLAGEPLSGLAGSGPRAPGGPCGTKRGTQHGRKPRAPRCCGG

SEQ ID NO: 24123 - protein, 77 aa, Homo sapiens; identical to SEQ ID NO: 14937

SEQ ID NO: 24124 - protein, 8 aa, Homo sapiens
VRNMLPSS

SEQ ID NO: 24125 - protein, 388 aa, Homo sapiens
KEAATLAMASPPACPSEEDESLKGCELYVQLHGIQQVLKDCIVHLCISKPERPMKFLREHFEKLEKEENRQILARQKSNSQSDSHDEEVSPTPPNPVVKARRRRGGVSAEVYTEEDAVSYVRKVIPKDYKTMTALAKAISKNVLFAHLDDNERSDIFDAMFPVTHIAGETVIQQGNEGDNFYVVDQGEVDVYVNGEWVTNISEGGSFGELALIYGTPRAATVKAKTDLKLWGIDRDSYRRILMGSTLRKRKMYEEFLSKVSILESLEKWERLTVADALEPVQFEDGEKIVVQGEPGDDFYIITEGTASVLQRRSPNEEYVEVGRLGPSDYFGEIALLLNRPRAATVVARGPLKCVKLDRPRFERVLGPCSEILKRNIQRYNSFISLTV

SEQ ID NO: 24126 - protein, 106 aa, Homo sapiens
IQDMAVRQHLLTNLVEVDGRFVWRVNLDALTQHLDKILAFPQRQESYLGPTLFLLGGNSQFVHPSHHPEIMRLFPRAQMQTVPNAGHWIHADRPQDFIAAIRGFLV

SEQ ID NO: 24127 - protein, 34 aa, Homo sapiens
MFSGGCHSPGFGRPSPAFPAPGSPPPAPRPCRQS

SEQ ID NO: 24128 - protein, 25 aa, Homo sapiens
LKTFSVALAEQRQALGVEVFGFIRA

SEQ ID NO: 24129 - protein, 371 aa, Homo sapiens
VSRAGAMEGQSVEELLAKAEQDEAEKLQRITVHKELELQFDLGNLLASDRNPPTGLRCAGPTPEAELQALARDNTQLLINQLWQLPTERVEEAIVARLPEPTTRLPREKPLPRPRPLTRWQQFARLKGIRPKKKTNLVWDEVSGQWRRRWGYQRARDDTKEWLIEVPGNADPLEDQFAKRIQAKKERVAKNELNRLRNLARAHKMQLPSAAGLHPTGHQSKEELGRAMQVAKVSTASVGRFQERLPKEKVPRGSGKKRKFQPLFGDFAAEKKNQLELLRVMNSKKPQLDVTRATNKQMREEDQEEAAKRRKMSQKGKRKGGRQGPGGKRKGGPPSQGGKRKGGLGGKMNSGPPGLGGKRKGGQRPGGKRRK

SEQ ID NO: 24130 - protein, 56 aa, Homo sapiens
LGDPSALPAVAAADPRLRREGRPRCARPEVTRPGPSSLPSTIPLRLRAPASSCESL

SEQ ID NO: 24131 - protein, 64 aa, Homo sapiens
KCVTSCRYCPWTGRSPSTSSAAEEPSASAPAPLSSAAPIPGSSLRGVELFPMTVLIRLHYTFVC

SEQ ID NO: 24132 - protein, 7 aa, Homo sapiens
IQTFDWR

SEQ ID NO: 24133 - protein, 11 aa, Homo sapiens
LLCSRLSCFPS

SEQ ID NO: 24134 - protein, 26 aa, Homo sapiens
RYPTSKMPDLKDSKTTDLCQHVKHMV

SEQ ID NO: 24135 - protein, 28 aa, Homo sapiens
LPKTKLLCKHLCTAMCVGICEKKRICEV

SEQ ID NO: 24136 - protein, 20 aa, Homo sapiens
VTLHPAIPLQTAPTGVMPSV

SEQ ID NO: 24137 - protein, 62 aa, Homo sapiens
LDFLERTGCLSPLKTPISRIQHRPAPCLRRSNPHTSSILLQWWGACSGISNTIWTSGGKTCT

SEQ ID NO: 24138 - protein, 47 aa, Homo sapiens
IEKILRNAVPAASLRTAGPCPSVGRRSAVPSAPQVLFLIPNKLARGL

SEQ ID NO: 24139 - protein, 97 aa, Homo sapiens
LLRPLFALSFHFLQRASRMAHKQIYYSDKYFDEHYEYRHVMLPRELSKQVPKTHLMSEEEWRRLGVQQSLGWVHYMIHEPEPHILLFRRPLPKDQQK

SEQ ID NO: 24140 - protein, 40 aa, Homo sapiens
RIILQLNRYYPQILTNKEAEKVLRSSGTPRHPCVCGSVTS

SEQ ID NO: 24141 - protein, 18 aa, Homo sapiens
IGLLPERPAPTWRPSSLW

SEQ ID NO: 24142 - protein, 38 aa, Homo sapiens
RSRCMGTCIIYRQDGCLKTQSQTSRIQLLEALPGLQRR

SEQ ID NO: 24143 - protein, 42 aa, Homo sapiens
LTRPAKLPPVCYSLMSWIRLPRLVEVTLEMVVGLLTESSTRS

SEQ ID NO: 24144 - protein, 736 aa, Homo sapiens
RAMAASPGPAGVGGAGAVYGSGSSGFALDSGLEIKTRSVEQTLLPLVSQITTLINHKDNTKKSDKTLQAIQRVGQAVNLAVGRFVKVGEAIANENWDLKEEINIACIEAKQAGETIAALTDITNLNHLESDGQITIFTDKTGVIKAARLLLSSVTKVLLLADRVVIKQIITSRNKVLATMERLEKVNSFQEFVQIFSQFGNEMVEFAHLSGDRQNDLKDEKKKAKMAAARAVLEKCTMMLLTASKTCLRHPNCESAHKNKEGVFDRMKVALDKVIEIVTDCKPNGETDISSISIFTGIKEFKMNIEALRENLYFQSKENLSVTLEVILERMEDFTDSAYTSHEHRERILELSTQARMELQQLISVWIQAQSKKTKSIAEELELSILKISHSLNELKKELHSTATQLAADLLKYHADHVVLKALKLTGVEGNLEALAEYACKLSEQKEQLVETCRLLRHISGTEPLEITCIHAEETFQVTGQQIISAAETLTLHPSSKIAKENLDVFCEAWESQISDMSTLLREINDVFEGRRGEKYGYLSLPKPMKNNANLKSLKPDKPDSEEQAKIAKLGLKLGLLTSDADCEIEKWEDQENEIVQYGRNMSSMAYSLYLFTRGEGPLKTSQDLIHQLEVFAAEGLKLTSSVQAFSKQLKDDDKLMLLLEINKLIPLCHQLQTVTKTSLQNKVFLKVDKCITKTRSMMALLVQLLSLCYKLLKKLQMENNGWVSVTNKDTMDSKT

SEQ ID NO: 24145 - protein, 33 aa, Homo sapiens
MNLSPTLAAASRLTPPEKSFSTRQQVKVFFQVT

SEQ ID NO: 24146 - protein, 88 aa, Homo sapiens
MRLVARLQVGPADTQPRVSGEADGESSSGSRDSGLLWCHQPPPQQGGPGEGQEQLQRLDVQTDGGPVCAVPVDRWPVLPREDQEGQQL

SEQ ID NO: 24147 - protein, 7 aa, Homo sapiens
LILGDCG

SEQ ID NO: 24148 - protein, 616 aa, Homo sapiens
VPVPAGLPGTRPPPHPLLRAMEPELAAQKQPRPRRRSRRASGLSTEGATGPSADTSGSELDGRCSLRRGSSFTFLTPGPNWDFTLKRKRREKDDDVVSLSSLDLKEPSNKRVRPLARVTSLANLISPVRNGAVRRFGQTIQSFTLRGDHRSPASAQKFSSRSTVPTPAKRRSSALWSEMLDITMKESLTTREIRRQEAIYEMSRGEQDLIEDLKLARKAYHDPMLKLSIMSEEELTHIFGDLDSYIPLHEDLLTRIGEATKPDGTVEQIGHILVSWLPRLNAYRGYCSNQLAAKALLDQKKQDPRVQDFLQRCLESPFSRKLDLWSFLDIPRSRLVKYPLLLKEILKHTPKEHPDVQLLEDAILIIQGVLSDINLKKGESECQYYIDKLEYLDEKQRDPRIEASKVLLCHGELRSKSGHKLYIFLFQDILVLTRPVTRNERHSYQVYRQPIPVQELVLEDLQDGDVRMGGSFRGAFSNSEKAKNIFRIRFHDPSPAQSHTLQANDVFHKQQWFNCIRAAIAPFQSAGSPPELQGLPELHEECEGNHPSARKLTAQRRASTVSSVTQVEVDENAYRCGSGMQMAEDSKSLKTHQTQPGIRRARDKALSGGKRKETLV

SEQ ID NO: 24149 - protein, 36 aa, Homo sapiens
RNPGHDFAFLLDLVGDYTLSPMETTSCILPSIWDLG

SEQ ID NO: 24150 - protein, 7 aa, Homo sapiens
MGPLGGR

SEQ ID NO: 24151 - protein, 35 aa, Homo sapiens
LARRIAESSPLFTTWSRFILPYPVFGFLSSPSSLC

SEQ ID NO: 24152 - protein, 15 aa, Homo sapiens
KTVLSAEAHYGCNWR

SEQ ID NO: 24153 - protein, 49 aa, Homo sapiens
REAAKECRRRKKEYVKCLESRVAVLEVQNKKLIEELETLKDICSPKTDY

SEQ ID NO: 24154 - protein, 27 aa, Homo sapiens
LSPLAGFPVAVRCAAGFLVNFWMKPLN

SEQ ID NO: 24155 - protein, 514 aa, Homo sapiens
VGRSRPRDSISARSDNSPFPWRSLRAWHPAGRLKTVVSSIASLDLATISEMSSRSTKDLIKSKWGSKPSNSKSETTLEKLKGEIAHLKTSVDEITSGKGKLTDKERHRLLEKIRVLEAEKEKNAYQLTEKDKEIQRLRDQLKARYSTTTLLEQLEETTREGERREQVLKALSEEKDVLKQQLSAATSRIAELESKTNTLRLSQTVAPNCFNSSINNIHEMEIQLKDALEKNQQWLVYDQQREVYVKGLLAKIFELEKKTETAAHSLPQQTKKPESEGYLQEEKQKCYNDLLASAKKDLEVERQTITQLSFELSEFRRKYEETQKEVHNLNQLLYSQRRADVQHLEDDRHKTEKIQKLREENDIARGKLEEEKKRSEELLSQVQFLYTSLLKQQEEQTRVALLEQQMQACTLDFENEKLDRQHVQHQLHVILKELRKARNQITQLESLKQLHEFAITEPLVTFQGETENREKVAASPKSPTAALNESLVECPKCNIQYPATEHRDLLVHVEYCSK

SEQ ID NO: 24156 - protein, 44 aa, Homo sapiens
RRASKILGSRTWPEPLDRAGPSPETWRVATTQVWMVLLNMMISN

SEQ ID NO: 24157 - protein, 21 aa, Homo sapiens
RGNTKPATRCEITRVIHRLKT

SEQ ID NO: 24158 - protein, 447 aa, Homo sapiens
LAIERAGRERGVAPPLGRRAPSRPQPRGSPSRASPADTLAVDTLAVGTRGARGAGPLAGGGGGMKVTSLDGRQLRKMLRKEAAARCVVLDCRPYLAFAASNVRGSLNVNLNSVVLRRARGGAVSARYVLPDEAARARLLQEGGGGVAAVVVLDQGSRHWQKLREESAARVVLTSLLACLPAGPRVYFLKGGYETFYSEYPECCVDVKPISQEKIESERALISQCGKPVVNVSYRPAYDQGGPVEILPFLYLGSAYHASKCEFLANLHITALLNVSRRTSEACATHLHYKWIPVEDSHTADISSHFQEAIDFIDCVREKGGKVLVHCEAGISRSPTICMAYLMKTKQFRLKEAFDYIKQRRSMVSPNFGFMGQLLQYESEILPSTPNPQPPSCQGEAAGSSLIGHLQTLSPDMQGAYCTFPASVLAPVPTHSTVSELSRSPVATATSC

SEQ ID NO: 24159 - protein, 12 aa, Homo sapiens
ILPARIKKKSIS

SEQ ID NO: 24160 - protein, 359 aa, Homo sapiens
TVENTDPECYWLTNWIETILVQSWYPITVATNSREQKKILAKYLLETSGNLDGLEYKLHDFGYRGVSSQETAGIGASAHLVNFKGTDTVAGLALNKKYYGTKDPVPGYSVPAAEHSTITAWGKDHEKDAFEHIVTQFSSVPVSVVSNSYDIYNACEKIWGEDLRHLIVSRSTQAPLIIRPDSGNPLDTVLKVLEILGKKFPVTENSKGYKLLPPYLRVIQGDGVDINTLQEIVEGMKQKMWSIENIAFGSGGGLLQKLTRDLLNCSFKCSYVVTNGLGINVFKDPVADPNKRSKKGRLSLHRTPAGNFVTLEEGKGDLEEYGQDLLHTVFKNGKVTKSYSFDEIRKNAQLNIELEAAHH

SEQ ID NO: 24161 - protein, 278 aa, Homo sapiens
KMEAAETEAEAAALEVLAEVAGILEPVGLQEEAELPAKILVEFVVDSQKKDKLLCSQLQVADFLQNILAQEDTAKGLDPLASEDTSRQKAIAAKEQWKELKATYREHVEAIKIGLTKALTQMEEAQRKRTQLREAFEQLQAKKQMAMEKRRAVQNQWQLQQEKHLQHLAEVSAEVRERKTGTQQELDRVFQKLGNLKQQAEQERDKLQRYQTFLQLLYTLQGKLLFPEAEAEAENLPDDKPQQPTRPQEQSTGDTMGRDPGVSFKAVGLQPAGDVNLP

SEQ ID NO: 24162 - protein, 496 aa, Homo sapiens
TKMATEAQSEGEVPARESGRSDAICSFVICNDSSLRGQPIIFNPDFFVEKLRHEKPEIFTELVVSNITRLIDLPGTELAQLMGEVDLKLPGGAGPASGFFRSLMSLKRKEKGVIFGSPLTEEGIAQIYQLIEYLHKNLRVEGLFRVPGNSVRQQILRDALNNGTDIDLESGEFHSNDVATLLKMFLGELPEPLLTHKHFNAHLKIADLMQFDDKGNKTNIPDKDRQIEALQLLFLILPPPNRNLLKLLLDLLYQTAKKQDKNKMSAYNLALMFAPHVLWPKNVTANDLQENITKLNSGMAFMIKHSQKLFKAPAYIRECARLHYLGSRTQASKDDLDLIASCHTKSFQLAKSQKRNRVDSCPHQEETQHHTEEALRELFQHVHDMPESAKKKQLIRQFNKQSLTQTPGREPSTSQVQKRARSRSFSGLIKRKVLGNQMMSEKKKKNPTPESVAIGELKGTSKENRNLLFSGSPAVTMTPTRLKWSEGKKEGKKGFL

SEQ ID NO: 24163 - protein, 74 aa, Homo sapiens
ISLKPPPAPGPRAEEKREGTAEAAAALHRPPGGHLESPAPRRPWPQVPTAGPRLPASLQPRPRQNNLRMSWWHR

SEQ ID NO: 24164 - protein, 24 aa, Homo sapiens
LSPSRSRRRFRAAVQSWILQSLSH

SEQ ID NO: 24165 - protein, 33 aa, Homo sapiens
VTLGLQRGAESRTRRVLPAAVWTTRGHRQKWAL

SEQ ID NO: 24166 - protein, 43 aa, Homo sapiens
VWTDSPVLGKSSPCYSILARNSRHFRWQNKFNPCFSILSSSRS

SEQ ID NO: 24167 - protein, 98 aa, Homo sapiens
TTARRAFPIPFGSKSNMATLKDQLIYNLLKEEQTPQNKITVVGVGAVGMACAISILMKDLADELALVDVIEDKLKGEMMDLQHGSLFLRTPKIVSGKG

SEQ ID NO: 24168 - protein, 11 aa, Homo sapiens
LPVPTRSSFAG

SEQ ID NO: 24169 - protein, 553 aa, Homo sapiens
IQRGSGPRCAMEQVNELKEKGNKALSVGNIDDALQCYSEAIKLDPHNHVLYSNRSAAYAKKGDYQKAYEDGCKTVDLKPDWGKGYSRKAAALEFLNRFEEAKRTYEEGLKHEANNPQLKEGLQNMEARLAERKFMNPFNMPNLYQKLESDPRTRTLLSDPTYRELIEQLRNKPSDLGTKLQDPRIMTTLSVLLGVDLGSMDEEEEIATPPPPPPPKKETKPEPMEEDLPENKKQALKEKELGNDAYKKKDFDTALKHYDKAKELDPTNMTYITNQAAVYFEKGDYNKCRELCEKAIEVGRENREDYRQIAKAYARIGNSYFKEEKYKDAIHFYNKSLAEHRTPDVLKKCQQAEKILKEQERLAYINPDLALEEKNKGNECFQKGDYPQAMKHYTEAIKRNPKDAKLYSNRAACYTKLLEFQLALKDCEECIQLEPTFIKGYTRKAAALEAMKDYTKAMDVYQKALDLDSSCKEAADGYQRCMMAQYNRHDSPEDVKRRAMADPEVQQIMSDPAMRLILEQMQKDPQALSEHLKNPVIAQKIQKLMDVGLIAIR

SEQ ID NO: 24170 - protein, 478 aa, Homo sapiens
LTPQPGPRLAGSGPSHWFSPLSLPVASKAPGTMAQALGEDLVQPPELQDDSSSLGSDSELSGPGPYRQADRYGFIGGSSAEPGPGHPPADLIRQREMKWVEMTSHWEKTMSRRYKKVKMQCRKGIPSALRARCWPLLCGAHVCQKNSPGTYQELAEAPGDPQWMETIGRDLHRQFPLHEMFVSPQGHGQQGLLQVLKAYTLYRPEQGYCQAQGPVAAVLLMHLPPEEAFWCLVQICEVYLPGYYGPHMEAVRLDAEVFMALLRRLLPHVHKHLQQVGVGPLLYLPEWFLCLFARSLPFPTVLRVWDAFLSEGARVLFRVGLTLVRLALGTAEQRGACPGLLETLGALRAIPPAQLQEEAFMSQVHSVVLSERDLQREIKAQLAQLPDSAPGPPPRPQVRLAGAQAIFEAQQLAGVRRGAKPEVPRIVVQPPEEPRPPRRKPQTRGKTFHGLLTRARGPPIEGPPRPQRGSTSFLDTRF

SEQ ID NO: 24171 - protein, 551 aa, Homo sapiens
ILNTALLIQRTLHRVDCREGGGKRARRELGKGRSQEAAREGARARPFFSSVAGSHARPPRRLGAICDSGGGGGGGGGSGNFAASSGRACLTAVWRRPRPRRQEPGGRRRNMSEREVSTAPAGTDMPAAKKQKLSSDENSNPDLSGDENDDAVSIESGTNTERPDTPTNTPNAPGRKSWGKGKWKSKKCKYSFKCVNSLKEDHNQPLFGVQFNWHSKEGDPLVFATVGSNRVTLYECHSQGEIRLLQSYVDADADENFYTCAWTYDSNTSHPLLAVAGSRGIIRIINPITMQCIKHYVGHGNAINELKFHPRDPNLLLSVSKDHALRLWNIQTDTLVAIFGGVEGHRDEVLSADYDLLGEKIMSCGMDHSLKLWRINSKRMMNAIKESYDYNPNKTNRPFISQKIHFPDFSTRDIHRNYVDCVRWLGDLILSKSCENAIVCWKPGKMEDDIDKIKPSESNVTILGRFDYSQCDIWYMRFSMDFWQKMLALGNQVGKLYVWDLEVEDPHKAKCTTLTHHKCGAAIRQTSFSRDSSILIAVCDDASIWRWDRLR

SEQ ID NO: 24172 - protein, 10 aa, Homo sapiens
LETRMMTLSV

SEQ ID NO: 24173 - protein, 22 aa, Homo sapiens
INMIELYKVYHNEFDFEFDLWK

SEQ ID NO: 24174 - protein, 26 aa, Homo sapiens
RYTIMSLILNLICGNKGKVILAGAYC

SEQ ID NO: 24175 - protein, 17 aa, Homo sapiens
MSDSYLEQRANNQSTAN

SEQ ID NO: 24176 - protein, 38 aa, Homo sapiens
LAQVSSPVPLRLPVSWASLGPHERESFLSLMVNSRPPA

SEQ ID NO: 24177 - protein, 12 aa, Homo sapiens
LIVVCCHPFMSR

SEQ ID NO: 24178 - protein, 495 aa, Homo sapiens
IWIPAVVGKGQSAEVLGGVMAVPFVEDWDLVQTLGEGAYGEVQLAVNRVTEEAVAVKIVDMKRAVDCPENIKKEICINKMLNHENVVKFYGHRREGNIQYLFLEYCSGGELFDRIEPDIGMPEPDAQRFFHQLMAGVVYLHGIGITHRDIKPENLLLDERDNLKISDFGLATVFRYNNRERLLNKMCGTLPYVAPELLKRREFHAEPVDVWSCGIVLTAMLAGELPWDQPSDSCQEYSDWKEKKTYLNPWKKIDSAPLALLHKILVENPSARITIPDIKKDRWYNKPLKKGAKRPRVTSGGVSESPSGFSKHIQSNLDFSPVNSASSEENVKYSSSQPEPRTGLSLWDTSPSYIDKLVQGISFSQPTCPDHMLLNSQLLGTPGSSQNPWQRLVKRMTRFFTKLDADKSYQCLKETCEKLGYQWKKSCMNQVTISTTDRRNNKLIFKVNLLEMDDKILVDFRLSKGDGLEFKRHFLKIKGKLIDIVSSQKIWLPAT

SEQ ID NO: 24179 - protein, 185 aa, Homo sapiens
KLVVVGAGGVGKSALTIQLIQNHFVDEYDPTIEDSYRKQVVIDGETCLLDILDTAGQEEYSAMRDQYMRTGEGFLCVFAINNTKSFEDIHQYREQIKRVKDSDDVPMVLVGNKCDLAARTVESRQAQDLARSYGIPYIETSAKTRQGVEDAFYTLVREIRQHKLRKLNPPDESGPGCMSCKCVLS

SEQ ID NO: 24180 - protein, 104 aa, Homo sapiens
TCEDVSACVAAGLKAGLAQVNSTSRRRPRPRVCILGWTSWGFGPSPVGGSRSAAWAQPTPRRRPWQAPWTWTRAARWRSCSAGASKPSMTPGRCGTRSWCACSS

SEQ ID NO: 24181 - protein, 641 aa, Homo sapiens
LHSGVDELGVRSEPGGRLPERSLGPAHPAPAAMAGTLDLDKGCTVEELLRGCIEAFDDSGKVRDPQLVRMFLMMHPWYIPSSQLAAKLLHIYQQSRKDNSNSLQVKTCHLVRYWISAFPAEFDLNPELAEQIKELKALLDQEGNRRHSSLIDIDSVPTYKWKRQVTQRNPVGQKKRKMSLLFDHLEPMELAEHLTYLEYRSFCKILFQDYHSFVTHGCTVDNPVLERFISLFNSVSQWVQLMILSKPTAPQRALVITHFVHVAEKLLQLQNFNTLMAVVGGLSHSSISRLKETHSHVSPETIKLWEGLTELVTATGNYGNYRRRLAACVGFRFPILGVHLKDLVALQLALPDWLDPARTRLNGAKMKQLFSILEELAMVTSLRPPVQANPDLLSLLTVSLDQYQTEDELYQLSLQREPRSKSSPTSPTSCTPPPRPPVLEEWTSAAKPKLDQALVVEHIEKMVESVFRNFDVDGDGHISQEEFQIIRGNFPYLSAFGDLDQNQDGCISREEMVSYFLRSSSVLGGRMGFVHNFQESNSLRPVACRHCKALILGIYKQGLKCRACGVNCHKQCKDRLSVECRRRAQSVSLEGSAPSPSPMHSHHHRAFSFSLPRPGRRGSRPPEIREEEVQTVEDGVFDIHL

SEQ ID NO: 24182 - protein, 10 aa, Homo sapiens
VFSLRLGHIV

SEQ ID NO: 24183 - protein, 32 aa, Homo sapiens
MAAGYLGGASCWTMPHCQETGAGRFSDKISLS

SEQ ID NO: 24184 - protein, 31 aa, Homo sapiens
LGPFLSSASFLSDILTRLRCLLLFSELRNAA

SEQ ID NO: 24185 - protein, 75 aa, Homo sapiens
LGPLGASPGLMIVQKAAIKGAWEAGWRREQKKPNSADLGTVRAASRNCGQRLCVLAGRACSFLPWQPRAMAIIAL

SEQ ID NO: 24186 - protein, 70 aa, Homo sapiens
LGHPRPHLLRLPDLPSFPAFLWIPASGHPSPPSLQGPLLVSLLLEPLPPPPSLQNFSFTPHPPPLPPFLF

SEQ ID NO: 24187 - protein, 41 aa, Homo sapiens
LPLARPSQRPQPSREGAPGRKDPPVCRRPPFSWSPSPSSWW

SEQ ID NO: 24188 - protein, 8 aa, Homo sapiens
MLKNHQLL

SEQ ID NO: 24189 - protein, 435 aa, Homo sapiens
LGVMILLRASEVRQLLHNKFVVILGDSVHRAVYKDLVLLLQKDRLLTPGQLRARGELNFEQDELVDGGQRGHMHNGLNYREVREFRSDHHLVRFYFLTRVYSDYLQTILKELQSGEHAPDLVIMNSCLWDISRYGPNSWRSYLENLENLFQCLGQVLPESCLLVWNTAMPVGEEVTGGFLPPKLRRQKATFLKNEVVKANFHSATEARKHNFDVLDLHFHFRHARENLHWDGVHWNGRVHRCLSQLLLAHVADAWGVELPHRHPVGEWIKKKKPGPRVEGPPQANRNHPALPLSPPLPSPTYRPLLGFPPQRLPLLPLLSPQPPPPILHHQGMPRFPQGPPDACFSSDHTFQSDQFYCHSDVPSSAHAGFFVEDNFMVGPQLPMPFFPTPRYQRPAPVVHRGFGRYRPRGPYTPWGQRPRPSKRRAPANPEPRPQ

SEQ ID NO: 24190 - protein, 42 aa, Homo sapiens
VGHLFPESGLEISELPILRPSSGERVPGSQESWALPLTSWRP

SEQ ID NO: 24191 - protein, 1404 aa, Homo sapiens
RSRMAPQMYEFHLPLSPEELLKSGGVNQYVVQEVLSIKHLPPQLRAFQAAFRAQGPLAMLQHFDTIYSILHHFRSIDPGLKEDTLQFLIKVVSRHSQELPAILDDTTLSGSDRNAHLNALKMNCYALIRLLESFETMASQTNLVDLDLGGKGKKARTKAAHGFDWEEERQPILQLLTQLLQLDIRHLWNHSIIEEEFVSLVTGCCYRLLENPTINHQKNRPTREAITHLLGVALTRYNHMLSATVKIIQMLQHFEHLAPVLVAAVSLWATDYGMKSIVGEIVREIGQKCPQELSRDPSGTKGFAAFLTELAERVPAILMSSMCILLDHLDGENYMMRNAVLAAMAEMVLQVLSGDQLEAAARDTRDQFLDTLQAHGHDVNSFVRSRVLQLFTRIVQQKALPLTRFQAVVALAVGRLADKSVLVCKNAIQLLASFLANNPFSCKLSDADLAGPLQKETQKLQEMRAQRRTAAASAVLDPEEEWEAMLPELKSTLQQLLQLPQGEEEIPEQIANTETTEDVKGRIYQLLAKASYKKAIILTREATGHFQESEPFSHIDPEESEETRLLNILGLIFKGPAASTQEKNPRESTGNMVTGQTVCKNKPNMSDPEESRGNDELVKQEMLVQYLQDAYSFSRKITEAIGIISKMMYENTTTVVQEVIEFFVMVFQFGVPQALFGVRRMLPLIWSKEPGVREAVLNAYRQLYLNPKGDSARAKAQALIQNLSLLLVDASVGTIQCLEEILCEFVQKDELKPAVTQLLWERATEKVACCPLERCSSVMLLGMMARGKPEIVGSNLDTLVSIGLDEKFPQDYRLAQQVCHAIANISDRRKPSLGKRHPPFRLPQEHRLFERLRETVTKGFVHPDPLWIPFKEVAVTLIYQLAEGPEVICAQILQGCAKQALEKLEEKRTSQEDPKESPAMLPTFLLMNLLSLAGDVALQQLVHLEQAVSGELCRRRVLREEQEHKTKDPKEKNTSSETTMEEELGLVGATADDTEAELIRGICEMELLDGKQTLAAFVPLLLKVCNNPGLYSNPDLSAAASLALGKFCMISATFCDSQLRLLFTMLEKSPLPIVRSNLMVATGDLAIRFPNLVDPWTPHLYARLRDPAQQVRKTAGLVMTHLILKDMVKVKGQVSEMAVLLIDPEPQIAALAKNFFNELSHKGNAIYNLLPDIISRLSDPELGVEEEPFHTIMKQLLSYITKDKQTESLVEKLCQRFRTSRTERQQRDLAYCVSQLPLTERGLRKMLDNFDCFGDKLSDESIFSAFLSVVGKLRRGAKPEGKAIIDEFEQKLRACHTRGLDGIKELEIGQAGSQRAPSAKKPSTGSRYQPLASTASDNDFVTPEPRRTTRRHPNTQQRASKKKPKVVFSSDESSEEDLSAEMTEDETPKKTTPILRASARRHRS

SEQ ID NO: 24192 - protein, 48 aa, Homo sapiens
LGTERPLGLGAARGARRVAAVSKTSALSALVYKLKWRKFRWPTWILTS

SEQ ID NO: 24193 - protein, 31 aa, Homo sapiens
RGKNQDLITRATDRLQTPVSMESRGLSPGSS

SEQ ID NO: 24194 - protein, 6 aa, Homo sapiens
TLISFY

SEQ ID NO: 24195 - protein, 93 aa, Homo sapiens
LICAMAGDVVYADIKTVRTSPLELAFPLQRSVSFNFSTVHKSCPAKDWKVHKGKCYWIAETKKSWNKSQNDCAINNSYLMVIQDITAMVRFNI

SEQ ID NO: 24196 - protein, 411 aa, Homo sapiens
LPLSAAPRPRSLPMASPLRSAAALARQDCSNGCSAECTGEGGSKEVVGTFKAKDLIVTPATILKEKPDPNNLVFGTVFTDHMLTVEWSSEFGWEKPHIKPLQNLSLHPGSSALHYAVELFEGLKAFRGVDNKIRLFQPNLNMDRMYRSAVRATLPVFDKEELLECIQQLVKLDQEWVPYSTSASLYIRPTFIGTEPSLGVKKPTKALLFVLLSPVGPYFSSGTFNPVSLWANPKYVRAWKGGTGDCKMGGNYGSSLFAQCEAVDNGCQQVLWLYGEDHQITEVGTMNLFLYWINEDGEEELATPPLDGIILPGVTRRCILDLAHQWGEFKVSERYLTMDDLTTALEGNRVREMFGSGTACVVCPVSDILYKGETIHIPTMENGPKLASRILSKLTDIQYGREESDWTIVLS

SEQ ID NO: 24197 - protein, 10 aa, Homo sapiens
LQTMGRCRTF

SEQ ID NO: 24198 - protein, 22 aa, Homo sapiens
LTGLLISPFFSMQEDWPPKPVY

SEQ ID NO: 24199 - protein, 49 aa, Homo sapiens
IQTLGSYCSCWCGMFTAEKMVRRGKEEVRRKKQGNDRVLLSYPGWSAMA

SEQ ID NO: 24200 - protein, 103 aa, Homo sapiens
LECDGMILAHGKLRLPGSSDSPASASRVAGITGMCHHAPLARLVSNTLPQVILPPLGLQQAEELPRRQEVEQNTPSLVPIIDNIMTLHVMDQLTPSRSVNWFI

SEQ ID NO: 24201 - protein, 32 aa, Homo sapiens
MHPSLETPLKGWSLGDHIKRKMPTTSTTSTRF

SEQ ID NO: 24202 - protein, 566 aa, Homo sapiens
RMAEGKAGGAAGLFAKQVQKKFSRAQEKVLQKLGKAVETKDERFEQSASNFYQQQAEGHKLYKDLKNFLSAVKVMHESSKRVSETLQEIYSSEWDGHEELKAIVWNNDLLWEDYEEKLADQAVRTMEIYVAQFSEIKERIAKRGRKLVDYDSARHHLEAVQNAKKKDEAKTAKAEEEFNKAQTVFEDLNQELLEELPILYNSRIGCYVTIFQNISNLRDVFYREMSKLNHNLYEVMSKLEKQHSNKVFVVKGLSSSSRRSLVISPPVRTATVSSPLTSPTSPSTLSLKSESESVSATEDLAPDAAQGEDNSEIKELLEEEEIEKEGSEASSSEEDEPLPACNGPAQAQPSPTTERAKSQEEVLPSSTTPSPGGALSPSGQPSSSATEVVLRTRTASEGSEQPKKRASIQRTSAPPSRPPPPRATASPRPSSGNIPSSPTASGGGSPTSPRASLGTGTASPRTSLEVSPNPEPPEKPVRTPEAKENENIHNQNPEELCTSPTLMTSQVASEPGEAKKMEDKEKDNKLISANSSEGQDQLQVSMVPENNNLTAPEPQEEVSTSENPQL

SEQ ID NO: 24203 - protein, 17 aa, Homo sapiens
MDEEDAAAPVCSHEQDG

SEQ ID NO: 24204 - protein, 10 aa, Homo sapiens
MWKLKPREKV

SEQ ID NO: 24205 - protein, 198 aa, Homo sapiens
IRRERSVKSFGPDQLDTRTTDFNFFGLILSETMKYTSYILAFQLCIVLGSLGCYCQDPYVKEAENLKKYFNAGHSDVADNGTLFLGILKNWKEESDRKIMQSQIVSFYFKLFKNFKDDQSIQKSVETIKEDMNVKFFNSNKKKRDDFEKLTNYSVTDLNVQRKAIHELIQVMAELSPAAKTGKRKRSQMLFRGRRASQ

SEQ ID NO: 24206 - protein, 8 aa, Homo sapiens
ILMQVIQM

SEQ ID NO: 24207 - protein, 187 aa, Homo sapiens
LLELELSAMAALQKSVSSFLMGTLATSCLLLLALLVQGGAAAPISSHCRLDKSNFQQPYITNRTFMLAKEASLADNNTDVRLIGEKLFHGVSMSERCYLMKQVLNFTLEEVLFPQSDRFQPYMQEVVPFLARLSNRLSTCHIEGDDLHIQRNVQKLKDTVKKLGESGEIKAIGELDLLFMSLRNACI

SEQ ID NO: 24208 - protein, 479 aa, Homo sapiens
TESELIGFHSLGRNKNYLGSFIERDSLTLRASGCSWVQREPPALLLSRLPQPLASAWVRRGGIKPRSESGSFARGALGLCLPRGASGRHPALSRSSTPMIDTLRPVPFASEMAISKTVAWLNEQLELGNERLLLMDCRPQELYESSHIESAINVAIPGIMLRRLQKGNLPVRALFTRGEDRDRFTRRCGTDTVVLYDESSSDWNENTGGESVLGLLLKKLKDEGCRAFYLEGGFSKFQAEFSLHCETNLDGSCSSSSPPLPVLGLGGLRISSDSSSDIESDLDRDPNSATDSDGSPLSNSQPSFPVEILPFLYLGCAKDSTNLDVLEEFGIKYILNVTPNLPNLFENAGEFKYKQIPISDHWSQNLSQFFPEAISFIDEARGKNCGVLVHCLAGISRSVTVTVAYLMQKLNLSMNDAYDIVKMKKSNISPNFNFMGQLLDFERTLGLSSPCDNRVPAQQLYFTTPSNQNVYQVDSLQST

SEQ ID NO: 24209 - protein, 24 aa, Homo sapiens
LRSSGRLAPHTSRRYLEFLQHGRH

SEQ ID NO: 24210 - protein, 2082 aa, Homo sapiens
IADLGVRRAASGEMLKFKYGARNPLDAGAAEPIASRASRLNLFFQGKPPFMTQQQMSPLSREGILDALFVLFEECSQPALMKIKHVSNFVRKYSDTIAELQELQPSAKDFEVRSLVGCGHFAEVQVVREKATGDIYAMKVMKKKALLAQEQVSFFEEERNILSRSTSPWIPQLQYAFQDKNHLYLVMEYQPGGDLLSLLNRYEDQLDENLIQFYLAELILAVHSVHLMGYVHRDIKPENILVDRTGHIKLVDFGSAAKMNSNKMVNAKLPIGTPDYMAPEVLTVMNGDGKGTYGLDCDWWSVGVIAYEMIYGRSPFAEGTSARTFNNIMNFQRFLKFPDDPKVSSDFLDLIQSLLCGQKERLKFEGLCCHPFFSKIDWNNIRNSPPPFVPTLKSDDDTSNFDEPEKNSWVSSSPCQLSPSGFSGEELPFVGFSYSKALGILGRSESVVSGLDSPAKTSSMEKKLLIKSKELQDSQDKCHKMEQEMTRLHRRVSEVEAVLSQKEVELKASETQRSLLEQDLATYITECSSLKRSLEQARMEVSQEDDKALQLLHDIREQSRKLQEIKEQEYQAQVEEMRLMMNQLEEDLVSARRRSDLYESELRESRLAAEEFKRKATECQHKLLKAKDQGKPEVGEYAKLEKINAEQQLKIQELQEKLEKAVKASTEATELLQNIRQAKERAERELEKLQNREDSSEGIRKKLVEAEERRHSLENKVKRLETMERRENRLKDDIQTKSQQIQQMADKILELEEKHREAQVSAQHLEVHLKQKEQHYEEKIKVLDNQIKKDLADKETLENMMQRHEEEAHEKGKILSEQKAMINAMDSKIRSLEQRIVELSEANKLAANSSLFTQRNMKAQEEMISELRQQKFYLETQAGKLEAQNRKLEEQLEKISHQDHSDKNRLLELETRLREVSLEHEEQKLELKRQLTELQLSLQERESQLTALQAARAALESQLRQAKTELEETTAEAEEEIQALTAHRDEIQRKFDALRNSCTVITDLEEQLNQLTEDNAELNNQNFYLSKQLDEASGANDEIVQLRSEVDHLRREITEREMQLTSQKQTMEALKTTCTMLEEQVMDLEALNDELLEKERQWEAWRSVLGDEKSQFECRVRELQRMLDTEKQSRARADQRITESRQVVELAVKEHKAEILALQQALKEQKLKAESLSDKLNDLEKKHAMLEMNARSLQQKLETERELKQRLLEEQAKLQQQMDLQKNHIFRLTQGLQEALDRADLLKTERSDLEYQLENIQVLYSHEKVKMEGTISQQTKLIDFLQAKMDQPAKKKKGLFSRRKEDPALPTQVPLQYNELKLALEKEKARCAELEEALQKTRIELRSAREEAAHRKATDHPHPSTPATARQQIAMSAIVRSPEHQPSAMSLLAPPSSRRKESSTPEEFSRRLKERMHHNIPHRFNVGLNMRATKCAVCLDTVHFGRQASKCLECQVMCHPKCSTCLPATCGLPAEYATHFTEAFCRDKMNSPGLQTKEPSSSLHLEGWMKVPRNNKRGQQGWDRKYIVLEGSKVLIYDNEAREAGQRPVEEFELCLPDGDVSIHGAVGASELANTAKADVPYILKMESHPHTTCWPGRTLYLLAPSFPDKQRWVTALESVVAGGRVSREKAEADAKLLGNSLLKLEGDDRLDMNCTLPFSDQVVLVGTEEGLYALNVLKNSLTHVPGIGAVFQIYIIKDLEKLLMIAGEERALCLVDVKKVKQSLAQSHLPAQPDISPNIFEAVKGCHLFGAGKIENGLCICAAMPSKVVILRYNENLSKYCIRKEIETSEPCSCIHFTNYSILIGTNKFYEIDMKQYTLEEFLDKNDHSLAPAVFAASSNSFPVSIVQVNSAGQREEYLLCFHEFGVFVDSYGRRSRTDDLKWSRLPLAFAYREPYLFVTHFNSLEVIEIQARSSAGTPARAYLDIPNPRYLGPAISSGAIYLASSYQDKLRVICCKGNLVKESGTEHHRGPSTSRSSPNKRGPPTYNEHITKRVASSPAPPEGPSHPREPSTPHRYREGRTELRRDKSPGRPLEREKSPGRMLSTRRERSPGRLFEDSSRGRLPAGAVRTPLSQVNKVWDQSSV

SEQ ID NO: 24211 - protein, 11 aa, Homo sapiens
VTRPELPVSPQ

SEQ ID NO: 24212 - protein, 15 aa, Homo sapiens
VMLGDRLLGHTPVLL

SEQ ID NO: 24213 - protein, 27 aa, Homo sapiens
LSGTLDDLQSGWRSHGGLLEVTAKEIL

SEQ ID NO: 24214 - protein, 26 aa, Homo sapiens
RHPTLPTSATETTCVHTLTAAKGAIT

SEQ ID NO: 24215 - protein, 9 aa, Homo sapiens
LQLMKVLPN

SEQ ID NO: 24216 - protein, 30 aa, Homo sapiens
MESTFMHIKSFSRFDVSIFVRHWKITRMIL

SEQ ID NO: 24217 - protein, 1211 aa, Homo sapiens
LRLAEWPPSFRSPELRGKMERHQPRLHHPAQGSAAGTPYPSSASLRGCRESKMPRRKGPQHPPPPSGPEEPGEKRPKFHLNIRTLTDDMLDKFASIRIPGSKKERPPLPNLKTAFASSDCSAAPLEMMENFPKPLSENELLELFEKMMEDMNLNEDKKAPLREKDFSIKKEMVMQYINTASKTGSLKRSRQISPQEFIHELKMGSADERLVTCLESLRVSLTSNPVSWVESFGHEGLGLLLDILEKLISGKIQEKVVKKNQHKVIQCLKALMNTQYGLERIMSEERSLSLLAKAVDPRHPNMMTDVVKLLSAVCIVGEESILEEVLEALTSAGEEKKIDRFFCIVEGLRHNSVQLQVACMQLINALVTSPDDLDFRLHIRNEFMRCGLKEILPNLKCIKNDGLDIQLKVFDEHKEEDLFELSHRLEDIRAELDEAYDVYNMVWSTVKETRAEGYFISILQHLLLIRNDYFIRQQYFKLIDECVSQIVLHRDGMDPDFTYRKRLDLDLTQFVDICIDQAKLEEFEEKASELYKKFEKEFTDHQETQAELQKKEAKINELQAELQAFKSQFGALPADCNIPLPPSKEGGTGHSALPPPPPLPSGGGVPPPPPPPPPPPLPGMRMPFSGPVPPPPPLGFLGGQNSPPLPILPFGLKPKKEFKPEISMRRLNWLKIRPHEMTENCFWIKVNENKYENVDLLCKLENTFCCQQKERREEEDIEEKKSIKKKIKELKFLDSKIAQNLSIFLSSFRVPYEEIRMMILEVDETRLAESMIQNLIKHLPDQEQLNSLSQFKSEYSNLCEPEQFVVVMSNVKRLRPRLSAILFKLQFEEQVNNIKPDIMAVSTACEEIKKSKSFSKLLELVLLMGNYMNAGSRNAQTFGFNLSSLCKLKDTKSADQKTTLLHFLVEICEEKYPDILNFVDDLEPLDKASKVSVETLEKNLRQMGRQLQQLEKELETFPPPEDLHDKFVTKMSRFVISAKEQYETLSKLHENMEKLYQSIIGYYAIDVKKVSVEDFLTDLNNFRTTFMQAIKENIKKREAEEKEKRVRIAKELAERERLERQQKKKRLLEMKTEGDETGVMDNLLEALQSGAAFRDRRKRTPMPKDVRQSLSPMSQRPVLKVCNHENQKVQLTEGSRSHYNINCNSTRTPVAKELNYNLDTHTSTGRIKAAEKKEACNVESNRKKETELLGSFSKNESVPEVEALLARLRAL

SEQ ID NO: 24218 - protein, 25 aa, Homo sapiens
ISLSRPCYAVYLGVLYVLLPMPSLK

SEQ ID NO: 24219 - protein, 12 aa, Homo sapiens
LESLRVPLGLAR

SEQ ID NO: 24220 - protein, 23 aa, Homo sapiens
RSTTPSQTTDLSGSQPPKTPSGR

SEQ ID NO: 24221 - protein, 135 aa, Homo sapiens
LSVRARKISAMPHSSDSSDSSFSRSPPPGKQDSSDDVRRVQRREKNRIAAQKSRQRQTQKADTLHLESEDLEKQNAALRKEIKQLTEELKYFTSVLNSHEPLCSVLAASTPSPPEVVYSAHAFHQPHVSSPRFQP

SEQ ID NO: 24222 - protein, 22 aa, Homo sapiens
MSSLLLQTEDTKKLQSKISSSY

SEQ ID NO: 24223 - protein, 38 aa, Homo sapiens
LINIGWWEYRTRLLRVPCAATFQPWPQVNRVSAKPGLP

SEQ ID NO: 24224 - protein, 29 aa, Homo sapiens
LLKEQTPGLTFHLIFGARTSREIHVQAAF

SEQ ID NO: 24225 - protein, 640 aa, Homo sapiens
RRKMAAMAVGGAGGSRVSSGRDLNCVPEIADTLGAVAKQGFDFLCMPVFHPRFKREFIQEPAKNRPGPQTRSDLLLSGRDWNTLIVGKLSPWIRPDSKVEKIRRNSEAAMLQELNFGAYLGLPAFLLPLNQEDNTNLARVLTNHIHTGHHSSMFWMRVPLVAPEDLRDDIIENAPTTHTEEYSGEEKTWMWWHNFRTLCDYSKRIAVALEIGADLPSNHVIDRWLGEPIKAAILPTSIFLTNKKGFPVLSKMHQRLIFRLLKLEVQFIITGTNHHSEKEFCSYLQYLEYLSQNRPPPNAYELFAKGYEDYLQSPLQPLMDNLESQTYEVFEKDPIKYSQYQQAIYKCLLDRVPEEEKDTNVQVLMVLGAGRGPLVNASLRAAKQADRRIKLYAVEKNPNAVVTLENWQFEEWGSQVTVVSSDMREWVAPEKADIIVSELLGSFADNELSPECLDGAQHFLKDDGVSIPGEYTSFLAPISSSKLYNEVRACREKDRDPEAQFEMPYVVRLHNFHQLSAPQPCFTFSHPNRDPMIDNNRYCTLEFPVEVNTVLHGFAGYFETVLYQDITLSIRPETHSPGMFSWFPILFPIKQPITVREGQTICVRFWRCSNSKKVWYEWAVTAPVCSAIHNPTGRSYTIGL

SEQ ID NO: 24226 - protein, 36 aa, Homo sapiens
LSATENFILAVFVETAFGKRKEMNFTDLTFLHLPFF

SEQ ID NO: 24227 - protein, 14 aa, Homo sapiens
MTLMIFNRIKIEFF

SEQ ID NO: 24228 - protein, 39 aa, Homo sapiens
RRSASSRRRCRAARSPGSSSSPRTGTRSCTWPSSMKKRH

SEQ ID NO: 24229 - protein, 530 aa, Homo sapiens
IANMAPERLRSRALSAFKLRGLLLRGEAIKYLTEALQSISELELEDKLEKIINAVEKQPLSSNMIERSVVEAAVQECSQSVDETIEHVFNIIGAFDIPRFVYNSERKKFLPLLMTNHPAPNLFGTPRDKAEMFRERYTILHQRTHRHELFTPPVIGSHPDESGSKFQLKTIETLLGSTTKIGDAIVLGMITQLKEGKFFLEDPTGTVQLDLSKAQFHSGLYTEACFVLAEGWFEDQVFHVNAFGFPPTEPSSTTRAYYGNINFFGGPSNTSVKTSAKLKQLEEENKDAMFVFLSDVWLDQVEVLEKLRIMFAGYSPAPPTCFILCGNFSSAPYGKNQVQALKDSLKTLADIICEYPDIHQSSRFVFVPGPEDPGFGSILPRPPLAESITNEFRQRVPFSVFTTNPCRIQYCTQEITVFREDLVNKMCRNCVRFPSSNLAIPNHFVKTILSQGHLTPLPLYVCPVYWAYDYALRVYPVPDLLVIADKYDPFTTTNTECLCINPGSFPRSGFSFKVFYPSNKTVEDSKLQGF

SEQ ID NO: 24230 - protein, 30 aa, Homo sapiens
LLSVTSPSPSPLPLPAAAAVAAPWAVGNER

SEQ ID NO: 24231 - protein, 101 aa, Homo sapiens
KTDLKVDCLSSERMSLPLLAGGVADDINTNKKEGISDVVEGMELNSSITSQDVLMSSPEKNTASQNSILEEGETKISQSELFDNKSLTTECHLLDSVSFPT

SEQ ID NO: 24232 - protein, 51 aa, Homo sapiens
VYRCLYGHKLSFLLSKYLKVGLLEFYYPWMLLLTWKRLRNNLLICTLLNVP

SEQ ID NO: 24233 - protein, 27 aa, Homo sapiens
LARANAQDDHHPRVCHHLRLERSFMQG

SEQ ID NO: 24234 - protein, 40 aa, Homo sapiens
MEDYIKDRLMKLLKKHQCWLLCSRMWGMAYSPSLDIFEIS

SEQ ID NO: 24235 - protein, 236 aa, Homo sapiens
LTMYMDLVDGIFLNQIMLQIDPRPTNQRINKHVNNDVNLRIQNLTILVRNIKTYYQEVLQQLIVMNLPNVLMIGRDPLSGKSMEEIKKVLLLVLGCAVQCERKEEFIERIKQLDIETQAGIVAHIQEVTHNQENVFDLQWLELPDVAPEELEALSRSMVLHLRRLIDQRDECTELIVDLTQERDYLQAQHPPSPIKSSSADSTPSPTSSLSSEDKQHLAVELADTKARLRRVRQEL

SEQ ID NO: 24236 - protein, 23 aa, Homo sapiens
LVLTRLLNKSSDLRPAVNVVPER

SEQ ID NO: 24237 - protein, 2366 aa, Homo sapiens
VWTPNKSAQNLSRRFAAAEKFSSKMDGVSSEANEENDNIERPVRRRHSSILKPPRSPLQDLRGGNERVQESNALRNKKNSRRVSFADTIKVFQTESHMKIVRKSEMEGCSAMVPSQLQLLPPGFKRFSCLSLPETETGENLLLIQNKKLEDNYCEITGMNTLLSAPIHTQMQQKEFSIIEHTRERKHANDQTVIFSDENQMDLTSSHTVMITKGLLDNPISEKSTKIDTTSFLANLKLHTEDSRMKKEVNFSVDQNTSSENKIDFNDFIKRLKTGKCSAFPDVPDKENFEIPIYSKEPNSASSTHQMHVSLKEDENNSNITRLFREKDDGMNFTQCHTANIQTLIPTSSETNSRESKGNDITIYGNDFMDLTFNHTLQILPATGNFSEIENQTQNAMDVTTGYGTKASGNKTVFKSKQNTAFQDLSINSADKIHITRSHIMGAETHIVSQTCNQDARILAMTPESIYSNPSIQGCKTVFYSSCNDAMEMTKCLSNMREEKNLLKHDSNYAKMYCNPDAMSSLTEKTIYSGEENMDITKSHTVAIDNQIFKQDQSNVQIAAAPTPEKEMMLQNLMTTSEDGKMNVNCNSVPHVSKERIQQSLSNPLSISLTDRKTELLSGENMDLTESHTSNLGSQVPLAAYNLAPESTSESHSQSKSSSDECEEITKSRNEPFQRSDIIAKNSLTDTWNKDKDWVLKILPYLDKDSPQSADCNQEIATSHNIVYCGGVLDKQITNRNTVSWEQSLFSTTKPLFSSGQFSMKNHDTAISSHTVKSVLGQNSKLAEPLRKSLSNPTPDYCHDKMIICSEEEQNMDLTKSHTVVIGFGPSELQELGKTNLEHTTGQLTTMNRQIAVKVEKCGKSPIEKSGVLKSNCIMDVLEDESVQKPKFPKEKQNVKIWGRKSVGGPKIDKTIVFSEDDKNDMDITKSYTIEINHRPLLEKRDCHLVPLAGTSETILYTCRQDDMEITRSHTTALECKTVSPDEITTRPMDKTVVFVDNHVELEMTESHTVFIDYQEKERTDRPNFELSQRKSLGTPTVICTPTEESVFFPGNGESDRLVANDSQLTPLEEWSNNRGPVEVADNMELSKSATCKNIKDVQSPGFLNEPLSSKSQRRKSLKLKNDKTIVFSENHKNDMDITQSCMVEIDNESALEDKEDFHLAGASKTILYSCGQDDMEITRSHTTALECKTLLPNEIAIRPMDKTVLFTDNYSDLEVTDSHTVFIDCQATEKILEENPKFGIGKGKNLGVSFPKDNSCVQEIAEKQALAVGNKIVLHTEQKQQLFAATNRTTNEIIKFHSAAMDEKVIGKVVDQACTLEKAQVESCQLNNRDRRNVDFTSSHATAVCGSSDNYSCLPNVISCTDNLEGSAMLLCDKDEEKANYCPVQNDLAYANDFASEYYLESEGQPLSAPCPLLEKEEVIQTSTKGQLDCVITLHKDQDLIKDPRNLLANQTLVYSQDLGEMTKLNSKRVSFKLPKDQMKVYVDDIYVIPQPHFSTDQPPLPKKGQSSINKEEVILSKAGNKSLNIIENSSAPICENKPKILNSEEWFAAACKKELKENIQTTNYNTALDFHSNSDVTKQVIQTHVNAGEAPDPVITSNVPCFHSIKPNLNNLNGKTGEFLAFQTVHLPPLPEQLLELGNKAHNDMHIVQATEIHNINIISSNAKDSRDEENKKSHNGAETTSLPPKTVFKDKVRRCSLGIFLPRLPNKRNCSVTGIDDLEQIPADTTDINHLETQPVSSKDSGIGSVAGKLNLSPSQYINEENLPVYPDEINSSDSINIETEEKALIETYQKEISPYENKMGKTCNSQKRTWVQEEEDIHKEKKIRKNEIKFSDTTQDREIFDHHTEEDIDKSANSVLIKNLSRTPSSCSSSLDSIKADGTSLDFSTYRSSQMESQFLRDTICEESLREKLQDGRITIREFFILLQVHILIQKPRQSNLPGNFTVNTPPTPEDLMLSQYVYRPKIQIYREDCEARRQKIEELKLSASNQDKLLVDINKNLWEKMRHCSDKELKAFGIYLNKIKSCFTKMTKVFTHQGKVALYGKLVQSAQNEREKLQIKIDEMDKILKKIDNCLTEMETETKNLEDEEKNNPVEEWDSEMRAAEKELEQLKTEEEELQRNLLELEVQKEQTLAQIDFMQKQRNRTEELLDQLSLSEWDVVEWSDDQAVFTFVYDTIQLTITFEESVVGFPFLDKRYRKIVDVNFQSLLDEDQAPPSSLLVHKLIFQYVEEKESWKKTCTTQHQLPKMLEEFSLVVHHCRLLGEEIEYLKRWGPNYNLMNIDINNNELRLLFSSSAAFAKFEITLFLSAYYPSVPLPSTIQNHVGNTSQDDIATILSKVPLENNYLKNVVKQIYQDLFQDCHFYH

SEQ ID NO: 24238 - protein, 6 aa, Homo sapiens
MSFHSV

SEQ ID NO: 24239 - protein, 47 aa, Homo sapiens
LRARRAVLTAPRTLVSSLFSPRPSLGRAGTLAFPVPHGAAPTPDGVQ

SEQ ID NO: 24240 - protein, 20 aa, Homo sapiens
LNCAAEDFYSRLLQLMSKCS

SEQ ID NO: 24241 - protein, 986 aa, Homo sapiens
LPVLTSRSLRQPAVPHARLGGVEPAAMKSARAKTPRKPTVKKGSQTNLKDPVGVYCRVRPLGFPDQECCIEVINNTTVQLHTPEGYRLNRNGDYKETQYSFKQVFGTHTTQKELFDVVANPLVNDLIHGKNGLLFTYGVTGSGKTHTMTGSPGEGGLLPRCLDMIFNSIGSFQAKRYVFKSNDRNSMDIQCEVDALLERQKREAMPNPKTSSSKRQVDPEFADMITVQEFCKAEEVDEDSVYGVFVSYIEIYNNYIYDLLEEVPFDPIKPKPPQSKLLREDKNHNMYVAGCTEVEVKSTEEAFEVFWRGQKKRRIANTHLNRESSRSHSVFNIKLVQAPLDADGDNVLQEKEQITISQLSLVDLAGSERTNRTRAEGNRLREAGNINQSLMTLRTCMDVLRENQMYGTNKMVPYRDSKLTHLFKNYFDGEGKVRMIVCVNPKAEDYEENLQVMRFAEVTQEVEVARPVDKAICGLTPGRRYRNQPRGPVGNEPLVTDVVLQSFPPLPSCEILDINDEQTLPRLIEALEKRHNLRQMMIDEFNKQSNAFKALLQEFDNAVLSKENHMQGKLNEKEKMISGQKLEIERLEKKNKTLEYKIEILEKTTTIYEEDKRNLQQELETQNQKLQRQFSDKRRLEARLQGMVTETTMKWEKECERRVAAKQLEMQNKLWVKDEKLKQLKAIVTEPKTEKPERPSRERDREKVTQRSVSPSPVPLSSNYIAQISNGQQLMSQPQLHRRSNSCSSISVASCISEWEQKIPTYNTPLKVTSIARRRQQEPGQSKTCIVSDRRRGMYWTEGREVVPTFRNEIEIEEDHCGRLLFQPDQNAPPIRLRHRRSRSAGDRWVDHKPASNMQTETVMQPHVPHAITVSVANEKALAKCEKYMLTHQELASDGEIETKLIKGDIYKTRGGGQSVQFTDIETLKQESPNGSRKRRSSTVAPAQPDGAESEWTDVETRCSVAVEMRAGSQLGPGYQHHAQPKRKKP

SEQ ID NO: 24242 - protein, 58 aa, Homo sapiens
IQLFSFILLRATDSTEMETIRRLSIHLNKYLALTPPRRNSLMLWLIPWSMTSFMAKMV

SEQ ID NO: 24243 - protein, 17 aa, Homo sapiens
KGSVDISGLQGLPSGTI

SEQ ID NO: 24244 - protein, 38 aa, Homo sapiens
LELKLPTLSSLNNYRAGLGGTDSIFRSLMGCWVDGAGK

SEQ ID NO: 24245 - protein, 38 aa, Homo sapiens
KFVAEFCDMSNNGPEDFISSSRKNSRQTARISSNPERR

SEQ ID NO: 24246 - protein, 22 aa, Homo sapiens
LAYKRSCFSSITSTSREIESIR

SEQ ID NO: 24247 - protein, 212 aa, Homo sapiens
VLVTLDPGAEPWHHDSEAETLSWSHPGEMEPSQCVEELEDDVFQPEDGEPVTQPGSLLSADLFAQSLLDCPLSRLQLFPLTHCCGPGLRPTSQEDKATQTLSPASPSQGVMLPCGVTEEPQRLFYGNAGYRLPLPASFPAVLPIGEQPPEGQWQHQAEVQIARKLQCIADQFHRLHVQQHQQNQNRVWWQILLFLHNLALNGEENRNGAGPR

SEQ ID NO: 24248 - protein, 184 aa, Homo sapiens
KTLLSTRQKMTDCEFGYIYRLAQDYLQCVLQIPQPGSGPSKTSRVLQNVAFSVQKEVEKNLKSCLDNVNVVSVDTARTLFNQVMEKEFEDGIINWGRIVTIFAFEGILIKKLLRQQIAPDVDTYKEISYFVAEFIMNNTGEWIRQNGGWENGFVKKFEPKSGWMTFLEVTGKICEMLSLLKQYC

SEQ ID NO: 24249 - protein, 53 aa, Homo sapiens
LGTFALGPQPGPGHPGMRRWACCSWSRCSCCPAPTDCPSTTASTTPTAPTTRT

SEQ ID NO: 24250 - protein, 825 aa, Homo sapiens
VAAGTLAGFSWSGGGGNMAETAAGVGRFKTNYAVERKIEPFYKGGKAQLDQTGQHLFCVCGTRVNILEVASGAVLRSLEQEDQEDITAFDLSPDNEVLVTASRALLLAQWAWQEGSVTRLWKAIHTAPVATMAFDPTSTLLATGGCDGAVRVWDIVRHYGTHHFRGSPGVVHLVAFHPDPTRLLLFSSATDAAIRVWSLQDRSCLAVLTAHYSAVTSLAFSADGHTMLSSGRDKICIIWDLQSCQATRTVPVFESVEAAVLLPEEPVSQLGVKSPGLYFLTAGDQGTLRVWEAASGQCVYTQAQPPGPGQELTHCTLAHTAGVVLTATADHNLLLYEARSLRLQKQFAGYSEEVLDVRFLGPEDSHVVVASNSPCLKVFELQTSACQILHGHTDIVLALDVFRKGWLFASCAKDQSVRIWRMNKAGQVMCVAQGSGHTHSVGTVCCSRLKESFLVTGSQDCTVKLWPLPKALLSKNTAPDNGPILLQAQTTQRCHDKDINSVAIAPNDKLLATGSQDRTAKLWALPQCQLLGVFSGHRRGLWCVQFSPMDQVLATASADGTIKLWALQDFSCLKTFEGHDASVLKVAFVSRGTQLLSSGSDGLVKLWTIKNNECVRTLDAHEDKVWGLHCSRLDDHALTGASDSRVILWKDVTEAEQAEEQARQEEQVVRQQELDNLLHEKRYLRALGLAISLDRPHTVLTVIQAIRRDPEACEKLEATMLRLRRDQKEALLRFCVTWNTNSRHCHEAQAVLGVLLRREAPEELLAYEGVRAALEALLPYTERHFQRLSRTLQAAAFLDFLWHNMKLPVPAAAPTPWETHKGALP

SEQ ID NO: 24251 - protein, 16 aa, Homo sapiens
LGAGTFHSQLDAHSAQ

SEQ ID NO: 24252 - protein, 43 aa, Homo sapiens
KRGPIPGAPGRAQLPPPGLPCHLVPTCPLLPAGSGPHPIFIWP

SEQ ID NO: 24253 - protein, 7 aa, Homo sapiens
ITAMLTE

SEQ ID NO: 24254 - protein, 30 aa, Homo sapiens
ISWLEMDPNCSCATGGSCSCASSCKCKECK

SEQ ID NO: 24255 - protein, 22 aa, Homo sapiens
RHPRARRRGILSAWMCGNSLPT

SEQ ID NO: 24256 - protein, 190 aa, Homo sapiens
RIRCSNPGGKMRPLTEEETRVMFEKIAKYIGENLQLLVDRPDGTYCFRLHNDRVYYVSEKIMKLAANISGDKLVSLGTCFGKFTKTHKFRLHVTALDYLAPYAKYKVWIKPGAEQSFLYGNHVLKSGLGRITENTSQYQGVVVYSMADIPLGFGVAAKSTQDCRKVDPMAIVVFHQADIGEYVRHEETLT

SEQ ID NO: 24257 - protein, 37 aa, Homo sapiens
LVLLGARPAFGTERSASRAPPGKFAVESRPLGPRGPA

SEQ ID NO: 24258 - protein, 28 aa, Homo sapiens
RDTLDSRGSPCSCLPRPTTEAVGPGQSC

SEQ ID NO: 24259 - protein, 71 aa, Homo sapiens
LSCACGRLCREEAADTGDDILPHETGLQPGMVPLKYLLEEGVWGAGVGCGVFPAISTAYDHCNNLSPSEEH

SEQ ID NO: 24260 - protein, 54 aa, Homo sapiens
LAQGFPGHLPPRSWSRAEPRSMEMDAPRPPSLAVPGAASRPGRTVDNGRLSPIH

SEQ ID NO: 24261 - protein, 38 aa, Homo sapiens
VATSRILDISNVQVSYMGTLDDTEVWGTVDPIMQVALL

SEQ ID NO: 24262 - protein, 13 aa, Homo sapiens
VDGSEPKLSKKWW

SEQ ID NO: 24263 - protein, 194 aa, Homo sapiens
RLWPAARAAMDAAEVEFLAEKELVTIIPNFSLDKIYLIGGDLGPFNPGLPVEVPLWLAINLKQRQKCRLLPPEWMDVEKLEKMRDHERKEETFTPMPSPYYMELTKLLLNHASDNIPKADEIRTLVKDMWDTRIAKLRVSADSFVRQQEAHAKLDNLTLMEINTSGTFLTQALNHMYKLRTNLQPLESTQSQDF

SEQ ID NO: 24264 - protein, 899 aa, Homo sapiens
RNRPSAEKMSLRIDVDTNFPECVVDAGKVTLGTQQRQEMDPRLREKQNEIILRAVCALLNSGGGIIKAEIENKGYNYERHGVGLDVPPIFRSHLDKMQKENHFLIFVKSWNTEAGVPLATLCSNLYHRERTSTDVMDSQEALAFLKCRTQTPTNINVSNSLGPQAAQGSVQYEGNINVSAAALFDRKRLQYLEKLNLPESTHVEFVMFSTDVSHCVKDRLPKCVSAFANTEGGYVFFGVHDETCQVIGCEKEKIDLTSLRASIDGCIKKLPVHHFCTQRPEIKYVLNFLEVHDKGALRGYVCAIKVEKFCCAVFAKVPSSWQVKDNRVRQLPTREWTAWMMEADPDLSRCPEMVLQLSLSSATPRSKPVCIHKNSECLKEQQKRYFPVFSDRVVYTPESLYKELFSQHKGLRDLINTEMRPFSQGILIFSQSWAVDLGLQEKQGVICDALLISQNNTPILYTIFSKWDAGCKGYSMIVAYSLKQKLVNKGGYTGRLCITPLVCVLNSDRKAQSVYSSYLQIYPESYNFMTPQHMEALLQSLVIVLLGFKSFLSEELGSEVLNLLTNKQYELLSKNLRKTRELFVHGLPGSGKTILALRIMEKIRNVFHCEPANILYICENQPLKKLVSFSKKNICQPVTRKTFMKNNFEHIQHIIIDDAQNFRTEDGDWYGKAKFITQTARDGPGVLWIFLDYFQTYHLSCSGLPPPSDQYPREEINRVVRNAGPIANYLQQVMQEARQNPPPNLPPGSLVMLYEPKWAQGVPGNLEIIEDLNLEEILIYVANKCRFLLRNGYSPKDIAVLFTKASEVEKYKDRLLTAMRKRKLSQLHEESDLLLQIGDASDVLTDHIVLDSVCRFSGLERNIVFGINPGVAPPAGAYNLLLCLASRAKRHLYILKASV

SEQ ID NO: 24265 - protein, 22 aa, Homo sapiens
VLRTTWVPGAFRVLAAAAGVQT

SEQ ID NO: 24266 - protein, 14 aa, Homo sapiens
RDRLSRRGASYLKL

SEQ ID NO: 24267 - protein, 37 aa, Homo sapiens
LMLPCGTCHGAGTAALSRPAVVAAAAAAAGPERRSCH

SEQ ID NO: 24268 - protein, 85 aa, Homo sapiens; identical to SEQ ID NO: 15391

SEQ ID NO: 24269 - protein, 23 aa, Homo sapiens
LSPRRASSWRRGSICSARACACA

SEQ ID NO: 24270 - protein, 45 aa, Homo sapiens
TARMPAVSAEERRWRLTDQSRWSWRRGRQAADSANIICPRLKNSS

SEQ ID NO: 24271 - protein, 337 aa, Homo sapiens
KGKMSQSKGKKRNPGLKIPKEAFEQPQTSSTPPRDLDSKACISIGNQNFEVKADDLEPIMELGRGAYGVVEKMRHVPSGQIMAVKRIRATVNSQEQKRLLMDLDISMRTVDCPFTVTFYGALFREGDVWICMELMDTSLDKFYKQVIDKGQTIPEDILGKIAVSIVKALEHLHSKLSVIHRDVKPSNVLINALGQVKMCDFGISGYLVDSVAKTIDAGCKPYMAPERINPELNQKGYSVKSDIWSLGITMIELAILRFPYDSWGTPFQQLKQVVEEPSPQLPADKFSAEFVDFTSQCLKKNSKERPTYPELMQHPFFTLHESKGTDVASFVKLILGD

SEQ ID NO: 24272 - protein, 25 aa, Homo sapiens
VLSTASSLRPLVMMRPFFVWHLQRR

SEQ ID NO: 24273 - protein, 54 aa, Homo sapiens
VLSTASSLRPLVMMVQSASVSKAGKGSSSSHGVAAALNQDLDPDPKCHVFNVSK

SEQ ID NO: 24274 - protein, 57 aa, Homo sapiens
MRSISCPSRPSTRCAAPAPTPPSTPSSEFPLTVFTLRFGESCCTWLLTPIQRSRTWP

SEQ ID NO: 24275 - protein, 302 aa, Homo sapiens
IGLSWAMAAEARVSRWYFGGLASCGAACCTHPLDLLKVHLQTQQEVKLRMTGMALRVVRTDGILALYSGLSASLCRQMTYSLTRFAIYETVRDRVAKGSQGPLPFHEKVLLGSVSGLAGGFVGTPADLVNVRMQNDVKLPQGQRRNYAHALDGLYRVAREEGLRRLFSGATMASSRGALVTVGQLSCYDQAKQLVLSTGYLSDNIFTHFVASFIAAAGDEPPPQGGCATFLCQPLDVLKTRLMNSKGEYQGVFHCAVETAKLGPLAFYKGLVPAGIRLIPHTVLTFVFLEQLRKNFGIKVPS

SEQ ID NO: 24276 - protein, 233 aa, Homo sapiens
VETCACLRLLARLHYIMGDYAEALSNQQKAVLMSERVMGTEHPNTIQEYMHLALYCFASSQLSTALSLLYRARYLMLLVFGEDHPEMALLDNNIGLVLHGVMEYDLSLRFLENALAVSTKYHGPKALKVALSHHLVARVYESKAEFRSALQHEKEGYTIYKTQLGEDHEKTKESSEYLKCLTQQAVALQRTMNEIYRNGSSANIPPLKFTAPSMASVLEQLNVINGILFIPLR

SEQ ID NO: 24277 - protein, 135 aa, Homo sapiens
LDRFSILMTSCTSWLQAPQAPGLCRDEQSSRISVPQLSGAPILLPDLEGTKLSNFQESSPLPHKHERKDKRSTPEEEGRSAPEKIIQSLKLCPGGHRPASLSSGCPAGCRLSFNLPPSMLLSVQKCCMPSSLKTC

SEQ ID NO: 24278 - protein, 51 aa, Homo sapiens
LASLASRRAAPTPRWRRPRLPRRRPPRAAGPCPPWCPGQSPRARPWTPSWR

SEQ ID NO: 24279 - protein, 51 aa, Homo sapiens
MQKLPLVMISASPWQILIYHPKWSQSCAVSLLSVFQEVQSLKGWVMLHLWS

SEQ ID NO: 24280 - protein, 196 aa, Homo sapiens
TASRATSRGPQGMDLQAAGAQAQGAAEPSRGPPLPSARGAPPSPEAGFATADHSSQERETEKAMDRLARGTQSIPNDSPARGEGTHSEEEGFAMDEEDSDGELNTWELSEGTNCPPKEQPGDLFNEDWDSELKADQGNPYDADDIQESISQELKPWVCCAPQGDMIYDPSWHHPPPLIPYYSKMVFETGQFDDAED

SEQ ID NO: 24281 - protein, 26 aa, Homo sapiens
ISLMIPANAWLLFWKLPLGDAPQLAL

SEQ ID NO: 24282 - protein, 40 aa, Homo sapiens
VGPVGRSRSLSLGNMRVTSTATSSMDWLLPNSHTVGLFLT

SEQ ID NO: 24283 - protein, 1194 aa, Homo sapiens
KMWRVKKLSLSLSPSPQTGKPSMRTPLRELTLQPGALTNSGKRSPACSSLTPSLCKLGLQEGSNNSSPVDFVNNKRTDLSSEHFSHSSKWLETCQHESDEQPLDPIPQISSTPKTSEEAVDPLGNYMVKTIVLVPSPLGQQQDMIFEARLDTMAETNSISLNGPLRTDDLVREEVAPCMGDRFSEVAAVSEKPIFQESPSHLLEESPPNPCSEQLHCSKESLSSRTEAVREDLVPSESNAFLPSSVLWLSPSTALAADFRVNHVDPEEEIVEHGAMEEREMRFPTHPKESETEDQALVSSVEDILSTCLTPNLVEMESQEAPGPAVEDVGRILGSDTESWMSPLAWLEKGVNTSVMLENLRQSLSLPSMLRDAAIGTTPFSTCSVGTWFTPSAPQEKSTNTSQTGLVGTKHSTSETEQLLCGRPPDLTALSRHDLEDNLLSSLVILEVLSRQLRDWKSQLAVPHPETQDSSTQTDTSHSGITNKLQHLKESHEMGQALQQARNVMQSWVLISKELISLLHLSLLHLEEDKTTVSQESRRAETLVCCCFDLLKKLRAKLQSLKAEREEARHREEMALRGKDAAEIVLEAFCAHASQRISQLEQDLASMREFRGLLKDAQTQLVGLHAKQEELVQQTVSLTSTLQQDWRSMQLDYTTWTALLSRSRQLTEKLTVKSQQALQERDVAIEEKQEVSRVLEQVSAQLEECKGQTEQLELENSRLATDLRAQLQILANMDSQLKELQSQHTHCAQDLAMKDELLCQLTQSNEEQAAQWQKEEMALKHMQAELQQQQAVLAKEVRDLKETLEFADQENQVAHLELGQVECQLKTTLEVLRERSLQCENLKDTVENLTAKLASTIADNQEQDLEKTRQYSQKLGLLTEQLQSLTLFLQTKLKEKTEQETLLLSTACPPTQEHPLPNDRTFLGSILTAVADEEPESTPVPLLGSDKSAFTRVASMVSLQPAETPGMEESLAEMSIMTTELQSLCSLLQESKEEAIRTLQRKICELQARLQAQEEQHQEVQKAKEADIEKLNQALCLRYKNEKELQEVIQQQNEKILEQIDKSGELISLREEVTHLTRSLRRAETETKVLQEALAGQLDSNCQPMATNWIQEKVWLSQEVDKLRVMFLEMKNEKEKLMIKFQSHRNILEENLRRSDKELEKLDDIVQHIYKTLLSIPEVVRGCKELQGLLEFLS

SEQ ID NO: 24284 - protein, 325 aa, Homo sapiens
VPFALHGVPGQIPYFSTASASHSVPEAGPSLEEKFLVSCDISTSGQEQIKLNTSEVGHKALGPGSSKKYPSLMASNGVAVDGCVSGTTTAEAENTSDQNLSIEESGVGVFPSQDPAQPRMPPWIYNESLVPDAYKKILETTMTPTGIDTAKLYPILMSSGLPRETLGQIWALANRTTPGKLTKEELYTVLAMIAVTQRGVPAMSPDALNQFPAAPIPTLSGFSMTLPTPVSQPTVIPSGPAGSMPLSLGQPVMGINLVGPVGGAAAQASSGFIPTYPANQVVKPEEDDFQDFQDASKSGSLDDSFSDFQELPASSKTSNSQHGNR

SEQ ID NO: 24285 - protein, 437 aa, Homo sapiens
KSEPMGNAEEPEIPYSYSREYNEYENIKLERHVVSFDSSRPTSGKMNCDVCGLSCISFNVLMVHKRSHTGERPFQCNQCGASFTQKGNLLRHIKLHTGEKPFKCHLCNYACQRRDALTGHLRTHSVEKPYKCEFCGRSYKQRSSLEEHKERCRTFLQSTDPGDTASAEARHIKAEMGSERALVLDRLASNVAKRKSSMPQKFIGEKRHCFDVNYNSSYMYEKESELIQTRMMDQAINNAISYLGAEALRPLVQTPPAPTSEMVPVISSMYPIALTRAEMSNGAPQELEKKSIHLPEKSVPSERGLSPNNSGHDSTDTDSNHEERQNHIYQQNHMVLSRARNGMPLLKEVPRSYELLKPPPICPRDSVKVINKEGEVMDVYRCDHCRVLFLDYVMFTIHMGCHGFRDPFECNMCGYRSHDRYEFSSHIARGEHRALLK

SEQ ID NO: 24286 - protein, 15 aa, Homo sapiens
MKVLVGDGSSFPISA

SEQ ID NO: 24287 - protein, 51 aa, Homo sapiens
MGRAFPSRHKTARFECALVSASLTTAGTPGKNLSSYNSKCGGKTHQSRDGK

SEQ ID NO: 24288 - protein, 35 aa, Homo sapiens
IFSAPRISATASTARRPTVVQRWGARAAFPSRVPD

SEQ ID NO: 24289 - protein, 27 aa, Homo sapiens
KKPSKRFQMKKKMKRVTTKRKLKRVTP

SEQ ID NO: 24290 - protein, 27 aa, Homo sapiens
LRGAASHRPELRKPAPVRGAPGRHSEL

SEQ ID NO: 24291 - protein, 239 aa, Homo sapiens
LQPPPRRSTLAPCAMVTHSKFPAAGMSRPLDTSLRLKTFSSKSEYQLVVNAVRKLQESGFYWSAVTGGEANLLLSAEPAGTFLIRDSSDQRHFFTLSVKTQSGTKNLRIQCEGGSFSLQSDPRSTQPVPRFDCVLKLVHHYMPPPGAPSFPSPPTEPSSEVPEQPSAQPLPGSPPRRAYYIYSGGEKIPLVLSRPLSSNVATLQHLCRKTVNGHLDSYEKVTQLPGPIREFLDQYDAPL

SEQ ID NO: 24292 - protein, 167 aa, Homo sapiens
LCPRVMTTPNKGNKALKVKREPGENGTSLTDEELVTMSVRELNQHLRGLSKEEIVQLKQRRRTLKNRGYAASCRVKRVTQKEELEKQKAELQQEVEKLASENASMKLELDALRSKYEALQTFARTVARSPVAPARGPLAAGLGPLVPGKVAATSVITIVKSKTDARS

SEQ ID NO: 24293 - protein, 282 aa, Homo sapiens
IHHPRKRKVSRVPQPVQVSPSLLQAKEKTQQSLAAIVDSLKLDEIQPYSSERANPYFEYLHIRKKIEEKRKLLCSVIPQAPQYYDEYVTFNGSYLLDGNPLSKICIPTITPPPSLSDPLKELFRQQEVVRMKLRLQHSIEREKLIVSNEQEVLRVHYRAARTLANQTLPFSACTVLLDAEVYNVPLDSQSDDSKTSVRDRFNARQFMSWLQDVDDKFDKLKTCLLMRQQHEAAALNAVQRLEWQLKLQELDPATYKSISIYEIQEFYVPLVDVNDDFELTPI

SEQ ID NO: 24294 - protein, 25 aa, Homo sapiens
ILQSVSVRLKDSVCCRTQRVTAPLG

SEQ ID NO: 24295 - protein, 70 aa, Homo sapiens
LRFPGSVAEWAAAPAEMPGKKARKNAQPSPARAPAELEVECATQLRRFGDKLNFRQKLLNLISKLFCSGT

SEQ ID NO: 24296 - protein, 59 aa, Homo sapiens
ILGFQRRLRYPQLETQRRVAFCSRTDLRLESVCWGPCLWKRPRGLKDGLVRSGTIMLSC

SEQ ID NO: 24297 - protein, 18 aa, Homo sapiens
KVQKTLDNHIAIRSTAPG

SEQ ID NO: 24298 - protein, 60 aa, Homo sapiens
KTQMGRSVRASSTHISRTSLSNSFQRWIILLYFWLFFMYTELYVKRCFGIHQFPLPRTCL

SEQ ID NO: 24299 - protein, 53 aa, Homo sapiens [sequence omitted]

SEQ ID NO: 24300 - protein, 42 aa, Homo sapiens
LQFSWSSLRSSCEPTMSSFASTRTARTEPPCSEPSAFWALRL

SEQ ID NO: 24301 - protein, 100 aa, Homo sapiens
RMSQPPQCLRRAQSSCCHFMVKLLDDGTFMIPGEKVAHTSLDALVTFHQQKPIEPRRELLTQPCRQKDPANVDYEDLFLYSNAVAEEAACPVSAPEEVCI

SEQ ID NO: 24302 - protein, 33 aa, Homo sapiens
LEKRVLRTLCCRALPPSLPLLPPYLTSFSEEDP

SEQ ID NO: 24303 - protein, 30 aa, Homo sapiens
RPSTRPPRAAMSPAPRCCLERGGTWREAAP

SEQ ID NO: 24304 - protein, 94 aa, Homo sapiens
LCPVRPGLEPTPPPSCRPCPRAMGCGGSRCSSPTSGTVRAKRRKLRESTRNWPTSAPSSKETKPWMATVRKNMCVNCFSSSCLAMTLTLGTWRL

SEQ ID NO: 24305 - protein, 32 aa, Homo sapiens
MVARAFRVSMSADGEAEPTCQWPGAGFVAKLM

SEQ ID NO: 24306 - protein, 64 aa, Homo sapiens
TASVRRVRKQVVNIPSFIVRLDSQKHIDFSLRSPYGGGRPGRVKRKNAKKGQGGAGAGDDEEED

SEQ ID NO: 24307 - protein, 51 aa, Homo sapiens
IPSFIVRLDSQKHIDFSLRSPYGGGRPGRVKRKNAKKGQGGAGAGDDEEED

SEQ ID NO: 24308 - protein, 10 aa, Homo sapiens
LGRGRSPGLA

SEQ ID NO: 24309 - protein, 23 aa, Homo sapiens
IQCLMVMKTTWPKTAGVTSGERI

SEQ ID NO: 24310 - protein, 1122 aa, Homo sapiens
IPLNLHLHHDPFRSLQEPRHQPPTMGSKERFHWQSHNVKQSGVDDMVLLPQITEDAIAANLRKRFMDDYIFTYIGSVLISVNPFKQMPYFTDREIDLYQGAAQYENPPHIYALTDNMYRNMLIDCENQCVIISGESGAGKTVAAKYIMGYISKVSGGGEKVQHVKDIILQSNPLLEAFGNAKTVRNNNSSRFGKYFEIQFSRGGEPDGGKISNFLLEKSRVVMQNENERNFHIYYQLLEGASQEQRQNLGLMTPDYYYYLNQSDTYQVDGTDDRSDFGETLSAMQVIGIPPSIQQLVLQLVAGILHLGNISFCEDGNYARVESVDLLAFPAYLLGIDSGRLQEKLTSRKMDSRWGGRSESINVTLNVEQAAYTRDALAKGLYARLFDFLVEAINRAMQKPQEEYSIGVLDIYGFEIFQKNGFEQFCINFVNEKLQQIFIELTLKAEQEEYVQEGIRWTPIQYFNNKVVCDLIENKLSPPGIMSVLDDVCATMHATGGGADQTLLQKLQAAVGTHEHFNSWSAGFVIHHYAGKVSYDVSGFCERNRDVLFSDLIELMQTSEQAFLRMLFPEKLDGDKKGRPSTAGSKIKKQANDLVATLMRCTPHYIRCIKPNETKRPRDWEENRVKHQVEYLGLKENIRVRRAGFAYRRQFAKFLQRYAILTPETWPRWRGDERQGVQHLLRAVNMEPDQYQMGSTKVFVKNPESLFLLEEVRERKFDGFARTIQKAWRRHVAVRKYEEMREEASNILLNKKERRRNSINRNFVGDYLGLEERPELRQFLGKRERVDFADSVTKYDRRFKPIKRDLILTPKCVYVIGREKVKKGPEKGQVCEVLKKKVDIQALRGVSLSTRQDDFFILQEDAADSFLESVFKTEFVSLLCKRFEEATRRPLPLTFSDTLQFRVKKEGWGGGGTRSVTFSRGFGDLAVLKVGGRTLTVSVGDGLPKSSKPTRKGMAKGKPRRSSQAPTRAAPAPPRGMDRNGVPPSARGGPLPLEIMSGGGTHRPPRGPPSTSLGASRRPRARPPSEHNTEFLNVPDQGMAGMQRKRSVGQRPVPGVGRPKPQPRTHGPRCRALYQYVGQDVDELSFNVNEVIEILMEDPSGWWKGRLHGQEGLFPGNYVEKI

SEQ ID NO: 24311 - protein, 94 aa, Homo sapiens
VQGQFLPPPEQPLTPSVNEAVTAHSETVGSGPSSLGFPDWDPNTHAAYTDSPYSCPASAAENFLPPDFYPPSDPGQPCPFPQGMEVRYRVGTGC

SEQ ID NO: 24312 - protein, 30 aa, Homo sapiens
ILLSPQMATCMSVRPSWSTFCTRRRRLPGR

SEQ ID NO: 24313 - protein, 24 aa, Homo sapiens
MYQCIMYLYTLGDTVKCTSHCGLP

SEQ ID NO: 24314 - protein, 16 aa, Homo sapiens
IFPRLQTPTDLLWEPE

SEQ ID NO: 24315 - protein, 66 aa, Homo sapiens
RTRAGLELGWDPELGSSAAGRPTCWCPGGSEPRRRPGPRGTTGRDASHPSGCSCGFPVQEEAVGVG

SEQ ID NO: 24316 - protein, 27 aa, Homo sapiens
RDPALPQPQPPDAPIPVSTGIRILPVV

SEQ ID NO: 24317 - protein, 7 aa, Homo sapiens
LSANNGS

SEQ ID NO: 24318 - protein, 95 aa, Homo sapiens
LQSCSPSSCLSANAARMASQNRDPAATSVAAARKGAEPSGGAARGPVGKRLQQELMTLMMSGDKGISAFPESDNLFKWVGTIHGAAGTNPTLIVP

SEQ ID NO: 24319 - protein, 308 aa, Homo sapiens
RTPGRGLGPRLHRMGLPVSWAPPALWVLGCCALLLSLWALCTACRRPEDAVAPRKRARRQRARLQGSATAAEASLLRRTHLCSLSKSDTRLHELHRGPRSSRALRPASMDLLRPHWLEVSRDITGPQAAPSAFPHQELPRALPAAAATAGCAGLEATYSNVGLAALPGVSLAASPVVAEYARVQKRKGTHRSPQEPQQGKTEVTPAAQVDVLYSRVCKPKRRDPGPTTDPLDPKGQGAILALAGDLAYQTLPLRALDVDSGPLENVYESIRELGDPAGRSSTCGAGTPPASSCPSLGRGWRPLPASLP

SEQ ID NO: 24320 - protein, 90 aa, Homo sapiens
MLIPRFRLTYLMRSVRETKSNLQCTQRPHCPRFRAQSFLLQGNMKTLCGYMTLLLKQQTMLGLLFHLLLRSPTLMVLERRCRNWEKVKGL

SEQ ID NO: 24321 - protein, 21 aa, Homo sapiens
VRSLLLVTWPHGGPSFVREQL

SEQ ID NO: 24322 - protein, 16 aa, Homo sapiens
MTTSAWPLQASPPMQG

SEQ ID NO: 24323 - protein, 285 aa, Homo sapiens
VPRAPRSAMSSCSRVALVTGANRGIGLAIARELCRQFSGDVVLTARDVARGQAAVQQLQAEGLSPRFHQLDIDDLQSIRALRDFLRKEYGGLNVLVNNAAVAFKSDDPMPFDIKAEMTLKTNFFATRNMCNELLPIMKPHGRVVNISSLQCLRAFENCSEDLQERFHSETLTEGDLVDLMKKFVEDTKNEVHEREGWPNSPYGVSKLGVTVLSRILARRLDEKRKADRILVNACCPGPVKTDMDGKDSIRTVEEGAETPVYLALLPPDATEPQGQLVHDKVVQNW

SEQ ID NO: 24324 - protein, 11 aa, Homo sapiens
IWISTSEKRSG

SEQ ID NO: 24325 - protein, 74 aa, Homo sapiens
ILAPYSHYLLELWLRHYNRALSPLSKSWEMVIVNASPILEAPGCRGPQLDPSHPWSLTLDLSQKAEKRSSLESL

SEQ ID NO: 24326 - protein, 57 aa, Homo sapiens
ILAPYSHYLLELWLRHYNRALSPLSKSWEMVIVNASPILEAPGCRGPQLAGCGGSGL

SEQ ID NO: 24327 - protein, 95 aa, Homo sapiens
LLPSAGPLRRSPQFPARTRSGPPNLRPKSGGGSGGKKMKNEIAAVVFFFTRLVRKHDKLKKEAVERFAEKLTLILQEKYKNHWYPEKPSKGQAYR

SEQ ID NO: 24328 - protein, 71 aa, Homo sapiens
LMKTLYSLCVTPIGQSMSSMYTTIPRSNYSLNKMMTLKFPPMKTSSGMKRRMKSIQEMTVMGQSLLRSAHG

SEQ ID NO: 24329 - protein, 38 aa, Homo sapiens
TRREGATSSRREAAEPATTDPAEPPPPPRPHGGRQGHS

SEQ ID NO: 24330 - protein, 45 aa, Homo sapiens
VWSPLQVTMNSECVDGWVDGGWQVGRLQGHSWQRLWVCRGPQVPL

SEQ ID NO: 24331 - protein, 107 aa, Homo sapiens
TTPPTGCVATTTKTPSAPSSLDIAVEEDLSSTPLLKDLLELTRREFQREDIALNYRDAEGDLVRLLSDEDVALMVRQARGLPSQKRLFPWKLHITQKDNYRVYNTMP

SEQ ID NO: 24332 - protein, 40 aa, Homo sapiens
IMSLRRLMTPTLIPATMICTQEIQSRTLLMNVSMNSKPIR

SEQ ID NO: 24333 - protein, 28 aa, Homo sapiens
IPATMICTQEIQSRTLLMNVSMNSKPIR

SEQ ID NO: 24334 - protein, 19 aa, Homo sapiens
KSSSDPLDIKKDVLLPAWN

SEQ ID NO: 24335 - protein, 28 aa, Homo sapiens
TGCSTSRRITCASKAPNLGPQRGTKSSS

SEQ ID NO: 24336 - protein, 208 aa, Homo sapiens
VMSRESDVEAQQSHGSSACSQPHGSVTQSQGSSSQSQGISSSSTSTMPNSSQSSHSSSGTLSSLETVSTQELYSIPEDQEPEDQEPEEPTPAPWARLWALQDGFANLECVNDNYWFGRDKSCEYCFDEPLLKRTDKYRTYSKKHFRIFREVGPKNSYIAYIEDHSGNGTFVNTELVGKGKRRPLNNNSEIALSLSRNKEKILKIYSLS

SEQ ID NO: 24337 - protein, 112 aa, Homo sapiens
RKTCKKVAIKIISKRKFAIGSAREADPALNVETEIEILKKLNHPCIIKIKNFFDAEDYYIVLELMEGGELFDKVVGNKRLKEATCKLYFYQMLLAVQVKEALNSFDSCLSFS

SEQ ID NO: 24338 - protein, 8 aa, Homo sapiens
VEFTQGSP

SEQ ID NO: 24339 - protein, 63 aa, Homo sapiens
VGKARARFCSASQRRTGRTTHSPRASSCFASPAGGSCVPRGIHRPSLLLSSPTSTPSATTAPA

SEQ ID NO: 24340 - protein, 25 aa, Homo sapiens
KQRLFPGQIQVQVLAISHHGTASCR

SEQ ID NO: 24341 - protein, 74 aa, Homo sapiens
LPPSPTPCTPGPSLRALGAPWPAGLRWRCCSSACWVFWSPPRMVVSIYPMPFLTMKTRNPLQSPRNPVLGMTLT

SEQ ID NO: 24342 - protein, 174 aa, Homo sapiens
KTKMAKFVIRPATAADCSDILRLIKELAKYEYMEEQVILTEKDLLEDGFGEHPFYHCLVAEVPKEHWTPEGHSIVGFAMYYFTYDPWIGKLLYLEDFFVMSDYRGFGIGSEILKNLSQVAMRCRCSSMHFLVAEWNEPSINFYKRRGASDLSSEEGWRLFKIDKEYLLKMATEE

SEQ ID NO: 24343 - protein, 34 aa, Homo sapiens
TAGKTAGCTASSKPRASEQILRGTRDSSPCHGGF

SEQ ID NO: 24344 - protein, 1233 aa, Homo sapiens
IMKEEVKGIPVRVALRCRPLVPKEISEGCQMCLSFVPGEPQVVVGTDKSFTYDFVFDPSTEQEEVFNTAVAPLIKGVFKGYNATVLAYGQTGSGKTYSMGGAYTAEQENEPTVGVIPRVIQLLFKEIDKKSDFEFTLKVSYLEIYNEEILDLLCPSREKAQINIREDPKEGIKIVGLTEKTVLVALDTVSCLEQGNNSRTVASTAMNSQSSRSHAIFTISLEQRKKSDKNSSFRSKLHLVDLAGSERQKKTKAEGDRLKEGININRGLLCLGNVISALGDDKKGGFVPYRDSKLTRLLQDSLGGNSHTLMIACVSPADSNLEETLNTLRYADRARKIKNKPIVNIDPQTAELNHLKQQVQQLQVLLLQAHGGTLPGSITVEPSENLQSLMEKNQSLVEENEKLSRGLSEAAGQTAQMLERIILTEQANEKMNAKLEELRQHAACKLDLQKLVETLEDQELKENVEIICNLQQLITQLSDETVACMAAAIDTAVEQEAQVETSPETSRSSDAFTTQHALRQAQMSKELVELNKALALKEALARKMTQNDSQLQPIQYQYQDNIKELELEVINLQKEKEELVLELQTAKKDANQAKLSERRRKRLQELEGQIADLKKKLNEQSKLLKLKESTERTVSKLNQEIRMMKNQRVQLMRQMKEDAEKFRQWKQKKDKEVIQLKERDRKRQYELLKLERNFQKQSNVLRRKTEEAAAANKRLKDALQKQREVADKRKETQSRGMEGTAARVKNWLGNEIEVMVSTEEAKRHLNDLLEDRKILAQDVAQLKEKKESGENPPPKLRRRTFSLTEVRGQVSESEDSITKQIESLETEMEFRSAQIADLQQKLLDAESEDRPKQRWENIATILEAKCALKYLIGELVSSKIQVSKLESSLKQSKTSCADMQKMLFEERNHFAEIETELQAELVRMEQQHQEKVLYLLSQLQQSQMAEKQLEESVSEKEQQLLSTLKCQDEELEKMREVCEQNQQLLRENEIIKQKLTLLQVASRQKHLPKDTLLSPDSSFEYVPPKPKPSRVKEKFLEQSMDIEDLKYCSEHSVNEHEDGDGDDDEGDDEEWKPTKLVKVSRKNIQGCSCKGWCGNKQCGCRKQKSDCGVDCCCDPTKCRNRQQGKDSLGTVERTQDSEGSFKLEDPTEVTPGLSFFNPVCATPNSKILKEMCDVEQVLSKKTPPAPSPFDLPELKHVATEYQENKAPGKKKKRALASNTSFFSGCSPIEEEAH

SEQ ID NO: 24345 - protein, 258 aa, Homo sapiens
VDVLFVWSPQGGLGPRFGPGEMAQPILGHGSLQPASAAGLASLELDSSLDQYVQIRIFKIIVIGDSNVGKTCLTFRFCGGTFPDKTEATIGVDFREKTVEIEGEKIKVQVWDTAGQERFRKSMVEHYYRNVHAVVFVYDVTKMTSFTNLKMWIQECNGHAVPPLVPKVLVGNKCDLREQIQVPSNLALKFADAHNMLLFETSAKDPKESQNVESIFMCLACRLKAQKSLLYRDAERQQGKVQKLEFPQEANSKTSCPC

SEQ ID NO: 24346 - protein, 35 aa, Homo sapiens
LMLARRPESSERQLDSWKRLLGWKSGGLGYSQLCR

SEQ ID NO: 24347 - protein, 40 aa, Homo sapiens
MLHDHGLTGEPEVLCRDQRKALIPSLQPVQLSTWLTLGTQ

SEQ ID NO: 24348 - protein, 21 aa, Homo sapiens
RLGMPQTCDGTGQMHLGRSWW

SEQ ID NO: 24349 - protein, 37 aa, Homo sapiens
VPLNRSYREAVRVLRVQAHKILALSVLPMPRMFSLTC

SEQ ID NO: 24350 - protein, 340 aa, Homo sapiens
LDPHSLNLPSLHSLPAALRVTPAAKAPGAATAAPPSSTAQHQNTLFLDSDMGSSKKVTLSVLSREQSEGVGARVRRSIGRPELKNLDPFLLFDEFKGGRPGGFPDHPHRGFETVSYLLEGGSMAHEDFCGHTGKMNPGDLQWMTAGRGILHAEMPCSEEPAHGLQLWVNLRSSEKMVEPQYQELKSEEIPKPSKDGVTVAVISGEALGIKSKVYTRTPTLYLDFKLDPGAKHSQPIPKGWTSFIYTISGDVYIGPDDAQQKIEPHHTAVLGEGDSVQVENKDPKRSHFVLIAGEPLREPVIQHGPFVMNTNEEISQAILDFRNAKNGFERAKTWKSKIGN

SEQ ID NO: 24351 - protein, 187 aa, Homo sapiens
LALGSFCSLRPAPSLRAGLQRRAQPSAACQQPPSRPAAQPRTKPGQSFLAARAMNTEMYQTPMEVAVYQLHNFSISFFSSLLGGDVVSVKLDNSASGASVVAIDNKIEQAMDLVKNHLMYAVREEVEILKEQIRELVEKNSQLERENTLLKTLASPEQLEKFQSCLSPEEPAPESPQVPEAPGGSAV

SEQ ID NO: 24352 - protein, 53 aa, Homo sapiens
VHPSVGTRARAPLFLLTVAPTHTLQSPRELIFSPQRAPPYPAPPTGPPFPPAC

SEQ ID NO: 24353 - protein, 164 aa, Homo sapiens
VRLHEDGARTKTLLGKAVRCYESLILKAEGKVESDFFCQLGHFNLLLEDYSKALSAYQRYYSLQADYWKNAAFLYGLGLVYFYYNAFHWAIKAFQDVLYVDPSFCRAKEIHLRLGLMFKVNTDYKSSLKHFQLALIDCNPCTLSNAEIQFHIAHLYETQVSVLT

SEQ ID NO: 24354 - protein, 602 aa, Homo sapiens
MQLEALNLLHTLVWARSLCRAGAVQTQERLSGSASPEQVPAGECCALQEYEAAVEQLKSEQIRAQAEERRKTLSEETRQHQARAQYQDKLARQRYEDQLKQQQLLNEENLRKQEESVQKQEAMRRATVEREMELRHKNEMLRVETEARARAKAERENADIIREQIRLKASEHRQTVLESIRTAGTLFGEGFRAFVTDRDKVTATVAGLTLLAVGVYSAKNATAVTGRFIEARLGKPSLVRETSRITVLEALRHPIQVSRRLLSRPQDVLEGVVLSPSLEARVRDIAIATRNTKKNRGLYRHILLYGPPGTGKTLFAKKLALHSGMDYAIMTGGDVAPMGREGVTAMHKLFDWANTSRRGLLLFMDEADAFLRKRATEEISKDLRATLNAFLYHMGQHSNKFMLVLASNLPEQFDCAINSRIDVMVHFDLPQQEERERLVRLHFDNCVLKPATEGKRRLKLAQFDYGRKCSEVARLTEGMSGREIAQLAVSWQATAYASKDGVLTEAMMDACVQDAVQQYRQKMRWLKAEGPGRGVEHPLSGVQGETLTSWSLATDPSYPCLAGPCTFRICSWMGTGLCPGPLSPRMSCGGGRPFCPPGHPLL

SEQ ID NO: 24355 - protein, 17 aa, Homo sapiens
MCFKITLFLNLSSCRKR

SEQ ID NO: 24356 - protein, 97 aa, Homo sapiens
MIVHSVDDFSSALKALQCHICSKDSLDCGKLLSLRVHITSRESLDSVEFDLHWAAVTLANNFKCTPVKPIPIIPTALARNLSSNLNISQVQGTYKYG

SEQ ID NO: 24357 - protein, 14 aa, Homo sapiens
MAVNKVPRLYGCER

SEQ ID NO: 24358 - protein, 21 aa, Homo sapiens
MQGFGIHFEPLSCLTLTSFHY

SEQ ID NO: 24359 - protein, 154 aa, Homo sapiens
MAEMRARMQQQLDEYQELLDIKLALDMEIHAYRKLLEGEEERLRLSPSPTSQRSRGRASSHSSQTQGGGSVTKKRKLESTESRSSFSQHARTSGRVAVEEVDEEGKFVRLRNKSNEVGSCSGSKGIQLHQGESGKTEGWHVERGTSLPSEGGPG

SEQ ID NO: 24360 - protein, 244 aa, Homo sapiens
MILCSPCSSHFLLPLSPPPALSPSCSLSLPFPCVLVSPLPGGGGVGAAEVAGSKVVPALPESGQSEPGPPEVEGGTKATGNCFYVSMPSGPPDSSTDHSEAPMSPPQPDSLPAGQTEPQPQLQGGNDDPRRPSRSPPSLALRDVGMIFHTIEQLTLKLNRLKDMELAHRELLKSLGGESSGGTTPVGSFHTEAARWTDGSLSPPAKEPLASDSRNSHELGPCPEDGSDAPLEDSTADAAASPGP

SEQ ID NO: 24361 - protein, 46 aa, Homo sapiens
MSTGIMEYKKTTKAMKKRRMFYLHPISKPLLSCYCMSLQAQYRASS

SEQ ID NO: 24362 - protein, 29 aa, Homo sapiens
MIYPLFTDEESEAQRTVMKCDQTLRSPKR

SEQ ID NO: 24363 - protein, 80 aa, Homo sapiens
MQTYLEKAVEVAGNYDGESSDELRNGKMKAFLSLARFSDTQYQRIENYMKSSEFENKQALLKRAKEEVGLLREHKIQTNR

SEQ ID NO: 24364 - protein, 111 aa, Homo sapiens [sequence omitted]

SEQ ID NO: 24365 - protein, 233 aa, Homo sapiens
MNKSPHISNCSVASDYLDLDKITVEDDVGGVQGKRKAASKAAAQQRKILLEGSDGDSANDTEPDFAPGEDSEDDSDFCESEDNDEDFSMRKSKVKEIKKKEVKVKSPVEKKEKKSKSKCNALVTSVDSAPAAVKSESQSLPKKVSLSSDTTRKPLEIRSPSAESKKPKWVPPGMAYLSSRTGAWKIITAASGGSRSSSSPLVVVSVKSPNQSLRLGLSRLARVKPLHPNATST

SEQ ID NO: 24366 - protein, 44 aa, Homo sapiens
MKDGVPEGAQLQGPVHRNPTYRPRYRRYVAFSTNGQLKDLCAQW

SEQ ID NO: 24367 - protein, 1907 aa, Homo sapiens
MFRNERAIRFVVMVTPEDLKANAEYIKMADHYVPVPGGPNNNNYANVELIVDIAKRIPVQAVWAGWGHASENPKLPELLCKNGVAFLGPPSEAMWALGDKIASTVVAQTLQVPTLPWSGSGLTVEWTEDDLQQGKRISVPEDVYDKGCVKDVDEGLEAAERIGFPLMIKASEGGGGKGIRKAESAEDFPILFRQVQSEIPGSPIFLMKLAQHARHLEVQILADQYGNAVSLFGRDCSIQRRHQKIVEEAPATIAPLAIFEFMEQCAIRLAKTVGYVSAGTVEYLYSQDGSFHFLELNPRLQVEHPCTEMIADVNLPAAQLQIAMGVPLHRLKDIRLLYGESPWGVTPISFETPSNPPLARGHVIAARITSENPDEGFKPSSGTVQELNFRSSKNVWGYFSVAATGGLHEFADSQFGHCFSWGENREEAISNMVVALKELSIRGDFRTTVEYLINLLETESFQNNDIDTGWLDYLIAEKVQAEKPDIMLGVVCGALNVADAMFRTCMTDFLHSLERGQVLPADSLLNLVDVELIYGGVKYILKVARQSLTMFVLIMNGCHIEIDAHRLNDGGLLLSYNGNSYTTYMKEEVDSYRITIGNKTCVFEKENDPTVLRSPSAGKLTQYTVEDGGHVEAGSSYAEMEVMKMIMTLNVQERGRVKYIKRPGAVLEAGCVVARLELDDPSKVHPAEPFTGELPAQQTLPILGEKLHQVFHSVLENLTNVMSGFCLPEPVFSIKLKEWVQKLMMTLRHPSLPLLELQEIMTSVAGRIPAPVEKSVRRVMAQYASNITSVLCQFPSQQIATILDCHAATLQRKADREVFFINTQSIVQLVQRYRSGIRGYMKTVVLDLLRRYLRVEHHFQQAHYDKCVINLREQFKPDMSQVLDCIFSHAQVAKKNQLVIMLIDELCGPDPSLSDELISILNELTQLSKSEHCKVALRARQILIASHLPSYELRHNQVESIFLSAIDMYGHQFCPENLKKLILSETTIFDVLPTFFYHANKVVCMASLEVYVRRGYIAYELNSLQHRQLPDGTCVVEFQFMLPSSHPNRMTVPISITNPDLLRHSTELFMDSGFSPLCQRMGAMVAFRRFEDFTRNFDEVISCFANVPKDTPLFSEARTSLYSEDDCKSLREEPIHILNVSIQCADHLEDEALVPILRTFVQSKKNILVDYGLRRITFLIAQEKEFPKFFTFRARDEFAEDRIYRHLEPALAFQLELNRMRNFDLTAVPCANHKMHLYLGAAKVKEGVEVTDHRFFIRAIIRHSDLITKEASFEYLQNEGERLLLEAMDELEVAFNNTSVRTDCNHIFLNFVPTVIMDPFKIEESVRYMVMRYGSRLWKLRVLQAEVKINIRQTTTGSAVPIRLFITNESGYYLDISLYKEVTDSRSGNIMFHSFGNKQGPQHGMLINTPYVTKDLLQAKRFQAQTLGTTYIYDFPEMFRQALFKLWGSPDKYPKDILTYTELVLDSQGQLVEMNRLPGGNEVGMVAFKMRFKTQEYPEGRDVIVIGNDITFRIGSFGPGEDLLYLRASEMARAEGIPKIYVAANSGARIGMAEEIKHMFHVAWVDPEDPHKGFKYLYLTPQDYTRISSLNSVHCKHIEEGGESRYMITDIIGKDDGLGVENLRGSGMIAGESSLAYEEIVTISLVTCRAIGIGAYLVRLGQRVIQVENSHIILTGASALNKVLGREVYTSNNQLGGVQIMHYNGVSHITVPDDFEGVYTILEWLSYMPKDNHSPVPIITPTDPIDREIEFLPSRAPYDPRWMLAGRPHPTLKGTWQSGFFDHGSFKEIMAPWAQTVVTGRARLGGIPVGVIAVETRTVEVAVPADPANLDSEAKIIQQAGQVWFPDSAYKTAQAVKDFNREKLPLMIFANWRGFSGGMKGCLGTWRDVSWWKIRAMLPMHIGEGSV

SEQ ID NO: 24368 - protein, 645 aa, Homo sapiens [sequence omitted]

SEQ ID NO: 24369 - protein, 226 aa, Homo sapiens
MRKRTPLHNDNSWIRQRSASVNKEPVSLPGIMRRGESLDNLDSPRSNSWRQPPWLNQPTGFYASSSVQDFSRPPPQLVSTSNRAYMRNPSSSVPPPSAGSVKTSTTGVATTQSPTPRSHSPSASQSGSQLRNRSVSGKRICSYCNNILGKGAAMIIESLGLCYHLHCFKCVACECDLGGSSSGAEVRIRNHQLYCNDCYLRFKCKRANQRENFLPFKEATGSHAFP

SEQ ID NO: 24370 - protein, 123 aa, Homo sapiens
MGEVEISALAYVKMCLHAARYPHAAVNGLFLAPAPRSGECLCLTDCVPLFHSHLALSVMLEVALNQVDVWGAQAGLVVAGYYHANAAVNDQSTQASSSRASSIQQARSPQATYRERPQLRPHL

SEQ ID NO: 24371 - protein, 139 aa, Homo sapiens
MIERSVVEAAVQECSQSVDETILLMTNHPAPNLFGTPRDKAEMFRERYTILHQRTHRHELFTPPVIGSHPDESGSKFQLKTIETLLGSTTKIGDAIVLGMITQLKEGKFFLEDPTGTVQLDLSKAISFTLVYTQRHALS

SEQ ID NO: 24372 - protein, 234 aa, Homo sapiens
MYMDLVDGIFLNQIMLQIDPRPTNQRINKHVNNDVNLRIQNLTILVRNIKTYYQEVLQQLIVMNLPNVLMIGRDPLSGKSMEEIKKVLLLVLGCAVQCERKEEFIERIKQLDIETQAGIVAHIQEVTHNQENVFDLQWLELPDVAPEELEALSRSMVLHLRRLIDQRDECTELIVDLTQERDYLQAQHPPSPIKSSSADSTPSPTSSLSSEDKQHLAVELADTKARLRRVRQEL

SEQ ID NO: 24373 - protein, 71 aa, Homo sapiens
MELQGAQEDLGISLSSPRRNHETRPGSKAKGRSSICLQASVWMAKTLGLRYPADPNSNMKHPFCFRLTPKE

SEQ ID NO: 24374 - protein, 293 aa, Homo sapiens
MRLPSPELELSKLRTSAIRTAPNPYYCQVGLGPAQSWPLPPGVTEVSPANVTLLRALGHGAFGEVYEGLVIGLPGDSSPLQVAIKTLPELCSPQDELDFLMEALIISKFRHQNIVRCVGLSLRATPRLILLELMSGGDMKSFLRHSRPHLGQPSPLVMRDLLQLAQDIAQGCHYLEENHFIHRDIAARNCLLSCAGPSRVAKIGDFGMARDIYRASYYRRGDRALLPVKWMPPEAFLEGIFTSKTDSWSFGVLLWEIFSLGYMPYPGRTNQEVLDFVVGGGRMDPPRGCPGPV

SEQ ID NO: 24375 - protein, 134 aa, Homo sapiens [sequence omitted]

SEQ ID NO: 24376 - protein, 161 aa, Homo sapiens [sequence omitted]

SEQ ID NO: 24377 - protein, 510 aa, Homo sapiens
MIAEEESLKERLIKSISVCQKELNTLCSELHVEPFQEEGETTILQLEKDLRTQVELMRKQKKERKQELKLLQEQDQELCEILCMPHYDIDSASVPSLEELNQFRQHVTTLRETKASRREEFVSIKRQIILCMEALDHTPDTSFERDVVCEDEDAFCLSLENIATLQKLLRQLEMQKSQNEAVCEGLRTQIRELWDRLQIPEEEREAVATIMSGSKAKVRKALQLEVDRLEELKMQNMKKVIEAIRVELVQYWDQCFYSQEQRQAFAPFCAEDYTESLLQLHDAEIVRLKNYYEVHKELFEGVQKWEETWRLFLEFERKASDPNRFTNRGGNLLKEEKQRAKLQKMLPKLEEELKARIELWEQEHSKAFMVNGQKFMEYVAEQWEMHRLEKERAKQERQLKNKKQTETEMLYGSAPRTPSKRRGLAPNTPGKARKLNTTTMSNATANSSIRPIFGGTVYHSPVSRLPPSGSKPVAASTCSGKKTPRTGRHGANKENLELNGSILSEGSVPL

SEQ ID NO: 24378 - protein, 98 aa, Homo sapiens
MRRSEVLAEESIVCLQKALNHLREIWELIGIPEDQRLQRTEVVKKHIKELLDMMIAEEESLKERLIKSISVCQKELNTLCSELHVEPFQVRGSPQGLW

SEQ ID NO: 24379 - protein, 151 aa, Homo sapiens [sequence omitted]

SEQ ID NO: 24380 - protein, 25 aa, Homo sapiens
MQLSYTGEDSFHVNIHILWGNLLPK

SEQ ID NO: 24381 - protein, 92 aa, Homo sapiens
MCVAQVLTAHLLPPRQALGSLCSPWAAPRVGPLPPAPAMVRISKPKTFQAYLDDCHRRYSCAHCRAHLANHDDLISKSFQGSQGRAYLFNSV

SEQ ID NO: 24382 - protein, 184 aa, Homo sapiens
MVRPQQQPLSGPLSSAYDHVRKTRVAIKKISPFEHQTYCQRTLREIQILLRFRHENVIGIRDILRASTLEAMRDVYIVQDLMETDLYKLLKSQQLSNDHICYFLYQILRGLKYIHSANVLHRDLKPSNLLINTTCDLKICDFGLARIADPEHDHTGFLTEYVATRWYRAPEIMLNSKVGGAAHS

SEQ ID NO: 24383 - protein, 363 aa, Homo sapiens
MAPERMGWAVEQELASLEKGLFQDEDSCSDCSYRDKPGSSLQSFMPEGKTFFPEIFQTNQLLFYERFRAYQDYILADCKASEVQEFTAEFLEKVLEPSGWRAVWHTNVFKVLVEITDVDFAALKAVVRLAEPYLCDSQVSTFTMECMKELLDLKEHRLPLQELWVVFDDSGVFDQTALAIEHVRFFYQNIWRSWDEEEEDEYDYFVRCVEPRLRLHYDILEDRVPSGLIVDYHNLLSQCEESYRKFLNLRSSLSNCNSDSEQENISMVEGLKLYSEMEQLKQKLKLIENPLLRYVFGYQKNSNIQAKGVRSSGQKITHVVSSTMMAGLLRSLLTDRLCQEPGEEEREIQVNGEFLTPGGFFSF

SEQ ID NO: 24384 - protein, 19 aa, Homo sapiens
MRHISSILRTPLRSSCPFS

SEQ ID NO: 24385 - protein, 193 aa, Homo sapiens [sequence omitted]

SEQ ID NO: 24386 - protein, 733 aa, Homo sapiens
MPLPGGLWWLLCCRRGFTLLHRDYGDGELSGDGDEDEDEETFELRTPSPAGGGRGPLEVTLTQPVRSGPVSNRLQSWEETWSLIPEKGLPEDDPDIVVKGWLYREPRGGGARPWLPPRRAWFVLTRDSLDQFSSSGKGARRLGSLVLTSLCSVTGPERRRKETGLWSVTVSGRKHSVRLCSPRQAEAERWGVALREVIASKAPLETPTQLLLRDIQESCGDPEAVALIYLRNPILRHTSGALYAPLLPLPYGVSAPGPGYAPLREEAVRLFLALQALEGARRPGPLMQGVLQTCRDLPALRDELFLQLAKQTSGPAGPPGLPATQDPAALRYWQLLTCMSCTFRPGGAVRGHLLGHLERTEQALPDSELAEYARFIRKALGRTRGRELVPSLAEISALSQRQELLCTVHCPGAGACAVAIDSHTTAGEVARELVGRLGLARSRNAFALYEQRGAQERALAGGTLVADVLTSLAAEEAGLEDSPDSGWRLCLRLHGPLHPEGLSPDGHELPFLFEQAHALLLRGRPPPPDDTLRALAALRLQSLQRDFSPRVPLPRLDRLLPPPAPPREDPPRPTPRPPPSAALLAGALWSPGLAKRRAERARRGGAGRTAGSIAREGGGGAGTAAAVLGGWKRLRGMGRAEAMAAYLALAAQCPGFGAARYDVLELSTVRGRREKGTLAAQAPHLCPRATGPTECHVIPHIQNSYPSQTPGVTSPWALTSLEPQPPPHTCCES

SEQ ID NO: 24387 - protein, 159 aa, Homo sapiens
MVASDMMVLLKTFFSCHKEFQTVPFYIFSESYGGKMAAGIGLELYKAIQRGTIKCNFAGVALGDSWISPVDSVLSWGPYLYSMSLLEDKGLAEVSKVAEQVLNAVNKGLYREATELWGKAEMIIEQNTDGVNFYNILTKSTPTSTMESSLEFTQSHLGE

SEQ ID NO: 24388 - protein, 97 aa, Homo sapiens
MTRSKTFQAYLPSCHRTYSCIHCRAHLANHDELISKVHISSRPSLPTPGRALSAPEVAEVYKLSRIFVLHLCTGRADPRDRLTQLRKTLSWRDRVVI

SEQ ID NO: 24389 - protein, 56 aa, Homo sapiens [sequence omitted]

SEQ ID NO: 24390 - protein, 102 aa, Homo sapiens [sequence omitted]

SEQ ID NO: 24391 - protein, 26 aa, Homo sapiens
MKPTSPGDTVSELQGEISRPAKLSSR

SEQ ID NO: 24392 - protein, 9 aa, Homo sapiens
MDLTLWTSS

SEQ ID NO: 24393 - protein, 221 aa, Homo sapiens
MNFDLKQGTWGGDWPEALAISQRWQQQDKAANKELTFLLFSCPHRLREHLERGRGNLEWKEPPSMRLKARPSSPGFSVLTCSAFSFYPPELQLRFLRNGLAAGTGQGDFGPNSDGSFHASSSLTVKSGDEHHYCCIVQHAGLAQPLRVELGEVPPGGDAPGFPLPCLTAAPVLPESDLPPHCCHLLESDCLEPHACQCPQNLMACPSQGQLPSVSCCFWPH

SEQ ID NO: 24394 - protein, 19 aa, Homo sapiens
MAGKILPLLMATGSGKGSV

SEQ ID NO: 24395 - protein, 28 aa, Homo sapiens
MKKRGPPGRSQKVEWTSGIQAQQFLYFS

SEQ ID NO: 24396 - protein, 792 aa, Homo sapiens
MLEGRCQTQPRSSPSGREASLWSSGFGMKLEAVTPFLGKYRPFVGRCCQTCTPKSWESLFHRSITDLGFCNVILVKEENTRFRGWLVRRLCYFLWSLEQHIPPCQDVPQKIMESTGVQNLLSGRVPGGTGEGQVPDLVKKEVQRILGHIQAPPRPFLVRLFSWALLRFLNCLFLNVQLHKGQMKMVQKAAQAGLPLVLLSTHKTLLDGILLPFMLLSQGLGVLRVAWDSRACSPALRALLRKLGGLFLPPEASLSLDSSEGLLARAVVQAVIEQLLVSGQPLLIFLEEPPGALGPRLSALGQAWVGFVVQAVQVGIVPDALLVPVAVTYDLVPDAPCDIDHASAPLGLWTGALAVLRSLWSRWGCSHRICSRVHLAQPFSLQEYIVSARSCWGGRQTLEQLLQPIVLGQCTAVPDTEKEQEWTPITGPLLALKEEDQLLVRRLSCHVLSASVGSSAVMSTAIMATLLLFKHQKLLGEFSWLTEEILLRGFDVGFSGQLRSLLQHSLSLLRAHVALLRIRQGDLLVVPQPGPGLTHLAQLSAELLPVFLSEAVGACAVRGLLAGRVPPQGPWELQGILLLSQNELYRQILLLMHLLPQDLLLLKPCQSSYCYCQEVLDRLIQCGLLVAEETPGSRPACDTGRQRLSRKLLWKPSGDFTDSDSDDFGEADGRYFRLSQQSHCPDFFLFLCRLLSPLLKAFAQAAAFLRQGQLPDTELGYTEQLFQFLQATAQEEGIFECADPKLAISAVWTFRDLGVLQQTPSPAGPRLHLSPTFASLDNQEKLEQFIRQFICS

SEQ ID NO: 24397 - protein, 336 aa, Homo sapiens
MATLLLFKHQKGVFLSQLLGEFSWLTEEILLRGFDVGFSGQLRSLLQHSLSLLRAHVALLRIRQGDLLVVPQPGPGLTHLAQLSAELLPVFLSEAVGACAVRGLLAGRVPPQGPWELQGILLLSQNELYRQILLLMHLLPQDLLLLKPCQSSYCYCQEVLDRLIQCGLLVAEETPGSRPACDTGRQRLSRKLLWKPSGDFTDSDSDDFGEADGRYFRLSQQSHCPDFFLFLCRLLSPLLKAFAQAAAFLRQGQLPDTELGYTEQLFQFLQATAQEEGIFECADPKLAISAVWTFRDLGVLQQTPSPAGPRLHLSPTFASLDNQEKLEQFIRQFICS

SEQ ID NO: 24398 - protein, 41 aa, Homo sapiens
MVHCCHSPDCIFETQALSNLQRTKRQPPRYVCWEGVIVTAL

SEQ ID NO: 24399 - protein, 423 aa, Homo sapiens
METSSSSDDSCDSFASDNFANTKPKFRSDISEELANVFYEDSDNESFCGFSESEVQDVLDHCGFLQKPRPDVTNELAGIFHADSDDESFCGFSESEIQDGMRLQSVREGCRTRSQCRHSGPLRVAMKFPARSTRGATNKKAESRQPSENSVTDSNSDSEDESGMNFLEKRALNIKQNKAMLAKLMSELESFPGSFRGRHPLPGSDSQSRRPRRRTFPGVASRRNPERRARPLTRSRSRILGSLDALPMEEEEEEDKYMLVRKRKTVDGYMNEDDLPRSRRSRSSVTLPHIIRPVEEITEEELENVCSNSREKIYNRSLGSTCHQCRQKTIDTKTNCRNPDCWGVRGQFCGPCLRNRYGEEVRDALLDPNWHCPPCRGICNCSFCRQRDGRCATGVLVYLAKYHGFGNVHAYLKSLKQEFEMQA

SEQ ID NO: 24400 - protein, 33 aa, Homo sapiens
MKGDVAPHGSRGSQNLILALDLRRESLTRDETQ

SEQ ID NO: 24401 - protein, 39 aa, Homo sapiens
MKGDVAPHGSRGSQLFLSLQNLILALDLRRESLTRDETQ

SEQ ID NO: 24402 - protein, 533 aa, Homo sapiens
MIPELVVAMLACARIGALHSIVFAGFSSESLCERILDSSCSLLITTDAFYRGEKLVNLKELADEALQKCQEKGFPVRCCIVVKHLGRAELGMGDSTSQSPPIKRSCPDVQISWNQGIDLWWHELMQEAGDECEPEWCDAEDPLFILYTSGSTGKPKGVVHTVGGYMLYVATTFKYVFDFHAEDVFWCTADIGWITGHSYVTYGPLANGATSVLFEGIPTYPDVNRLWSIVDKYKVTKFYTAPTAIRLLMKFGDEPVTKHSRASLQVLGTVGEPINPEAWLWYHRVVGAQRCPIVDTFWQTETGGHMLTPLPGATPMKPGSATFPFFGVAPAILNESGEELEGEAEGYLVFKQPWPGIMRTVYGNHERFETTYFKKFPGYYVTGDGCQRDQDGYYWITGRIDDMLNVSGHLLSTAEVESALVEHEAVAEAAVVGHPHPVKGECLYCFVTLCDGHTFSPKLTEELKKQIREKIGPIATPDYIQNAPGLPKTRSGKIMRRVLRKIAQNDHDLGDMSTVADPSVISHLFSHRCLTIQ

SEQ ID NO: 24403 - protein, 224 aa, Homo sapiens
MRTAKDVNRDLYRMKSRHLLDMDEQSKAWTIYRPEDSGRRAKSASIIYQHNPINMICQNGPNSWISIANSEAIQIGHGNIITRQTVSREDGSAGPRHLPSMAPGDSSTWGTLVDPWGPQDIHMEQSILRRVQLGHSNEMRLHGVPSEGPAHIPPGSPPVFQCSGKQAAEERGAESQRKTLTSRSAGRDQWGRPTAGSVEQKDASQTAQQHERSLCHCCRPRSFV

SEQ ID NO: 24404 - protein, 34 aa, Homo sapiens
MTAPALEYRLCFGAFGISFHLVRKSVVSPASSGK

SEQ ID NO: 24405 - protein, 321 aa, Homo sapiens
MEKGRLSVGDHVALVYPPGVDLIAAFYGCLYCGCVPVTVRPPHPQNLGTTLPTVKMIVEVSKSACVLTTQAVTRLLRSKEAAAAVDIRTWPTILDTDDIPKKKIASVFRPPSPDVLAYLDFSVSTTGILAGVKMSHAATSALCRSIKLQCELYPSRQIAICLDPYCGLGFALWCLCSVYSGHQSVLVPPLELESNVSLWLSAVSQYKARVTFCSYSVMEMCTKGLGAQTGVLRMKGVNLSCVRTCMVVAEERPRIALTQSFSKLFKDLGLPARAVSTTFGCRVNVAICLQVRCLGLRFSKAGCWQHGDPVSQLLMCRFVAA

SEQ ID NO: 24406 - protein, 368 aa, Homo sapiens
MVMFELAWMLSKDLNDMLWWAIVGLTDQWVQDKITQMKYVTDVGVLQRHVSRHNHRNEDEENTLSVDCTRISFEYDLRLVLYQHWSLHDSLCNTSYTAARFKLWSVHGQKRLQEFLADMGLPLKQVKQKFQAMDISLKENLREMIEESANKFGMKDMRVQTFSIHFGFKHKFLASDVVFATMSLMESPEKDGSGTDHFIQALDSLSRSNLDKLYHGLELAKKQLRATQQTIASCLCTNLVISQGPFLYCSLMEGTPDVMLFSRPASLSLLSKHLLKSFVCSTKNRRCKLLPLVMAAPLSMEHGTVTVVGIPPETDSSDRKNSFFGRAFEKAAESTSSRMLHNHFDLSVIELKAEDRSKFLDALISLLS

SEQ ID NO: 24407 - protein, 162 aa, Homo sapiens
MLIKQVDEEAALEQAVKFCQVHLGAAAQRQASGDTPTTPKHPKDSRENFFPVTVVPTAPDPVPADSVQRPSDAHTKPRPALAAATTIITCPPSASASTLDQSKDPGPPRPHRPEATPSMASLGPGPPLLLPPCLKDPACFLAADPALAHSLCHPWRLTCLPS

SEQ ID NO: 24408 - protein, 11 aa, Homo sapiens
MFILMDYLAFD

SEQ ID NO: 24409 - protein, 42 aa, Homo sapiens; identical to SEQ ID NO: 7336

SEQ ID NO: 24410 - protein, 150 aa, Homo sapiens
MNWRSAGESQSCPDSASPQGPLPSGLPSPAIPVAGKVGLALPSRPLPHRRAQLKRCLERLKQQMPLGADCARYTTLSLLRRARMHIQKLEDQEQRARQLKERLRSKQQSLQRQLEQLRGLAGAAERERLRADSLDSSGLSSERSDSDQGP

SEQ ID NO: 24411 - protein, 450 aa, Homo sapiens
MVFDPWLIGPAFARGWWLLHEPPSDWLERLCQADLIYISHLHSDHLSYPTLKKLAGRRPDIPIYVGNTERPVFWNLNQSGVQLTNINVVPFGIWQQVDKNLRFMILMDGVHPEMDTCIIVEYKGHKILNIVDCTRPNGGRLPMKVALMMSDFAGGASGFPMTFSGGKFTEEWKAQFIKTERKKLLNYKARLVKNLQPRIYCPFAGYFVESHPSDKYIKETNTKNDPNELNNLIKKNSDVITWTPRPGATLDLGRMLKDRTDSKGIIEPPEGTKIYKDSWDFEPYLEILNAALGDEIFLHSSWIKEYFTWAGFKDYNLVVRMIETDEDFNPFPGGYDYLVDFLDLSFPKERPQREHPYEEIHSRVDVIRHVVKNGLLWDELYIGFQTRLQRDPDIYHHLFWNHFQIKLPLTPPNWKSFLMCCEQNGPVILQFSTERTNEPNRNKFSVENKA

SEQ ID NO: 24412 - protein, 435 aa, Homo sapiens [sequence omitted]

SEQ ID NO: 24413 - protein, 250 aa, Homo sapiens
MSDFAGGASGFPMTFSGGKFTEEWKAQFIKTERKKLLNYKARLVKNLQPRIYCPFAGYFVESHPSDKYIKETNTKNDPNELNNLIKKNSDVITWTPRPGATLDLGRMLKDRTDSKGIIEPPEGTKIYKDSWDFEPYLEILNAALGDEIFLHSSWIKEYFTWAGFKDYNLVVRMIETDEDFNPFPGGYDYLVDFLDLSFPKERPQREHPYEEIHSRVDVIRHVVKNGLLWDELYIGFQTRLQRDPDIYHHL

SEQ ID NO: 24414 - protein, 89 aa, Homo sapiens
MSNCCSFKIPRQRNRQTMGSIEQTTEILLCLSPVEVASLKEGINFFRNKSTGKDYVLYKNKSRLRACKNMCKHQGGLFIKDIEDLAGSC

SEQ ID NO: 24415 - protein, 128 aa, Homo sapiens
MSEHRNEALGNYLEMRLKSSFLRGLGSWKSNPLRLGGWTILLTLTMGQGEPGGPQGDPWVPHELLLPSLCDSSHASSWGSGSITCAWRGGDSSSHPLVSGHILSNSPVAAVMCSSMGTHLSPFKGTLL

SEQ ID NO: 24416 - protein, 141 aa, Homo sapiens
MRSRVVLGEFGVRNVHTTDFPGNYSGYDDAWDQDRFEKNFRVDVVHMDENSLEFDMVGIDAAIANAFRRILLAEVPTMAVEKVLVYNNTSIVQDEILAHRLGLIPIHADPRLFEYRNQGEKMKFWEKWTIWVQILVDCDVG

SEQ ID NO: 24417 - protein, 237 aa, Homo sapiens
METWSVEQVCSWLVEKNLGELVHRFQEEEVSGAALLALNDRMVQQLVKKIGHQAVLMDLIKKYKQNTQGLKSPENPKKAALVMQTEAARDYRDEESSSPARHGEQMPSFYPAENLDNGLIDQRVLKQRRNVKQILARSKALQWTKSYVLPEFPYDVKCMLAEQKCPDHSMRIRIIEFLQADMTKYLEGSLYPSTQQYNDVVNALLQAHPFLDEDGCGFCHKIAVRIKGRIDILFLLP

SEQ ID NO: 24418 - protein, 83 aa, Homo sapiens
MKPSKRFFISPPSSTAFMKQRRMGLNDFIQKIANNSYACKHPEVQSILKISQPQEPELMNANPSPPVSFCMCRASVENCKGVS

SEQ ID NO: 24419 - protein, 93 aa, Homo sapiens
MTVKTEAAKGTLTYSRMRGMVAILIAFMKQRRMGLNDFIQKIANNSYACKHPEVQSILKISQPQEPELMNANPSPPVSFCMCRASVENCKGVS

SEQ ID NO: 24420 - protein, 105 aa, Homo sapiens
MVTGQSGLFTQYNIQKKAMTVKEFRQLANSGKYCTPRYLDYEDLERKYWKNLTFVAPIYGADINGSIYDEFLPVRCNLANVQASEKKVELMGHPDPGLKVACLSA

SEQ ID NO: 24421 - protein, 343 aa, Homo sapiens
MLTSNQNVPVFLIDPLILELINKNFEQVKNTSHGSTSQCKFFCVPRDFTAFALQYHLWKNEEGWFRIAENMGFQCLKIESKDPRLDGIDSLSGTEIPLHYICKLATHAIHLVVFHERSGNYLWHGHLRLKEHIDRKFVPFRKLQFGRYPGAFDRPELQQVTVDGLEVLIPKDPMHFVEEVPHSRFIECRYKEARAFFQQYLDDNTVEAVAFRKSAKELLQLAAKTLNKLGVPFWLSSGTCLGWYRQCNIIPYSKDVDLGIFIQDYKSDIILAFQDAGLPLKHKFGKVEDSLELSFQGKDDVKLDVFFFYEETDHMWNGGTQAKTGKKFKYESNKYLFIKVLQK

SEQ ID NO: 24422 - protein, 133 aa, Homo sapiens
MRSSITAPCGAVAADLSTSRSGASLTAMSPFSATREKSHSWLSTGWFTMVIAVELCDHVHVYGMVPPNYCSQRPRLQRMPYHYYEPKGPDECVTYIQNEHSRKGNHHRFITEKRVFSSWAQLYGITFSHPSWT

SEQ ID NO: 24423 - protein, 86 aa, Homo sapiens
MVVMNSLRVILQASPGKLLWRKFQIPRFMPARPCSLYTCTYKTRNRAFFLLFLILPIHGTSKGQGNGPPQTDVHWFCSSHLGVSTG

SEQ ID NO: 24424 - protein, 17 aa, Homo sapiens
MSSSLVQLSTWLTLGTQ

SEQ ID NO: 24425 - protein, 161 aa, Homo sapiens
IRPGRAPPPLLGPPAFAQGRPAVMEEEAETEEQQRFSYQQRLKAAVHYTVGCLCEEVALDKEMQFSKQTIAAISELTFRQCENFAKDLEMFARHAKRTTINTEDVKLLARRSNSLLKYITDKSEEIAQINLERKAQKKKKSEDGSKNSRQPAEAGVVESEN

SEQ ID NO: 24426 - protein, 34 aa, Homo sapiens
KMEDEEVAESWEEAADSGQEIQISSQSAHCDSGR

SEQ ID NO: 24427 - protein, 52 aa, Homo sapiens
MNLSSPPCLALLTNRACLAVNWHRVTLFPGIQVCNQNTGEEKLQDPCPHLSS

SEQ ID NO: 24428 - protein, 327 aa, Homo sapiens
KFFLTEFWLRQRRRRPERAMDALKSAGRALIRSPSLAKQSWGGGGRHRKLPENWTDTRETLLEGMLFSLKYLGMTLVEQPKGEELSAAAIKRIVATAKASGKKLQKVTLKVSPRGIILTDNLTNQLIENVSIYRISYCTADKMHDKVFAYIAQSQHNQSLECHAFLCTKRKMAQAVTLTVAQAFKVAFEFWQVSKEEKEKRDKASQEGGDVLGARQDCTPSLKSLVATGNLLDLEETAKAPLSTVSANTTNMDEVPRPQALSGSSVVWELDDGLDEAFSRLAQSRTNPQVLDTGLTAQDMHYAQCLSPVDWDKPDSSGTEQDDLFSF

SEQ ID NO: 24429 - protein, 145 aa, Homo sapiens
LAPWPAGLFLAMGRSRRTGAHRAHSLARQMKAKRRRPDLDEIHRELRPQGSARPQPDPNAEFDPDLPGGGLHRCLACARYFIDSTNLKTHFRSKDHKKRLKQLSVEPYSQEEAERAAGMGSYVPPRRLAVPTEVSTEVPEMDTST

SEQ ID NO: 24430 - protein, 216 aa, Homo sapiens
ITRDPKPPGLRPSQRPMDDKKKKRSPKPCLAQPAQAPGTLRRVPVPTSHSGSLALGLPHLPSPKQRAKFKRVGKEKCRPVLAGGGSGSAGTPLQHSFLTEVTDVYEMEGGLLNLLNDFHSGRLQAFGKECSFEQLEHVREMQEKLARLHFSLDVCGEEEDDEEEEDGVTEGLPEEQKKTMADRNLDQLLSNLEDLSNSIQKLHLAENAEPEEQSAA

SEQ ID NO: 24431 - protein, 736 aa, Homo sapiens
IARFSSLLTLRMAMDSSLQARLFPGLAIKIQRSNGLIHSANVRTVNLEKSCVSVEWAEGGATKGKEIDFDDVAAINPELLQLLPLHPKDNLPLQENVTIQKQKRRSVNSKIPAPKESLRSRSTRMSTVSELRITAQENDMEVELPAAANSRKQFSVPPAPTRPSCPAVAEIPLRMVSEEMEEQVHSIRGSSSANPVNSVRRKSCLVKEVEKMKNKREEKKAQNSEMRMKRAQEYDSSFPNWEFARMIKEFRATLECHPLTMTDPIEEHRICVCVRKRPLNKQELAKKEIDVISIPSKCLLLVHEPKLKVDLTKYLENQAFCFDFAFDETASNEVVYRFTARPLVQTIFEGGKATCFAYGQTGSGKTHTMGGDLSGKAQNASKGIYAMASRDVFLLKNQPCYRKLGLEVYVTFFEIYNGKLFDLLNKKAKLRVLEDGKQQVQVVGLQEHLVNSADDVIKMIDMGSACRTSGQTFANSNSSRSHACFQIILRAKGRMHGKFSLVDLAGNERGADTSSADRQTRMEGAEINKSLLALKECIRALGQNKAHTPFRESKLTQVLRDSFIGENSRTCMIATISPGISSCEYTLNTLRYADRVKELSPHSGPSGEQLIQMETEEMEACSNGALIPGNLSKEEEELSSQMSSFNEAMTQIRELEEKAMEELKEIIQQGPDWLELSEMTEQPDYDLETFVNKAESALAQQAKHFSALRDVIKALRLAMQLEEQASRQISSKKRPQ

SEQ ID NO: 24432 - protein, 43 aa, Homo sapiens
LFSIPFRSFLGRRRRRSTLRVILYARPLPLPPGGTSPSPPDLS

SEQ ID NO: 24433 - protein, 435 aa, Homo sapiens
ILLSLPTPDTRLRLVISSVFFSSLLLSRFSMQEKDASSQGFLPHFQHFATQAIHVGQDPEQWTSRAVVPPISLSTTFKQGAPGQHSGFEYSRSGNPTRNCLEKAVAALDGAKYCLAFASGLAATVTITHLLKAGDQIICMDDVYGGTNRYFRQVASEFGLKISFVDCSKIKLLEAAITPETKLVWIETPTNPTQKVIDIEGCAHIVHKHGDIILVVDNTFMSPYFQRPLALGADISMYSATKYMNGHSDVVMGLVSVNCESLHNRLRFLQNSLGAVPSPIDCYLCNRGLKTLHVRMEKHFKNGMAVAQFLESNPWVEKVIYPGLPSHPQHELVKRQCTGCTGMVTFYIKGTLQHAEIFLKNLKLFTLAESLGGFESLAELPAIMTHASVLKNDRDVLGISDTLIRLSVGLEDEEDLLEDLDQALKAAHPPSGSHS

SEQ ID NO: 24434 - protein, 54 aa, Homo sapiens
LSPEAAAAAPSPRTRDPPARGRNVAEVLLKGPEMQGFGIHFEPLSCLTLTSFHY

SEQ ID NO: 24435 - protein, 23 aa, Homo sapiens
LQILAEAFVMSAAAETGVLKAGC

SEQ ID NO: 24436 - protein, 36 aa, Homo sapiens
LIPPPGITILLPKRPPKTTEDKEETIQKLEVRRKCA

SEQ ID NO: 24437 - protein, 6 aa, Homo sapiens
IAFRMC

SEQ ID NO: 24438 - protein, 31 aa, Homo sapiens
ILSSGNWMPTRRVILESCVGDHKAFVSQVPE

SEQ ID NO: 24439 - protein, 15 aa, Homo sapiens
VPSAPIDRYWTPWPC

SEQ ID NO: 24440 - protein, 10 aa, Homo sapiens
LWPLRVLPQP

SEQ ID NO: 24441 - protein, 39 aa, Homo sapiens
RAPATAAFASTTRWTPSSAGWPARSDSASPSCTSCCPAS

SEQ ID NO: 24442 - protein, 792 aa, Homo sapiens
KENMTSPAKFKKDKEIIAEYDTQVKEIRAQLTEQMKCLDQQCELRVQLLQDLQDFFRKKAEIEMDYSRNLEKLAERFLAKTRSTKDQQFKKDQNVLSPVNCWNLLLNQVKRESRDHTTLSDIYLNNIIPRFVQVSEDSGRLFKKSKEVGQQLQDDLMKVLNELYSVMKTYHMYNADSISAQSKLKEAEKQEEKQIGKSVKQEDRQTPRSPDSTANVRIEEKHVRRSSVKKIEKMKEKRQAKYTENKLKAIKARNEYLLALEATNASVFKYYIHDLSDLIDCCDLGYHASLNRALRTFLSAELNLEQSKHEGLDAIENAVENLDATSDKQRLMEMYNNVFCPPMKFEFQPHMGDMASQLCAQQPVQSELVQRCQQLQSRLSTLKIENEEVKKTMEATLQTIQDIVTVEDFDVSDCFQYSNSMESVKSTVSETFMSKPSIAKRRANQQETEQFYFTKMKEYLEGRNLITKLQAKHDLLQKTLGESQRTDCSLARRSSTVRKQDSSQAIPLVVESCIRFISRHGLQHEGIFRVSGSQVEVNDIKNAFERGEDPLAGDQNDHDMDSIAGVLKLYFRGLEHPLFPKDIFHDLMACVTMDNLQERALHIRKVLLVLPKTTLIIMRYLFAFLNHLSQFSEENMMDPYNLAICFGPSLMSVPEGHDQVSCQAHVNELIKTIIIQHENIFPSPRELEGPVYSRGGSMEDYCDSPHGETTSVEDSTQDVTAEHHTSDDECEPIEAIAKFDYVGRTARELSFKKGASLLLYQRASDDWWEGRHNGIDGLIPHQYIVVQDTLIS

SEQ ID NO: 24443 - protein, 731 aa, Homo sapiens
LMLFNSVLRQPQLGVLRNGWSSQYPLQSLLTGYQCSGNDEHTSYGETGVPVPPFGCTFSSAPNMEHVLAVANEEGFVRLYNTESQSFRKKCFKEWMAHWNAVFDLAWVPGELKLVTAAGDQTAKFWDVKAGELIGTCKGHQCSLKSVAFSKFEKAVFCTGGRDGNIMVWDTRCNKKDGFYRQVNQISGAHNTSDKQTPSKPKKKQNSKGLAPSVDFQQSVTVVLFQDENTLVSAGAVDGIIKVWDLRKNYTAYRQEPIASKSFLYPGSSTRKLGYSSLILDSTGSTLFANCTDDNIYMFNMTGLKTSPVAIFNGHQNSTFYVKSSLSPDDQFLVSGSSDEAAYIWKVSTPWQPPTVLLGHSQEVTSVCWCPSDFTKIATCSDDNTLKIWRLNRGLEEKPGGDKLSTVGWASQKKKESRPGLVTVTSSQSTPAKAPRAKCNPSNSSPSSAACAPSCAGDLPLPSNTPTFSIKTSPAKARSPINRRGSVSSVSPKPPSSFKMSIRNWVTRTPSSSPPITPPASETKIMSPRKALIPVSQKSSQAEACSESRNRVKRRLDSSCLESVKQKCVKSCNCVTELDGQVENLHLDLCCLAGNQEDLSKDSLGPTKSSKIEGAGTSISEPPSPISPYASESCGTLPLPLRPCGEGSEMVGKENSSPENKNWLLAMAAKRKAENPSPRSPSSQTPNSRRQSGKKLPSPVTITPSSMRKICTYFHRKSQEDFCGPEHSTEL

SEQ ID NO: 24444 - protein, 25 aa, Homo sapiens
TAAPRRATRPPKVSRGRENGKLPTS

SEQ ID NO: 24445 - protein, 98 aa, Homo sapiens
LPEVNFQKQESPEPGRGMNREGAPGKSPEEMYIQQKVRVLLMLRKMGSNLTASEEEFLRTYAGVVNSQLSQLPPHSIDQGAEDVVMAFSRSETEDRRQ

SEQ ID NO: 24446 - protein, 53 aa, Homo sapiens
LAVPPPQPPGDLQAAISKRCSLLGRGPGGEGPALPRRRPLAASPGLRAMPRAV

SEQ ID NO: 24447 - protein, 6 aa, Homo sapiens
LHIMGR

SEQ ID NO: 24448 - protein, 30 aa, Homo sapiens
TPRFPPLDWFYCGSGLISMSCCGAFTAFGL

SEQ ID NO: 24449 - protein, 50 aa, Homo sapiens
TGVGVRVAVGVPGPEHEPERESAARTPVATRVPGAARATSAALPWSPAAR

SEQ ID NO: 24450 - protein, 8 aa, Homo sapiens
TAAIFFLS

SEQ ID NO: 24451 - protein, 10 aa, Homo sapiens
MPWTWLQRST

SEQ ID NO: 24452 - protein, 34 aa, Homo sapiens
IFFRRLFENLVVNIHLFKSYFIFKLKLLKNTLIP

SEQ ID NO: 24453 - protein, 30 aa, Homo sapiens
IFCKGVSSIWSFFFLPPSFLTLKTNSVPSW

SEQ ID NO: 24454 - protein, 19 aa, Homo sapiens
MITKVVFPGRGLSIALRMC

SEQ ID NO: 24455 - protein, 27 aa, Homo sapiens
KRKEVFEGRRGNEMLKTMERKKMTRSF

SEQ ID NO: 24456 - protein, 25 aa, Homo sapiens
KEVFEGRRGNEMLKTMERKKMTRSF

SEQ ID NO: 24457 - protein, 9 aa, Homo sapiens
LVRPPLFVF

SEQ ID NO: 24458 - protein, 18 aa, Homo sapiens
KVLPVPPALGTRLCIASP

SEQ ID NO: 24459 - protein, 49 aa, Homo sapiens
LWMEWRCGPLWSANKALGWRGRLAAFLVVGPSEQSSWFWRWLRRLDCGV

SEQ ID NO: 24460 - protein, 149 aa, Homo sapiens
LRGREGRRARRSLELSANLGAPMTAAATATVLKEGVLEKRSGGLLQLWKRKRCVLTERGLQLFEAKGTGGRPKELSFARIKAVECVESTGRHIYFTLVTEGGGEIDFRCPLEDPGWNAQITLGLVKFKNQQAIQTVRARQSLGTGTLVS

SEQ ID NO: 24461 - protein, 145 aa, Homo sapiens
TGRARGRGGAGRARGAPGMSQGLPAAGSVLQRSVAAPGNQPQPQPQQQSPEDDDRKVRRREKNRVAAQRSRKKQTQKADKLHEEYESLEQENTMLRREIGKLTEELKHLTEALKEHEKMCPLLLCPMNFVPVPPRPDPVAGCLPR

SEQ ID NO: 24462 - protein, 20 aa, Homo sapiens
LTWPGRQKMFHVGYPAWGSL

SEQ ID NO: 24463 - protein, 188 aa, Homo sapiens
ISVHCDVHIFNWLIKYIKRNTKENKDCEMPTLEPGNVISILISSEFLKMDSLVEQCIQYCHKNMNAIVATPCNMNCINANLLTRIADLFSHNEVDDLKDKKDKFKSKLFCKKIERLFDPEYLNPDSRSNAATLYRCCLCKKLLTKETERRIPCIPGKINVDRRGNIVYIHIRCREDKIHTCIFVYIYI

SEQ ID NO: 24464 - protein, 360 aa, Homo sapiens
VTFASACPASMEPKRIREGYLVKKGSVFNTWKPMWVVLLEDGIEFYKKKSDNSPKGMIPLKGSTLTSPCQDFGKRMFVFKITTTKQQDHFFQAAFLEERDAWVRDIKKAIKCIEGGQKFARKSTRRSIRLPETIDLGALYLSMKDTEKGIKELNLEKDKKIFNHCFTGNCVIDWLVSNQSVRNRQEGLMIASSLLNEGYLQPAGDMSKSAVDGTAENPFLDNPDAFYYFPDSGFFCEENSSDDDVILKEEFRGVIIKQGCLLKQGHRRKNWKVRKFILREDPAYLHYYDPAGAEDPLGAIHLRGCVVTSVESNSNGRKSEEENLFEIITADEVHYFLQAATPKERTEWIRAIQMASRTGK

SEQ ID NO: 24465 - protein, 693 aa, Homo sapiens
IGVMSGGILIYKNRVRMNTFPWLKIVKISFKCKQFFIQLRKELHESRETLLGFNMVNYRACKNLWKACVEHHTFFRLDRPLPPQKNFFAHYFTLGSKFRYCGRTEVQSVQYGKEKANKDRVFARSPSKPLARKLMDWEVVSRNSISDDRLETQSLPSRSPPGTPNHRNSTFTQEGTRLRPSSVGHLVDHMVHTSPSEVFVNQRSPSSTQANSIVLESSPSQETPGDGKPPALPPKQSKKNSWNQIHYSHSQQDLESHINETFDIPSSPEKPTPNGGIPHDNLVLIRMKPDENGRFGFNVKGGYDQKMPVIVSRVAPGTPADLCVPRLNEGDQVVLINGRDIAEHTHDQVVLFIKASCERHSGELMLLVRPNAVYDVVEEKLENEPDFQYIPEKAPLDSVHQDDHSLRESMIQLAEGLITGTVLTQFDQLYRKKPGMTMSCAKLPQNISKNRYRDISPYDATRVILKGNEDYINANYINMEIPSSSIINQYIACQGPLPHTCTDFWQMTWEQGSSMVVMLTTQVERGRVKCHQYWPEPTGSSSYGCYQVTCHSEEGNTAYIFRKMTLFNQEKNESRPLTQIQYIAWPDHGVPDDSSDFLDFVCHVRNKRAGKEEPVVVHCSAGIGRTGVLITMETAMCLIECNQPVYPLDIVRTMRDQRAMMIQTPSQYRFVCEAILKVYEEGFVKPLTTSTNK

SEQ ID NO: 24466 - protein, 16 aa, Homo sapiens
MAVFLCLKTVKQERII

SEQ ID NO: 24467 - protein, 457 aa, Homo sapiens
IWAPATSMDARRVPQKDLRVKKNLKKFRYVKLISMETSSSSDDSCDSFASDNFANTKPKFRSDISEELANVFYEDSDNESFCGFSESEVQDVLDHCGFLQKPRPDVTNELAGIFHADSDDESFCGFSESEIQDGMRLQSVREGCRTRSQCRHSGPLRVAMKFPARSTRGATNKKAESRQPSENSVTDSNSDSEDESGMNFLEKRALNIKQNKAMLAKLMSELESFPGSFRGRHPLPGSDSQSRRPRRRTFPGVASRRNPERRARPLTRSRSRILGSLDALPMEEEEEEDKYMLVRKRKTVDGYMNEDDLPRSRRSRSSVTLPHIIRPVEEITEEELENVCSNSREKIYNRSLGSTCHQCRQKTIDTKTNCRNPDCWGVRGQFCGPCLRNRYGEEVRDALLDPNWHCPPCRGICNCSFCRQRDGRCATGVLVYLAKYHGFGNVHAYLKSLKQEFEMQA

SEQ ID NO: 24468 - protein, 40 aa, Homo sapiens
LRWQRQESPAATGRTPPLERILKEMKSALRNEVDCLLAFC

SEQ ID NO: 24469 - protein, 18 aa, Homo sapiens
KGMGIDATHRPPVSISTL

SEQ ID NO: 24470 - protein, 62 aa, Homo sapiens
VQGAPLSPMCSLKQMLCLIPAGESHRLELLGRERPSCTLLRDCHAPPGGLRTFDMLQSWPRQ

SEQ ID NO: 24471 - protein, 30 aa, Homo sapiens
RPRHQRVKTAKTIPSTVVNSIAARLLLQII

SEQ ID NO: 24472 - protein, 28 aa, Homo sapiens
LHSVDFQGKKKTVLVVVIINIWTSVMVK

SEQ ID NO: 24473 - protein, 39 aa, Homo sapiens
MPSAARGCGVVRSRCAAGVQWCHQFAAASTSQAQMILLP

SEQ ID NO: 24474 - protein, 418 aa, Homo sapiens
IEVKMSKKISGGSVVEMQGDEMTRIIWELIKEKLIFPYVELDLHSYDLGIENRDATNDQVTKDAAEAIKKHNVGVKCATITPDEKRVEEFKLKQMWKSPNGTIRNILGGTVFREAIICKNIPRLVSGWVKPIIIGRHAYGDQYRATDFVVPGPGKVEITYTPSDGTQKVTYLVHNFEEGGGVAMGMYNQDKSIEDFAHSSFQMALSKGWPLYLSTKNTILKKYDGRFKDIFQEIYDKQYKSQFEAQKIWYEHRLIDDMVAQAMKSEGGFIWACKNYDGDVQSDSVAQGYGSLGMMTSVLVCPDGKTVEAEAAHGTVTRHYRMYQKGQETSTNPIASIFAWTRGLAHRAKLDNNKELAFFANALEEVSIETIEAGFMTKDLAACIKGLPNVQRSDYLNTFEFMDKLGENLKIKLAQAKL

SEQ ID NO: 24475 - protein, 27 aa, Homo sapiens
LPTTMPVVTIPLARRSLTQCWIGSASW

SEQ ID NO: 24476 - protein, 757 aa, Homo sapiens
LALGYWLGPMLGTLRAMEGEDVEDDQLLQKLRASRRRFQRRMQRLIEKYNQPFEDTPVVQMATLTYETPQGLRIWGGRLIKERNEGEIQDSSMKPADRTDGSVQAAAWGPELPSHRTVLGADSKSGEVDATSDQEESVAWALAPAVPQSPLKNELRRKYLTQVDILLQGAEYFECAGNRAGRDVRVTPLPSLASPAVPAPGYCSRISRKSPGDPAKPASSPREWDPLHPSSTDMALVPRNDSLSLQETSSSSFLSSQPFEDDDICNVTISDLYAGMLHSMSRLLSTKPSSIISTKTFIMQNWNSRRRHRYKSRMNKTYCKGARRSQRSSKENFIPCSEPVKGTGALRDCKNVLDVSCRKTGLKLEKAFLEVNRPQIHKLDPSWKERKVTPSKYSSLIYFDSSATYNLDEENRFRTLKWLISPVKIVSRPTIRQGHGENRQREIEIRFDQLHREYCLSPRNQPRRMCLPDSWAMNMYRGGPASPGGLQGLETRRLSLPSSKAKAKSLSEAFENLGKRSLEAGRCLPKSDSSSSLPKTNPTHSATRPQQTSDLHVQGNSSGIFRKSVSPSKTLSVPDKEVPGHGRNRYDEIKEEFDKLHQKYCLKSPGQMTVPLCIGVSTDKASMEVRYQTEGFLGKLNPDPHFQGFQKLPSSPLGCRKSLLGSTAIEAPSSTCVARAITRDGTRDHQFPAKRPRLSEPQGSGRQGNSLGASDGVDNTVRPGDQGSSSQPNSEERGENTSYRMEEKSDFMLEKLETKSV

SEQ ID NO: 24477 - protein, 21 aa, Homo sapiens
LPLRWSSPGTALIRVTSSCWT

SEQ ID NO: 24478 - protein, 35 aa, Homo sapiens
MERLLDYMIWIKPWVEAILPWLNLPGMSLRVKRWQ

SEQ ID NO: 24479 - protein, 72 aa, Homo sapiens
LPLAARQPPLPLNLVPMAARPSFTRTVGIWASPKPSRWLLGLLEPVSSPLPPRPDPLFCPKELALTASGSRS

SEQ ID NO: 24480 - protein, 26 aa, Homo sapiens
LQRGPYGVVLDSRRNLKGNFHNVRSP

SEQ ID NO: 24481 - protein, 17 aa, Homo sapiens
LDSRRNLKGNFHNVRSP

SEQ ID NO: 24482 - protein, 31 aa, Homo sapiens
MLRAQTLTSGRPTPMFLTPLSSFQSFTQLCS

SEQ ID NO: 24483 - protein, 60 aa, Homo sapiens
IVMVMWNILKPRTHLLCMTNMFCTRHEGTDSTVFLPHSHNISEWISRHIPFGFLHLCSYE

SEQ ID NO: 24484 - protein, 16 aa, Homo sapiens
KSRMVCWQGVLVDWFL

SEQ ID NO: 24485 - protein, 54 aa, Homo sapiens
LDTLCDLYETLTITQAVIFLNTRRKVDWLTEKMHARDFTVSALVRGVLKCLDFH

SEQ ID NO: 24486 - protein, 69 aa, Homo sapiens
KSMRHWEGLGRGSVPLLLRATSWVIPGPGAGLGLTRGLPRGRLGACVTSPPAGCGDYVGPLWPVRSASL

SEQ ID NO: 24487 - protein, 35 aa, Homo sapiens
LSRPAAPLAHSPSGRRAGEQLFGPSRTATQSQRAP

SEQ ID NO: 24488 - protein, 16 aa, Homo sapiens
LETVWWTPERMCGFVL

SEQ ID NO: 24489 - protein, 14 aa, Homo sapiens
VKKMSRQLMCTFSV

SEQ ID NO: 24490 - protein, 9 aa, Homo sapiens
TGPAMRRRP

SEQ ID NO: 24491 - protein, 30 aa, Homo sapiens
VACGSRRLAKSQRSAPAGVSLAWSPHPPGP

SEQ ID NO: 24492 - protein, 35 aa, Homo sapiens
IAAAVAATGRGAAVGDRGRGCRRRSGWLANTWCHM

SEQ ID NO: 24493 - protein, 24 aa, Homo sapiens
TLNEIGYLTKDMFDKIGLGLLQQN

SEQ ID NO: 24494 - protein, 45 aa, Homo sapiens
IQKYLSWWLMQKTLSSSKSFVIVGPENPFATGTDMFCLSGLVKGG

SEQ ID NO: 24495 - protein, 28 aa, Homo sapiens
LCSSPAQYSGGLGGGLKRRALGRRHCSR

SEQ ID NO: 24496 - protein, 37 aa, Homo sapiens
VPAAPPPRPARPVASRPVPSGAASRVLMRVGGSEDIF

SEQ ID NO: 24497 - protein, 36 aa, Homo sapiens
LLEVFMERVVHGGMSIFLKKMSHSLSSWSLMKIKPN

SEQ ID NO: 24498 - protein, 11 aa, Homo sapiens
LSLPELQSRWG

SEQ ID NO: 24499 - protein, 36 aa, Homo sapiens
KKSSLTRSQIKSKGIESGWNSSPFNPGWIFSSLQAM

SEQ ID NO: 24500 - protein, 69 aa, Homo sapiens
LGPPFPPAPQALADRDLRPRVGKKQRPGRRFYLERSKHLCLFGVGNSDLKKWCVVDSVSRHVFSQDFHH

SEQ ID NO: 24501 - protein, 23 aa, Homo sapiens
KKMLKSICRHIGKKRSASRMSVF

SEQ ID NO: 24502 - protein, 24 aa, Homo sapiens
LDPEPRRAWAVGPRGKVPCTRGLR

SEQ ID NO: 24503 - protein, 14 aa, Homo sapiens
ISRPFRIIRLSAEI

SEQ ID NO: 24504 - protein, 17 aa, Homo sapiens
IFISIYTLYEKIQNSKG

SEQ ID NO: 24505 - protein, 43 aa, Homo sapiens
ILGTIFCIDSYTTKEYTSIFIKFIMSFRLHLEWKLNMHILWRL

SEQ ID NO: 24506 - protein, 501 aa, Homo sapiens
LLGSGTIMFEIKKICCIGAGYVGGPTCSVIAHMCPEIRVTVVDVNESRINAWNSPTLPIYEPGLKEVVESCRGKNLFFSTNIDDAIKEADLVFISVNTPTKTYGMGKGRAADLKYIEACARRIVQNSNGYKIVTEKSTVPVRAAESIRRIFDANTKPNLNLQVLSNPEFLAEGTAIKDLKNPDRVLIGGDETPEGQRAVQALCAVYEHWVPREKILTTNTWSSELSKLAANAFLAQRISSINSISALCEATGADVEEVATAIGMDQRIGNKFLKASVGFGGSCFQKDVLNLVYLCEALNLPEVARYWQQVIDMNDYQRRRFASRIIDSLFNTVTDKKIAILGFAFKKDTGDTRESSSIYISKYLMDEGAHLHIYDPKVPREQIVVDLSHPGVSEDDQVSRLVTISKDPYEACDGAHAVVICTEWDMFKELDYERIHKKMLKPAFIFDGRRVLDGLHNELQTIGFQIETIGKKVSSKRIPYAPSGEIPKFSLQDPPNKKPKV

SEQ ID NO: 24507 - protein, 27 aa, Homo sapiens
IRFPFLPPQLAESSRAHRLRAPMRMRW

SEQ ID NO: 24508 - protein, 8 aa, Homo sapiens
LNRGATKE

SEQ ID NO: 24509 - protein, 8 aa, Homo sapiens
MAWAPVPG

SEQ ID NO: 24510 - protein, 49 aa, Homo sapiens
LAHTSTLSLYLSQNDNSRYNFWHGFFFTSSRFWRKWLCSKWRLGRCRTG

SEQ ID NO: 24511 - protein, 857 aa, Homo sapiens
IYLMGMCSRQERIQKDIDVVIQKSRAEKDCLFADFRYSDSTFTFTYVGGPRSVSYSVHVSEDYPDNTYVSSSENDEDVLVTTEPIPVIFHRIATELRKTNDINCCLSIKSKLQKENGEESRQNSTVEEDSEGDNDSEEFYYGGQVNYDGELHKHPQLEADLSAVREIYGPHAVSLREYGAIDDVDIDLHIDVSFLDEEIAVAWEVIRTEPIIVRLHCSLTQYLNGPVPTVDVFQISTKERFGLGHQLKKIMQTFVTQQWKQSKEKSNCLHNKKLSEKKVKSPLHLFSTLRRSPSYPPPGCGKSKSKLKSEQDGISKTHKLLRRTCSSTVKTDDVCVTKSHRTFGRSLSSDPRAEQAMTAIKSHKLLNRPCPAAVKSEECLTLKSHRLLTRSCSGDPRCEHNTNLKPHKLLSRSYSSNLRMEELYGLKNHKLLSKSYSSAPKSSKTELFKEPNAEGRRLSLTSGLIGILTPSSSSSSQLAPNGAKCIPVRDRGFLVQTIEFAEQRIPVLNEYCVVCDEPHVFQNGPMLRPTVCERELCVFAFQTLGVMNEAADEIATGAQVVDLLVSMCRSALESPRKVVIFEPYPSVVDPNDPQMLAFNPRKKNYDRVMKALDSITSIREMTQAPYLEIKKQMDKQDPLAHPLLQWVISSNRSHIVKLPVNRQLKFMHTPHQFLLLSSPPAKESNFRAAKKLFGSTFAFHGSHIENWHSILRNGLVVASNTRLQLHGAMYGSGIYLSPMSSISFGYSGMNKKQKVSAKDEPASSSKSSNTSQSQKKGQQSQFLQSRNLKCIALCEVITSSDLHKHGEIWVVPNTDHVCTRFFFVYEDGQVGDANINTQEGGIHKEILRVIGNQTATG

SEQ ID NO: 24512 - protein, 42 aa, Homo sapiens
RLSASRPSDLPSRKLGSQKIGNSYQHGKPIENSGDWLLVSST

SEQ ID NO: 24513 - protein, 18 aa, Homo sapiens
LSPLRKSNLDIDQKLKMV

SEQ ID NO: 24514 - protein, 27 aa, Homo sapiens
LQDLCQRMKHSSHELTKSKGEFAEILI

SEQ ID NO: 24515 - protein, 13 aa, Homo sapiens
LCKERTCGSSEYM

SEQ ID NO: 24516 - protein, 38 aa, Homo sapiens
TSSGGAALPVEIRGGRQDSLAAVPAAVHWVKNDNQHQP

SEQ ID NO: 24517 - protein, 33 aa, Homo sapiens
VAAEAALSGTCEQRGRQPGGSVRDHVWRTTTKH

SEQ ID NO: 24518 - protein, 37 aa, Homo sapiens
MKLLDLEGKSSFTPLPKVSHRPLQHAFPAGSLYTFRL

SEQ ID NO: 24519 - protein, 22 aa, Homo sapiens
MSFLVILIDLFGFQKDTVIMCV

SEQ ID NO: 24520 - protein, 45 aa, Homo sapiens
LQQRAGLVWWFHRADPAALTGRRRRQRRRKAAHPERHAQRKIRAP

SEQ ID NO: 24521 - protein, 51 aa, Homo sapiens
LSLVMGNIKILCEVQDFRVGWAWGGGMGTVGGMGYLGIILKDYMLCKFLCD

SEQ ID NO: 24522 - protein, 45 aa, Homo sapiens
LPSSLFHSESRSARPHCSPCVAGTLARDRRIAPAAEPTCPSLGCA

SEQ ID NO: 24523 - protein, 82 aa, Homo sapiens
LEPQRAEEEAQRPTAEYCGESQRASASLNSRQKYTRNRRRRVRVGPCAGGGAGAARSGSRLGRVASWTRRCSPRSWTSGSSS

SEQ ID NO: 24524 - protein, 30 aa, Homo sapiens
KPHLFGQPPSLRIGKCSSRGNSLRRKHLYH

SEQ ID NO: 24525 - protein, 56 aa, Homo sapiens
LAGPSRSRHHGFLQSSAGGASTLGLPAARGQGLQCAPLHFPAHSWGQSGAGRSGRG

SEQ ID NO: 24526 - protein, 295 aa, Homo sapiens
VRGPVRPEPGATPRAVLGETRVPVLRLLLGSALVGRLLDSLKRDYAGKPQPPIKSERRNPPSYAMAGKKVLIVYAHQEPKSFNGSLKNVAVDELSRQGCTVTVSDLYAMNLEPRATDKDITGTLSNPEVFNYGVETHEAYKQRSLASDITDEQKKVREADLVIFQFPLYWFSVPAILKGWMDRVLCQGFAFDIPGFYDSGLLQGKLALLSVTTGGTAEMYTKTGVNGDSRYFLWPLQHGTLHFCGFKVLAPQISFAPEIASEEERKGMVAAWSQRLQTIWKEEPIPCTAHWHFGQ

SEQ ID NO: 24527 - protein, 483 aa, Homo sapiens
LGPTAALSSESRASAEQSGRRTPGAGADGTRGMNLEGGGRGGEFGMSAVSCGNGKLRQWLIDQIDSGKYPGLVWENEEKSIFRIPWKHAGKQDYNREEDAALFKAWALFKGKFREGIDKPDPPTWKTRLRCALNKSNDFEELVERSQLDISDPYKVYRIVPEGAKKGAKQLTLEDPQMSMSHPYTMTTPYPSLPAQQVHNYMMPPLDRSWRDYVPDQPHPEIPYQCPMTFGPRGHHWQGPACENGCQVTGTFYACAPPESQAPGVPTEPSIRSAEALAFSDCRLHICLYYREILVKELTTSSPEGCRISHGHTYDASNLDQVLFPYPEDNGQRKNIEKLLSHLERGVVLWMAPDGLYAKRLCQSRIYWDGPLALCNDRPNKLERDQTCKLFDTQQFLSELQAFAHHGRSLPRFQVTLCFGEEFPDPQRQRKLITAHVEPLLARQLYYFAQQNSGHFLRGYDLPEHISNPEDYHRSIRHSSIQE

SEQ ID NO: 24528 - protein, 27 aa, Homo sapiens
LLSVEAKTKLRSPVIWVMVYVKHQRNL

SEQ ID NO: 24529 - protein, 38 aa, Homo sapiens
LQVLDQHPVGTSDHRDATQLGFQPLMSALGSTGSTEGT

SEQ ID NO: 24530 - protein, 54 aa, Homo sapiens
KAGGRRMWMMMEKRKSSWSVLRSSQCQPVMRRMKYPPQNPAEGRKPRVVMFLQP

SEQ ID NO: 24531 - protein, 10 aa, Homo sapiens
MRNLRQVTSP

SEQ ID NO: 24532 - protein, 75 aa, Homo sapiens
LRSSNWDSEPGLFLALARLQEGIRICYQRRPRRSQAGPQRPAPPLPATRSAHRRPAAELAHPSHHSSTCSLEKGR

SEQ ID NO: 24533 - protein, 70 aa, Homo sapiens
LSPVRKKWTPCFIWPARIGLWPAQPRMNGHHAATVYSSYRFLGSTPAEACSVGPPSVLWTWPGVSDLTPA

SEQ ID NO: 24534 - protein, 78 aa, Homo sapiens
RRFLPRTPRGVHLMLVGTQSAQPSLRHCVSRAGPQTRPPLPHPSQGGACVGRTLNPAARPLDGRRRDGWPPCTAPAVS

SEQ ID NO: 24535 - protein, 7 aa, Homo sapiens
MISASAL

SEQ ID NO: 24536 - protein, 857 aa, Homo sapiens
LPASEPDPRRPWSVASARSLPRPPPAARSCLDQDLGLCERIAGPGEVTAAPPGEVTAAPPGEVLESTMAEQVLPQALYLSNMRKAVKIRERTPEDIFKPTNGIIHHFKTMHRYTLEMFRTCQFCPQFREIIHKALIDRNIQATLESQKKLNWCREVRKLVALKTNGDGNCLMHATSQYMWGVQDTDLVLRKALFSTLKETDTRNFKFRWQLESLKSQEFVETGLCYDTRNWNDEWDNLIKMASTDTPMARSGLQYNSLEEIHIFVLCNILRRPIIVISDKMLRSLESGSNFAPLKVGGIYLPLHWPAQECYRYPIVLGYDSHHFVPLVTLKDSGPEIRAVPLVNRDRGRFEDLKVHFLTDPENEMKEKLLKEYLMVIEIPVQGWDHGTTHLINAAKLDEANLPKEINLVDDYFELVQHEYKKWQENSEQGRREGHAQNPMEPSVPQLSLMDVKCETPNCPFFMSVNTQPLCHECSERRQKNQNKLPKLNSKPGPEGLPGMALGASRGEAYEPLAWNPEESTGGPHSAPPTAPSPFLFSETTAMKCRSPGCPFTLNVQHNGFCERCHNARQLHASHAPDHTRHLDPGKCQACLQDVTRTFNGICSTCFKRTTAEASSSLSTSLPPSCHQRSKSDPSRLVRSPSPHSCHRAGNDAPAGCLSQAARTPGDRTGTSKCRKAGCVYFGTPENKGFCTLCFIEYRENKHFAAASGKVSPTASRFQNTIPCLGRECGTLGSTMFEGYCQKCFIEAQNQRFHEAKRTEEQLRSSQRRDVPRTTQSTSRPKCARASCKNILACRSEELCMECQHPNQRMGPGAHRGEPAPEDPPKQRCRAPACDHFGNAKCNGYCNECFQFKQMYG

SEQ ID NO: 24537 - protein, 692 aa, Homo sapiens
IAPINFKVKTVNDLSSQLSPLDLHPSLKMSRQLDDLNMRWKLLQVSVDDRLKQLQEAHRDFGPSSQHFLSTSVQLPWQRSISHNKVPYYINHQTQTTCWDHPKMTELFQSLADLNNVRFSAYRTAIKIRRLQKALCLDLLELSTTNEIFKQHKLNQNDQLLSVPDVINCLTTTYDGLEQMHKDLVNVPLCVDMCLNWLLNVYDTGRTGKIRVQSLKIGLMSLSKGLLEEKYRYLFKEVAGPTEMCDQRQLGLLLHDAIQIPRQLGEVAAFGGSNIEPSVRSCFQQNNNKPEISVKEFIDWMHLEPQSMVWLPVLHRVAAAETAKHQAKCNICKECPIVGFRYRSLKHFNYDVCQSCFFSGRTAKGHKLHYPMVEYCIPTTSGEDVRDFTKVLKNKFRSKKYFAKHPRLGYLPVQTVLEGDNLETPITLISMWPEHYDPSQSPQLFHDDTHSRIEQYATRLAQMERTNGSFLTDSSSTTGSVEDEHALIQQYCQTLGGESPVSQPQSPAQILKSVEREERGELERIIADLEEEQRNLQVEYEQLKDQHLRRGLPVGSPPESIISPHHTSEDSELIAEAKLLRQHKGRLEARMQILEDHNKQLESQLHRLRQLLEQPESDSRINGVSPWASPQHSALSYSLDPDASGPQFHQAAGEDLLAPPHDTSTDLTEVMEQIHSTFPSCCPNVPSRPQAM

SEQ ID NO: 24538 - protein, 42 aa, Homo sapiens
TVETAALVGEAAAAAAEEEEGEAAAAKENAWTEEMSTISTKA

SEQ ID NO: 24539 - protein, 1000 aa, Homo sapiens
TRPAALGSRSSVSPENQPSRAMGTRLPLVLRQLRRPPQPPGPPRRLRVPCRASSGGGGGGGGGREGLLGQRRPQDGQARSSCSPGGRTPAARDSIVREVIQNSKEVLSLLQEKNPAFKPVLAIIQAGDDNLMQEINQNLAEEAGLNITHICLPPDSSEAEIIDEILKINEDTRVHGLALQISENLFSNKVLNALKPEKDVDGVTDINLGKLVRGDAHECFVSPVAKAVIELLEKSVGVNLDGKKILVVGAHGSLEAALQCLFQRKGSMTMSIQWKTRQLQSKLHEADIVVLGSPKPEEIPLTWIQPGTTVLNCSHDFLSGKVGCGSPRIHFGGLIEEDDVILLAAALRIQNMVSSGRRWLREQQHRRWRLHCLKLQPLSPVPSDIEISRGQTPKAVDVLAKEIGLLADEIEIYGKSKAKVRLSVLERLKDQADGKYVLVAGITPTPLGEGKSTVTIGLVQALTAHLNVNSFACLRQPSQGPTFGVKGGAAGGGYAQVIPMEEFNLHLTGDIHAITAANNLLAAAIDTRILHENTQTDKALYNRLVPLVNGVREFSEIQLARLKKLGINKTDPSTLTEEEVSKFARLDIDPSTITWQRVLDTNDRFLRKITIGQGNTEKGHYRQAQFDIAVASEIMAVLALTDSLADMKARLGRMVVASDKSGQPVTADDLGVTGALTVLMKDAIKPNLMQTLEGTPVFVHAGPFANIAHGNSSVLADKIALKLVGEEGFVVTEAGFGADIGMEKFFNIKCRASGLVPNVVVLVATVRALKMHGGGPSVTAGVPLKKEYTEENIQLVADGCCNLQKQIQITQLFGVPVVVALNVFKTDTRAEIDLVCELAKRAGAFDAVPCYHWSVGGKGSVDLARAVREAASKRSRFQFLYDVQVPIVDKIRTIAQAVYGAKDIELSPEAQAKIDRYTQQGFGNLPICMAKTHLSLSHQPDKKGVPRDFILPISDVRASIGAGFIYPLVGTMSTMPGLPTRPCFYDIDLDTETEQVKGLF

SEQ ID NO: 24540 - protein, 11 aa, Homo sapiens
KHLQPNKTSTR

SEQ ID NO: 24541 - protein, 57 aa, Homo sapiens
KPRNCSAQFTQETKGFNMDGLQISRWKRGMARPASYGSTLRRVPGCILCLPNSASWV

SEQ ID NO: 24542 - protein, 16 aa, Homo sapiens
MWRKTTAVSNLVSRAW

SEQ ID NO: 24543 - protein, 6 aa, Homo sapiens
IPASGT

SEQ ID NO: 24544 - protein, 72 aa, Homo sapiens
MGSIEQTTEILLCLSPVEVASLKEGINFFRNKSTGKDYVLYKNKSRLRACKNMCKHQGGLFIKDIEDLAGSC

SEQ ID NO: 24545 - protein, 494 aa, Homo sapiens
LLLELNPPNPWDLQPRSPEELAFGEVQITYLTHACMDLKLGDKRMVFDPWLIGPAFARGWWLLHEPPSDWLERLCQADLIYISHLHSDHLSYPTLKKLAGRRPDIPIYVGNTERPVFWNLNQSGVQLTNINVVPFGIWQQVDKNLRFMILMDGVHPEMDTCIIVEYKGHKILNIVDCTRPNGGRLPMKVALMMSDFAGGASGFPMTFSGGKFTEEWKAQFIKTERKKLLNYKARLVKNLQPRIYCPFAGYFVESHPSDKYIKETNTKNDPNELNNLIKKNSDVITWTPRPGATLDLGRMLKDRTDSKGIIEPPEGTKIYKDSWDFEPYLEILNAALGDEIFLHSSWIKEYFTWAGFKDYNLVVRMIETDEDFNPFPGGYDYLVDFLDLSFPKERPQREHPYEEIHSRVDVIRHVVKNGLLWDELYIGFQTRLQRDPDIYHHLFWNHFQIKLPLTPPNWKSFLMCCEQNGPVILQFSTERTNEPNRNKFSVENKA

SEQ ID NO: 24546 - protein, 16 aa, Homo sapiens
VESVSSFSILFRNSNA

SEQ ID NO: 24547 - protein, 24 aa, Homo sapiens
MSAWCECVNIGGPDAQDPMAVGKM

SEQ ID NO: 24548 - protein, 12 aa, Homo sapiens
IPATPPPPVSPL

SEQ ID NO: 24549 - protein, 7 aa, Homo sapiens
LIELVLC

SEQ ID NO: 24550 - protein, 48 aa, Homo sapiens
LRPTTRTSFSSSTFPRTLGCLACPNLLTGLRNREMLLPFYLTKSSASG

SEQ ID NO: 24551 - protein, 105 aa, Homo sapiens
LDSRELEGTDLISRGWVSPHHSFGGSRDPGNIVFCSVSGDHLPRLGLLGQARTHGPWKSWSRGLNSRHLYRAEHDHIPAAAAGAQPGLHRSRWLRGPCGKHLSVG

SEQ ID NO: 24552 - protein, 27 aa, Homo sapiens
RRDLNSSCPTNSISAFLLTSCENYSSG

SEQ ID NO: 24553 - protein, 24 aa, Homo sapiens
RLGETERTSALKQKSPELRSPRRG

SEQ ID NO: 24554 - protein, 9 aa, Homo sapiens
IETSVFPFC

SEQ ID NO: 24555 - protein, 75 aa, Homo sapiens
TLPPACPRPCCPFSTPTCTATRPPYRIIMVIKFVTLTPGLKTPTVNRLRPLWRPRIRLLCHFLSSVPSEVYTKRE

SEQ ID NO: 24556 - protein, 53 aa, Homo sapiens
RVAVCPLIEARLSWKFQSCNDFCKWSFSVCLEISEYCVLGLICDDLIPNLNFC

SEQ ID NO: 24557 - protein, 146 aa, Homo sapiens
ILARSKALQWTKSYVLPEFPYDVKCMLAEQKCPDHSMRIRIIEFLQADMTKYLEGSLYPSTQQYNDVVNALLQAHPFLDEDGCGFFLWKRALKDRFKYVRRPIEDDEQVIRNKCKFGHRRGQTRKSLADIRFDEIKLVQIKVRLNS

SEQ ID NO: 24558 - protein, 288 aa, Homo sapiens
TSPPSVFGAEIAKTEGLEMADHMMAMNHGRFPDGTNGLHHHPAHRMGMGQFPSPHHHQQQQPQHAFNALMGEHIHYGAGNMNATSGIRHAMGPGTVNGGHPPSALAPAARFNNSQFMGPPVASQGGSLPASMQLQKLNNQYFNHHPYPHNHYMPDLHPAAGHQMNGTNQHFRDCNPKHSGGSSTPGGSGGSSTPGGSGSSSGGGAGSSNSGGGSGSGNMPASVAHVPAAMLPPNVIDTDFIDEEVLMSLVIEMGLDRIKELPELWLGQNEFDFMTDFVCKQQPSRVSC

SEQ ID NO: 24559 - protein, 451 aa, Homo sapiens
TSAGMSRRPCSCALRPPRCSCSASPSAVTAAGRPRPSDSCKEESSTLSVKMKCDFNCNHVHSGLKLVKPDDIGRLVSYTPAYLEGSCKDCIKDYERLSCIGSPIVSPRIVQLETESKRLHNKENQHVQQTLNSTNEIEALETSRLYEDSGYSSFSLQSGLSEHEEGSLLEENFGDSLQSCLLQIQSPDQYPNKNLLPVLHFEKVVCSTLKKNAKRNPKVDREMLKEIIARGNFRLQNIIGRKMGLECVDILSELFRRGLRHVLATILAQLSDMDLINVSKVSTTWKKILEDDKGAFQLYSKAIQRVTENNNKFSPHASTREYVMFRTPLASVQKSAAQTSLKKDAQTKLSNQGDQKGSTYSRHNEFSEVAKTLKKNESLKACIRCNSPAKYDCYLQRATCKREGCGFDYCTKCLCNYHTTKDCSDGKLLKASCKIGPLPGTKKSKKNLRRL

SEQ ID NO: 24560 - protein, 217 aa, Homo sapiens
LLFFAKSEPERQAAAAAEGSATVSAGARTARAREEPPRARALRATPATSSRELCPGDRARVMTTNPKPNKALKVKKEAGENAPVLSDDELVSMSVRELNQHLRGLTKEEVTRLKQRRRTLKNRGYAASCRIKRVTQKEELERQRVELQQEVEKLARENSSMRLELDALRSKYEALQTFARTVARGPVAPSKVATTSVITIVKSTELSSTSVPFSAAS

SEQ ID NO: 24561 - protein, 33 aa, Homo sapiens
IMLRAGRRAPLPSPPSLDSPGPQAHALSASSAA

SEQ ID NO: 24562 - protein, 34 aa, Homo sapiens
LQNPMRLPPSKALARMPTPAAATGCASPATCVFF

SEQ ID NO: 24563 - protein, 17 aa, Homo sapiens
LAPTVAEVGRAEPEAAG

SEQ ID NO: 24564 - protein, 13 aa, Homo sapiens
VAEVGRAEPEAAG

SEQ ID NO: 24565 - protein, 60 aa, Homo sapiens
KEMSTAILDMVEVFTNQIQSFPEHMANVELKKSLDEIQSILESFNDRLDQAEKKLSKLKI

SEQ ID NO: 24566 - protein, 285 aa, Homo sapiens
IADVQIKNEEELEKCPMSLGEEVVPETPCEILYQGMLYSLPQYMIALLKILLAAAPTSKAKTDSINILADVLPEEMPITVLQSMKLGIDVNRHKEIIVKSISTLLLLLLKHFKLNHIYQFEYVSQHLVFANCIPLILKFFNQNILSYITAKNSISVLDYPCCTIQDLPELTTESLEAGDNSQFCWRNLFSCINLLRLLNKLTKWKHSRTMMLVVFKSAPILKRALKVKQAMLQLYVLKLLKLQTKYLGRQWRKSNMKTMSAIYQKVRHRMNDDWAYGNGESSQSS

SEQ ID NO: 24567 - protein, 45 aa, Homo sapiens
IFYTFAEVQSNGIKSLDFGRKVLLTFFFLKGRKRILELHFLKHHS

SEQ ID NO: 24568 - protein, 23 aa, Homo sapiens
IYCDLLMDELYFAKIVREIPPSP

SEQ ID NO: 24569 - protein, 34 aa, Homo sapiens
LQVQMQREPGSRDDKIQPESVEVTPQWRDSSPCV

SEQ ID NO: 24570 - protein, 58 aa, Homo sapiens
MQMFPPSPLFFFLRLLKQNSRRLEHTFVFLRNFSQILLRYIGKKRRATRFWDPRRGTP

SEQ ID NO: 24571 - protein, 11 aa, Homo sapiens
LRPREVMLSCF

SEQ ID NO: 24572 - protein, 113 aa, Homo sapiens
ICQLLSFRRLGGAVATSAFSVSDGVNGGGGWDAAAGLAAGGWVGAGPGDGEGDRRQPLVHAADRLRLHPQPGLPDPSGRRPPGPAARRGEKSSIHFLPNSIPWACHSIWEKSN

SEQ ID NO: 24573 - protein, 11 aa, Homo sapiens
TRFRHGMFSVV

SEQ ID NO: 24574 - protein, 13 aa, Homo sapiens
LPIRRPSTPAARA

SEQ ID NO: 24575 - protein, 745 aa, Homo sapiens
ITSVILASVSVINESENYEALLECVIILNGILYALPESERKLQSSIQDLCVTWWEKGLPAKEDTGKTAFVMLLRRSLETKTGADVCRLWRIHQALYCFDYDLEESGEIKDMLLECFININYIKKEEGRRFLSCLFNWNINFIKMIHGTIKNQLQGLQKSLMVYIAEIYFRAWKKASGKILEAIENDCIQDFMFHGIHLPRRSPVHSKVREVLSYFHHQKKVRQGVEEMLYRLYKPILWRGLKARNSEVRSNAALLFVEAFPIRDPNLHAIEMDSEIQKQFEELYSLLEDPYPMVRSTGILGVCKITSKYWEMMPPTILIDLLKKVTGELAFDTSSADVRCSVFKCLPMILDNKLSHPLLEQLLPALRYSLHDNSEKVRVAFVDMLLKIKAVRAAKFWKICPMEHILVRLETDSRPVSRRLVSLIFNSFLPVNQPEEVWCERCVTLVQMNHAAARRFYQYAHEHTACTNIAKLIHVIRHCLNACIQRAVREPPEDEEEEDGREKENVTVLDKTLSVNDVACMAGLLEIIVILWKSIDRSMENNKEAKLYTINKFASVLPEYLKVFKDDRCKIPLFMLMSFMPASAVPPFSCGVISTLRSREEGAVDKSYCTLLDCLCSWGQVGHILELVDNWLPTEHAQAKSNTASKGRVQIHDTRPVKPELALVYIEYLLTHPKNRECLLSAPRKKLNHLLKALETSKADLESLLQTPGGKPRGFSEAAAPRAFGLHCRLSIHLQHKVCLLLALY

SEQ ID NO: 24576 - protein, 6 aa, Homo sapiens
LAVPEE

SEQ ID NO: 24577 - protein, 85 aa, Homo sapiens
TPLSGRHWRHSLPPPGSPGGGGVRLTAGNLGDPSALPAVAAADPRLRREGRPRCARPEVTRPGPSSLPSTIPLRLRAPASSCESL

SEQ ID NO: 24578 - protein, 101 aa, Homo sapiens
IGGFASGPALPLIPQPAVRNPCRIHETLPIAAGGHFALELTTPEQGRDSPDAGRLFCPFGDTSPPLPGPASLKGSPCSCLDAGFFSGSGKPAASRDDAPQR

SEQ ID NO: 24579 - protein, 39 aa, Homo sapiens
MLFPCTTDRLSDAACLEAALGASGGGGGGGGGGGSSGVL

SEQ ID NO: 24580 - protein, 31 aa, Homo sapiens
RAALAPVATGAARPAKIHGRPSPKRVRGPLS

SEQ ID NO: 24581 - protein, 1286 aa, Homo sapiens
IVTMSLMVSAGRGLGAVWSPTHVQVTVLQARGLRAKGPGGTSDAYAVIQVGKEKYATSVSERSLGAPVWREEATFELPSLLSSGPAAAATLQLTVLHRALLGLDKFLGRAEVDLRDLHRDQGRRKTQWYKLKSKPGKKDKERGEIEVDIQFMRNNMTASMFDLSMKDKSRNPFGKLKDKIKGKNKDSGSDTASAIIPSTTPSVDSDDESVVKDKKKKSKIKTLLSKSNLQKTPLSQSMSVLPTSKPEKVLLRPGDFQSQWDEDDNEDESSSASDVMSHKRTASTDLKQLNQVNFTLPKKEGLSFLGGLRSKNDVLSRSNVCINGNHVYLEQPEAKGEIKDSSPSSSPSPKGFRKKHLFSSTENLAAGSWKEPAEGGGLSSDRQLSESSTKDSLKSMTLPSYRPAPLVSGDLRENMAPANSEATKEAKESKKPESRRSSLLSLMTGKKDVAKGSEGENPLTVPGREKEGMLMGVKPGEDASGPAEDLVRRSEKDTAAVVSRQGSSLNLFEDVQITEPEAEPESKSEPRPPISSPRAPQTRAVKPRLEVSPEAQPTARLPSPTDSPSSLPPLPSSSGQASVPSELGHGADTQSSESPSVFSSLSSPIAAPISTSTPIESWPLVDRGQAKSEGPPLLPKAELQTESLTPVPNSGSSALGSLFKQPSFPANKGTEDSLMGRTRETGTEKNTSSLELEESLPEQPETGRQEEELPRFPCKKQDYSPSSGEAQEVPFALSLSSDGAVSPVGELAAGGDRDLESQAGSLVESKARDAAEEVAPPLPMGASVPSIDSMMRKLEEMGLNLRKDQKKTKKRVSFSEQLFTEEAVAGAALLVEGHSSCPQELNPAWSVAGNASDGEPPESPHAEDSERESVTTPGPATCGAPASPADHLLLPSQEESFSEVPMSEASSAKDTPLFRMEGEDALVTQYQSKASDHEGLLSDPLSDLQLVSDFKSPIMADLNLSLPSIPEVASDDERIDQVEDDGDQVEDDGETAKSSTLDIGALSLGLVVPCPERGKGPSGEADRLVLGEGLCDFRLQAPQASVTAPSEQTTEFGIHKPHLGKSSSLDKQLPGPSGGEEEKPMGNGSPSPPPGTSLDNPVPSPSPSEIFPVTHSFPSSAHSDTHHTSTAESQKKATAEGSAGRVENFGKRKPLLQAWVSPSETHPVSAQPGAGTGSAKHRLHPVKPMNAMATKVANCSLGTATIISENLNNEVMMKKYSPSDPAFAYAQLTHDELIQLVLKQKETISKKEFQVRELEDYIDNLLVRVMEETPNILRIPTQVGKKAGKM

SEQ ID NO: 24582 - protein, 442 aa, Homo sapiens
IQFMRNNMTASMFDLSMKDKSRNPFGKLKDKIKGKNKDSGSDTASAIIPSTTPSVDSDDESVVKDKKKKSKIKTLLSKSNLQKTPLSQSMSVLPTSKPEKVLLRPGDFQSQWDEDDNEDESSSASDVMSHKRTASTDLKQLNQVNFTLPKKEGLSFLGGLRSKNDVLSRSNVCINGNHVYLEQPEAKGEIKDSSPSSSPSPKGFRKKHLFSSTENLAAGSWKEPAEGGGLSSDRQLSESSTKDSLKSMTLPSYRPAPLVSGDLRENMAPANSEATKEAKESKKPESRRSSLLSLMTGKKDVAKGSEGENPLTVPGREKEGMLMGVKPGEDASGPAEDLVRRSEKDTAAVVSRQGSSLNLFEDVQITEPEAEPESKSEPRPPISSPRAPQTRAVKPRLHPVKPMNAMATKVANCSLGTATIISENLNNEVMMKVCPLRSWCVR

SEQ ID NO: 24583 - protein, 59 aa, Homo sapiens
ILLDPSPFPGTVIVTGGGCGCHCTAPTATAAPDLGDHVLPLQKELPFVTRRGRRSTLGP

SEQ ID NO: 24584 - protein, 21 aa, Homo sapiens
KMPDLKDSKTTDLCQHVKHMV

SEQ ID NO: 24585 - protein, 49 aa, Homo sapiens
LRCSISPSAAAATAAHSWCRCRAFTPKSFPQPMAQAALGISAQGNHIPL

SEQ ID NO: 24586 - protein, 13 aa, Homo sapiens
LEMLLITMFMNIP

SEQ ID NO: 24587 - protein, 761 aa, Homo sapiens
LSEAAVRVAAGARWGMAGSRGAGRTAAPSVRPEKRRSEPELEPEPEPEPPLLCTSPLSHSTGSDSGVSDSEESVFSGLEDSGSDSSEDDDEGDEEGEDGALDDEGHSGIKKTTEEQVQASTPCPRTEMASARIGDEYAEDSSDEEDIRNTVGNVPLEWYDDFPHVGYDLDGRRIYKPLRTRDELDQFLDKMDDPDYWRTVQDPMTGRDLRLTDEQVALVRRLQSGQFGDVGFNPYEPAVDFFSGDVMIHPVTNRPADKRSFIPSLVEKEKVSRMVHAIKMGWIQPRRPRDPTPSFYDLWAQEDPNAVLGRHKMHVPAPKLALPGHAESYNPPPEYLLSEEERLAWEQQEPGERKLSFLPRKFPSLRAVPAYGRFIQERFERCLDLYLCPRQRKMRVNVDPEDLIPKLPRPRDLQPFPTCQALVYRGHSDLVRCLSVSPGGQWLVSGSDDGSLRLWEVATARCVRTVPVGGVVKSVAWNPSPAVCLVAAAVEDSVLLLNPALGDRLVAGSTDQLLSAFVPPEEPPLQPARWLEASEEERQVGLRLRICHGKPVTQVTWHGRGDYLAVVLATQGHTQVLIHQLSRRRSQSPFRRSHGQVQRVAFHPARPFLLVASQRSVRLYHLLRQELTKKLMPNCKWVSSLAVHPAGDNVICGSYDSKLVWFDLDLSTKPYRMLRHHKKALRAVAFHPRYPLFASGSDDGSVIVCHGMVYNDLLQNPLLVPVKVLKGHVLTRDLGVLDVIFHPTQPWVFSSGADGTVRLFT

SEQ ID NO: 24588 - protein, 57 aa, Homo sapiens
IDPVLRPLSSFQFRLIFVPLRLLPAPLPPAPAPSPGTRSPPLTERSRPVALRAAVPR

SEQ ID NO: 24589 - protein, 35 aa, Homo sapiens
LCTCFLLLREYLSPPERMGYACVQRTRRCAPASLS

SEQ ID NO: 24590 - protein, 73 aa, Homo sapiens
VPPSWSLLPALFPQITKTWKLRCLLQNVKVFLESPLPHIPWTIPPLSIHPRIMASLLITTNPWIMMLPERSAI

SEQ ID NO: 24591 - protein, 34 aa, Homo sapiens
TRRSEPGDSRSAMAPIGLKAVVGERRGLIRILNP

SEQ ID NO: 24592 - protein, 17 aa, Homo sapiens
KSSPSQTYLTSKTYFAL

SEQ ID NO: 24593 - protein, 44 aa, Homo sapiens
LESLWKRSRCMGTCIIYRQDGCLKTQSQTSRIQLLEALPGLQRR

SEQ ID NO: 24594 - protein, 6 aa, Homo sapiens
VSMERS

SEQ ID NO: 24595 - protein, 29 aa, Homo sapiens
IARLEKRSCHHGCTFTEDQHWECGEDDAV

SEQ ID NO: 24596 - protein, 19 aa, Homo sapiens
MPSLHESEQRNEAPLCGWP

SEQ ID NO: 24597 - protein, 59 aa, Homo sapiens
LAPPCSPAPSCLPESPPPPPPQPWPRVVKAAVLRAPRIAPPEPKVLAPPRPLPPRSPKS

SEQ ID NO: 24598 - protein, 549 aa, Homo sapiens
LREYLGSMVAHDETGGLLPIKRTIRVLDVNNQSFREQEEPSNKRVRPLARVTSLANLISPVRNGAVRRFGQTIQSFTLRGDHRSPASAQKFSSRSTVPTPAKRRSSALWSEMLDITMKESLTTREIRRQEAIYEMSRGEQDLIEDLKLARKAYHDPMLKLSIMSEEELTHIFGDLDSYIPLHEDLLTRIGEATKPDGTVEQIGHILVSWLPRLNAYRGYCSNQLAAKALLDQKKQDPRVQDFLQRCLESPFSRKLDLWSFLDIPRSRLVKYPLLLKEILKHTPKEHPDVQLLEDAILIIQGVLSDINLKKGESECQYYIDKLEYLDEKQRDPRIEASKVLLCHGELRSKSGHKLYIFLFQDILVLTRPVTRNERHSYQVYRQPIPVQELVLEDLQDGDVRMGGSFRGAFSNSEKAKNIFRIRFHDPSPAQSHTLQANDVFHKQQWFNCIRAAIAPFQSAGSPPELQGLPELHEECEGNHPSARKLTAQRRASTVSSVTQVEVDENAYRCGSGMQMAEDSKSLKTHQTQPGIRRARDKALSGGKRKETLV

SEQ ID NO: 24599 - protein, 43 aa, Homo sapiens
LRTPVQRSLARRIAESSPLFTTWSRFILPYPVFGFLSSPSSLC

SEQ ID NO: 24600 - protein, 301 aa, Homo sapiens
ITPKDNNKTLKPAIAEYIVKKAKQRIALQRWQDELNRRKNHKGMIFVENTVDLEGPPSDFYYINEYKPAPGISLVNEATFGCSCTDCFFQKCCPAEAGVLLAYNKNQQIKIPPGTPIYECNSRCQCGPDCPNRIVQKGTQYSLCIFRTSNGRGWGVKTLVKIKRMSFVMEYVGEVITSEEAERRGQFYDNKGITYLFDLDYESDEFTVDAARYGNVSHFVNHSCDPNLQVFNVFIDNLDTRLPRIALFSTRTINAGEELTFDYQMKGSGDISSDSIDHSPAKKRVRTVCKCGAVTCRGYLN

SEQ ID NO: 24601 - protein, 30 aa, Homo sapiens
ISFEVVVCLKRETRHETVMHEQNSGVVWPA

SEQ ID NO: 24602 - protein, 31 aa, Homo sapiens
IISRDLPYPLTNYGRLYQNRENWRRYLWSCV

SEQ ID NO: 24603 - protein, 17 aa, Homo sapiens
VVGTGSHTHSSGRTHLS

SEQ ID NO: 24604 - protein, 35 aa, Homo sapiens
LSPLETVGRTVVASATRGKRLLPSLNWTPRAPESA

SEQ ID NO: 24605 - protein, 23 aa, Homo sapiens
RMQMTIEMRTTRRCCGGAVEVRR

SEQ ID NO: 24606 - protein, 14 aa, Homo sapiens
TRCEITRVIHRLKT

SEQ ID NO: 24607 - protein, 42 aa, Homo sapiens
MSATGQLMTRVAQLKSFPSSTLEVPTMHPSASSSPTCTSQPC

SEQ ID NO: 24608 - protein, 8 aa, Homo sapiens
LADCAVPP

SEQ ID NO: 24609 - protein, 10 aa, Homo sapiens
LAGATRQSRA

SEQ ID NO: 24610 - protein, 22 aa, Homo sapiens
RRMQLKLILWIEKLLELLYKVF

SEQ ID NO: 24611 - protein, 22 aa, Homo sapiens
LRILTIRTHISLQEASWPSQTT

SEQ ID NO: 24612 - protein, 37 aa, Homo sapiens
LLGSCVRACPAMNEEYDVIVLGTGLTVTSQNNTFRCL

SEQ ID NO: 24613 - protein, 344 aa, Homo sapiens
IETILVQSWYPITVATNSREQKKILAKYLLETSGNLDGLEYKLHDFGYRGVSSQETAGIGASAHLVNFKGTDTVAGLALNKKYYGTKDPVPGYSVPAAEHSTITAWGKDHEKDAFEHIVTQFSSVPVSVVSNSYDIYNACEKIWGEDLRHLIVSRSTQAPLIIRPDSGNPLDTVLKVLEILGKKFPVTENSKGYKLLPPYLRVIQGDGVDINTLQEIVEGMKQKMWSIENIAFGSGGGLLQKLTRDLLNCSFKCSYVVTNGLGINVFKDPVADPNKRSKKGRLSLHRTPAGNFVTLEEGKGDLEEYGQDLLHTVFKNGKVTKSYSFDEIRKNAQLNIELEAAHH

SEQ ID NO: 24614 - protein, 11 aa, Homo sapiens
VSPTEGIRGCF

SEQ ID NO: 24615 - protein, 1307 aa, Homo sapiens
KLIPRHGLVNMGRSGKLPSGVSAKLKRWKKGHSSDSNPAICRHRQAARSRFFSRPSGRSDLTVDAVKLHNELQSGSLRLGKSEAPETPMEEEAELVLTEKSSGTFLSGLSDCTNVTFSKVQRFWESNSAAHKEICAVLAAVTEVIRSQGGKETETEYFAALMTTMEAVESPESLAAVAYLLNLVLKRVPSPVLIKKFSDTSKAFMDIMSAQASSGSTSVLRWVLSCLATLLRKQDLEAWGYPVTLQVYHGLLSFTVHPKPKIRKAAQHGVCSVLKGSEFMFEKAPAHHPAAISTAKFCIQEIEKSGGSKEATTTLHMLTLLKDLLPCFPEGLVKSCSETLLRVMTLSHVLVTACAMQAFHSLFHARPGLSTLSAELNAQIITALYDYVPSENDLQPLLAWLKVMEKAHINLVRLQWDLGLGHLPRFFGTAVTCLLSPHSQVLTAATQSLKEILKECVAPHMADIGSVTSSASGPAQSVAKMFRAVEEGLTYKFHAAWSSVLQLLCVFFEACGRQAHPVMRKCLQSLCDLRLSPHFPHTAALDQAVGAAVTSMGPEVVLQAVPLEIDGSEETLDFPRSWLLPVIRDHVQETRLGFFTTYFLPLANTLKSKAMDLAQAGSTVESKIYDTLQWQMWTLLPGFCTRPTDVAISFKGLARTLGMAISERPDLRVTVCQALRTLITKGCQAEADRAEVSRFAKNFLPILFNLYGQPVAAGDTPAPRRAVLETIRTYLTITDTQLVNSLLEKASEKVLDPASSDFTRLSVLDLVVALAPCADEAAISKLYSTIRPYLESKAHGVQKKAYRVLEEVCASPQGPGALFVQSHLEDLKKTLLDSLRSTSSPAKRPRLKCLLHIVRKLSAEHKEFITALIPEVILCTKEVSVGARKNAFALLVEMGHAFLRFGSNQEEALQCYLVLIYPGLVGAVTMVSCSILALTHLLFEFKGLMGTSTVEQLLENVCLLLASRTRDVVKSALGFIKVAVTVMDVAHLAKHVQLVMEAIGKLSDDMRRHFRMKLRNLFTKFIRKFGFELVKRLLPEEYHRVLVNIRKAEARAKRHRALSQAAVEEEEEEEEEEEPAQGKGDSIEEILADSEDEEDNEEEERSRGKEQRKLARQRSRAWLKEGGGDEPLNFLDPKVAQRVLATQPGPGRGRKKDHGFKVSADGRLIIREEADGNKMEEEEGAKGEDEEMADPMEDVIIRNKKHQKLKHQKEAEEEELEIPPQYQAGGSGIHRPVAKKAMPGAEYKAKKAKGDVKKKGRPDPYAYIPLNRSKLNRRKKMKLQGQFKGLVKAARRGSQVGHKNRRKDRRP

SEQ ID NO: 24616 - protein, 15 aa, Homo sapiens
MQPSCQPPALFLPCL

SEQ ID NO: 24617 - protein, 16 aa, Homo sapiens
MPSAPSTLTWNSWASS

SEQ ID NO: 24618 - protein, 456 aa, Homo sapiens
LPVASKAPGTMAQALGEDLVQPPELQDDSSSLGSDSELSGPGPYRQADRYGFIGGSSAEPGPGHPPADLIRQREMKWVEMTSHWEKTMSRRYKKVKMQCRKGIPSALRARCWPLLCGAHVCQKNSPGTYQELAEAPGDPQWMETIGRDLHRQFPLHEMFVSPQGHGQQGLLQVLKAYTLYRPEQGYCQAQGPVAAVLLMHLPPEEAFWCLVQICEVYLPGYYGPHMEAVRLDAEVFMALLRRLLPHVHKHLQQVGVGPLLYLPEWFLCLFARSLPFPTVLRVWDAFLSEGARVLFRVGLTLVRLALGTAEQRGACPGLLETLGALRAIPPAQLQEEAFMSQVHSVVLSERDLQREIKAQLAQLPDSAPGPPPRPQVRLAGAQAIFEAQQLAGVRRGAKPEVPRIVVQPPEEPRPPRRKPQTRGKTFHGLLTRARGPPIEGPPRPQRGSTSFLDTRF

SEQ ID NO: 24619 - protein, 29 aa, Homo sapiens
LRFTTLKNLPIPILSPCSNKSHYGDLETL

SEQ ID NO: 24620 - protein, 39 aa, Homo sapiens
MQQKIFKEMTDGCLSTTDLFWTVKTKSLMYCSWETPWCS

SEQ ID NO: 24621 - protein, 134 aa, Homo sapiens
LAPVASPGSVRVPTLGKLGAPPPLPPPPAWLWVPEPPPLAQPDSLLLPEPSGSGSFPGDGWPLSHGSVRPPQSARHGCERGAVQQSHPPEEPPTAPRHHQAWIGAGRAPLHGVPQSPRTKSLGIHGRKKCSGSM

SEQ ID NO: 24622 - protein, 153 aa, Homo sapiens
KKMSIPFSNTHYRIPQGFGNLLEGLTREILREQPDNIPAFAAAYFESLLEKREKTNFDPAEWGSKVEDRFYNNHAFEEQEPPEKSDPKQEESQISGKEEETSVTILDSSEEDKEKEEVAAVKIQAAFRGHIAREEAKKMKTNSLQNEEKEENK

SEQ ID NO: 24623 - protein, 47 aa, Homo sapiens
VLGWSVEEPSRVSAWGRVRAGPAGRWRSGGRWWMAQPWKAEVKVTSP

SEQ ID NO: 24624 - protein, 40 aa, Homo sapiens
LTPSFEISMTMMSLFGAPRAGFIKLNMQWKLLNKVQPQLV

SEQ ID NO: 24625 - protein, 42 aa, Homo sapiens
IRAQELRFSTCSRGAIGPPLPAASIFILQDPENHPLMVFAQA

SEQ ID NO: 24626 - protein, 88 aa, Homo sapiens
LAQVNSTSRRRPRPRVCILGWTSWGFGPSPVGGSRSAAWAQPTPRRRPWQAPWTWTRAARWRSCSAGASKPSMTPGRCGTRSWCACSS

SEQ ID NO: 24627 - protein, 619 aa, Homo sapiens
LGPAHPAPAAMAGTLDLDKGCTVEELLRGCIEAFDDSGKVRDPQLVRMFLMMHPWYIPSSQLAAKLLHIYQQSRKDNSNSLQVKTCHLVRYWISAFPAEFDLNPELAEQIKELKALLDQEGNRRHSSLIDIDSVPTYKWKRQVTQRNPVGQKKRKMSLLFDHLEPMELAEHLTYLEYRSFCKILFQDYHSFVTHGCTVDNPVLERFISLFNSVSQWVQLMILSKPTAPQRALVITHFVHVAEKLLQLQNFNTLMAVVGGLSHSSISRLKETHSHVSPETIKLWEGLTELVTATGNYGNYRRRLAACVGFRFPILGVHLKDLVALQLALPDWLDPARTRLNGAKMKQLFSILEELAMVTSLRPPVQANPDLLSLLTVSLDQYQTEDELYQLSLQREPRSKSSPTSPTSCTPPPRPPVLEEWTSAAKPKLDQALVVEHIEKMVESVFRNFDVDGDGHISQEEFQIIRGNFPYLSAFGDLDQNQDGCISREEMVSYFLRSSSVLGGRMGFVHNFQESNSLRPVACRHCKALILGIYKQGLKCRACGVNCHKQCKDRLSVECRRRAQSVSLEGSAPSPSPMHSHHHRAFSFSLPRPGRRGSRPPEIREEEVQTVEDGVFDIHL

SEQ ID NO: 24628 - protein, 24 aa, Homo sapiens
RTAWAPALSPLSCCCCCSYCWPLA

SEQ ID NO: 24629 - protein, 55 aa, Homo sapiens
LPFLPEKKTALGRDCGASKSPAVGISRIWNRVHFLTFEYSTQGFLEKNLVPEELD

SEQ ID NO: 24630 - protein, 19 aa, Homo sapiens
IEHLLRDSFKTTAMNRRWG

SEQ ID NO: 24631 - protein, 8 aa, Homo sapiens
LKSSMAAS

SEQ ID NO: 24632 - protein, 6 aa, Homo sapiens
MAVPWG

SEQ ID NO: 24633 - protein, 40 aa, Homo sapiens
MWMFPFLKWKVTSRAQKLTSRAQKWTLTHLMLMFMAQTGT

SEQ ID NO: 24634 - protein, 179 aa, Homo sapiens
TAAALRVSAPDPPPPHPARLCRLFQRPSLPSGRRCRCRRRRRHRARFRPRPPSAVQGPSVSAPGPRLPASPGPGPGTMSEKSVEAAAELSAKDLKEKKEKVEEKASRKERKKEVVEEEENGAEEEEEETAEDGEEEDEGEEEDEEEEEEDDEGPALKRAAEEEDEADPKRQKTENGASA

SEQ ID NO: 24635 - protein, 38 aa, Homo sapiens
ISSYSTFRFFNLQLSFNNSTLFFLKKYTSCLLYFALGT

SEQ ID NO: 24636 - protein, 56 aa, Homo sapiens
LYPAPWRPPVSLPQGGIRRLEAPRGGKRLALPCPTPHHDPPAAAPSAGLSARVLLL

SEQ ID NO: 24637 - protein, 66 aa, Homo sapiens
INALMASPRRESLGMVFSTVKTFEPPERLTPAPLRSQLLGRLRCEDYLSSEVPLHSSLGYRGKPCL

SEQ ID NO: 24638 - protein, 68 aa, Homo sapiens
IFSESGPGSVQLLSRPGSATVPPPDVLLPLARPSQRPQPSREGAPGRKDPPVCRRPPFSWSPSPSSWW

SEQ ID NO: 24639 - protein, 1012 aa, Homo sapiens
LPLTNNKMMSDASDMLAAALEQMDGIIAGSKALEYSNGIFDCQSPTSPFMGSLRALHLVEDLRGLLEMMETDEKEGLRCQIPDSTAETLVEWLQSQMTNGHLPGNGDVYQERLARLENDKESLVLQVSVLTDQVEAQGEKIRDLEFCLEEHREKVNATEEMLQQELLSRTSLETQKLDLMAEISNLKLKLTAVEKDRLDYEDKFRDTEGLIQEINDLRLKVSEMDSERLQYEKKLKSTKDELASLKEQLEEKESEVKRLQEKLVCKMKGEGVEIVDRDENFKKKLKEKNIEVQKMKKAVESLMAANEEKDRKIEDLRQCLNRYKKMQDTVVLAQGKKGKDGEYEELLNSSSISSLLDAQGFSDLEKSPSPTPVMGSPSCDPFNTSVPEEFHTTILQVSIPSLLPATVSMETSEKSKLTPKPETSFEENDGNIILGATVDTQLCDKLLTSSLQKSSSLGNLKKETSDGEKETIQKTSEDRAPAESRPFGTLPPRPPGQDTSMDDNPFGTRKVRSSFGRGFFKIKSNKRTASAPNLDRKRSASAPTLAETEKETAEHLDLAGASSRPKDSQRNSPFQIPPPSPDSKKKSRGIMKLFGKLRRSQSTTFNPDDMSEPEFKRGGTRATAGPRLGWSRDLGQSNSDLDMPFAKWTKEQVCNWLMEQGLGSYLNSGKHWIASGQTLLQASQQDLEKELGIKHSLHRKKLQLALQALGSEEETNHGKLDFNWVTRWLDDIGLPQYKTQFDEGRVDGRMLHYMTVDDLLSLKVVSVLHHLSIKRAIQVLRINNFEPNCLRRRPSDENTIAPSEVQKWTNHRVMEWLRSVDLAEYAPNLRGSGVHGGLMVLEPRFNVETMAQLLNIPPNKTLLRRHLATHFNLLIGAEAQHQKRDAMELPDYVLLTATAKVKPKKLAFSNFGNLRKKKQEDGEEYVCPMELGQASGSASKKGFKPGLDMRLYEEDDLDRLEQMEDSEGTVRQIGAFSEGINNLTHMLKEDDMFKDFAARSPSASITDEDSNV

SEQ ID NO: 24640 - protein, 17 aa, Homo sapiens
ITLMPQRIERLPLRPCR

SEQ ID NO: 24641 - protein, 438 aa, Homo sapiens
LCALGVMILLRASEVRQLLHNKFVVILGDSVHRAVYKDLVLLLQKDRLLTPGQLRARGELNFEQDELVDGGQRGHMHNGLNYREVREFRSDHHLVRFYFLTRVYSDYLQTILKELQSGEHAPDLVIMNSCLWDISRYGPNSWRSYLENLENLFQCLGQVLPESCLLVWNTAMPVGEEVTGGFLPPKLRRQKATFLKNEVVKANFHSATEARKHNFDVLDLHFHFRHARENLHWDGVHWNGRVHRCLSQLLLAHVADAWGVELPHRHPVGEWIKKKKPGPRVEGPPQANRNHPALPLSPPLPSPTYRPLLGFPPQRLPLLPLLSPQPPPPILHHQGMPRFPQGPPDACFSSDHTFQSDQFYCHSDVPSSAHAGFFVEDNFMVGPQLPMPFFPTPRYQRPAPVVHRGFGRYRPRGPYTPWGQRPRPSKRRAPANPEPRPQ

SEQ ID NO: 24642 - protein, 47 aa, Homo sapiens
MSWWTEASGATCTTALTTVRSASSAPTTIWYVFTSSPACTPITSRPS

SEQ ID NO: 24643 - protein, 33 aa, Homo sapiens
LEISELPILRPSSGERVPGSQESWALPLTSWRP

SEQ ID NO: 24644 - protein, 10 aa, Homo sapiens
LASLMWPRPT

SEQ ID NO: 24645 - protein, 64 aa, Homo sapiens
IAAPAVADATDPAAGGLGTERPLGLGAARGARRVAAVSKTSALSALVYKLKWRKFRWPTWILTS

SEQ ID NO: 24646 - protein, 68 aa, Homo sapiens
KEFGSVGRCNVHRHFQGNSKQSPFPFAFPQILSVYIKPWVHIVVVIEGNWLNSTLVYGTFCGHLRKTS

SEQ ID NO: 24647 - protein, 24 aa, Homo sapiens
MSSSFSNSCLSGGQTSKATKNERP

SEQ ID NO: 24648 - protein, 56 aa, Homo sapiens
LFKMPQVKHQRRNLRDPLPNRSLIKQRPPRKWQSPTLASFQLGSRLLTTPPCPTRK

SEQ ID NO: 24649 - protein, 47 aa, Homo sapiens
VLASCALPSRWRALHSQAYQQGSNWRVLNMPRTQIPALLLLVLHGHL

SEQ ID NO: 24650 - protein, 23 aa, Homo sapiens
MMPPVPISQHVMKGPSKFLSCVL

SEQ ID NO: 24651 - protein, 10 aa, Homo sapiens
LFLLVWYVHG

SEQ ID NO: 24652 - protein, 49 aa, Homo sapiens
MFTAEKMVRRGKEEVRRKKQGNDPACDGSADTIQIGKLVHLILCPPPRN

SEQ ID NO: 24653 - protein, 41 aa, Homo sapiens
MDTMMLNVRNLFEQLVRRVEILSEGNEVRTTDSADSRDAHV

SEQ ID NO: 24654 - protein, 31 aa, Homo sapiens
LKPSFRVDIPTSRTVRILKTTQQKVKKWKIV

SEQ ID NO: 24655 - protein, 17 aa, Homo sapiens
LDLISLIQELLISTSLA

SEQ ID NO: 24656 - protein, 34 aa, Homo sapiens
LSISRTASVLLHGRRFWSTAIARLQENTLCGGLS

SEQ ID NO: 24657 - protein, 58 aa, Homo sapiens
VLASSARSGQAAVGAAGARTARGCCCCPRPARLETERPSQAAAPLMLGGCWRVAAAKR

SEQ ID NO: 24658 - protein, 376 aa, Homo sapiens
LSHCLRSSGRLAPHTSRRKEQSELDQDLDDVEEVEEEETGEETKLKARQLTVQMMQNPQILAALQERLDGLVETPTGYIESLPRVVKRRVNALKNLQVKCAQIEAKFYEEVHDLERKYAVLYQPLFDKEELKEKAKIEDEKKDEEKEDPKGIPEFWLTVFKNVDLLSDMVQEHDEPILKHLKDIKVKFSDAGQPMSFVLEFHFEPNEYFTNEVLTKTYRMRSEPDDSDPFSFDGPEIMGCTGCQIDWKKGKNVTLKTIKKKQKHKGRGTVRTVTKTVSNDSFFNFFAPPEVPESGDLDDDAEAILAADFEIGHFLRERIIPRSVLYFTGEAIEDDDDDYDEEGEEADEEGEEEGDEENDPDYDPKKDQNPAECKQQ

SEQ ID NO: 24659 - protein, 6 aa, Homo sapiens
IPSHYA

SEQ ID NO: 24660 - protein, 50 aa, Homo sapiens
LQELLTNRLSMVLHSRINCTSVCAKSTRHWRNSRNNTWYRHMDLSGKRSR

SEQ ID NO: 24661 - protein, 19 aa, Homo sapiens
LSHALLSTVVPCLCNSSCC

SEQ ID NO: 24662 - protein, 29 aa, Homo sapiens
LEAAAVGGFARLCSGDFGGGASGTSARTR

SEQ ID NO: 24663 - protein, 213 aa, Homo sapiens
VAMEEPPVREEEEEEGEEDEERDEVGPEGALGKSPFQLTAEDVYDISYLLGRELMALGSDPRVTQLQFKVVRVLEMLEALVNEGSLALEELKMERDHLRKEVEGLRRQSPPASGEVNLGPNKMVVDLTDPNRPRFTLQELRDVLQERNKLKSQLLVVQEELQCYKSGLIPPREGPGGRREKDAVVTSAKNAGRNKEEKTIIKKLFFFRSGKQT

SEQ ID NO: 24664 - protein, 40 aa, Homo sapiens
LEELDSSRWESASLSGTLDDLQSGWRSHGGLLEVTAKEIL

SEQ ID NO: 24665 - protein, 10 aa, Homo sapiens
MRHPSFLPMP

SEQ ID NO: 24666 - protein, 6 aa, Homo sapiens
MFYFFP

SEQ ID NO: 24667 - protein, 6 aa, Homo sapiens
MKVLPN

SEQ ID NO: 24668 - protein, 8 aa, Homo sapiens
KVSFVVLS

SEQ ID NO: 24669 - protein, 122 aa, Homo sapiens
VTAVGCPRPLLPSRVKLKIPFGNKLLDAVCLVPNKSLTYGIILTHGASGDMNLPHLMSLASHLASHGFFCLRFTCKGLNIVHRIKAYKSVLNYLKTSGEYKLAGVFLGELVGESGTENASSP

SEQ ID NO: 24670 - protein, 43 aa, Homo sapiens
LECSGVIMAQLLGSSDPPASASGVAAGTAGTCHHAWLKHKVFS

SEQ ID NO: 24671 - protein, 26 aa, Homo sapiens
IISLSRPCYAVYLGVLYVLLPMPSLK

SEQ ID NO: 24672 - protein, 8 aa, Homo sapiens
MSCCRCLH

SEQ ID NO: 24673 - protein, 44 aa, Homo sapiens
LGCGVIPVCLLPAFLGFFRRRGASLRNSRPLRATALAVSFASSS

SEQ ID NO: 24674 - protein, 66 aa, Homo sapiens
MWVIILKIAFRFYLLDCLFSTNFKPATTCVWFCPTSSGVGECTVMVIVAPVAILLSSPLSHFGVVY

SEQ ID NO: 24675 - protein, 25 aa, Homo sapiens
RSTTPSQTTDLSGSQPPKTPSGRKY

SEQ ID NO: 24676 - protein, 110 aa, Homo sapiens
VWSLQPGPSPGRNTSTFAKDSLIHHHGTQKKKMQKRRLKLWPTQGGCKLFEIFLVEKWGSKFPPLNLGRPSDCLTNRNSMEATLYRFLRLSLKRLAVPTSCHLGIIVLET

SEQ ID NO: 24677 - protein, 158 aa, Homo sapiens
LAPPLTALLLPAWEKAGEGEILCAPSGERLCQLPHSNVEVQESEWRLTEAKGPTMGKESGWDSGRAAVAAVVGGVVAVGTVLVALSAMGFTSVGIAASSIAAKMMSTAAIANGGGVAAGSLVAILQSVGAAGLSVTSKVIGGFAGTALGAWLGSPPSS

SEQ ID NO: 24678 - protein, 46 aa, Homo sapiens
VLVQNVDIKLKILAYGHRKCIFGFVFLSLASNLGFWLRRLLNNDLS

SEQ ID NO: 24679 - protein, 28 aa, Homo sapiens
RLRKQAEKNVEKKIDKYTEVFKTHGLLV

SEQ ID NO: 24680 - protein, 65 aa, Homo sapiens
KLVGASASRGGKEPVRGPGLPARAPRHVHRLGREVAIAERQEGRGGPGRRPGGGAPLGPARTGFI

SEQ ID NO: 24681 - protein, 31 aa, Homo sapiens
LLLSVTSPSPSPLPLPAAAAVAAPWAVGNER

SEQ ID NO: 24682 - protein, 1132 aa, Homo sapiens
KENMPATRKPMRYGHTEGHTEVCFDDSGSFIVTCGSDGDVRIWEDLDDDDPKFINVGEKAYSCALKSGKLVTAVSNNTIQVHTFPEGVPDGILTRFTTNANHVVFNGDGTKIAAGSSDFLVKIVDVMDSSQQKTFRGHDAPVLSLSFDPKDIFLASASCDGSVRVWQISDQTCAISWPLLQKCNDVINAKSICRLAWQPKSGKLLAIPVEKSVKLYRRESWSHQFDLSDNFISQTLNIVTWSPCGQYLAAGSINGLIIVWNVETKDCMERVKHEKGYAICGLAWHPTCGRISYTDAEGNLGLLENVCDPSGKTSSSKVSSRVEKDYNDLFDGDDMSNAGDFLNDNAVEIPSFSKGIINDDEDDEDLMMASGRPRQRSHILEDDENSVDISMLKTGSSLLKEEEEDGQEGSIHNLPLVTSQRPFYDGPMPTPRQKPFQSGSTPLHLTHRFMVWNSIGIIRCYNDEQDNAIDVEFHDTSIHHATHLSNTLNYTIADLSHEAILLACESTDELASKLHCLHFSSWDSSKEWIIDLPQNEDIEAICLGQGWAAAATSALLLRLFTIGGVQKEVFSLAGPVVSMAGHGEQLFIVYHRGTGFDGDQCLGVQLLELGKKKKQILHGDPLPLTRKSYLAWIGFSAEGTPCYVDSEGIVRMLNRGLGNTWTPICNTREHCKGKSDHYWVVGIHENPQQLRCIPCKGSRFPPTLPRPAVAILSFKLPYCQIATEKGQMEEQFWRSVIFHNHLDYLAKNGYEYEESTKNQATKEQQELLMKMLALSCKLEREFRCVELADLMTQNAVNLAIKYASRSRKLILAQKLSELAVEKAAELTATQVEEEEEEEDFRKKLNAGYSNTATEWSQPRFRNQVEEDAEDSGEADDEEKPEIHKPGQNSFSKSTNSSDVSAKSGAVTFSSQGRVNPFKVSASSKEPAMSMNSARSTNILDNMGKSSKKSTALSRTTNNEKSPIIKPLIPKPKPKQASAASYFQKRNSQTNKTEEVKEENLKNVLSETPAICPPQNTENQRPKTGFQMWLEENRSNILSDNPDFSDEADIIKEGMIRFRVLSTEERKVWANKAKGETASEGTEAKKRKRVVDESDETENQEEKAKENLNLSKKQKPLDFSTNQKLSAFAFKQE

SEQ ID NO: 24683 - protein, 19 aa, Homo sapiens
VAQDVFITFCQSTQEGYKY

SEQ ID NO: 24684 - protein, 417 aa, Homo sapiens
RRKMQTFLKGKRVGYWLSEKKIKKLNFQAFAELCRKRGMEVVQLNLSRPIEEQGPLDVIIHKLTDVILEADQNDSQSLELVHRFQEYIDAHPETIVLDPLPAIRTLLDRSKSYELIRKIEAYMEDDRICSPPFMELTSLCGDDTMRLLEKNGLTFPFICKTRVAHGTNSHEMAIVFNQEGLNAIQPPCVVQNFINHNAVLYKVFVVGESYTVVQRPSLKNFSAGTSDRESIFFNSHNVSKPESSSVLTELDKIEGVFERPSDEVIRELSRALRQALGVSLFGIDIIINNQTGQHAVIDINAFPGYEGVSEFFTDLLNHIATVLQGQSTAMAATGDVALLRHSKLLAEPAGGLVGERTCSASPGCCGSMMGQDAPWKAEADAGGTAKLPHQRLGCNAGVSPSFQQHCVASLATKASSQ

SEQ ID NO: 24685 - protein, 55 aa, Homo sapiens
LFQSLTGFSDLLFPPPHWVSVLEARVRGGGGWPRRSALGAASVPLGRRSTACTAA

SEQ ID NO: 24686 - protein, 38 aa, Homo sapiens
LPSVTSGHLCSVFHNLVLTRLLNKSSDLRPAVNVVPER

SEQ ID NO: 24687 - protein, 9 aa, Homo sapiens
RTMRLIGTI

SEQ ID NO: 24688 - protein, 24 aa, Homo sapiens
TLVGLLWSTLWTEKHRGYRTQLLP

SEQ ID NO: 24689 - protein, 1086 aa, Homo sapiens
LVASVAPRAGCGRKPRRSVAQRKGLQQDEDLSQECRMAAVKKEGGALSEAMSLEGDEWELSKENVQPLRQGRIMSTLQGALAQESACNNTLQQQKRAFEYEIRFYTGNDPLDVWDRYISWTEQNYPQGGKESNMSTLLERAVEALQGEKRYYSDPRFLNLWLKLGRLCNEPLDMYSYLHNQGIGVSLAQFYISWAEEYEARENFRKADAIFQEGIQQKAEPLERLQSQHRQFQARVSRQTLLALEKEEEEEVFESSVPQRSTLAELKSKGKKTARAPIIRVGGALKAPSQNRGLQNPFPQQMQNNSRITVFDENADEASTAELSKPTVQPWIAPPMPRAKENELQAGPWNTGRSLEHRPRGNTASLIAVPAVLPSFTPYVEETARQPVMTPCKIEPSINHILSTRKPGKEEGDPLQRVQSHQQASEEKKEKMMYCKEKIYAGVGEFSFEEIRAEVFRKKLKEQREAELLTSAEKRAEMQKQIEEMEKKLKEIQTTQQERTGDQQEETMPTKETTKLQIASESQKIPGMTLSSSVCQVNCCARETSLAENIWQEQPHSKGPSVPFSIFDEFLLSEKKNKSPPADPPRVLAQRRPLAVLKTSESITSNEDVSPDVCDEFTGIEPLSEDAIITGFRNVTICPNPEDTCDFARAARFVSTPFHEIMSLKDLPSDPERLLPEEDLDVKTSEDQQTACGTIYSQTLSIKKLSPIIEDSREATHSSGFSGSSASVASTSSIKCLQIPEKLELTNETSENPTQSPWCSQYRRQLLKSLPELSASAELCIEDRPMPKLEIEKEIELGNEDYCIKREYLICEDYKLFWVAPRNSAELTVIKVSSQPVPWDFYINLKLKERLNEDFDHFCSCYQYQDGCIVWHQYINCFTLQDLLQHSEYITHEITVLIIYNLLTIVEMLHKAEIVHGDLSPRCLILRNRIHDPYDCNKNNQALKIVDFSYSVDLRVQLDVFTLSGFRTVQILEGQKILANCSSPYQVDLFGIADLAHLLLFKEHLQVFWDGSFWKLSQNISELKDGELWNKFFVRILNANDEATVSVLGELAAEMNGVFDTTFQSHLNKALWKVGKLTSPGALLFQ

SEQ ID NO: 24690 - protein, 2384 aa, Homo sapiens
VSGLLEAAVCFRSKETQSVWTPNKSAQNLSRRFAAAEKFSSKMDGVSSEANEENDNIERPVRRRHSSILKPPRSPLQDLRGGNERVQESNALRNKKNSRRVSFADTIKVFQTESHMKIVRKSEMEGCSAMVPSQLQLLPPGFKRFSCLSLPETETGENLLLIQNKKLEDNYCEITGMNTLLSAPIHTQMQQKEFSIIEHTRERKHANDQTVIFSDENQMDLTSSHTVMITKGLLDNPISEKSTKIDTTSFLANLKLHTEDSRMKKEVNFSVDQNTSSENKIDFNDFIKRLKTGKCSAFPDVPDKENFEIPIYSKEPNSASSTHQMHVSLKEDENNSNITRLFREKDDGMNFTQCHTANIQTLIPTSSETNSRESKGNDITIYGNDFMDLTFNHTLQILPATGNFSEIENQTQNAMDVTTGYGTKASGNKTVFKSKQNTAFQDLSINSADKIHITRSHIMGAETHIVSQTCNQDARILAMTPESIYSNPSIQGCKTVFYSSCNDAMEMTKCLSNMREEKNLLKHDSNYAKMYCNPDAMSSLTEKTIYSGEENMDITKSHTVAIDNQIFKQDQSNVQIAAAPTPEKEMMLQNLMTTSEDGKMNVNCNSVPHVSKERIQQSLSNPLSISLTDRKTELLSGENMDLTESHTSNLGSQVPLAAYNLAPESTSESHSQSKSSSDECEEITKSRNEPFQRSDIIAKNSLTDTWNKDKDWVLKILPYLDKDSPQSADCNQEIATSHNIVYCGGVLDKQITNRNTVSWEQSLFSTTKPLFSSGQFSMKNHDTAISSHTVKSVLGQNSKLAEPLRKSLSNPTPDYCHDKMIICSEEEQNMDLTKSHTVVIGFGPSELQELGKTNLEHTTGQLTTMNRQIAVKVEKCGKSPIEKSGVLKSNCIMDVLEDESVQKPKFPKEKQNVKIWGRKSVGGPKIDKTIVFSEDDKNDMDITKSYTIEINHRPLLEKRDCHLVPLAGTSETILYTCRQDDMEITRSHTTALECKTVSPDEITTRPMDKTVVFVDNHVELEMTESHTVFIDYQEKERTDRPNFELSQRKSLGTPTVICTPTEESVFFPGNGESDRLVANDSQLTPLEEWSNNRGPVEVADNMELSKSATCKNIKDVQSPGFLNEPLSSKSQRRKSLKLKNDKTIVFSENHKNDMDITQSCMVEIDNESALEDKEDFHLAGASKTILYSCGQDDMEITRSHTTALECKTLLPNEIAIRPMDKTVLFTDNYSDLEVTDSHTVFIDCQATEKILEENPKFGIGKGKNLGVSFPKDNSCVQEIAEKQALAVGNKIVLHTEQKQQLFAATNRTTNEIIKFHSAAMDEKVIGKVVDQACTLEKAQVESCQLNNRDRRNVDFTSSHATAVCGSSDNYSCLPNVISCTDNLEGSAMLLCDKDEEKANYCPVQNDLAYANDFASEYYLESEGQPLSAPCPLLEKEEVIQTSTKGQLDCVITLHKDQDLIKDPRNLLANQTLVYSQDLGEMTKLNSKRVSFKLPKDQMKVYVDDIYVIPQPHFSTDQPPLPKKGQSSINKEEVILSKAGNKSLNIIENSSAPICENKPKILNSEEWFAAACKKELKENIQTTNYNTALDFHSNSDVTKQVIQTHVNAGEAPDPVITSNVPCFHSIKPNLNNLNGKTGEFLAFQTVHLPPLPEQLLELGNKAHNDMHIVQATEIHNINIISSNAKDSRDEENKKSHNGAETTSLPPKTVFKDKVRRCSLGIFLPRLPNKRNCSVTGIDDLEQIPADTTDINHLETQPVSSKDSGIGSVAGKLNLSPSQYINEENLPVYPDEINSSDSINIETEEKALIETYQKEISPYENKMGKTCNSQKRTWVQEEEDIHKEKKIRKNEIKFSDTTQDREIFDHHTEEDIDKSANSVLIKNLSRTPSSCSSSLDSIKADGTSLDFSTYRSSQMESQFLRDTICEESLREKLQDGRITIREFFILLQVHILIQKPRQSNLPGNFTVNTPPTPEDLMLSQYVYRPKIQIYREDCEARRQKIEELKLSASNQDKLLVDINKNLWEKMRHCSDKELKAFGIYLNKIKSCFTKMTKVFTHQGKVALYGKLVQSAQNEREKLQIKIDEMDKILKKIDNCLTEMETETKNLEDEEKNNPVEEWDSEMRAAEKELEQLKTEEEELQRNLLELEVQKEQTLAQIDFMQKQRNRTEELLDQLSLSEWDVVEWSDDQAVFTFVYDTIQLTITFEESVVGFPFLDKRYRKIVDVNFQSLLDEDQAPPSSLLVHKLIFQYVEEKESWKKTCTTQHQLPKMLEEFSLVVHHCRLLGEEIEYLKRWGPNYNLMNIDINNNELRLLFSSSAAFAKFEITLFLSAYYPSVPLPSTIQNHVGNTSQDDIATILSKVPLENNYLKNVVKQIYQDLFQDCHFYH

SEQ ID NO: 24691 - protein, 32 aa, Homo sapiens
LRKICRGGLPRQKSFLQKWMGCLQRLMKKMTI

SEQ ID NO: 24692 - protein, 37 aa, Homo sapiens
VERKPGALGAVRVGRVPRPRGEVGARGLLERGALRTE

SEQ ID NO: 24693 - protein, 95 aa, Homo sapiens
LSPSLLAPLLPEELPARRWVLGPPRYCGTKSSRRSRRRPAFPTVKSLASTAGSPAWTKERMGLSAGKISRGFQNLPSTHWGTGSSMPSFQRERTR

SEQ ID NO: 24694 - protein, 52 aa, Homo sapiens
TPGLILPEDGATGGCGIRAPCPALCLPAQAGHSAGRPPSAAHRGQPCGQEPL

SEQ ID NO: 24695 - protein, 50 aa, Homo sapiens
RAKVGYMESTCGPSAQGWILFCSLIAKHCLIWNKSSWVIPISPYHMSTTS

SEQ ID NO: 24696 - protein, 34 aa, Homo sapiens
LAGGSGNSLGGRRGRTGGCWEPSLGLRPAVSVGL

SEQ ID NO: 24697 - protein, 39 aa, Homo sapiens
TAPRTLVSSLFSPRPSLGRAGTLAFPVPHGAAPTPDGVQ

SEQ ID NO: 24698 - protein, 29 aa, Homo sapiens
ILVSFRNLMKKRKESVKTHFSMRLMSKCS

SEQ ID NO: 24699 - protein, 93 aa, Homo sapiens
LPPPPSASISLQLPSLACGRPVLLPSPVQPGTRVRLAQVSVRDWEATEGRESGTLLELKLPTLSSLNNYRAGLGGTDSIFRSLMGCWVDGAGK

SEQ ID NO: 24700 - protein, 29 aa, Homo sapiens
MEYYNKLRQHGEFQTSLSIPYSQRRRPNT

SEQ ID NO: 24701 - protein, 81 aa, Homo sapiens
ISTAPRTFLSPSTATLMNGRYGRAALTQFCTLTCGGGQTSCWWLLLMPTLWGRWPVASVTTCLPASCGPGTAASPCSSARP

SEQ ID NO: 24702 - protein, 28 aa, Homo sapiens
LMPPAARWPGPQCPKRALMVPSDRLALL

SEQ ID NO: 24703 - protein, 36 aa, Homo sapiens
VAEFCDMSNNGPEDFISSSRKNSRQTARISSNPERR

SEQ ID NO: 24704 - protein, 36 aa, Homo sapiens
VAEFCDMSNNGPEDFISSSRKNSRQTARISSNPERS

SEQ ID NO: 24705 - protein, 20 aa, Homo sapiens
VTFQNQLFLELYLLQQCLGD

SEQ ID NO: 24706 - protein, 25 aa, Homo sapiens
IARMPERALSFGSCGCGCRHHGAEA

SEQ ID NO: 24707 - protein, 52 aa, Homo sapiens
KSMTSRWRSRICGWRTMGVTAVRSLTGWRMKAVWWSWSCGDGAVCPHISPTC

SEQ ID NO: 24708 - protein, 840 aa, Homo sapiens
VAFCEEFGANLPHAAVAAGTLAGFSWSGGGGNMAETAAGVGRFKTNYAVERKIEPFYKGGKAQLDQTGQHLFCVCGTRVNILEVASGAVLRSLEQEDQEDITAFDLSPDNEVLVTASRALLLAQWAWQEGSVTRLWKAIHTAPVATMAFDPTSTLLATGGCDGAVRVWDIVRHYGTHHFRGSPGVVHLVAFHPDPTRLLLFSSATDAAIRVWSLQDRSCLAVLTAHYSAVTSLAFSADGHTMLSSGRDKICIIWDLQSCQATRTVPVFESVEAAVLLPEEPVSQLGVKSPGLYFLTAGDQGTLRVWEAASGQCVYTQAQPPGPGQELTHCTLAHTAGVVLTATADHNLLLYEARSLRLQKQFAGYSEEVLDVRFLGPEDSHVVVASNSPCLKVFELQTSACQILHGHTDIVLALDVFRKGWLFASCAKDQSVRIWRMNKAGQVMCVAQGSGHTHSVGTVCCSRLKESFLVTGSQDCTVKLWPLPKALLSKNTAPDNGPILLQAQTTQRCHDKDINSVAIAPNDKLLATGSQDRTAKLWALPQCQLLGVFSGHRRGLWCVQFSPMDQVLATASADGTIKLWALQDFSCLKTFEGHDASVLKVAFVSRGTQLLSSGSDGLVKLWTIKNNECVRTLDAHEDKVWGLHCSRLDDHALTGASDSRVILWKDVTEAEQAEEQARQEEQVVRQQELDNLLHEKRYLRALGLAISLDRPHTVLTVIQAIRRDPEACEKLEATMLRLRRDQKEALLRFCVTWNTNSRHCHEAQAVLGVLLRREAPEELLAYEGVRAALEALLPYTERHFQRLSRTLQAAAFLDFLWHNMKLPVPAAAPTPWETHKGALP

SEQ ID NO: 24709 - protein, 28 aa, Homo sapiens
RGPTCLPWLSMSLATPWAWATPQPPTPL

SEQ ID NO: 24710 - protein, 100 aa, Homo sapiens
LIESLAGPLGIGPENGPISGEEKRRPPVTLWKLDTYVTRKVIWTRGSPMMTSTHPLLSQPAKPRAPTAPSMGTVKQNSPWSLKCRAWSGAKNSPRGPTRC

SEQ ID NO: 24711 - protein, 19 aa, Homo sapiens
LTPTILPSLRFPVLYTPNS

SEQ ID NO: 24712 - protein, 34 aa, Homo sapiens
MTMTRKKKGPSGSLVSGVPGAQGRRASESTTASS

SEQ ID NO: 24713 - protein, 12 aa, Homo sapiens
ILGGPWPKIYFS

SEQ ID NO: 24714 - protein, 20 aa, Homo sapiens
MLGPSSSPSRMATYPQRAGS

SEQ ID NO: 24715 - protein, 474 aa, Homo sapiens
IPVPAYFRHAEPGFSLKRPRGLSRSLPPPPPAKGSIPISRLFPPRTPGWHQLQPRRVSFRGEASETLQSPGYDPSRPESFFQQSFQRLSRLGHGSYGEVFKVRSKEDGRLYAVKRSMSPFRGPKDRARKLAEVGSHEKVGQHPCCVRLEQAWEEGGILYLQTELCGPSLQQHCEAWGASLPEAQVWGYLRDTLLALAHLHSQGLVHLDVKPANIFLGPRGRCKLGDFGLLVELGTAGAGEVQEGDPRYMAPELLQGSYGTAADVFSLGLTILEVACNMELPHGGEGWQQLRQGYLPPEFTAGLSSELRSVLVMMLEPDPKLRATAEALLALPVLRQPRAWGVLWCMAAEALSRGWALWQALLALLCWLWHGLAHPASWLQPLGPPATPPGSPPCSLLLDSSLSSNWDDDSLGPSLSPEAVLARTVGSTSTPRSRCTPRDALDLSDINSEPPRGSFPSFEPRNLLSLFEDTLDPT

SEQ ID NO: 24716 - protein, 263 aa, Homo sapiens
VAAARLLAPEHAREPPRSAPEPPAVPPAASRAPPPAHPRTLWPTPPAGPFCRMVAHNQVAADNAVSTAAEPRRRPEPSSSSSSSPAAPARPRPCPAVPAPAPGDTHFRTFRSHADYRRITRASALLDACGFYWGPLSVHGAHERLRAEPVGTFLVRDSRQRNCFFALSVKMASGPTSIRVHFQAGRFHLDGSRESFDCLFELLEHYVAAPRRMLGAPLRQRRVRPLQELCRQRIVATVGRENLARIPLNPVLRDYLSSFPFQI

SEQ ID NO: 24717 - protein, 35 aa, Homo sapiens
ICFESSGCKSMQLSYTGEDSFHVNIHILWGNLLPK

SEQ ID NO: 24718 - protein, 34 aa, Homo sapiens
MAPERMGWAVEQELASLEKGDHEPHFPFPKKRKA

SEQ ID NO: 24719 - protein, 77 aa, Homo sapiens
RVAPATTSPANQRPGLHQSHGRQKSTDRTGSLREDVLQLCHEGGCCSGFEEERMGGGGVGPLCHELQSHHFQKGHHR

SEQ ID NO: 24720 - protein, 195 aa, Homo sapiens
VRLWPAARAAMDAAEVEFLAEKELVTIIPNFSLDKIYLIGGDLGPFNPGLPVEVPLWLAINLKQRQKCRLLPPEWMDVEKLEKMRDHERKEETFTPMPSPYYMELTKLLLNHASDNIPKADEIRTLVKDMWDTRIAKLRVSADSFVRQQEAHAKLDNLTLMEINTSGTFLTQALNHMYKLRTNLQPLESTQSQDF

SEQ ID NO: 24721 - protein, 105 aa, Homo sapiens
ILPTPERNPGLSPSPGTHPSAFWSLGFSLLDVEREWTPTTRVGRACCLPCTVFQAFRCVVGLHASSRPNALSMGVHATPSLHPFTDGHLSCFRFSCHECLSMGVP

SEQ ID NO: 24722 - protein, 19 aa, Homo sapiens
LFVSLWVDVVGDWQDPGIR

SEQ ID NO: 24723 - protein, 24 aa, Homo sapiens
MLLHETHLLHTQDSSPQFLSLLLI

SEQ ID NO: 24724 - protein, 32 aa, Homo sapiens
IRSCRPLPALMWLMFQADLGSLRWQVLYGEKT

SEQ ID NO: 24725 - protein, 576 aa, Homo sapiens
LGEGCGFRRGLSCAVVMPQTRSQAQATISFPKRKLSRALNKAKNSSDAKLEPTNVQTVTCSPRVKALPLSPRKRLGDDNLCNTPHLPPCSPPKQGKKENGPPHSHTLKGRRLVFDNQLTIKSPSKRELAKVHQNKILSSVRKSQEITTNSEQRCPLKKESACVRLFKQEGTCYQQAKLVLNTAVPDRLPAREREMDVIRNFLREHICGKKAGSLYLSGAPGTGKTACLSRILQDLKKELKGFKTIMLNCMSLRTAQAVFPAIAQEICQEEVSRPAGKDMMRKLEKHMTAEKGPMIVLVLDEMDQLDSKGQDVLYTLFEWPWLSNSHLVLIGIANTLDLTDRILPRLQAREKCKPQLLNFPPYTRNQIVTILQDRLNQVSRDQVLDNAAVQFCARKVSAVSGDVRKALDVCRRAIEIVESDVKSQTILKPLSECKSPSEPLIPKRVGLIHISQVISEVDGNRMTLSQEGAQDSFPLQQKILVCSLMLLIRQLKIKEVTLGKLYEAYSKVCRKQQVAAVDQSECLSLSGLLEARGILGLKRNKETRLTKVFFKIEEKEIEHALKDKALIGNILATGLP

SEQ ID NO: 24726 - protein, 43 aa, Homo sapiens
VDLHVLPLFNTLMPEAMVDTKGGFPTIRMHLLCFEIATMDSYG

SEQ ID NO: 24727 - protein, 51 aa, Homo sapiens
TASSLRPLVMMVQSASVSKAGKGSSSSHGVAAALNQDLDPDPKCHVFNVSK

SEQ ID NO: 24728 - protein, 102 aa, Homo sapiens [sequence omitted]

SEQ ID NO: 24729 - protein, 140 aa, Homo sapiens
REPGWETAMAKDILGEAGLHFDELNKLRVLDPEVTQQTIELKEECKDFVDKIGQFQKIVGGLIELVDQLAKEAENEKMKAIGARNLLKSIAKQREAQQQQLQALIAEKKMQLERYRVEYEALCKVEAEQNEFIDQFIFQK

SEQ ID NO: 24730 - protein, 31 aa, Homo sapiens
VRGALGQRVWDWWHRRRRRTEASLGSFEPVQ

SEQ ID NO: 24731 - protein, 199 aa, Homo sapiens
TWPTASRATSRGPQGMDLQAAGAQAQGAAEPSRGPPLPSARGAPPSPEAGFATADHSSQERETEKAMDRLARGTQSIPNDSPARGEGTHSEEEGFAMDEEDSDGELNTWELSEGTNCPPKEQPGDLFNEDWDSELKADQGNPYDADDIQESISQELKPWVCCAPQGDMIYDPSWHHPPPLIPYYSKMVFETGQFDDAED

SEQ ID NO: 24732 - protein, 83 aa, Homo sapiens
IFSSPSQDWHSNEGTVRTEAQVAQMQKLPLVMISECVSFICQASPWQILIYHPKWSQSCAVSLLSVFQEVQSLKGWVMLHLWS

SEQ ID NO: 24733 - protein, 23 aa, Homo sapiens
MIPANAWLLFWKLPLGDAPQLAL

SEQ ID NO: 24734 - protein, 40 aa, Homo sapiens; identical to SEQ ID NO: 24282

SEQ ID NO: 24735 - protein, 17 aa, Homo sapiens
MTRWIVLLVPPATQNPG

SEQ ID NO: 24736 - protein, 100 aa, Homo sapiens
LNQHSRFIIGSVSEDNSEDEISNLVKLDLLEEKEGSLSPASVGSDTLSDLGISSLQDGLALHISSWIKRSGSVVLGSHCSSESPRGALGDKPHPQRFRFI

SEQ ID NO: 24737 - protein, 251 aa, Homo sapiens
IGGHGNFSPGFKDVTVYNPELDKWHNLESAPKILRDVKALAIEDRFVYIAARTPVDRDTEDGLKAVITCYDTETRQWQDVESLPLIDNYCFFQMSVVNSNFYQTASCCPKSYCLENEEAVRKIASQVSDEILESLPPEVLSIEGAAICYYKDDVFIIGGWKNSDDIDKQYRKEAYRYCAERKRWMLLPPMPQPRCRATACHVRIPYRYLHGTQRYPMPQNLMWQKDRIRQMQEIHRHALNMRRVPSSQIEC

SEQ ID NO: 24738 - protein, 91 aa, Homo sapiens
RRSVGSWKMLKSFWQKVCGMRTSALLQGITETIFYGAFSKSKPGTIGIFSPKGETLDRTALMIITAGLLACPSHPMHPFCQIIRMREWKTS

SEQ ID NO: 24739 - protein, 10 aa, Homo sapiens
VKDNLLIPAL

SEQ ID NO: 24740 - protein, 34 aa, Homo sapiens
VLVFRSSTAALPRAAEAARRSEKWPKTSALGRRS

SEQ ID NO: 24741 - protein, 13 aa, Homo sapiens
LPGVPTQAKLEHG

SEQ ID NO: 24742 - protein, 14 aa, Homo sapiens
VCLSTSPATPCSRT

SEQ ID NO: 24743 - protein, 7 aa, Homo sapiens
LIKEEAS

SEQ ID NO: 24744 - protein, 44 aa, Homo sapiens
ILGFQRRLRYPQLETQRRVAFCSRTDLRGLKDGLVRSGTIMLSC

SEQ ID NO: 24745 - protein, 28 aa, Homo sapiens
LQDCSCSARVLQLSEVLQLEAEVPGLCS

SEQ ID NO: 24746 - protein, 13 aa, Homo sapiens
LDNHIAIRSTAPG

SEQ ID NO: 24747 - protein, 57 aa, Homo sapiens
MGRSVRASSTHISRTSLSNSFQRWIILLYFWLFFMYTELYVKRCFGIHQFPLPRTCL

SEQ ID NO: 24748 - protein, 26 aa, Homo sapiens
IRTPGSSVQPWPYATLWPWASTRATK

SEQ ID NO: 24749 - protein, 1059 aa, Homo sapiens
RRLREWQRSWRRAACGRSGRASLKEHPRGTLLSDGSPALSRNVGMTVSQKGGPQPTPSPAGPGTQLGPITGEMDEADSAFLKFKQTADDSLSLTSPNTESIFVEDPYTASLRSEIESDGHEFEAESWSLAVDAAYAKKQKREVVKRQDVLYELMQTEVHHVRTLKIMLKVYSRALQEELQFSSKAIGRLFPCADDLLETHSHFLARLKERRQESLEEGSDRNYVIQKIGDLLVQQFSGENGERMKEKYGVFCSGHNEAVSHYKLLLQQNKKFQNLIKKIGNFSIVRRLGVQECILLVTQRITKYPVLVERIIQNTEAGTEDYEDLTQALNLIKDIISQVDAKVSECEKGQRLREIAGKMDLKSSSKLKNGLTFRKEDMLQRQLHLEGMLCWKTTSGRLKDILAILLTDVLLLLQEKDQKYVFASVDSKPPVISLQKLIVREVANEEKAMFLISASLQGPEMYEIYTSSKEDRNAWMAHIQRAVESCPDEEEGPFSLPEEERKVVEARATRLRDFQERLSMKDQLIAQSLLEKQQIYLEMAEMGGLEDLPQPRGLFRGGDPSETLQGELILKSAMSEIEGIQSLICRQLGSANGQAEDGGSSTGPPRRAETFAGYDCTNSPTKNGSFKKKVSSTDPRPRDWRGPPNSPDLKLSDSDIPGSSEESPQVVEAPGTESDPRLPTVLESELVQRIQTLSQLLLNLQAVIAHQDSYVETQRAAIQEREKQFRLQSTRGNLLLEQERQRNFEKQREERAALEKLQSQLRHEQQRWERERQWQHQELERAGARLQEREGEARQLRERLEQERAELERQRQAYQHDLERLREAQRAVERERERLELLRRLKKQNTAPGALPPDTLAEAQPPSHPPSFNGEGLEGPRVSMLPSGVGPEYAERPEVARRDSAPTENRLAKSDVPIQLLSATNQFQRQAAVQQQIPTKLAASTKGGKDKGGKSRGSQRWESSASFDLKQQLLLNKLMGKDESTSRNRRSLSPILPGRHSPAPPPDPGFPAPSPPPADSPSEGFSLKAGGTALLPGPPAPSPLPATPLSAKEDASKEDVIFF

SEQ ID NO: 24750 - protein, 31 aa, Homo sapiens
VHLLPVLSLPGAPAAVAVESPWKCRKRHSAS

SEQ ID NO: 24751 - protein, 61 aa, Homo sapiens
RLGRTRGSRGTPCGEAGAPLSGCGRCPSWRCCLCCGCFSSGRVPRAAPGHCSATELDPWAT

SEQ ID NO: 24752 - protein, 43 aa, Homo sapiens
IRKKIEHDVVMKASSSLPKKLALLKAPAKKKGAAAATSSKTPS

SEQ ID NO: 24753 - protein, 389 aa, Homo sapiens
VQTLNRNPGSCRHWHSYSEGLGHPRVSQVTFPPPQEAMTEAGKLPLPLPPRLDWFVHTQMGQLAQDGVPEWFHGAISREDAENLLESQPLGSFLIRVSHSHVGYTLSYKAQSSCCHFMVKLLDDGTFMIPGEKVAHTSLDALVTFHQQKPIEPRRELLTQPCRQKDPANVDYEDLFLYSNAVAEEAACPVSAPEEASPKPVLCHQSKERKPSAEMNRITTKEATSSCPPKSPLGETRQKLWRSLKMLPERGQRVRQQLKSHLATVNLSSLLDVRRSTVISGPGTGKGSQDHSGDPTSGDRGYTDPCVATSLKSPSQPQAPKDRKVPTRKAERSVSCIEVTPGDRSWHQMVVRALSSQESKPEHQGLAEPENDQLPEEYQQPPPFAPGYC

SEQ ID NO: 24754 - protein, 419 aa, Homo sapiens
LASGRSSPIMPRERRERDAKERDTMKEDGGAEFSARSRKRKANVTVFLQDPDEEMAKIDRTARDQCGSQPWDNNAVCADPCSLIPTPDKEDDDRVYPNSTCKPRIIAPSRGSPLPVLSWANREEVWKIMLNKEKTYLRDQHFLEQHPLLQPKMRAILLDWLMEVCEVYKLHRETFYLAQDFFDRYMATQENVVKTLLQLIGISSLFIAAKLEEIYPPKLHQFAYVTDGACSGDEILTMELMIMKALKWRLSPLTIVSWLNVYMQVAYLNDLHEVLLPQYPQQIFIQIAELLDLCVLDVDCLEFPYGILAASALYHFSSSELMQKVSGYQWCDIENCVKWMVPFAMVIRETGSSKLKHFRGVADEDAHNIQTHRDSLDLLDKARAKKAMLSEQNRASPLPSGLLTPPQSGKKQSSGPEMA

SEQ ID NO: 24755 - protein, 15 aa, Homo sapiens
MLLVFFGDLQGKEAG

SEQ ID NO: 24756 - protein, 25 aa, Homo sapiens
MADPSIAWSHRCRPLVACVFSPSLA

SEQ ID NO: 24757 - protein, 40 aa, Homo sapiens
ILEQPTLGQRIWRNPGLKSRFSSFKTYLNTSLHGSSRDPP

SEQ ID NO: 24758 - protein, 134 aa, Homo sapiens
VAVCISCLCPHVCPQVRFSEKVTVHFLAVWAGPAQAARQGPWEQLARDRSRFARRITQAQEELSPCLTPAARARAWARLRNPPLAPIPALTQTLPSSSVPSSPVQTTPLSQAVATPSRSSAAAAAALDLSGRRG

SEQ ID NO: 24759 - protein, 1123 aa, Homo sapiens
KIPLNLHLHHDPFRSLQEPRHQPPTMGSKERFHWQSHNVKQSGVDDMVLLPQITEDAIAANLRKRFMDDYIFTYIGSVLISVNPFKQMPYFTDREIDLYQGAAQYENPPHIYALTDNMYRNMLIDCENQCVIISGESGAGKTVAAKYIMGYISKVSGGGEKVQHVKDIILQSNPLLEAFGNAKTVRNNNSSRFGKYFEIQFSRGGEPDGGKISNFLLEKSRVVMQNENERNFHIYYQLLEGASQEQRQNLGLMTPDYYYYLNQSDTYQVDGTDDRSDFGETLSAMQVIGIPPSIQQLVLQLVAGILHLGNISFCEDGNYARVESVDLLAFPAYLLGIDSGRLQEKLTSRKMDSRWGGRSESINVTLNVEQAAYTRDALAKGLYARLFDFLVEAINRAMQKPQEEYSIGVLDIYGFEIFQKNGFEQFCINFVNEKLQQIFIELTLKAEQEEYVQEGIRWTPIQYFNNKVVCDLIENKLSPPGIMSVLDDVCATMHATGGGADQTLLQKLQAAVGTHEHFNSWSAGFVIHHYAGKVSYDVSGFCERNRDVLFSDLIELMQTSEQAFLRMLFPEKLDGDKKGRPSTAGSKIKKQANDLVATLMRCTPHYIRCIKPNETKRPRDWEENRVKHQVEYLGLKENIRVRRAGFAYRRQFAKFLQRYAILTPETWPRWRGDERQGVQHLLRAVNMEPDQYQMGSTKVFVKNPESLFLLEEVRERKFDGFARTIQKAWRRHVAVRKYEEMREEASNILLNKKERRRNSINRNFVGDYLGLEERPELRQFLGKRERVDFADSVTKYDRRFKPIKRDLILTPKCVYVIGREKVKKGPEKGQVCEVLKKKVDIQALRGVSLSTRQDDFFILQEDAADSFLESVFKTEFVSLLCKRFEEATRRPLPLTFSDTLQFRVKKEGWGGGGTRSVTFSRGFGDLAVLKVGGRTLTVSVGDGLPKSSKPTRKGMAKGKPRRSSQAPTRAAPAPPRGMDRNGVPPSARGGPLPLEIMSGGGTHRPPRGPPSTSLGASRRPRARPPSEHNTEFLNVPDQGMAGMQRKRSVGQRPVPGVGRPKPQPRTHGPRCRALYQYVGQDVDELSFNVNEVIEILMEDPSGWWKGRLHGQEGLFPGNYVEKI

SEQ ID NO: 24760 - protein, 10 aa, Homo sapiens
LATSESQLLL

SEQ ID NO: 24761 - protein, 34 aa, Homo sapiens
RVSSFLPSAPLSREGKTVPYCLQTSQGSRRFLSS

SEQ ID NO: 24762 - protein, 13 aa, Homo sapiens
LRTRVHACDRPCV

SEQ ID NO: 24763 - protein, 237 aa, Homo sapiens
KMLSKGLKRKREEEEEKEPLAVDSWWLDPGHTAVAQAPPAVASSSLFDLSVLKLHHSLQQSEPDLRHLVLVVNTLRRIQASMAPAAALPPVPSPPAAPSVADNLLASSDAALSASMASLLEDLSHIEGLSQAPQPLADEGPPGRSIGGAAPSLGALDLLGPATGCLLDDGLEGLFEDIDTSMYDNELWAPASEGLKPGPEDGPGKEEAPELDEAELDYLMDVLVGTQALERPPGPGR

SEQ ID NO: 24764 - protein, 55 aa, Homo sapiens
ILQLRDSHRSLDTIQKSHPEGDNNVPATRAIHRGCLFVYWFYCDNQRATTCLFLE

SEQ ID NO: 24765 - protein, 108 aa, Homo sapiens
RRPPAGLPLQASLPCGPLSPPWPSHRAMVPSLASQGPRSTRRYCLMCGYCLGGCPWPSGMQPQPRCVSSLWTSSRPTSTSMRYTMRRRSGGPSRRHPRIRATRRRRRS

SEQ ID NO: 24766 - protein, 13 aa, Homo sapiens
LKFSAVRIARDVC

SEQ ID NO: 24767 - protein, 9 aa, Homo sapiens
ITAMLQDPH

SEQ ID NO: 24768 - protein, 13 aa, Homo sapiens
RLQTPTDLLWEPE

SEQ ID NO: 24769 - protein, 6 aa, Homo sapiens
VASSPA

SEQ ID NO: 24770 - protein, 23 aa, Homo sapiens
VAGVQLPTFCPDLWLLISPVSAD

SEQ ID NO: 24771 - protein, 6 aa, Homo sapiens
MVAELL

SEQ ID NO: 24772 - protein, 100 aa, Homo sapiens
LPPSAQPAVPAFVGCPAPGPPASLLPAPPRWRCPSRSPRQARLSVQQACAVAPSVRATSRASCWDLMASWGPRCGRPLPRRSPPSPRPCTTSPGSAAAAA

SEQ ID NO: 24773 - protein, 22 aa, Homo sapiens
TKTEPEPVAGSGRGSAESRRWQ

SEQ ID NO: 24774 - protein, 352 aa, Homo sapiens
ITDMKGTGIMDCAPKALLARALYDNCPDCSDELAFSRGDILTILEQHVPESEGWWKCLLHGRQGLAPANRLQILTEVAADRPCPPFLRGLEEAPASSEETYQVPTLPRPPTPGPVYEQMRSWAEGPQPPTAQVYEFPDPPTSARIICEKTLSFPKQAILTLPRPVRASLPTLPSQVYDVPTQHRGPVVLKEPEKQQLYDIPASPKKAGLHPPDSQASNPGPLIPQPSSQQTPERKPRLSEHCRLYFGALFKAISAFHGSLSSSQPAEIITQSKLVIMVGQKLVDTLCMETQERDVRNEILRGSSHLCSLLKDVALATKNAVLTYPSPAALGHLQAEAEKLEQHTRQFRGTLG

SEQ ID NO: 24775 - protein, 309 aa, Homo sapiens
LRTPGRGLGPRLHRMGLPVSWAPPALWVLGCCALLLSLWALCTACRRPEDAVAPRKRARRQRARLQGSATAAEASLLRRTHLCSLSKSDTRLHELHRGPRSSRALRPASMDLLRPHWLEVSRDITGPQAAPSAFPHQELPRALPAAAATAGCAGLEATYSNVGLAALPGVSLAASPVVAEYARVQKRKGTHRSPQEPQQGKTEVTPAAQVDVLYSRVCKPKRRDPGPTTDPLDPKGQGAILALAGDLAYQTLPLRALDVDSGPLENVYESIRELGDPAGRSSTCGAGTPPASSCPSLGRGWRPLPASLP

SEQ ID NO: 24776 - protein, 41 aa, Homo sapiens
VPATVRGWGSLLRFCIPTRSYSNGTQRCKSANTNRIFKENT

SEQ ID NO: 24777 - protein, 42 aa, Homo sapiens
RRRRSVRPTKRSRSSCRRTSRSTGPRTACCCWVLENLVKAPL

SEQ ID NO: 24778 - protein, 35 aa, Homo sapiens
VAPHGSRGSQLFLSLQNLILALDLRRESLTRDETQ

SEQ ID NO: 24779 - protein, 11 aa, Homo sapiens
MTVIFDPRNQS

SEQ ID NO: 24780 - protein, 18 aa, Homo sapiens
LLPEPLQRAWFQETQSPL

SEQ ID NO: 24781 - protein, 494 aa, Homo sapiens
KRLNMNPQIRNPMERMYRDTFYDNFENEPILYGRSYTWLCYEVKIKRGRSNLLWDTGVFRGQVYFKPQYHAEMCFLSWFCGNQLPAYKCFQITWFVSWTPCPDCVAKLAEFLSEHPNVTLTISAARLYYYWERDYRRALCRLSQAGARVTIMDYEEFAYCWENFVYNEGQQFMPWYKFDENYAFLHRTLKEILRYLMDPDTFTFNFNNDPLVLRRRQTYLCYEVERLDNGTWVLMDQHMGFLCNEAKNLLCGFYGRHAELRFLDLVPSLQLDPAQIYRVTWFISWSPCFSWGCAGEVRAFLQENTHVRLRIFAARIYDYDPLYKEALQMLRDAGAQVSIMTYDEFEYCWDTFVYRQGCPFQPWDGLEEHSQALSGRLRAILQVRASSLCLVPHRPPPPPRSPVPCLPLCSEPPLGSLLPTGRPAPSLPFLLTASFSFPPPASLPPLPSLSLSPGHLPVPSFHSLTSCSIQPPCSSRIRETEGWASVSKEGRDLG

SEQ ID NO: 24782 - protein, 171 aa, Homo sapiens
LPASITTVTRDSSTGFADCRTQRHACTSCLLRNLNTVEKTVYKRDVPCQPCKGQRENYPSPVTKLQEARSQEGKPLSLQNVASTSLMAETAHCTLKPALPTASEINCCNSGTHDAYHSGSSMEPAGSQPFLGPMNSLKRGTEIFLLFVKSLTFPLFFMYTLNCNSSSQIKH

SEQ ID NO: 24783 - protein, 21 aa, Homo sapiens
MMKSSSDPLDIKKDVLLPAWN

SEQ ID NO: 24784 - protein, 76 aa, Homo sapiens
RPSDPIPTPAGPAQDALAQAWGCWGWNVELQPQPIWQSPRNSETGTAALSASAVCCHVTHPKHLLAAGSIPQDPKP

SEQ ID NO: 24785 - protein, 304 aa, Homo sapiens
VTRRAEAMVHQVLYRALVSTKWLAESIRTGKLGPGLRVLDASWYSPGTREARKEYLERHVPGASFFDIEECRDTASPYEMMLPSEAGFAEYVGRLGISNHTHVVVYDGEHLGSFYAPRVWWMFRVFGHRTVSVLNGGFRNWLKEGHPVTSEPSRPEPAVFKATLDRSLLKTYEQVLENLESKRFQLVDSRSQGRFLGTEPEPDAVGLDSGHIRGAVNMPFMDFLTEDGFEKGPEELRALFQTKKVDLSQPLIATCRKGVTACHVALAAYLCGKPDVAVYDGSWSEWFRRAPPESRVSQGKSEKA

SEQ ID NO: 24786 - protein, 696 aa, Homo sapiens
IRPRVAAGAAGRMGLSAAAPLWGPPGLLLAIALHPALSVPPRRDYCVLGAGPAGLQMAYFLQRAGRDYAVFERAPRPGSFFTRYPRHRKLISINKRYTGKANAEFNLRHDWNSLLSHDPRLLFRHYSRAYFPDARDMVRYLGDFADTLGLRVQYNTTIAHVTLDKDRQAWNGHYFILTDQKGQVHQCSVLFVATGLSVPNQVDFPGSEYAEGYESVSVDPEDFVGQNVLILGRGNSAFETAENILGVTNFIHMLSRSRVRLSWATHYVGDLRAINNGLLDTYQLKSLDGLLESDLTDLAILKDSKGKFHVTPKFFLEEANTNQSADSITLPQDDNDNFAMRVPYDRVIRCLGWNFDFSIFNKSLRLNSGNAFGKKYPLIRASYESKGSRGLFILGTASHSVDYRKSAGGFIHGFRYTVRAVHRLLEHRHHSVTWPATELPITQLTSSIVRRVNEASGLYQMFGVLADVILLKENSTAFEYLEEFPIQMLAQLETLTGRKAKHGLFVINMEYGRNFSGPDKDVFFDDRSVGHTEDAWQSNFLHPVIYYYRYLPTEQEVRFRPAHWPLPRPTAIHHIVEDFLTDWTAPIGHILPLRRFLENCLDTDLRSFYAESCFLFALTRQKLPPFCQQGYLRMQGLVSTESLWQHRVESRLLRDYAPTGRRLEDSSQQLGDQEPLGSPLAPGPLAQSVDSNKEEL

SEQ ID NO: 24787 - protein, 63 aa, Homo sapiens
MWMPASSWGRCVSSPQVVEGFRATMAQRLVRVLQICAGHVPGVSALNLLSLLRSSEGPSLEDL

SEQ ID NO: 24788 - protein, 22 aa, Homo sapiens
LFPGQIQVQVLAISHHGTASCR

SEQ ID NO: 24789 - protein, 35 aa, Homo sapiens
MMTEEYQLNNTFGWIWKLEFLLTTKGFIFKAILGN

SEQ ID NO: 24790 - protein, 12 aa, Homo sapiens
RPKMETAAAVAA

SEQ ID NO: 24791 - protein, 38 aa, Homo sapiens
MPWRILSASRLLAAGPPAPTSRALERESSCLLRLYYAW

SEQ ID NO: 24792 - protein, 6 aa, Homo sapiens
VEQTLA

SEQ ID NO: 24793 - protein, 1234 aa, Homo sapiens
RIMKEEVKGIPVRVALRCRPLVPKEISEGCQMCLSFVPGEPQVVVGTDKSFTYDFVFDPSTEQEEVFNTAVAPLIKGVFKGYNATVLAYGQTGSGKTYSMGGAYTAEQENEPTVGVIPRVIQLLFKEIDKKSDFEFTLKVSYLEIYNEEILDLLCPSREKAQINIREDPKEGIKIVGLTEKTVLVALDTVSCLEQGNNSRTVASTAMNSQSSRSHAIFTISLEQRKKSDKNSSFRSKLHLVDLAGSERQKKTKAEGDRLKEGININRGLLCLGNVISALGDDKKGGFVPYRDSKLTRLLQDSLGGNSHTLMIACVSPADSNLEETLNTLRYADRARKIKNKPIVNIDPQTAELNHLKQQVQQLQVLLLQAHGGTLPGSITVEPSENLQSLMEKNQSLVEENEKLSRGLSEAAGQTAQMLERIILTEQANEKMNAKLEELRQHAACKLDLQKLVETLEDQELKENVEIICNLQQLITQLSDETVACMAAAIDTAVEQEAQVETSPETSRSSDAFTTQHALRQAQMSKELVELNKALALKEALARKMTQNDSQLQPIQYQYQDNIKELELEVINLQKEKEELVLELQTAKKDANQAKLSERRRKRLQELEGQIADLKKKLNEQSKLLKLKESTERTVSKLNQEIRMMKNQRVQLMRQMKEDAEKFRQWKQKKDKEVIQLKERDRKRQYELLKLERNFQKQSNVLRRKTEEAAAANKRLKDALQKQREVADKRKETQSRGMEGTAARVKNWLGNEIEVMVSTEEAKRHLNDLLEDRKILAQDVAQLKEKKESGENPPPKLRRRTFSLTEVRGQVSESEDSITKQIESLETEMEFRSAQIADLQQKLLDAESEDRPKQRWENIATILEAKCALKYLIGELVSSKIQVSKLESSLKQSKTSCADMQKMLFEERNHFAEIETELQAELVRMEQQHQEKVLYLLSQLQQSQMAEKQLEESVSEKEQQLLSTLKCQDEELEKMREVCEQNQQLLRENEIIKQKLTLLQVASRQKHLPKDTLLSPDSSFEYVPPKPKPSRVKEKFLEQSMDIEDLKYCSEHSVNEHEDGDGDDDEGDDEEWKPTKLVKVSRKNIQGCSCKGWCGNKQCGCRKQKSDCGVDCCCDPTKCRNRQQGKDSLGTVERTQDSEGSFKLEDPTEVTPGLSFFNPVCATPNSKILKEMCDVEQVLSKKTPPAPSPFDLPELKHVATEYQENKAPGKKKKRALASNTSFFSGCSPIEEEAH

SEQ ID NO: 24794 - protein, 34 aa, Homo sapiens
MLARRPESSERQLDSWKRLLGWKSGGLGYSQLCR

SEQ ID NO: 24795 - protein, 63 aa, Homo sapiens
LIPGKDYWAGSQEAWGTLSSAANMLHDHGLTGEPEVLCRDQRKALIPSLQPVQLSTWLTLGTQ

SEQ ID NO: 24796 - protein, 17 aa, Homo sapiens
ILALSVLPMPRMFSLTC

SEQ ID NO: 24797 - protein, 23 aa, Homo sapiens
RLGMPQTCDGTGQMHLGRLDLGE

SEQ ID NO: 24798 - protein, 30 aa, Homo sapiens
VSAAQPLSPSLRQPRRTAHQEARARMGSLC

SEQ ID NO: 24799 - protein, 333 aa, Homo sapiens
LPSLHSLPAALRVTPAAKAPGAATAAPPSSTAQHQNTLFLDSDMGSSKKVTLSVLSREQSEGVGARVRRSIGRPELKNLDPFLLFDEFKGGRPGGFPDHPHRGFETVSYLLEGGSMAHEDFCGHTGKMNPGDLQWMTAGRGILHAEMPCSEEPAHGLQLWVNLRSSEKMVEPQYQELKSEEIPKPSKDGVTVAVISGEALGIKSKVYTRTPTLYLDFKLDPGAKHSQPIPKGWTSFIYTISGDVYIGPDDAQQKIEPHHTAVLGEGDSVQVENKDPKRSHFVLIAGEPLREPVIQHGPFVMNTNEEISQAILDFRNAKNGFERAKTWKSKIGN

SEQ ID NO: 24800 - protein, 43 aa, Homo sapiens
RDDLANTHTHSHTPSPSGRSRRTVNMALGLLPERGRRRQRGSC

SEQ ID NO: 24801 - protein, 62 aa, Homo sapiens
KSQIPASVRSSSWRWQSSWSQKAGRMQVMSTSALMTVGWLPKEIQKADFRQTLSAFLMGFAS

SEQ ID NO: 24802 - protein, 146 aa, Homo sapiens
TKPGQSFLAARAMNTEMYQTPMEVAVYQLHNFSISFFSSLLGGDVVSVKLDNSASGASVVAIDNKIEQAMDLVKNHLMYAVREEVEILKEQIRELVEKNSQLERENTLLKTLASPEQLEKFQSCLSPEEPAPESPQVPEAPGGSAV

SEQ ID NO: 24803 - protein, 46 aa, Homo sapiens
LLTTTSPCSLVVPVALWSQKASLRMEGNQARKEREQILLQPITVEL

SEQ ID NO: 24804 - protein, 8 aa, Homo sapiens
IAKMLWSF

SEQ ID NO: 24805 - protein, 41 aa, Homo sapiens
TGSSYVGQAGLESPGSSDPPASASGKVGLQARIAAPGQSLF

SEQ ID NO: 24806 - protein, 24 aa, Homo sapiens
MVSISGKTSCQPNWSKCLWKFPKV

SEQ ID NO: 24807 - protein, 9 aa, Homo sapiens
KCNRTDFTT

SEQ ID NO: 24808 - protein, 329 aa, Homo sapiens
ISRFAGMGNLLKVLTREIENYPHFFLDFENAQPTEGEREIWNQISAVLQDSESILADLQAYKGAGPEIRDAIQNPNDIQLQEKAWNAVCPLVVRLKRFYEFSIRLEKALQSLLESLTCPPYTPTQHLEREQALAKEFAEILHFTLRFDELKMRNPAIQNDFSYYRRTISRNRINNMHLDIENEVNNEMANRMSLFYAEATPMLKTLSNATMHFVSENKTLPIENTTDCLSTMTSVCKVMLETPEYRSRFTSEETLMFCMRVMVGVIILYDHVHPVGAFCKTSKIDMKGCIKVLKEQAPDSVEGLLNALRFTTKHLNDESTSKQIRAMLQ

SEQ ID NO: 24809 - protein, 51 aa, Homo sapiens
IETIEAGFMTKDLAACIKGLPNVQRSDYLNTFEFMDKLGENLKIKLAQAKL

SEQ ID NO: 24810 - protein, 18 aa, Homo sapiens
VSRKGMSLQERGANVQPA

SEQ ID NO: 24811 - protein, 9 aa, Homo sapiens
MCAKCVRDR

SEQ ID NO: 24812 - protein, 246 aa, Homo sapiens
KSTTTGHLIYKCGGVDKRTIEKFEKEAAEMGKCSFKYAWVLDKLKAEREHGITIDISLWKFETSKYYVTIIDAPGHRDLIKNMITGTSQADCAVLIVAAGFGEFEAGISKNGQTREHALLAYTLGVKQLIVGVNKMDSTEPPYSHKRYEEIVKEVSTYIKKIGHNTDTVAFVPVSGWNGDNTLEPSANMPWFKGWKVTRKDGNASGTTLLEALDCILPPTRPTDKPLCLPLQDVYKIGGIGTVPVG

SEQ ID NO: 24813 - protein, 733 aa, Homo sapiens
ITYNPFLFKMPEEVHHGEEEVETFAFQAEIAQLMSLIINTFYSNKEIFLRELISNASDALDKIRYESLTDPSKLDSGKELKIDIIPNPQERTLTLVDTGIGMTKADLINNLGTIAKSGTKAFMEALQAGADISMIGQFGVGFYSAYLVAEKVVVITKHNDDEQYAWESSAGGSFTVRADHGEPIGRGTKVILHLKEDQTEYLEERRVKEVVKKHSQFIGYPITLYLEKEREKEISDDEAEEEKGEKEEEDKDDEEKPKIEDVGSDEEDDSGKDKKKKTKKIKEKYIDQEELNKTKPIWTRNPDDITQEEYGEFYKSLTNDWEDHLAVKHFSVEGQLEFRALLFIPRRAPFDLFENKKKKNNIKLYVRRVFIMDSCDELIPEYLNFIRGVVDSEDLPLNISREMLQQSKILKVIRKNIVKKCLELFSELAEDKENYKKFYEAFSKNLKLGIHEDSTNRRRLSELLRYHTSQSGDEMTSLSEYVSRMKETQKSIYYITGESKEQVANSAFVERVRKRGFEVVYMTEPIDEYCVQQLKEFDGKSLVSVTKEGLELPEDEEEKKKMEESKAKFENLCKLMKEILDKKVEKVTISNRLVSSPCCIVTSTYGWTANMERIMKAQALRDNSTMGYMMAKKHLEINPDHPIVETLRQKAEADKNDKAVKDLVVLLFETALLSSGFSLEDPQTHSNRIYRMIKLGLGIDEDEVAAEEPNAAVPDEIPPLEGDEDASRMEEVD

SEQ ID NO: 24814 - protein, 185 aa, Homo sapiens
ISSIEQKTSADGNEKKIEMVRAYREKIEKELEAVCQDVLSLLDNYLIKNCSETQYESKVFYLKMKGDYYRYLAEVATGEKRATVVESSEKAYSEAHEISKEHMQPTHPIRLGLALNYSVFYYEIQNAPEQACHLAKTAFDDAIAELDTLNEDSYKDSTLIMQLLRDNLTLWTSDQQDDDGGEGNN

SEQ ID NO: 24815 - protein, 106 aa, Homo sapiens
KMVKQIESKTAFQEALDAAGDKLVVVDFSATWCGPCKMIKPFFHSLSEKYSNVIFLEVDVDDCQDVASECEVKCMPTFQFFKKGQKVGEFSGANKEKLEATINELV

SEQ ID NO: 24816 - protein, 7 aa, Homo sapiens
LACSWES

SEQ ID NO: 24817 - protein, 21 aa, Homo sapiens
LRLSVPSPFRFRKHGLRCGCL

SEQ ID NO: 24818 - protein, 6 aa, Homo sapiens
MSLGKV

SEQ ID NO: 24819 - protein, 9 aa, Homo sapiens
MTVCLEASV

SEQ ID NO: 24820 - protein, 22 aa, Homo sapiens
LICLYTYTLCTKCRVIIMLTWT

SEQ ID NO: 24821 - protein, 36 aa, Homo sapiens
MLTAGPSVAVPPQAPFGYGYTAPPYGQPQPGFGYSM

SEQ ID NO: 24822 - protein, 1023 aa, Homo sapiens
MYLFVITAEDRQVSITASTRGFYLNQSTAYHFNPKPASPRFLSHSLVELLNQISPTFKKNFAVLQKKRVQRHPFERIATPFQVYSWTAPQAEHAMDCVRAEDAYTSRLGYEEHIPGQTRDWNEELQTTRELPRKNLPERLLRERAIFKVHSDFTAAATRGAMAVIDGNVMAINPSEETKMQMFIWNNIFFSLGFDVRDHYKDFGGDVAAYVAPTNDLNGVRTYNAVDVEGLYTLGTVVVDYRGYRVTAQSIIPGILERDQEQSVIYGSIDFGKTVVSHPRYLELLERTSRPLKILRHQVLNDRDEEVELCSSVECKGIIGNDGRHYILDLLRTFPPDLNFLPVPGEELPEECARAGFPRAHRHKLCCLRQELVDAFVEHRYLLFMKLAALQLMQQNASQLETPSSLENGGPSSLESKSEDPPGQEAGSEEEGSSASGLAKVKELAETIAADDGTADPRSREVIRNACKAVGSISSTAFDIRFNPDIFSPGVRFPESCQDEVRDQKQLLKDAAAFLLSCQIPGLKIGIGELITRSAKHIFKTYLQGVELSGLSAAISHFLNCFLSSYPNPVAHLPADELVSKKRNKRRKNRPPGAADNTAWAVMTPQELWKNICQEAKNYFDFDLECETVDQAVETYGLQKITLLREISLKTGIQVLLKEYSFDSRHKPAFTEEDVLNIFPVVKHVNPKASDAFHFFQSGQAKVQQGFLKEGCELINEALNLFNNVYGAMHVETCACLRLLARLHYIMGDYAEALSNQQKAVLMSERVMGTEHPNTIQEYMHLALYCFASSQLSTALSLLYRARYLMLLVFGEDHPEMALLDNNIGLVLHGVMEYDLSLRFLENALAVSTKYHGPKALKVALSHHLVARVYESKAEFRSALQHEKEGYTIYKTQLGEDHEKTKESSEYLKCLTQQAVALQRTMNEIYRNGSSANIPPLKFTAPSMASVLEQLNVINGILFIPLSQKDLENLKAEVARRHQLQEASRNRDRAEEPMATEPAPAGAPGDLGSQPPAAKDPSPSVQG

SEQ ID NO: 24823 - protein, 105 aa, Homo sapiens [sequence omitted]

SEQ ID NO: 24824 - protein, 345 aa, Homo sapiens
MRGMVAILIAFMKQRRMGLNDFIQKIANNSYACKHPEVQSILKISQPQEPELMNANPSPPPSPSQQINLGPSSNPHAKPSDFHFLKVIGKGSFGKVLLARHKAEEVFYAVKVLQKKAILKKKEEKHIMSERNVLLKNVKHPFLVGLHFSFQTADKLYFVLDYINGGELFYHLQRERCFLEPRARFYAAEIASALGYLHSLNIVYRDLKPENILLDSQGHIVLTDFGLCKENIEHNSTTSTFCGTPEYLAPEVLHKQPYDRTVDWWCLGAVLYEMLYGLPPFYSRNTAEMYDNILNKPLQLKPNITNSARHLLEGLLQKDRTKRLGAKDDFVSDVFLSSWAGRDVH

SEQ ID NO: 24825 - protein, 8 aa, Homo sapiens
LQDWEELG

SEQ ID NO: 24826 - protein, 114 aa, Homo sapiens
LTQHYDAKPQGRDDRYCESIMRRRGLTSPCKDINTFIHGNKRSIKAICENKNGNPHRENLRISKSSFQVTTCKLHGGSPWPPCQYRATAGFRNVVVACENGLPVHLDQSIFRRP

SEQ ID NO: 24827 - protein, 118 aa, Homo sapiens [sequence omitted]

SEQ ID NO: 24828 - protein, 51 aa, Homo sapiens
MWGLGTTSSFRWYSSDYRRSFQLNSPVDKMRKTGEQAFSVFTYKVRSVMGQ

SEQ ID NO: 24829 - protein, 173 aa, Homo sapiens
MHLSLLPDRRTHWNVGIDFTASNGNPLDPSSLHYINPMGTNEYLSAIWAVGQIIQDYDSDKMFPALGFGAQLPPDWKQYFILLIITDGVISDMEETRHAVVQASKLPMSIIIVGVGNADFAAMEFLDGDSRMLRSHTGEEAARDIVQFVPFREFRNVSVGLGWEGAVTGSQPP

SEQ ID NO: 24830 - protein, 148 aa, Homo sapiens
MEILNVTLVPYGNAQEQNVSGRWEFKCQHGEEECKFNKVEACVLDELDMELAFLTIVCMEEFEDMERSLPLCLQLYAPGLSPDTIMECAMGDRGMQLMHANAQRTDALQPPHEYVPWVTVNGVRIFLALSLTLIVPWSQGWTRQRDQR

SEQ ID NO: 24831 - protein, 47 aa, Homo sapiens
MRPLSCFVQKPLEDQTQLLTLVCQLYQGKKPDVCPSSTSSLRSVCFK

SEQ ID NO: 24832 - protein, 430 aa, Homo sapiens
MAKENRGDDGATERPKKAKEERRMDQMMPGKTKADAADPAPLPSQEPPRNSTEQQGLASGSSVSFVGASGCPEAYKRLLSSFYCKGTHGIMSPLAKKKLLAQVSKVEALQCQEEGCRHGAEPQASPAVHLPESPQSPKGLTENSRHRLTPQEGLQAPGGSLREEAQAGPCPAAPIFKGCFYTHPTEVLKPVSQHPRDFFSRLKDGVLLGPPGKEGLSVKEPQLVWGGDANRPSAFHKGGSRKGILYPKPKACWVSPMAKVPAESPTLPPTFPSSPGLGSKRSLEEEGAAHSGKRLRAVSPFLKEADAKKCGAKPAGSGLVSCLLGPALGPVPPEAYRGTMLHCPLNFTGTPGPLKGQAALPFSPLVIPAFPAHFLATAGPSPMAAGLMHFPPTSFDSALRHRLCPASSAWHAPPVTTYAAPHFFHLNTKL

SEQ ID NO: 24833 - protein, 77 aa, Homo sapiens
MQEKAFGAAGETIVIEELLDGEEVSCLCFTDGKTVAPMPPAQDHKRLLEGDGGPNTGGMGAYCPAPQVLPEDSAEVL

SEQ ID NO: 24834 - protein, 2454 aa, Homo sapiens
MPVWEDEGDDDAKKQTPKQRLLGWIQNKIPYLPITNFNQNWQDGKALGALVDSCAPGLCPDWESWDPQKPVDNAREAMQQADDWLGVPQVITPEEIIHPDVDEHSVMTYLSQFPKAKLKPGAPLKPKLNPKKARAYGRGIEPTGNMVKQPAKFTVDTISAGQGDVMVFVEDPEGNKEEAQVTPDSDKNKTYSVEYLPKVTGLHKVTVLFAGQHISKSPFEVSVDKAQGDASKVTAKGPGLEAVGNIANKPTYFDIYTAGAGVGDIGVEVEDPQGKNTVELLVEDKGNQVYRCVYKPMQPGPHVVKIFFAGDTIPKSPFVVQVGEACNPNACRASGRGLQPKGVRIRETTDFKVDTKAAGSGELGVTMKGPKGLEELVKQKDFLDGVYAFEYYPSTPGRYSIAITWGGHHIPKSPFEVQVGPEAGMQKVRAWGPGLHGGIVGRSADFVVESIGSEVGSLGFAIEGPSQAKIEYNDQNDGSCDVKYWPKEPGEYAVHIMCDDEDIKDSPYMAFIHPATGGYNPDLVRAYGPGLEKSGCIVNNLAEFTVDPKDAGKAPLKIFAQDGEGQRIDIQMKNRMDGTYACSYTPVKAIKHTIAVVWGGVNIPHSPYRVNIGQGSHPQKVKVFGPGVERSGLKANEPTHFTVDCTEAGEGDVSVGIKCDARVLSEDEEDVDFDIIHNANDTFTVKYVPPAAGRYTIKVLFASQEIPASPFRVKVDPSHDASKVKAEGPGLSKAGVENGKPTHFTVYTKGAGKAPLNVQFNSPLPGDAVKDLDIIDNYDYSHTVKYTPTQQGNMQVLVTYGGDPIPKSPFTVGVAAPLDLSKIKLNGLENRVEVGKDQEFTVDTRGAGGQGKLDVTILSPSRKVVPCLVTPVTGRENSTAKFIPREEGLYAVDVTYDGHPVPGSPYTVEASLPPDPSKVKAHGPGLEGGLVGKPAEFTIDTKGAGTGGLGLTVEGPCEAKIECSDNGDGTCSVSYLPTKPGEYFVNILFEEVHIPGSPFKADIEMPFDPSKVVASGPGLEHGKVGEAGLLSVDCSEAGPGALGLEAVSDSGTKAEVSIQNNKDGTYAVTYVPLTAGMYTLTMKYGGELVPHFPARVKVEPAVDTSRIKVFGPGIEGKDVFREATTDFTVDSRPLTQVGGDHIKAHIANPSGASTECFVTDNADGTYQVEYTPFEKGLHVVEVTYDDVPIPNSPFKVAVTEGCQPSRVQAQGPGLKEAFTNKPNVFTVVTRGAGIGGLGITVEGPSESKINCRDNKDGSCSAEYIPFAPGDYDVNITYGGAHIPGSPFRVPVKDVVDPSKVKIAGPGLGSGVRARVLQSFTVDSSKAGLAPLEVRVLGPRGLVEPVNVVDNGDGTHTVTYTPSQEGPYMVSVKYADEEIPRSPFKVKVLPTYDASKVTASGPGLSSYGVPASLPVDFAIDARDAGEGLLAVQITDQEGKPKRAIVHDNKDGTYAVTYIPDKTGRYMIGVTYGGDDIPLSPYRIRATQTGDASKCLATGPGIASTVKTGEEVGFVVDAKTAGKGKVTCTVLTPDGTEAEADVIENEDGTYDIFYTAAKPGTYVIYVRFGGVDIPNSPFTVMVTEEAYVPVSDMNGLGFKPFDLVIPFAVRKGEITGEVHMPSGKTATPEIVDNKDGTVTVRYAPTEVGLHEMHIKYMGSHIPESPLQFYVNYPNSGSVSAYGPGLVYGVANKTATFTIVTEDAGEGGLDLAIEGPSKAEISCIDNKDGTCTVTYLPTLPGDYSILVKYNDKHIPGSPFTAKITDDSRRCSQVKLGSAADFLLDISETDLSSLTASIKAPSGRDEPCLLKRLPNNHIGISFIPREVGEHLVSIKKNGNHVANSPVSIMVVQSEIGDARRAKVYGRGLSEGRTFEMSDFIVDTRDAGYGGISLAVEGPSKVDIQTEDLEDGTCKVSYFPTVPGVYIVSTKFADEHVPGSPFTVKISGEGRVKESITRTSRAPSVATVGSICDLNLKIPEINSSDMSAHVTSPSGRVTEAEIVPMGKNSHCVRFVPQEMGVHTVSVKYRGQHVTGSPFQFTVGPLGEGGAHKVRAGGPGLERGEAGVPAEFSIWTREAGAGGLSIAVEGPSKAEITFDDHKNGSCGVSYIAQEPGNYEVSIKFNDEHIPESPYLVPVIAPSDDARRLTVMSLQESGLKVNQPASFAIRLNGAKGKIDAKVHSPSGAVEECHVSELEPDKYAVRFIPHENGVHTIDVKFNGSHVVGSPFKVRVGEPGQAGNPALVSAYGTGLEGGTTGIQSEFFINTTRAGPGTLSVTIEGPSKVKMDCQETPEGYKVMYTPMAPGNYLISVKYGGPNHIVGSPFKAKVTGQRLVSPGSANETSSILVESVTRSSTETCYSAIPKASSDASKVTSKGAGLSKAFVGQKSSFLVDCSKAGSNMLLIGVHGPTTPCEEVSMKHVGNQQYNVTYVVKERGDYVLAVKWGEEHIPGSPFHVTVP

SEQ ID NO: 24835 - protein, 79 aa, Homo sapiens
MKEEAIKPPLKAFMKQRRMGLNDFIQKIANNSYACKHPEVQSILKISQPQEPELMNANPSPPVSFCMCRASVENCKGVS

SEQ ID NO: 24836 - protein, 16 aa, Homo sapiens
MLERMVITTLSPRQSS

SEQ ID NO: 24837 - protein, 63 aa, Homo sapiens
MTPSSRLSLPRSGPEDPLALAFKPTPFPSSLSVIISTAHPSPEHTNHLMQAPPANSNKAMSLF

SEQ ID NO: 24838 - protein, 14 aa, Homo sapiens
IDATHRPPVSISTL

SEQ ID NO: 24839 - protein, 28 aa, Homo sapiens
LECSAKGGRGDVGSADIQDLEKWLAKIA

SEQ ID NO: 24840 - protein, 76 aa, Homo sapiens
MSGGSADYNREHGGPEGMDPDGVIESNWNEIVDNFDDMNLKESLLRGIYAYGFEKPSAIQQRAIIPCIKGKRNWHF

SEQ ID NO: 24841 - protein, 18 aa, Homo sapiens
TALISVVTTASAGGEDER

SEQ ID NO: 24842 - protein, 9 aa, Homo sapiens
IAGTKSTTV

SEQ ID NO: 24843 - protein, 47 aa, Homo sapiens
LRVPWIQSAAPGERDPSLVEAQSSGRVHPACVWREAGKPVPGSWPQR

SEQ ID NO: 24844 - protein, 375 aa, Homo sapiens
TLGALRPAMVMEVGTLDAGGLRALLGERAAQCLLLDCRSFFAFNAGHIAGSVNVRFSTIVRRRAKGAMGLEHIVPNAELRGRLLAGAYHAVVLLDERSAALDGAKRDGTLALAAGALCREARAAQVFFLKGGYEAFSASCPELCSKQSTPMGLSLPLSTSVPDSAESGCSSCSTPLYDQGGPVEILPFLYLGSAYHASRKDMLDALGITALINVSANCPNHFEGHYQYKSIPVEDNHKADISSWFNEAIDFIDSIKNAGGRVFVHCQAGISRSATICLAYLMRTNRVKLDEAFEFVKQRRSIISPNFSFMGQLLQFESQVLAPHCSAEAGSPAMAVLDRGTSTTTVFNFPVSIPVHSTNSALSYLQSPITTSPSC

SEQ ID NO: 24845 - protein, 35 aa, Homo sapiens
ITSFFFELHLGSFFCARLFHPFSLPPVLLLFDLFD

SEQ ID NO: 24846 - protein, 79 aa, Homo sapiens
RDPGNIVFCSVSGDHLPRLGLLGQARTHGPWKSWSRGLNSRHLYRAEHDHIPAAAAGAQPGLHRSRWLRGPCGKHLSVG

SEQ ID NO: 24847 - protein, 213 aa, Homo sapiens
TSRAESASMTERRVPFSLLRGPSWDPFRDWYPHSRLFDQAFGLPRLPEEWSQWLGGSSWPGYVRPLPPAAIESPAVAAPAYSRALSRQLSSGVSEIRHTADRWRVSLDVNHFAPDELTVKTKDGVVEITGKHEERQDEHGYISRCFTRKYTLPPGVDPTQVSSSLSPEGTLTVEAPMPKLATQSNEITIPVTFESRAQLGGPEAAKSDETAAK

SEQ ID NO: 24848 - protein, 123 aa, Homo sapiens
LDPFPSVLTAARQTPAAKMVKQIESKTAFQEALDAAGDKLVVVDFSATWCGPCKMIKPFFHSLSEKYSNVIFLEVDVDDCQDVASECEVKCMPTFQFFKKGQKVGEFSGANKEKLEATINELV

SEQ ID NO: 24849 - protein, 133 aa, Homo sapiens
IAIMNDTVTIRTRKFMTNRLLQRKQMVIDVLHPGKATVPKTEIREKLAKMYKTTPDVIFVFGFRTHFGGGKTTGFGMIYDSLDYAKKNEPKHRLARHGLYEKKKTSRKQRKERKNRMKKVRGTAKANVGAGKK

SEQ ID NO: 24850 - protein, 15 aa, Homo sapiens
LLMGSMSITWELAAL

SEQ ID NO: 24851 - protein, 17 aa, Homo sapiens
LRLFLARVLRPRLPRHE

SEQ ID NO: 24852 - protein, 20 aa, Homo sapiens
MMPMSWCGTLSSYPTNLPTT

SEQ ID NO: 24853 - protein, 10 aa, Homo sapiens
RDFERPRSRS

SEQ ID NO: 24854 - protein, 407 aa, Homo sapiens
VLLPSSAPQRPPVSAPRPLARLCLTATMMFSGFNADYEASSSRCSSASPAGDSLSYYHSPADSFSSMGSPVNAQDFCTDLAVSSANFIPTVTAISTSPDLQWLVQPALVSSVAPSQTRAPHPFGVPAPSAGAYSRAGVVKTMTGGRAQSIGRRGKVEQLSPEEEEKRRIRRERNKMAAAKCRNRRRELTDTLQAETDQLEDEKSALQTEIANLLKEKEKLEFILAAHRPACKIPDDLGFPEEMSVASLDLTGGLPEVATPESEEAFTLPLLNDPEPKPSVEPVKSISSMELKTEPFDDFLFPASSRPSGSETARSVPDMDLSGSFYAADWEPLHSGSLGMGPMATELEPLCTPVVTCTPSCTAYTSSFVFTYPEADSFPSCAAAHRKGSSSNEPSSDSLSSPTLLAL

SEQ ID NO: 24855 - protein, 6 aa, Homo sapiens
MAFPLP

SEQ ID NO: 24856 - protein, 30 aa, Homo sapiens
ILLACFLILICLYTYTLCTKCRVIIMLTWT

SEQ ID NO: 24857 - protein, 20 aa, Homo sapiens
KDWQRRVATWFNQPARKIRR

SEQ ID NO: 24858 - protein, 114 aa, Homo sapiens
VDPRRRNKSTESLQANVQRLKEYRSKLILFPRKPSAPKKGDSSAEELKLATQLTGPVMPVRNVYKKEKARVITEEEKNFKAFASLRMARANARLFGIRAKRAKEAAEQDVEKKK

SEQ ID NO: 24859 - protein, 247 aa, Homo sapiens
LRQYRRRKMAATLLAARGAGPAPAWGPEAFTPDWESREVSTGTTIMAVQFDGGVVLGADSRTTTGSYIANRVTDKLTPIHDRIFCCRSGSAADTQAVADAVTYQLGFHSIELNEPPLVHTAASLFKEMCYRYREDLMAGIIIAGWDPQEGGQVYSVPMGGMMVRQSFAIGGSGSSYIYGYVDATYREGMTKEECLQFTANALALAMERDGSSGGVIRLAAIAESGVERQVLLGDQIPKFAVATLPPA

SEQ ID NO: 24860 - protein, 16 aa, Homo sapiens
LEASLRGRPEATVPPR

SEQ ID NO: 24861 - protein, 9 aa, Homo sapiens
VKTQRISPL

SEQ ID NO: 24862 - protein, 200 aa, Homo sapiens
IFSAISCFWDLPAPFLWLAPSCQPTMSSQIRQNYSTDVEAAVNSLVNLYLQASYTYLSLGFYFDRDDVALEGVSHFFRELAEEKREGYERLLKMQNQRGGRALFQDIKKPAEDEWGKTPDAMKAAMALEKKLNQALLDLHALGSARTDPHLCDFLETHFLDEEVKLIKKMGDHLTNLHRLGGPEAGLGEYLFERLTLKHD

SEQ ID NO: 24863 - protein, 125 aa, Homo sapiens
LTAQPRLMEPIYLVEIQCPEQVVGGIYGVLNRKRGHVFEESQVAGTPMFVVKAYLPVNESFGFTADLRSNTGGQAFPQCVFDHWQILPGDPFDNSSRPSQVVAETRKRKGLKEGIPALDNFLDKL

SEQ ID NO: 24864 - protein, 39 aa, Homo sapiens
VAREPSASLGQLGTHLAQLGRADALRVLSKLGSSGVCWA

SEQ ID NO: 24865 - protein, 33 aa, Homo sapiens
LSASRLLAAGPPAPTSRALERESSCLLRLYYAW

SEQ ID NO: 24866 - protein, 22 aa, Homo sapiens
MGSSFLANKFPFLSKRAIKSFQ

SEQ ID NO: 24867 - protein, 261 aa, Homo sapiens
KLASFLKDFDREVEIRIKQIESDRQNLLKEVDNLYNIEILRLPKALREMNWLDYFALGGNKQALEEAATADLDITEINKLTAEAIQTPLKSAKTRKVIQVDEMIVEEEEEEENERKNLQTARVKRCPPSKKRTQSIQGKGKGKRSSRANTVTPAVGRLEVSMVKPTPGLTPRFDSRVFKTPGLRTPAAGERIYNISGNGSPLADSKEIFLTVPVGGGESLRLLASDLQRHSIAQLDPEALGNIKKLSNRLAQICSSIRTHK

SEQ ID NO: 24868 - protein, 12 aa, Homo sapiens
ISSQSAHCDSGR

SEQ ID NO: 24869 - protein, 8 aa, Homo sapiens
KFPSINHD

SEQ ID NO: 24870 - protein, 9 aa, Homo sapiens
LLLVLNLEP

SEQ ID NO: 24871 - protein, 20 aa, Homo sapiens
KDLPLSPPLLLPSFPSQNIP

SEQ ID NO: 24872 - protein, 30 aa, Homo sapiens
KALFSWSRLIHCVPDVLTSAISPNVGNSTA

SEQ ID NO: 24873 - protein, 21 aa, Homo sapiens
RTPDKMKNLSKSWWKKYCCFV

SEQ ID NO: 24874 - protein, 14 aa, Homo sapiens
MAIAIKLGIAPFHF

SEQ ID NO: 24875 - protein, 9 aa, Homo sapiens
TRKKCFRRQ

SEQ ID NO: 24876 - protein, 16 aa, Homo sapiens
LVPTSRPLPSFLVYPL

SEQ ID NO: 24877 - protein, 7 aa, Homo sapiens
LVLRIPA

SEQ ID NO: 24878 - protein, 14 aa, Homo sapiens
KDSTFTLEQPSFQC

SEQ ID NO: 24879 - protein, 22 aa, Homo sapiens
RQRGCWSPSLRGATWCGSARAR

SEQ ID NO: 24880 - protein, 8 aa, Homo sapiens
LWAFTSVL

SEQ ID NO: 24881 - protein, 100 aa, Homo sapiens
KAITKAQKKDGKKRKRGRKESYSIYVYKVLKQVHPDTGISSKAMGIMNSFVNDIFERIASEASRLAHYKQALHHHVPRSADGRAPAAARRAGQARRVRGH

SEQ ID NO: 24882 - protein, 18 aa, Homo sapiens
LSSHFQIYPFSLRKPNSD

SEQ ID NO: 24883 - protein, 21 aa, Homo sapiens
LPCSVTPLEKKKKSRSILLSP

SEQ ID NO: 24884 - protein, 92 aa, Homo sapiens
ILRALPFQLGRCRMAPAKKGGEKKKGRSAINEVVTREYTINIHKRIHGVGFKKRAPRALKEIRKFAMKEMGTPDVRIDTRLNKAVWAKGIRC

SEQ ID NO: 24885 - protein, 58 aa, Homo sapiens
LVLRSSRSELVRRGWELVPAEIQWEEPAAARATPPLERILKEMKSALRNEVDCLLAFC

SEQ ID NO: 24886 - protein, 6 aa, Homo sapiens
IRIIAL

SEQ ID NO: 24887 - protein, 26 aa, Homo sapiens
LKRAGIRPGLQPATWIMLKRDMEYLQ

SEQ ID NO: 24888 - protein, 35 aa, Homo sapiens
VWKQQMYPQYATYYYPQYLQAKFGRHSGIPSEKEE

SEQ ID NO: 24889 - protein, 15 aa, Homo sapiens
ILPRSELPGASPGWS

SEQ ID NO: 24890 - protein, 51 aa, Homo sapiens
LGASDGVDNTVRPGDQGSSSQPNSEERGENTSYRMEEKSDFMLEKLETKSV

SEQ ID NO: 24891 - protein, 39 aa, Homo sapiens
RRSCGRCGSPTAAARTASSTWWTRWTWTGWRRPRRSCTR

SEQ ID NO: 24892 - protein, 22 aa, Homo sapiens
LHDYRKHGVCRLVTHKKIAVRW

SEQ ID NO: 24893 - protein, 11 aa, Homo sapiens
LIRFNFLGPMA

SEQ ID NO: 24894 - protein, 37 aa, Homo sapiens
LHSSHSRCGLCFRLSTMRFQNTVTRFLAQDSWFFQNQ

SEQ ID NO: 24895 - protein, 36 aa, Homo sapiens
ISNRRGVLMTSLVDHVRDLFCLRGTGKGWTAPLSLY

SEQ ID NO: 24896 - protein, 51 aa, Homo sapiens
VPDDGLTAQQLFNCGDGLTYNDFLILPGYIDFTADQVVSMIRNWVLNIKVS

SEQ ID NO: 24897 - protein, 636 aa, Homo sapiens
VCPRVRPVPACRTMESYHKPDQQKLQALKDTANRLRISSIQATTAAGSGHPTSCCSAAEIMAVLFFHTMRYKSQDPRNPHNDRFVLSKGHAAPILYAVWAEAGFLAEAELLNLRKISSDLDGHPVPKQAFTDVATGSLGQGLGAACGMAYTGKYFDKASYRVYCLLGDGELSEGSVWEAMAFASIYKLDNLVAILDINRLGQSDPAPLQHQMDIYQKRCEAFGWHAIIVDGHSVEELCKAFGQAKHQPTAIIAKTFKGRGITGVEDKESWHGKPLPKNMAEQIIQEIYSQIQSKKKILATPPQEDAPSVDIANIRMPSLPSYKVGDKIATRKAYGQALAKLGHASDRIIALDGDTKNSTFSEIFKKEHPDRFIECYIAEQNMVSIAVGCATRNRTVPFCSTFAAFFTRAFDQIRMAAISESNINLCGSHCGVSIGEDGPSQMALEDLAMFRSVPTSTVFYPSDGVATEKAVELAANTKGICFIRTSRPENAIIYNNNEDFQVGQAKVVLKSKDDQVTVIGAGVTLHEALAAAELLKKEKINIRVLDPFTIKPLDRKLILDSARATKGRILTVEDHYYEGGIGEAVSSAVVGEPGITVTHLAVNRVPRSGKPAELLKMFGIDRDAIAQAVRGLITKA

SEQ ID NO: 24898 - protein, 20 aa, Homo sapiens
LYSSKAGSHYATYTYSSDFL

SEQ ID NO: 24899 - protein, 111 aa, Homo sapiens
MDSTEPPYSHKRYEEIVKEVSTYIKKIGHNTDTVAFVPVSGWNGDNTLEPSANMPWFKGWKVTRKDGNASGTTLLEALDCILPPTRPTDKPLCLPLQDVYKIGGIGTVPVG

SEQ ID NO: 24900 - protein, 31 aa, Homo sapiens
MRREAPATAQAVAPPRRGAGQSRLVLQRNHP

SEQ ID NO: 24901 - protein, 7 aa, Homo sapiens
LLHLPLT

SEQ ID NO: 24902 - protein, 118 aa, Homo sapiens
IKQYIGPPSAAAIFKIYLSCLEELMKCQIIYPRQQLLTLRELEMIGFIENNVSKLSLLLNDISRKSEGLSGRVLRKLPFLAHALYVQAPTVTIEGFLQALSLAVDKQFEERKKLAAYI

SEQ ID NO: 24903 - protein, 11 aa, Homo sapiens
RAAANKGAAAG

SEQ ID NO: 24904 - protein, 307 aa, Homo sapiens
MDSTEPPYSQKREEEIVKEVSTYIKKIGYNPDTVAFVPISGWNGDNMLEPSANMPWLKGWKATRKDGSASGTMLLEALDCILPPTHPTDKPLRLPLQDVYKIGGIGTVPVGRVETGVLKPGVVVTFAPVNITTEVKSVEMHHEALSEALPGDNVGFNVKNVSVKDVRRGNVAGDSKNDPPMETADFIAQVIILNHPGQISAGYAPILDCHAAHIACKFAELKEKIDRGSGKKLEDGPKFLKSGDAAIVDMVPGKPIVESFSDYPPLGHFAVRDMRQTVAVGVIKAVDKKAAGGGKVTKSAQTAQKAK

SEQ ID NO: 24905 - protein, 10 aa, Homo sapiens
VDRVGSPPWD

SEQ ID NO: 24906 - protein, 11 aa, Homo sapiens
KAFGSAVGTSV

SEQ ID NO: 24907 - protein, 25 aa, Homo sapiens
VPIPPTESPGATVFFALHCRRGTKC

SEQ ID NO: 24908 - protein, 81 aa, Homo sapiens
LRDNIQGITKPAIRRLARRGGVKRISGLIYEETRGVLKVFLENVIRDAVTYTEHAKRKTVTAMDVVYALKRQGRTLYGFGG

SEQ ID NO: 24909 - protein, 29 aa, Homo sapiens
TRLATTRRLASSRATCSWPSATTRSSTNC

SEQ ID NO: 24910 - protein, 13 aa, Homo sapiens
RRPAVFLRCSWRM

SEQ ID NO: 24911 - protein, 60 aa, Homo sapiens
LCDSSHASSWGSGSITCAWRGGDSSSHPLVSGHILSNSPVAAVMCSSMGTHLSPFKGTLL

SEQ ID NO: 24912 - protein, 35 aa, Homo sapiens
RGPGIRRTGWHCLKRRLLGDCAARWIHCPRRFNQL

SEQ ID NO: 24913 - protein, 685 aa, Homo sapiens
LHSPGACGTEVDMDPQRSPLLEVKGNIELKRPLIKAPSQLPLSGSRLKRRPDQMEDGLEPEKKRTRGLGATTKITTSHPRVPSLTTVPQTQGQTTAQKVSKKTGPRCSTAIATGLKNQKPVPAVPVQKSGTSGVPPMAGGKKPSKRPAWDLKGQLCDLNAELKRCRERTQTLDQENQQLQDQLRDAQQQVKALGTERTTLEGHLAKVQAQAEQGQQELKNLRACVLELEERLSTQEGLVQELQKKQVELQEERRGLMSQLEEKERRLQTSEAALSSSQAEVASLRQETVAQAALLTEREERLHGLEMERRRLHNQLQELKGNIRVFCRVRPVLPGEPTPPPGLLLFPSGPGGPSDPPTRLSLSRSDERRGTLSGAPAPPTRHDFSFDRVFPPGSGQDEVFEEIAMLVQSALDGYPVCIFAYGQTGSGKTFTMEGGPGGDPQLEGLIPRALRHLFSVAQELSGQGWTYSFVASYVEIYNETVRDLLATGTRKGQGGECEIRRAGPGSEELTVTNARYVPVSCEKEVDALLHLARQNRAVARTAQNERSSRSHSVFQLQISGEHSSRGLQCGAPLSLVDLAGSERLDPGLALGPGERERLRETQAINSSLSTLGLVIMALSNKESHVPYRNSKLTYLLQNSLGGSAKMLMFVNISPLEENVSESLNSLRFASKVNQCVIGTAQANRK

SEQ ID NO: 24914 - protein, 223 aa, Homo sapiens
IWCAVLVTMSETVPPAPAASAAPEKPLAGKKAKKPAKAAAASKKKPAGPSVSELIVQAASSSKERGGVSLAALKKALAAAGYDVEKNNSRIKLGIKSLVSKGTLVQTKGTGASGSFKLNKKASSVETKPGASKVATKTKATGASKKLKKATGASKKSVKTPKKAKKPAATRKSSKNPKKPKTVKPKKVAKSPAKAKAVKPKAAKARVTKPKTAKPKKAAPKKK

SEQ ID NO: 24915 - protein, 26 aa, Homo sapiens
LPFRNMNPVSPELLIFQEKPRFQICR

SEQ ID NO: 24916 - protein, 9 aa, Homo sapiens
VSPRSHKFL

SEQ ID NO: 24917 - protein, 9 aa, Homo sapiens
LKNLSWKKY

SEQ ID NO: 24918 - protein, 63 aa, Homo sapiens
INSDTDKSETKESIVTEELIVVTSYTLGQCRQSEKEKMEQKAISKRFKFEEPLLQEIPGEFIY

SEQ ID NO: 24919 - protein, 7 aa, Homo sapiens
LSQFRAW

SEQ ID NO: 24920 - protein, 8 aa, Homo sapiens
IILWKENA

SEQ ID NO: 24921 - protein, 20 aa, Homo sapiens
LLGNLLWKPRVFPDQSLGAN

SEQ ID NO: 24922 - protein, 8 aa, Homo sapiens
LPEFGPPL

SEQ ID NO: 24923 - protein, 12 aa, Homo sapiens
RPSPKRVRGPLS

SEQ ID NO: 24924 - protein, 23 aa, Homo sapiens
KSFPQPMAQAALGISAQGNHIPL

SEQ ID NO: 24925 - protein, 42 aa, Homo sapiens
IHSFIPGNRQENKRLPKTKLLCKHLCTAMCVGICEKKRICEV

SEQ ID NO: 24926 - protein, 30 aa, Homo sapiens
MQLGPASSLVRFSSVFIASQNNVLRTFCSQ

SEQ ID NO: 24927 - protein, 12 aa, Homo sapiens
VAGKRWAFRRGL

SEQ ID NO: 24928 - protein, 85 aa, Homo sapiens
LRSTASLLATQESDVMVGPFKLRSRKQRTLSMIEEEIRAAQEREEELKRQRQVLQSTQSPRTKNAPSLPSRTCYKTAPGPRGHTG

SEQ ID NO: 24929 - protein, 48 aa, Homo sapiens
TEELYGNTFQLYKSADHRTLDKVLEVQPEKLELIMDEMKQILTPMAQK

SEQ ID NO: 24930 - protein, 25 aa, Homo sapiens
LEVGQGAMETGGSLGLEQRIHRQVP

SEQ ID NO: 24931 - protein, 49 aa, Homo sapiens
KFFKFKGFGSLSNLPRSFTLRRSSASISRQSHLEPDTFEATRPGAMGRG

SEQ ID NO: 24932 - protein, 9 aa, Homo sapiens
LVRGVPAAV

SEQ ID NO: 24933 - protein, 21 aa, Homo sapiens
IMLRTAFRVAALFSSLHLGNT

SEQ ID NO: 24934 - protein, 20 aa, Homo sapiens
TTSPFFELDPASTRVGVTIA

SEQ ID NO: 24935 - protein, 6 aa, Homo sapiens
RLVSKS

SEQ ID NO: 24936 - protein, 86 aa, Homo sapiens
RKKGEKRASSPFRRVREEEIEVDSRVADNSFDAKRGAAGDWGERANQVLKFTKGKSFRHEKTKKKRGSYRGGSISVQVNSIKFDSE

SEQ ID NO: 24937 - protein, 430 aa, Homo sapiens
LQYILNKYLKGKVVTKEKIQEAKDVYKEHFQDDVVNEKGWNYILEKYDGHLPIEIKAVPEGFVIPRGNVLFTVENTDPECYWLTNWIETILVQSWYPITVATNSREQKKILAKYLLETSGNLDGLEYKLHDFGYRGVSSQETAGIGASAHLVNFKGTDTVAGLALNKKYYGTKDPVPGYSVPAAEHSTITAWGKDHEKDAFEHIVTQFSSVPVSVVSNSYDIYNACEKIWGEDLRHLIVSRSTQAPLIIRPDSGNPLDTVLKVLEILGKKFPVTENSKGYKLLPPYLRVIQGDGVDINTLQEIVEGMKQKMWSIENIAFGSGGGLLQKLTRDLLNCSFKCSYVVTNGLGINVFKDPVADPNKRSKKGRLSLHRTPAGNFVTLEEGKGDLEEYGQDLLHTVFKNGKVTKSYSFDEIRKNAQLNIELEAAHH

SEQ ID NO: 24938 - protein, 25 aa, Homo sapiens
RPTTAGDKIAQPHPAVQRLPACAPS

SEQ ID NO: 24939 - protein, 24 aa, Homo sapiens
RRSLKSQMMTWDLAFLIKFLLPCK

SEQ ID NO: 24940 - protein, 43 aa, Homo sapiens
LAASQSRGRGAPEDPPSGSWRPRSAWAGSARCLPVPTRSSFAG

SEQ ID NO: 24941 - protein, 25 aa, Homo sapiens
KKTSFGSLKDEDRIFTNLYGRHDWR

SEQ ID NO: 24942 - protein, 42 aa, Homo sapiens
TICALGDGAAWPVQGLIRHFRPELEERMQRFAQQHQARQAAS

SEQ ID NO: 24943 - protein, 6 aa, Homo sapiens
KMAAPR

SEQ ID NO: 24944 - protein, 28 aa, Homo sapiens
MAVPFVEDWDLVQTLGEGAYGEARHRHA

SEQ ID NO: 24945 - protein, 29 aa, Homo sapiens
VPRSAAGGAPQPPSWLRRSWLTCCGSGRG

SEQ ID NO: 24946 - protein, 23 aa, Homo sapiens
IRAQELRFSTCSRGAIGIQRITR

SEQ ID NO: 24947 - protein, 6 aa, Homo sapiens
ITSQEP

SEQ ID NO: 24948 - protein, 115 aa, Homo sapiens
VGSQPPPVAPEPGPVPSSPSQEPPTKREYDQCRIQVRLPDGTSLTQTFRAREQLAAVRLYVELHRGEELGGGQDPVQLLSGFPRRAFSEADMERPLQELGLVPSAVLIVAKKCPS

SEQ ID NO: 24949 - protein, 44 aa, Homo sapiens
LERSSGSAEAMTLQPSWSGSRSVWTASSCSSTPTSWTSPMSSRK

SEQ ID NO: 24950 - protein, 27 aa, Homo sapiens
LQRSRLLRLSVPSPFRFRKHGLRCGCL

SEQ ID NO: 24951 - protein, 18 aa, Homo sapiens
ILTRLRCLLLFSELRNAA

SEQ ID NO: 24952 - protein, 38 aa, Homo sapiens
LGTVRAASRNCGQRLCVLAGRACSFLPWQPRAMAIIAL

SEQ ID NO: 24953 - protein, 26 aa, Homo sapiens
ICAMPPHMSRDSDLPLSSEFAELWGT

SEQ ID NO: 24954 - protein, 32 aa, Homo sapiens
MITGTSQADCAVLIFAAGVGEFEAGISKNGQT

SEQ ID NO: 24955 - protein, 80 aa, Homo sapiens
LLSATALLCSLGHPRPHLLRLPDLPSFPAFLWIPASGHPSPPSLQGPLLVSLLLEPLPPPPSLQNFSFTPHPPPLPPFLF

SEQ ID NO: 24956 - protein, 396 aa, Homo sapiens
RKMSGEDEQQEQTIAEDLVVTKYKMGGDIANRVLRSLVEASSSGVSVLSLCEKGDAMIMEETGKIFKKEKEMKKGIAFPTSISVNNCVCHFSPLKSDQDYILKEGDLVKIDLGVHVDGFIANVAHTFVVDVAQGTQVTGRKADVIKAAHLCAEAALRLVKPGNQNTQVTEAWNKVAHSFNCTPIEGMLSHQLKQHVIDGEKTIIQNPTDQQKKDHEKAEFEVHEVYAVDVLVSSGEGKAKDAGQRTTIYKRDPSKQYGLKMKTSRAFFSEVERRFDAMPFTLRAFEDEKKARMGVVECAKHELLQPFNVLYEKEGEFVAQFKFTVLLMPNGPMRITSGPFEPDLYKSEMEVQDAELKALLQSSASRKTQKKKKKKASKTAENATSGETLEENEAGD

SEQ ID NO: 24957 - protein, 6 aa, Homo sapiens
RIWMHF

SEQ ID NO: 24958 - protein, 19 aa, Homo sapiens
LAEDRPSEQLVEEEEPMNL

SEQ ID NO: 24959 - protein, 6 aa, Homo sapiens
VINSSL

SEQ ID NO: 24960 - protein, 467 aa, Homo sapiens
RNKNYLGSFIERDSLTLRASGCSWVQREPPALLLSRLPQPLASAWVRRGGIKPRSESGSFARGALGLCLPRGASGRHPALSRSSTPMIDTLRPVPFASEMAISKTVAWLNEQLELGNERLLLMDCRPQELYESSHIESAINVAIPGIMLRRLQKGNLPVRALFTRGEDRDRFTRRCGTDTVVLYDESSSDWNENTGGESVLGLLLKKLKDEGCRAFYLEGGFSKFQAEFSLHCETNLDGSCSSSSPPLPVLGLGGLRISSDSSSDIESDLDRDPNSATDSDGSPLSNSQPSFPVEILPFLYLGCAKDSTNLDVLEEFGIKYILNVTPNLPNLFENAGEFKYKQIPISDHWSQNLSQFFPEAISFIDEARGKNCGVLVHCLAGISRSVTVTVAYLMQKLNLSMNDAYDIVKMKKSNISPNFNFMGQLLDFERTLGLSSPCDNRVPAQQLYFTTPSNQNVYQVDSLQST

SEQ ID NO: 24961 - protein, 689 aa, Homo sapiens
IPRPEATMSTPAVPQDLQLPPSQRAQSAFKEQRRQKLKEHLLRRKTLFAYKQENEMLSSRDQRVVTSEDQVQEGTKVLKLKTKMADKENMKRPAESKNNTVVGKHCIPLKPSNELTNSTVVIDTHKPKDSNQTPHLLLTEDDPQSQHMTLSQAFHLKNNSKKKQMTTEKQKQDANMPKKPVLGSYRGQIVQSKINSFRKPLQVKDESSAATKKLSATIPKATKPQPVNTSSVTVKSNRSSNMTATTKFVSTTSQNTQLVRPPIRSHHSNTRDTVKQGISRTSANVTIRKGPHEKELLQSKTALSSVKTSSSQGIIRNKTLSRSIASEVIARPASLSNDKLMEKSEPVDQRRHTAGKAIVDSRSAQPKETSEERKARLSEWKAGKGRVLKRPPNSVVTQHEPAGQNEKPVGSFWTTMAEEDEQRLFTEKVNNTFSECLNLINEGCPKEDILVTLNDLIKNIPDAKKLVKYWICLALIEPITSPIENIIAIYEKAILAGAQPIEEMRHTIVDILTMKSQEKANLGENMEKSCASKEEVKEVSIEDTGVDVDPEKLEMESKLHRNLLFQDCEKEQDNKTKDPTHDVKTPNTETRTSCLIKYNVSTTPYLQSVKKKVQFDGTNSAFKELKFLTPVRRSRRLQEKTSKLPDMLKDHYPCVSSLEQLTELGRETDAFVCRPNAALCRVYYEADTT

SEQ ID NO: 24962 - protein, 25 aa, Homo sapiens
MHIKSFSRFDVSIFVRHWKITRMIL

SEQ ID NO: 24963 - protein, 17 aa, Homo sapiens
TDLSGSQPPKTPSGRKY

SEQ ID NO: 24964 - protein, 72 aa, Homo sapiens
KLWPTQGGCKLFEIFLVEKWGSKFPPLNLGRPSDCLTNRNSMEATLYRFLRLSLKRLAVPTSCHLGIIVLET

SEQ ID NO: 24965 - protein, 24 aa, Homo sapiens
REAHQWGHELSASCHSTPMSLGKV

SEQ ID NO: 24966 - protein, 29 aa, Homo sapiens
LDLGTLTRFLWGTAEDYFEFRWSPVVWHI

SEQ ID NO: 24967 - protein, 443 aa, Homo sapiens
IAMIIPSLEELDSLKYSDLQNLAKSLGLRANLRATKLLKALKGYIKHEARKGNENQDESQTSASSCDETEIQISNQEEAERQPLGHVTKTRRRCKTVRVDPDSQQNHSEIKISNPTEFQNHEKQESQDLRATAKVPSPPDEHQEAENAVSSGNRDSKVPSEGKKSLYTDESSKPGKNKRTAITTPNFKKLHEAHFKEMESIDQYIERKKKHFEEHNSMNELKQQPINKGGVRTPVPPRGRLSVASTPISQRRSQGRSCGPASQSTLGLKGSLKRSAISAAKTGVRFSAATKDNEHKRSLTKTPARKSAHVTVSGGTPKGEAVLGTHKLKTITGNSAAVITPFKLTTEATQTPVSNKKPVFDLKASLSRPLNYEPHKGKLKPWGQSKENNYLNQHVNRINFYKKTYKQPHLQTKEEQRKKREQERKEKKAKVLGMRRGLILAED

SEQ ID NO: 24968 - protein, 16 aa, Homo sapiens
INILREKRNILKNTIP

SEQ ID NO: 24969 - protein, 39 aa, Homo sapiens
IKIGMNGFRRAEYSNTWTPICRNSENFKKPIRSSMQRGR

SEQ ID NO: 24970 - protein, 33 aa, Homo sapiens
LGQSPGMAEREDAAGVRAALLDAEQSPVALRPL

SEQ ID NO: 24971 - protein, 27 aa, Homo sapiens
MATATVTANNGQTVTIPVQGKEGRVGY

SEQ ID NO: 24972 - protein, 16 aa, Homo sapiens
LATPWAWATPQPPTPL

SEQ ID NO: 24973 - protein, 23 aa, Homo sapiens
LQEMWAVPKRWMRLLLSSSRGPS

SEQ ID NO: 24974 - protein, 26 aa, Homo sapiens
TERSASRAPPGKFAVESRPLGPRGPA

SEQ ID NO: 24975 - protein, 6 aa, Homo sapiens
RVSHVI

SEQ ID NO: 24976 - protein, 47 aa, Homo sapiens
RAEPRSMEMDAPRPPSLAVPGAASRPGRAAISSSEPSPLLATLCFFS

SEQ ID NO: 24977 - protein, 39 aa, Homo sapiens
RAEPRSMEMDAPRPPSLAVPGAASRPGRTVDNGRLSPIH

SEQ ID NO: 24978 - protein, 202 aa, Homo sapiens
VRTSAEFLMKNSDLYGAKGAGIEIYPGSQCTLSDNGIHHCKEGILIKDFLDEHYDIPKISMVNNIIHNNEGYGVVLVKPTIFSDLQENAEDGTEENKALKIQTSGEPDVAERVDLEELIECATGKMELCARTDPSEQVEGNCEIVNELIAASTQKGQIKKKRLSELGITQADDNLMSQEMFVGIVGNQFKWNGKGSFGTFLF

SEQ ID NO: 24979 - protein, 6 aa, Homo sapiens
MQVALL

SEQ ID NO: 24980 - protein, 47 aa, Homo sapiens
LRLRGDGHQDRQRGLPGGVQPGARRRLGRHLMTSGCLPSCASPPGMP

SEQ ID NO: 24981 - protein, 166 aa, Homo sapiens
VRSRELESKPLKMADDLDFETGDAGASATFPMQCSALRKNGFVVLKGRPCKIVEMSTSKTGKHGHAKVHLVGIDIFTGKKYEDICPSTHNMDVPNIKRNDFQLIGIQDGYLSLLQDSGEVREDLRLPEGDLGKEIEQKYDCGEEILITVLSAMTEEAAVAIKAMAK

SEQ ID NO: 24982 - protein, 553 aa, Homo sapiens
LIPPASPPVEAQARFAAFSLCLITMSTNENANTPAARLHRFKNKGKDSTEMRRRRIEVNVELRKAKKDDQMLKRRNVSSFPDDATSPLQENRNNQGTVNWSVDDIVKGINSSNVENQLQATQAARKLLSREKQPPIDNIIRAGLIPKFVSFLGRTDCSPIQFESAWALTNIASGTSEQTKAVVDGGAIPAFISLLASPHAHISEQAVWALGNIAGDGSVFRDLVIKYGAVDPLLALLAVPDMSSLACGYLRNLTWTLSNLCRNKNPAPPIDAVEQILPTLVRLLHHDDPEVLADTCWAISYLTDGPNERIGMVVKTGVVPQLVKLLGASELPIVTPALRAIGNIVTGTDEQTQVVIDAGALAVFPSLLTNPKTNIQKEATWTMSNITAGRQDQIQQVVNHGLVPFLVSVLSKADFKTQKEAVWAVTNYTSGGTVEQIVYLVHCGIIEPLMNLLTAKDTKIILVILDAISNIFQAAEKLGETEKLSIMIEECGGLDKIEALQNHENESVYKASLSLIEKYFSVEEEEDQNVVPETTSEGYTFQVQDGAPGTFNF

SEQ ID NO: 24983 - protein, 26 aa, Homo sapiens
KVEMLRLSLARNLARAIIREGSLEGS

SEQ ID NO: 24984 - protein, 77 aa, Homo sapiens
LPEPGPSDSPGPKYPASQASRPQSFCPGCPCPGSPGHQAPRPGPSVVDAAGLRSPCPGQHGAPASARRFRFPSGAEL

SEQ ID NO: 24985 - protein, 18 aa, Homo sapiens
VLFCGKAFPSVPTRKATA

SEQ ID NO: 24986 - protein, 6 aa, Homo sapiens
LDPWAT

SEQ ID NO: 24987 - protein, 44 aa, Homo sapiens
LERNPMNLLNVGELLLICCISSNVQVMLKRNPVLLRSIDKPLAR

SEQ ID NO: 24988 - protein, 21 aa, Homo sapiens
LCLVRGKTGGAQKALVWNSES

SEQ ID NO: 24989 - protein, 7 aa, Homo sapiens
KPPPRSP

SEQ ID NO: 24990 - protein, 37 aa, Homo sapiens
REPSASLGQLGTHLAQLGRADALRVLSKLGSSGVCWA

SEQ ID NO: 24991 - protein, 16 aa, Homo sapiens
LPPPFPDWLWVATSSF

SEQ ID NO: 24992 - protein, 160 aa, Homo sapiens
IHTEVWTQFRRATQKETTMSLLPVPYTEAASLSTGSTVTIKGRPLACFLNEPYLQVDFHTEMKEESDIVFHFQVCFGRRVVMNSREYGAWKQQVESKNMPFQDGQEFELSISVLPDKYQVMVNGQSSYTFDHRIKPEAVKMVQVWRDISLTKFNVSYLKR

SEQ ID NO: 24993 - protein, 635 aa, Homo sapiens
IPLLPRAWPCGSSSLPPSPPPHPSPAASLGPASCAGVCWLPCARPSSQPSAGPAAMEVPQPEPAPGSALSPAGVCGGAQRPGHLPGLLLGSHGLLGSPVRAAASSPVTTLTQTMHDLAGLGSETPKSQVGTLLFRSRSRLTHLSLSRRASESSLSSESSESSDAGLCMDSPSPMDPHMAEQTFEQAIQAASRIIRNEQFAIRRFQSMPVRLLGHSPVLRNITNSQAPDGRRKSEAGSGAASSSGEDKENDGFVFKMPWKPTHPSSTHALAEWASRREAFAQRPSSAPDLMCLSPDRKMEVEELSPLALGRFSLTPAEGDTEEDDGFVDILESDLKDDDAVPPGMESLISAPLVKTLEKEEEKDLVMYSKCQRLFRSPSMPCSVIRPILKRLERPQDRDTPVQNKRRRSVTPPEEQQEAEEPKARVLRSKSLCHDEIENLLDSDHRELIGDYSKAFLLQTVDGKHQDLKYISPETMVALLTGKFSNIVDKFVIVDCRYPYEYEGGHIKTAVNLPLERDAESFLLKSPIAPCSLDKRVILIFHCEFSSERGPRMCRFIRERDRAVNDYPSLYYPEMYILKGGYKEFFPQHPNFCEPQDYRPMNHEAFKDELKTFRLKTRSWAGERSRRELCSRLQDQ

SEQ ID NO: 24994 - protein, 419 aa, Homo sapiens
RRPVGYCLLLITARGIMDRSKENCISGPVKATAPVGGPKRVLVTQQFPCQNPLPVNSGQAQRVLCPSNSSQRIPLQAQKLVSSHKPVQNQKQKQLQATSVPHPVSRPLNNTQKSKQPLPSAPENNPEEELASKQKNEESKKRQWALEDFEIGRPLGKGKFGNVYLAREKQSKFILALKVLFKAQLEKAGVEHQLRREVEIQSHLRHPNILRLYGYFHDATRVYLILEYAPLGTVYRELQKLSKFDEQRTATYITELANALSYCHSKRVIHRDIKPENLLLGSAGELKIADFGWSVHAPSSRRTTLCGTLDYLPPEMIEGRMHDEKVDLWSLGVLCYEFLVGKPPFEANTYQETYKRISRVEFTFPDFVTEGARDLISRLLKHNPSQRPMLREVLEHPWITANSSKPSNCQNKESASKQS

SEQ ID NO: 24995 - protein, 38 aa, Homo sapiens
MNYRLRPLEKFVTYFTRMEQLSDKESYKLSCQLEPENP

SEQ ID NO: 24996 - protein, 43 aa, Homo sapiens
LKPQSQVIFITFPSGMPPVLKPTTTPVEEQPCHQNRAKNGSPK

SEQ ID NO: 24997 - protein, 28 aa, Homo sapiens
MLHDHGLTGEPEVLCRDQRKALIPSLQP

SEQ ID NO: 24998 - protein, 18 aa, Homo sapiens
MPQTCDGTGQMHLGRSWW

SEQ ID NO: 24999 - protein, 177 aa, Homo sapiens
MGVGQLPVFRPPPHGVGSAALAASLGNSFPRRLKLAQFDYGRKCSEVARLTEGMSGREIAQLAVSWQATAYASKDGVLTEAMMDACVQDAVQQYRQKMRWLKAEGPGRGVEHPLSGVQGETLTSWSLATDPSYPCLAGPCTFRICSWMGTGLCPGPLSPRMSCGGGRPFCPPGHPLL

SEQ ID NO: 25000 - protein, 166 aa, Homo sapiens
MVRVGGGWMALDEFLVKNDPCRARGRTNIELREKFILPEGASQGMTPFRSRGRRSKPSSRAASPTRSSSSASQSNHSCTSMPSSPATPASGTKVIPSSGSKLKRPTPTFHSSRTSLAGDTSNSSSPASTGAKTNRAGKYLPRDLQARLRIWKQQPMWNVSLLPRSG

SEQ ID NO: 25001 - protein, 493 aa, Homo sapiens [sequence omitted]

SEQ ID NO: 25002 - protein, 45 aa, Homo sapiens
MEPRGGLAQNISLWILSSGNWMPTRRVILESCVGDHKAFVSQVPE

SEQ ID NO: 25003 - protein, 56 aa, Homo sapiens
MPEINTNHLDKQQVQLLAEMCILIDENDNKIGAETKKNCHLNENIEKGAALKQSFL

SEQ ID NO: 25004 - protein, 288 aa, Homo sapiens
MQLVSGGELFDRIVEKGFYTEKDASTLIRQVLDAVYYLHRMGIVHRDLKPENLLYYSQDEESKIMISDFGLSKMEGKGDVMSTACGTPGYVAPEVLAQKPYSKAVDCWSIGVIAYILLCGYPPFYDENDSKLFEQILKAEYEFDSPYWDDISDSAKDFIRNLMEKDPNKRYTCEQAARHPWIAGDTALNKNIHESVSAQIRKNFAKSKWRQAFNATAVVRHMRKLHLGSSLDSSNASVSSSLSLASQKDCLAPSTLCSFISSSSGVSGVGAERRPRPTTVTAVHSGSK

SEQ ID NO: 25005 - protein, 65 aa, Homo sapiens
MESCGIYKTTFKSIVKCDVDIHKDLYANTVLSGSTTMYPGIALQDAEGDHCPGSQHEEDQDHCSF

SEQ ID NO: 25006 - protein, 415 aa, Homo sapiens
MENLQRQLNLMKWTLCHRQNLPDRDVVRWASGGLALQGIYKASHQRGLTEKREELLSVPKEFLLLGPQQGTQMKTKEFTSPQAEFMFTQMVEKLGFRLTTSAKDGNWGFSLEAGLDHSKHPESKETQQSSSENSYFCSTKFSYIPLASCHFPIDQLQLSKPAVQELKCIEELLSQTTNPDRFSLLRHRIINFFHRFGSHVNQGPLHLGGIYWWKAISEGYCTEQLAEVRQQSAEALDIFIRDSYSGFGVKVAAGVNVSDSHSKTATQTKTSQNLQTKVQLSVAQTGGPPEADGLVQWKAGLIASNQTWCVIDRGLQLVPVWDIILSSHRSNFKDPLQVANFLKDSYTALTSITAQIQNGEELLSAGKEARVFLEDVKSWEVSDPEEQLKKLINFMKMLSQKLKSYDTWINICLTD

SEQ ID NO: 25007 - protein, 966 aa, Homo sapiens
MCPLAHPAQDLPLLPSQLSLDPSGPEWDCPLGSKDLEEEGPWGGGSGLPPTGCFPGSWRQDVGLDCKGSPEGAEARAWTVYYYSLLQSCLQQAGLPETQDRGQVPRTGCPGAEVTLCVLGSPSTFLPVLLEGGVQSPGNMLLCLSPAWLMKVPAPGQPGEAALLVSKAVSFHPGGLTFLDDFVPPRRATYFLAGLGLGPGRGREAAELARDLTCPTGASAELARLLEDRLLTRQLLAQQGGVAVPATLAFTYKPPGLLRGGDASLGLRLVELSGKEGQETLVKEEVEAFLRSEALGDILQVAVKLSGWRWRGRQAWRLHPRAELGAVVDTVLALLEKLEEEESVLVEAVYPPAQLPCSDGPSPGPGLAVRICAVVCRTQGDRPLLSKVVCGVGRGDRPLRHHNSLPRTLEVALAQCGLGEEAQVAAVRQRVKAAAEAALAAVLALEAGLSAEQRGGRRAHTDFLGVDFALTAAGGVLTPVALELNGGLCLEACGALEGLWAAPRLGPAADEAVAAPLVETMLRRSARCLMEGKQLLVVGAGGVSKKFVWEAARDYGLQLHLVESDPNHFASQLVQTFIHFDMTEHRRDEENARLLAELVRARGLKLDGCFSYWDDCLVLTALLCQELGLPCSSPAAMRLAKQKSLTQLHLLHHHGPPWPAPSLHAVPCCPLESEADVERAVHQVPLPGVMKLEFGAGAVGVRLVEDAPQCHEHFSRITRDLQGEADHPGIGLGWGNAMLLMEFVEGTEHDVDLVLFGGRLLAAFVSDNGPTRLPGFTETAACMPTGLAPEQEAQMVQAAFRCCLGCGLLDGVFNVELKLTGAGPRLIEINPRMGGFYLRDWILELYGVDLLLAAVMVACGLRPALPTRPRARGHLVGVMCLVSQHLQALSSTASRETLQALHDRGLLRLNLLEEALVPGEYEEPYCSVACAGPSPTEARLRLLGLCQGLGIDGPSYPVAHFLSHFK

SEQ ID NO: 25008 - protein, 21 aa, Homo sapiens
MTRHITAKVYCHLQRSSLLRS

SEQ ID NO: 25009 - protein, 122 aa, Homo sapiens
MYSLLLPFFLRRNLALLPRLECDGMILAHGKLRLPGSSDSPASASRVAGITGMCHHAPLARLVSNTLPQVILPPLGLQQAEELPRRQEVEQNTPSLVPIIDNIMTLHVMDQLTPSRSVNWFI

SEQ ID NO: 25010 - protein, 311 aa, Homo sapiens
MPNVLLPPKESNLFKRILKCYEQKQYKNGLKFCKMILSNPKFAEHGETLAMKGLTLNCLGKKEEAYEFVRKGLRNDVKSHVCWHVYGLLQRSDKKYDEAIKCYRNALKLDKDNLQILRDLSLLQIQMRDLEGYRETRYQLLQLRPTQRASWIGYAIAYHLLKDYDMALKLLEEFRQTQQVPPNKIDYEYSELILYQNQVMREADLLQESLEHIEMYEKQICDKLLVEEIKGEILLKLGRLKEASEVFKNLIDRNAENWCYYEGLEKALQISTLEERLQIYEEISKQHPKAITPRRLPLTLVPGFYNPGTCY

SEQ ID NO: 25011 - protein, 289 aa, Homo sapiens
MPSSTGRTMYVLPFSMGPVGSPLSRIGVQLTDSAYVVASMRIMTRLGTPVLQALGDGDFVKCLHSVGQPLTGQGEPVSQWPCNPEKTLIGHVPDQREIISFGSGYGGNSLLGKKCFALRIASRLARDEGWLAEHMLILGITSPAGKKRYVAAAFPSACGKTNLAMMRPALPGWKVECVGDDIAWMRFDSEGEGLSDHTLGSGSCQSLGVSSLVFTMTLSVRKFPEHPTLLHSSGSPATRETAFPHQILGPSQDRGGWSRTFFGLTSQVFLVWSFLSFTSPNRSTPGHQP

SEQ ID NO: 25012 - protein, 72 aa, Homo sapiens
MHAHVLQALANVNIGSLICNVGAGGPAPAAGAAPAGGPAPSTAAAPAEEKKVEAKKEESEESDDDMGFGLFD

SEQ ID NO: 25013 - protein, 511 aa, Homo sapiens
MMIAEEESLKERLIKSISVCQKELNTLCSELHVEPFQEEGETTILQLEKDLRTQVELMRKQKKERKQELKLLQEQDQELCEILCMPHYDIDSASVPSLEELNQFRQHVTTLRETKASRREEFVSIKRQIILCMEALDHTPDTSFERDVVCEDEDAFCLSLENIATLQKLLRQLEMQKSQNEAVCEGLRTQIRELWDRLQIPEEEREAVATIMSGSKAKVRKALQLEVDRLEELKMQNMKKVIEAIRVELVQYWDQCFYSQEQRQAFAPFCAEDYTESLLQLHDAEIVRLKNYYEVHKELFEGVQKWEETWRLFLEFERKASDPNRFTNRGGNLLKEEKQRAKLQKMLPKLEEELKARIELWEQEHSKAFMVNGQKFMEYVAEQWEMHRLEKERAKQERQLKNKKQTETEMLYGSAPRTPSKRRGLAPNTPGKARKLNTTTMSNATANSSIRPIFGGTVYHSPVSRLPPSGSKPVAASTCSGKKTPRTGRHGANKENLELNGSILSEGSVPL

SEQ ID NO: 25014 - protein, 180 aa, Homo sapiens
MMIAEEESLKERLIKSISVCQKELNTLCSELHVEPFQEEGETTILQLEKDLRTQVELMRKQKKERKQELKLLQEQDQELCEILCMPHYDIDSASVPSLEELNQFRQHVTTLRETKASRREEFVSIKRQIILCMEALDHTPDTSFERDVVCEDEDAFCLSLENIATLQKLLRQVLSSQIMP

SEQ ID NO: 25015 - protein, 99 aa, Homo sapiens [sequence omitted]

SEQ ID NO: 25016 - protein, 72 aa, Homo sapiens [sequence omitted]

SEQ ID NO: 25017 - protein, 285 aa, Homo sapiens
MDTLPDNRTRVVEDNHSYYVSRLYGPSEPHSRELWVDVAEANRSQVKIHTILSNTHRQASRVVLSFDFPFYGHPLRQITIATGGFIFMGDVIHRMLTATQYVAPLMANFNPGYSDNSTVVYFDNGTVFVVQWDHVYLQGWEDKGSFTFQAALHHDGRIVFAYKEIPMSVPEISSSQHPVKTGLSDAFMILNPSPDVPESRRRSIFEYHRIELDPSKVTSMSAVEFTPLPTCLQHRSCDACMSSDLTFNCSWCHVLQRSLNNQDENTYVNCLDSQQCHGSSESRRP

SEQ ID NO: 25018 - protein, 458 aa, Homo sapiens
MQNPETGVRMQNQRVLVTSVPHAMTGSDVLQWIVQRLWISSLEAQNLGNFIVRYGYIYPLQDPKNLILKPDGSLYRFQTPYFWPTQQWPAEDTDYAIYLAKRNIKKKGILEEYEKENYNFLNQKMNYKWDFVIMQAKEQYRAGKERNKADRYALDCQEKAYWLVHRCPPGMDNVLDYGLDRVTNPNEVKKQTVVAVKKEIMYYQQALMRSTVKSSVSLGGIVKYSEQFSSNDAIMSGCLPSNPWITDDTQFWDLNAKLVEIPTKMRVERWAFNFSELIRDPKGRQSFQYFLKKEFSGENLGFWEACEDLKYGDQSKVKEKAEEIYKLFLAPGARRWINIDGKTMDITVKGLKHPHRYVLDAAQTHIYMLMKKDSYARYLKSPIYKDMLAKAIEPQETTKKSSTLPFMRRHLRSSPSPVILRQLEEEAKAREAANTVDITQVMSKLDRRSQLQKELPPK

SEQ ID NO: 25019 - protein, 422 aa, Homo sapiens
MCAPPRGAPPEHPAPTGLCRSSCAELQARVMAALRQPQVAELLAEARRAFREEFGAEPELAVSAPGRVNLIGEHTDYNQGLVLPMALELMTVLVGSPRKDGLVSLLTTSEGADEPQRLQFPLPTAQRSLEPGTPRWANYVKGVIQYYPAAPLPGFSAVVVSSVPLGGGLSSSASLEVATYTFLQQLCPDSGTIAARAQVCQQAEHSFAGMPCGIMDQFISLMGQKGHALLIDCRSLETSLVPLSDPKLAVLITNSNVRHSLASSEYPVRRRQCEEVARALGKESLREVQLEELEAARDLVSKEGFRRARHVVGEIRRTAQAAAALRRGDYRAFGRLMVESHRSLRDDYEVSCPELDQLVEAALAVPGVYGSRMTGGGFGGCTVTLLEASAAPHAMRHIQEHYGGTATFYLSQAADGAKVLCL

SEQ ID NO: 25020 - protein, 75 aa, Homo sapiens
MTTPCNGPGTVAYACNTSTLGGRGGRITREEHKKHSSGCAFLSVKKQFEELTLGEFLKLDRERAKNKIERALLAE

SEQ ID NO: 25021 - protein, 86 aa, Homo sapiens
MRFRKGQGVARSRTARLQPDRCPDLSVPSPAQSHHGLLDTADAAALEEFHVSPETAGPAPGRIAVASLPLLHPGGCSPLPPAPGAP

SEQ ID NO: 25022 - protein, 338 aa, Homo sapiens [sequence omitted]

SEQ ID NO: 25023 - protein, 132 aa, Homo sapiens [sequence omitted]

SEQ ID NO: 25024 - protein, 85 aa, Homo sapiens [sequence omitted]

SEQ ID NO: 25025 - protein, 138 aa, Homo sapiens
MPTWALLRKPLGKTDAGNGAFWDPCSAASESQHALGYLWPSFPWDLTYDRPPLLGVVTKMKMQRTIVIRRDYLHYIRKYNRFEKRHKNMSVHLSPCFRDVQIGDIVTVGECRPLSKTVRFNVLKVTKAAGTKKQFQKF

SEQ ID NO: 25026 - protein, 16 aa, Homo sapiens
MNAHFLVGRKMLEFMN

SEQ ID NO: 25027 - protein, 494 aa, Homo sapiens
MLAWISCRTVAESLQQVRQQLKKLEELEQKYTYEHDPITKNKQVLWDRTFSLFQQLIQSSFVVERQPCMPTHPQRPLVLKTGVQFTVKLRLLVKLQELNYNLKVKVLFDKDVNERNTVKGFRKFNILGTHTKVMNMEESTNGSLAAEFRHLQLKEQKNAGTRTNEGPLIVTEELHSLSFETQLCQPGLVIDLETTSLPVVVISNVSQLPSGWASILWYNMLVAEPRNLSFFLTPPCARWAQLSEVLSWQFSSVTKRGLNVDQLNMLGEKLLGPNASPDGLIPWTRFCKENINDKNFPFWLWIESILELIKKHLLPLWNDGCIMGFISKERERALLKDQQPGTFLLRFSESSREGAITFTWVERSQNGGEPDFHAVEPYTKKELSAVTFPDIIRNYKVMAAENIPENPLKYLYPNIDKDHAFGKYYSRPKEAPEPMELDGPKGTGYIKTELISVSEVHPSRLQTTDNLLPMSPEEFDEVSRIVGSVEFDSMMNTV

SEQ ID NO: 25028 - protein, 113 aa, Homo sapiens
MGLPVSWAPPALWVLGCCALLLSLWALCTACRRPEDAVAPRKRARRQRARLQGSATAAEAVSARLSRGPGWGPQGTDQPSSPPVPTEADPPLLPQQVGHQTARAAPGPAQQQG

SEQ ID NO: 25029 - protein, 869 aa, Homo sapiens
MEGSGFGGDLEALRGPRGFPGPPGPPGVPGLPGEPGRFGVNSSDVPGPAGLPGVPGREGPPGFPGLPGPPGPPGREGPPGRTGQKGSLGEAGAPGHKGSKGAPGPAGARGESGLAGAPGPAGPPGPPGPPGPPGPGLPAGFDDMEGSGGPFWSTARSADGPQGPPGLPGLKGDPGVPGLPGAKGEVGADGVPGFPGLPGREGIAGPQGPKGDRGSRGEKGDPGKDGVGQPGLPGPPGPPGPVVYVSEQDGSVLSVPGPEGRPGFAGFPGPAGPKGNLGSKGERGSPGPKGEKGEPGSIFSPDGGALGPAQKGAKGEPGFRGPPGPYGRPGYKGEIGFPGRPGRPGMNGLKGEKGEPGDASLGFGMRGMPGPPGPPGPPGPPGTPVYDSNVFAESSRPGPPGLPGNQGPPGPKGAKGEVGPPGPPGQFPFDFLQLEAEMKGEKGDRGDAGQKGERGEPGGGGFFGSSLPGPPGPPGPPGPRGYPGIPGPKGESIRGQPGPPGPQGPPGIGYEGRQGPPGPPGPPGPPSFPGPHRQTISVPGPPGPPGPPGPPGTMGASSGVRLWATRQAMLGQVHEVPEGWLIFVAEQEELYVRVQNGFRKVQLEARTPLPRGTDNEVAALQPPVVQLHDSNPYPRREHPHPTARPWRADDILASPPRLPEPQPYPGAPHHSSYVHLRPARPTSPPAHSHRDFQPVLHLVALNSPLSGGMRGIRGADFQCFQQARAVGLAGTFRAFLSSRLQDLYSIVRRADRAAVPIVNLKDELLFPSWEALFSGSEGPLKPGARIFSFDGKDVLRHPTWPQKSVWHGSDPNGRRLTESYCETWRTEAPSATGQASSLLGGRLLGQSAASCHHAYIVLCIENSFMTASK

SEQ ID NO: 25030 - protein, 689 aa, Homo sapiens
MWAPTSPPAGSSSPSQPTWKSSLYSSLAYSEAFHYSFAARPRRLTQLALAQRPEPQLLRLRPSSLRTQDISHLLTGVFRNLYSAEVIGDEVSASLIKARGSENERHEEFVDQLQQIRELYKQRLDEFEMLERHITQAQARAIAENERVMSQAGVQDLESLVRLPPVKSVSRWCIDSELLRKHHLISPEDYYTDTVPFHSAPKGISLPGCSKLTFSCEKRSVQKKELNKKLEDSCRKKLAEFEDELDHTVDSLTWNLTPKAKERTREPLKKASQPRNKNWMNHLRVPQRELDRLLLARMESRNHFLKNPRFFPPNTRYGGKSLVFPPKKPAPIGEFQSTEPEQSCADTPVFLAKPPIGFFTDYEIGPVYEMVIALQNTTTTSRYLRVLPPSTPYFALGLGMFPGKGGMVAPGMTCQYIVQFFPDCLGDFDDFILVETQSAHTLLIPLQARRPPPVLTLSPVLDCGYCLIGGVKMTRFICKNVGFSVGRFCIMPKTSWPPLSFKAIATVGFVEQPPFGILPSVFELAPGHAILVEVLFSPKSLGKAEQTFIIMCDNCQIKELVTIGIGQLIALDLIYISGEKSQPDPGELTDLTAQHFIRFEPENLRSTARKQLIIRNATHVELAFYWQIMKPNLQPLMPGETFSMDSIKCYPDKETAFSIMPRKGVLSPHTDHEFILSFSPHEVQMVSSQ

SEQ ID NO: 25031 - protein, 34 aa, Homo sapiens
MTPFEPVSYQNIRIPRQKLGEVSWAMPVLKWESC

SEQ ID NO: 25032 - protein, 59 aa, Homo sapiens
MKKTIKMHEKRNTKQKNDEKTPQGAVPAYLLDREGQSRAKVLSNMIKQKRKEKAVSNNN

SEQ ID NO: 25033 - protein, 54 aa, Homo sapiens
MEKRHNYVRKVAETAVQLFISGDKVNVAGLVLAGSADFKTELSQSDMFDQVSKK

SEQ ID NO: 25034 - protein, 40 aa, Homo sapiens
MTPKPPPDSASDSMQNLGSGDLPQPREEASSSGDRLRTGV

SEQ ID NO: 25035 - protein, 75 aa, Homo sapiens
MEQSIEQTTEILLCLSPVEVASLKEGINFFRNKSTGKDYVLYKNKSRLRACKNMCKHQGGLFIKDIEDLAGSVLH

SEQ ID NO: 25036 - protein, 31 aa, Homo sapiens
MGVGGMMGQGSSEESEKGTGAFKSPLGDGLQ

SEQ ID NO: 25037 - protein, 96 aa, Homo sapiens
MLSRNPDNYVRETKLDLQRVPRNYDPALHPFEVPREYIRALNATKLERVFAKPFLASLDGHRDGVNCLAKHPEKLATVLSGACDGEASVNLDDIFN

SEQ ID NO: 25038 - protein, 16 aa, Homo sapiens
LKYLKWIQNYFSNADN

SEQ ID NO: 25039 - protein, 23 aa, Homo sapiens
KPKKAAISSKKNSAKKNASSTKA

SEQ ID NO: 25040 - protein, 13 aa, Homo sapiens
LGLLLHCNFLPWT

SEQ ID NO: 25041 - protein, 620 aa, Homo sapiens
LAVRGSARVAGPALSLTGGSEAGRRSKSKMKYILVTGGVISGIGKGIIASSVGTILKSCGLHVTSIKIDPYINIDAGTFSPYEHGEVFVLDDGGEVDLDLGNYERFLDIRLTKDNNLTTGKIYQYVINKERKGDYLGKTVQVVPHITDAIQEWVMRQALIPVDEDGLEPQVCVIELGGTVGDIESMPFIEAFRQFQFKVKRENFCNIHVSLVPQPSSTGEQKTKPTQNSVRELRGLGLSPDLVVCRCSNPLDTSVKEKISMFCHVEPEQVICVHDVSSIYRVPLLLEEQGVVDYFLRRLDLPIERQPRKMLMKWKEMADRYDRLLETCSIALVGKYTKFSDSYASVIKALEHSALAINHKLEIKYIDSADLEPITSQEEPVRYHEAWQKLCSAHGVLVPGGFGVRGTEGKIQAIAWARNQKKPFLGVCLGMQLAVVEFSRNVLGWQDANSTEFDPTTSHPVVVDMPEHNPGQMGGTMRLGKRRTLFQTKNSVMRKLYGDADYLEERHRHRFEVNPVWKKCLEEQGLKFVGQDVEGERMEIVELEDHPFFVGVQYHPEFLSRPIKPSPPYFGLLLASVGRLSHYLQKGCRLSPRDTYSDRSGSSSPDSEITELKFPSINHD

SEQ ID NO: 25042 - protein, 14 aa, Homo sapiens
MVCLRNFKRCRPPD

SEQ ID NO: 25043 - protein, 20 aa, Homo sapiens
LAEAFVMSAAAETGVLKAGC

SEQ ID NO: 25044 - protein, 8 aa, Homo sapiens
LENTAQLL

SEQ ID NO: 25045 - protein, 77 aa, Homo sapiens
RLAWREGRFAGFRPLFQRPTKSPSPTPNSTPFGTMCGGWDPVAHPCRSCPSHARRRVFVVTPCCHLFSSLCEDLDWQ

SEQ ID NO: 25046 - protein, 43 aa, Homo sapiens
VEISRSHEFLPGLALEYGAGGLFGSPPRQVAGPTRPPGIPGLK

SEQ ID NO: 25047 - protein, 33 aa, Homo sapiens
RMCAGPWRKGAETGPYFCNDTVRHRKASLLCPF

SEQ ID NO: 25048 - protein, 465 aa, Homo sapiens
KMETLSFPRYNVAEIVIHIRNKILTGADGKNLTKNDLYPNPKPEVLHMIYMRALQIVYGIRLEHFYMMPVNSEVMYPHLMEGFLPFSNLVTHLDSFLPICRVNDFETADILCPKAKRTSRFLSGIINFIHFREACRETYMEFLWQYKSSADKMQQLNAAHQEALMKLERLDSVPVEEQEEFKQLSDGIQELQQSLNQDFHQKTIVLQEGNSQKKSNISEKTKRLNELKLSVVSLKEIQESLKTKIVDSPEKLKNYKEKMKDTVQKLKNARQEVVEKYEIYGDSVDCLPSCQLEVQLYQKKIQDLSDNREKLASILKESLNLEDQIESDESELKKLKTEENSFKRLMIVKKEKLATAQFKINKKHEDVKQYKRTVIEDCNKVQEKRGAVYERVTTINQEIQKIKLGIQQLKDAAEREKLKSQEIFLNLKTALEKYHDGIEKAAEDSYAKIDEKTAELKRKMFKMST

SEQ ID NO: 25049 - protein, 22 aa, Homo sapiens
MEPTWNCAGCYINISSPGKRCW

SEQ ID NO: 25050 - protein, 74 aa, Homo sapiens
VPRPWGARGVPGRGALGTRQPLAVPPPQPPGDLQAAISKRCSLLGRGPGGEGPALPRRRPLAASPGLRAMPRAV

SEQ ID NO: 25051 - protein, 20 aa, Homo sapiens
TMITKVVFPGRGLSIALRMC

SEQ ID NO: 25052 - protein, 18 aa, Homo sapiens
LSATQRKGRLVRPPLFVF

SEQ ID NO: 25053 - protein, 37 aa, Homo sapiens
LGSLVRLPSWSSPWPRYVPKGVTKPPSQPSAPSRSQT

SEQ ID NO: 25054 - protein, 16 aa, Homo sapiens
LPVPPALGTRLCIASP

SEQ ID NO: 25055 - protein, 36 aa, Homo sapiens
LLLRRGCIGERASSREFSVALPLPFSLHGLAPRPST

SEQ ID NO: 25056 - protein, 1914 aa, Homo sapiens
IPAPEPPRGSGARRSRRGLESAMANRRVGRGCWEVSPTERRPPAGLRGPAAEEEASSPPVLSLSHFCRSPFLCFGDVLLGASRTLSLALDNPNEEVAEVKISHFPAADLGFSVSQRCFVLQPKEKIVISVNWTPLKEGRVREIMTFLVNDVLKHQAILLGNAEEQKKKKRSLWDTIKKKKISASTSHNRRVSNIQNVNKTFSVSQKVDRVRSPLQACENLAMNEGGPPTENNSLILEENKIPISPISPAFNECHGATCLPLSVRRSTTYSSLHASENRELLNVHSANVSKVSFNEKAVTETSFNSVNVNGQRGENSKLSLTPNCSSTLNITQSQIHFLSPDSFVNNSHGANNELELVTCLSSDMFMKDNSQPVHLESTIAHEIYQKILSPDSFIKDNYGLNQDLESESVNPILSPNQFLKDNMAYMCTSQQTCKVPLSNENSQVPQSPEDWRKSEVSPRIPECQGSKSPKAIFEELVEMKSNYYSFIKQNNPKFSAVQDISSHSHNKQPKRRPILSATVTKRKATCTRENQTEINKPKAKRCLNSAVGEHEKVINNQKEKEDFHSYLPIIDPILSKSKSYKNEVTPSSTTASVARKRKSDGSMEDANVRVAITEHTEVREIKRIHFSPSEPKTSAVKKTKNVTTPISKRISNREKLNLKKKTDLSIFRTPISKTNKRTKPIIAVAQSSLTFIKPLKTDIPRHPMPFAAKNMFYDERWKEKQEQGFTWWLNFILTPDDFTVKTNISEVNAATLLLGIENQHKISVPRAPTKEEMSLRAYTARCRLNRLRRAACRLFTSEKMVKAIKKLEIEIEARRLIVRKDRHLWKDVGERQKVLNWLLSYNPLWLRIGLETTYGELISLEDNSDVTGLAMFILNRLLWNPDIAAEYRHPTVPHLYRDGHEEALSKFTLKKLLLLVCFLDYAKISRLIDHDPCLFCKDAEFKASKEILLAFSRDFLSGEGDLSRHLGLLGLPVNHVQTPFDEFDFAVTNLAVDLQCGVRLVRTMELLTQNWDLSKKLRIPAISRLQKMHNVDIVLQVLKSRGIELSDEHGNTILSKDIVDRHREKTLRLLWKIAFAFQVDISLNLDQLKEEIAFLKHTKSIKKTISLLSCHSDDLINKKKGKRDSGSFEQYSENIKLLMDWVNAVCAFYNKKVENFTVSFSDGRVLCYLIHHYHPCYVPFDAICQRTTQTVECTQTGSVVLNSSSESDDSSLDMSLKAFDHENTSELYKELLENEKKNFHLVRSAVRDLGGIPAMINHSDMSNTIPDEKVVITYLSFLCARLLDLRKEIRAARLIQTTWRKYKLKTDLKRHQEREKAARIIQLAVINFLAKQRLRKRVNAALVIQKYWRRVLAQRKLLMLKKEKLEKVQNKAASLIQAMWRRYRAKKYLCKVKAACKIQAWYRCWRAHKEYLAILKAVKIIQGCFYTKLERTRFLNVRASAIIIQRKWRAILPAKIAHEHFLMIKRHRAACLIQAHYRGYKGRQVFLRQKSAALIIQKYIRAREAGKHERIKYIEFKKSTVILQALVRGWLVRKRFLEQRAKIRLLHFTAAAYYHLNAVRIQRAYKLYLAVKNANKQVNSVICIQRWFRARLQEKRFIQKYHSIKKIEHEGQECLSQRNRAASVIQKAVRHFLLRKKQEKFTSGIIKIQALWRGYSWRKKNDCTKIKAIRLSLQVVNREIREENKLYKRTALALHYLLTYKHLSAILEALKHLEVVTRLSPLCCENMAQSGAISKIFVLIRSCNRSIPCMEVIRYAVQVLLNVSKYEKTTSAVYDVENCIDILLELLQIYREKPGNKVADKGGSIFTKTCCLLAILLKTTNRASDVRSRSKVVDRIYSLYKLTAHKHKMNTERILYKQKKNSSISIPFIPETPVRTRIVSRLKPDWVLRRDNMEEITNPLQAIQMVMDTLGIPY

SEQ ID NO: 25057 - protein, 11 aa, Homo sapiens
MSLQAQYRASS

SEQ ID NO: 25058 - protein, 65 aa, Homo sapiens
LASNALGLSRRRELPEDCTNYRGLLRPVCDSEAGLGVASGALALQLRTLAARVLIQIHAGDTHTE

SEQ ID NO: 25059 - protein, 21 aa, Homo sapiens
MSREYVNNRNSCHFNRLLLTS

SEQ ID NO: 25060 - protein, 20 aa, Homo sapiens
LALVPVAEETPPQLPGVFYE

SEQ ID NO: 25061 - protein, 16 aa, Homo sapiens
KRGLTLLSFKTVLFKA

SEQ ID NO: 25062 - protein, 45 aa, Homo sapiens
KMDKKAYFLGMMNGERLHGELLTIQCPSLLWYREDLDRVFMETVK

SEQ ID NO: 25063 - protein, 45 aa, Homo sapiens
MMLPTMLFCLSNLKGPSALNSSPDHLILQGPRSRSWSHQNFWAKG

SEQ ID NO: 25064 - protein, 45 aa, Homo sapiens
VLLGSRTPARMPARPPACRVRPFPPGLPGQRIRLCRYRFLTLRTR

SEQ ID NO: 25065 - protein, 118 aa, Homo sapiens
IGYDFRRPLAQLREVHLRRFNLRRSALELFFIDQANYFLNFPCKVGTTPVSSPSQTPRPQPGPIPPHTQVRNQVYSWLLRLRPPSQGYLSSRSPQEMLRASGLTQVRALGVRDVKSGP

SEQ ID NO: 25066 - protein, 22 aa, Homo sapiens
TMRFQNTVTRFLAQDSWFFQNQ

SEQ ID NO: 25067 - protein, 6 aa, Homo sapiens
IILNHV

SEQ ID NO: 25068 - protein, 7 aa, Homo sapiens
TQSQRAP

SEQ ID NO: 25069 - protein, 24 aa, Homo sapiens
IVLHLLYSLEDFHYVLTTLKCVNS

SEQ ID NO: 25070 - protein, 51 aa, Homo sapiens
MEFLILEILSNFYGRRLKSMAKLEISGMLFTLNASRIKSQLFLRNSSLKGI

SEQ ID NO: 25071 - protein, 72 aa, Homo sapiens
LRELGPPFPPAPQALADRDLRPRVGKKQRPGRRFYLERSKHLCLFGVGNSDLKKWCVVDSVSRHVFSQDFHH

SEQ ID NO: 25072 - protein, 29 aa, Homo sapiens
LAASIEAHRPATAARSHERQRRAELRRAG

SEQ ID NO: 25073 - protein, 29 aa, Homo sapiens
RLEHLASPRCRWPAVISRPFRIIRLSAEI

SEQ ID NO: 25074 - protein, 19 aa, Homo sapiens
MSFRLHLEWKLNMHILWRL

SEQ ID NO: 25075 - protein, 6 aa, Homo sapiens
KRVFDC

SEQ ID NO: 25076 - protein, 30 aa, Homo sapiens
LQYPLEGLRRSRGHRKPLSSLGPRGLLSTR

SEQ ID NO: 25077 - protein, 15 aa, Homo sapiens
LQHAFPAGSLYTFRL

SEQ ID NO: 25078 - protein, 255 aa, Homo sapiens
LKRDYAGKPQPPIKSERRNPPSYAMAGKKVLIVYAHQEPKSFNGSLKNVAVDELSRQGCTVTVSDLYAMNLEPRATDKDITGTLSNPEVFNYGVETHEAYKQRSLASDITDEQKKVREADLVIFQFPLYWFSVPAILKGWMDRVLCQGFAFDIPGFYDSGLLQGKLALLSVTTGGTAEMYTKTGVNGDSRYFLWPLQHGTLHFCGFKVLAPQISFAPEIASEEERKGMVAAWSQRLQTIWKEEPIPCTAHWHFGQ

SEQ ID NO: 25079 - protein, 133 aa, Homo sapiens
TPPAATATATAPGIAFGTAPAPAPAAAPLGTVPAPTSWRLGCSCPKSTRLPTCAPRPATTCTPPSWRPARRRSPWSRSTRWARYWAAAASARSTQASASPTTCRWPSNTWRRTGFPTGESCLMALECPWKWSC

SEQ ID NO: 25080 - protein, 62 aa, Homo sapiens
TAWDEGRRVCVLAFILLSWEPTAGGSFSGSLGGRWMGSRGPRGTGPGKRRRRRRRSRSPGEA

SEQ ID NO: 25081 - protein, 34 aa, Homo sapiens
LGPNGARLPGGRSAHRARLPLLLPDHLVSTRNEI

SEQ ID NO: 25082 - protein, 6 aa, Homo sapiens
LVLEVA

SEQ ID NO: 25083 - protein, 12 aa, Homo sapiens
LLKWMKTTDFCF

SEQ ID NO: 25084 - protein, 350 aa, Homo sapiens
INVVPFGIWQQVDKNLRFMILMDGVHPEMDTCIIVEYKGHKILNIVDCTRPNGGRLPMKVALMMSDFAGGASGFPMTFSGGKFTEEWKAQFIKTERKKLLNYKARLVKNLQPRIYCPFAGYFVESHPSDKYIKETNTKNDPNELNNLIKKNSDVITWTPRPGATLDLGRMLKDRTDSKGIIEPPEGTKIYKDSWDFEPYLEILNAALGDEIFLHSSWIKEYFTWAGFKDYNLVVRMIETDEDFNPFPGGYDYLVDFLDLSFPKERPQREHPYEEIHSRVDVIRHVVKNGLLWDELYIGFQTRLQRDPDIYHHLFWNHFQIKLPLTPPNWKSFLMCCEQNGPVILQECKTT

SEQ ID NO: 25085 - protein, 35 aa, Homo sapiens
VSKVSTTWKKILEDDKGAFQLYSKAIQRVTVSVCR

SEQ ID NO: 25086 - protein, 59 aa, Homo sapiens
LWSPVGRGAAILVARGVSRIRRVSLPSRWRGLCPCSVTAALGKRSAPKTLWLQLRLPIL

SEQ ID NO: 25087 - protein, 732 aa, Homo sapiens
LMKLRSSHNASKTLNANNMETLIECQSEGDIKEHPLLASCESEDSICQLIEVKKRKKVLSWPFLMRRLSPASDFSGALETDLKASLFDQPLSIICGDSDTLPRPIQDILTILCLKGPSTEGIFRRAANEKARKELKEELNSGDAVDLERLPVHLLAVVFKDFLRSIPRKLLSSDLFEEWMGALEMQDEEDRIEALKQVADKLPRPNLLLLKHLVYVLHLISKNSEVNRMDSSNLAICIGPNMLTLENDQSLSFEAQKDLNNKVKTLVEFLIDNCFEIFGENIPVHSSITSDDSLEHTDSSDVSTLQNDSAYDSNDPDVESNSSSGISSPSRQPQVPMATAAGLDSAGPQDAREVSPEPIVSTVARLKSSLAQPDRRYSEPSMPSSQECLESRVTNQTLTKSEGDFPVPRVGSRLESEEAEDPFPEEVFPAVQGKTKRPVDLKIKNLAPGSVLPRALVLKAFSSSSLDASSDSSPVASPSSPKRNFFSRHQSFTTKTEKGKPSREIKKHSMSFTFAPHKKVLTKNLSAGSGKSQDFTRDHVPRGVRKESQLAGRIVQENGCETHNQTARGFCLRPHALSVDDVFQGADWERPGSPPSYEEAMQGPAARLVASESQTVGSMTVGSMRARMLEAHCLLPPLPPAHHVEDSRHRGSKEPLPGHGLSPLPERWKQSRTVHASGDSLGHVSGPGRPELLPLRTVSESVQRNKRDCLVRRCSQPVFEADQFQYAKESYI

SEQ ID NO: 25088 - protein, 7 aa, Homo sapiens
LTPGPVP

SEQ ID NO: 25089 - protein, 360 aa, Homo sapiens
VQLHGIQQVLKDCIVHLCISKPERPMKFLREHFEKLEKEENRQILARQKSNSQSDSHDEEVSPTPPNPVVKARRRRGGVSAEVYTEEDAVSYVRKVIPKDYKTMTALAKAISKNVLFAHLDDNERSDIFDAMFPVTHIAGETVIQQGNEGDNFYVVDQGEVDVYVNGEWVTNISEGGSFGELALIYGTPRAATVKAKTDLKLWGIDRDSYRRILMGSTLRKRKMYEEFLSKVSILESLEKWERLTVADALEPVQFEDGEKIVVQGEPGDDFYIITEGTASVLQRRSPNEEYVEVGRLGPSDYFGEIALLLNRPRAATVVARGPLKCVKLDRPRFERVLGPCSEILKRNIQRYNSFISLTV

SEQ ID NO: 25090 - protein, 38 aa, Homo sapiens
IRPNSCFRGGNFHGEPSALVTAKEEEMAPVRERPWPRQ

SEQ ID NO: 25091 - protein, 9 aa, Homo sapiens
KMADSVASR

SEQ ID NO: 25092 - protein, 16 aa, Homo sapiens
VRVAPGSPPPAPGWSS

SEQ ID NO: 25093 - protein, 90 aa, Homo sapiens
LIPQPAVRNPCRIHETLPIAAGGHFALELTTPEQGRDSPDAGRLFCPFGDTSPPLPGPASLKGSPCSCLDAGFFSGSGKPAASRDDAPQR

SEQ ID NO: 25094 - protein, 34 aa, Homo sapiens
VRRLLWLLGPRRAGESRRPRGMLVRKPSGAAAAI

SEQ ID NO: 25095 - protein, 71 aa, Homo sapiens
LLLCSVTSPNPLPTQPAPFFFCLRCSISPSAAAATAAHSWCRCRAFTPKSFPQPMAQAALGISAQGNHIPL

SEQ ID NO: 25096 - protein, 11 aa, Homo sapiens
MLLITMFMNIP

SEQ ID NO: 25097 - protein, 53 aa, Homo sapiens
LRPLSSFQFRLIFVPLRLLPAPLPPAPAPSPGTRSPPLTERSRPVALRAAVPR

SEQ ID NO: 25098 - protein, 44 aa, Homo sapiens
IIWMNSSKNLKIQRFLERTSNSSISSVMLSMSPLLKSQAASRSQ

SEQ ID NO: 25099 - protein, 30 aa, Homo sapiens
KRLPKTKLLCKHLCTAMCVGICEKKRICEV

SEQ ID NO: 25100 - protein, 8 aa, Homo sapiens
LGPTSWAG

SEQ ID NO: 25101 - protein, 16 aa, Homo sapiens
LVAAAAAGGPAHVKPA

SEQ ID NO: 25102 - protein, 23 aa, Homo sapiens
LGASKIQRLAVSPGGKIVPISKM

SEQ ID NO: 25103 - protein, 46 aa, Homo sapiens
LHLESLWKRSRCMGTCIIYRQDGCLKTQSQTSRIQLLEALPGLQRR

SEQ ID NO: 25104 - protein, 60 aa, Homo sapiens
LLAPPCSPAPSCLPESPPPPPPQPWPRVVKAAVLRAPRIAPPEPKVLAPPRPLPPRSPKS

SEQ ID NO: 25105 - protein, 56 aa, Homo sapiens
LRAGGGRADSGLSAVAGISGGKGIAGEGDQRAAPAARSAPSRPLHHELGHRALGSV

SEQ ID NO: 25106 - protein, 24 aa, Homo sapiens
LAGFPVAVRCAAGFLVNFWMKPLN

SEQ ID NO: 25107 - protein, 21 aa, Homo sapiens
KHHFITSCQGFLVNFWMKPLN

SEQ ID NO: 25108 - protein, 30 aa, Homo sapiens
ISRDLPYPLTNYGRLYQNRENWRRYLWSCV

SEQ ID NO: 25109 - protein, 11 aa, Homo sapiens
IASAGFNLCPL

SEQ ID NO: 25110 - protein, 321 aa, Homo sapiens
ILAKYLLETSGNLDGLEYKLHDFGYRGVSSQETAGIGASAHLVNFKGTDTVAGLALNKKYYGTKDPVPGYSVPAAEHSTITAWGKDHEKDAFEHIVTQFSSVPVSVVSNSYDIYNACEKIWGEDLRHLIVSRSTQAPLIIRPDSGNPLDTVLKVLEILGKKFPVTENSKGYKLLPPYLRVIQGDGVDINTLQEIVEGMKQKMWSIENIAFGSGGGLLQKLTRDLLNCSFKCSYVVTNGLGINVFKDPVADPNKRSKKGRLSLHRTPAGNFVTLEEGKGDLEEYGQDLLHTVFKNGKVTKSYSFDEIRKNAQLNIELEAAHH

SEQ ID NO: 25111 - protein, 56 aa, Homo sapiens
LEDPYAAWRLLFLGTQVSSLYCYNFFSRTAVFFACTNGTSSSAGYFSTAGVWREEG

SEQ ID NO: 25112 - protein, 497 aa, Homo sapiens
LTKMATEAQSEGEVPARESGRSDAICSFVICNDSSLRGQPIIFNPDFFVEKLRHEKPEIFTELVVSNITRLIDLPGTELAQLMGEVDLKLPGGAGPASGFFRSLMSLKRKEKGVIFGSPLTEEGIAQIYQLIEYLHKNLRVEGLFRVPGNSVRQQILRDALNNGTDIDLESGEFHSNDVATLLKMFLGELPEPLLTHKHFNAHLKIADLMQFDDKGNKTNIPDKDRQIEALQLLFLILPPPNRNLLKLLLDLLYQTAKKQDKNKMSAYNLALMFAPHVLWPKNVTANDLQENITKLNSGMAFMIKHSQKLFKAPAYIRECARLHYLGSRTQASKDDLDLIASCHTKSFQLAKSQKRNRVDSCPHQEETQHHTEEALRELFQHVHDMPESAKKKQLIRQFNKQSLTQTPGREPSTSQVQKRARSRSFSGLIKRKVLGNQMMSEKKKKNPTPESVAIGELKGTSKENRNLLFSGSPAVTMTPTRLKWSEGKKEGKKGFL

SEQ ID NO: 25113 - protein, 55 aa, Homo sapiens
TAEAAAALHRPPGGHLESPAPRRPWPQVPTAGPRLPASLQPRPRQNNLRMSWWHR

SEQ ID NO: 25114 - protein, 34 aa, Homo sapiens
LEATWRVRPRGGHGHKCPQLAPGGVERSCWEAAG

SEQ ID NO: 25115 - protein, 41 aa, Homo sapiens
VDGHGKERARLRMIYPLFTDEESEAQRTVMKCDQTLRSPKR

SEQ ID NO: 25116 - protein, 10 aa, Homo sapiens
VAGAAYRAEV

SEQ ID NO: 25117 - protein, 20 aa, Homo sapiens
LTSGGSTSGLAGRIVPVEEL

SEQ ID NO: 25118 - protein, 54 aa, Homo sapiens
LLRLCSEESAVWLQLQFFPLSSAWNLTLPTLSPSRSRRRFRAAVQSWILQSLSH

SEQ ID NO: 25119 - protein, 19 aa, Homo sapiens
IELYKVYHNEFDFEFDLWK

SEQ ID NO: 25120 - protein, 18 aa, Homo sapiens
KCPICRSTIKGTVRTFLS

SEQ ID NO: 25121 - protein, 44 aa, Homo sapiens
LKVEHHPTPLGPTLPQGLLHLHLHPAWPGVHLCGSYLGAIELNG

SEQ ID NO: 25122 - protein, 13 aa, Homo sapiens
IQIGIKIINNVCH

SEQ ID NO: 25123 - protein, 454 aa, Homo sapiens
LRLPPGPIFCPLLQEMNLLPNIESPVTRQEKMATVWDEAEQDGIGEEVLKMSTEEIIQRTRLLDSEIKIMKSEVLRVTHELQAMKDKIKENSEKIKVNKTLPYLVSNVIELLDVDPNDQEEDGANIDLDSQRKGKCAVIKTSTRQTYFLPVIGLVDAEKLKPGDLVGVNKDSYLILETLPTEYDSRVKAMEVDERPTEQYSDIGGLDKQIQELVEAIVLPMNHKEKFENLGIQPPKGVLMYGPPGTGKTLLARACAAQTKATFLKLAGPQLVQMFIGDGAKLVRDAFALAKEKAPSIIFIDELDAIGTKRFDSEKAGDREVQRTMLELLNQLDGFQPNTQVKVIAATNRVDILDPALLRSGRLDRKIEFPMPNEEARARIMQIHSRKMNVSPDVNYEELARCTDDFNGAQCKAVCVEAGMIALRRGATELTHEDYMEGILEVQAKKKANLQYYA

SEQ ID NO: 25124 - protein, 35 aa, Homo sapiens
RRTMAELGEADEAELQRLVAAEQQKAQFTAQATCP

SEQ ID NO: 25125 - protein, 25 aa, Homo sapiens
VFISSFPWRFVQMPMSEVMLEKRSS

SEQ ID NO: 25126 - protein, 12 aa, Homo sapiens
TGASLSVPGVRR

SEQ ID NO: 25127 - protein, 27 aa, Homo sapiens
KAPKWILRHQKSILMHLMWMFMVQTGI

SEQ ID NO: 25128 - protein, 20 aa, Homo sapiens
VKIPCLYPSSTPWCGLLGAG

SEQ ID NO: 25129 - protein, 30 aa, Homo sapiens
KGSCSLPLPSPCSLPQPYPSYLTRRGKEGG

SEQ ID NO: 25130 - protein, 47 aa, Homo sapiens
MSFTQKINSTWFLNFCTKISRNSWMPLLSLAFLFPSSRAICSSCSRA

SEQ ID NO: 25131 - protein, 13 aa, Homo sapiens
TGAETLLEACIGW

SEQ ID NO: 25132 - protein, 18 aa, Homo sapiens
LPGLGAPRAAAKRLRSSL

SEQ ID NO: 25133 - protein, 31 aa, Homo sapiens
LILPHRIESLFLHTSLMPPSSVCHGPTSNIC

SEQ ID NO: 25134 - protein, 18 aa, Homo sapiens
MGKIENNIIKCKTSKVLF

SEQ ID NO: 25135 - protein, 8 aa, Homo sapiens
KMATAPRR

SEQ ID NO: 25136 - protein, 40 aa, Homo sapiens
VDPKKTIQMGSFRINPDGSQSVVEVTVTVPPNKVAHSGFG

SEQ ID NO: 25137 - protein, 27 aa, Homo sapiens
LRVEIWMMMLKLSLLQTSKLVTFYVSV

SEQ ID NO: 25138 - protein, 11 aa, Homo sapiens
VVPCLCNSSCC

SEQ ID NO: 25139 - protein, 101 aa, Homo sapiens
IMATRGHVQDPNDRRLRPIYDYLDNGNNKMAIQQADKLLKKHKDLHCAKVLKAIGLQRTGKQEEAFTLAQEVAALEPTDDNSLQALTILYREMHRRWHGSI

SEQ ID NO: 25140 - protein, 41 aa, Homo sapiens
TEKTPSLGSRIPSRAGWITTSRGLGATRCFLMKRITQNHRL

SEQ ID NO: 25141 - protein, 16 aa, Homo sapiens
IRQERQKALMEEARLS

SEQ ID NO: 25142 - protein, 21 aa, Homo sapiens
LWYRGSAPGLESLRVPLGLAR

SEQ ID NO: 25143 - protein, 18 aa, Homo sapiens
LGSSAGITHIPQNAGSKL

SEQ ID NO: 25144 - protein, 149 aa, Homo sapiens
LPAWEKAGEGEILCAPSGERLCQLPHSNVEVQESEWRLTEAKGPTMGKESGWDSGRAAVAAVVGGVVAVGTVLVALSAMGFTSVGIAASSIAAKMMSTAAIANGGGVAAGSLVAILQSVGAAGLSVTSKVIGGFAGTALGAWLGSPPSS

SEQ ID NO: 25145 - protein, 11 aa, Homo sapiens
VAAPWAVGNER

SEQ ID NO: 25146 - protein, 113 aa, Homo sapiens
VKTFGPFGSGSQDNLTMYMDLVDGIFLNQIMLQIDPRPTNQRINKHVNNDVNLRIQNLTILVRNIKTYYQRWGDDYDEEGEEADEEGEEGGDEENDPDYDPKKDQNPTECKQQ

SEQ ID NO: 25147 - protein, 1039 aa, Homo sapiens
RVRTCILPQRVIDVSGMWDQRLVRLALLQHLRAFYGIKVKGVRGQCDRRRHETAATEIGGKIFGVPFNALPHSAVPEYGHIPSFLVDACTSLEDHIHTEGLFRKSGSVIRLKALKNKVDHGEGCLSSAPPCDIAGLLKQFFRELPEPILPADLHEALLKAQQLGTEEKNKATLLLSCLLADHTVHVLRYFFNFLRNVSLRSSENKMDSSNLAVIFAPNLLQTSEGHEKMSSNTEKKLRLQAAVVQTLIDYASDIGRVPDFILEKIPAMLGIDGLCATPSLEGFEEGEYETPGEYKRKRRQSVGDFVSGALNKFKPNRTPSITPQEERIAQLSESPVILTPNAKRTLPVDSSHGFSSKKRKSIKHNFNFELLPSNLFNSSSTPVSVHIDTSSEGSSQSSLSPVLIGGNHLITAGVPRRSKRIAGKKVCRVESGKAGCFSPKISHKEKVRRSLRLKFNLGKNGREVNGCSGVNRYESVGWRLANQQSLKNRIESVKTGLLFSPDVDEKLPKKGSEKISKSEETLLTPERLVGTNYRMSWTGPNNSSFQEVDANEASSMVENLEVENSLEPDIMVEKSPATSCELTPSNLNNKHNSNITSSPLSGDENNMTKETLVKVQKAFSESGSNLHALMNQRQSSVTNVGKVKLTEPSYLEDSPEENLFETNDLTIVESKEKYEHHTGKGEKCFSERDFSPLQTQTFNRETTIKCYSTQMKMEHEKDIHSNMPKDYLSKQEFSSDEEIKKQQSPKDKLNNKLKENENMMEGNLPKCAAHSKDEARSSFSQQSTCVVTNLSKPRPMRIAKQQSLETCEKTVSESSQMTEHRKVSDHIQWFNKLSLNEPNRIKVKSPLKFQRTPVRQSVRRINSLLEYSRQPTGHKLASLGDTASPLVKSVSCDGALSSCIESASKDSSVSCIKSGPKEQKSMSCEESNIGAISKSSMELPSKSFLKMRKHPDSVNASLRSTTVYKQKILSDGQVKVPLDDLTNHDIVKPVVNNNMGISSGINNRVLRRPSERGRAWYKGSPKHPIGKTQLLPTSKPVDL

SEQ ID NO: 25148 - protein, 9 aa, Homo sapiens
LLATLMNSF

SEQ ID NO: 25149 - protein, 85 aa, Homo sapiens
ISLQLPSLACGRPVLLPSPVQPGTRVRLAQVSVRDWEATEGRESGTLLELKLPTLSSLNNYRAGLGGTDSIFRSLMGCWVDGAGK

SEQ ID NO: 25150 - protein, 30 aa, Homo sapiens
MWFCVSGNLMKKRKESVKTHFSMRLMSKCS

SEQ ID NO: 25151 - protein, 48 aa, Homo sapiens
RITATRCSRPSRFYNTWWNVSGRSTRSSRIQQLSQEYSLATSIGIKRS

SEQ ID NO: 25152 - protein, 44 aa, Homo sapiens
RTKKRRCRTPRPWTCSRRVWLWWCRTRCSAICRSRLLWKKSTPK

SEQ ID NO: 25153 - protein, 96 aa, Homo sapiens
LALRDPPLTPPRTSRDPHTHPSPPADPSLLGAGCPPPSPGPDLLPQVPGAAPARPPSNPAGGPGWGAPCGCGSGFWRCCFCCWHRPRAPRSPRRRT

SEQ ID NO: 25154 - protein, 7 aa, Homo sapiens
LGRRVLL

SEQ ID NO: 25155 - protein, 47 aa, Homo sapiens
RLQRAFQLPDCLFASPVISWLEMDPNCSCATGGSCSCASSCKCKECK

SEQ ID NO: 25156 - protein, 39 aa, Homo sapiens
LSPTSTARTARPLWAGNMNRPLRAARSTKRGSTSLNSTT

SEQ ID NO: 25157 - protein, 50 aa, Homo sapiens
LASPSPLCSLPRLSPGLRYFAFLKKGKKELNSPLPLLQSGCTSALHFAQR

SEQ ID NO: 25158 - protein, 46 aa, Homo sapiens
VGLHASSRPNALSMGVHATPSLHPFTDGHLSCFRFSCHECLSMGVP

SEQ ID NO: 25159 - protein, 23 aa, Homo sapiens
TVSPVFSLAGAWAGGNSRPKEAP

SEQ ID NO: 25160 - protein, 18 aa, Homo sapiens
TWVPGAFRVLAAAAGVQT

SEQ ID NO: 25161 - protein, 13 aa, Homo sapiens
LVRARAQRASSPW

SEQ ID NO: 25162 - protein, 46 aa, Homo sapiens
VSTVCEAAAPELEGGLILQRERWPPFLDLLLLQAQTPPPLFRTGTS

SEQ ID NO: 25163 - protein, 48 aa, Homo sapiens
LASRRAAPTPRWRRPRLPRRRPPRAAGPCPPWCPGQSPRARPWTPSWR

SEQ ID NO: 25164 - protein, 141 aa, Homo sapiens
VSGSDDFTLFLWSPAEDKKPLTRMTGHQALINQVLFSPDSRIVASASFDKSIKLWDGRTGKYLASLRGHVAAVYQIAWSADSRLLVSGSSDSTLKVWDVKAQKLAMDLPGHADEVYAVDWSPDGQRVASGGKDKCLRIWRR

SEQ ID NO: 25165 - protein, 107 aa, Homo sapiens
LLTLEPTFHHLLPIMQVSTAALAVLLCTMALCNQVLSAPLAADTPTACCFSYTSRQIPQNFIADYFETSSQCSKPSVIFLTKRGRQVCADPSEEWVQKYVSDLELSA

SEQ ID NO: 25166 - protein, 6 aa, Homo sapiens
MSATWS

SEQ ID NO: 25167 - protein, 535 aa, Homo sapiens
LSPGDGRSTWRGRVATAAAPARPGSDMEDIQTNAELKSTQEQSVPAESAAVLNDYSLTKSHEMENVDSGEGPANEDEDIGDDSMKVKDEYSERDENVLKSEPMGNAEEPEIPYSYSREYNEYENIKLERHVVSFDSSRPTSGKMNCDVCGLSCISFNVLMVHKRSHTGERPFQCNQCGASFTQKGNLLRHIKLHTGEKPFKCHLCNYACQRRDALTGHLRTHSVEKPYKCEFCGRSYKQRSSLEEHKERCRTFLQSTDPGDTASAEARHIKAEMGSERALVLDRLASNVAKRKSSMPQKFIGEKRHCFDVNYNSSYMYEKESELIQTRMMDQAINNAISYLGAEALRPLVQTPPAPTSEMVPVISSMYPIALTRAEMSNGAPQELEKKSIHLPEKSVPSERGLSPNNSGHDSTDTDSNHEERQNHIYQQNHMVLSRARNGMPLLKEVPRSYELLKPPPICPRDSVKVINKEGEVMDVYRCDHCRVLFLDYVMFTIHMGCHGFRDPFECNMCGYRSHDRYEFSSHIARGEHRALLK

SEQ ID NO: 25168 - protein, 68 aa, Homo sapiens
LEQKEMDLSALRVEEVQNVINAMQKILECPICLELIKEPVSTKCDHIFCKFCMLKLLNQKKGPSQCPL

SEQ ID NO: 25169 - protein, 55 aa, Homo sapiens
LEGPRETWCRCGLALPCARLGGKACSRVRAFRHRHVGRWCDSWPRREQRLPHLRG

SEQ ID NO: 25170 - protein, 52 aa, Homo sapiens
LLTESRLTILGFQRRLRYPQLETQRRVAFCSRTDLRGLKDGLVRSGTIMLSC

SEQ ID NO: 25171 - protein, 42 aa, Homo sapiens
LDPAAPLGLGATSAAPPLKSQSIQDGKPRRQTRIKCREGQYE

SEQ ID NO: 25172 - protein, 22 aa, Homo sapiens
VAAQRQDRLTVGVYESAKLMNV

SEQ ID NO: 25173 - protein, 12 aa, Homo sapiens
VCGAVSRSHVPG

SEQ ID NO: 25174 - protein, 40 aa, Homo sapiens
TRDQAPSPVTAAESSPLAAARPGAAPQGPSPDRLGRPDVH

SEQ ID NO: 25175 - protein, 25 aa, Homo sapiens
RSSMWRRRGSSLRFAIAKTSLPEAP

SEQ ID NO: 25176 - protein, 9 aa, Homo sapiens
VPHGTPPFC

SEQ ID NO: 25177 - protein, 35 aa, Homo sapiens
TLGQRIWRNPGLKSRFSSFKTYLNTSLHGSSRDPP

SEQ ID NO: 25178 - protein, 79 aa, Homo sapiens
ITQAQEELSPCLTPAARARAWARLRNPPLAPIPALTQTLPSSSVPSSPVQTTPLSQAVATPSRSSAAAAAALDLSGRRG

SEQ ID NO: 25179 - protein, 30 aa, Homo sapiens
LEVSLSSARRRTGSQHHGRTGCGKRSFGLR

SEQ ID NO: 25180 - protein, 15 aa, Homo sapiens
KMAAPSRVRCGRLCL

SEQ ID NO: 25181 - protein, 659 aa, Homo sapiens
VAAATRGFPGWCLSPASLAPRPPRIPLLPRAWPCGSSSLPPSPPPHPSPAASLGPASCAGVCWLPCARPSSQPSAGPAAMEVPQPEPAPGSALSPAGVCGGAQRPGHLPGLLLGSHGLLGSPVRAAASSPVTTLTQTMHDLAGLGSETPKSQVGTLLFRSRSRLTHLSLSRRASESSLSSESSESSDAGLCMDSPSPMDPHMAEQTFEQAIQAASRIIRNEQFAIRRFQSMPVRLLGHSPVLRNITNSQAPDGRRKSEAGSGAASSSGEDKENDGFVFKMPWKPTHPSSTHALAEWASRREAFAQRPSSAPDLMCLSPDRKMEVEELSPLALGRFSLTPAEGDTEEDDGFVDILESDLKDDDAVPPGMESLISAPLVKTLEKEEEKDLVMYSKCQRLFRSPSMPCSVIRPILKRLERPQDRDTPVQNKRRRSVTPPEEQQEAEEPKARVLRSKSLCHDEIENLLDSDHRELIGDYSKAFLLQTVDGKHQDLKYISPETMVALLTGKFSNIVDKFVIVDCRYPYEYEGGHIKTAVNLPLERDAESFLLKSPIAPCSLDKRVILIFHCEFSSERGPRMCRFIRERDRAVNDYPSLYYPEMYILKGGYKEFFPQHPNFCEPQDYRPMNHEAFKDELKTFRLKTRSWAGERSRRELCSRLQDQ

SEQ ID NO: 25182 - protein, 103 aa, Homo sapiens
LPPSAQPAVPAFVGCPAPGPPASLLPAPPRWRCPSRSPRQARLSVQQACAVAPSVRATSRASCWDLMASWGPRCGRPLPRRSPPSPRPCTTSPGSAAKPQRVR

SEQ ID NO: 25183 - protein, 16 aa, Homo sapiens
LSALLALVLRARAGSK

SEQ ID NO: 25184 - protein, 28 aa, Homo sapiens
TSTTGARRPEQAFRENVRRYRQQEMRTS

SEQ ID NO: 25185 - protein, 48 aa, Homo sapiens
ILTAELLEDLGPWVAGGSRRASWTDLKKTAFQDLLRLQLQLEVQNVFS

SEQ ID NO: 25186 - protein, 30 aa, Homo sapiens
LVSLPWTWAASPGWGMPWTLEKMLPASSRG

SEQ ID NO: 25187 - protein, 56 aa, Homo sapiens
LAPYSHYLLELWLRHYNRALSPLSKSWEMVIVNASPILEAPGCRGPQLAGCGGSGL

SEQ ID NO: 25188 - protein, 289 aa, Homo sapiens
LLPSAGPLRRSPQFPARTRSGPPNLRPKSGGGSGGKKMKNEIAAVVFFFTRLVRKHDKLKKEAVERFAEKLTLILQEKYKNHWYPEKPSKGQAYRCIRVNKFQRVDPDVLKACENSCILYSDLGLPKELTLWVDPCEVCCRYGEKNNAFIVASFENKDENKDEISRKVTRALDKVTSDYHSGSSSSDEETSKEMEVKPSSVTAAASPVYQISELIFPPLPMWHPLPRKKPGMYRGNGHQNHYPPPVPFGYPNQGRKNKPYRPIPVTWVPPPGMHCDRNHWINPHMLAPH

SEQ ID NO: 25189 - protein, 32 aa, Homo sapiens
TSSRREAAEPATTDPAEPPPPPRPHGGRQGHS

SEQ ID NO: 25190 - protein, 17 aa, Homo sapiens
LPEPLQRAWFQETQSPL

SEQ ID NO: 25191 - protein, 32 aa, Homo sapiens
LAAGDPRSPDRSRAGQPATMVALRPVQQLQGG

SEQ ID NO: 25192 - protein, 20 aa, Homo sapiens
MKSSSDPLDIKKDVLLPAWN

SEQ ID NO: 25193 - protein, 33 aa, Homo sapiens
LARRPESSERQLDSWKRLLGWKSGGLGYSQLCR

SEQ ID NO: 25194 - protein, 85 aa, Homo sapiens
VPLKILVSPWAAAPPVVTGIVRTSRTQSLASAEVSLMPRFAFLTWGGKRQKWMSFRFVATWCQMNMSSCPLKPWRLPEFVPISTW

SEQ ID NO: 25195 - protein, 40 aa, Homo sapiens
LANTHTHSHTPSPSGRSRRTVNMALGLLPERGRRRQRGSC

SEQ ID NO: 25196 - protein, 36 aa, Homo sapiens
VAPTHTLQSPRELIFSPQRAPPYPAPPTGPPFPPAC

SEQ ID NO: 25197 - protein, 10 aa, Homo sapiens
ILLQPITVEL

SEQ ID NO: 25198 - protein, 27 aa, Homo sapiens
MLYEFFVKVYPSCRGGKVVLDQTGVSK

SEQ ID NO: 25199 - protein, 84 aa, Homo sapiens
MEELGLVTHLVTKLRANVNARTFAGNTPLHLAAGLGYPTLTRLLLKAGQSHPQGHLNRVGGRERGASQSPDFAVLNVGPHHTAP

SEQ ID NO: 25200 - protein, 301 aa, Homo sapiens
MKRWPRLGSPGCLPKPCAPSGTYRPWKPRKGKERIGGFYALSPYPGLRLISLNMNFCSRENFWLLINSTDPAGQLQWLVGELQAAEDRGDKVHIIGHIPPGHCLKSWSWNYYRIVARYENTLAAQFFGHTHVDEFEVFYDEETLSRPLAVAFLAPSATTYIGLNPGYRVYQIDGNYSGSSHVVLDHETYILNLTQANIPGAIPHWQLLYRARETYGLPNTLPTAWHNLVYRMRGDMQLFQTFWFLYHKGHPPSEPCGTPCRLATLCAQLSARADSPALCRHLMPDGSLPEAQSLWPRPLFC

SEQ ID NO: 25201 - protein, 405 aa, Homo sapiens
MKWTLCHRQNLPDRDVVRWASGGLALQGIYKASHQRGLTEKREELLSVPKEFLLLGPQQGTQMKTKEFTSPQAEFMFTQMVEKLGFRLTTSAKDGNWGFSLEAGLDHSKHPESKETQQSSSENSYFCSTKFSYIPLASCHFPIDQLQLSKPAVQELKCIEELLSQTTNPDRFSLLRHRIINFFHRFGSHVNQGPLHLGGIYWWKAISEGYCTEQLAEVRQQSAEALDIFIRDSYSGFGVKVAAGVNVSDSHSKTATQTKTSQNLQTKVQLSVAQTGGPPEADGLVQWKAGLIASNQTWCVIDRGLQLVPVWDIILSSHRSNFKDPLQVANFLKDSYTALTSITAQIQNGEELLSAGKEARVFLEDVKSWEVSDPEEQLKKLINFMKMLSQKLKSYDTWINICLTD

SEQ ID NO: 25202 - protein, 15 aa, Homo sapiens
MPPSSVCHGPTSNIC

SEQ ID NO: 25203 - protein, 27 aa, Homo sapiens
MQKLEIVCFNIEKLWKRTSRHPTSWIT

SEQ ID NO: 25204 - protein, 52 aa, Homo sapiens
MSYEVDLLTHEWVTTRSLETAGWTPTCAFQLLLEPQGPRKAVWSLQPASRDF

SEQ ID NO: 25205 - protein, 119 aa, Homo sapiens
MESKKTYEQKCRDADDAEQAFERISANGHQKQVEKSQNKARQCKDSATEAERVYRQSIAQLEKVRAEWEQEHRTTCEAFQLQEFDRLTILRNALWVHSNQLSMQCVKDDEVGAEGLGVG

SEQ ID NO: 25206 - protein, 33 aa, Homo sapiens
MEMDAPRPPSLAVPGAASRPGRTVDNGRLSPIH

SEQ ID NO: 25207 - protein, 41 aa, Homo sapiens
MEMDAPRPPSLAVPGAASRPGRAAISSSEPSPLLATLCFFS

SEQ ID NO: 25208 - protein, 39 aa, Homo sapiens
MEGHICQSLESAKAGTRFPGPQWGCANPRELGSAVRSDN

SEQ ID NO: 25209 - protein, 7 aa, Homo sapiens
MVYGNRP

SEQ ID NO: 25210 - protein, 152 aa, Homo sapiens
MMVLLKTFFSCHKEFQTVPFYIFSESYGGKMAAGIGLELYKAIQRGTIKCNFAGVALGDSWISPVDSVLSWGPYLYSMSLLEDKGLAEVSKVAEQVLNAVNKGLYREATELWGKAEMIIEQVKRGNTQRRACLAFSGGYRAHGWCCQTWSLH

SEQ ID NO: 25211 - protein, 81 aa, Homo sapiens
MVKLLDDGTFMIPGEKVAHTSLDALVTFHQQKPIEPRRELLTQPCRQKDPANVDYEDLFLYSNAVAEEAACPVSAPEEVCI

SEQ ID NO: 25212 - protein, 88 aa, Homo sapiens [sequence omitted]

SEQ ID NO: 25213 - protein, 111 aa, Homo sapiens
MEAAVAPGRDAPAPAASQPSGCGKHNSPERKVYMDYNATTPLEPEVIQAMTKAMWEAWGNPSSPYSAGRKAKDIINAARESLAKMIGGKPQDIIFTSGGTEVKLLNTLTFC

SEQ ID NO: 25214 - protein, 19 aa, Homo sapiens
MLLPEPLQRAWFQETQSPL

SEQ ID NO: 25215 - protein, 123 aa, Homo sapiens
MGSLLAATTEAPGEYFFSDGIRLKKYRGMGSLDAMDKHLSSQNRYFSEADKIKVAQGVSGAVQDKGSIHKFVPYLIAGIQHSCQDIGAKSLTQVRAMMYSGELKFEKRTSSAQVEGGVHSLHS

SEQ ID NO: 25216 - protein, 78 aa, Homo sapiens
MIGLKAKLYHKQRHAEKIQMKKTIKMHEKRNTKQKNDEKTPQGAVPAYLLDREGQSRAKVLSNMIKQKRKEKAVSNNN

SEQ ID NO: 25217 - protein, 15 aa, Homo sapiens
MQPPSTPPPCHRASG

SEQ ID NO: 25218 - protein, 73 aa, Homo sapiens
VAPGAEAAERSPRRRPDWLPRNCGDSPYSELGLRFPGLSPSPEAPTKPGKEGKDSGGSSSMSAYSRKPERARS

SEQ ID NO: 25219 - protein, 29 aa, Homo sapiens
LLCQLRSSSTLAAESPFPPSNDTLCIRFC

SEQ ID NO: 25220 - protein, 12 aa, Homo sapiens
MSCCGAFTAFGL

SEQ ID NO: 25221 - protein, 17 aa, Homo sapiens
LSGKRRRPMEPGSGRCC

SEQ ID NO: 25222 - protein, 3499 aa, Homo sapiens
IPAPEPPRGSGARRSRRGLESAMANRRVGRGCWEVSPTERRPPAGLRGPAAEEEASSPPVLSLSHFCRSPFLCFGDVLLGASRTLSLALDNPNEEVAEVKISHFPAADLGFSVSQRCFVLQPKEKIVISVNWTPLKEGRVREIMTFLVNDVLKHQAILLGNAEEQKKKKRSLWDTIKKKKISASTSHNRRVSNIQNVNKTFSVSQKVDRVRSPLQACENLAMNEGGPPTENNSLILEENKIPISPISPAFNECHGATCLPLSVRRSTTYSSLHASENRELLNVHSANVSKVSFNEKAVTETSFNSVNVNGQRGENSKLSLTPNCSSTLNITQSQIHFLSPDSFVNNSHGANNELELVTCLSSDMFMKDNSQPVHLESTIAHEIYQKILSPDSFIKDNYGLNQDLESESVNPILSPNQFLKDNMAYMCTSQQTCKVPLSNENSQVPQSPEDWRKSEVSPRIPECQGSKSPKAIFEELVEMKSNYYSFIKQNNPKFSAVQDISSHSHNKQPKRRPILSATVTKRKATCTRENQTEINKPKAKRCLNSAVGEHEKVINNQKEKEDFHSYLPIIDPILSKSKSYKNEVTPSSTTASVARKRKSDGSMEDANVRVAITEHTEVREIKRIHFSPSEPKTSAVKKTKNVTTPISKRISNREKLNLKKKTDLSIFRTPISKTNKRTKPIIAVAQSSLTFIKPLKTDIPRHPMPFAAKNMFYDERWKEKQEQGFTWWLNFILTPDDFTVKTNISEVNAATLLLGIENQHKISVPRAPTKEEMSLRAYTARCRLNRLRRAACRLFTSEKMVKAIKKLEIEIEARRLIVRKDRHLWKDVGERQKVLNWLLSYNPLWLRIGLETTYGELISLEDNSDVTGLAMFILNRLLWNPDIAAEYRHPTVPHLYRDGHEEALSKFTLKKLLLLVCFLDYAKISRLIDHDPCLFCKDAEFKASKEILLAFSRDFLSGEGDLSRHLGLLGLPVNHVQTPFDEFDFAVTNLAVDLQCGVRLVRTMELLTQNWDLSKKLRIPAISRLQKMHNVDIVLQVLKSRGIELSDEHGNTILSKDIVDRHREKTLRLLWKIAFAFQVDISLNLDQLKEEIAFLKHTKSIKKTISLLSCHSDDLINKKKGKRDSGSFEQYSENIKLLMDWVNAVCAFYNKKVENFTVSFSDGRVLCYLIHHYHPCYVPFDAICQRTTQTVECTQTGSVVLNSSSESDDSSLDMSLKAFDHENTSELYKELLENEKKNFHLVRSAVRDLGGIPAMINHSDMSNTIPDEKVVITYLSFLCARLLDLRKEIRAARLIQTTWRKYKLKTDLKRHQEREKAARIIQLAVINFLAKQRLRKRVNAALVIQKYWRRVLAQRKLLMLKKEKLEKVQNKAASLIQGYWRRYSTRQRFLKLKYYSIILQSRIRMIIAVTSYKRYLWATVTIQRHWRAYLRRKQDQQRYEMLKSSTLIIQSMFRKWKQRKMQSQVKATVILQRAFREWHLRKQAKEENSAIIIQSWYRMHKELRKYIYIRSCVVIIQKRFRCFQAQKLYKRRKESILTIQKYYKAYLKGKIERTNYLQKRAAAIQLQAAFRRLKAHNLCRQIRAACVIQSYWRMRQDRVRFLNLKKTIIKFQAHVRKHQQRQKYKKMKKAAVIIQTHFRAYIFAMKVLASYQKTRSAVIVLQSAYRGMQARKMYIHILTSVIKIQSYYRAYVSKKEFLSLKNATIKLQSTVKMKQTRKQYLHLRAAALFIQQCYRSKKIAAQKREEYMQMRESCIKLQAFVRGYLVRKQMRLQRKAVISLQSYFRMRKARQYYLKMYKAIIVIQNYYHAYKAQVNQRKNFLQVKKAATCLQAAYRGYKVRQLIKQQSIAALKIQSAFRGYNKRVKYQSVLQSIIKIQRWYRAYKTLHDTRTHFLKTKAAVISLQSAYRGWKVRKQIRREHQAALKIQSAFRMAKAQKQFRLFKTAALVIQQNFRAWTAGRKQCMEYIELRHAVLVLQSMWKGKTLRRQLQRQHKCAIIIQSYYRMHVQQKKWKIMKKAALLIQKYYRAYSIGREQNHLYLKTKAAVVTLQSAYRGMKVRKRIKDCNKAAVTIQSKYRAYKTKKKYATYRASAIIIQRWYRGIKITNHQHKEYLNLKKTAIKIQSVYRGIRVRRHIQHMHRAATFIKAMFKMHQSRISYHTMRKAAIVIQVRCRAYYQGKMQREKYLTILKAVKVLQASFRGVRVRRTLRKMQTAATLIQSNYRRYRQQTYFNKLKKITKTVQQRYWAMKERNIQFQRYNKLRHSVIYIQAIFRGKKARRHLKMMHIAATLIQRRFRTLMMRRRFLSLKKTAILIQRKYRAHLCTKHHLQFLQVQNAVIKIQSSYRRWMIRKRMREMHRAATFIQSTFRMHRLHMRYQALKQASVVIQQQYQANRAAKLQRQHYLRQRHSAVILQAAFRGMKTRRHLKSMHSSATLIQSRFRSLLVRRRFISLKKATIFVQRKYRATICAKHKLYQFLHLRKAAITIQSSYRRLMVKKKLQEMQRAAVLIQATFRMYRTYITFQTWKHASILIQQHYRTYRAAKLQRENYIRQWHSAVVIQAAYKGMKARQLLREKHKASIVIQSTYRMYRQYCFYQKLQWATKIIQEKYRANKKKQKVFQHNELKKETCVQAGFQDMNIKKQIQEQHQAAIIIQKHCKAFKIRKHYLHLRATVVSIQRRYRKLTAVRTQAVICIQSYYRGFKVRKDIQNMHRAATLIQSFYRMHRAKVDYETKKTAIVVIQNYYRLYVRVKTERKNFLAVQKSVRTIQAAFRGMKVRQKLKNVSEEKMAAIVNQSALCCYRSKTQYEAVQSEGVMIQEWYKASGLACSQEAEYHSQSRAAVTIQKAFCRMVTRKLETQKCAALRIQFFLQMAVYRRRFVQQKRAAITLQHYFRTWQTRKQFLLYRKAAVVLQNHYRAFLSAKHQRQVYLQIRSSVIIIQARSKGFIQKRKFQEIKNSTIKIQAMWRRYRAKKYLCKVKAACKIQAWYRCWRAHKEYLAILKAVKIIQGCFYTKLERTRFLNVRASAIIIQRKWRAILPAKIAHEHFLMIKRHRAACLIQAHYRGYKGRQVFLRQKSAALIIQKYIRAREAGKHERIKYIEFKKSTVILQALVRGWLVRKRFLEQRAKIRLLHFTAAAYYHLNAVRIQRAYKLYLAVKNANKQVNSVICIQRWFRARLQEKRFIQKYHSIKKIEHEGQECLSQRNRAASVIQKAVRHFLLRKKQEKFTSGIIKIQALWRGYSWRKKNDCTKIKAIRLSLQVVNREIREENKLYKRTALALHYLLTYKHLSAILEALKHLEVVTRLSPLCCENMAQSGAISKIFVLIRSCNRSIPCMEVIRYAVQVLLNVSKYEKTTSAVYDVENCIDILLELLQIYREKPGNKVADKGGSIFTKTCCLLAILLKTTNRASDVRSRSKVVDRIYSLYKLTAHKHKMNTERILYKQKKNSSISIPFIPETPVRTRIVSRLKPDWVLRRDNMEEITNPLQAIQMVMDTLGIPY

SEQ ID NO: 25223 - protein, 6 aa, Homo sapiens
ISRGFS

SEQ ID NO: 25224 - protein, 17 aa, Homo sapiens
IRKRMAAETQTLNFGPE

SEQ ID NO: 25225 - protein, 11 aa, Homo sapiens
LLYAILESCLG

SEQ ID NO: 25226 - protein, 70 aa, Homo sapiens
LPPPRRNASVTHSLSPDETGVQGTGSSSHSGLCQRCKIWCRCPSLNASRCRPFSRCCGRYNGAKGKNSDY

SEQ ID NO: 25227 - protein, 52 aa, Homo sapiens
KDSSFPSWPEMFSLDSFRKDRAQHRQRQCKLPPPRLPPMCVNPTPGGTISRG

SEQ ID NO: 25228 - protein, 13 aa, Homo sapiens
ILAHATMLSGYNH

SEQ ID NO: 25229 - protein, 126 aa, Homo sapiens
KFMAIQKALQPDWFQCLSDGEVSCKEATSIKRVRKSVDRSLLFLDNCLRLQEESEVLQKSVIIGVIEGGDVMEERLRSARETAKRPVGGFLLDGFQGNPTTLEARLRLLSSVTAELPEDKPRPVFG

SEQ ID NO: 25230 - protein, 53 aa, Homo sapiens
TAWVLPWARGTEHTSGFLLEVFMERVVHGGMSIFLKKMSHSLSSWSLMKIKPN

SEQ ID NO: 25231 - protein, 6 aa, Homo sapiens
LPTIRF

SEQ ID NO: 25232 - protein, 34 aa, Homo sapiens
ISASPRVPSPGSPPLSRGFGALGSHSLGSQRHCD

SEQ ID NO: 25233 - protein, 45 aa, Homo sapiens
MMTFMMGLKRKMLMMVSLLLLNNWTWEMKFTMMWIPLISLFHQQR

SEQ ID NO: 25234 - protein, 34 aa, Homo sapiens
KPGTPGVGKTTLGKELASKSGLKYINVGDLAREV

SEQ ID NO: 25235 - protein, 28 aa, Homo sapiens
MFPQLLAFLDFFFKNFLNLLSLAVYIFT

SEQ ID NO: 25236 - protein, 15 aa, Homo sapiens
RLGLGIASDLMNLSL

SEQ ID NO: 25237 - protein, 164 aa, Homo sapiens
LARPPAASPGSALSCPPTRPRPSAPAAATAATPPAATATATAPGIAFGTAPAPAPAAAPLGTVPAPTSWRLGCSCPKSTRLPTCAPRPATTCTPPSWRPARRRSPWSRSTRWARYWAAAASARSTQASASPTTCRWPSNTWRRTGFPTGESCLMALECPWKWSC

SEQ ID NO: 25238 - protein, 312 aa, Homo sapiens
LQVAVAMDTLDRVVKPKTKRAKRFLEKREPKLNENIKNAMLIKGGNANATVTKVLKDVYALKKPYGVLYKKKNITRPFEDQTSLEFFSKKSDCSLFMFGSHNKKRPNNLVIGRMYDYHVLDMIELGIENFVSLKDIKNSKCPEGTKPMLIFAGDDFDVTEDYRRLKSLLIDFFRGPTVSNIRLAGLEYVLHFTALNGKIYFRSYKLLLKKSGCRTPRIELEEMGPSLDLVLRRTHLASDDLYKLSMKMPKALKPKKKKNISHDTFGTTYGRIHMQKQDLSKLQTRKMKGLKKRPAERITEDHEKKSKRIKKN

SEQ ID NO: 25239 - protein, 989 aa, Homo sapiens
VSPENQPSRAMGTRLPLVLRQLRRPPQPPGPPRRLRVPCRASSGGGGGGGGGREGLLGQRRPQDGQARSSCSPGGRTPAARDSIVREVIQNSKEVLSLLQEKNPAFKPVLAIIQAGDDNLMQEINQNLAEEAGLNITHICLPPDSSEAEIIDEILKINEDTRVHGLALQISENLFSNKVLNALKPEKDVDGVTDINLGKLVRGDAHECFVSPVAKAVIELLEKSVGVNLDGKKILVVGAHGSLEAALQCLFQRKGSMTMSIQWKTRQLQSKLHEADIVVLGSPKPEEIPLTWIQPGTTVLNCSHDFLSGKVGCGSPRIHFGGLIEEDDVILLAAALRIQNMVSSGRRWLREQQHRRWRLHCLKLQPLSPVPSDIEISRGQTPKAVDVLAKEIGLLADEIEIYGKSKAKVRLSVLERLKDQADGKYVLVAGITPTPLGEGKSTVTIGLVQALTAHLNVNSFACLRQPSQGPTFGVKGGAAGGGYAQVIPMEEFNLHLTGDIHAITAANNLLAAAIDTRILHENTQTDKALYNRLVPLVNGVREFSEIQLARLKKLGINKTDPSTLTEEEVSKFARLDIDPSTITWQRVLDTNDRFLRKITIGQGNTEKGHYRQAQFDIAVASEIMAVLALTDSLADMKARLGRMVVASDKSGQPVTADDLGVTGALTVLMKDAIKPNLMQTLEGTPVFVHAGPFANIAHGNSSVLADKIALKLVGEEGFVVTEAGFGADIGMEKFFNIKCRASGLVPNVVVLVATVRALKMHGGGPSVTAGVPLKKEYTEENIQLVADGCCNLQKQIQITQLFGVPVVVALNVFKTDTRAEIDLVCELAKRAGAFDAVPCYHWSVGGKGSVDLARAVREAASKRSRFQFLYDVQVPIVDKIRTIAQAVYGAKDIELSPEAQAKIDRYTQQGFGNLPICMAKTHLSLSHQPDKKGVPRDFILPISDVRASIGAGFIYPLVGTMSTMPGLPTRPCFYDIDLDTETEQVKGLF

SEQ ID NO: 25240 - protein, 25 aa, Homo sapiens
RPVHKRYRGFSRKLLKWMKTTDFCF

SEQ ID NO: 25241 - protein, 385 aa, Homo sapiens
LKKLAGRRPDIPIYVGNTERPVFWNLNQSGVQLTNINVVPFGIWQQVDKNLRFMILMDGVHPEMDTCIIVEYKGHKILNIVDCTRPNGGRLPMKVALMMSDFAGGASGFPMTFSGGKFTEEWKAQFIKTERKKLLNYKARLVKNLQPRIYCPFAGYFVESHPSDKYIKETNTKNDPNELNNLIKKNSDVITWTPRPGATLDLGRMLKDRTDSKGIIEPPEGTKIYKDSWDFEPYLEILNAALGDEIFLHSSWIKEYFTWAGFKDYNLVVRMIETDEDFNPFPGGYDYLVDFLDLSFPKERPQREHPYEEIHSRVDVIRHVVKNGLLWDELYIGFQTRLQRDPDIYHHLFWNHFQIKLPLTPPNWKSFLMCCEQNGPVILQECKTT

SEQ ID NO: 25242 - protein, 30 aa, Homo sapiens
KARLVKNLQPRIYCPFAGYFVESHPSDKYG

SEQ ID NO: 25243 - protein, 21 aa, Homo sapiens
LLVAAVSSEFLALSMRRLVVF

SEQ ID NO: 25244 - protein, 163 aa, Homo sapiens
TLDGTDVLFTGREFFVGLSKWTNHRGAEIVADTFRDFAVSTVPVSGPSHLRGLCGMGGPRTVVAGSSDAAQKAVRAMAVLTDHPYASLTLPDDAAADCLFLRPGLPGVPPFLLHRGGGDLPNSQEALQKLSDVTLVPVSCSELEKAGAGLSSLCLVLSTRPHS

SEQ ID NO: 25245 - protein, 52 aa, Homo sapiens
VWDSLRPTTRTSFSSSTFPRTLGCLACPNLLTGLRNREMLLPFYLTKSSASG

SEQ ID NO: 25246 - protein, 24 aa, Homo sapiens
LNSSCPTNSISAFLLTSCENYSSG

SEQ ID NO: 25247 - protein, 23 aa, Homo sapiens
RGDTMITKVVFPGRGLSIALWMC

SEQ ID NO: 25248 - protein, 10 aa, Homo sapiens
LKQMVTMFRY

SEQ ID NO: 25249 - protein, 201 aa, Homo sapiens
VGAGGRRMAKQKRKVPEVTEKKNKKLKKASAEGPLLGPEAAPSGEGAGSKGEAVLRPGLDAEPELSPEEQRVLERKLKKERKKEERQRLREAGLVAQHPPARRSGAELALDYLCRWAQKHKNWRFQKTRQTWLLLHMYDSDKVPDEHFSTLLAYLEGLQGRARELTVQKAEALMRELDEEGSDPPLPGRAQRIRQVLQLLS

SEQ ID NO: 25250 - protein, 122 aa, Homo sapiens
LGQGPLWTTICQLLSFRRLGGAVATSAFSVSDGVNGGGGWDAAAGLAAGGWVGAGPGDGEGDRRQPLVHAADRLRLHPQPGLPDPSGRRPPGPAARRGEKSSIHFLPNSIPWACHSIWEKSN

SEQ ID NO: 25251 - protein, 26 aa, Homo sapiens
LGVSLSAWRAFRCGVRDGCQFKRQAP

SEQ ID NO: 25252 - protein, 17 aa, Homo sapiens
LPHSYCNTPLLKKVFLD

SEQ ID NO: 25253 - protein, 12 aa, Homo sapiens
RHLHLGPTSWAG

SEQ ID NO: 25254 - protein, 38 aa, Homo sapiens
LPAPGICIWDRPPGLADQRGSSSNVCCGGCNSIPASSW

SEQ ID NO: 25255 - protein, 183 aa, Homo sapiens
KFPAYERVLLREAGFKRPVVLFGPIADIAMEKLANELPDWFQTAKTEPKDAGSEKSTGVVRLNTVRQIIEQDKHALLDVTPKAVDLLNYTQWFPIVIFFNPDSRQGVKTMRQRLNPTSNKSSRKLFDQANKLKKTCAHLFTATINLNSANDSWFGSLKDTIQHQQGEAVWVSEGKVCGIDMLL

SEQ ID NO: 25256 - protein, 59 aa, Homo sapiens
ITKTWKLRCLLQNVKVFLESPLPHIPWTIPPLSIHPRIMASLLITTNPWIMMLPERSAI

SEQ ID NO: 25257 - protein, 47 aa, Homo sapiens
RDALESLWKRSRCMGTCIIYRQDGCLKTQSQTSRIQLLEALPGLQRR

SEQ ID NO: 25258 - protein, 635 aa, Homo sapiens
INIACIEAKQAGETIAALTDITNLNHLESDGQITIFTDKTGVIKAARLLLSSVTKVLLLADRVVIKQIITSRNKVLATMERLEKVNSFQEFVQIFSQFGNEMVEFAHLSGDRQNDLKDEKKKAKMAAARAVLEKCTMMLLTASKTCLRHPNCESAHKNKEGVFDRMKVALDKVIEIVTDCKPNGETDISSISIFTGIKEFKMNIEALRENLYFQSKENLSVTLEVILERMEDFTDSAYTSHEHRERILELSTQARMELQQLISVWIQAQSKKTKSIAEELELSILKISHSLNELKKELHSTATQLAADLLKYHADHVVLKALKLTGVEGNLEALAEYACKLSEQKEQLVETCRLLRHISGTEPLEITCIHAEETFQVTGQQIISAAETLTLHPSSKIAKENLDVFCEAWESQISDMSTLLREINDVFEGRRGEKYGYLSLPKPMKNNANLKSLKPDKPDSEEQAKIAKLGLKLGLLTSDADCEIEKWEDQENEIVQYGRNMSSMAYSLYLFTRGEGPLKTSQDLIHQLEVFAAEGLKLTSSVQAFSKQLKDDDKLMLLLEINKLIPLCHQLQTVTKTSLQNKVFLKVDKCITKTRSMMALLVQLLSLCYKLLKKLQMENNGWVSVTNKDTMDSKT

SEQ ID NO: 25259 - protein, 14 aa, Homo sapiens
TRAGFLAGRMAAGT

SEQ ID NO: 25260 - protein, 320 aa, Homo sapiens
LAKYLLETSGNLDGLEYKLHDFGYRGVSSQETAGIGASAHLVNFKGTDTVAGLALNKKYYGTKDPVPGYSVPAAEHSTITAWGKDHEKDAFEHIVTQFSSVPVSVVSNSYDIYNACEKIWGEDLRHLIVSRSTQAPLIIRPDSGNPLDTVLKVLEILGKKFPVTENSKGYKLLPPYLRVIQGDGVDINTLQEIVEGMKQKMWSIENIAFGSGGGLLQKLTRDLLNCSFKCSYVVTNGLGINVFKDPVADPNKRSKKGRLSLHRTPAGNFVTLEEGKGDLEEYGQDLLHTVFKNGKVTKSYSFDEIRKNAQLNIELEAAHH

SEQ ID NO: 25261 - protein, 16 aa, Homo sapiens
LLCLGSTRKWTLVSML

SEQ ID NO: 25262 - protein, 6 aa, Homo sapiens
VFIWMY

SEQ ID NO: 25263 - protein, 108 aa, Homo sapiens
RPSEQAGKAHRLSAEERDQLLPNLRAVGWNELEGRDAIFKQFHFKDFNRAFGFMTRVALQAEKLDHHPEWFNVYNKVHITLSTHECAGLSERDINLASFIEQVAVSMT

SEQ ID NO: 25264 - protein, 35 aa, Homo sapiens
LEATWRVRPRGGHGHKCPQLAPGKSKAQDDLSSFH

SEQ ID NO: 25265 - protein, 32 aa, Homo sapiens
RLRMIYPLFTDEESEAQRTVMKCDQTLRSPKR

SEQ ID NO: 25266 - protein, 35 aa, Homo sapiens
LCFLIFPSALFWGGGYSSFGITFPPPMCFPSFEIF

SEQ ID NO: 25267 - protein, 37 aa, Homo sapiens
MHLPPEEAFWCLVQICEVYLPGYYGPHMVPEYCSVWG

SEQ ID NO: 25268 - protein, 65 aa, Homo sapiens
IFQLQNKVRPLVLFSRTESPSPLQRPLVPVAAMIPFRIHGALFHIWIKRVQQKSWVKNLAYKLRS

SEQ ID NO: 25269 - protein, 544 aa, Homo sapiens
IQRTLHRVDCREGGGKRARRELGKGRSQEAAREGARARPFFSSVAGSHARPPRRLGAICDSGGGGGGGGGSGNFAASSGRACLTAVWRRPRPRRQEPGGRRRNMSEREVSTAPAGTDMPAAKKQKLSSDENSNPDLSGDENDDAVSIESGTNTERPDTPTNTPNAPGRKSWGKGKWKSKKCKYSFKCVNSLKEDHNQPLFGVQFNWHSKEGDPLVFATVGSNRVTLYECHSQGEIRLLQSYVDADADENFYTCAWTYDSNTSHPLLAVAGSRGIIRIINPITMQCIKHYVGHGNAINELKFHPRDPNLLLSVSKDHALRLWNIQTDTLVAIFGGVEGHRDEVLSADYDLLGEKIMSCGMDHSLKLWRINSKRMMNAIKESYDYNPNKTNRPFISQKIHFPDFSTRDIHRNYVDCVRWLGDLILSKSCENAIVCWKPGKMEDDIDKIKPSESNVTILGRFDYSQCDIWYMRFSMDFWQKMLALGNQVGKLYVWDLEVEDPHKAKCTTLTHHKCGAAIRQTSFSRDSSILIAVCDDASIWRWDRLR

SEQ ID NO: 25270 - protein, 30 aa, Homo sapiens
VTLKAPKWILRHQKSILMHLMWMFMVQTGI

SEQ ID NO: 25271 - protein, 37 aa, Homo sapiens
LEAPRGGKRLALPCPTPHHDPPAAAPSAGLSARVLLL

SEQ ID NO: 25272 - protein, 30 aa, Homo sapiens
LDMTPVAYHGHGVSAFRCCSPLLLQAKARR

SEQ ID NO: 25273 - protein, 255 aa, Homo sapiens
LAACAPGRPPARDGTGSMSSGYSSLEEDAEDFFFTARTSFFRRAPQGKPRSGQQDVEKEKETHSYLSKEEIKEKVHKYNLAVTDKLKMTLNSNGIYTGFIKVQMELCKPPQTSPNSGKLSPSSNGCMNTLHISSTNTVGEVIEALLKKFLVTESPAKFALYKRCHREDQVYACKLSDREHPLYLRLVAGPRTDTLSFVLREHEIGEWEAFSLPELQNFLRILDKEEDEQLQNLKRRYTAYRQKLEEALREVWKPD

SEQ ID NO: 25274 - protein, 27 aa, Homo sapiens
VILPPLGLQTLHVMDQLTPSRSVNWFI

SEQ ID NO: 25275 - protein, 17 aa, Homo sapiens
KLSLLQTSKLVTFYVSV

SEQ ID NO: 25276 - protein, 56 aa, Homo sapiens
ITYQRALQELLTNRLSMVLHSRINCTSVCAKSTRHWRNSRNNTWYRHMDLSGKRSR

SEQ ID NO: 25277 - protein, 86 aa, Homo sapiens
LSGDQPTIRKENFNNVPDLELNPIRSKIVRAFFDNRNLRKGPSGLADEINFEDFLTIMSYFRPIDTTMDEEQVELSRKEKLRCACH

SEQ ID NO: 25278 - protein, 43 aa, Homo sapiens
LSTEKTPSLGSRIPSRAGWITTSRGLGATRCFLMKRITQNHRL

SEQ ID NO: 25279 - protein, 9 aa, Homo sapiens
RGLCSFLWA

SEQ ID NO: 25280 - protein, 11 aa, Homo sapiens
MLLEMALSFVK

SEQ ID NO: 25281 - protein, 27 aa, Homo sapiens
VSLTHQMKSLLKMNRLQFIYHGYLCHE

SEQ ID NO: 25282 - protein, 143 aa, Homo sapiens
KRAQRCLGLSVRARKISAMPHSSDSSDSSFSRSPPPGKQDSSDDVRRVQRREKNRIAAQKSRQRQTQKADTLHLESEDLEKQNAALRKEIKQLTEELKYFTSVLNSHEPLCSVLAASTPSPPEVVYSAHAFHQPHVSSPRFQP

SEQ ID NO: 25283 - protein, 113 aa, Homo sapiens
RKAVWSLQPGPSPGRNTSTFAKDSLIHHHGTQKKKMQKRRLKLWPTQGGCKLFEIFLVEKWGSKFPPLNLGRPSDCLTNRNSMEATLYRFLRLSLKRLAVPTSCHLGIIVLET

SEQ ID NO: 25284 - protein, 138 aa, Homo sapiens
ILCAPSGERLCQLPHSNVEVQESEWRLTEAKGPTMGKESGWDSGRAAVAAVVGGVVAVGTVLVALSAMGFTSVGIAASSIAAKMMSTAAIANGGGVAAGSLVAILQSVGAAGLSVTSKVIGGFAGTALGAWLGSPPSS

SEQ ID NO: 25285 - protein, 217 aa, Homo sapiens
LLPVQASLAMGEVEISALAYVKMCLHAARYPHAAVNGLFLAPAPRSGECLCLTDCVPLFHSHLALSVMLEVALNQVDVWGAQAGLVVAGYYHANAAVNDQSPGPLALKIAGRIAEFFPDAVLIMLDNQKLVPQPRVPPVIVLENQGLRWVPKDKNLVMWRDWEESRQMVGALLEDRAHQHLVDFDCHLDDIRQDWTNQRLNTQITQWVGPTNGNGNA

SEQ ID NO: 25286 - protein, 26 aa, Homo sapiens
LAFNSGNTKVFSGGNDEQVILHDVER

SEQ ID NO: 25287 - protein, 301 aa, Homo sapiens
IPSPESCEKLSLVPDAAAARVPWQPQVSEPRATLPAPRLRARVDRSLSGCTLGIPDLDSAGEMPLGHIMRLDLEKIALEYIVPCLHEVGFCYLDNFLGEVVGDCVLERVKQLHCTGALRDGQLAGPRAGVSKRHLRGDQITWIGGNEEGCEAISFLLSLIDRLVLYCGSRLGKYYVKERSKAMVACYPGNGTGYVRHVDNPNGDGRCITCIYYLNKNWDAKLHGGILRIFPEGKSFIADVEPIFDRLLFFWSDRRNPHEVQPSYATRYAMTVWYFDAEERAEAKKKFRNLTRKTESALTED

SEQ ID NO: 25288 - protein, 29 aa, Homo sapiens
KFPVPVSAAVELPWQCDSLIPGKSEEQAT

SEQ ID NO: 25289 - protein, 25 aa, Homo sapiens
RRSPGRTGSPLVAFVVEKVDKWQSA

SEQ ID NO: 25290 - protein, 56 aa, Homo sapiens
MRIRMKVKLLHPLVMRLRYRSATRKKLRDSHLAMSPKQGEGARLSVWTLTHRIIQR

SEQ ID NO: 25291 - protein, 48 aa, Homo sapiens
LLLTSHTFASSLCSQLEGHECPWAVVSGRGPDTATLLPGGRGADAWFK

SEQ ID NO: 25292 - protein, 29 aa, Homo sapiens
LLACFLILICLYTYTLCTKCRVIIMLTWT

SEQ ID NO: 25293 - protein, 17 aa, Homo sapiens
IFRLLLKISVERNNSES

SEQ ID NO: 25294 - protein, 68 aa, Homo sapiens
LREPNISTAPRTFLSPSTATLMNGRYGRAALTQFCTLTCGGGQTSCWWLLLMPTLWGRWPVASVTTCL

SEQ ID NO: 25295 - protein, 86 aa, Homo sapiens
LREPNISTAPRTFLSPSTATLMNGRYGRAALTQFCTLTCGGGQTSCWWLLLMPTLWGRWPVASVTTCLPASCGPGTAASPCSSARP

SEQ ID NO: 25296 - protein, 30 aa, Homo sapiens
IITSGSLPCKGELLSSSLCLMEIMITSSSF

SEQ ID NO: 25297 - protein, 20 aa, Homo sapiens
LSMSLATPWAWATPQPPTPL

SEQ ID NO: 25298 - protein, 21 aa, Homo sapiens
VSLFVSLWVDVVGDWQDPGIR

SEQ ID NO: 25299 - protein, 19 aa, Homo sapiens
MFQADLGSLRWQVLYGEKT

SEQ ID NO: 25300 - protein, 13 aa, Homo sapiens
ILRTPLRSSCLFS

SEQ ID NO: 25301 - protein, 892 aa, Homo sapiens
KMSLRIDVDTNFPECVVDAGKVTLGTQQRQEMDPRLREKQNEIILRAVCALLNSGGGIIKAEIENKGYNYERHGVGLDVPPIFRSHLDKMQKENHFLIFVKSWNTEAGVPLATLCSNLYHRERTSTDVMDSQEALAFLKCRTQTPTNINVSNSLGPQAAQGSVQYEGNINVSAAALFDRKRLQYLEKLNLPESTHVEFVMFSTDVSHCVKDRLPKCVSAFANTEGGYVFFGVHDETCQVIGCEKEKIDLTSLRASIDGCIKKLPVHHFCTQRPEIKYVLNFLEVHDKGALRGYVCAIKVEKFCCAVFAKVPSSWQVKDNRVRQLPTREWTAWMMEADPDLSRCPEMVLQLSLSSATPRSKPVCIHKNSECLKEQQKRYFPVFSDRVVYTPESLYKELFSQHKGLRDLINTEMRPFSQGILIFSQSWAVDLGLQEKQGVICDALLISQNNTPILYTIFSKWDAGCKGYSMIVAYSLKQKLVNKGGYTGRLCITPLVCVLNSDRKAQSVYSSYLQIYPESYNFMTPQHMEALLQSLVIVLLGFKSFLSEELGSEVLNLLTNKQYELLSKNLRKTRELFVHGLPGSGKTILALRIMEKIRNVFHCEPANILYICENQPLKKLVSFSKKNICQPVTRKTFMKNNFEHIQHIIIDDAQNFRTEDGDWYGKAKFITQTARDGPGVLWIFLDYFQTYHLSCSGLPPPSDQYPREEINRVVRNAGPIANYLQQVMQEARQNPPPNLPPGSLVMLYEPKWAQGVPGNLEIIEDLNLEEILIYVANKCRFLLRNGYSPKDIAVLFTKASEVEKYKDRLLTAMRKRKLSQLHEESDLLLQIGDASDVLTDHIVLDSVCRFSGLERNIVFGINPGVAPPAGAYNLLLCLASRAKRHLYILKASV

SEQ ID NO: 25302 - protein, 11 aa, Homo sapiens
RTPLRSSCPFS

SEQ ID NO: 25303 - protein, 54 aa, Homo sapiens
VAQMQKLPLVMISASPWQILIYHPKWSQSCAVSLLSVFQEVQSLKGWVMLHLWS

SEQ ID NO: 25304 - protein, 35 aa, Homo sapiens
LSDAILEGYPKSKKQFFEEVGIETDEDYNVTLPDP

SEQ ID NO: 25305 - protein, 8 aa, Homo sapiens
LSVIVCLS

SEQ ID NO: 25306 - protein, 64 aa, Homo sapiens
VRRADKGAILEGPRETWCRCGLALPCARLGGKACSRVRAFRHRHVGRWCDSWPRREQRLPHLRG

SEQ ID NO: 25307 - protein, 36 aa, Homo sapiens
VLRILIVSRGVHSPPLASAQGATAAIATSSLSQGPV

SEQ ID NO: 25308 - protein, 67 aa, Homo sapiens
LLTESRLTILGFQRRLRYPQLETQRRVAFCSRTDLRLESVCWGPCLWKRPRGLKDGLVRSGTIMLSC

SEQ ID NO: 25309 - protein, 68 aa, Homo sapiens
RLPGDPARGRLKPRPACPGLGRRSRALDPAAPLGLGATSAAPPLKSQSIQDGKPRRQTRIKCREGQYE

SEQ ID NO: 25310 - protein, 26 aa, Homo sapiens
RPRRPLMPRSRRSWRMPTGRTTTNTS

SEQ ID NO: 25311 - protein, 18 aa, Homo sapiens
RGSSLRFAIAKTSLPEAP

SEQ ID NO: 25312 - protein, 24 aa, Homo sapiens
VNLNSINMYKYLFSTEKIMFVDEI

SEQ ID NO: 25313 - protein, 29 aa, Homo sapiens
LCTVRSSTSSMAGKILPLLMATGSGKGSV

SEQ ID NO: 25314 - protein, 77 aa, Homo sapiens
LTPSATSPSPSCTCRSLSCPLTCPSRLSTALHPISTSTQWSLLQLCTTHYPSSHHGPATEPLPCLPSPPGPQPCHQP

SEQ ID NO: 25315 - protein, 31 aa, Homo sapiens
IWHTGQSREASAPSLGNLNTPASKSQGTSVL

SEQ ID NO: 25316 - protein, 24 aa, Homo sapiens
TRSYSNGTQRCKSANTNRIFKENT

SEQ ID NO: 25317 - protein, 45 aa, Homo sapiens
LEATGPMKGDVAPHGSRGSQLFLSLQNLILALDLRRESLTRDETQ

SEQ ID NO: 25318 - protein, 76 aa, Homo sapiens
KASSRHPFRPRVVIVAEVALVACGEEEVASWIVVVPVECSEVAVVETEVASVVAGAWTEVALVEEDEVALGGPLDL

SEQ ID NO: 25319 - protein, 17 aa, Homo sapiens
VKERGRERNPFIMFSLP

SEQ ID NO: 25320 - protein, 103 aa, Homo sapiens
KLGRPGMDSSSSSSAAGLGAVDPQLQHFIEVETQKQRFQQLVHQMTELCWEKCMDKPGPKLDSRAEACFVNCVERFIDTSQFILNRLEQTQKSKPVFSESLSD

SEQ ID NO: 25321 - protein, 137 aa, Homo sapiens
LCLTLISVMSGRGKQGGKARAKAKSRSSRAGLQFPVGRVHRLLRKGNYAERVGAGAPVYMAAVLEYLTAEILELAGNAARDNKKTRIIPRHLQLAIRNDEELNKLLGKVTIAQGGVLPNIQAVLLPKKTESHKAKSK

SEQ ID NO: 25322 - protein, 353 aa, Homo sapiens
LLRPRNLCAQPKLTSREVTDCSMTAKMETTFYDDALNASFLPSESGPYGYSNPKILKQSMTLNLADPVGSLKPHLRAKNSDLLTSPDVGLLKLASPELERLIIQSSNGHITTTPTPTQFLCPKNVTDEQEGFAEGFVRALAELHSQNTLPSVTSAAQPVNGAGMVAPAVASVAGGSGSGGFSASLHSEPPVYANLSNFNPGALSSGGGAPSYGAAGLAFPAQPQQQQQPPHHLPQQMPVQHPRLQALKEEPQTVPEMPGETPPLSPIDMESQERIKAERKRMRNRIAASKCRKRKLERIARLEEKVKTLKAQNSELASTANMLREQVAQLKQKVMNHVNSGCQLMLTQQLQTF

SEQ ID NO: 25323 - protein, 96 aa, Homo sapiens
VGIMLTELEKALNSIIDVYHKYSLIKGNFHAVYRDDLKKLLETECPQYIRKKGADVWFKELDINTDGAVNFQEFLILVIKMGVAAHKKSHEESHKE

SEQ ID NO: 25324 - protein, 17 aa, Homo sapiens
LIQMRRRCCSFCAGMLL

SEQ ID NO: 25325 - protein, 40 aa, Homo sapiens
VPSQADVAVFEAVSSPPPADLCHALRWYNHIKSYEKEKAR

SEQ ID NO: 25326 - protein, 23 aa, Homo sapiens
LDSARFRYLMGEGLGVHPLSCHG

SEQ ID NO: 25327 - protein, 15 aa, Homo sapiens
IYARGAQDMKCVSIQ

SEQ ID NO: 25328 - protein, 46 aa, Homo sapiens
IRCRHSSPIETCPDVLRYGLKRWVSAQQKHYLCQLECWRLWIGWCH

SEQ ID NO: 25329 - protein, 9 aa, Homo sapiens
LLLRVGTLS

SEQ ID NO: 25330 - protein, 87 aa, Homo sapiens
MSSYAFFVQTCREEHKKKHPDSSVNFAEFSKKCSERWKTMSAKEKSKFEDMAKSDKARYDREMKNYVPPKGDKKGKKKDPNAPKRPP

SEQ ID NO: 25331 - protein, 51 aa, Homo sapiens
IKSEHPGLSIGDTAKKLGEMWSEQSAKDKQPYEQKAAKLKEKYEKVQCHLF

SEQ ID NO: 25332 - protein, 9 aa, Homo sapiens
RHSCCLQCC

SEQ ID NO: 25333 - protein, 19 aa, Homo sapiens
MDVVYALKRQGRTLYGFGG

SEQ ID NO: 25334 - protein, 17 aa, Homo sapiens
TRRQFSGGKENRAERQQ

SEQ ID NO: 25335 - protein, 9 aa, Homo sapiens
MAAVWLQRR

SEQ ID NO: 25336 - protein, 31 aa, Homo sapiens [sequence omitted]

SEQ ID NO: 25337 - protein, 23 aa, Homo sapiens
VGMRFAGLVAAAAAGGPAHVKPA

SEQ ID NO: 25338 - protein, 32 aa, Homo sapiens
IGPYSRSSDSSSQDGEADREQDCFSGSLGRCR

SEQ ID NO: 25339 - protein, 14 aa, Homo sapiens
TGSHTHSSGRTHLS

SEQ ID NO: 25340 - protein, 7 aa, Homo sapiens
IPRPAQC

SEQ ID NO: 25341 - protein, 33 aa, Homo sapiens
VGPWGTWRFQCACMEWNECCWCLSEDSAPRFRD

SEQ ID NO: 25342 - protein, 13 aa, Homo sapiens
RCSRSWGTPRVMR

SEQ ID NO: 25343 - protein, 15 aa, Homo sapiens
TLLLCCISRLAHIST

SEQ ID NO: 25344 - protein, 25 aa, Homo sapiens
LMSSSFSNSCLSGGQTSKATKNERP

SEQ ID NO: 25345 - protein, 28 aa, Homo sapiens
LTLQRTGKRNRPDGPLSPNRALCGAPWS

SEQ ID NO: 25346 - protein, 30 aa, Homo sapiens
MVDSRISCKEELLLGRTSPSKNYNMMTVSG

SEQ ID NO: 25347 - protein, 61 aa, Homo sapiens
RTEGNIDDSLIGGNASAEGPEGEGTESTVITGVDIVMNHHLQETSFTKEAYKKYIKDYMKS

SEQ ID NO: 25348 - protein, 177 aa, Homo sapiens
TMMFSGFNADYEASSSRCSSASPAGDSLSYYHSPADSFSSMGSPVNAQDFCTDLAVSSANFIPTVTAISTSPDLQWLVQPALVSSVAPSQTRAPHPFGVPAPSAGAYSRAGVVKTMTGGRAQSIGRRGKVEQLSPEEEEKRRIRRERNKMAAAKCRNRRRELTDTLQAVGTLWVAPF

SEQ ID NO: 25349 - protein, 381 aa, Homo sapiens
TMMFSGFNADYEASSSRCSSASPAGDSLSYYHSPADSFSSMGSPVNAQDFCTDLAVSSANFIPTVTAISTSPDLQWLVQPALVSSVAPSQTRAPHPFGVPAPSAGAYSRAGVVKTMTGGRAQSIGRRGKVEQLSPEEEEKRRIRRERNKMAAAKCRNRRRELTDTLQAETDQLEDEKSALQTEIANLLKEKEKLEFILAAHRPACKIPDDLGFPEEMSVASLDLTGGLPEVATPESEEAFTLPLLNDPEPKPSVEPVKSISSMELKTEPFDDFLFPASSRPSGSETARSVPDMDLSGSFYAADWEPLHSGSLGMGPMATELEPLCTPVVTCTPSCTAYTSSFVFTYPEADSFPSCAAAHRKGSSSNEPSSDSLSSPTLLAL

SEQ ID NO: 25350 - protein, 32 aa, Homo sapiens
ICERIFYPEIEEVQALDDTERGSGGFGSTGKN

SEQ ID NO: 25351 - protein, 25 aa, Homo sapiens
LGPLAYKRSCFSSITSTSREIESIR

SEQ ID NO: 25352 - protein, 190 aa, Homo sapiens
LKLAPGGHVGRFCIWTESAFRKLDELYGTWRKAASLKSNYNLPMHKMINTDLSRILKSPEIQRALRAPRKKIHRRVLKKNPLKNLRIMLKLNPYAKTMRRNTILRQARNHKLRVDKAAAAAAALQAKSDEKAAVAGKKPVVGKKGKKAAVGVKKQKKPLVGKKAAATKKPAPEKKPAEKKPTTEEKKPAA

SEQ ID NO: 25353 - protein, 13 aa, Homo sapiens
MLRSQSKKKWKRI

SEQ ID NO: 25354 - protein, 15 aa, Homo sapiens
RVRDGTHQPPSRRRR

SEQ ID NO: 25355 - protein, 24 aa, Homo sapiens
VMPTQEVQELPIPSKLLEFLSYRI

SEQ ID NO: 25356 - protein, 193 aa, Homo sapiens
LESKPLKMADDLDFETGDAGASATFPMQCSALRKNGFVVLKGRPCKIVEMSTSKTGKHGHAKVHLVGIDIFTGKKYEDICPSTHNMDVPNIKRNDFQLIGIQDGYLSLLQDSGEVREDLRLPEGDLGKEIEQKYDCGEEILVWCLPPCFCAQLCSVRFFLSSDISWLSLLLLQITVLSAMTEEAAVAIKAMAK

SEQ ID NO: 25357 - protein, 17 aa, Homo sapiens
LFCGKAFPSVPTRKATA

SEQ ID NO: 25358 - protein, 15 aa, Homo sapiens
IPVLRTPRASPWLTS

SEQ ID NO: 25359 - protein, 164 aa, Homo sapiens
LIGEYGLRNKREVWRVKFTLAKIRKAARELLTLDEKDPRRLFEGNALLRRLVRIGVLDEGKMKLDYILGLKIEDFLERRLQTQVFKLGLAKSIHHARVLIRQRHIRVRKQVVNIPSFIVRLDSQKHIDFSLRSPYGGGRPGRVKRKNAKKGQGGAGAGDDEEED

SEQ ID NO: 25360 - protein, 42 aa, Homo sapiens
TFHFQAPTMATYQVVELRILTNWGHPEYTCIYRFRVHGEPAH

SEQ ID NO: 25361 - protein, 97 aa, Homo sapiens
TNEEPPPPTVQVQGPGPQREEKQKTKMAKFVIRPATAADCSDILRLIKELAKYEYMEEQVILTEKDLLEDGFGEHPFYHCLVAEVPKEHWTPEGYSL

SEQ ID NO: 25362 - protein, 67 aa, Homo sapiens
IGSEILKNLSQVAMRCRCSSMHFLVAEWNEPSINFYKRRGASDLSSEEGWRLFKIDKEYLLKMATEE

SEQ ID NO: 25363 - protein, 99 aa, Homo sapiens
LLFFHSASGASVVAIDNKIEQAMDLVKNHLMYAVREEVEILKEQIRELVEKNSQLERENTLLKTLASPEQLEKFQSCLSPEEPAPESPQVPEAPGGSAV

SEQ ID NO: 25364 - protein, 347 aa, Homo sapiens
LCAQPKLTSREVTDCSMTAKMETTFYDDALNASFLPSESGPYGYSNPKILKQSMTLNLADPVGSLKPHLRAKNSDLLTSPDVGLLKLASPELERLIIQSSNGHITTTPTPTQFLCPKNVTDEQEGFAEGFVRALAELHSQNTLPSVTSAAQPVNGAGMVAPAVASVAGGSGSGGFSASLHSEPPVYANLSNFNPGALSSGGGAPSYGAAGLAFPAQPQQQQQPPHHLPQQMPVQHPRLQALKEEPQTVPEMPGETPPLSPIDMESQERIKAERKRMRNRIAASKCRKRKLERIARLEEKVKTLKAQNSELASTANMLREQVAQLKQKVMNHVNSGCQLMLTQQLQTF

SEQ ID NO: 25365 - protein, 21 aa, Homo sapiens
IHCTPDVLTPAISPNVGNLTA

SEQ ID NO: 25366 - protein, 15 aa, Homo sapiens
LLPKKTESHKPGKNK

SEQ ID NO: 25367 - protein, 251 aa, Homo sapiens
LEPPRAPSPPAPPRPLAFLFPARPPGFRAPPATNPLATMSVELEEALPVTTAEGMAKKVTKAGGSAALSPSKKRKNSKKKNQPGKYSQLVVETIRRLGERNGSSLAKIYTEAKKVPWFDQQNGRTYLKYSIKALVQNDTLLQVKGTGANGSFKLNRKKLEGGGERRGAPAAATAPAPTAHKAKKAAPGAAGSRRADKKPARGQKPEQRSHKKGAGAKKDKGGKAKKTAAAGGKKVKKAAKPSVPKVPKGRK

SEQ ID NO: 25368 - protein, 331 aa, Homo sapiens
IKGNGSESAPAAAARPRRRHRDSEALCTPGRSPLCAAEPVLDATSPPSVFGAEIAKTEGLEMADHMMAMNHGRFPDGTNGLHHHPAHRMGMGQFPSPHHHQQQQPQHAFNALMGEHIHYGAGNMNATSGIRHAMGPGTVNGGHPPSALAPAARFNNSQFMGPPVASQGGSLPASMQLQKLNNQYFNHHPYPHNHYMPDLHPAAGHQMNGTNQHFRDCNPKHSGGSSTPGGSGGSSTPGGSGSSSGGGAGSSNSGGGSGSGNMPASVAHVPAAMLPPNVIDTDFIDEEVLMSLVIEMGLDRIKELPELWLGQNEFDFMTDFVCKQQPSRVSC

SEQ ID NO: 25369 - protein, 474 aa, Homo sapiens
RPSPPSAAMSTRSVSSSSYRRMFGGPGTASRPSSSRSYVTTSTRTYSLGSALRPSTSRSLYASSPGGVYATRSSAVRLRSSVPGVRLLQDSVDFSLADAINTEFKNTRTNEKVELQELNDRFANYIDKVRFLEQQNKILLAELEQLKGQGKSRLGDLYEEEMRELRRQVDQLTNDKARVEVERDNLAEDIMRLREKLQEEMLQREEAENTLQSFRQDVDNASLARLDLERKVESLQEEIAFLKKLHEEEIQELQAQIQEQHVQIDVDVSKPDLTAALRDVRQQYESVAAKNLQEAEEWYKSKFADLSEAANRNNDALRQAKQESTEYRRQVQSLTCEVDALKGTNESLERQMREMEENFAVEAANYQDTIGRLQDEIQNMKEEMARHLREYQDLLNVKMALDIEIATYRKLLEGEESRISLPLPNFSSLNLRETNLDSLPLVDTHSKRTLLIKTVETRDGQVINETSQHHDDLE

SEQ ID NO: 25370 - protein, 449 aa, Homo sapiens
KTENSKLRKVKYEETVFYGLQYILNKYLKGKVVTKEKIQEAKDVYKEHFQDDVVNEKGWNYILEKYDGHLPIEIKAVPEGFVIPRGNVLFTVENTDPECYWLTNWIETILVQSWYPITVATNSREQKKILAKYLLETSGNLDGLEYKLHDFGYRGVSSQETAGIGASAHLVNFKGTDTVAGLALNKKYYGTKDPVPGYSVPAAEHSTITAWGKDHEKDAFEHIVTQFSSVPVSVVSNSYDIYNACEKIWGEDLRHLIVSRSTQAPLIIRPDSGNPLDTVLKVLEILGKKFPVTENSKGYKLLPPYLRVIQGDGVDINTLQEIVEGMKQKMWSIENIAFGSGGGLLQKLTRDLLNCSFKCSYVVTNGLGINVFKDPVADPNKRSKKGRLSLHRTPAGNFVTLEEGKGDLEEYGQDLLHTVFKNGKVTKSYSFDEIRKNAQLNIELEAAHH

SEQ ID NO: 25371 - protein, 152 aa, Homo sapiens
LDSMKDEEYEQMVKELQEIRLEPQEVPRGSEPWKQQLTEDGDSFLHLAIIHEEKALTMEVIRQVKGDLAFLNFQNNLQQTPLHLAVITNQPEIAEALLGAGCDPELRDFRGNTPLHLACEQGCLASVGVLTQSCTTPHLHSILKATNYNGAL

SEQ ID NO: 25372 - protein, 303 aa, Homo sapiens
LDGLGAEAAPEPPPPPPPPAFYYPEPGAPPPYSAPAGGLVSELLRPELDAPLGPALHGRFLLAPPGRLVKAEPPEADGGGGYGCAPGLTRGPRGLKREGAPGPAASCMRGPGGRPPPPPDTPPLSPDGPARLPAPGPRASFPPPFGGPGFGAPGPGLHYAPPAPPAFGLFDDAAAAAAALGLAPPAARGLLTPPASPLELLEAKPKRGRRSWPRKRTATHTCSYAGCGKTYTKSSHLKAHLRTHTGEKPYHCNWDGCGWKFARSDELTRHYRKHTGHRPFQCHLCDRAFSRSDHLALHMKRHM

SEQ ID NO: 25373 - protein, 450 aa, Homo sapiens
LILYSGTALSAPGGATPPSPLGPTEPALSRGTAASCGGLGTAGRLHRNFAIVGTGRCSFPELPRTAYFEDSLSSPGTPTAHPGLAPYFPNPAIALASRRPQRGHRGPPVPREMFQAFPGDYDSGSRCSSSPSAESQYLSSVDSFGSPPTAAASQECAGLGEMPGSFVPTVTAITTSQDLQWLVQPTLISSMAQSQGQPLASQPPVVDPYDMPGTSYSTPGMSGYSSGGASGSGGPSTSGTTSGPGPARPARARPRRPREETLTPEEEEKRRVRRERNKLAAAKCRNRRRELTDRLQAETDQLEEEKAELESEIAELQKEKERLEFVLVAHKPGCKIPYEEGPGPGPLAEVRDLPGSAPAKEDGFSWLLPPPPPPPLPFQTSQDAPPNLTASLFTHSEVQVLGDPFPVVNPSYTSSFVLTCPEVSAFAGAQRTSGSDQPSDPLNSPSLLAL

SEQ ID NO: 25374 - protein, 605 aa, Homo sapiens
IPHTPWGRRPEEEAEDSGGPGEDRETLGLKTSSSLPEAWGLLDDDDGMYGEREATSVPRGQGSQFADGQRAPLSPSLLIRTLQGSDKNPGEEKAEEEGVAEEEGVNKFSYPPSHRECCPAVEEEDDEEAVKKEAHRTSTSALSPGSKPSTWVSCPGEEENQATEDKRTERSKGARKTSVSPRSSGSDPRSWEYRSGEASEEKEEKAHKETGKGEAAPGPQSSAPAQRPQLKSWWCQPSDEEEGEVKALGAAEKDGEAECPPCIPPPSAFLKAWVYWPGEDTEEEEDEEEDEDSDSGSDEEEGEAEASSSTPATGVFLKSWVYQPGEDTEEEEDEDSDTGSAEDEREAETSASTPPASAFLKAWVYRPGEDTEEEEDEDVDSEDKEDDSEAALGEAESDPHPSHPDQRAHFRGWGYRPGKETEEEEAAEDWGEAEPCPFRVAIYVPGEKPPPPWAPPRLPLRLQRRLKRPETPTHDPDPETPLKARKVRFSEKVTVHFLAVWAGPAQAARQGPWEQLARDRSRFARRITQAQEELSPCLTPAARARAWARLRNPPLAPIPALTQTLPSSSVPSSPVQTTPLSQAVATPSRSSAAAAAALDLSGRRG

SEQ ID NO: 25375 - protein, 181 aa, Homo sapiens
VTPRRPFEKSRLDQELKLIGEYGLRNKREVWRVKFTLAKIRKAARELLTLDEKDPRRLFEGNALLRRLVRIGVLDEGKMKLDYILGLKIEDFLERRLQTQVFKLGLAKSIHHARVLIRQRHIRVRKQVVNIPSFIVRLDSQKHIDFSLRSPYGGGRPGRVKRKNAKKGQGGAGAGDDEEED

SEQ ID NO: 25376 - protein, 14 aa, Homo sapiens
MMPAPSATPIPSSR

SEQ ID NO: 25377 - protein, 93 aa, Homo sapiens [sequence omitted]

SEQ ID NO: 25378 - protein, 7 aa, Homo sapiens
MGQIGNV

SEQ ID NO: 25379 - protein, 107 aa, Homo sapiens
MEVIRQVKGDLAFLNFQNNLQQTPLHLAVITNQPEIAEALLGAGCDPELRDFRGNTPLHLACEQGCLASVGVLTQSCTTPHLHSILKATNYNGMSASLPCPTPSEGR

SEQ ID NO: 25380 - protein, 96 aa, Homo sapiens
MAPESIKPLTTSKSDLEAKEGEVLDELSLLGRASQLETVTRSRNSLPNQVAFPEGEEQDAVSGGKFSSTLYETGGCDMSLVNFEPAARRASNIWYV

SEQ ID NO: 25381 - protein, 839 aa, Homo sapiens
MEFLDITSIRDTRFGKFAKMPKSQKLRDVFNMDFPDNSFLLKTLTVVSGPDMVDLTFHNFVSYKENVGKAWAEDVLALVKHPLTANASRSTFLDKILVKLKMQLNSEGKIPVKNFFQMFPADRKRVEAALSACHLPKGKNDAINPEDFPEPVYKSFLMSLCPRPEIDEIFTSYHAKAKPYMTKEHLTKFINQKQRDSRLNSLLFPPARPDQVQGLIDKYEPSGINAQRGQLSPEGMVWFLCGPENSVLAQDKLLLHHDMTQPLNHYFINSSHNTYLTAGQFSGLSSAEMYRQVLLSGCRCVELDCWKGKPPDEEPIITHGFTMTTDIFFKEAIEAIAESAFKTSPYPIILSFENHVDSPRQQAKMAEYCRTIFGDMLLTEPLEKFPLKPGVPLPSPEDLRGKILIKNKKNQFSGPTSSSKDTGGEAEGSSPPSAPAGEGTVWAGEEGTELEEEEVEEEEEEESGNLDEEEIKKMQSDEGTAGLEVTAYEEMSSLVNYIQPTKFVSFEFSAQKNRSYVISSFTELKAYDLLSKASVQFVDYNKRQMSRIYPKGTRMDSSNYMPQMFWNAGCQMVALNFQTMDLPMQQNMAVFEFNGQSGYLLKHEFMRRPDKQFNPFSVDRIDVVVATTLSITVISGQFLSERSVRTYVEVELFGLPGDPKRRYRTKLSPSTNSINPVWKEEPFVFEKILMPELASLRVAVMEEGNKFLGHRIIPINALNSGYHHLCLHSESNMPLTMPALFIFLEMKDYIPGAWADLTVALANPIKFFSAHDTKSVKLKEAMGGLPEKPFPLASPVASQVNGALAPTSNGSPGMSFGPHTYWGHLHLCTHRHFPLKNFT

SEQ ID NO: 25382 - protein, 61 aa, Homo sapiens
MCNSRITIHLNRAKVGYMESTCGPSAQGWILFCSLIAKHCLIWNKSSWVIPISPYHMSTTS

SEQ ID NO: 25383 - protein, 22 aa, Homo sapiens
MGTLDDTEVWGTVDPIMQVALL

SEQ ID NO: 25384 - protein, 30 aa, Homo sapiens
MPSTSSTSGWPRSTSTPRPRSTSRTASTRA

SEQ ID NO: 25385 - protein, 234 aa, Homo sapiens
MGSKERFHWQSHNVKQSGVDDMVLLPQITEDAIAANLRKRFMDDYIFTYIGSVLISVNPFKQMPYFTDREIDLYQGAAQYENPPHIYALTDNMYRNMLIDCENQCVIISGESGAGKTVAAKYIMGYISKVSGGGEKVQHVKDIILQSNPLLEAFGNAKTVRNNNSSRFGKYFEIQFSRGGEPDGGKISNFLLEKSRVVMQNENERNFHIYYQVQGRGRGRGSTTWSPAGWTMGR

SEQ ID NO: 25386 - protein, 70 aa, Homo sapiens [sequence omitted]

SEQ ID NO: 25387 - protein, 979 aa, Homo sapiens
MVSVKYADEEIPRSPFKVKVLPTYDASKVTASGPGLSSYGVPASLPVDFAIDARDAGEGLLAVQITDQEGKPKRAIVHDNKDGTYAVTYIPDKTGRYMIGVTYGGDDIPLSPYRIRATQTGDASKCLATGPGIASTVKTGEEVGFVVDAKTAGKGKVTCTVLTPDGTEAEADVIENEDGTYDIFYTAAKPGTYVIYVRFGGVDIPNSPFTVMVTEEAYVPVSDMNGLGFKPFDLVIPFAVRKGEITGEVHMPSGKTATPEIVDNKDGTVTVRYAPTEVGLHEMHIKYMGSHIPESPLQFYVNYPNSGSVSAYGPGLVYGVANKTATFTIVTEDAGEGGLDLAIEGPSKAEISCIDNKDGTCTVTYLPTLPGDYSILVKYNDKHIPGSPFTAKITDDSRRCSQVKLGSAADFLLDISETDLSSLTASIKAPSGRDEPCLLKRLPNNHIGISFIPREVGEHLVSIKKNGNHVANSPVSIMVVQSEIGDARRAKVYGRGLSEGRTFEMSDFIVDTRDAGYGGISLAVEGPSKVDIQTEDLEDGTCKVSYFPTVPGVYIVSTKFADEHVPGSPFTVKISGEGRVKESITRTSRAPSVATVGSICDLNLKIPEINSSDMSAHVTSPSGRVTEAEIVPMGKNSHCVRFVPQEMGVHTVSVKYRGQHVTGSPFQFTVGPLGEGGAHKVRAGGPGLERGEAGVPAEFSIWTREAGAGGLSIAVEGPSKAEITFDDHKNGSCGVSYIAQEPGNYEVSIKFNDEHIPESPYLVPVIAPSDDARRLTVMSLQESGLKVNQPASFAIRLNGAKGKIDAKVHSPSGAVEECHVSELEPDKYAVRFIPHENGVHTIDVKFNGSHVVGSPFKVRVGEPGQAGNPALVSAYGTGLEGGTTGIQSEFFINTTRAGPGTLSVTIEGPSKVKMDCQETPEGYKVMYTPMAPGNYLISVKYGGPNHIVGSPFKAKVTGNEQPPSELLSLPGELVVSDQS

SEQ ID NO: 25388 - protein, 99 aa, Homo sapiens
MEEVQKQKELSKAEIQKVLKEKDQLTTDLNSMEKSFSDLFKRFEKQKEVIEGYRKVCLRHPGVLTSEADGLMVQASGATSCCLCTLVLGQASPCHGGMG

SEQ ID NO: 25389 - protein, 110 aa, Homo sapiens
MRIRIIEFLQADMTKYLEGSLYPSTQQYNDVVNALLQAHPFLDEDGCGFFLWKRALKDRFKYVRRPIEDDEQVIRNKCKFGHRRGQTRKSLADIRFDEIKLVQIKVRLNS

SEQ ID NO: 25390 - protein, 973 aa, Homo sapiens
MAVVRTSLQKVVVLLHRLQRMAVSSPRYQKLCKDIQAEIDAHNDIFKSIDGNRQKMVKALGNSEEATMLQHRLDDMNQRWNDLKAKSASIRAHLEASAEKWNRLLMSLEELIKWLNMKDEELKKQMPIGGDVPALQLQYDHCKALRRELKEKEYSVLNAVDQARVFLADQPIEAPEEPRRNLQSKTELTPEERAQKIAKAMRKQSSEVKEKWESLNAVTSNWQKQVDKALEKLRDLQGAMDDLDADMKEAESVRNGWKPVGDLLIDSLQDHIEKIMAFREEIAPINFKVKTVNDLSSQLSPLDLHPSLKMSRQLDDLNMRWKLLQVSVDDRLKQLQEAHRDFGPSSQHFLSTSVQLPWQRSISHNKVPYYINHQTQTTCWDHPKMTELFQSLADLNNVRFSAYRTAIKIRRLQKALCLDLLELSTTNEIFKQHKLNQNDQLLSVPDVINCLTTTYDGLEQMHKDLVNVPLCVDMCLNWLLNVYDTGRTGKIRVQSLKIGLMSLSKGLLEEKYRYLFKEVAGPTEMCDQRQLGLLLHDAIQIPRQLGEVAAFGGSNIEPSVRSCFQQNNNKPEISVKEFIDWMHLEPQSMVWLPVLHRVAAAETAKHQAKCNICKECPIVGFRYRSLKHFNYDVCQSCFFSGRTAKGHKLHYPMVEYCIPTTSGEDVRDFTKVLKNKFRSKKYFAKHPRLGYLPVQTVLEGDNLETPITLISMWPEHYDPSQSPQLFHDDTHSRIEQYATRLAQMERTNGSFLTDSSSTTGSVEDEHALIQQYCQTLGGESPVSQPQSPAQILKSVEREERGELERIIADLEEEQRNLQVEYEQLKDQHLRRGLPVGSPPESIISPHHTSEDSELIAEAKLLRQHKGRLEARMQILEDHNKQLESQLHRLRQLLEQPESDSRINGVSPWASPQHSALSYSLDPDASGPQFHQAAGEDLLAPPHDTSTDLTEVMEQIHSTFPSCCPNVPSRPQAM

SEQ ID NO: 25391 - protein, 14 aa, Homo sapiens
MIAVFCKSNFSRIL

SEQ ID NO: 25392 - protein, 718 aa, Homo sapiens
MPGSDLERRAHLLLAQLEHSEPIEAEPEALSPVPALKPTPELELALTPARAPSPVPAPAPEPEPAPTPAPGSELEVAPAPAPELQQAPEPAVGLESAPAPALELEPAPEQDPAPSQTLELEPAPAPVPSLQPSWPSPVVAENGLSEEKPHLLVFPPDLVAEQFTLMDAELFKKVVPYHCLGSIWSQRDKKGKEHLAPTIRATVTQFNSVANCVITTCLGNRSTKAPDRARVVEHWIEVARECRILKNFSSLYAILSALQSNSIHRLKKTWEDVSRDSFRIFQKLSEIFSDENNYSLSRELLIKEGTSKFATLEMNPKRAQKRPKETGIIQGTVPYLGTFLTDLVMLDTAMKDYLYGRLINFEKRRKEFEVIAQIKLLQSACNNYSIAPDEQFGAWFRAVERLSETESYNLSCELEPPSESASNTLRTKKNTAIVKRWSDRQAPSTELSTSGSSHSKSCDQLRCGPYLSSGDIADALSVHSAGSSSSDVEEINISFVPESPDGQEKKVTACPSPQYPFPSPHSKSMHGARKPWILNTASRRFPIWQLAWGAPTGQWDLLILPSPSVLGISLTVIPGDLRHQLSLQQHLVLLSLHHARGCHTHPQALCLRALQLQLRAAALQPAGGRLLYHPRQPGRGQWQHVQEHPGKPAGVAWVPPSTGGKCTLNTVHHPCPPGVYLVVGGEGQMSARYRNEEGSDQGQGWPEGRGGGKEQPCKAPRS

SEQ ID NO: 25393 - protein, 43 aa, Homo sapiens
MSLSSASTPPLWPPENSFPSSGLSSIRRRWSQFLFTFLKVDKL

SEQ ID NO: 25394 - protein, 14 aa, Homo sapiens
LVVFSCMKRLAPLK

SEQ ID NO: 25395 - protein, 28 aa, Homo sapiens
ILLPKRPPKTTEDKEETIQKLEVRRKCA

SEQ ID NO: 25396 - protein, 30 aa, Homo sapiens
IMLLCLLQLAAPLCSYSITIRFYLFWLNTP

SEQ ID NO: 25397 - protein, 38 aa, Homo sapiens
VSPACKTWVFCWTSWPRRTRTSGCCRPSCRPKRKSFRA

SEQ ID NO: 25398 - protein, 25 aa, Homo sapiens
LVFPRKEMAGELQGTQAPSLRRSLG

SEQ ID NO: 25399 - protein, 71 aa, Homo sapiens
RKSKKKRQQHQEEEDILDVRDEKDGGAREAESRAHTGSSSRGKRKRQQHPKKERAGVSTVQKAKKKQKKRD

SEQ ID NO: 25400 - protein, 17 aa, Homo sapiens
ILPQSMVAEYPELRGVF

SEQ ID NO: 25401 - protein, 67 aa, Homo sapiens
KFCSTGFLCSSTYASSFSLVACRAWLALRPEVLKSAGILHLCNLLLSPSHHRNQSLEAFGLGAAFTV

SEQ ID NO: 25402 - protein, 148 aa, Homo sapiens
IPRRVGSGAGHAQWAGPVRVARPQLNAQLEGWLSQVQSTKRPARAIIAPHAGYTYCGSCAAHAYKQVDPSITRRIFILGPSHHVPLSRCALSSVDIYRTPLYDLRIDQKIYGELWKTGMFERMSLQTDEDEHSIEMHLPYTAKAMERV

SEQ ID NO: 25403 - protein, 19 aa, Homo sapiens
TIPSTVVNSIAARLLLQII

SEQ ID NO: 25404 - protein, 23 aa, Homo sapiens
LCSLILSCLFVVLKGRSFVLWVC

SEQ ID NO: 25405 - protein, 27 aa, Homo sapiens
RIIQYAVCRISMTTLKMNFLYSPDILI

SEQ ID NO: 25406 - protein, 105 aa, Homo sapiens
IDLDTKKPCTRSLTCKTHSLTQRRAVQGRRKRFDVLLAEHKNKTREKELIRHPDSQQPPQPLRDPHPAPPRTSQEPHQNPHGVIPSESKPFVASKPKPHTPSLPR

SEQ ID NO: 25407 - protein, 338 aa, Homo sapiens
MPLSEAPLCISCCPVKGDLLVGCTNKLVLFSLKYQIINEEFSLLDFERSLIIHIDNITPVEVSFCVGYVAVMSDLEVLIVKLESGPKNGERVHHHPHKTNNRIRRTEEGISNEISQLESDDFVICQKPLELLGEKSEQSGLSVTLESTGLADEKRKYSHFQHLLYRRFAPDISSYVLSDDIKLHSLQLLPIYQTGSLTSDGKNLSQEKELLSLFCFFSLPHVGYLYMVVKSVELMSVYQYPEKSQQAVLTPQFLHVITSNNLQCFTVRCSAAAAREEDPYMDTTLKACPPVSMDVCALRIQLFIGLKAICHFKNHIILLTKAEPEAIPERRQSPKRLL

SEQ ID NO: 25408 - protein, 25 aa, Homo sapiens
IVASVHVLWCPKVVFVLALGGASLC

SEQ ID NO: 25409 - protein, 49 aa, Homo sapiens
LPHHLQPVLPELPCGCLQVGPHCFPCRYLADWPKHPHQPLPSMLPPTCC

SEQ ID NO: 25410 - protein, 544 aa, Homo sapiens
LLPSEEDPALQELESNFLIQQKLVEAAKKLANEPDLCKTVKKKRKQDYTDAMKKLQEIENAINEYRIRCGKKPSQKATVLPEDIIPSESSSLSDTTTYDDPSDAFTFPGQRSSSVPHSPRILPPKSLGIERIHFRKSSINEQFVDTRQSREMLSTHSSPYKTLERRPQGGRSMPTTPVLTRNAYSSSHLEPESSSQHCRQRSGSLESQSHLLSEMDSDKPFFSLSKSQRSSSTEILDDGSSYTSQSSTEYYCVTPVTGPYYTTQTLDTRTRGRRRSKKQNVSTSNSGSMPNLAQKDSLRNGVYSKSQEPPSSSYYIAGYTPYAECDFYYSGGYVYENDTEGQYSVNPSYRSSAHYGYERQRDYSRSFHEDEVDRVPHNPYATLRLPRKAAAKSEHITKNIHKALVAEHLRGWYQRASGQKDQGHSPQTSFDSDRGSQRCLGFAGLQVPCSPSSRASSYSSVSSTNASGNWRTQLTIGLSDYETPAHSSYTSCYGNVYNPLPSPSRQYTEISQLDGTDGNQLEDNLESSEQRLFWHEDSKPGTLV

SEQ ID NO: 25411 - protein, 20 aa, Homo sapiens
MEGMHSWAVLLVSDSPLTLQ

SEQ ID NO: 25412 - protein, 21 aa, Homo sapiens
RSSFQSATMTSSTRMCWRLAS

SEQ ID NO: 25413 - protein, 16 aa, Homo sapiens
LGYRQALQLRRIQGKT

SEQ ID NO: 25414 - protein, 8 aa, Homo sapiens
ILLQLVSS

SEQ ID NO: 25415 - protein, 41 aa, Homo sapiens
LPDPSASASRRRPAYRRPALRRSPGVSGHLGPTVWSCFTFP

SEQ ID NO: 25416 - protein, 15 aa, Homo sapiens
MLYEWAESSSLFFFW

SEQ ID NO: 25417 - protein, 21 aa, Homo sapiens
VTYKLAAVACASAGREAEQYC

SEQ ID NO: 25418 - protein, 130 aa, Homo sapiens
LRMSEHRNEALGNYLEMRLKSSFLRGLGSWKSNPLRLGGWTILLTLTMGQGEPGGPQGDPWVPHELLLPSLCDSSHASSWGSGSITCAWRGGDSSSHPLVSGHILSNSPVAAVMCSSMGTHLSPFKGTLL

SEQ ID NO: 25419 - protein, 22 aa, Homo sapiens
LARLQEGHPSHHSSTCSLEKGR

SEQ ID NO: 25420 - protein, 144 aa, Homo sapiens
RHMTWIPLGNQADLFPEGTIRPVHDDILIAQLRPGQEIDLLMHCVKGIGKDHAKFSPVATASYRLLPDITLLEPVEGEAAEELSRCFSPGVIEVQEVQGKKVARVANPRLDTFSREIFRNEKLKKVVRLARVRDHYICEYEVVR

SEQ ID NO: 25421 - protein, 37 aa, Homo sapiens
KYITLQFEKSKPHGKIPAKRENQRRSGFTKQPTLARN

SEQ ID NO: 25422 - protein, 799 aa, Homo sapiens
VRSAAAQPGRDAGRRRAAGGGSPVRSPRLSAEPRARRAMARRPRHSIYSSDEDDEDFEMCDHDYDGLLPKSGKRHLGKTRWTREEDEKLKKLVEQNGTDDWKVIANYLPNRTDVQCQHRWQKVLNPELIKGPWTKEEDQRVIELVQKYGPKRWSVIAKHLKGRIGKQCRERWHNHLNPEVKKTSWTEEEDRIIYQAHKRLGNRWAEIAKLLPGRTDNAIKNHWNSTMRRKVEQEGYLQESSKASQPAVATSFQKNSHLMGFAQAPPTAQLPATGQPTVNNDYSYYHISEAQNVSSHVPYPVALHVNIVNVPQPAAAAIQRHYNDEDPEKEKRIKELELLLMSTENELKGQQVLPTQNHTCSYPGWHSTTIADHTRPHGDSAPVSCLGEHHSTPSLPADPGSLPEESASPARCMIVHQGTILDNVKNLLEFAETLQFIDSDSSSWCDLSSFEFFEEADFSPSQHHTGKALQLQQREGNGTKPAGEPSPRVNKRMLSESSLDPPKVLPPARHSTIPLVILRKKRGQASPLATGDCSSFIFADVSSSTPKRSPVKSLPFSPSQFLNTSSNHENSDLEMPSLTSTPLIGHKLTVTTPFHRDQTVKTQKENTVFRTPAIKRSILESSPRTPTPFKHALAAQEIKYGPLKMLPQTPSHLVEDLQDVIKQESDESGIVAEFQENGPPLLKKIKQEVESPTDKSGNFFCSHHWEGDSLNTQLFTQTSPVADAPNILTSSVLMAPASEDEDNVLKAFTVPKNRSLASPLQPCSSTWEPASCGKMEEQMTSSSQARKYVNAFSARTLVM

SEQ ID NO: 25423 - protein, 474 aa, Homo sapiens
LAFGEVQITYLTHACMDLKLGDKRMVFDPWLIGPAFARGWWLLHEPPSDWLERLCQADLIYISHLHSDHLSYPTLKKLAGRRPDIPIYVGNTERPVFWNLNQSGVQLTNINVVPFGIWQQVDKNLRFMILMDGVHPEMDTCIIVEYKGHKILNIVDCTRPNGGRLPMKVALMMSDFAGGASGFPMTFSGGKFTEEWKAQFIKTERKKLLNYKARLVKNLQPRIYCPFAGYFVESHPSDKYIKETNTKNDPNELNNLIKKNSDVITWTPRPGATLDLGRMLKDRTDSKGIIEPPEGTKIYKDSWDFEPYLEILNAALGDEIFLHSSWIKEYFTWAGFKDYNLVVRMIETDEDFNPFPGGYDYLVDFLDLSFPKERPQREHPYEEIHSRVDVIRHVVKNGLLWDELYIGFQTRLQRDPDIYHHLFWNHFQIKLPLTPPNWKSFLMCCEQNGPVILQFSTERTNEPNRNKFSVENKA

SEQ ID NO: 25424 - protein, 45 aa, Homo sapiens
TTRTSFSSSTFPRTLGCLACPNLLTGLRNREMLLPFYLTKSSASG

SEQ ID NO: 25425 - protein, 31 aa, Homo sapiens
LEDGPKFLKSDDAAIVDMVPDKPMCVDSLSD

SEQ ID NO: 25426 - protein, 25 aa, Homo sapiens
LIGLINDETYPEADNLKKNKYGFGF

SEQ ID NO: 25427 - protein, 6 aa, Homo sapiens
MERTVL

SEQ ID NO: 25428 - protein, 53 aa, Homo sapiens
ILHPHPGFSCTCSQSVFLKVILTLLLISYLHEYFSLFSVSLKIELPTPKYEIG

SEQ ID NO: 25429 - protein, 13 aa, Homo sapiens
VDLRPREVMLSCF

SEQ ID NO: 25430 - protein, 104 aa, Homo sapiens
LGGAVATSAFSVSDGVNGGGGWDAAAGLAAGGWVGAGPGDGEGDRRQPLVHAADRLRLHPQPGLPDPSGRRPPGPAARRGEKSSIHFLPNSIPWACHSIWEKSN

SEQ ID NO: 25431 - protein, 19 aa, Homo sapiens
MMMRKKTTWKLRKKMESWS

SEQ ID NO: 25432 - protein, 15 aa, Homo sapiens
LLSTPYTTWLHILLH

SEQ ID NO: 25433 - protein, 6 aa, Homo sapiens
LTIMMP

SEQ ID NO: 25434 - protein, 42 aa, Homo sapiens
IGLLVPLLGWGNQNTQWYPTSKMPDLKDSKTTDLCQHVKHMV

SEQ ID NO: 25435 - protein, 49 aa, Homo sapiens
VHPPRPGIMWTPRCRRRPPCLSACSPRPSMTYPGSQPFFGEWRPWSSES

SEQ ID NO: 25436 - protein, 26 aa, Homo sapiens
LDLVGDYTLSPMETTSCILPSIWDLG

SEQ ID NO: 25437 - protein, 28 aa, Homo sapiens
TFSWSGRRMQLKLILWIEKLLELLYKVF

SEQ ID NO: 25438 - protein, 65 aa, Homo sapiens
VKDAVSKKPIPLENPKEKRPGKRIEREEEEEEEALPLDMMDEDDLQLMKDLGQRVSFLTRDLSSR

SEQ ID NO: 25439 - protein, 49 aa, Homo sapiens
KRRFFGTPVDGHGKERARLRMIYPLFTDEESEAQRTVMKCDQTLRSPKR

SEQ ID NO: 25440 - protein, 76 aa, Homo sapiens
VHIIGHIPPGHCLKSWSWNYYRIVARYENTLAAQFFGHTHVDEFEVFYDEETLSRPLAVAFLAPSATTYIGLNPGE

SEQ ID NO: 25441 - protein, 58 aa, Homo sapiens
LYSSLLLPSSHFLVCSAAVWAWAMRQGRFPIRAPTCPQSLERDSNPASMSRSLQPPSS

SEQ ID NO: 25442 - protein, 140 aa, Homo sapiens
RLGSPRPVGSHLTSVKFLMTSPEIASLSWGQMKVKGSNTTYKDCKVWPGGSRTWDWRETGTEHSPGVQPADVKEVVEKGVQTLVIGRGMSEALKVPSSTVEYLKKHGIDVRVLQTEQAVKEYNALVAQGVRVGGVFHSTC

SEQ ID NO: 25443 - protein, 14 aa, Homo sapiens
MAQPWKAEVKVTSP

SEQ ID NO: 25444 - protein, 18 aa, Homo sapiens
MPLGPWRSGRLPTSAERH

SEQ ID NO: 25445 - protein, 23 aa, Homo sapiens
LMSEAPKWMSVPQMSKRMAQNGT

SEQ ID NO: 25446 - protein, 9 aa, Homo sapiens
KMEVLYRKP

SEQ ID NO: 25447 - protein, 32 aa, Homo sapiens
LVSLLLEPLPPPPSLQNFSFTPHPPPLPPFLF

SEQ ID NO: 25448 - protein, 10 aa, Homo sapiens
TSCMCWFSWR

SEQ ID NO: 25449 - protein, 27 aa, Homo sapiens
LVPIIDNIMTLHVMDQLTPSRSVNWFI

SEQ ID NO: 25450 - protein, 26 aa, Homo sapiens
MNQYQSLKNRIPPRQPHNKPRWVFSY

SEQ ID NO: 25451 - protein, 43 aa, Homo sapiens
IAQVDPKKTIQMGSFRINPDGSQSVVEVTVTVPPNKVAHSGFG

SEQ ID NO: 25452 - protein, 49 aa, Homo sapiens
RTAVDSLVAYSVKIETNENNLESAKGLLDDLRNDLDRLFVKVEKIHEKV

SEQ ID NO: 25453 - protein, 15 aa, Homo sapiens
KPLLLGPRGSCPMLC

SEQ ID NO: 25454 - protein, 35 aa, Homo sapiens
IPKKPKAVNSPQRSRLFAYPTLESLQKWKEQNVRV

SEQ ID NO: 25455 - protein, 45 aa, Homo sapiens
LVLERVRQSVCSRSCRSPAAAGLDSETFLVSLLRHLCCKIEAVLW

SEQ ID NO: 25456 - protein, 31 aa, Homo sapiens
LTTCLPALPRPPSRGASSPWNLMTTSQWLSH

SEQ ID NO: 25457 - protein, 28 aa, Homo sapiens
RSTTPSQTTDLSGSQPPKTPSGSTSRTS

SEQ ID NO: 25458 - protein, 21 aa, Homo sapiens
VNTNFLPQKCSTCKNRKSSYS

SEQ ID NO: 25459 - protein, 13 aa, Homo sapiens
LASPPQPRFSAPP

SEQ ID NO: 25460 - protein, 26 aa, Homo sapiens
ICRLASFLCAPESCGPARTSEDLHSS

SEQ ID NO: 25461 - protein, 96 aa, Homo sapiens
VDCLSSERMSLPLLAGGVADDINTNKKEGISDVVEGMELNSSITSQDVLMSSPEKNTASQNSILEEGETKISQSELFDNKSLTTECHLLDSVSFPT

SEQ ID NO: 25462 - protein, 221 aa, Homo sapiens
IMLQIDPRPTNQRINKHVNNDVNLRIQNLTILVRNIKTYYQEVLQQLIVMNLPNVLMIGRDPLSGKSMEEIKKVLLLVLGCAVQCERKEEFIERIKQLDIETQAGIVAHIQEVTHNQENVFDLQWLELPDVAPEELEALSRSMVLHLRRLIDQRDECTELIVDLTQERDYLQAQHPPSPIKSSSADSTPSPTSSLSSEDKQHLAVELADTKARLRRVRQEL

SEQ ID NO: 25463 - protein, 99 aa, Homo sapiens
VNWEGASPGVPPEPRKGQSPRKNKNKNKNRQPAENPETTEPGQFYIALGFLRGRGEGVRDKSPSFLCFFFSFAFSSFIFLFVCIFFPLLVEVRFPPTRP

SEQ ID NO: 25464 - protein, 1033 aa, Homo sapiens
LPQRVIDVSGMWDQRLVRLALLQHLRAFYGIKVKGVRGQCDRRRHETAATEIGGKIFGVPFNALPHSAVPEYGHIPSFLVDACTSLEDHIHTEGLFRKSGSVIRLKALKNKVDHGEGCLSSAPPCDIAGLLKQFFRELPEPILPADLHEALLKAQQLGTEEKNKATLLLSCLLADHTVHVLRYFFNFLRNVSLRSSENKMDSSNLAVIFAPNLLQTSEGHEKMSSNTEKKLRLQAAVVQTLIDYASDIGRVPDFILEKIPAMLGIDGLCATPSLEGFEEGEYETPGEYKRKRRQSVGDFVSGALNKFKPNRTPSITPQEERIAQLSESPVILTPNAKRTLPVDSSHGFSSKKRKSIKHNFNFELLPSNLFNSSSTPVSVHIDTSSEGSSQSSLSPVLIGGNHLITAGVPRRSKRIAGKKVCRVESGKAGCFSPKISHKEKVRRSLRLKFNLGKNGREVNGCSGVNRYESVGWRLANQQSLKNRIESVKTGLLFSPDVDEKLPKKGSEKISKSEETLLTPERLVGTNYRMSWTGPNNSSFQEVDANEASSMVENLEVENSLEPDIMVEKSPATSCELTPSNLNNKHNSNITSSPLSGDENNMTKETLVKVQKAFSESGSNLHALMNQRQSSVTNVGKVKLTEPSYLEDSPEENLFETNDLTIVESKEKYEHHTGKGEKCFSERDFSPLQTQTFNRETTIKCYSTQMKMEHEKDIHSNMPKDYLSKQEFSSDEEIKKQQSPKDKLNNKLKENENMMEGNLPKCAAHSKDEARSSFSQQSTCVVTNLSKPRPMRIAKQQSLETCEKTVSESSQMTEHRKVSDHIQWFNKLSLNEPNRIKVKSPLKFQRTPVRQSVRRINSLLEYSRQPTGHKLASLGDTASPLVKSVSCDGALSSCIESASKDSSVSCIKSGPKEQKSMSCEESNIGAISKSSMELPSKSFLKMRKHPDSVNASLRSTTVYKQKILSDGQVKVPLDDLTNHDIVKPVVNNNMGISSGINNRVLRRPSERGRAWYKGSPKHPIGKTQLLPTSKPVDL

SEQ ID NO: 25465 - protein, 62 aa, Homo sapiens
MRQEKEMRIRMKVKLLHPLVMRLRYRSATRKKLRDSHLAMSPKQGEGARLSVWTLTHRIIQR

SEQ ID NO: 25466 - protein, 34 aa, Homo sapiens
RKKLRDSHLAMSPKQGEGARLSVWTLTHSRIIQR

SEQ ID NO: 25467 - protein, 10 aa, Homo sapiens
MVPSDRLALL

SEQ ID NO: 25468 - protein, 17 aa, Homo sapiens
LNSAFVNLICRYVQTTS

SEQ ID NO: 25469 - protein, 12 aa, Homo sapiens
LSAWMCGNSLPT

SEQ ID NO: 25470 - protein, 86 aa, Homo sapiens [sequence omitted]

SEQ ID NO: 25471 - protein, 101 aa, Homo sapiens
RSSSLTWHQAPSMRPGLDMSSAPRRWWKHPLSCACGRLCREEAADTGDDILPHETGLQPGMVPLKYLLEEGVWGAGVGCGVFPAISTAYDHCNNLSPSEEH

SEQ ID NO: 25472 - protein, 63 aa, Homo sapiens
RLAQGFPGHLPPRSWSRAEPRSMEMDAPRPPSLAVPGAASRPGRAAISSSEPSPLLATLCFFS

SEQ ID NO: 25473 - protein, 78 aa, Homo sapiens
RWQPTMQSPQQQSPDGGQNLPPLPPPRPRPPRARGRAPRSRPRPPATRTSAHSVRTPITGASRAPARSWTPADSTGGP

SEQ ID NO: 25474 - protein, 204 aa, Homo sapiens
IGSALQDQASRLGVPVGILSAGMVASSVGQICTAPAETSHPVLLTVEQRKKLSSLLEFAQYLLAHSMFSRLSFCQELWKIQSSLLLEAVWHLHVQGIVSLQELLESHPDMHAVGSWLFRNLCCLCEQMEASCQHADVARAMLSDFVQMFVLRGFQKNSDLRRTVEPEKMPQVTVDVLQRMLIFALDALAAGVQEESSTHKIVRC

SEQ ID NO: 25475 - protein, 50 aa, Homo sapiens
LGSAIVSSAGPGSSFDFCALVILYPVYRLPTSHVIMISFEGELNEIPLRA

SEQ ID NO: 25476 - protein, 15 aa, Homo sapiens
VASDRGDPESLLSAE

SEQ ID NO: 25477 - protein, 34 aa, Homo sapiens
IFKLKRGKEACALDTVGWVQRHRKMLRHCPSKRK

SEQ ID NO: 25478 - protein, 33 aa, Homo sapiens
RSLSLGNMRVTSTATSSMDWLLPNSHTVGLFLT

SEQ ID NO: 25479 - protein, 6 aa, Homo sapiens
TSRLFI

SEQ ID NO: 25480 - protein, 79 aa, Homo sapiens
LKSFWQKVCGMRTSALLQGITETIFYGAFSKSKPGTIGIFSPKGETLDRTALMIITAGLLACPSHPMHPFCQIIRMRVF

SEQ ID NO: 25481 - protein, 56 aa, Homo sapiens
VVVRVRLRGTRHRLRPPERLREPRPEGVGVAAAETQPPLFPLFAERRRVASIRQLP

SEQ ID NO: 25482 - protein, 296 aa, Homo sapiens
VEGPGEAAMKPSGEDQAALAAGPWEECFQAAVQLALRAGQIIRKALTEEKRVSTKTSAADLVTETDHLVEDLIISELRERFPSHRFIAEEAAASGAKCVLTHSPTWIIDPIDGTCNFVHRFPTVAVSIGFAVRQELEFGVIYHCTEERLYTGRRGRGAFCNGQRLRVSGETDLSKALVLTEIGPKRDPATLKLFLSNMERLLHAKAHGVRVIGSSTLALCHLASGAADAYYQFGLHCWDLAAATVIIREAGGIVIDTSGGPLDLMACRVVAASTREMAMLIAQALQTINYGRDDEK

SEQ ID NO: 25483 - protein, 47 aa, Homo sapiens
LETQRRVAFCSRTDLRLESVCWGPCLWKRPRGLKDGLVRSGTIMLSC

SEQ ID NO: 25484 - protein, 14 aa, Homo sapiens
LEILLIFTPSPRDS

SEQ ID NO: 25485 - protein, 82 aa, Homo sapiens
KGQGVARSRTARLQPDRCPDLSVPSPAQSHHGLLDTADAAALEEFHVSPETAGPAPGRIAVASLPLLHPGGCSPLPPAPGAP

SEQ ID NO: 25486 - protein, 175 aa, Homo sapiens
VRTLAGNCAAATMSQEGVELEKSVRRLREKFHGKVSSKKAGALMRKFGSDHTGVGRSIVYGVKQKDGQELSNDLDAQDPPEDMKQDRDIQAVATSLLPLTEANLRMFQRAQDDLIPAVDRQFACSSCDHVWWRRVPQRKEVSRCRKCRKRYEPVPADKMWGLAEFHCPKCRHNFR

SEQ ID NO: 25487 - protein, 16 aa, Homo sapiens
MPSPWLDRNSSMPARS

SEQ ID NO: 25488 - protein, 25 aa, Homo sapiens
KPTSPGDTVSELQGEISRPAKLSSR

SEQ ID NO: 25489 - protein, 60 aa, Homo sapiens
LRPAGGPRAPPRPGPAGGALLPRSLTAFVPHSGHGLPVSSGEPAYTPIPHDVPHGTPPFC

SEQ ID NO: 25490 - protein, 121 aa, Homo sapiens
LSSDHSLFSLQCRRLCLRSPGHGSVASTPLCPRPVSALTTPALSAPTFFLQPRPPPPLLAAAMESSTFALVPVFAHLSILQSLVPAAGAASPVAISAQHLCYSHVTPGDPGAGAGQGPAPS

SEQ ID NO: 25491 - protein, 31 aa, Homo sapiens
VARAFRVSMSADGEAEPTCQWPGAGFVAKLM

SEQ ID NO: 25492 - protein, 20 aa, Homo sapiens
LSSPAPATSGVAVPGMEPRP

SEQ ID NO: 25493 - protein, 30 aa, Homo sapiens
LSPLSPSVAKSRPLDLDTPSPRLHDLPGPS

SEQ ID NO: 25494 - protein, 936 aa, Homo sapiens
LTDEEKCWTGRENSDANMQRSIMSFFHPKKEGKAKKPEKEASNSSRETEPPPKAALKEWNGVVSESDSPVKRPGRKAARVLGSEGEEEDEALSPAKGQKPALDCSQVSPPRPATSPENNASLSDTSPMDSSPSGIPKRRTARKQLPKRTIQEVLEEQSEDEDREAKRKKEEEEEETPKESLTEAEVATEKEGEDGDQPTTPPKPLKTSKAETPTESVSEPEVATKQELQEEEEQTKPPRRAPKTLSSFFTPRKPAVKKEVKEEEPGAPGKEGAAEGPLDPSGYNPAKNNYHPVEDACWKPGQKVPYLAVARTFEKIEEVSARLRMVETLSNLLRSVVALSPPDLLPVLYLSLNHLGPPQQGLELGVGDGVLLKAVAQATGRQLESVRAEAAEKGDVGLVAENSRSTQRLMLPPPPLTASGVFSKFRDIARLTGSASTAKKIDIIKGLFVACRHSEARFIARSLSGRLRLGLAEQSVLAALSQAVSLTPPGQEFPPAMVDAGKGKTAEARKTWLEEQGMILKQTFCEVPDLDRIIPVLLEHGLERLPEHCKLSPGIPLKPMLAHPTRGISEVLKRFEEAAFTCEYKYDGQRAQIHALEGGEVKIFSRNQEDNTGKYPDIISRIPKIKLPSVTSFILDTEAVAWDREKKQIQPFQVLTTRKRKEVDASEIQVQVCLYAFDLIYLNGESLVREPLSRRRQLLRENFVETEGEFVFATSLDTKDIEQIAEFLEQSVKDSCEGLMVKTLDVDATYEIAKRSHNWLKLKKDYLDGVGDTLDLVVIGAYLGRGKRAGRYGGFLLASYDEDSEELQAICKLGTGFSDEELEEHHQSLKALVLPSPRPYVRIDGAVIPDHWLDPSAVWEVKCADLSLSPIYPAARGLVDSDKGISLRFPRFIRVREDKQPEQATTSAQVACLYRKQSQIQNQQGEDSGSDPEDTY

SEQ ID NO: 25495 - protein, 57 aa, Homo sapiens
KNEIAAVVFFFTRLVRKHDKLKKEAVERFAEKLTLILQEKYKNHWYPEKPSKGQAYR

SEQ ID NO: 25496 - protein, 338 aa, Homo sapiens
LGLGAPGRPSPAMLLSKFGSLAHLCGPGGVDHLPVKILQPAKADKESFEKAYQVGAVLGSGGFGTVYAGSRIADGLPVAVKHVVKERVTEWGSLGGATVPLEVVLLRKVGAAGGARGVIRLLDWFERPDGFLLVLERPEPAQDLFDFITERGALDEPLARRFFAQVLAAVRHCHSCGVVHRDIKDENLLVDLRSGELKLIDFGSGALLKDTVYTDFDGTRVYSPPEWIRYHRYHGRSATVWSLGVLLYDMVCGDIPFEQDEEILRGRLLFRRRVSPECQQLIRWCLSLRPSERPSLDQIAAHPWMLGADGGVPESCDLRLCTLDPDDVASTTSSSESL

SEQ ID NO: 25497 - protein, 11 aa, Homo sapiens
KSFEASELQRS

SEQ ID NO: 25498 - protein, 71 aa, Homo sapiens
IVRPPALSRVAALRVPARPGPGRCVALSGAPPAGSPRGKGARPGGGLASDAPGRARSRRGSRCHLLQQDRG

SEQ ID NO: 25499 - protein, 32 aa, Homo sapiens
RRRRRRCSRTSRSLRSSWRRRRAPGRSCSWRR

SEQ ID NO: 25500 - protein, 9 aa, Homo sapiens
VCPCLTSTP

SEQ ID NO: 25501 - protein, 213 aa, Homo sapiens
LAAVEFVTYEVTPLESLPFNSSWSACLALGSFCSLRPAPSLRAGLQRRAQPSAACQQPPSRPAAQPRTKPGQSFLAARAMNTEMYQTPMEVAVYQLHNFSISFFSSLLGGDVVSVKLDNSASGASVVAIDNKIEQAMDLVKNHLMYAVREEVEILKEQIRELVEKNSQLERENTLLKTLASPEQLEKFQSCLSPEEPAPESPQVPEAPGGSAV

SEQ ID NO: 25502 - protein, 30 aa, Homo sapiens
MSPTFNRLHSTRGTRGGHLPLPAETIQWQY

SEQ ID NO: 25503 - protein, 128 aa, Homo sapiens
MQRASRLKRELHMLATEPPPGITCWQDKDQMDDLRARRYPFEPPQIRFLTPIYHPNIDSAGRICLDVLKLPPKGAWRPSLNIATVLTSIQLLMSEPNPDDPLMADIVNIPIFLCNTYPTLSIPLTLPV

SEQ ID NO: 25504 - protein, 41 aa, Homo sapiens
MEYKKTTKAMKKRRMFYLHPISKPLLSCYCMSLQAQYRASS

SEQ ID NO: 25505 - protein, 75 aa, Homo sapiens
MAEPDYIEDDNPELIRPQKLINPVKTSRNHQDLHRELLMNQKRTGLPLREADPLQVAITVVASSASRLLQSRVPF

SEQ ID NO: 25506 - protein, 15 aa, Homo sapiens
MAHQRKGLKSSMAAS

SEQ ID NO: 25507 - protein, 727 aa, Homo sapiens
MRRGFRPGAERKTREPPRTGTAFTAPEESLEWIMTHEEHHAAKTLGIGKAIAVLTSGGDAQGMNAAVRAVVRVGIFTGARVFFVHEGYQGLVDGGDHIKEATWESVSMMLQLGGTVIGSARCKDFREREGRLRAAYNLVKRGITNLCVIGGDGSLTGADTFRSEWSDLLSDLQKAGKITDEEATKSSYLNIVGLVGSIDNDFCGTDMTIGTDSALHRIMEIVDAITTTAQSHQRTFVLEVMGRHCGYLALVTSLSCGADWVFIPECPPDDDWEEHLCRRLSETRTRGSRLNIIIVAEGAIDKNGKPITSEDIKNGSRMGVEAVMALLEGTPDTPACVVSLSGNQAVRLPLMECVQVTKDVTKAMDEKKFDEALKLRGRSFMNNWEVYKLLAHVRPPVSKSGSHTVAVMNVGAPAAGMNAAVRSTVRIGLIQGNRVLVVHDGFEGLAKGQIEEAGWSYVGGWTGQGGSKLGTKRTLPKKSFEQISANITKFNIQGLVIIGGFEAYTGGLELMEGRKQFDELCIPFVVIPATVSNNVPGSDFSVGADTALNTICTANVEHLVQKMKTTVKRGLVLRNEKCNENYTTDFIFNLYSEEGKGIFDSRKNVLGHMQQGGSPTPFDRNFATKMGAKAMNWMSGKIKESYRNGRIFANTPDSGCVLGMRKRALVFQPVAELKDQTDFEHRIPKEQWWLKLRPILKILAKYEIDLDTSDHAHLEHITRKRSGEAAV

SEQ ID NO: 25508 - protein, 410 aa, Homo sapiens
MGLPPTENWNFYMAFSFFRVAAILQGVYKRSLTGQASSTYAEQTGKLTEFVSNLAWDFAVKEGFRVFKEMPFTNPLTRSYHTWARPQSQWCPTGSRSYSSVPEASPAHTSRGGLVISPESLSPPVRELYHRLKHFMEQRVYPAEPELQSHQASAARWSPSPLIEDLKEKAKAEGLWNLFLPLEADPEKKYGAGLTNVEYAHLCELMGTSLYAPEVCNCSAPDTGNMELLVRYGTEAQKARWLIPLLEGKARSCFAMTEPQVASSDATNIEASIREEDSFYVINGHKWWITGILDPRCQLCVFMGKTDPHAPRHRQQSVLLVPMDTPGIKIIRPLTVYGLEDAPGGHGEVRFEHVRVPKENMVLGPGRGFEIAQGRLGPGRIHHCMRLIGFSERALALMKARVSAFPRTQH

SEQ ID NO: 25509 - protein, 24 aa, Homo sapiens
MALKQISSNKCFGGLQKVFEHDRR

SEQ ID NO: 25510 - protein, 1267 aa, Homo sapiens
MKEDIPWTLIDFYDNQPVIDLIEAKMGILELLDEECLLPHGTDENWLQKLYNNFVNRNPLFEKPRMSNTSFVIQHFADKVEYKCEGFLEKNRDTVYDMLVEILRASKFHLCANFFQENPTPPSPFGSMITVKSAKQVIKPNSKHFRTTVGSKFRSSLYLLMETLNATTPHYVRCIKPNDEKLPFEFDSKRIVQQLRACGVLETIRISAQSYPSRWTYIEFYSRYGILMTKQELSFSDKKEVCKVVLHRLIQDSNQYQFGKTKIFFRAGQVAYLEKLRLDKLRQSCVMVQKHMRGWLQRKKFLRERRAALIIQQYFRGQQTVRKAITAVALKEAWAAIIIQKHCRGYLVRSLYQLIRMATITMQAYSRGFLARRRYRKMLEEHKAVILQKYARAWLARRRFQSIRRFVLNIQLTYRVQRLQKKLEDQNKENHGLVEKLTSLAALRAGDVEKIQKLEAELEKAATHRRNYEEKGKRYRDAVEEKLAKLQKHNSELETQKEQIQLKLQEKTEELKEKMDNLTKQLFDDVQKEERQRMLLEKSFELKTQDYEKQIQSLKEEIKALKDEKMQLQHLVEGEHVTSDGLKAEVARLSKQVKTISEFEKEIELLQAQKIDVEKHVQSQKREMREKMSEITKQLLESYDIEDVRSRLSVEDLEHLNEDGELWFAYEGLKKATRVLESHFQSQKDCYEKEIEALNFKVVHLSQEINHLQKLFREENDINESIRHEVTRLTSENMMIPDFKQQISELEKQKQDLEIRLNEQAEKMKGKLEELSNQLHRSQEEEGTQRKALEAQNEIHTKEKEKLIDKIQEMQEASDHLKKQFETESEVKCNFRQEASRLTLENRDLEEELDMKDRVIKKLQDQVKTLSKTIGKANDVHSSSGPKEYLGMLQYKREDEAKLIQNLILDLKPRGVVVNMIPGLPAHILFMCVRYADSLNDANMLKSLMNSTINGIKQVVKEHLEDFEMLSFWLSNTCHFLNCLKQYSGEEEFMKHNSPQQNKNCLNNFDLSEYRQILSDVAIRIYHQFIIIMEKNIQPIIVPGMLEYESLQGISGLKPTGFRKRSSSIDDTDGYTMTSVLQQLSYFYTTMCQNGLDPELVRQAVKQLFFLIGAVTLNSLFLRKDMCSCRKGMQIRCNISYLEEWLKDKNLQNSLAKETLEPLSQAAWLLQVKKTTDSDAKEIYERCTSLSAVQIIKILNSYTPIDDFEKRVTPSFVRKVQALLNSREDSSQLMLDTKYLFQVTFPFTPSPHALEMIQIPSSFKLGFLNRL

SEQ ID NO: 25511 - protein, 618 aa, Homo sapiens [sequence omitted]

SEQ ID NO: 25512 - protein, 112 aa, Homo sapiens [sequence omitted]

SEQ ID NO: 25513 - protein, 501 aa, Homo sapiens
MGAEEAAPDPAGVGRGGGVAGPPSGGGGQPQWQKCRLLLRSEGEGGGGSRLEFFVPPKASRPRLSIPCSSITDVRTTTALEMPDRENTFVVKVEGPSEYIMETVDAQHVKAWVSDIQECLSPGPCPATSPRPMTLPLAPGTSFLTRENTDSLELSCLNHSESLPSQDLLLGPSESNDRLSQGAYGGLSDRPSASISPSSASIAASHFDSMELLPPELPPRIPIEEGPPTGTVHPLSAPYPPLDTPETATGSFLFQGEPEGGEGDQPLSGYPWFHGMLSRLKAAQLVLTGGTGSHGVFLVRQSETRRGEYVLTFNFQGKAKHLRLSLNEEGQCRVQHLWFQSIFDMLEHFRVHPIPLESGGSSDVVLVSYVPSSQRQQEPTTSHDPPQPPEPPSWTDPPQPGAEEASRAPEVAAAAAAAAKERQEKEKAGGGGVPEELVPVVELVPVVELEEAIAPGSEAQGAGSGGDAGVPPMVQLQQSPLGGDGEEGGHPRAINNQYSFV

SEQ ID NO: 25514 - protein, 52 aa, Homo sapiens
MMTSTHPLLSQPAKPRAPTAPSMGTVKQNSPWSLKCRAWSGAKNSPRGPTRC

SEQ ID NO: 25515 - protein, 140 aa, Homo sapiens
MKCPLDRAYLIKLSGLNKETYQSCLKSFECLLGLNSNIGIRDLAVQFSCIEAVNMASKILKSYESSLPQTQQVDLDLSRPLFTSAALLSACKILKLKVDKNKMVATSGVKKAIFDRLCKQLEKIGQQVDSKYSVVQECVI

SEQ ID NO: 25516 - protein, 59 aa, Homo sapiens
MDAFGGPIWSMAASPSGSQLLVGCEDGSVKLFQITPDKIQFERNFDRQKSKRHFSWGGK

SEQ ID NO: 25517 - protein, 45 aa, Homo sapiens
MSITSNVDGLKTTQTTRGVAFPKNHVRIKEKEREKDLGTQLVSTK

SEQ ID NO: 25518 - protein, 11 aa, Homo sapiens
MPTGRTTTNTS

SEQ ID NO: 25519 - protein, 18 aa, Homo sapiens
MPFKCMQLTDFILKFPHR

SEQ ID NO: 25520 - protein, 56 aa, Homo sapiens
MWNILKPRTHLLCMTNMFCTRHEGTDSTVFLPHSHNISEWISRHIPFGFLHLCSYE

SEQ ID NO: 25521 - protein, 75 aa, Homo sapiens
MERASERRTASALFAGFRALGLFSNDIPHVVRFSALKRRFYVTTCVGKSFHTYDVQKLSLVAVSKYGLYSEFMHI

SEQ ID NO: 25522 - protein, 296 aa, Homo sapiens
MIVSGMNSSLIRFSSSFFPQASLGGCVRMIVTGAAPASPTVLGFLRAALGCQVYEGYGQTECTAGCTFTTPGDWTSGHVGAPLPCNHIKLVDVEELNYWACKGEGEICVRGPNVFKGYLKDPDRTKEALDSDGWLHTGDIGKWLPAGTLKIIDRKKHIFKLAQGEYVAPEKIENIYIRSQPVAQIYVHGDSLKAFLVGIVVPDPEVMPSWAQKRGIEGTYADLCTNKDLKKAILEDMVRLGKESGLHSFEQVKAIHIHSDMFSVQNGLLTPTLKAKRPELREYFKKQIEELYSISM

SEQ ID NO: 25523 - protein, 3294 aa, Homo sapiens
MKDVMSDLQQTNSEKILLSWVRQTTRPYSQVNVLNFTTSWTDGLAFNAVLHRHKPDLFSWDKVVKMSPIERLEHAFSKAQTYLGIEKLLDPEDVAVQLPDKKSIIMYLTSLFEVLPQQVTIDAIREVETLPRKYKKECEEEAINIQSTAPEEEHESPRAETPSTVTEVDMDLDSYQIALEEVLTWLLSAEDTFQEQDDISDDVEEVKDQFATHEAFMMELTAHQSSVGSVLQAGNQLITQGTLSDEEEFEIQEQMTLLNARWEALRVESMDRQSRLHDVLMELQKKQLQQLSAWLTLTEERIQKMETCPLDDDVKSLQKLLEEHKSLQSDLEAEQVKVNSLTHMVVIVDENSGESATAILEDQLQKLGERWTAVCRWTEERWNRLQEINILWQELLEEQCLLKAWLTEKEEALNKVQTSNFKDQKELSVSVRRLAILKEDMEMKRQTLDQLSEIGQDVGQLLDNSKASKKINSDSEELTQRWDSLVQRLEDSSNQVTQAVAKLGMSQIPQKDLLETVRVREQAITKKSKQELPPPPPPKKRQIHVDIEAKKKFDAISAELLNWILKWKTAIQTTEIKEYMKMQDTSEMKKKLKALEKEQRERIPRADELNQTGQILVEQMGKEGLPTEEIKNVLEKVSSEWKNVSQHLEDLERKIQLQEDINAYFKQLDELEKVIKTKEEWVKHTSISESSRQSLPSLKDSCQRELTNLLGLHPKIEMARASCSALMSQPSAPDFVQRGFDSFLGRYQAVQEAVEDRQQHLENELKGQPGHAYLETLKTLKDVLNDSENKAQVSLNVLNDLAKVEKALQEKKTLDEILENQKPALHKLAEETKALEKNVHPDVEKLYKQEFDDVQGKWNKLKVLVSKDLHLLEEIALTLRAFEADSTVIEKWMDGVKDFLMKQQAAQGDDAGLQRQLDQCSAFVNEIETIESSLKNMKEIETNLRSGPVAGIKTWVQTRLGDYQTQLEKLSKEIATQKSRLSESQEKAANLKKDLAEMQEWMTQAEEEYLERDFEYKSPEELESAVEEMKRAKEDVLQKEVRVKILKDNIKLLAAKVPSGGQELTSELNVVLENYQLLCNRIRGKCHTLEEVWSCWIELLHYLDLETTWLNTLEERMKSTEVLPEKTDAVNEALESLESVLRHPADNRTQIRELGQTLIDGGILDDIISEKLEAFNSRYEDLSHLAESKQISLEKQLQVLRETDQMLQVLQESLGELDKQLTTYLTDRIDAFQVPQEAQKIQAEISAHELTLEELRRNMRSQPLTSPESRTARGGSQMDVLQRKLREVSTKFQLFQKPANFEQRMLDCKRVLDGVKAELHVLDVKDVDPDVIQTHLDKCMKLYKTLSEVKLEVETVIKTGRHIVQKQQTDNPKGMDEQLTSLKVLYNDLGAQVTEGKQDLERASQLARKMKKEAASLSEWLSATETELVQKSTSEGLLGDLDTEISWAKNVLKDLEKRKADLNTITESSAALQNLIEGSEPILEERLCVLNAGWSRVRTWTEDWCNTLMNHQNQLEIFDGNVAHISTWLYQAEALLDEIEKKPTSKQEEIVKRLVSELDDANLQVENVRDQALILMNARGSSSRELVEPKLAELNRNFEKVSQHIKSAKLLIAQEPLYQCLVTTETFETGVPFSDLEKLENDIENMLKFVEKHLESSDEDEKMDEESAQIEEVLQRGEEMLHQPMEDNKKEKIRLQLLLLHTRYNKIKAIPIQQRKMGQLASGIRSSLLPTDYLVEINKILLCMDDVELSLNVPELNTAIYEDFSFQEDSLKNIKDQLDKLGEQIAVIHEKQPDVILEASGPEAIQIRDTLTQLNAKWDRINRMYSDRKGCFDRAMEEWRQFHCDLNDLTQWITEAEELLVDTCAPGGSLDLEKARIHQQELEVGISSHQPSFAALNRTGDGIVQKLSQADGSFLKEKLAGLNQRWDAIVAEVKDRQPRLKGESKQVMKYRHQLDEIICWLTKAEHAMQKRSTTELGENLQELRDLTQEMEVHAEKLKWLNRTELEMLSDKSLSLPERDKISESLRTVNMTWNKICREVPTTLKECIQEPSSVSQTRIAAHPNVQKVVLVSSASDIPVQSHRTSEISIPADLDKTITELADWLVLIDQMLKSNIVTVGDVEEINKTVSRMKITKADLEQRHPQLDYVFTLAQNLKNKASSSDMRTAITEKLERVKNQWDGTQHGVELRQQQLEDMIIDSLQWDDHREETEELMRKYEARLYILQQARRDPLTKQISDNQILLQELGPGDGIVMAFDNVLQKLLEEYGSDDTRNVKETTEYLKTSWINLKQSIADRQNALEAEWRTVQASRRDLENFLKWIQEAETTVNVLVDASHRENALQDSILARELKQQMQDIQAEIDAHNDIFKSIDGNRQKMVKALGNSEEATMLQHRLDDMNQRWNDLKAKSASIRAHLEASAEKWNRLLMSLEELIKWLNMKDEELKKQMPIGGDVPALQLQYDHCKALRRELKEKEYSVLNAVDQARVFLADQPIEAPEEPRRNLQSKTELTPEERAQKIAKAMRKQSSEVKEKWESLNAVTSNWQKQVDKALEKLRDLQGAMDDLDADMKEAESVRNGWKPVGDLLIDSLQDHIEKIMAFREEIAPINFKVKTVNDLSSQLSPLDLHPSLKMSRQLDDLNMRWKLLQVSVDDRLKQLQEAHRDFGPSSQHFLSTSVQLPWQRSISHNKVPYYINHQTQTTCWDHPKMTELFQSLADLNNVRFSAYRTAIKIRRLQKALCLDLLELSTTNEIFKQHKLNQNDQLLSVPDVINCLTTTYDGLEQMHKDLVNVPLCVDMCLNWLLNVYDTGRTGKIRVQSLKIGLMSLSKGLLEEKYRYLFKEVAGPTEMCDQRQLGLLLHDAIQIPRQLGEVAAFGGSNIEPSVRSCFQQNNNKPEISVKEFIDWMHLEPQSMVWLPVLHRVAAAETAKHQAKCNICKECPIVGFRYRSLKHFNYDVCQSCFFSGRTAKGHKLHYPMVEYCIPTTSGEDVRDFTKVLKNKFRSKKYFAKHPRLGYLPVQTVLEGDNLETPITLISMWPEHYDPSQSPQLFHDDTHSRIEQYATRLAQMERTNGSFLTDSSSTTGSVEDEHALIQQYCQTLGGESPVSQPQSPAQILKSVEREERGELERIIADLEEEQRNLQVEYEQLKDQHLRRGLPVGSPPESIISPHHTSEDSELIAEAKLLRQHKGRLEARMQILEDHNKQLESQLHRLRQLLEQPESDSRINGVSPWASPQHSALSYSLDPDASGPQFHQAAGEDLLAPPHDTSTDLTEVMEQIHSTFPSCCPNVPSRPQAM

SEQ ID NO: 25524 - protein, 230 aa, Homo sapiens
MASVQNAQRDNAGDRADFWRMRGQRSGVKKNLRKSREDLTAVVSVSTKFPAYERVLLREAGFKRPVVLFGPIADIAMEKLANELPDWFQTAKTEPKDAGSEKSTGVVRLNTVRQIIEQDKHALLDVTPKAVDLLNYTQWFPIVIFFNPDSRQGVKTMRQRLNPTSNKSSRKLFDQANKLKKTCAHLFTATINLNSANDSWFGSLKDTIQHQQGEAVWVSEGKVCGIDMLL

SEQ ID NO: 25525 - protein, 35 aa, Homo sapiens
MNYGCHECPCEAVGKPWLDCEGYLKSILESTRSSM

SEQ ID NO: 25526 - protein, 740 aa, Homo sapiens
RFLGIARFSSLLTLRMAMDSSLQARLFPGLAIKIQRSNGLIHSANVRTVNLEKSCVSVEWAEGGATKGKEIDFDDVAAINPELLQLLPLHPKDNLPLQENVTIQKQKRRSVNSKIPAPKESLRSRSTRMSTVSELRITAQENDMEVELPAAANSRKQFSVPPAPTRPSCPAVAEIPLRMVSEEMEEQVHSIRGSSSANPVNSVRRKSCLVKEVEKMKNKREEKKAQNSEMRMKRAQEYDSSFPNWEFARMIKEFRATLECHPLTMTDPIEEHRICVCVRKRPLNKQELAKKEIDVISIPSKCLLLVHEPKLKVDLTKYLENQAFCFDFAFDETASNEVVYRFTARPLVQTIFEGGKATCFAYGQTGSGKTHTMGGDLSGKAQNASKGIYAMASRDVFLLKNQPCYRKLGLEVYVTFFEIYNGKLFDLLNKKAKLRVLEDGKQQVQVVGLQEHLVNSADDVIKMIDMGSACRTSGQTFANSNSSRSHACFQIILRAKGRMHGKFSLVDLAGNERGADTSSADRQTRMEGAEINKSLLALKECIRALGQNKAHTPFRESKLTQVLRDSFIGENSRTCMIATISPGISSCEYTLNTLRYADRVKELSPHSGPSGEQLIQMETEEMEACSNGALIPGNLSKEEEELSSQMSSFNEAMTQIRELEEKAMEELKEIIQQGPDWLELSEMTEQPDYDLETFVNKAESALAQQAKHFSALRDVIKALRLAMQLEEQASRQISSKKRPQ

SEQ ID NO: 25527 - protein, 57 aa, Homo sapiens
LSRWLRSVGVFLLPAPYWAPRERWLGSLRRPSLVHGYPVLAWHSARCWCQAWTEEPR

SEQ ID NO: 25528 - protein, 19 aa, Homo sapiens
VFSSCSAVGGGGRNQSLGD

SEQ ID NO: 25529 - protein, 8 aa, Homo sapiens
MRAFVVCW

SEQ ID NO: 25530 - protein, 212 aa, Homo sapiens
KSTMRAAAISTPKLDKMPGMFFSANPKELKGTTHSLLDDKMQKRRPKTFGMDMKAYLRSMIPHLESGMKSSKSKDVLSAAEVMQWSQSLEKLLANQTGQNVFGSFLKSEFSEENIEFWLACEDYKKTESDLLPCKAEEIYKAFVHSDAAKQINIDFRTRESTAKKIKAPTPTCFDEAQKVIYTLMEKDSYPRFLKSDIYLNLLNDLQANSLK

SEQ ID NO: 25531 - protein, 33 aa, Homo sapiens
MDKCLHEGSAVPAPRLCPTTDSAKDQNSCETNS

SEQ ID NO: 25532 - protein, 11 aa, Homo sapiens
RIGSRGRMGRR

SEQ ID NO: 25533 - protein, 18 aa, Homo sapiens
KKLEKNDVVLKQPTEYHL

SEQ ID NO: 25534 - protein, 16 aa, Homo sapiens
TPESLCTSFTLLREYL

SEQ ID NO: 25535 - protein, 82 aa, Homo sapiens
VLKQVHPDTGISSKAMGIMNSFVNDIFERIAGEASRLAHYNKRSTITSREIQTAVRLLLPGKLAKHAVSEGTKAVTKYTSSK

SEQ ID NO: 25536 - protein, 44 aa, Homo sapiens
REAESRAHTGSSSRGKRKRQQHPKKERAGVSTVQKAKKKQKKRD

SEQ ID NO: 25537 - protein, 14 aa, Homo sapiens
KGLSEGKWKNQNEH

SEQ ID NO: 25538 - protein, 28 aa, Homo sapiens
RMFYLHPISKPLLSCYCMSLQAQYRASS

SEQ ID NO: 25539 - protein, 8 aa, Homo sapiens
MLKMSLVF

SEQ ID NO: 25540 - protein, 9 aa, Homo sapiens
LLLLLLWDR

SEQ ID NO: 25541 - protein, 214 aa, Homo sapiens
TPCAFAFSAPGPGPAPPPPLPAFPEAPGSEPACCPLAFRVDPFTDYGSSLTVTLPPELQAHQPFQVILRYTSTDAPAIWWLDPELTYGCAKPFVFTQGHSVCNRSFFPCFDTPAVKCTYSAVVKAPSGVQVLMSATRSAYMEEEGVFHFHMEHPVPAYLVALVAGDLKPADIGPRSRVWAEPCLLPTATSKLSGAVEQWLSAAERLYGPYMWGR

SEQ ID NO: 25542 - protein, 17 aa, Homo sapiens
LSGCVVASRKPVALAAW

SEQ ID NO: 25543 - protein, 33 aa, Homo sapiens
LAGAVSHDGPSLPLFQSVDSLACMTKFFSFAMT

SEQ ID NO: 25544 - protein, 60 aa, Homo sapiens
RAWELTPLTDPQSQSQRCEETSTLPGPQGQRGSASEAPFSVPIPIQALLALTTPRDSSGS

SEQ ID NO: 25545 - protein, 27 aa, Homo sapiens
LDFRFLFCKMRSLEDPENEAHRKQVTC

SEQ ID NO: 25546 - protein, 57 aa, Homo sapiens
LAAERLPGRVDSTPPTPAASAAACGWRVPLGLNLWDLTPFPPPSLTPQPGGSIYSPD

SEQ ID NO: 25547 - protein, 40 aa, Homo sapiens
KTNLRSRDLKTACTQPFPRVALHSQAQCRIQACMCGGWRS

SEQ ID NO: 25548 - protein, 57 aa, Homo sapiens
LPLALEPAAVARSSSRIGEGEGMRSCCGPRVTVKDPAAALGPPRPLRLRGAAGARRA

SEQ ID NO: 25549 - protein, 14 aa, Homo sapiens
IRLCRYRFLTLRTR

SEQ ID NO: 25550 - protein, 804 aa, Homo sapiens
LACSFPVVSRGFLASRSARSLSSEGGTMPDNRQPRNRQPRIRSGNEPRSAPAMEPDGRGAWAHSRAALDRLEKLLRCSRCTNILREPVCLGGCEHIFCSNCVSDCIGTGCPVCYTPAWIQDLKINRQLDSMIQLCSKLRNLLHDNELSDLKEDKPRKSLFNDAGNKKNSIKMWFSPRSKKVRYVVSKASVQTQPAIKKDASAQQDSYEFVSPSPPADVSERAKKASARSGKKQKKKTLAEINQKWNLEAEKEDGEFDSKEESKQKLVSFCSQPSVISSPQINGEIDLLASGSLTESECFGSLTEVSLPLAEQIESPDTKSRNEVVTPEKVCKNYLTSKKSLPLENNGKRGHHNRLSSPISKRCRTSILSTSGDFVKQTVPSENIPLPECSSPPSCKRKVGGTSGRKNSNMSDEFISLSPGTPPSTLSSSSYRRVMSSPSAMKLLPNMAVKRNHRGETLLHIASIKGDIPSVEYLLQNGSDPNVKDHAGWTPLHEACNHGHLKVVELLLQHKALVNTTGYQNDSPLHDAAKNGHVDIVKLLLSYGASRNAVNIFGLRPVDYTDDESMKSLLLLPEKNESSSASHCSVMNTGQRRDGPLVLIGSGLSSEQQKMLSELAVILKAKKYTEFDSTVTHVVVPGDAVQSTLKCMLGILNGCWILKFEWVKACLRRKVCEQEEKYEIPEGPRRSRLNREQLLPKLFDGCYFYLWGTFKHHPKDNLIKLVTAGGGQILSRKPKPDSDVTQTINTVAYHARPDSDQRFCTQYIIYEDLCNYHPERVRQGKVWKAPSSWFIDCVMSFELLPLDS

SEQ ID NO: 25551 - protein, 43 aa, Homo sapiens
TWAARRSCGRCGSPTAAARTASSTWWTRWTWTGWRRPRRSCTR

SEQ ID NO: 25552 - protein, 15 aa, Homo sapiens
RFMDSKMNLNTWRIS

SEQ ID NO: 25553 - protein, 99 aa, Homo sapiens
KPCTRSLTCKTHSLTQRRAVQGRRKRFDVLLAEHKNKTREKELIRHPDSQQPPQPLRDPHPAPPRTSQEPHQNPHGVIPSESKPFVASKPKPHTPSLPR

SEQ ID NO: 25554 - protein, 21 aa, Homo sapiens
LQFWRPSEHFTRPLSVSVQCL

SEQ ID NO: 25555 - protein, 59 aa, Homo sapiens
VMVMWNILKPRTHLLCMTNMFCTRHEGTDSTVFLPHSHNISEWISRHIPFGFLHLCSYE

SEQ ID NO: 25556 - protein, 389 aa, Homo sapiens
IEEKNKATFLRAYVNWRNKRTENSRVCIRMIGHNVEGPFSKAFRDQMYIIEMPLSEAPLCISCCPVKGDLLVGCTNKLVLFSLKYQIINEEFSLLDFERSLIIHIDNITPVEVSFCVGYVAVMSDLEVLIVKLESGPKNGERVHHHPHKTNNRIRRTEEGISNEISQLESDDFVICQKPLELLGEKSEQSGLSVTLESTGLADEKRKYSHFQHLLYRRFAPDISSYVLSDDIKLHSLQLLPIYQTGSLTSDGKNLSQEKELLSLFCFFSLPHVGYLYMVVKSVELMSVYQYPEKSQQAVLTPQFLHVITSNNLQCFTVRCSAAAAREEDPYMDTTLKACPPVSMDVCALRIQLFIGLKAICHFKNHIILLTKAEPEAIPERRQSPKRLL

SEQ ID NO: 25557 - protein, 406 aa, Homo sapiens
LALSQEDPSLERHFKGHRDAVTCVDFSINTKQLASGSMDSCLMVWHMKPQSRAYRFTGHKDAVTCVNFSPSGHLLASGSRDKTVRIWVPNVKGESTVFRAHTATVRSVHFCSDGQSFVTASDDKTVKVWATHRQKFLFSLSQHINWVRCAKFSPDGRLIVSASDDKTVKLWDKSSRECVHSYCEHGGFVTYVDFHPSGTCIAAAGMDNTVKVWDVRTHRLLQHYQLHSAAVNGLSFHPSGNYLITASSDSTLKILDLMEGRLLYTLHGHQGPATTVAFSRTGEYFASGGSDEQVMVWKSNFDIVDHGEVTKVPRPPATLASSMGNLPEVDFPVPPGRGRSVESVQSQPQEPVSVPQTLTSTLEHIVGQLDVLTQTVSILEQRLTLTEDKLKQCLENQQLIMQRATP

SEQ ID NO: 25558 - protein, 16 aa, Homo sapiens
VKMCSTFSSVHPSSSC

SEQ ID NO: 25559 - protein, 55 aa, Homo sapiens
VKARASASPLQRSPLPIWFWNHREELGHSNTRCYHAGHPPLQTPVTAPRKNPKCL

SEQ ID NO: 25560 - protein, 21 aa, Homo sapiens
VHPACVWREAGKPVPGSWPQR

SEQ ID NO: 25561 - protein, 610 aa, Homo sapiens
VPATEMVEGPGCTLNGEKIRARVLPGQAVTGVRGSALRSLQGRALRLAASTVVVSPQAAALNNDSSQNVLSLFNGYVYSGVETLGKELFMYFGPKALRIHFGMKGFIMINPLEYKYKNGASPVLEVQLTKDLICFFDSSVELRNSMESQQRIRMMKELDVCSPEFSFLRAESEVKKQKGRMLGDVLMDQNVLPGVGNIIKNEALFDSGLHPAVKVCQLTDEQIHHLMKMIRDFSILFYRCRKAGLALSKHYKVYKRPNCGQCHCRITVCRFGDNNRMTYFCPHCQKENPQHVDICKLPTRNTIISWTSSRVDHVMDSVARKSEEHWTCVVCTLINKPSSKACDACLTSRPIDSVLKSEENSTVFSHLMKYPCNTFGKPHTEVKINRKTAFGTTTLVLTDFSNKSSTLERKTKQNQILDEEFQNSPPASVCLNDIQHPSKKTTNDITQPSSKVNISPTISSESKLFSPAHKKPKTAQYSSPELKSCNPGYSNSELQINMTDGPRTLNPDSPRCSKHNRLCILRVVGKDGENKGRQFYACPLPREAQCGFFEWADLSFPFCNHGKRSTMKTVLKIGPNNGKNFFVCPLGKEKQCNFFQWAENGPGIKIIPGC

SEQ ID NO: 25562 - protein, 20 aa, Homo sapiens
VAPPRRGAGQSRLVLQRNHP

SEQ ID NO: 25563 - protein, 10 aa, Homo sapiens
KTCNNPEWLL

SEQ ID NO: 25564 - protein, 66 aa, Homo sapiens
LTPSRRWEQAPAMERDTAASPHDPSCMTPKPPPDSASDSMQNLGSGDLPQPREEASSSGDRLRTGV

SEQ ID NO: 25565 - protein, 18 aa, Homo sapiens
TQMGAGTSYGEGYSCVST

SEQ ID NO: 25566 - protein, 13 aa, Homo sapiens
RPYSSHPSCKSLL

SEQ ID NO: 25567 - protein, 47 aa, Homo sapiens
KTLSPTLAYPVGRQSCNLVNYLLSPRFPFILLKSSPVSDPYLLSLLL

SEQ ID NO: 25568 - protein, 38 aa, Homo sapiens
LVNFFEKRVDIGLKIKDQKKVERQFSTASDHEQPGVSG

SEQ ID NO: 25569 - protein, 243 aa, Homo sapiens
IKSERRNPPSYAMAGKKVLIVYAHQEPKSFNGSLKNVAVDELSRQGCTVTVSDLYAMNLEPRATDKDITGTLSNPEVFNYGVETHEAYKQRSLASDITDEQKKVREADLVIFQFPLYWFSVPAILKGWMDRVLCQGFAFDIPGFYDSGLLQGKLALLSVTTGGTAEMYTKTGVNGDSRYFLWPLQHGTLHFCGFKVLAPQISFAPEIASEEERKGMVAAWSQRLQTIWKEEPIPCTAHWHFGQ

SEQ ID NO: 25570 - protein, 51 aa, Homo sapiens
LAVKQMQQRRLLPRSPRGPGIRRTGWHCLKRRLLGDCAARWIHCPRRFNQL

SEQ ID NO: 25571 - protein, 21 aa, Homo sapiens
VAAVMCSSMGTHLSPFKGTLL

SEQ ID NO: 25572 - protein, 44 aa, Homo sapiens
MEKRKSSWSVLRSSQCQPVMRRMKYPPQNPAEGRKPRVVMFLQP

SEQ ID NO: 25573 - protein, 78 aa, Homo sapiens
LSPMLDMSLSPVRKKWTPCFIWPARIGLWPAQPRMNGHHAATVYSSYRFLGSTPAEACSVGPPSVLWTWPGVSDLTPA

SEQ ID NO: 25574 - protein, 296 aa, Homo sapiens
TRPAALGSRSSVSPENQPSRAMGTRLPLVLRQLRRPPQPPGPPRRLRVPCRASSGGGGGGGGGREGLLGQRRPQDGQARSSCSPGGRTPAARDSIVREVIQNSKEVLSLLQEKNPAFKPVLAIIQAGDDNLMQEINQNLAEEAGLNITHICLPPDSSEAEIIDEILKINEDTRVHGLALQISENLFSNKVLNALKPEKDVDGVTDINLGKLVRGDAHECFVSPVAKAVIELLEKSGVNLDGKKILVVGAHGSLEAALQCLFQRKGSMTMSIQWKTRQLQSKTESRSVTRLECRRVI

SEQ ID NO: 25575 - protein, 28 aa, Homo sapiens
RFPGSNSIQLKKALLRAAYFHPKIAVIN

SEQ ID NO: 25576 - protein, 270 aa, Homo sapiens
RKKLLNYKARLVKNLQPRIYCPFAGYFVESHPSDKYIKETNTKNDPNELNNLIKKNSDVITWTPRPGATLDLGRMLKDRTDSKGIIEPPEGTKIYKDSWDFEPYLEILNAALGDEIFLHSSWIKEYFTWAGFKDYNLVVRMIETDEDFNPFPGGYDYLVDFLDLSFPKERPQREHPYEEIHSRVDVIRHVVKNGLLWDELYIGFQTRLQRDPDIYHHLFWNHFQIKLPLTPPNWKSFLMCCEQNGPVILQFSTERTNEPNRNKFSVENKA

SEQ ID NO: 25577 - protein, 459 aa, Homo sapiens
KTMTTDEGAKNNEESPTATVAEQGEDITSKKDRGVLKIVKRVGNGEETPMIGDKVYVHYKGKLSNGKKFDSSHDRNEPFVFSLGKGQVIKAWDIGVATMKKGEICHLLCKPEYAYGSAGSLPKIPSNATLFFEIELLDFKGEDLFEDGGIIRRTKRKGEGYSNPNEGATVEIHLEGRCGGRMFDCRDVAFTVGEGEDHDIPIGIDKALEKMQREEQCILYLGPRYGFGEAGKPKFGIEPNAELIYEVTLKSFEKAKESWEMDTKEKLEQAAIVKEKGTVYFKGGKYMQAVIQYGKIVSWLEMEYGLSEKESKASESFLLAAFLNLAMCYLKLREYTKAVECCDKALGLDSANEKGLYRRGEAQLLMNEFESAKGDFEKVLEVNPQNKAARLQISMCQKKAKEHNERDRRIYANMFKKFAEQDAKEEANKAMGKKTSEGVTNEKGTDSQAMEEEKPEGHV

SEQ ID NO: 25578 - protein, 42 aa, Homo sapiens
LSWKFQSCNDFCKWSFSVCLEISEYCVLGLICDDLIPNLNFC

SEQ ID NO: 25579 - protein, 7 aa, Homo sapiens
LLMSAGL

SEQ ID NO: 25580 - protein, 49 aa, Homo sapiens
ILVARGVSRIRRVSLPSRWRGLCPCSVTAALGKRSAPKTLWLQLRLPIL

SEQ ID NO: 25581 - protein, 30 aa, Homo sapiens
MQREPGSRDDKIQPESVEVTPQWRDSSPCV

SEQ ID NO: 25582 - protein, 12 aa, Homo sapiens
RWKRTGFRLEAP

SEQ ID NO: 25583 - protein, 11 aa, Homo sapiens
VVMLPEFGPPL

SEQ ID NO: 25584 - protein, 32 aa, Homo sapiens
MNFSNIMNYMKLLGQVALQRSNLPAISLLERW

SEQ ID NO: 25585 - protein, 242 aa, Homo sapiens
LEGWKSSKDLKNQLGHLESELSFLSTLTGINIRNHSKQTEDLTSTEMTEKSIRKVLQRHRLSGNCHMVTFQLEFQILEIQNKERLSSAVTDLNIIMEPTECSELSEFVSRAEERKDLFMFFRSLHFFVEWFEYRKRTFKHLKEKYPDAVYLSEGPSSCSMGIRSASRPGFELVIVWRIQIDEDGKVFPKLDLLTKVPQRALELDKNRAIETAPLSFRTLVGLLGIEAALESLIKSLCAEENN

SEQ ID NO: 25586 - protein, 35 aa, Homo sapiens
LLQVLEATRVNRRKSALALRWEAGIYANQEEEDNE

SEQ ID NO: 25587 - protein, 76 aa, Homo sapiens
RTRTASSSSPLCTAAEGPSLGLGTLRGENEAIRHPLGPCFQVSLSPLPAFFPALSPKLPPGREKRPGAKNEPFSST

SEQ ID NO: 25588 - protein, 16 aa, Homo sapiens
LLPERPAPTWRPSSLW

SEQ ID NO: 25589 - protein, 12 aa, Homo sapiens
VISGAPLAAAVI

SEQ ID NO: 25590 - protein, 41 aa, Homo sapiens
IKQRRYKNSGKRMILLGENLKKRRRDPKSSYLRSSFFTHLC

SEQ ID NO: 25591 - protein, 37 aa, Homo sapiens
MEGSQLNFQEKYVNRSQHVVSQDLASLLTLMRVREYL

SEQ ID NO: 25592 - protein, 18 aa, Homo sapiens
ILVLCKSSYLSGSQLSHL

SEQ ID NO: 25593 - protein, 922 aa, Homo sapiens
VAQSNRATMGTTAPGPIHLLELCDQKLMEFLCNMDNKDLVWLEEIQEEAERMFTREFSKEPELMPKTPSQKNRRKKRRISYVQDENRDPIRRRLSRRKSRSSQLSSRRLRSKDSVEKLATVVGENGSVLRRVTRAAAAAAAATMALAAPSSPTPESPTMLTKKPEDNHTQCQLVPVVEIGISERQNAEQHVTQLMSTEPLPRTLSPTPASATAPTSQGIPTSDEESTPKKSKARILESITVSSLMATPQDPKGQGVGTGRSASKLRIAQVSPGPRDSPAFPDSPWRERVLAPILPDNFSTPTGSRTDSQSVRHSPIAPSSPSPQVLAQKYSLVAKQESVVRRASRRLAKKTAEEPAASGRIICHSYLERLLNVEVPQKVGSEQKEPPEEAEPVAAAEPEVPENNGNNSWPHNDTEIANSTPNPKPAASSPETPSAGQQEAKTDQADGPREPPQSARRKRSYKQAVSELDEEQHLEDEELQPPRSKTPSSPCPASKVVRPLRTFLHTVQRNQMLMTPTSAPRSVMKSFIKRNTPLRMDPKEKERQRLENLRRKEEAEQLRRQKVEEDKRRRLEEVKLKREERLRKVLQARERVEQMKEEKKKQIEQKFAQIDEKTEKAKEERLAEEKAKKKAAAKKMEEVEARRKQEEEARRLRWLQQEEEERRHQELLQKKKEEEQERLRKAAEAKRLAEQREQERREQERREQERREQERREQERREQERQLAEQERRREQERLQAERELQEREKALRLQKEQLQRELEEKKKKEEQQRLAERQLQEEQEKKAKEAAGASKALNVTVDVQSPACTSYQMTPQGHRAPPKINPDNYGMDLNSDDSTDDEAHPRKPIPTWARGTPLSQAIIHQYYHPPNLLELFGTILPLDLEDIFKKSKPRYHKRTSSAVWNSPPLQGARVPSSLAYSLKKH

SEQ ID NO: 25594 - protein, 29 aa, Homo sapiens
IPHPQDTQSPGNRMPSAPSTLTWNSWASS

SEQ ID NO: 25595 - protein, 48 aa, Homo sapiens
IPTPELAASQSRGRGAPEDPPSGSWRPRSAWAGSARCLPVPTRSSFAG

SEQ ID NO: 25596 - protein, 17 aa, Homo sapiens
RLLPSTTMPLPASRTCR

SEQ ID NO: 25597 - protein, 18 aa, Homo sapiens
TRTAIQTSLETRMMTLSV

SEQ ID NO: 25598 - protein, 36 aa, Homo sapiens
KGLRGQAVTGSMCGILGGSAADLAKWTGLLRRLCRW

SEQ ID NO: 25599 - protein, 12 aa, Homo sapiens
IPRLLATGVVNM

SEQ ID NO: 25600 - protein, 51 aa, Homo sapiens
TVFRIRAQELRFSTCSRGAIGPETTRELRERKGLACQRNFPSAQTPGLRRL

SEQ ID NO: 25601 - protein, 39 aa, Homo sapiens
RPSCSCLVAIALGLLTAVLLSVLLYQWILCQEPAPSFPQ

SEQ ID NO: 25602 - protein, 57 aa, Homo sapiens
LLYPAPWRPPVSLPQGGIRRLEAPRGGKRLALPCPTPHHDPPAAAPSAGLSARVLLL

SEQ ID NO: 25603 - protein, 57 aa, Homo sapiens
LLSRPGSATVPPPDVLLPLARPSQRPQPSREGAPGRKDPPVCRRPPFSWSPSPSSWW

SEQ ID NO: 25604 - protein, 298 aa, Homo sapiens
LLCIQRWNWGPAFPPRPGLALAPTLQLLVEMGSAKSVPVTPARPPPHNKHLARVADPRSPSAGILRTPIQVESSPQPGLPAGEQLEGLKHAQDSDPRSPTLGIARTPMKTSSGDPPSPLVKQLSEVFETEDSKSNLPPEPVLPPEAPLSSELDLPLGTQLSVEEQMPPWNQTEFPSKQVFSKEEARQPTETPVASQSSDKPSRDPETPRSSGSMRNRWKPNSSKVLGRSPLTILQDDNSPGTLTLRQGKRPSPLSENVSELKEGAILGTGRLLKTGGRAWEQGQDHDKENQHFPLVES

SEQ ID NO: 25605 - protein, 834 aa, Homo sapiens
ILVGLEEIGGRRVAALTWSGTWGEGTMGRKLDPTKEKRGPGRKARKQKGAETELVRFLPAVSDENSKRLSSRARKRAAKRRLGSVEAPKTNKSPEAKPLPGKLPKGAVQTAGKKGPQSLFNAPRGKKRPAPGSDEEEEEEDSEEDGMVNHGDLWGSEDDADTVDDYGADSNSEDEEEGEALLPIERAARKQKAREAAAGIQWSEEETEDEEEEKEVTPESGPPKVEEADGGLQINVDEEPFVLPPAGEMEQDAQAPDLQRVHKRIQDIVGILRDFGAQREEGRSRSEYLNRLKKDLAIYYSYGDFLLGKLMDLFPLSELVEFLEANEVPRPVTLRTNTLKTRRRDLAQALINRGVNLDPLGKWSKTGLVVYDSSVPIGATPEYLAGHYMLQGASSMLPVMALAPQEHERILDMCCAPGGKTSYMAQLMKNTGVILANDANAERLKSVVGNLHRLGVTNTIISHYDGRQFPKVVGGFDRVLLDAPCSGTGVISKDPAVKTNKDEKDILRCAHLQKELLLSAIDSVNATSKTGGYLVYCTCSITVEENEWVVDYALKKRNVRLVPTGLDFGQEGFTRFRERRFHPSLRSTRRFYPHTHNMDGFFIAKFKKFSNSIPQSQTGNSETATPTNVDLPQVIPKSENSSQPAKKAKGAAKTKQQLQKQQHPKKASFQKLNGISKGADSELSTVPSVTKTQASSSFQDSSQPAGKAEGIREPKVTGKLKQRSPKLQSSKKVAFLRQNAPPKGTDTQTPAVLSPSKTQATLKPKDHHQPLGRAKGVEKQQLPEQPFEKAAFQKQNDTPKGPQPPTVSPIRSSRPPPAKRKKSQSRGNSQLLLS

SEQ ID NO: 25606 - protein, 17 aa, Homo sapiens
MGQIPEALRRSLLLMKL

SEQ ID NO: 25607 - protein, 152 aa, Homo sapiens
LGNPMKAGASLWGGLRFTVPHLRDTKKTIQFDFQILSKNLNNSQSDVVSFRLSVEAQAQVTLNGVSKPEAVLFPVSDWHPRDQPQKEEDLGPAVHHVYELINQGPSSISQGVLELSCPQALEGQQLLYVTRVTGLNCTTNHPINPKGLEVRS

SEQ ID NO: 25608 - protein, 47 aa, Homo sapiens
IIKKENKKAVYEKLSISRTASVLLHGRRFWSTAIARLQENTLCGGLS

SEQ ID NO: 25609 - protein, 39 aa, Homo sapiens
TARGCCCCPRPARLETERPSQAAAPLMLGGCWRVAAAKR

SEQ ID NO: 25610 - protein, 14 aa, Homo sapiens
LSTVVPCLCNSSCC

SEQ ID NO: 25611 - protein, 690 aa, Homo sapiens
IPRPEATMSTPAVPQDLQLPPSQRAQSAFKEQRRQKLKEHLLRRKTLFAYKQENEMLSSSRDQRVVTSEDQVQEGTKVLKLKTKMADKENMKRPAESKNNTVVGKHCIPLKPSNELTNSTVVIDTHKPKDSNQTPHLLLTEDDPQSQHMTLSQAFHLKNNSKKKQMTTEKQKQDANMPKKPVLGSYRGQIVQSKINSFRKPLQVKDESSAATKKLSATIPKATKPQPVNTSSVTVKSNRSSNMTATTKFVSTTSQNTQLVRPPIRSHHSNTRDTVKQGISRTSANVTIRKGPHEKELLQSKTALSSVKTSSSQGIIRNKTLSRSIASEVIARPASLSNDKLMEKSEPVDQRRHTAGKAIVDSRSAQPKETSEERKARLSEWKAGKGRVLKRPPNSVVTQHEPAGQNEKPVGSFWTTMAEEDEQRLFTEKVNNTFSECLNLINEGCPKEDILVTLNDLIKNIPDAKKLVKYWICLALIEPITSPIENIIAIYEKAILAGAQPIEEMRHTIVDILTMKSQEKANLGENMEKSCASKEEVKEVSIEDTGVDVDPEKLEMESKLHRNLLFQDCEKEQDNKTKDPTHDVKTPNTETRTSCLIKYNVSTTPYLQSVKKKVQFDGTNSAFKELKFLTPVRRSRRLQEKTSKLPDMLKDHYPCVSSLEQLTELGRETDAFVCRPNAALCRVYYEADTT

SEQ ID NO: 25612 - protein, 7 aa, Homo sapiens
VSFVVLS

SEQ ID NO: 25613 - protein, 23 aa, Homo sapiens
MKPAIFVTSELFSVSRFMCSSRL

SEQ ID NO: 25614 - protein, 219 aa, Homo sapiens
KCQMQAGKPILYSYFRSSCSWRVRIALALKGIDYETVPINLIKDGGQQFSKDFQALNPMKQVPTLKIDGITIHQSLAIIEYLEEMRPTPRLLPQDPKKRASVRMISDLIAGGIQPLQNLSVLKQVGEEMQLTWAQNAITCGFNALEQILQSTAGIYCVGDEVTMADLCLVPQVANAERFKVDLTPYPTISSINKRLLVLEAFQVSHPCRQPDTPTELRA

SEQ ID NO: 25615 - protein, 128 aa, Homo sapiens
ISAMPHSSDSSDSSFSRSPPPGKQDSSDDVRRVQRREKNRIAAQKSRQRQTQKADTLHLESEDLEKQNAALRKEIKQLTEELKYFTSVLNSHEPLCSVLAASTPSPPEVVYSAHAFHQPHVSSPRFQP

SEQ ID NO: 25616 - protein, 71 aa, Homo sapiens
LWPTQGGCKLFEIFLVEKWGSKFPPLNLGRPSDCLTNRNSMEATLYRFLRLSLKRLAVPTSCHLGIIVLET

SEQ ID NO: 25617 - protein, 94 aa, Homo sapiens
LALGIGDVPLMEGAETLGWAARLGGCGLSAQGLGQSWLQEAGTPVVGRRRVLQRLTGACLCLCSREGDLSGQGLASALPEVREMWEDADLWGPR

SEQ ID NO: 25618 - protein, 14 aa, Homo sapiens
LLASPPQPRFSAPP

SEQ ID NO: 25619 - protein, 63 aa, Homo sapiens
ISTAPRTFLSPSTATLMNGRYGRAALTQFCTLTCGGGQTSCWWLLLMPTLWGRWPVASVTTCL

SEQ ID NO: 25620 - protein, 10 aa, Homo sapiens
MEIMITSSSF

SEQ ID NO: 25621 - protein, 17 aa, Homo sapiens
TRSTQPREGGRPLPAEP

SEQ ID NO: 25622 - protein, 36 aa, Homo sapiens
RRWACCSWSRCSCCPAPTDCPSTTASTTPTAPTTRT

SEQ ID NO: 25623 - protein, 30 aa, Homo sapiens
TARGPTCLPWLSMSLATPWAWATPQPPTPL

SEQ ID NO: 25624 - protein, 44 aa, Homo sapiens
RSYLTTHRRSHSGERPYKCEECGKAFNSRSYLIAHQRSHTREKL

SEQ ID NO: 25625 - protein, 36 aa, Homo sapiens
VLLGARPAFGTERSASRAPPGKFAVESRPLGPRGPA

SEQ ID NO: 25626 - protein, 75 aa, Homo sapiens
VAYNNQSNRLAVSRTDGTVEIYNLSANYFQEKLWCFCSFSQVMSLGLQKLCAGQKDSDSLVLGSMARLWSMIYRR

SEQ ID NO: 25627 - protein, 11 aa, Homo sapiens
VFAIMQQSMQF

SEQ ID NO: 25628 - protein, 17 aa, Homo sapiens
KNQHHVWQLSIGARSLP

SEQ ID NO: 25629 - protein, 15 aa, Homo sapiens
IPQRSPKLFNEYSQM

SEQ ID NO: 25630 - protein, 48 aa, Homo sapiens
KLRGPATSVGPVGRSRSLSLGNMRVTSTATSSMDWLLPNSHTVGLFLT

SEQ ID NO: 25631 - protein, 10 aa, Homo sapiens
LQPTTSRLFI

SEQ ID NO: 25632 - protein, 12 aa, Homo sapiens
LEVPLPTKCLFA

SEQ ID NO: 25633 - protein, 88 aa, Homo sapiens
RRSVGSWKMLKSFWQKVCGMRTSALLQGITETIFYGAFSKSKPGTIGIFSPKGETLDRTALMIITAGLLACPSHPMHPFCQIIRMRVF

SEQ ID NO: 25634 - protein, 38 aa, Homo sapiens
VASAVVPAWRQVGNCWCPIWILESQTPIFRNSLLNLER

SEQ ID NO: 25635 - protein, 33 aa, Homo sapiens
RMASSDLEQLCSHVNEKIGNIKKTLSLRNCGTL

SEQ ID NO: 25636 - protein, 139 aa, Homo sapiens
VELCESLEEDYKDIEHLKENVPSHLPQVTVTQSWYMKSRLTYNQINDVIKEINKAVISKYKILHQPKKSMNSVTRNLYHRFIDEETKDTKGRYFIVEADIKEFTTLKADKKFHVLLNILRHCRRLSEVRGGGLTRYVIT

SEQ ID NO: 25637 - protein, 82 aa, Homo sapiens
LKHLAGATRLVATALSAVVRGCRVGCDFGRPSGCGSLLPPARGLESGGPLSEGKTGEPGAPGDPEVPAPPPRGCEPTAEEVG

SEQ ID NO: 25638 - protein, 361 aa, Homo sapiens
VTFPPPQEAMTEAGKLPLPLPPRLDWFVHTQMGQLAQDGVPEWFHGAISREDAENLLESQPLGSFLIRVSHSHVGYTLSYKAQSSCCHFMVKLLDDGTFMIPGEKVAHTSLDALVTFHQQKPIEPRRELLTQPCRQKDPANVDYEDLFLYSNAVAEEAACPVSAPEEASPKPVLCHQSKERKPSAEMNRITTKEATSSCPPKSPLGETRQKLWRSLKMLPERGQRVRQQLKSHLATVNLSSLLDVRRSTVISGPGTGKGSQDHSGDPTSGDRGYTDPCVATSLKSPSQPQAPKDRKVPTRKAERSVSCIEVTPGDRSWHQMVVRALSSQESKPEHQGLAEPENDQLPEEYQQPPPFAPGYC

SEQ ID NO: 25639 - protein, 6 aa, Homo sapiens
TRCPTA

SEQ ID NO: 25640 - protein, 8 aa, Homo sapiens
VTSMKGGF

SEQ ID NO: 25641 - protein, 334 aa, Homo sapiens
TPRTPEPHKPGLAMKPGFSPRGGGFGGRGGFGDRGGRGGRGGFGGGRGRGGGFRGRGRGGGGGGGGGGGGGRGGGGFHSGGNRGRGRGGKRGNQSGKNVMVEPHRHEGVFICRGKEDALVTKNLVPGESVYGEKRVSISEGDDKIEYRAWNPFRSKLAAAILGGVDQIHIKPGAKVLYLGAASGTTVSHVSDIVGPDGLVYAVEFSHRSGRDLINLAKKRTNIIPVIEDARHPHKYRMLIAMVDVIFADVAQPDQTRIVALNAHTFLRNGGHFVISIKANCIDSTASAEAVFASEVKKMQQENMKPQEQLTLEPYERDHAVVVGVYRPPPKVKN

SEQ ID NO: 25642 - protein, 81 aa, Homo sapiens
VLHPSRHSAVSCLGVAAAMARKALPPTHLGQSWFCSCCRDTELAISALRARTATGSPGSCRCTAGPLPCASALESCCCRVT

SEQ ID NO: 25643 - protein, 61 aa, Homo sapiens
KGPTSHPEKLSYSQLLGPRNPGAPNSQLSDIWHTGQSREASAPSLGNLNTPASKSQGTSVL

SEQ ID NO: 25644 - protein, 52 aa, Homo sapiens
LDVPVDNLKEHGTWDMTAPSIPSGGRQSLSVRQHPAFMRTVCCLLTEPPVVY

SEQ ID NO: 25645 - protein, 7 aa, Homo sapiens
LGFFTVS

SEQ ID NO: 25646 - protein, 8 aa, Homo sapiens
KDPTPVSL

SEQ ID NO: 25647 - protein, 37 aa, Homo sapiens
LIFPTLSVRSPPPLDARAPGESTAGRMVGSTLTIGGN

SEQ ID NO: 25648 - protein, 287 aa, Homo sapiens
TQVPRAPRSAMSSCSRVALVTGANRGIGLAIARELCRQFSGDVVLTARDVARGQAAVQQLQAEGLSPRFHQLDIDDLQSIRALRDFLRKEYGGLNVLVNNAAVAFKSDDPMPFDIKAEMTLKTNFFATRNMCNELLPIMKPHGRVVNISSLQCLRAFENCSEDLQERFHSETLTEGDLVDLMKKFVEDTKNEVHEREGWPNSPYGVSKLGVTVLSRILARRLDEKRKADRILVNACCPGPVKTDMDGKDSIRTVEEGAETPVYLALLPPDATEPQGQLVHDKVVQNW

SEQ ID NO: 25649 - protein, 164 aa, Homo sapiens
IAFWCQENCVALLCDGTPVVYIFQLDARRQQLVYRQQLAFQHQVWDVAFEETQGLWVLQDCQEAPLVLYRPVGDQWQSVPESTVLKKVSGVLRGNWAMLEGSAGADASFSSLYKATFDNVTSYLKKKEERLQQQLEKKQRRRSPPPGPDGHAKKMRPGEATLSC

SEQ ID NO: 25650 - protein, 212 aa, Homo sapiens
RKLWPEAQIRNTMALLTAETFRLQFNNKRRLRRPYYPRKALLCYQLTPQNGSTPTRGYFENKKKCHAEICFINEIKSMGLDETQCYQVTCYLTWSPCSSCAWELVDFIKAHDHLNLGIFASRLYYHWCKPQQKGLRLLCGSQVPVEVMGFPEFADCWENFVDHEKPLSFNPYKMLEELDKNSRAIKRRLERIKIPGVRAQGRYMDILCDAEV

SEQ ID NO: 25651 - protein, 97 aa, Homo sapiens
KFAIGSAREADPALNVETEIEILKKLNHPCIIKIKNFFDAEDYYIVLELMEGGELFDKVVGNKRLKEATCKLYFYQMLLAVQVKEALNSFDSCLSFS

SEQ ID NO: 25652 - protein, 92 aa, Homo sapiens
LVRALPLALVLHELGAGRSRAGEPLRLGVGAELLVDVGQRLRRGTPWLRVHRDGPALSGPQSRALQEALVLSDRAPFAAPSPFAELVLPPQQ

SEQ ID NO: 25653 - protein, 327 aa, Homo sapiens
LGTDQDFKLKMVVMNSLRVILQASPGKLLWRKFQIPRFMPARPCSLYTCTYKTRNRALHPLWESVDLVPGGDRQSPINIRWRDSVYDPGLKPLTISYDPATCLHVWNNGYSFLVEFEDSTDKSVIKGGPLEHNYRLKQFHFHWGAIDAWGSEHTVDSKCFPAELHLVHWNAVRFENFEDAALEENGLAVIGVFLKLGKHHKELQKLVDTLPSIKHKDALVEFGSFDPSCLMPTCPDYWTYSGSLTTPPLSESVTWIIKKQPVEVDHDQLEQFRTLLFTSEGEKEKRMVDNFRPLQPLMNRTVRSSFRHDYVLNVQAKPKPATSQATP

SEQ ID NO: 25654 - protein, 41 aa, Homo sapiens
LLPLGAVAACAVSAAQPLSPSLRQPRRTAHQEARARMGSLC

SEQ ID NO: 25655 - protein, 6 aa, Homo sapiens
MSDLCT

SEQ ID NO: 25656 - protein, 49 aa, Homo sapiens
MITRSGSPATVIKKSAKAGPNATKVQPKNTAAPMAGQLQTDRRKGFFSV

SEQ ID NO: 25657 - protein, 35 aa, Homo sapiens
MAAQLRRHQGRRGASSPRCVTVGAIFDHPIFAVGF

SEQ ID NO: 25658 - protein, 266 aa, Homo sapiens
MTENGEINFSVIGQYVDYLVKEQGVKNIFVNGTTGEGLSLSVSERRQVAEEWVTKGKDKLDQVIIHVGALSLKESQELAQHAAEIGADGIAVIAPFFLKPWTKDILINFLKEVAAAAPALPFYYYHIPALTGVKIRAEELLDGILDKIPTFQGLKFSDTDLLDFGQCVDQNRQQQFAFLFGVDEQLLSALVMGATGAVGSTYNYLGKKTNQMLEAFEQKDFSLALNYQFCIQRFINFVVKLENSKLKVSKNQRTLPLGTTNFPFLH

SEQ ID NO: 25659 - protein, 149 aa, Homo sapiens
MTWWRIGGFYALSPYPGLRLISLNMNFCSRENFWLLINSTDPAGQLQWLVGELQAAEDRGDKVHIIGHIPPGHCLKSWSWNYYRIVARYENTLAAQFFGHTHVDEFEVFYDEETLSRPLAVAFLAPSATTYIGLNPVSPTSLQVTVCTK

SEQ ID NO: 25660 - protein, 254 aa, Homo sapiens
MVRAQKIQALDRGTAQYGVTKFSDLTEEEFRTIYLNTLLRKEPGNKMKQAKSVGDLAPPEWDWRSKGAVTKVKDQGMCGSCWAFSVTGNVEGQWFLNQGTLLSLSEQELLDCDKMDKACMGGLPSNAYSAIKNLGGLETEDDYSYQGHMQSCNFSAEKAKVYINDSVELSQNEQKLAAWLAKRGPISVAINAFGMQFYRHGISRPLRPLCSPWLIDHAVLLVGYGNREFRCLSCIQPGHRQGWDHSISGPLEGK

SEQ ID NO: 25661 - protein, 16 aa, Homo sapiens
MIGQEIIQLFTRPLIF

SEQ ID NO: 25662 - protein, 43 aa, Homo sapiens
MNVVFITILIIALIALSGGSTLHQFFQSLLAVSIHAQLKSILV

SEQ ID NO: 25663 - protein, 45 aa, Homo sapiens
MNVFPGFPGGLWHSPNSYARAIPDQEDLKRTSLKSSPDEELREKK

SEQ ID NO: 25664 - protein, 40 aa, Homo sapiens [sequence omitted]

SEQ ID NO: 25665 - protein, 22 aa, Homo sapiens
MYFKTCVHKTEDFLFYLVQMPS

SEQ ID NO: 25666 - protein, 492 aa, Homo sapiens
MLEYLSLTFLISVKIQGDYIPRQVRTWVKQYRASETSTIPAMERLIEWLPLHLPRQQRTTVVHGDFRLDNLVFHPEEPEVLAVLDWELSTLGDPLADVAYSCLAHYLPSSFPVLRGINDCDLTQLGIPAAEEYFRMYCLQMGLPPTENWNFYMAFSFFRVAAILQGVYKRSLTGQASSTYAEQTGKLTEFVSNLAWDFAVKEGFRVFKEMPFTNPLTRSYHTWARPQSQWCPTGSRSYSSVPEASPAHTSRGGLVISPESLSPPVRELYHRLKHFMEQRVYPAEPELQSHQASAARWSPSPLIEDLKEKAKAEGLWNLFLPLEADPEKKYGAGLTNVEYAHLCELMGTSLYAPEVCNCSAPDTGNMELLVRYGTEAQKARWLIPLLEGKARSCFAMTEPQVASSDATNIEASIREEDSFYVINGHKWWITGILDPRCQLCVFMGKTDPHAPRHRQQSVLLVPMDTPGIKIIRPLTVYGLEDAPGCFLPSFSL

SEQ ID NO: 25667 - protein, 334 aa, Homo sapiens
MTGEGVDEQQDNSETIEKVLDSRLGKKGATGASTTVYAIEANGDPSGDFDTEKDEGEIQYLIKWKGWSYIHSTWESEESLQQQKVKGLKKLENFKKKEDEIKQWLGKVSPEDVEYFNCQQELASELNKQYQIVERVIAVKTSKSTLGQTDFPAHSRKPAPSNEPEYLCKWMGLPYSECSWEDEALIGKKFQNCIDSFHSRNNSKTIPTRECKALKQRPRFVALKKQPAYLGGENLELRDYQLEGLNWLAHSWCKNNSVILADEMGLGKTIQTISFLSYLFHQHQLYGPFLIVVPLSTLTSWQREFEIWAPEINVVVYIGDLMSRNTVCKQKELG

SEQ ID NO: 25668 - protein, 314 aa, Homo sapiens [sequence omitted]

SEQ ID NO: 25669 - protein, 92 aa, Homo sapiens
MKKITLLKYFRNYMSEHLLKAGANITPREGDELARLPYLRTWFRTRSAIILHLSNGSVQINFFQVSWRSPGAGESWGRLRMPGSGPCGLNVE

SEQ ID NO: 25670 - protein, 98 aa, Homo sapiens
MFCHLLSLFSPFSHGVSTKYLNFTASENTSRVMQHQYQVSNLGQRSLPISLVFLVPVRLNQTVIWDRPQVTFSEVSGARPDSCTALRVPLTSVNAIGF

SEQ ID NO: 25671 - protein, 66 aa, Homo sapiens
MIIEQNTDGVNFYNILTKSTPTSTMESSLEFTQSHLAESETLPLAVQHPQQLGKDVLMARRGGSHL

SEQ ID NO: 25672 - protein, 30 aa, Homo sapiens
MRSLGFIFKGMKQLRLFWKTFWQLVKLEYN

SEQ ID NO: 25673 - protein, 34 aa, Homo sapiens [sequence omitted]

SEQ ID NO: 25674 - protein, 165 aa, Homo sapiens
MEAAVAPGRDAPAPAASQPSGCGKHNSPERKVYMDYNATTPLEPEVIQAMTKAMWEAWGNPSSPYSAGRKAKDIINAARESLAKMIGGKPQDIIFTSGGTESNNLVIHSVVKHFHANQTSKGHTGGHHSPVKGAKPHFITSSVEHDSIRLPLEHLVEEQVAAYSM

SEQ ID NO: 25675 - protein, 23 aa, Homo sapiens
MSRRFIFSLCFFLFQFILNAYFS

SEQ ID NO: 25676 - protein, 206 aa, Homo sapiens
MVNSRDNKFSKKDCLSIRNVVASIQTKEGLNLKLISGDVLYIWADVIVNSVPMNLQLGGGPLSRAFLQKAGPMLQKELDDRRRETEEKVGNIFMTSGCNLDCKAVLHAVAPYWNNGAETSWQIMANIIKKCLTTVEVLSFSSITFPMIGTGSLQFPKAVFAKLILSEVFEYSSSTRPITSPLQEVHFLVYTNDDEGCQEALAGPKR

SEQ ID NO: 25677 - protein, 464 aa, Homo sapiens
MKQAPEILGSANGKTPSCEVNRECSVFLSKAQLSSSLQEGVMQKFNGHDALPFIPADKLKDLTSRVFNGEPGAHDAKLRFESQEMKGIGTPPNTTPIKNGSPEIKLKITKTYMNGKPLFESSICGDSAADVSQSEENGQKPENKARRNRKRSIKYDSLLEQGLVEAALVSKISSPSDKKIPAKKESCPNTGRDKDHLLKYNVGDLVWSKVSGYPWWPCMVSADPLLHSYTKLKGQKKSARQYHVQFFGDAPERAWIFEKSLVAFEGEGQFEKLCQESAKQAPTKAEKIKLLKPISGKLRAQWEMGIVQAEEAASMSVEERKAKFTFLYVGDQLHLNPQVAKEAGIAAESLGEMAESSGVSEEAAENPKSVREECIPMKRRRRAKLCSSAETLESHPDIGKSTPQKTAEADPRRGVGSPPGRKKTTVSMPRSRKGDAASQFLVFCQKHRDEVSTKLCFMLASFRI

SEQ ID NO: 25678 - protein, 28 aa, Homo sapiens
MTPTTPRLCWNQESVQGSIILTQAQGTT

SEQ ID NO: 25679 - protein, 169 aa, Homo sapiens [sequence omitted]

SEQ ID NO: 25680 - protein, 454 aa, Homo sapiens
RKMSPKRIAKRRSPPADAIPKSKKVKDTRAAASRRVPGARSCQGACGPSPPDQKTRPVSHRSHSTEPGLVLTLGQGDVGQLGLGENVMERKKPALVSIPEDVVQAEAGGMHTVCLSKSGQVYSFGCNDEGALGRDTSVEGSEMVPGKVELQEKVVQVSAGDSHTAALTDDGRVFLWGSFRDNNGVIGLLEPMKKSMVPVQVQLDVPVVKVASGNDHLVMLTADGDLYTLGCGEQGQLGRVPELFANRGGRQGLERLLVPKCVMLKSRGSRGHVRFQDAFCGAYFTFAISHEGHVYGFGLSNYHQLGTPGTESCFIPQNLTSFKNSTKSWVGFSGGQHHTVCMDSEGKAYSLGRAEYGRLGLGEGAEEKSIPTLISRLPAVSSVACGASVGYAVTKDGRVFAWGMGTNYQLGTGQDEDAWSPVEMMGKQLENRVVLSVSSGGQHTVLLVKDKEQS

SEQ ID NO: 25681 - protein, 25 aa, Homo sapiens
TGSVGTNCKDPSPCGRSHGTVRVRE

SEQ ID NO: 25682 - protein, 33 aa, Homo sapiens
LRLFSFSPCNAGKSQSRHRNMPLIQCLCLAVTC

SEQ ID NO: 25683 - protein, 275 aa, Homo sapiens
KISFVDCSKIKLLEAAITPETKLVWIETPTNPTQKVIDIEGCAHIVHKHGDIILVVDNTFMSPYFQRPLALGADISMYSATKYMNGHSDVVMGLVSVNCESLHNRLRFLQNSLGAVPSPIDCYLCNRGLKTLHVRMEKHFKNGMAVAQFLESNPWVEKVIYPGLPSHPQHELVKRQCTGCTGMVTFYIKGTLQHAEIFLKNLKLFTLAESLGGFESLAELPAIMTHASVLKNDRDVLGISDTLIRLSVGLEDEEDLLEDLDQALKAAHPPSGSHS

SEQ ID NO: 25684 - protein, 66 aa, Homo sapiens
VPLPWGGAVTTRLSPEAAAAAPSPRTRDPPARGRNVAEVLLKGPEMQGFGIHFEPLSCLTLTSFHY

SEQ ID NO: 25685 - protein, 27 aa, Homo sapiens
LLGPAHAKDLPLSPPLLLPSFPSQNIP

SEQ ID NO: 25686 - protein, 36 aa, Homo sapiens
KMAAQLRRHQGRRGASSPRCVTVGAIFDHPIFAVGF

SEQ ID NO: 25687 - protein, 64 aa, Homo sapiens
ISKRVTPAPTALCRGSRWSSSWRLIASSASLWARSTTRGSSAAASSCIRTSWSRWCCAAPAKST

SEQ ID NO: 25688 - protein, 1074 aa, Homo sapiens
KENMTSPAKFKKDKEIIAEYDTQVKEIRAQLTEQMKCLDQQCELRVQLLQDLQDFFRKKAEIEMDYSRNLEKLAERFLAKTRSTKDQQFKKDQNVLSPVNCWNLLLNQVKRESRDHTTLSDIYLNNIIPRFVQVSEDSGRLFKKSKEVGQQLQDDLMKVLNELYSVMKTYHMYNADSISAQSKLKEAEKQEEKQIGKSVKQEDRQTPRSPDSTANVRIEEKHVRRSSVKKIEKMKEKRQAKYTENKLKAIKARNEYLLALEATNASVFKYYIHDLSDLIDQCCDLGYHASLNRALRTFLSAELNLEQSKHEGLDAIENAVENLDATSDKQRLMEMYNNVFCPPMKFEFQPHMGDMASQLCAQQPVQSELVQRCQQLQSRLSTLKIENEEVKKTMEATLQTIQDIVTVEDFDVSDCFQYSNSMESVKSTVSETFMSKPSIAKRRANQQETEQFYFTKMKEYLEGRNLITKLQAKHDLLQKTLGESQRTDCSLARRSSTVRKQDSSQAIPLVVESCIRFISRHGLQHEGIFRVSGSQVEVNDIKNAFERGEDPLAGDQNDHDMDSIAGVLKLYFRGLEHPLFPKDIFHDLMACVTMDNLQERALHIRKVLLVLPKTTLIIMRYLFAFLNHLSQFSEENMMDPYNLAICFGPSLMSVPEGHDQVSCQAHVNELIKTIIIQHENIFPSPRELEGPVYSRGGSMEDYCDSPHGETTSVEDSTQDVTAEHHTSDDECEPIEAIAKFDYVGRTARELSFKKGASLLLYQRASDDWWEGRHNGIDGLIPHQYIVVQDTEDGVVERSSPKSEIEVISEPPEEKVTARAGASCPSGGHVADIYLANINKQRKRPESGSIRKTFRSDSHGLSSSLTDSSSPGVGASCRPSSQPIMSQSLPKEGPDKCSISGHGSLNSISRHSSLKNRLDSPQIRKTATAGRSKSFNNHRPMDPEVIAQDIEATMNSALNELRELERQSSVKHTPDVVLDTLEPLKTSPVVAPTSEPSSPLHTQLLKDPEPAFQRSASTAGDIACAFRPVKSVKMAAPVKPPATRPKPTVFPKTNATSPGVNSSTSPQSTDKSCTV

SEQ ID NO: 25689 - protein, 39 aa, Homo sapiens
VAGVGGDNDLCCERRKLRFLLNLEAFLRLFSQLRLFLRP

SEQ ID NO: 25690 - protein, 102 aa, Homo sapiens
LSTCLPEVNFQKQESPEPGRGMNREGAPGKSPEEMYIQQKVRVLLMLRKMGSNLTASEEEFLRTYAGVVNSQLSQLPPHSIDQGAEDVVMAFSRSETEDRRQ

SEQ ID NO: 25691 - protein, 1288 aa, Homo sapiens
IMEPIYPFARPQMNTRFPSSRMVPFHFPPSKCALWNPTPTGDFIYLHLSYYRNPKLVVTEKTIRLAYRHAKQNKKNSSCFLLGSLTADEDEEGVTLTVDRFDPGREVPECLEITPTASLPGDFLIPCKVHTQELCSREMIVHSVDDFSSALKALQCHICSKDSLDCGKLLSLRVHITSRESLDSVEFDLHWAAVTLANNFKCTPVKPIPIIPTALARNLSSNLNISQVQGTYKYGYLTMDETRKLLLLLESDPKVYSLPLVGIWLSGITHIYSPQVWACCLRYIFNSSVQERVFSESGNFIIVLYSMTHKEPEFYECFPCDGKIPDFRFQLLTSKETLHLFKNVEPPDKNPIRCELSAESQNAETEFFSKASKNFSIKRSSQKLSSGKMPIHDHDSGVEDEDFSPRPIPSPHPVSQKISKIQPSVPELSLVLDGNFIESNPLPTPLEMVNNENPPLINHLEHLKPLQPQLYDEKHSPEVEAGEPSLRGIPNQLNQDKPALLRHCKVRQPPAYKKGNPHTRNSIKPSSHNGPSHDIFEKLQTVSAGNVQNEEYPIRPSTLNSRQSSLAPQSQPHDFVFSPHNSGRPMELQIPTPPLPSYCSTNVCRCCQHHSHIQYSPLNSWQGANTVGSIQDVQSEALQKHSLFHPSGCPALYCNAFCSSSSPIALRPQGDMGSCSPHSNIEPSPVARPPSHMDLCNPQPCTVCMHTPKTESDNGMMGLSPDAYRFLTEQDRQLRLLQAQIQRLLEAQSLMPCSPKTTAVEDTVQAGRQMELVSVEAQSSPGLHMRKGVSIAVSTGASLFWNAAGEDQEPDSQMKQDDTKISSEDMNFSVDINNEVTSLPGSASSLKAVDIPSFEESNIAVEEEFNQPLSVSNSSLVVRKEPDVPVFFPSGQLAESVSMCLQTGPTGGASNNSETSEEPKIEHVMQPLLHQPSDNQKIYQDLLGQVNHLLNSSSKETEQPSTKAVIISHECTRTQNVYHTKKKTHHSRLVDKDCVLNATLKQLRSLGVKIDSPTKVKKNAHNVDHASVLACISPEAVISGLNCMSFANVGMSGLSPNGVDLSMEANAIALKYLNENQLSQLSVTRSNQNNCDPFSLLHINTDRSTVGLSLISPNNMSFATKKYMKRYGLLQSSDNSEDEEEPPDNADSKSEYLLNQNLRSIPEQLGGQKEPSKNDHEIINCSNCESVGTNADTPVLRNITNEVLQTKAKQQLTEKPAFLVKNLKPSPAVNLRTGKAEFTQHPEKENEGDITIFPESLQPSETLKQMNSMNSVGTFLDVKRLRQLPKLF

SEQ ID NO: 25692 - protein, 11 aa, Homo sapiens
LSTSDAFTAIT

SEQ ID NO: 25693 - protein, 50 aa, Homo sapiens
KATSMHRTSRVSPFPEPECQEHCGRLCSEGIRLGGSPQSLSVPAQFSKRH

SEQ ID NO: 25694 - protein, 26 aa, Homo sapiens
IQEVVPVTSGAGQSWSETSTMPGVGP

SEQ ID NO: 25695 - protein, 6 aa, Homo sapiens
MCRNHQ

SEQ ID NO: 25696 - protein, 252 aa, Homo sapiens
IFLHGRNSPQSSPTSTPKLSKSLSFEMQQDELIEKPMSPMQYARSGLGTAEMNGKLIAAGGYNREECLRTVECYNPHTDHWSFLAPMRTPRARFQMAVLMGQLYVVGGSNGHSDDLSCGEMYDSNIDDWIPVPELRTNRCNAGVCALNGKLYIVGGSDPYGQKGLKNCDVFDPVTKLWTSCAPLNIRRHQSAVCELGGYLYIIGGAESWNCLNTVERYNPENNTWTLIAPMNVARRGAGVAVLNGECWDLER

SEQ ID NO: 25697 - protein, 6 aa, Homo sapiens
IIENAK

SEQ ID NO: 25698 - protein, 368 aa, Homo sapiens
LNNNNQMVLDMILYPLIGIPQTINWETIARLVPGLTPKECAKRFDELKSSGSSPVDNQYNSLMAAGESPVETLATYIKSSLLDIHGEFQETPVGHDAVSKTGRHSIASTRNCSSESENCTTHNGGEMTEESEGPNMVIHVCDEAKNLKEDFTCPRDLLISEMKYFAEYLSMDAQRWEEVDISVHCDVHIFNWLIKYIKRNTKENKDCEMPTLEPGNVISILISSEFLKMDSLVEQCIQYCHKNMNAIVATPCNMNCINANLLTRIADLFSHNEVDDLKDKKDKFKSKLFCKKIERLFDPEYLNPDSRSNAATLYRCCLCKKLLTKETERRIPCIPGKINVDRRGNIVYIHIRCREDKIHTCIFVYIYI

SEQ ID NO: 25699 - protein, 7 aa, Homo sapiens
MLSACSA

SEQ ID NO: 25700 - protein, 13 aa, Homo sapiens
LGTKIEKCIKSCQ

SEQ ID NO: 25701 - protein, 316 aa, Homo sapiens
VAMGLEAARELECAALGTLLRDPREAERTLLLDCRPFLAFCRRHVRAARPVPWNALLRRRARGPPAAVLACLLPDRALRTRLVRGELARAVVLDEGSASVAELRPDSPAHVLLAALLHETRAGPTAVYFLRGGFDGFQGCCPDLCSEAPAPALPPTGDKTSRSDSRAPVYDQGGPVEILPYLFLGSCSHSSDLQGLQACGITAVLNVSASCPNHFEGLFRYKSIPVEDNQMVEISAWFQEAIGFIDWVKNSGGRVLVHCQAGISRSATICLAYLMQSRRVRLDEAFDFVKQRRGVISPNFSFMGQLLQFETQVLCH

SEQ ID NO: 25702 - protein, 100 aa, Homo sapiens
MHHVNMTPEFKELYIVRENKALQKKCADYQINGEIICKCGQAWGTMMVHKGLDLPCLKIRNFVVVFKNNSTKKQYKKWVELPITFPNLDYSECCLFSDED

SEQ ID NO: 25703 - protein, 45 aa, Homo sapiens
LRRRLSGVSFGRRDAAGSAPDGNLAVTVSEFCSCRMCSTLKGWQQ

SEQ ID NO: 25704 - protein, 14 aa, Homo sapiens
KLLLVGPRPALRSL

SEQ ID NO: 25705 - protein, 146 aa, Homo sapiens
MISAGCGVSAAGRELSAPRPLRTDARLPAESLLRVCFGIPSIWPLLRKKKQLTKHCDNKDYSVCSLQDIHDDIENEFFVFTRYSYMRRSILNSLNIFSSVGPAWQDLSEGMMERLLDYMIWIKPWVEAILPWLNLPGMSLRVKRWQ

SEQ ID NO: 25706 - protein, 33 aa, Homo sapiens
ITMLRAQTLTSGRPTPMFLTPLSSFQSFTQLCS

SEQ ID NO: 25707 - protein, 14 aa, Homo sapiens
LNSMFILMDYLAFD

SEQ ID NO: 25708 - protein, 46 aa, Homo sapiens
IKIAIRFTVTTKAVTIWKAKIPDMQTGHPFSIMRFKMGMRRYFSEE

SEQ ID NO: 25709 - protein, 28 aa, Homo sapiens
VKQRRSLTTTEGWWGRGPGAPWTHRWPG

SEQ ID NO: 25710 - protein, 451 aa, Homo sapiens
MGSSESTDSGFCLDSPGPLDSKENLENPMRRIHSLPQKLLGCSPALKRSHSDSLDHDIFQLIDPDENKENEAFEFKKPVRPVSRGCLHSHGLQEGKDLFTQRQNSAPARMLSSNERDSSEPGNFIPLFTPQSPVTATLSDEDDGFVDLLDGENLKNEEETPSCMASLWTAPLVMRTTNLDNRCKLFDSPSLCSSSTRSVLKRPERSQEESPPGSTKRRKSMSGASPKESTNPEKAHETLHQSLSLASSPKGTIENILDNDPRDLIGDFSKGYLFHTVAGKHQDLKYISPEIMASVLNGKFANLIKEFVIIDCRYPYEYEGGHIKGAVNLHMEEEVEDFLLKKPIVPTDGKRVIVVFHCEFSSERGPRMCRYVRERDRLGNEYPKLHYPELYVLKGGYKEFFMKCQSYCEPPSYRPMHHEDFKEDLKKFRTKSRTWAGEKSKREMYSRLKKL

SEQ ID NO: 25711 - protein, 57 aa, Homo sapiens
VPGAVPKLTRVPVTMRQPVRPAAPPVNAPAFSAPLQRTALGGMSWMSRASRKTLRKS

SEQ ID NO: 25712 - protein, 43 aa, Homo sapiens
LHLVAGSEIARGRRKPKTVPGAAAAAGAALRPPQQQAESRSIR

SEQ ID NO: 25713 - protein, 9 aa, Homo sapiens
RKAMRILCS

SEQ ID NO: 25714 - protein, 133 aa, Homo sapiens
LEVPEASGLGTHGRDTQGRPCAVSPGITGGDFMEPGGWASGWGERLQTGSSPWLCPPLSLLEWWGPCILSCPPPPFSPNCRRLLSPGDTVPASSGLGKHGLSSPALAPAPPASWTWAFLHPVEPHSQERCLEG

SEQ ID NO: 25715 - protein, 172 aa, Homo sapiens
VPRFAGAAAARRREAGLGRARSSEPRRAPRLSLLTAAAGLRLSALGSAASAPLHSTSAPSDSLPSASTPPAPVRIVSQLLATRPVPGCFSISRPPLLEYFTPCIWGQGLEKGRVERPVEKKEARPAGGGGSADCGEETPRHPFWSSPLPPRPCAHSLAGELLSDQESKSGPG

SEQ ID NO: 25716 - protein, 31 aa, Homo sapiens
IKPIVWPSLPDHKKTLEHLCKKPRKVSVFGA

SEQ ID NO: 25717 - protein, 9 aa, Homo sapiens
MQLQMPSPE

SEQ ID NO: 25718 - protein, 45 aa, Homo sapiens
LSPTLAYPVGRQSCNLVNYLLSPRFPFILLKSSPVSDPYLLSLLL

SEQ ID NO: 25719 - protein, 21 aa, Homo sapiens
LLVAGVSSAFLVSSTRRLAGF

SEQ ID NO: 25720 - protein, 47 aa, Homo sapiens
IPSRGAPRPGSRIPAHPARGQRLRHLLSGPQALARFGGGACRTQHTQ

SEQ ID NO: 25721 - protein, 80 aa, Homo sapiens
MSKLSSDSFRELDTWVSRRANGRAIILFIFKLSCFHLVRMNSGSPARDNAPSQRFCTNLSEGLRFGISPSWREALYGCHA

SEQ ID NO: 25722 - protein, 16 aa, Homo sapiens
MTSFEMPRKYLFCHSY

SEQ ID NO: 25723 - protein, 8 aa, Homo sapiens
ILSMCTRF

SEQ ID NO: 25724 - protein, 490 aa, Homo sapiens
LNPPNPWDLQPRSPEELAFGEVQITYLTHACMDLKLGDKRMVFDPWLIGPAFARGWWLLHEPPSDWLERLCQADLIYISHLHSDHLSYPTLKKLAGRRPDIPIYVGNTERPVFWNLNQSGVQLTNINVVPFGIWQQVDKNLRFMILMDGVHPEMDTCIIVEYKGHKILNIVDCTRPNGGRLPMKVALMMSDFAGGASGFPMTFSGGKFTEEWKAQFIKTERKKLLNYKARLVKNLQPRIYCPFAGYFVESHPSDKYIKETNTKNDPNELNNLIKKNSDVITWTPRPGATLDLGRMLKDRTDSKGIIEPPEGTKIYKDSWDFEPYLEILNAALGDEIFLHSSWIKEYFTWAGFKDYNLVVRMIETDEDFNPFPGGYDYLVDFLDLSFPKERPQREHPYEEIHSRVDVIRHVVKNGLLWDELYIGFQTRLQRDPDIYHHLFWNHFQIKLPLTPPNWKSFLMCCEQNGPVILQFSTERTNEPNRNKFSVENKA

SEQ ID NO: 25725 - protein, 7 aa, Homo sapiens
KPETAVL

SEQ ID NO: 25726 - protein, 13 aa, Homo sapiens
TESASPRGDRFST

SEQ ID NO: 25727 - protein, 32 aa, Homo sapiens
MLQGIYFSGRWSSSVEHMANDNGLTDQKQERT

SEQ ID NO: 25728 - protein, 536 aa, Homo sapiens
IFPACHICKVYLQETAMETWSVEQVCSWLVEKNLGELVHRFQEEEVSGAALLALNDRMVQQLVKKIGHQAVLMDLIKKYKQNTQGLKSPENPKKAALVMQTEAARDYRDEESSSPARHGEQMPSFYPAENLDNGLIDQRVLKQRRNVKQILARSKALQWTKSYVLPEFPYDVKCMLAEQKCPDHSMRIRIIEFLQADMTKYLEGSLYPSTQQYNDVVNALLQAHPFLDEDGCGFFLWKRALKDRFKYVRRPIEDDEQVIRNKCKFGHRRGQTRKSLADIRFDEIKLVQIKEEAVCFDSELDEHIKWFQQEYVKTEKDWREIDKRMSQTLEIRRKMIGSRTPLKDILKLFPFLKCPYQMFREFQLLTRTDIYKKTRHILESYSENILTSFSVVDNPINIVLQEKMKHYTDEDMLKYMKMTATCLLLPDVFGDDPSLFVIMNEQVQVSTPVLEVKNPFNMEVCEFSLYLERERLTKVDDCVTALAALVAAFHVFRIECPRRLSQTFNFLETLIFDMHSPYFPSLKEKENEVGFQHPLT

SEQ ID NO: 25729 - protein, 17 aa, Homo sapiens
TQIMIINISLSDQRLYL

SEQ ID NO: 25730 - protein, 23 aa, Homo sapiens
ISTITPTPTTTTCRICTLLQATR

SEQ ID NO: 25731 - protein, 20 aa, Homo sapiens
MKTTRNRNKQQQQQQQKQCI

SEQ ID NO: 25732 - protein, 59 aa, Homo sapiens
LKSLVILLKEVTATSTGTYTRRGRPHSVFSTMTPTTPRLCWNQESVQGSIILTQAQGTT

SEQ ID NO: 25733 - protein, 38 aa, Homo sapiens
VAEVTVSKWKSLLSQQLLCKMPRPGIVAEHPRPAEVPP

SEQ ID NO: 25734 - protein, 24 aa, Homo sapiens
MEGLPEGLRFPDKLRIRCMVTLLL

SEQ ID NO: 25735 - protein, 16 aa, Homo sapiens
MNSYIGKLNILMLLGH

SEQ ID NO: 25736 - protein, 88 aa, Homo sapiens
VAGQEALTLGLWSGPLPRVTLHCSRTLLGFVTQGDFSMAVGCGEALGFVSLTGLLDMLSSQPAAQRGLVLLRPPASLQYRFARIAIEV

SEQ ID NO: 25737 - protein, 10 aa, Homo sapiens
RGTTGCPRAR

SEQ ID NO: 25738 - protein, 35 aa, Homo sapiens
KIMMNFSNIMNYMKLLGQVALQRSNLPAISLLERW

SEQ ID NO: 25739 - protein, 22 aa, Homo sapiens
MVAFLNEQQNASTSSRKHKFSC

SEQ ID NO: 25740 - protein, 22 aa, Homo sapiens
MVLLLQLDCLTMDIYLRVQLKI

SEQ ID NO: 25741 - protein, 33 aa, Homo sapiens
IRRLLQPGRLPRRREGKHKAGYALRDNKSNPQT

SEQ ID NO: 25742 - protein, 49 aa, Homo sapiens
LWPEADQDYCIELLVSSYSTPKISFCYSKDQMLRLPFQVVLRIRVVVIH

SEQ ID NO: 25743 - protein, 51 aa, Homo sapiens
LDRRGVTAAEEEVLRDTRGWTRQGNTRPTTAGDKIAQPHPAVQRLPACAPS

SEQ ID NO: 25744 - protein, 114 aa, Homo sapiens
MKMKVFRMEGSQLNFQEKYVNRSQHVVSQDLASLLTLMRKLKIPRPIQKSLKEKFQEILRYISRMSKKTVPQMTQKTVLLREQLMFIPQNMLDVMAEMQLIPFLGILKKFPALN

SEQ ID NO: 25745 - protein, 59 aa, Homo sapiens
LREASGDYRRSQEGGPASPAAPDTPSGRSGPAAPWRTPARTPPRLLPTLCPVTPVSWPL

SEQ ID NO: 25746 - protein, 29 aa, Homo sapiens
MGLAGTRTGPCCPAPSTSGWRPLQGWGSS

SEQ ID NO: 25747 - protein, 940 aa, Homo sapiens
RDTTGLGSEQPSGDVAQSNRATMGTTAPGPIHLLELCDQKLMEFLCNMDNKDLVWLEEIQEEAERMFTREFSKEPELMPKTPSQKNRRKKRRISYVQDENRDPIRRRLSRRKSRSSQLSSRRLRSKDSVEKLATVVGENGSVLRRVTRAAAAAAAATMALAAPSSPTPESPTMLTKKPEDNHTQCQLVPVVEIGISERQNAEQHVTQLMSTEPLPRTLSPTPASATAPTSQGIPTSDEESTPKKSKARILESITVSSLMATPQDPKGQGVGTGRSASKLRIAQVSPGPRDSPAFPDSPWRERVLAPILPDNFSTPTGSRTDSQSVRHSPIAPSSPSPQVLAQKYSLVAKQESVVRRASRRLAKKTAEEPAASGRIICHSYLERLLNVEVPQKVGSEQKEPPEEAEPVAAAEPEVPENNGNNSWPHNDTEIANSTPNPKPAASSPETPSAGQQEAKTDQADGPREPPQSARRKRSYKQAVSELDEEQHLEDEELQPPRSKTPSSPCPASKVVRPLRTFLHTVQRNQMLMTPTSAPRSVMKSFIKRNTPLRMDPKCSFVEKERQRLENLRRKEEAEQLRRQKVEEDKRRRLEEVKLKREERLRKVLQARERVEQMKEEKKKQIEQKFAQIDEKTEKAKEERLAEEKAKKKAAAKKMEEVEARRKQEEEARRLRWLQQEEEERRHQELLQKKKEEEQERLRKAAEAKRLAEQREQERREQERREQERREQERREQERREQERQLAEQERRREQERLQAERELQEREKALRLQKEQLQRELEEKKKKEEQQRLAERQLQEEQEKKAKEAAGASKALNVTVDVQSPACTSYQMTPQGHRAPPKINPDNYGMDLNSDDSTDDEAHPRKPIPTWARGTPLSQAIIHQYYHPPNLLELFGTILPLDLEDIFKKSKPRYHKRTSSAVWNSPPLQGARVPSSLAYSLKKH

SEQ ID NO: 25748 - protein, 110 aa, Homo sapiens
RQPSVQRAAGAGRPQCTGRHSRQAAWGREGTRARGPPSARCRCPPSAGRRFRSITCAPTGGWSLTARFTTSPNGPSSTRGASGSSGTTLEKMQRMPSAPSTLTWNSWASS

SEQ ID NO: 25749 - protein, 167 aa, Homo sapiens
LAALVQRGRLMQEVNRQLQGHLGEIRELKQLNRRLQAENRELRDLCCFLDSERQRGRRAARQWQLFGTQASRAVREDLGGCWQKLAELEGRQEELLRENLALKELCLALGEEWGPRGGPSGAGGSGAGPAPELALPPCGPRDLGDGSSSTGSVGSPDQLPLACSPDD

SEQ ID NO: 25750 - protein, 19 aa, Homo sapiens
MRQRRTRRTVCSSTSMSVT

SEQ ID NO: 25751 - protein, 24 aa, Homo sapiens
LKNLPIPILSPCSNKSHYGDLETL

SEQ ID NO: 25752 - protein, 66 aa, Homo sapiens
RSVPLCCWHEHLQGLELLLSLEEYSQLKLKSTAQCSFGSYSVISGELQKSLSRPNVEVKFSNNVTS

SEQ ID NO: 25753 - protein, 67 aa, Homo sapiens
TSSSSLPLSCCSPEPSPTAWPSSCMCGAERSYPVSCSSRSPAPSSSSASVPPQRPKTPSTRLMRRPF

SEQ ID NO: 25754 - protein, 66 aa, Homo sapiens
MGPSPAPSRTSASPPSLFRELALQATWLRCWPPSWSCWPCCWPPCSMSSAVSTCCSGTRTRMGRWR

SEQ ID NO: 25755 - protein, 46 aa, Homo sapiens
TVFRIRAQELRFSTCSRGAIGPPLPAASIFILQDPENHPLMVFAQA

SEQ ID NO: 25756 - protein, 29 aa, Homo sapiens
MFPNWKGTLKGHMWMSVGQTLTLRDQRAN

SEQ ID NO: 25757 - protein, 7 aa, Homo sapiens
KEIWSPF

SEQ ID NO: 25758 - protein, 76 aa, Homo sapiens
LPRPALWTSVGGRLLSVPALLYPAPWRPPVSLPQGGIRRLEAPRGGKRLALPCPTPHHDPPAAAPSAGLSARVLLL

SEQ ID NO: 25759 - protein, 342 aa, Homo sapiens
LLLSARGRRRRSIVKVSLHPAVMSKSESPKEPEQLRKLFIGGLSFETTDESLRSHFEQWGTLTDCVVMRDPNTKRSRGFGFVTYATVEEVDAAMNARPHKVDGRVVEPKRAVSREDSQRPGAHLTVKKIFVGGIKEDTEEHHLRDYFEQYGKIEVIEIMTDRGSGKKRGFAFVTFDDHDSVDKIVIQKYHTVNGHNCEVRKALSKQEMASASSSQRGRSGSGNFGGGRGGGFGGNDNFGRGGNFSGRGGFGGSRGGGGYGGSGDGYNGFGNDGSNFGGGGSYNDFGNYNNQSSNFGPMKGGNFGGRSSGPYGGGGQYFAKPRNQGGYGGSSSSSSYGSGRRF

SEQ ID NO: 25760 - protein, 1090 aa, Homo sapiens
RRSMARSSPYLRQLQGPLLPPRDLVEEDDDYLNDDVEEDEESVFIDAEELCSGGVKAGSLPGCLRVSICDENTQETCKVFGRFPITGAWWRVKVQVKPVVGSRSYQYQVQGFPSYFLQSDMSPPNQKHICALFLKECEVSSDDVNKFLTWVKEVSNYKNLNFENLRETLRTFHKETGRKDQKQPTQNGQEELFLDNEMSLPLENTIPFRNVMTALQFPKIMEFLPVLLPRHFKWIIGSGSKEMLKEIEEILGTHPWKLGFSKITYREWKLLRCEASWIAFCQCESLLQLMTDLEKNALIMYSRLKQICREDGHTYVEVNDLTLTLSNHMSFHAASESLKFLKDIGVVTYEKSCVFPYDLYHAERAIAFSICDLMKKPPWHLCVDVEKVLASIHTTKPENSSDDALNESKPDEVRLENPVDVVDTQDNGDHIWTNGENEINAEISEVQLDQDQVEVPLDRDQVAALEMICSNPVTVISGKGGCGKTTIVSRLFKHIEQLEEREVKKACEDFEQDQNASEEWITFTEQSQLEADKAIEVLLTAPTGKAAGLLRQKTGLHAYTLCQVNYSFYSWTQTMMTTNKPWKFSSVRVLVVDEGSLVSVGIFKSVLNLLCEHSKLSKLIILGDIRQLPSIEPGNLLKDLFETLKSRNCAIELKTNHRAESQLIVDNATRISRRQFPKFDAELNISDNPTLPISIQDKTFIFVRLPEEDASSQSSKTNHHSCLYSAVKTLLQENNLQNAKTSQFIAFRRQDCDLINDCCCKHYTGHLTKDHQSRLVFGIGDKICCTRNAYLSDLLPENISGSQQNNDLDASSEDFSGTLPDFAKNKRDFESNVRLCNGEIFFITNDVTDVTFGKRRSLTINNMAGLEVTVDFKKLMKYCRIKHAWARTIHTFQGSEEQTVVYVVGKAGRQHWQHVYTAVTRGRCRVYVIAEESQLRNAIMKNSFPRKTRLKHFLQSKLSSSGAPPADFPSPRKSSGDSGGPSTPSASPLPVVTDHAMTNDVTWSEASSPDERTLTFAERWQLSSPDGVDTDDDLPKSRASKRTCGVNDDESPSKIFMVGESPQVSSRLQNLRLNNLIPRQLFKPTDNQET

SEQ ID NO: 25761 - protein, 28 aa, Homo sapiens
VSKTSALSALVYKLKWRKFRWPTWILTS

SEQ ID NO: 25762 - protein, 15 aa, Homo sapiens
TPVSMESRGLSPGSS

SEQ ID NO: 25763 - protein, 44 aa, Homo sapiens
KNKSTPDLDSGHLLKPSFRVDIPTSRTVRILKTTQQKVKKWKIV

SEQ ID NO: 25764 - protein, 49 aa, Homo sapiens
IWLPLRRIMRRLVWILLKERVRKKERNTNYPFLLALQHVMLPEFQLQLN

SEQ ID NO: 25765 - protein, 19 aa, Homo sapiens
LEAEQSSLGSLKQTWIKKL

SEQ ID NO: 25766 - protein, 43 aa, Homo sapiens
IGRLEELDSSRWESASLSGTLDDLQSGWRSHGGLLEVTAKEIL

SEQ ID NO: 25767 - protein, 137 aa, Homo sapiens
LCAPSGERLCQLPHSNVEVQESEWRLTEAKGPTMGKESGWDSGRAAVAAVVGGVVAVGTVLVALSAMGFTSVGIAASSIAAKMMSTAAIANGGGVAAGSLVAILQSVGAAGLSVTSKVIGGFAGTALGAWLGSPPSS

SEQ ID NO: 25768 - protein, 80 aa, Homo sapiens
IFKLCCNKMCVVLLNTYDRDGIFPESHLPPVSLEIPSCFSCTLPLTNHKLQQHGCPAWSSSSQDDLEPGGPSEQMHTLPG

SEQ ID NO: 25769 - protein, 46 aa, Homo sapiens
RRGCAFPAPGPSRHTRSSPLARANAQDDHHPRVCHHLRLERSFMQG

SEQ ID NO: 25770 - protein, 57 aa, Homo sapiens
RITIHLNRAKVGYMESTCGPSAQGWILFCSLIAKHCLIWNKSSWVIPISPYHMSTTS

SEQ ID NO: 25771 - protein, 346 aa, Homo sapiens
LLPHWKITPQASLAPSSELTGMVPREAPESAQCLCPSLTIPNAKDVLRKRHKRRSRQHQRFMARKALLQEQGLLSMPPEPGSSPLPTPFGAATATEAASSGKQCLRAGSGSAPCSRRPAPGKASGPLPSKCVAIDCEMVGTGPRGRVSELARCSIVSYHGNVLYDKYIRPEMPIADYRTRWSGITRQHMRKAVPFQVAQKEILKLLKGKVVVGHALHNDFQALKYVHPRSQTRDTTYVPNFLSEPGLHTRARVSLKDLALQLLHKKIQVGQHGHSSVEDATTAMELYRLVEVQWEQQEARSLWTCPEDREPDSSTDMEQYMEDQYWPDDLAHGSRGGAREAQDRRN

SEQ ID NO: 25772 - protein, 37 aa, Homo sapiens
MRRWACCSWSRCSCCPAPTDCPSTTASTTPTAPTTRT

SEQ ID NO: 25773 - protein, 50 aa, Homo sapiens
MTSRWRSRICGWRTMGVTAVRSLTGWRMKAVWWSWSCGDGAVCPHISPTC

SEQ ID NO: 25774 - protein, 101 aa, Homo sapiens
RGPPLPAWAPGRRMEQGRAGALASPNGVALLWAPVPCELPGPAAGGKLWEHEGLAGAHLRLRLHEHLYLRVEDEWSHQLQHRAPPVVPAGFSALRSPHVYP

SEQ ID NO: 25775 - protein, 51 aa, Homo sapiens
LGAGTFHSQLDAHSAQGLGVQPACSELPCRWRRPSWSPACWGSCCCPSWPC

SEQ ID NO: 25776 - protein, 1133 aa, Homo sapiens
LAQGFPGHLPPRSWSRAEPRSMEMDAPRPPSLAVPGAASRPGRLLDGGHGRQQVQALSSQLLEVIPDSMRKQEVRTGREAGQGHGTGSPAEQVKALMDLLAGKGSQGSQAPQALDRTPDAPLGPCSNDSRIQRHRKALLSKVGGGPELGGPWHRLASLLLVEGLTDLQLREHDFTQVEATRGGGHPARTVALDRLFLPLSRVSVPPRVSITIGVAGMGKTTLVRHFVRLWAHGQVGKDFSLVLPLTFRDLNTHEKLCADRLICSVFPHVGEPSLAVAVPARALLILDGLDECRTPLDFSNTVACTDPKKEIPVDHLITNIIRGNLFPEVSIWITSRPSASGQIPGGLVDRMTEIRGFNEEEIKVCLEQMFPEDQALLGWMLSQVQADRALYLMCTVPAFCRLTGMALGHLWRSRTGPQDAELWPPRTLCELYSWYFRMALSGEGQEKGKASPRIEQVAHGGRKMVGTLGRLAFHGLLKKKYVFYEQDMKAFGVDLALLQGAPCSCFLQREETLASSVAYCFTHLSLQEFVAAAYYYGASRRAIFDLFTESGVSWPRLGFLTHFRSAAQRAMQAEDGRLDVFLRFLSGLLSPRVNALLAGSLLAQGEHQAYRTQVAELLQGCLRPDAAVCARAINVLHCLHELQHTELARSVEEAMESGALARLTGPAHRAALAYLLQVSDACAQEANLSLSLSQGVLQSLLPQLLYCRKLRLDTNQFQDPVMELLGSVLSGKDCRIQKISLAENQISNKGAKALARSLLVNRSLTSLDLRGNSIGPQGAKALADALKINRTLTSLSLQGNTVRDDGARSMAEALASNRTLSMLHLQKNSIGPMGAQRMADALKQNRSLKELMFSSNSIGDGGAKALAEALKVNQGLESLDLQSNSISDAGVAALMGALCTNQTLLSLSLRENSISPEGAQAIAHALCANSTLKNLDLTANLLHDQGARAIAVAVRENRTLTSLHLQWNFIQAGAAQALGQALQLNRSLTSLDLQENAIGDDGACAVARALKVNTALTALYLQVASIGASGAQVLGEALAVNRTLEILDLRGNAIGVAGAKALANALKVNSSLRRLNLQENSLGMDGAICIATALSGNHRLQHINLQGNHIGDSGARMISEAIKTNAPTCTVEM

SEQ ID NO: 25777 - protein, 50 aa, Homo sapiens
VFLGNPSNQKFIQLFICFESSGCKSMQLSYTGEDSFHVNIHILWGNLLPK

SEQ ID NO: 25778 - protein, 252 aa, Homo sapiens
VSGSSGQRRLLARQMASRWQNMGTSVRRRSLQHQEQLEDSKELQPVVSHQETSVGALGSLCRQFQRRLPLRAVNLNLRAGPSWKRLETPEPGQQGLQAAARSAKSALGAVSQRIQESCQSGTKWLVETQVKARRRKRGAQKGSGSPTHSLSQKSTRLSGAAPAHSAADPWEKEHHRLSVRMGSHAHPLRRSRREAAFRSPYSSTEPLCSPSESDSDLEPVGAGIQHLQKLSQELDEAIMAEESGDIVSLIHD

SEQ ID NO: 25779 - protein, 80 aa, Homo sapiens
RTWACRTPELGQSSSQRRPERFGDAGGSDGRELGAAAAEARGRKLAAHGAPGAAPARPCPAALCRGCRSAGSGQVRFPPL

SEQ ID NO: 25780 - protein, 34 aa, Homo sapiens
ICQSLESAKAGTRFPGPQWGCANPRELVAETSTT

SEQ ID NO: 25781 - protein, 221 aa, Homo sapiens
VKGSGGHRGGGEMAFSGSQAPYLSPAVPFSGTIQGGLQDGLQITVNGTVLSSSGTRFAVNFQTGFSGNDIAFHFNPRFEDGGYVVCNTRQNGSWGPEERKTHMPFQKGMPFDLCFLVQSSDFKVMVNGILFVQYFHRVPFHRVDTISVNGSVQLSYISFQTQTVIHTVQSAPGQMFSTPAIPPMMYPHPAYPMPFITTILGGLYPSKSILLSGTVLPSAQR

SEQ ID NO: 25782 - protein, 67 aa, Homo sapiens
VCGRSKKQPFCDGSHFFQRTGLSPLKFKAQETRMVALCTCKATQRPPYCDGTHRSERVQKAEVGSPL

SEQ ID NO: 25783 - protein, 14 aa, Homo sapiens
MFESHASLWKQYAM

SEQ ID NO: 25784 - protein, 63 aa, Homo sapiens
LAAPGLAGEPAMRGKTFRFEMQRDLVSFPLSPAVRVKLVSAGFQTAEELLEVKPSELSKGNDS

SEQ ID NO: 25785 - protein, 51 aa, Homo sapiens
LRSDHPWRLQSCASSHTATASQPFSSSSSTSTSATSSTTTSTCVAQKTQSR

SEQ ID NO: 25786 - protein, 68 aa, Homo sapiens
ISRHHISPHPHPPCLALDPIPGPPYQLTSSSVLQAPLGSSLPWLFLPLPLYRRLSVGALGFIKLGSEC

SEQ ID NO: 25787 - protein, 213 aa, Homo sapiens
KPRLRRSSPRAQEEGPGEPPPPELALLPPPPPPPPTPATPTSSASNLDLGEQRERWETFQKRQKLTSEGAAKLLLDTFEYQGLVKHTGGCHCGAVRFEVWASADLHIFDCNCSICKKKQNRHFIVPASRFKLLKGAEHITTYTFNTHKAQHTFCKRCGVQSFYTPRSNPGGFGIAPHCLDEGTVRSMVTEEFNGSDWEKAMKEHKTIKNMSKE

SEQ ID NO: 25788 - protein, 113 aa, Homo sapiens
RVLDPEVTQQTIELKEECKDFVDKIGQFQKIVGGLIELVDQLAKEAENEKMKAIGARNLLKSIAKQREAQQQQLQALIAEKKMQLERYRVEYEALCKVEAEQNEFIDQFIFQK

SEQ ID NO: 25789 - protein, 296 aa, Homo sapiens
IFPGLLDVYGFESFPDNSLEQLCINYANEKLQQHFVAHYLRAQQEEYAVEGLEWSFINYQDNQPCLDLIEGSPISICSLINEECRLNRPSSAAQLQTRIETALAGSPCLGHNKLSREPSFIVVHYAGPVRYHTAGLVEKNKDPIPPELTRLLQQSQDPLLMGLFPTNPKEKTQEEPPGQSRAPVLTVVSKFKASLEQLLQVLHSTTPHYIRCIKPNSQGQAQTFLQEEVLSQLEACGLVETIHISAAGFPIRVSHRNFVERYKLLRRLHPCTSSGPDSPYPAKGLPASVFREALGI

SEQ ID NO: 25790 - protein, 53 aa, Homo sapiens
LWRNPTNVSFVEGVTSREVPLRSTRSAAVHFFRALTQGTLVLVGDGSSFPISA

SEQ ID NO: 25791 - protein, 39 aa, Homo sapiens
LEGHIFSAPRISATASTARRPTVVQRWGARAAFPSRVPD

SEQ ID NO: 25792 - protein, 53 aa, Homo sapiens
LAARAAPPPRRLPARAPAPMMKAKCTTPSSSSSRSRASARPRRGWSCSRESGR

SEQ ID NO: 25793 - protein, 6 aa, Homo sapiens
IKEEAS

SEQ ID NO: 25794 - protein, 44 aa, Homo sapiens
RPSRTARSWSSCRRPRPTTSATSSSSTCVSFPSRSSPSASTTSS

SEQ ID NO: 25795 - protein, 92 aa, Homo sapiens
RPASEPAGSWELGETTPGKLSRQRGRRGLGKPDRAFAHSCRLAATRPRQPPRTRDQAPSPVTAAESSPLAAARPGAAPQGPSPDRLGRPDVH

SEQ ID NO: 25796 - protein, 514 aa, Homo sapiens
VGPRMEEPQAGDAARFSCPPNFTAKPPASESPRFSLEALTGPDTELWLIQAPADFAPECFNGRHVPLSGSQIVKGKLAGKRHRYRVLSSCPQAGEATLLAPSTEAGGGLTCASAPQGTLRILEGPQQSLSGSPLQPIPASPPPQIPPGLRPRFCAFGGNPPVTGPRSALAPNLLTSGKKKKEMQVTEAPVTQEAVNGHGALEVDMALGSPEMDVRKKKKKKNQQLKEPEAAGPVGTEPTVETLEPLGVLFPSTTKKRKKPKGKETFEPEDKTVKQEQINTEPLEDTVLSPTKKRKRQKGTEGMEPEEGVTVESQPQVKVEPLEEAIPLPPTKKRKKEKGQMAMMEPGTEAMEPVEPEMKPLESPGGTMAPQQPEGAKPQAQAALAAPKKKTKKEKQQDATVEPETEVVGPELPDDLEPQAAPTSTKKKKKKKERGHTVTEPIQPLEPELPGEGQPEARATPGSTKKRKKQSQESRMPETVPQEEMPGPPLNSESGEEAPTGRDKKRKQQQQQPV

SEQ ID NO: 25797 - protein, 226 aa, Homo sapiens
RMTEWETAAPAVAETPDIKLFGKWSTDDVQINDISLQMTTTSVMRGLLHQKEHHISHMDYIAVKEKYAKYLPHSAGRYAAKRFRKAQCPIVERLTNSMMMHGRNNGKKLMTVRIVKHAFEIIHLLTGENPLQVLVNAIINSGPREDSTRIGRAGTVRRQAVDVSPLRRVNQAIWLLCTGAREAAFRNIKTIAECLADELINAAKGSSNSYAIKKKDELERVAKSNR

SEQ ID NO: 25798 - protein, 128 aa, Homo sapiens
LTPSVNEAVTGHPPFPAHSETVGSGPSSLGFPDWDPNTHAAYTDSPYSCPASAAENFLPPDFYPPSDPGQPCPFPQGMEAGPWRVSAPPSGPPQFPAVVPGPSLEVARAHMLALGPQQLLAQDEEGDT

SEQ ID NO: 25799 - protein, 9 aa, Homo sapiens
IFMNERSRD

SEQ ID NO: 25800 - protein, 63 aa, Homo sapiens
RIKKISFFMTLPLPEFPALFHLIQLQLALRHGLAARRAGPAAGPAAAQRLTVAQHSHSAHRAG

SEQ ID NO: 25801 - protein, 113 aa, Homo sapiens
VQDARRRPPAGLPLQASLPCGPLSPPWPSHRAMVPSLASQGPRSTRRYCLMCGYCLGGCPWPSGMQPQPRCVSSLWTSSRPTSTSMRYTMRRRSGGPSRRHPRIRATRRRRRS

SEQ ID NO: 25802 - protein, 12 aa, Homo sapiens
LARASLSDLRRG

SEQ ID NO: 25803 - protein, 43 aa, Homo sapiens
TRRRRSVRPTKRSRSSCRRTSRSTGPRTACCCWVLENLVKAPL

SEQ ID NO: 25804 - protein, 15 aa, Homo sapiens
LSALAPPGNPPHAVF

SEQ ID NO: 25805 - protein, 170 aa, Homo sapiens
RAPSANMSVDPLSSKALKIKRELSENTPHLSDEALMGLSVRELNRHLRGLSAEEVTRLKQRRRTLKNRGYAASCRVKRVCQKEELQKQKSELEREVDKLARENAAMRLELDALRGKCEALQGFARSVAAARGPATLVAPASVITIVKSTPGSGSGPAHGPDPAHGPASCS

SEQ ID NO: 25806 - protein, 35 aa, Homo sapiens
LTSIFHCLLRVQMKMMKSSSDPLDIKKDVLLPAWN

SEQ ID NO: 25807 - protein, 33 aa, Homo sapiens
VAGRLRVLVKLGHPALSDDQQILSGRNICSAVR

SEQ ID NO: 25808 - protein, 29 aa, Homo sapiens
VVLEQYKMEDLMQVYDQFTLAPPLPSASS

SEQ ID NO: 25809 - protein, 47 aa, Homo sapiens
LLDLMSLSSASTPPLWPPENSFPSSGLSSIRRRWSQFLFTFLKVDKL

SEQ ID NO: 25810 - protein, 41 aa, Homo sapiens
VMGLGRCIWEVTAARTDRHCCRELATVFHAVAGGSRLHAPF

SEQ ID NO: 25811 - protein, 33 aa, Homo sapiens
KTRWAAPPIEITEDIRVLLKRKRGHLCMDPCLV

SEQ ID NO: 25812 - protein, 42 aa, Homo sapiens
TSPCSLVVPVALWSQKASLRMEGNQARKEREQILLQPITVEL

SEQ ID NO: 25813 - protein, 19 aa, Homo sapiens
LFKSYFIFKLKLLKNTLIP

SEQ ID NO: 25814 - protein, 13 aa, Homo sapiens
LELFFSSTVISNS

SEQ ID NO: 25815 - protein, 52 aa, Homo sapiens
ILRWIPASSTTMCSEHVEEKKQLYLLVSFCLSSWTLTFSETQQSLQWSVGPP

SEQ ID NO: 25816 - protein, 203 aa, Homo sapiens
LPGPGPLMAAIRKKLVVVGDGACGKTCLLIVFSKDEFPEVYVPTVFENYVADIEVDGKQVELALWDTAGQEDYDRLRPLSYPDTDVILMCFSVDSPDSLENIPEKWVPEVKHFCPNVPIILVANKKDLRSDEHVRTELARMKQEPVRTDDGRAMAVRIQAYDYLECSAKTKEGVREVFETATRAALQKRYGSQNGCINCCKVL

SEQ ID NO: 25817 - protein, 16 aa, Homo sapiens
KFLPADSFSFRLFGPV

SEQ ID NO: 25818 - protein, 122 aa, Homo sapiens
VEPTVTISPSRTEALNHHNLLVCSVTDFYPGQIKVRWFRNDQEETAGVVSTPLIRNGDWTFQILVMLEMTPQRGDVYTCHVEHPSLQSPITVEWRKGILSFCYYGPTRQRAPSDPFLPISYP

SEQ ID NO: 25819 - protein, 35 aa, Homo sapiens
TCSPCAASSRSSRSCTRPATSRRCRLWRSTGNRPA

SEQ ID NO: 25820 - protein, 17 aa, Homo sapiens
TLPPERALLCFSLRNQI

SEQ ID NO: 25821 - protein, 114 aa, Homo sapiens
VEDLRCKYISLIYTNYEAGKDDYVKALPGQLKPFETLLSQNQGGKTFIVGDQISFADYNLLDLLLIHEVLAPGCLDAFPLLSAYVGRLSARPKLKAFLASPEYVNLPINGNGKQ

SEQ ID NO: 25822 - protein, 9 aa, Homo sapiens
KRKYEDLEE

SEQ ID NO: 25823 - protein, 206 aa, Homo sapiens
KAPAAAPAPRSHRRRRRLSLVAAMTTASTSQVRQNYHQDSEAAINRQINLELYASYVYLSMSYYFDRDDVALKNFAKYFLHQSHEEREHAEKLMKLQNQRGGRIFLQDIKKPDCDDWESGLNAMECALHLEKNVNQSLLELHKLATDKNDPHLCDFIETHYLNEQVKAIKELGDHVTNLRKMGAPESGLAEYLFDKHTLGDSDNES

SEQ ID NO: 25824 - protein, 7 aa, Homo sapiens
IATRCPV

SEQ ID NO: 25825 - protein, 6 aa, Homo sapiens
VMSCVY

SEQ ID NO: 25826 - protein, 21 aa, Homo sapiens
ICLYTYTLCTKCRVIIMLTWT

SEQ ID NO: 25827 - protein, 24 aa, Homo sapiens
MPGNGMKTKCISHNKYYSNVEVII

SEQ ID NO: 25828 - protein, 32 aa, Homo sapiens
LPPPQGFAVIEAISSDLSHAFLYTSFPANRNH

SEQ ID NO: 25829 - protein, 184 aa, Homo sapiens
LARILQFLPGDCRGAASTVDYNCNMTLEELVACDNAAQKMQTVTAAVEELLVAAQRQDRLTVGVYESAKLMNVDPDSVVLCLLAIDEEEEDDIALQIHFTLIQSFCCDNDINIVRVSGMQRLAQLLGEPAETQGTTEARDLHCLLVTNPHTDAWKSHGLVEVASYCEESRGNNQWVPYISLQER

SEQ ID NO: 25830 - protein, 14 aa, Homo sapiens
LLGFGFVLQPSPRS

SEQ ID NO: 25831 - protein, 8 aa, Homo sapiens
MDIFNSFT

SEQ ID NO: 25832 - protein, 274 aa, Homo sapiens
MSPLQYSFMAVIHFAGLKAVGESVQKPLDYYRVNLTGTIQLLEIMKAHGVKNLVFSSSATVYGNPQYLPLDEAHPTGGCTNPYGKSKFFIEEMIRDLCQADKTWNAVLLRYFNPTGAHASGCIGEDPQGIPNNLMPYVSQVAIGRREALNVFGNDYDTEDGTGVRDYIHVVDLAKGHIAALRKLKEQCGCRIYNLGTGTGYSVLQMVQAMEKASGKKIPYKVVARREGDVAACYANPSLAQEELGWTAALGLDRMCEDLWRWQKQNPSGFGTQA

SEQ ID NO: 25833 - protein, 232 aa, Homo sapiens
MESMFSSPAEAALQRETGVPGLLTPLPDLDGVYELERVAGFVRDLGCERVALQFPDQLLGDAVAVAARLEETTGSKMFILGDTAYGSCCVDVLGAEQAGAQALIHFGPACLSPPARPLPVAFVLRQRSVALELCVKAFEAQNPDPKAPVVLLSEPACAHALGKGFCLCMHKGGFGYSPAPTVPGPASLQPSFSPTSGFPESRAYAPRAFWAPLPPCPREASRRVWCLLCRGL

SEQ ID NO: 25834 - protein, 172 aa, Homo sapiens
MAEMRARMQQQLDEYQELLDIKLALDMEIHAYRKLLEGEEERLRLSPSPTSQRSRGRASSHSSQTQGGGSVTKKRKLESTESRSSFSQHARTSGRVAVEEVDEEGKFVRLRNKSNEDQSMGNWQIKRQNGDDPLLTYRFPPKFTLKAGQVVTVSGRALGTLGRPWVAMGALG

SEQ ID NO: 25835 - protein, 121 aa, Homo sapiens
MKMVTGAVASVLEDEATDTSDSEGSCGSEKDHFYSDDDAIEADSEGDAEPCDKENENDGESSVGTNMGWADAMAKVLNKKTPESKPTILVKNKKLEKEKEKLKQERLEKIKQVCSTSSLVD

SEQ ID NO: 25836 - protein, 95 aa, Homo sapiens [sequence omitted]

SEQ ID NO: 25837 - protein, 86 aa, Homo sapiens
MTSRGEWWGLRMKRSGFSSQLCYEEALDGPVGRGHRRLGPGAQHCSRTGGLKPSPPLPPPPPPDRGIRRFPRQRNLRPQSQHLGGT

SEQ ID NO: 25838 - protein, 24 aa, Homo sapiens
MKINKNNIYAVLKTVRRPLRNISS

SEQ ID NO: 25839 - protein, 1123 aa, Homo sapiens [sequence omitted]

SEQ ID NO: 25840 - protein, 467 aa, Homo sapiens
MIERSVVEAAVQECSQSVDETIEHVFNIIGAFDIPRFVYNSERKKFLPLLMTNHPAPNLFGTPRDKAEMFRERYTILHQRTHRHELFTPPVIGSHPDESGSKFQLKTIETLLGSTTKIGDAIVLGMITQLKEGKFFLEDPTGTVQLDLSKAQFHSGLYTEACFVLAEGWFEDQVFHVNAFGFPPTEPSSTTRAYYGNINFFGGPSNTSVKTSAKLKQLEEENKDAMFVFLSDVWLDQVEVLEKLRIMFAGYSPAPPTCFILCGNFSSAPYGKNQVQALKDSLKTLADIICEYPDIHQSSRFVFVPGPEDPGFGSILPRPPLAESITNEFRQRVPFSVFTTNPCRIQYCTQEITVFREDLVNKMCRNCVRFPSSNLAIPNHFVKTILSQGHLTPLPLYVCPVYWAYDYALRVYPVPDLLVIADKYDPFTTTNTECLCINPGSFPRSGFSFKVFYPSNKTVEDSKLQGF

SEQ ID NO: 25841 - protein, 112 aa, Homo sapiens
MKLAANISGDKLVSLGTCFGKFTKTHKFRLHVTALDYLAPYAKYKVWIKPGAEQSFLYGNHVLKSGLGRITENTSQYQGVVVYSMADIPLVSRDGSCYRTQVLLFKKGMSSI

SEQ ID NO: 25842 - protein, 48 aa, Homo sapiens
MEDYIISILNLAQFYYSLITVLKTFNWPGTVVHACNPSTLGGQGRRIT

SEQ ID NO: 25843 - protein, 15 aa, Homo sapiens
MTLEELVACDNAAQK

SEQ ID NO: 25844 - protein, 49 aa, Homo sapiens
MTLEELVACDNAAQKMQTVTAAVEELLVAAQRQDRLTVGVYESAKLMNV

SEQ ID NO: 25845 - protein, 125 aa, Homo sapiens
MVISKQTRELPESHLSNMKKPVEEGTLPYPIFAAIDNDLQPSWQEARAPETWFEFTPHHAGFSALGAFVSITHFGSKFKKGRLVRTHPERDLTFLRGLWGSALGNTEVIREYIFGEYLGNRKVKP

SEQ ID NO: 25846 - protein, 140 aa, Homo sapiens [sequence omitted]

SEQ ID NO: 25847 - protein, 362 aa, Homo sapiens [sequence omitted]

SEQ ID NO: 25848 - protein, 128 aa, Homo sapiens
MKQPIMADGPRCKRRKQANPRRKNVVNYDNVVDTGSETDEEDKLHIAEDDGIANPLDQETSPASVPNHESSPHVSQALLPREEEEDEIREGGVEHPWHNNEILQASVDGPGKCLKSLGLFLYHLHIFN

SEQ ID NO: 25849 - protein, 88 aa, Homo sapiens
MKSKPLGICLIIDCIGNETGRCGSCRLTGAPRLRSWHRQAVFIGVISTNCRDKPVQESVLHPGCGGSCLEFQHFVRLRWEDHLSPVKN

SEQ ID NO: 25850 - protein, 45 aa, Homo sapiens
MKALYEQNQSDVNEAKSGGRSDLIPTIKFRHCSLLRNRRCTVAYL

SEQ ID NO: 25851 - protein, 122 aa, Homo sapiens
MRLSEPVPQTNAHESKEWYHASLTRAQAEHMLMRVPRDGAFLVRKRNEPNSYAISFRAEGKIKHCRVQQEGQTVMLGNSEFDSLVDLISYYEKHPLYRKMKLRYPINEEALEKIGTAVRGLW

SEQ ID NO: 25852 - protein, 9 aa, Homo sapiens
MNLNTWRIS

SEQ ID NO: 25853 - protein, 148 aa, Homo sapiens
MPASCRRRRYRSSPWSAAQPRTCTDPPSSPACSAQGSSRAAPMRARVIPEARWCVRTKLQSAGSPCKASSAGDRAVVTATSQASTPMWPTTWPGSGSTPFPDCSGTHLSLLGDSAVREWLGHGRQDCVPFPQCGQLRARMAQELNKVL

SEQ ID NO: 25854 - protein, 256 aa, Homo sapiens
MKVALMMSDFAGGASGFPMTFSGGKFTEEWKAQFIKTERKKLLNYKARLVKNLQPRIYCPFAGYFVESHPSDKYIKETNTKNDPNELNNLIKKNSDVITWTPRPGATLDLGRMLKDRTDSKGIIEPPEGTKIYKDSWDFEPYLEILNAALGDEIFLHSSWIKEYFTWAGFKDYNLVVRMIETDEDFNPFPGGYDYLVDFLDLSFPKERPQREHPYEEIHSRVDVIRHVVKNGLLWDELYIGFQTRLQRDPDIYHHL

SEQ ID NO: 25855 - protein, 89 aa, Homo sapiens
MSNCCSFKIPRQRNRQTMGSIEQTTEILLCLSPVEVASLKEGINFFRNKSTGKDYVLYKNKSRLRACKNMCKHQGGLFIKDIEDLAGSF

SEQ ID NO: 25856 - protein, 67 aa, Homo sapiens [sequence omitted]

SEQ ID NO: 25857 - protein, 196 aa, Homo sapiens
MVQQLVKKIGHQAVLMDLIKKYKQNTQGLKSPENPKKAALVMQTEAARDYRDEESSSPARHGEQMPSFYPAENLDNGLIDQRVLKQRRNVKQILARSKALQWTKSYVLPEFPYDVKCMLAEQKCPDHSMRIRIIEFLQADMTKYLEGSLYPSTQQYNDVVNALLQAHPFLDEDGCGFCHKIAVRIKGRIDILFLLP

SEQ ID NO: 25858 - protein, 203 aa, Homo sapiens
MRRLSPASDFSGALETDLKASLFDQPLSIICGDSDTLPRPIQDILTILCLKGPSTEGIFRRAANEKARKELKEELNSGDAVDLERLPVHLLAVVFKDFLRSIPRKLLSSDLFEEWMGALEMQDEEDRIEALKQVADKLPRPNLLLLKHLVYVLHLISKNSEVNRMDSSNLAICIGPNMLTLENDQSLSFEAQKDLNNKVCSAY

SEQ ID NO: 25859 - protein, 20 aa, Homo sapiens
MKDYDELLKYYELHETIGTE

SEQ ID NO: 25860 - protein, 7 aa, Homo sapiens
MPDITRL

SEQ ID NO: 25861 - protein, 30 aa, Homo sapiens
VRPHGARPLQQWVPDRHPRTIQKEKAHFGG

SEQ ID NO: 25862 - protein, 72 aa, Homo sapiens
VTSFRKKARNALCGVSRTPQLRTISPGLRAPKSPTTSKRPQKDKSRSPSRAPWPRPPFVCATSPSTCPPGSP

SEQ ID NO: 25863 - protein, 138 aa, Homo sapiens
LGFLHARVASCSTSLSLILVSTSSPGKFPFSRLALPTRASDFHPSFSLLASDYPPPIPPRPAAQLPPPFTRTGTIIPTPLRPVWDSTCLLPNPTLISAWSLPLWPNLSSRLIGDGHSHSLVPNTSSWMDSRHPCPLFN

SEQ ID NO: 25864 - protein, 24 aa, Homo sapiens
TTGLGSLRGCSLEGANSSYQGCFS

SEQ ID NO: 25865 - protein, 582 aa, Homo sapiens
VICSPGGESWKEGASVQIMKEHGGTFSSTGISGGSGDSAMDSLQPLQPNYMPVCLFAEESYQKLAMETLEELDWCLDQLETIQTYRSVSEMASNKFKRMLNRELTHLSEMSRSGNQVSEYISNTFLDKQNDVEIPSPTQKDREKKKKQQLMTQISGVKKLMHSSSLNNTSISRFGVNTENEDHLAKELEDLNKWGLNIFNVAGYSHNRPLTCIMYAIFQERDLLKTFRISSDTFITYMMTLEDHYHSDVAYHNSLHAADVAQSTHVLLSTPALDAVFTDLEILAAIFAAAIHDVDHPGVSNQFLINTNSELALMYNDESVLENHHLAVGFKLLQEEHCDIFMNLTKKQRQTLRKMVIDMVLATDMSKHMSLLADLKTMVETKKVTSSGVLLLDNYTDRIQVLRNMVHCADLSNPTKSLELYRQWTDRIMEEFFQQGDKERERGMEISPMCDKHTASVEKSQVGFIDYIVHPLWETWADLVQPDAQDILDTLEDNRNWYQSMIPQSPSPPLDEQNRDCQGLMEKFQFELTLDEEDSEGPEKEGEGHSYFSSTKTLCVIDPENRDSLGETDIDIATEDKSPVDT

SEQ ID NO: 25866 - protein, 436 aa, Homo sapiens
LILLSLPTPDTRLRLVISSVFFSSLLLSRFSMQEKDASSQGFLPHFQHFATQAIHVGQDPEQWTSRAVVPPISLSTTFKQGAPGQHSGFEYSRSGNPTRNCLEKAVAALDGAKYCLAFASGLAATVTITHLLKAGDQIICMDDVYGGTNRYFRQVASEFGLKISFVDCSKIKLLEAAITPETKLVWIETPTNPTQKVIDIEGCAHIVHKHGDIILVVDNTFMSPYFQRPLALGADISMYSATKYMNGHSDVVMGLVSVNCESLHNRLRFLQNSLGAVPSPIDCYLCNRGLKTLHVRMEKHFKNGMAVAQFLESNPWVEKVIYPGLPSHPQHELVKRQCTGCTGMVTFYIKGTLQHAEIFLKNLKLFTLAESLGGFESLAELPAIMTHASVLKNDRDVLGISDTLIRLSVGLEDEEDLLEDLDQALKAAHPPSGSHS

SEQ ID NO: 25867 - protein, 789 aa, Homo sapiens
IALASEQGASCSVRAPERKLRMKLLWQAKMSSIQDWGEEVEEGAVYHVTLKRVQIQQAANKGARWLGVEGDQLPPGHTVSQYETCKIRTIKAGTLEKLVENLLTAFGDNDFTYISIFLSTYRGFASTKEVLELLLDRYGNLTSPNCEEDGSQSSSESKMVIRNAIASILRAWLDQCAEDFREPPHFPCLQKLLDYLTRMMPGSDPERRAQNLLEQFQKQEVETDNGLPNTISFSLEEEEELEGGESAEFTCFSEDLVAEQLTYMDAQLFKKVVPHHCLGCIWSRRDKKENKHLAPTIRATISQFNTLTKCVVSTILGGKELKTQQRAKIIEKWINIAHECRLLKNFSSLRAIVSALQSNSIYRLKKTWAAVPRDRMLMFEELSDIFSDHNNHLTSRELLMKEGTSKFANLDSSVKENQKRTQRRLQLQKDMGVMQGTVPYLGTFLTDLTMLDTALQDYIEGGLINFEKRRREFEVIAQIKLLQSACNSYCMTPDQKFIQWFQRQQLLTEEESYALSCEIEAAADASTTSPKPRKSMVKRLSLLFLGSDMITSPTPTKEQPKSTASGSSGESMDSVSVSSCESNHSEAEEGSITPMDTPDEPQKKLSESSSSCSSIHSMDTNSSGMSSLINPLSSPPSCNNNPKIHKRSVSVTSITSTVLPPVYNQQNEDTCIIRISVEDNNGNMYKSIMLTSQDKTPAVIQRAMLKHNLDSDPAEEYELVQVISEDKELVIPDSANVFYAMNSQVNFDFILRKKNSMEEQVKLRSRTSLTLPRTAKRGCWSNRHSKITL

SEQ ID NO: 25868 - protein, 89 aa, Homo sapiens
IPGQTWVTGPASSPPGAFRFICIINYYFATDTFSQDISGRCICACPAVPAVAKVSSMDKCLHEGSAVPAPRLCPTTDSAKDQNSCETNS

SEQ ID NO: 25869 - protein, 15 aa, Homo sapiens
KRNLEAEAREHLKGS

SEQ ID NO: 25870 - protein, 28 aa, Homo sapiens
LYSPRGRFPVPESKFIYKCWSNKEGRTK

SEQ ID NO: 25871 - protein, 201 aa, Homo sapiens
LKSFLRECKVANYCRQVQQLLGKVQENSAYICSRRQRVSFGVSEQQAVEAWEKLTREEGTPLTLYYSHWRKLRDREIQLEISGKERLEDLNFPEIKRRKMADRKDEDRKQFKDLFDLNSSEEDDTEGFSERGILRPLSTRHGVEDDEEDEEEGEEDSSNSEGEWSWDGDPDAEAGLAPGELQQLAQGPEDELEDLQLSEDD

SEQ ID NO: 25872 - protein, 43 aa, Homo sapiens
TKLFGSQVGLCPGSCWFHVCQDSMSDFLIPQSHRHANVQEVQM

SEQ ID NO: 25873 - protein, 8 aa, Homo sapiens
ILSFKPIF

SEQ ID NO: 25874 - protein, 28 aa, Homo sapiens
RRTSPVTLSAPWTPTQPSCIPWTSRNLE

SEQ ID NO: 25875 - protein, 219 aa, Homo sapiens [sequence omitted]

SEQ ID NO: 25876 - protein, 26 aa, Homo sapiens
LSSRPLRLLDGRAGLLARGSVPAEKP

SEQ ID NO: 25877 - protein, 380 aa, Homo sapiens
KMSRGYSENNNFLNNNNQMVLDMILYPLIGIPQTINWETIARLVPGLTPKECAKRFDELKSSGSSPVDNQYNSLMAAGESPVETLATYIKSSLLDIHGEFQETPVGHDAVSKTGRHSIASTRNCSSESENCTTHNGGEMTEESEGPNMVIHVCDEAKNLKEDFTCPRDLLISEMKYFAEYLSMDAQRWEEVDISVHCDVHIFNWLIKYIKRNTKENKDCEMPTLEPGNVISILISSEFLKMDSLVEQCIQYCHKNMNAIVATPCNMNCINANLLTRIADLFSHNEVDDLKDKKDKFKSKLFCKKIERLFDPEYLNPDSRSNAATLYRCCLCKKLLTKETERRIPCIPGKINVDRRGNIVYIHIRCREDKIHTCIFVYIYI

SEQ ID NO: 25878 - protein, 61 aa, Homo sapiens
ILSARGSNPHSAPLLAFLAPAPAPGPETPGAASQNLRSTTGRPTHSLGTPSFARAHVPCHL

SEQ ID NO: 25879 - protein, 23 aa, Homo sapiens
IRFVTKSVMLSLMPTFSRILMPK

SEQ ID NO: 25880 - protein, 10 aa, Homo sapiens
VKAAQLWMVR

SEQ ID NO: 25881 - protein, 235 aa, Homo sapiens
LDSRGPGTTELMASSTPSSSATSSNAGADPNTTNLRPTTYDTWCGVAHGCTRKLGLKICGFLQRTNSLEEKSRLVSAFKERQSSKNLLSCENSDRDARFRRTETDFSNLFARDLLPAKNGEEQTVQFLLEVVDILLNYVRKTFDRSTKVLDFHHPHQLLEGMEGFNLELSDHPESLEQILVDCRDTLKYGVRTGHPRFFNQLSTGLDIIGLAGEWLTSTANTNMPSDMRECWLLR

SEQ ID NO: 25882 - protein, 95 aa, Homo sapiens
RLGARCGAKVTRSQQLPRSPEAGASSTHSSAVSAGMMGRPCLLTAGRPCLWRRMAPSLSRPQSNTCSLRPRPRTQTRSAWSSTWTRPWCTAPSSQ

SEQ ID NO: 25883 - protein, 16 aa, Homo sapiens
VDSLACMTKFFSFAMT

SEQ ID NO: 25884 - protein, 1026 aa, Homo sapiens
KMSNGYSTDENFRYLISCFRARVKMYIQVEPVLDYLTFLPAEVKEQIQRTVATSGNMQAVELLLSTLEKGVWHLGWTREFVEALRRTGSPLAARYMNPELTDLPSPSFENAHDEYLQLLNLLQPTLVDKLLVRDVLDKCMEEELLTIEDRNRIAAAENNGNESGVRELLKRIVQKENWFSAFLNVLRQTGNNELVQELTGSDCSESNAEIENLSQVDGPQVEEQLLSTTVQPNLEKEVWGMENNSSESSFADSSVVSESDTSLAEGSVSCLDESLGHNSNMGSDSGTMGSDSDEENVAARASPEPELQLRPYQMEVAQPALEGKNIIICLPTGSGKTRVAVYIAKDHLDKKKKASEPGKVIVLVNKVLLVEQLFRKEFQPFLKKWYRVIGLSGDTQLKISFPEVVKSCDIIISTAQILENSLLNLENGEDAGVQLSDFSLIIIDECHHTNKEAVYNNIMRHYLMQKLKNNRLKKENKPVIPLPQILGLTASPGVGGATKQAKAEEHILKLCANLDAFTIKTVKENLDQLKNQIQEPCKKFAIADATREDPFKEKLLEIMTRIQTYCQMSPMSDFGTQPYEQWAIQMEKKAAKEGNRKERVCAEHLRKYNEALQINDTIRMIDAYTHLETFYNEEKDKKFAVIEDDSDEGGDDEYCDGDEDEDDLKKPLKLDETDRFLMTLFFENNKMLKRLAENPEYENEKLTKLRNTIMEQYTRTEESARGIIFTKTRQSAYALSQWITENEKFAEVGVKAHHLIGAGHSSEFKPMTQNEQKEVISKFRTGKINLLIATTVAEEGLDIKECNIVIRYGLVTNEIAMVQARGRARADESTYVLVAHSGSGVIEHETVNDFREKMMYKAIHCVQNMKPEEYAHKILELQMQSIMEKKMKTKRNIAKHYKNNPSLITFLCKNCSVLACSGEDIHVIEKMHHVNMTPEFKELYIVRENKALQKKCADYQINGEIICKCGQAWGTMMVHKGLDLPCLKIRNFVVVFKNNSTKKQYKKWVELPITFPNLDYSECCLFSDED

SEQ ID NO: 25885 - protein, 20 aa, Homo sapiens
RFIFSLCFFLFQFILNAYFS

SEQ ID NO: 25886 - protein, 15 aa, Homo sapiens
VMGLALACLPTQVKS

SEQ ID NO: 25887 - protein, 14 aa, Homo sapiens
RRMSHRAASAWISP

SEQ ID NO: 25888 - protein, 24 aa, Homo sapiens
LLFCKSVDSFYQLLISSSGSKSIT

SEQ ID NO: 25889 - protein, 62 aa, Homo sapiens
KIAVAEVVAKVSFWTRLRQEGRRVHFRQPHLPPAFLESLKEEEVGFKAKDGQGKMPEKVLSR

SEQ ID NO: 25890 - protein, 321 aa, Homo sapiens
KSCCGAKFEASGGAGARLRSRTCSSFFGCLGPLSPAIMPIRALCTICSDFFDHSRDVAAIHCGHTFHLQCLIQWFETAPSRTCPQCRIQVGKRTIINKLFFDLAQEEENVLDAEFLKLQTVYSELDQAKLELKSAQKDLQSADKEIMSLKKKLTMLQETLNLPPVASETVDRLVLESPAPVEVNLKLRRPSFRDDIDLNATFDVDTPPARPSSSQHGYYEKLCLEKSHSPIQDVPKKICKGPRKESQLSLGGQSCAGEPDEELVGAFPIFVRNAILGQKQPKRPRSESSCSKDVVRTGFDGLGGRTKFIQPVSFSCDVELS

SEQ ID NO: 25891 - protein, 33 aa, Homo sapiens
VARVACGSRRLAKSQRSAPAGVSLAWSPHPPGP

SEQ ID NO: 25892 - protein, 612 aa, Homo sapiens
RGRPMALRGPAGLGPGSRRPLDEAVAGAEGREAPALVAAGGAPEDDEEDDGRGRGLLRWDSFSAWLHCVCVVGFDLELGQAVEVIYPQHSKLTDREKTNICYLSFPDSNSGCLGDTQFCFRFRQSSGRRVSLHCLLDQFDKDLPVYLKKDPAYFYGYVYFRQVRDKTLKRGYFQKSLVLISKLPYIHFFHTVLKQIAPEYFEKNEPYLEAACNDVDRWPAPVPGKTLHLPIMGVVMKVRIPTCHDKPGTTQIVQLTQQVDTNISVILPTVHEVDIFRCFCPVFLHSQMLWELVLLGEPLVVMAPSPSESSETVLALVNCISPLKYFSDFRPYFTIHDSEFKEYTTRTQAPPSVILGVTNPFFAKTLQHWPHIIRIGDLKPTGEIPKQVKVKKLKNLKTLDSKPGVYTSYKPYLNRDEEIIKQLQKGVQQKRPSEAQSVILRRYFLELTQSFIIPLERYVASLMPLQKSISPWKSPPQLRQFLPEEFMKTLEKTGPQLTSRIKGDWIGLYRHFLKSPNFDGWFKTRRKEMTQKLEALHLEALCEEDLLLWIQKHTEVETVDLVLKLKNKLLQADREHLPVKPDTMEKLRTHIDAIILALPEDLQGILLKTGMT

SEQ ID NO: 25893 - protein, 19 aa, Homo sapiens
KSKGRAPASETNRLHHGNF

SEQ ID NO: 25894 - protein, 689 aa, Homo sapiens
IWVMAISQHQFYLDRKQSKAKIPSARSLDEIAMDLTETGTQRASKLVTLETKSQFIMASNGSLISSGSQDSEVSEEQKREKILELKKKEKLLQEKLLKKVEELKKICLREAELTGKMPKEYPLNIGEKPPQVRRRVGTAFKLDDNLLPSEEDPALQELESNFLIQQKLVEAAKKLANEPDLCKTVKKKRKQDYTDAMKKLQEIENAINEYRIRCGKKPSQKATVLPEDIIPSESSSLSDTTTYDDPSDAFTFPGQRSSSVPHSPRILPPKSLGIERIHFRKSSINEQFVDTRQSREMLSTHSSPYKTLERRPQGGRSMPTTPVLTRNAYSSSHLEPESSSQHCRQRSGSLESQSHLLSEMDSDKPFFSLSKSQRSSSTEILDDGSSYTSQSSTEYYCVTPVTGPYYTTQTLDTRTRGRRRSKKQNVSTSNSGSMPNLAQKDSLRNGVYSKSQEPPSSSYYIAGYTPYAECDFYYSGGYVYENDTEGQYSVNPSYRSSAHYGYERQRDYSRSFHEDEVDRVPHNPYATLRLPRKAAAKSEHITKNIHKALVAEHLRGWYQRASGQKDQGHSPQTSFDSDRGSQRCLGFAGLQVPCSPSSRASSYSSVSSTNASGNWRTQLTIGLSDYETPAHSSYTSCYGNVYNPLPSPSRQYTEISQLDGTDGNQLEDNLESSEQRLFWHEDSKPGTLV

SEQ ID NO: 25895 - protein, 23 aa, Homo sapiens
IWGMEGMHSWAVLLVSDSPLTLQ

SEQ ID NO: 25896 - protein, 19 aa, Homo sapiens
LKKMSHSLSSWSLMKIKPN

SEQ ID NO: 25897 - protein, 100 aa, Homo sapiens
LGFGARDAAGRRAPRGVRRGGVLGTPGAAECISAVQPSACRAPSVSAARTWAGRRGVASELAARGARTALTRAAPRQAGARSSMVGSERDEPPVLHRPQR

SEQ ID NO: 25898 - protein, 13 aa, Homo sapiens
LDAKPWDMNNFHV

SEQ ID NO: 25899 - protein, 105 aa, Homo sapiens
RNNGSCPQYHPHSCTCLHGSWAHPCTSAIVSQDWNLSGSKRKQTLYKSRDGDTADCSRQGVGFFTSEILQHRPQRNASLWELWHPKIQPSVEFSGRICESHIYQG

SEQ ID NO: 25900 - protein, 15 aa, Homo sapiens
VVLRFILPSSWDCRK

SEQ ID NO: 25901 - protein, 480 aa, Homo sapiens
ISPEPAPREKEPGSIRPHCPDSRLDSVPSAPAGLRSSGARGAVVAAAPGMFHSPRRLCSALLQRDAPGLRRLPAPGLRRPLSPPAAVPRPASPRLLAAASAASGAARSCSRTVCSMGTGTSRLYSALAKTLNSSAASQHPEYLVSPDPEHLEPIDPKELLEECRAVLHTRPPRFQRDFVDLRTDCPSTHPPIRVMQWNILAQALGEGKDNFVQCPVEALKWEERKCLILEEILAYQPDILCLQEVDHYFDTFQPLLSRLGYQGTFFPKPWSPCLDVEHNNGPDGCALFFLQNRFKLVNSANIRLTAMTLKTNQVAIAQTLECKESGRQFCIAVTHLKARTGWERFRSAQGCDLLQNLQNITQGAKIPLIVCGDFNAEPTEEVYKHFASSSLNLNSAYKLLSADGQSEPPYTTWKIRTSGECRHTLDYIWYSKHALNVRSALDLLTEEQIGPNRLPSFNYPSDHLSLVCDFSFTEESDGLS

SEQ ID NO: 25902 - protein, 16 aa, Homo sapiens
LAFDYFSLLPPQCKGM

SEQ ID NO: 25903 - protein, 118 aa, Homo sapiens
VGKRAGSVCTFLEKTETKSHPHTECHSYVFAIDEVLEKVRKTQKRITKKNPKKAEKLERKKVYRAEYINFLENLKILEISEDCTYADVKALHTEITRNKDSVRQRIINIIRYSCDILS

SEQ ID NO: 25904 - protein, 27 aa, Homo sapiens
ILQTLWTVSLFNSSRKRSKKKFRHFWK

SEQ ID NO: 25905 - protein, 11 aa, Homo sapiens
ISMTLDMQMTV

SEQ ID NO: 25906 - protein, 37 aa, Homo sapiens
IQKNICLKMNHGWININQKLSMNLLCIKRKLKKSKPG

SEQ ID NO: 25907 - protein, 17 aa, Homo sapiens
LSTNPSPPRGPLFAPTR

SEQ ID NO: 25908 - protein, 209 aa, Homo sapiens
VLKMEVDINGESRSTLTTLPFPGAEANSPGKAEAEKPRCSSTPCSPMRRTVSGYQILHMDSNYLVGFTTGEELLKLAQKCTGGEESKAEAMPSLRSKQLDAGLARSSRLYKTRSRYYQPYEIPAVNGRRRRRMPSSGDKCTKSLPYEPYKALHGPLPLCLLKGKRAHSKSLDYLNLDKMIKEPADTEVLQYQLQHLTLRGDRVFARNNT

SEQ ID NO: 25909 - protein, 662 aa, Homo sapiens
LERNLQTRKKRSLESDSQDLGLEMPQPSVSGMDPPFGDAFRSHTFSEQTLMSTDLLANSSDPDFMYELDREMNYQQNPRDNFLSLEDCKDIENLESFTDVLDNEGALTSNWEQWDTYCEDLTKYTKLTSCDIWGTKEVDYLGLDDFSSPYQDEEVISKTPTLAQLNSEDSQSVSDSLYYPDSLFSVKQNPLPSSFPGKKITSRAAAPVCSSKTLQAEVPLSDCVQKASKPTSSTQIMVKTNMYHNEKVNFHVECKDYVKKAKVKINPVQQSRPLLSQIHTDAAKENTCYCGAVAKRQEKKGMEPLQGHATPALPFKETQELLLSPLPQEGPGSLAAGESSSLSASTSVSDSSQKKEEHNYSLFVSDNLGEQPTKCSPEEDEEDEEDVDDEDHDEGFGSEHELSENEEEEEEEEDYEDDKDDDISDTFSEPGYENDSVEDLKEVTSISSRKRGKRRYFWEYSEQLTPSQQERMLRPSEWNRDTLPSNMYQKNGLHHGKYAVKKSRRTDVEDLTPNPKKLLQIGNELRKLNKVISDLTPVSELPLTARPRSRKEKNKLASRACRLKKKAQYEANKVKLWGLNTEYDNLLFVINSIKQEIVNRVQNPRDERGPNMGQKLEILIKDTLGLPVAGQTSEFVNQVLEKTAEGNPTGGLVGLRIPTSKV

SEQ ID NO: 25910 - protein, 13 aa, Homo sapiens
LARLPASASQPPP

SEQ ID NO: 25911 - protein, 236 aa, Homo sapiens
VVSAMPKAKGKTRRQKFGYSVNRKRLNRNARRKAAPRIECSHIRHAWDHAKSVRQNLAEMGLAVDPNRAVPLRKRKVKAMEVDIEERPKELVRKPYVLNDLEAEASLPEKKGNTLSRDLIDYVRYMVENHGEDYKQSGKTSSILCRRGRWRWSDWFTSQLPQAEASPGPVKLEPGCKARRCCVAPEELARSHGIRRLHTHVHTPRSGEGTVLRGSNLYSSGGSRKSQNLLFSGWVM

SEQ ID NO: 25912 - protein, 6 aa, Homo sapiens
MTLFPR

SEQ ID NO: 25913 - protein, 52 aa, Homo sapiens
VLAFILLSWEPTAGGSFSGSLGGRWMGSRGPRGTGPGKRRRRRRRSRSPGEA

SEQ ID NO: 25914 - protein, 479 aa, Homo sapiens
LLLELNPPNPWDLQPRSPEELAFGEVQITYLTHACMDLKLGDKRMVFDPWLIGPAFARGWWLLHEPPSDWLERLCQADLIYISHLHSDHLSYPTLKKLAGRRPDIPIYVGNTERPVFWNLNQSGVQLTNINVVPFGIWQQVDKNLRFMILMDGVHPEMDTCIIVEYKGHKILNIVDCTRPNGGRLPMKVALMMSDFAGGASGFPMTFSGGKFTEEWKAQFIKTERKKLLNYKARLVKNLQPRIYCPFAGYFVESHPSDKYIKETNTKNDPNELNNLIKKNSDVITWTPRPGATLDLGRMLKDRTDSKGIIEPPEGTKIYKDSWDFEPYLEILNAALGDEIFLHSSWIKEYFTWAGFKDYNLVVRMIETDEDFNPFPGGYDYLVDFLDLSFPKERPQREHPYEEIHSRVDVIRHVVKNGLLWDELYIGFQTRLQRDPDIYHHLFWNHFQIKLPLTPPNWKSFLMCCEQNGPVILQECKTT

SEQ ID NO: 25915 - protein, 14 aa, Homo sapiens
VTESASPRGDRFST

SEQ ID NO: 25916 - protein, 49 aa, Homo sapiens
MCLSFTPPLSAATAAAAAAAAAAARIAAAPSLARRRYLLGQVRSSPEIL

SEQ ID NO: 25917 - protein, 135 aa, Homo sapiens
IHKLGRSNLHRMCRSQWKDTGNVKKQGSGTPPKEPSNSPATDPHPKEIQEMSYRELWKLILTKIRGIQETSEKESKEMSTAILDMVEVFTNQIQSFPEHMANVELKKSLDEIQSILESFNDRLDQAEKKLSKLKI

SEQ ID NO: 25918 - protein, 54 aa, Homo sapiens
VDPRMKPAWKIPSLETEPDRGRCTGRTLSGFSNQAAILAPQVWDFWVFSWLASC

SEQ ID NO: 25919 - protein, 59 aa, Homo sapiens
LMQMFPPSPLFFFLRLLKQNSRRLEHTFVFLRNFSQILLRYIGKKRRATRFWDPRRGTP

SEQ ID NO: 25920 - protein, 49 aa, Homo sapiens
LEGVRNFQFWAWAVGLADRPLALGLGARFSASRMRSFAVHQDLGPSGIS

SEQ ID NO: 25921 - protein, 26 aa, Homo sapiens
KNISKMMSLMKRDGTTFLRSMMGIFQ

SEQ ID NO: 25922 - protein, 25 aa, Homo sapiens
MSASKEKWKSLDICYLLPPPLKQLP

SEQ ID NO: 25923 - protein, 13 aa, Homo sapiens
TTWKLRKKMESWS

SEQ ID NO: 25924 - protein, 10 aa, Homo sapiens
LPNSRILKET

SEQ ID NO: 25925 - protein, 401 aa, Homo sapiens
LGIPASARGYAAGVWAATVGKVTSAAAPKRVSRAGAMEGQSVEELLAKAEQDEAEKLQRITVHKELELQFDLGNLLASDRNPPTGLRCAGPTPEAELQALARDNTQLLINQLWQLPTERVEEAIVARLPEPTTRLPREKPLPRPRPLTRWQQFARLKGIRPKKKTNLVWDEVSGQWRRRWGYQRARDDTKEWLIEVPGNADPLEDQFAKRIQAKKERVAKNELNRLRNLARAHKMQLPSAAGLHPTGHQSKEELGRAMQVAKVSTASVGRFQERLPKEKVPRGSGKKRKFQPLFGDFAAEKKNQLELLRVMNSKKPQLDVTRATNKQMREEDQEEAAKRRKMSQKGKRKGGRQGPGGKRKGGPPSQGGKRKGGLGGKMNSGPPGLGGKRKGGQRPGGKRRK

SEQ ID NO: 25926 - protein, 35 aa, Homo sapiens
LPGPASLKGSPCSCLDAGFFSGSGKPASRDDAPQR

SEQ ID NO: 25927 - protein, 87 aa, Homo sapiens
KEPRDRGLPAARTRHRHPRSPPAAGSQRQWIDPVLRPLSSFQFRLIFVPLRLLPAPLPPAPAPSPGTRSPPLTERSRPVALRAAVPR

SEQ ID NO: 25928 - protein, 103 aa, Homo sapiens
MTQDSYPRMPSSPSHHPPCRQRPPTSCLTGFLTIVYQVSPTWGPRVQAFSLIACLPPACSLGSPLSTFQTTLIITPLGPACSRHLRSLAGRTGLSLGPMTSLW

SEQ ID NO: 25929 - protein, 26 aa, Homo sapiens
RTMRRAPTAWAAGREAAREWGVEGPA

SEQ ID NO: 25930 - protein, 33 aa, Homo sapiens
LSPLPAFFPALSPKLPPGREKRPGAKNEPFSST

SEQ ID NO: 25931 - protein, 348 aa, Homo sapiens
LQPRALPGSSMADQAPFDTDVNTLTRFVMEEGRKARGTGELTQLLNSLCTAVKAISSAVRKAGIAHLYGIAGSTNVTGDQVKKLDVLSNDLVMNMLKSSFATCVLVSEEDKHAIIVEPEKRGKYVVCFDPLDGSSNIDCLVSVGTIFGIYRKKSTDEPSEKDALQPGRNLVAAGYALYGSATMLVLAMDCGVNCFMLDPAIGEFILVDKDVKIKKKGKIYSLNEGYARDFDPAVTEYIQRKKFPPDNSAPYGARYVGSMVADVHRTLVYGGIFLYPANKKSPNGKLRLLYECNPMAYVMEKAGGMATTGKEAVLDVIPTDIHQRAPVILGSPDDVLEFLKVYEKHSAQ

SEQ ID NO: 25932 - protein, 371 aa, Homo sapiens
RGRAVLRSAARGRRSWGSGRAMIRGFEAPMAENPPPPPPPVIFCHDSPKRVLVSVIRTTPIKPTCGGGGEPEPPPPLIPTSPGFSDFMVYPWRWGENAHNVTLSPGAAGAAASAALPAAAAAEHSGLRGRGAPPPAASASAAASGGEDEEEASSPDSGHLKDGIRRGRPRADTVRDLINEGEHSSSRIRCNICNRVFPREKSLQAHKRTHTGERPYLCDYPDCGKAFVQSGQLKTHQRLHTGEKPFVCSENGCLSRFTHANRHCPKHPYARLKREEPTDTLSKHQAADNKAAAEWLARYWEMREQRTPTLKGKLVQKADQEQQDPLEYLQSDEEDDEKRGAQRRLQEQRERLHGALALIELANLTGAPLRQ

SEQ ID NO: 25933 - protein, 40 aa, Homo sapiens
KSVFLRGLPFVRFQPQEFMVAFLNEQQNASTSSRKHKFSC

SEQ ID NO: 25934 - protein, 9 aa, Homo sapiens
KKLACSWES

SEQ ID NO: 25935 - protein, 25 aa, Homo sapiens
LAKSRRSKGAAMMLAVATVDFSQEH

SEQ ID NO: 25936 - protein, 50 aa, Homo sapiens
MCNIWKMIGIKQRRYKNSGKRMILLGENLKKRRRDPKSSYLRSSFFTHLC

SEQ ID NO: 25937 - protein, 29 aa, Homo sapiens
LKSFPSSTLEVPTMHPSASSSPTCTSQPC

SEQ ID NO: 25938 - protein, 127 aa, Homo sapiens
LGTRVFHDTLHVSGVYNGAGGDTHRAMLPSPLNVRLEAPAGMGEQLTETFALDTNTGSFLHTLEGPRFRASQCIYAHRTLPHVLAFRVSIARLAPGSGPITLLLRSAFSPESPDLDLHQGPDFQGAR

SEQ ID NO: 25939 - protein, 21 aa, Homo sapiens
LSCFGAMQPSCQPPALFLPCL

SEQ ID NO: 25940 - protein, 427 aa, Homo sapiens
KRLVAAGTTPVYHGSGPGYTLKTLRGAREAELGARWGPLAALERAEPQRRSWTTTQCISGGQLDWTGPLMPGCELPVGTCPDMCPAAERAQREREHRLHRLEVVPGCRQDPPRADPQRAVKEYSRPAAGKPRPPPSQLRPPSVLLATVRYLAGEVAESADIARAEVASFVADRLRAVLLDLALQGAGDAEAAVVLEAALATLLTVVARLGPDAARGPADPVLLQAQVQEGFGSLRRCYARGAGPHPRQPAFQGLFLLYNLGSVEALHEVLQLPAALRACPPLRKALAVDAAFREGNAARLFRLLQTLPYLPSCAVQCHVGHARREALARFARAFSTPKGQTLPLGFMVNLLALDGLREARDLCQAHGLPLDGEERVVFLRGRYVEEGLPPASTCKVLVESKLRGRTLEEVVMAEEEDEGTDRPGSPA

SEQ ID NO: 25941 - protein, 56 aa, Homo sapiens
LKRLGLSLLVHASSASGQQVTVMMSNAFAVMVDSGVGNLEMIHGFNMPSGFQGVST

SEQ ID NO: 25942 - protein, 38 aa, Homo sapiens
TMRRAQDAAVPRSAAGGAPQPPSWLRRSWLTCCGSGRG

SEQ ID NO: 25943 - protein, 62 aa, Homo sapiens
LPLSCCSPEPSPTAWPSSCMCGAERSYPVSCSSRSPAPSSSSASVPPQRPKTPSTRLMRRPF

SEQ ID NO: 25944 - protein, 493 aa, Homo sapiens
IPAVVGKGQSAEVLGGVMAVPFVEDWDLVQTLGEGAYGEVQLAVNRVTEEAVAVKIVDMKRAVDCPENIKKEICINKMLNHENVVKFYGHRREGNIQYLFLEYCSGGELFDRIEPDIGMPEPDAQRFFHQLMAGVVYLHGIGITHRDIKPENLLLDERDNLKISDFGLATVFRYNNRERLLNKMCGTLPYVAPELLKRREFHAEPVDVWSCGIVLTAMLAGELPWDQPSDSCQEYSDWKEKKTYLNPWKKIDSAPLALLHKILVENPSARITIPDIKKDRWYNKPLKKGAKRPRVTSGGVSESPSGFSKHIQSNLDFSPVNSASSEENVKYSSSQPEPRTGLSLWDTSPSYIDKLVQGISFSQPTCPDHMLLNSQLLGTPGSSQNPWQRLVKRMTRFFTKLDADKSYQCLKETCEKLGYQWKKSCMNQVTISTTDRRNNKLIFKVNLLEMDDKILVDFRLSKGDGLEFKRHFLKIKGKLIDIVSSQKIWLPAT

SEQ ID NO: 25945 - protein, 22 aa, Homo sapiens
VCTRVRMSAPVWPRDSRLAWLK

SEQ ID NO: 25946 - protein, 70 aa, Homo sapiens
LPLPGQGFGPSPVGGSRSAAWAQPTPRRRPWQAPWTWTRAARWRSCSAGASKPSMTPGRCGTRSWCACSS

SEQ ID NO: 25947 - protein, 18 aa, Homo sapiens
THAFGESRILVGSSAQAG

SEQ ID NO: 25948 - protein, 20 aa, Homo sapiens
KGHMWMSVGQTLTLRDQRAN

SEQ ID NO: 25949 - protein, 181 aa, Homo sapiens
TAAALRVSAPDPPPPHPARLCRLFQRPSLPSGRRCRCRRRRRHRARFRPRPPSAVQGPSVSAPGPRLPASPGPGPGTMSEKSVEAAAELSAKDLKEKKEKVEEKASRKERKKEVVEAPVPLVVMVGKACSQPEATPSPGPHRRRRTGLRRKKKKLPRMERRKMKGKKKMRKKKKRMMKGPR

SEQ ID NO: 25950 - protein, 62 aa, Homo sapiens
LAQAPRSGSPTSRSCARVDATQWVVWRPSTASRTWWSISRRRGLRRPQAPLSTCGSRTMPRG

SEQ ID NO: 25951 - protein, 73 aa, Homo sapiens
LAAGRSDSGGRRVWGTPQRWASWRPETTGTEVGHLFPESGLEISELPILRPSSGERVPGSQESWALPLTSWRP

SEQ ID NO: 25952 - protein, 97 aa, Homo sapiens
INDCCCKHYTGHLTKDHQSRLVFGIGDKICCTRNAYLSDLLPENISGSQQNNDLDASSEDFSGTLPDFAKNKRDFESNVRLCNGEIFFITNVSENRR

SEQ ID NO: 25953 - protein, 673 aa, Homo sapiens
ILPHTEEYVFGSTPNHIMAVFNQKSVSDMIKEFRKNWRALCNSERTTLCGADSMLLALQLSMAENNKQHSGEFTVSLSDVLLTWKYLLHEKLNLPVENMDVTDHYEDVRKIYDDFLKNSNMLDLIDVYQKCRALTSNCENYNTVSPGSTIQPPSERGSLLLSRPDLLAPGEDPPVSASLTLERQKGESLLAWSWSLNFRLPGIPITVQKKRRDLKKLAAVMRQSQLLDFLSGKQYAVGDETDLSIPTSPTSKYNRDNEKVQLLARKIIFSYLNLLVNSKNDLAVAYILNIPDRGLGREAFTDLKHAAREKQMSIFLVATSFIRTIELGGKGYAPPPSDPLRTHVKGLSNFINFIDKLDEILGEIPNPSIAGGQILSVIKMQLIKGQNSRDPFCKAIEEVAQDLDLRIKNIINSQEGVVALSTTDISPARPKSHAINHGTAYCGRDTVKALLVLLDEEAANAPTKNKAELLYDEENTIHHHGTSILTLFRSPTQVNNSIKPLRERICVSMQEKKIKMKQTLIRSQFACTYKDDYMISKDNWNNVNLASKPLCVLYMENDLSEGVNPSVGRSTIGTSFGNVHLDRSKNEKVSRKSTSQTGNKSSKRKQVDLDGENILCDNRNEPPQHKNAKIPKKSNDSQNRLYGKLAKVAKSNKCTAKDKLISGQAKLTQFFRL

SEQ ID NO: 25954 - protein, 38 aa, Homo sapiens
TGAETLLEGTPRWLRRESPRSSSNLYWLVMVVLEKRPS

SEQ ID NO: 25955 - protein, 32 aa, Homo sapiens
VVAAAEELVCGAERPMDEEDAAAPVCSHEQDG

SEQ ID NO: 25956 - protein, 915 aa, Homo sapiens
RKAGMEVNCLTLKDLISPRQPRLDFAVEDGENAQKENIFVDRSRMAPKTPIKNEPIDLSKQKKFTPERNPITPVKFVDRQQAEPWTPTANLKMLISAASPDIRDREKKKGLFRPIENKDDAFTDSLQLDVVGDSAVDEFEKQRPSRKQKSLGLLCQKFLARYPSYPLSTEKTTISLDEVAVSLGVERRRIYDIVNVLESLHLVSRVAKNQYGWHGRHSLPKTLRNLQRLGEEQKYEEQMAYLQQKELDLIDYKFGERKKDGDPDSQEQQLLDFSEPDCPSSSANSRKDKSLRIMSQKFVMLFLVSKTKIVTLDVAAKILIEESQDAPDHSKFKTKVRRLYDIANVLTSLALIKKVHVTEERGRKPAFKWIGPVDFSSSDEELVDVSASVLPELKRETYGQIQVCAKQKLARHGSFNTVQASERIQRKVNSEPSSPYREEQGSGGYSLEIGSLAAVYRQKIEDNSQGKAFASKRVVPPSSSLDPVAPFPVLSVDPEYCVNPLAHPVFSVAQTDLQAFSMQNGLNGQVDVSLASAASAVESLKPALLAGQPLVYVPSASLFMLYGSLQEGPASGSGSERDDRSSEAPATVELSSAPSAQKRLCEERKPQEEDEPATKRQSREYEDGPLSLVMPKKPSDSTDLASPKTMGNRASIPLKDIHVNGQLPAAEEISGKATANSLVSSEWGNPSRNTDVEKPSKENESTKEPSLLQYLCVQSPAGLNGFNVLLSGSQTPPTVGPSSGQLPSFSVPCMVLPSPPLGPFPVLYSPAMPGPVSSTLGALPNTGPVNFSLPGLGSIAQLLVGPTAVVNPKSSTLPSADPQLQSQPSLNLSPVMSRSHSVVQQPESPVYVGHPVSVVKLHQSPVPVTPKSIQRTHRETFFKTPGSLGDPVLKRRERNQSRNTSSAQRRLEIPSGGAD

SEQ ID NO: 25957 - protein, 970 aa, Homo sapiens
LESKQRGPCAMSRLIVKNLPNGMKEERFRQLFAAFGTLTDCSLKFTKDGKFRKFGFIGFKSEEEAQKAQKHFNKSFIDTSRITVEFCKSFGDPAKPRAWSKHAQKPSQPKQPPKDSTTPEIKKDEKKKKVAGQLEKLKEDTEFQEFLSVHQRRAQAATWANDGLDAEPSKGKSKPASDYLNFDSDSGQESEEEGAGEDLEEEASLEPKAAVQKELSDMDYLKSKMVKAGSSSSSEEEESEDEAVHCDEGSEAEEEDSSATPVLQERDSKGAGQEQGMPAGKKRPPEARAETEKPANQKEPTTCHTVKLRGAPFNVTEKNVMEFLAPLKPVAIRIVRNAHGNKTGYIFVDFSNEEEVKQALKCNREYMGGRYIEVFREKNVPTTKGAPKNTTKSWQGRILGENEEEEDLAESGRLFVRNLPYTSTEEDLEKLFSKYGPLSELHYPIDSLTKKPKGFAFITFMFPEHAVKAYSEVDGQVFQGRMLHVLPSTIKKEASEDASALGSSSYKKKKEAQDKANSASSHNWNTLFMGPNAVADAIAQKYNATKSQVFDHETKGSVAVRVALGETQLVQEVRRFLIDNGVSLDSFSQAAAERSKTVILVKNLPAGTLAAQLQETFGHFGSLGRVLLPEGGITAIVEFLEPLEARKAFRHLAYSKFHHVPLYLEWAPVGVFSSTAPQKKKLQDTPSEPMEKDPAEPETVPDGETPEDENPTEEGADNSSAKMEEEEEEEEEEEESLPGCTLFIKNLNFDTTEEKLKEVFSKVGTVKSCSISKKKNKAGVLLSMGFGFVEYRKPEQAQKALKQLQGHVVDGHKLEVRISERATKPAVTLARKKQVPRKQTTSKILVRNIPFQAHSREIRELFSTFGELKTVRLPKKMTGTGTHRGFGFVDFLTKQDAKRAFNALCHSTHLYGRRLVLEWADSEVTLQALRRKTAAHFHEPPKKKRSVVLDEILEQLEGSDSDSEEQTLQL

SEQ ID NO: 25958 - protein, 9 aa, Homo sapiens
LRAGTCWTR

SEQ ID NO: 25959 - protein, 48 aa, Homo sapiens
MSEDIVICRRTKSKLQICIDLCMMRCLVIDQMLLNPLIHRFYRKHVLH

SEQ ID NO: 25960 - protein, 491 aa, Homo sapiens
KMNLAEICDNAKKGREYALLGNYDSSMVYYQGVMQQIQRHCQSVRDPAIKGKWQQVRQELLEEYEQVKSIVSTLESFKIDKPPDFPVSCQDEPFRDPAVWPPPVPAEHRAPPQIRRPNREVRPLRKEMAGVGARGPVGRAHPISKSEKPSTSRDKDYRARGRDDKGRKNMQDGASDGEMPKFDGAGYDKDLVEALERDIVSRNPSIHWDDIADLEEAKKLLREAVVLPMWMPDFFKGIRRPWKGVLMVGPPGTGKTMLAKAVATECGTTFFNVSSSTLTSKYRGESEKLVRLLFEMARFYAPTTIFIDEIDSICSRRGTSDEHEASRRVKSELLIQMDGVGGALENDDPSKMVMVLAATNFPWDIDEALRRRLEKRIYIPLPTAKGRAELLKINLREVELDPDIQLEDIAEKIEGYSGADITNVCRDASLMAMRRRINGLSPEEIRALSKEELQMPVTKGDFELALKKIAKSVSAADLEKYEKWMVEFGSA

SEQ ID NO: 25961 - protein, 121 aa, Homo sapiens
TAVGCPRPLLPSRVKLKIPFGNKLLDAVCLVPNKSLTYGIILTHGASGDMNLPHLMSLASHLASHGFFCLRFTCKGLNIVHRIKAYKSVLNYLKTSGEYKLAGVFLGELVGESGTENASSP

SEQ ID NO: 25962 - protein, 26 aa, Homo sapiens
ISGQPACARTPMAAPGGGKEEVSKPA

SEQ ID NO: 25963 - protein, 21 aa, Homo sapiens
MKSLLKMNRLQFIYHGYLCHE

SEQ ID NO: 25964 - protein, 102 aa, Homo sapiens
ILFSSRTAAAPCPPTSHLLEIALHALCRPPLMPPHPPPGGPHAAHHPLPQCCPCSPAAQPSPLCSLLLPPPLPVLCPPLPQCLPPTSHPMPQVPQTIRTSRP

SEQ ID NO: 25965 - protein, 34 aa, Homo sapiens
LGSKANPIPTHWSSALIFNLPSPPFQNTHIPFQN

SEQ ID NO: 25966 - protein, 28 aa, Homo sapiens
LRQSLPARLFIQGFCGSLLKFYLKIALK

SEQ ID NO: 25967 - protein, 25 aa, Homo sapiens
LANHDREVLMDELLMKDCQQLLYWK

SEQ ID NO: 25968 - protein, 61 aa, Homo sapiens
MRSWPSELGSRTCSTSATTTAPSNSTPIARHPGRTKGYNSDDNLCEPSLEFEVPNHRQYGG

SEQ ID NO: 25969 - protein, 73 aa, Homo sapiens
MRPAGLRRDNWERRGTRPFRGTPGRGHLLMKFPVPVSAAVELPWQCGGRALVVLVSWEVAGLGRAGIRLSQLR

SEQ ID NO: 25970 - protein, 336 aa, Homo sapiens
IPKRRPPTPCAALLAGPVRKRVVELRTTPAGSRRQIPSPESCEKLSLVPDAAAARVPWQPQVSEPRATLPAPRLRARVDRSLSGCTLGIPDLDSAGEMPLGHIMRLDLEKIALEYIVPCLHEVGFCYLDNFLGEVVGDCVLERVKQLHCTGALRDGQLAGPRAGVSKRHLRGDQITWIGGNEEGCEAISFLLSLIDRLVLYCGSRLGKYYVKERSKAMVACYPGNGTGYVRHVDNPNGDGRCITCIYYLNKNWDAKLHGGILRIFPEGKSFIADVEPIFDRLLFFWSDRRNPHEVQPSYATRYAMTVWYFDAEERAEAKKKFRNLTRKTESALTED

SEQ ID NO: 25971 - protein, 23 aa, Homo sapiens
LVGLLWSTLWTEKHRGYRTQLLP

SEQ ID NO: 25972 - protein, 14 aa, Homo sapiens
VPMITQYHLWRKLL

SEQ ID NO: 25973 - protein, 837 aa, Homo sapiens
LLPVLTSRSLRQPAVPHARLGGVEPAAMKSARAKTPRKPTVKKGSQTNLKDPVGVYCRVRPLGFPDQECCIEVINNTTVQLHTPEGYRLNRNGDYKETQYSFKQVFGTHTTQKELFDVVANPLVNDLIHGKNGLLFTYGVTGSGKTHTMTGSPGEGGLLPRCLDMIFNSIGSFQAKRYVFKSNDRNSMDIQCEVDALLERQKREAMPNPKTSSSKRQVDPEFADMITVQEFCKAEEVDEDSVYGVFVSYIEIYNNYIYDLLEEVPFDPIKPKWNSCSTPMRNTDFVPPQSKLLREDKNHNMYVAGCTEVEVKSTEEAFEVFWRGQKKRRIANTHLNRESSRSHSVFNIKLVQAPLDADGDNVLQEKEQITISQLSLVDLAGSERTNRTRAEGNRLREAGNINQSLMTLRTCMDVLRENQMYGTNKMVPYRDSKLTHLFKNYFDGEGKVRMIVCVNPKAEDYEENLQVMRFAEVTQEVEVARPVDKAICGLTPGRRYRNQPRGPVGNEPLVTDVVLQSFPPLPSCEILDINDEQTLPRLIEALEKRHNLRQMMIDEFNKQSNAFKALLQEFDNAVLSKENHMQGKLNEKEKMISGQKLEIERLEKKNKTLEYKIEILEKTTTIYEEDKRNLQQELETQNQKLQRQFSDKRRLEARLQGMVTETTMKWEKECLLFQPDQNAPPIRLRHRRSRSAGDRWVDHKPASNMQTETVMQPHVPHAITVSVANEKALAKCEKYMLTHQELASDGEIETKLIKGDIYKTRGGGQSVQFTDIETLKQESPNGSRKRRSSTVAPAQPDGAESEWTDVETRCSVAVEMRAGSQLGPGYQHHAQPKRKKP

SEQ ID NO: 25974 - protein, 30 aa, Homo sapiens
MYLNLAPSMMFCLTQYGSCWKLLYEIVMAF

SEQ ID NO: 25975 - protein, 47 aa, Homo sapiens
IDLEGLGERAETSSSSARDLPPGCLGSRWTLLEVSWIQISLSKILLA

SEQ ID NO: 25976 - protein, 53 aa, Homo sapiens
KQLPSEALTGQHIQPDPTSSGMGWVTAKGPDAGVVRSHFLRDTLIIEYLYTFL

SEQ ID NO: 25977 - protein, 30 aa, Homo sapiens
LPPPGLPCHLVPTCPLLPAGSGPHPIFIWP

SEQ ID NO: 25978 - protein, 266 aa, Homo sapiens
IILRSCKINRDYSFLDYILGGCQLMFTVGIDFTASNGNPLDPSSLHYINPMGTNEYLSAIWAVGQIIQDYDSDKMFPALGFGAQLPPDWKVSHEFAINFNPTNPFCSGVDGIAQAYSACLPHIRFYGPTNFSPIVNHVARFAAQATQQRTATQYFILLIITDGVISDMEETRHAVVQASKLPMSIIIVGVGNADFAAMEFLDGDSRMLRSHTGEEAARDIVQFVPFREFRNAAKETLAKAVLAELPQQVVQYFKHKNLPPTNSEPA

SEQ ID NO: 25979 - protein, 440 aa, Homo sapiens
VGTRAARRRQDGGRMCDRNGGRRLRQWLIEQIDSSMYPGLIWENEEKSMFRIPWKHAGKQDYNQEVDASIFKAWAVFKGKFKEGDKAEPATWKTRLRCALNKSPDFEEVTDRSQLDISEPYKVYRIVPEEEQKCKLGVATAGCVNEVTEMECGRSEIDELIKEPSVDDYMGMIKRSPSPPEACRSQLLPDWWAQQPSTGVPLVTGYTTYDAHHSAFSQMVISFYYGGKLVGQATTTCPEGCRLSLSQPGLPGTKLYGPEGLELVRFPPADAIPSERQRQVTRKLFGHLERGVLLHSSRQGVFVKRLCQGRVFCSGNAVVCKGRPNKLERDEVVQVFDTSQFFRELQQFYNSQGRLPDGRVVLCFGEEFPDMAPLRSKLILVQIEQLYVRQLAEEAGKSCGAGSVMQAPEEPPPDQVFRMFPDICASHQRSFFRENQQITV

SEQ ID NO: 25980 - protein, 85 aa, Homo sapiens
LDMSSAPRRWWKHPLSCACGRLCREEAADTGDDILPHETGLQPGMVPLKYLLEEGVWGAGVGCGVFPAISTAYDHCNNLSPSEEH

SEQ ID NO: 25981 - protein, 768 aa, Homo sapiens
LEVIPDSMRKQEVRTGREAGQGHGTGSPAEQVKALMDLLAGKGSQGSQAPQALDRTPDAPLGPCSNDSRIQRHRKALLSKVGGGPELGGPWHRLASLLLVEGLTDLQLREHDFTQVEATRGGGHPARTVALDRLFLPLSRVSVPPRVSITIGVAGMGKTTLVRHFVRLWAHGQVGKDFSLVLPLTFRDLNTHEKLCADRLICSVFPHVGEPSLAVAVPARALLILDGLDECRTPLDFSNTVACTDPKKEIPVDHLITNIIRGNLFPEVSIWITSRPSASGQIPGGLVDRMTEIRGFNEEEIKVCLEQMFPEDQALLGWMLSQVQADRALYLMCTVPAFCRLTGMALGHLWRSRTGPQDAELWPPRTLCELYSWYFRMALSGEGQEKGKASPRIEQVAHGGRKMVGTLGRLAFHGLLKKKYVFYEQDMKAFGVDLALLQGAPCSCFLQREETLASSVAYCFTHLSLQEFVAAAYYYGASRRAIFDLFTESGVSWPRLGFLTHFRSAAQRAMQAEDGRLDVFLRFLSGLLSPRVNALLAGSLLAQGEHQAYRTQVAELLQGCLRPDAAVCARAINVLHCLHELQHTELARSVEEAMESGALARLTGPAHRAALAYLLQVSDACAQEANLSLSLSQGVLQSLLPQLLYCRKLRLDTNQFQDPVMELLGSVLSGKDCRIQKISLAENQISNKGAKALARSLLVNRSLTSLDLRGNSIGPQGAKALADALKINRTLTSLRVKFMYHKIDCFRRVPEADACNPSTLGGQGRWIT

SEQ ID NO: 25982 - protein, 343 aa, Homo sapiens
LRTMCAQYCISFADVEKAHINIRDSIHLTPVLTSSILNQLTGRNLFFKCELFQKTGSFKIRGALNAVRSLVPDALERKPKAVVTHSSGNHGQALTYAAKLEGIPAYIVVPQTAPDCKKLAIQAYGASIVYCEPSDESRENVAKRVTEETEGIMVHPNQEPAVIAGQGTIALEVLNQVPLVDALVVPVGGGGMLAGIAITVKALKPSVKVYAAEPSNADDCYQSKLKGKLMPNLYPPETIADGVKSSIGLNTWPIIRDLVDDIFTVTEDEIKCATQLVWERMKLLIEPTAGVGVAAVLSQHFQTVSPEVKNICIVLSGGNVDLTSSITWVKQAERPASYQSVSV

SEQ ID NO: 25983 - protein, 234 aa, Homo sapiens
KSSLEFHKANECQERPVECKFCKLDMQLSKLELHESYCGSRTELCQGCGQFIMHRMLAQHRDVCRSEQAQLGKGERISAPEREIYCHYCNQMIPENKYFHHMGKCCPDSEFKKHFPVGNPEILPSSLPSQAAENQTSTMEKDVRPKTRSINRFPLHSESSSKKAPRSKNKTLDPLLMSEPKPRTSSPRGDKAAYDILRRCSQCGILLPLPILNQHQVLSLCSLLTFLGTIRTVS

SEQ ID NO: 25984 - protein, 482 aa, Homo sapiens
LAPLARAGRSPAMPGFDYKFLEKPKRRLLCPLCGKPMREPVQVSTCGHRFCDTCLQEFLSEGVFKCPEDQLPLDYAKIYPDPELEVQVLGLPIRCIHSEEGCRWSGPLRHLQGHLNTCSFNVIPCPNRCPMKLSRRDLPAHLQHDCPKRRLKCEFCGCDFSGEAYESHEGMCPQESVYCENKCGARMMRRLLAQHATSECPKRTQPCTYCTKEFVFDTIQSHQYQCPRLPVACPNQCGVGTVAREDLPGHLKDSCNTALVLCPFKDSGCKHRCPKLAMARHVEESVKPHLAMMCALVSRQRQELQELRRELEELSVGSDGVLIWKIGSYGRRLQEAKAKPNLECFSPAFYTHKYGYKLQVSAFLNGNGSGEGTHLSLYIRVLPGAFDNLLEWPFARRVTFSLLDQSDPGLAKPQHVTETFHPDPNWKNFQKPGTWRGSLDESSLGFGYPKFISHQDIRKRNYVRDDAVFIRAAVELPRKILS

SEQ ID NO: 25985 - protein, 618 aa, Homo sapiens
KRAMAVYVGMLRLGRLCAGSSGVLGARAALSRSWQEARLQGVRFLSSREVDRMVSTPIGGLSYVQGCTKKHLNSKTVGQCLETTAQRVPEREALVVLHEDVRLTFAQLKEEVDKAASGLLSIGLCKGDRLGMWGPNSYAWVLMQLATAQAGIILVSVNPAYQAMELEYVLKKVGCKALVFPKQFKTQQYYNVLKQICPEVENAQPGALKSQRLPDLTTVISVDAPLPGTLLLDEVVAAGSTRQHLDQLQYNQQFLSCHDPINIQFTSGTTGSPKGATLSHYNIVNNSNILGERLKLHEKTPEQLRMILPNPLYHCLGSVAGTMMCLMYGATLILASPIFNGKKALEAISRERGTFLYGTPTMFVDILNQPDFSSYDISTMCGGVIAGSPAPPELIRAIINKINMKDLVVAYGTTENSPVTFAHFPEDTVEQKAESVGRIMPHTEARIMNMEAGTLAKLNTPGELCIRGYCVMLGYWGEPQKTEEAVDQDKWYWTGDVATMNEQGFCKIVGRSKDMIIRGGENIYPAELEDFFHTHPKVQEVQVVGVKDDRMGEEICACIRLKDGEETTVEEIKAFCKGKISHFKIPKYIVFVTNYPLTISGKIQKFKLREQMERHLNL

SEQ ID NO: 25986 - protein, 21 aa, Homo sapiens
RRGRQAADSANIICPRLKNSS

SEQ ID NO: 25987 - protein, 22 aa, Homo sapiens
TASSLRPLVMMRPFFVWHLQRR

SEQ ID NO: 25988 - protein, 42 aa, Homo sapiens
MMVQSASVSKAGKGSSSSHGVAAALNQDLDPDPKCHVFNVSK

SEQ ID NO: 25989 - protein, 41 aa, Homo sapiens
VTRSVAFVQKRYPSNKPCVKESGKPHLKSSTMWTTLKLLRI

SEQ ID NO: 25990 - protein, 60 aa, Homo sapiens
LLRRCGQEDAGGRLLGGTLSFTPVCCHGCRALVLMAPGGTYRMPRAERKWEWRRCDIPRC

SEQ ID NO: 25991 - protein, 27 aa, Homo sapiens
VKLSTKSHGNNGVKKIVSWVFVTYKLS

SEQ ID NO: 25992 - protein, 570 aa, Homo sapiens
RSRASQMAELDLMAPGPLPRATAQPPAPLSPDSGSPSPDSGSASPVEEEDVGSSEKLGRETEEQDSDSAEQGDPAGEGKEVLCDFCLDDTRRVKAVKSCLTCMVNYCEEHLQPHQVNIKLQSHLLTEPVKDHNWRYCPAHHSPLSAFCCPDQQCICQDCCQEHSGHTIVSLDAARRDKEAELQCTQLDLERKLKLNENAISRLQANQKSVLVSVSEVKAVAEMQFGELLAAVRKAQANVMLFLEEKEQAALSQANGIKAHLEYRSAEMEKSKQELERMAAISNTVQFLEEYCKFKNTEDITFPSVYVGLKDKLSGIRKVITESTVHLIQLLENYKKKLQEFSKEEEYDIRTQVSAVVQRKYWTSKPEPSTREQFLQYAYDITFDPDTAHKYLRLQEENRKVTNTTPWEHPYPDLPSRFLHWRQVLSQQSLYLHRYYFEVEIFGAGTYVGLTCKGIDRKGEERNSCISGNNFSWSLQWNGKEFTAWYSDMETPLKAGPFRRLGVYIDFPGGILSFYGVEYDTMTLVHKFACKFSEPVYAAFWLSKKENAIRIVDLGEEPEKPAPSLVGTAP

SEQ ID NO: 25993 - protein, 32 aa, Homo sapiens
ISCAERSKSRPTCTIPTSCVSTTIFMTGGGST

SEQ ID NO: 25994 - protein, 68 aa, Homo sapiens
RTTSTCGFFWKNLSASGNSLTLQSIPFSHQRKVTEAVPHLSPELEGDCFHGTELAAPPAKAKPNQEWG

SEQ ID NO: 25995 - protein, 278 aa, Homo sapiens
LLVRNIAITGNLEVETPFCHPSVPRAAANPPAGLQDPGLTERPHRSRRPRARYAPGIMGEKSRRKGPAPRHADGKLGRTCDHPYAPWSFTPSSRAPTAWVRPPCPVWASRLQEHSPEPRRARAPPTRRAQAALYAPALRLRDHLDRFSILMTSCTSWLQAPQAPGLCRDEQSSRISVPQLSGAPILLPDLEGTKLSNFQESSPLPHKHERKDKRSTPEEEGRSAPEKIIQSLKLCPGGHRPASLSSGCPAGCRLSFNLPPSMLLSVQKCCMPSSLKTC

SEQ ID NO: 25996 - protein, 10 aa, Homo sapiens
MLGCYFGNSP

SEQ ID NO: 25997 - protein, 48 aa, Homo sapiens; identical to SEQ ID NO: 25630

SEQ ID NO: 25998 - protein, 43 aa, Homo sapiens
TAWGLEGHIFSAPRISATASTARRPTVVQRWGARAAFPSRVPD

SEQ ID NO: 25999 - protein, 230 aa, Homo sapiens
LAPCAMVTHSKFPAAGMSRPLDTSLRLKTFSSKSEYQLVVNAVRKLQESGFYWSAVTGGEANLLLSAEPAGTFLIRDSSDQRHFFTLSVKTQSGTKNLRIQCEGGSFSLQSDPRSTQPVPRFDCVLKLVHHYMPPPGAPSFPSPPTEPSSEVPEQPSAQPLPGSPPRRAYYIYSGGEKIPLVLSRPLSSNVATLQHLCRKTVNGHLDSYEKVTQLPGPIREFLDQYDAPL

SEQ ID NO: 26000 - protein, 52 aa, Homo sapiens
TETAVSAAGDPAASSLLLPDGLERLKGWPRQIWNNYALMLMKRLAILRKPYH

SEQ ID NO: 26001 - protein, 75 aa, Homo sapiens
IEVPSLPVNLPINPWMIQERIFMSTIQPSLADQRLEFKLILDMSALVMTLMYSCMDLYAIFFHYPRSTLDTSCLN

SEQ ID NO: 26002 - protein, 61 aa, Homo sapiens
MRFRKGQGVARSRTARLQPDRCPDLSVPSPAQSHHGLLDTADAAALEEFHVSPETAGNAPV

SEQ ID NO: 26003 - protein, 110 aa, Homo sapiens
LNTRSAGRRSRRPGTVPRGSCKRRSPTCARPSRVTCSAARTTTRLASSWPRRRRSRLAARREQAARPPRPWTSGGGWRRRPRTRRRKLWPPTAPAWPTRRRRSRSWRIPR

SEQ ID NO: 26004 - protein, 25 aa, Homo sapiens
RELGAGGNDARKAIAPERATGAREA

SEQ ID NO: 26005 - protein, 26 aa, Homo sapiens
TLCCRALPPSLPLLPPYLTSFSEEDP

SEQ ID NO: 26006 - protein, 28 aa, Homo sapiens
IPVVDLMQDAARPRARLSPRHLRQPEIL

SEQ ID NO: 26007 - protein, 136 aa, Homo sapiens
IPVAVCISCLCPHVCPQVRFSEKVTVHFLAVWAGPAQAARQGPWEQLARDRSRFARRITQAQEELSPCLTPAARARAWARLRNPPLAPIPALTQTLPSSSVPSSPVQTTPLSQAVATPSRSSAAAAAALDLSGRRG

SEQ ID NO: 26008 - protein, 7 aa, Homo sapiens
KMRRRKS

SEQ ID NO: 26009 - protein, 32 aa, Homo sapiens
KTNFSYCKLSTTASSSNVTSWPVRSQRCSVTM

SEQ ID NO: 26010 - protein, 52 aa, Homo sapiens
LRRQPSSGLGSGSGSLASAPAPLGYPRPRPAAPPALGRPDAGLGRGRSPGLA

SEQ ID NO: 26011 - protein, 1120 aa, Homo sapiens
LNLHLHHDPFRSLQEPRHQPPTMGSKERFHWQSHNVKQSGVDDMVLLPQITEDAIAANLRKRFMDDYIFTYIGSVLISVNPFKQMPYFTDREIDLYQGAAQYENPPHIYALTDNMYRNMLIDCENQCVIISGESGAGKTVAAKYIMGYISKVSGGGEKVQHVKDIILQSNPLLEAFGNAKTVRNNNSSRFGKYFEIQFSRGGEPDGGKISNFLLEKSRVVMQNENERNFHIYYQLLEGASQEQRQNLGLMTPDYYYYLNQSDTYQVDGTDDRSDFGETLSAMQVIGIPPSIQQLVLQLVAGILHLGNISFCEDGNYARVESVDLLAFPAYLLGIDSGRLQEKLTSRKMDSRWGGRSESINVTLNVEQAAYTRDALAKGLYARLFDFLVEAINRAMQKPQEEYSIGVLDIYGFEIFQKNGFEQFCINFVNEKLQQIFIELTLKAEQEEYVQEGIRWTPIQYFNNKVVCDLIENKLSPPGIMSVLDDVCATMHATGGGADQTLLQKLQAAVGTHEHFNSWSAGFVIHHYAGKVSYDVSGFCERNRDVLFSDLIELMQTSEQAFLRMLFPEKLDGDKKGRPSTAGSKIKKQANDLVATLMRCTPHYIRCIKPNETKRPRDWEENRVKHQVEYLGLKENIRVRRAGFAYRRQFAKFLQRYAILTPETWPRWRGDERQGVQHLLRAVNMEPDQYQMGSTKVFVKNPESLFLLEEVRERKFDGFARTIQKAWRRHVAVRKYEEMREEASNILLNKKERRRNSINRNFVGDYLGLEERPELRQFLGKRERVDFADSVTKYDRRFKPIKRDLILTPKCVYVIGREKVKKGPEKGQVCEVLKKKVDIQALRGVSLSTRQDDFFILQEDAADSFLESVFKTEFVSLLCKRFEEATRRPLPLTFSDTLQFRVKKEGWGGGGTRSVTFSRGFGDLAVLKVGGRTLTVSVGDGLPKSSKPTRKGMAKGKPRRSSQAPTRAAPAPPRGMDRNGVPPSARGGPLPLEIMSGGGTHRPPRGPPSTSLGASRRPRARPPSEHNTEFLNVPDQGMAGMQRKRSVGQRPVPGVGRPKPQPRTHGPRCRALYQYVGQDVDELSFNVNEVIEILMEDPSGWWKGRLHGQEGLFPGNYVEKI

SEQ ID NO: 26012 - protein, 32 aa, Homo sapiens
MTICRARAVWKWTTACRRWSSGCSYRKTSWRS

SEQ ID NO: 26013 - protein, 80 aa, Homo sapiens
LQTSAIWGHSTSWSQGPHVPPRETLVFPAPRAKEPGRSELPAFGHLAHGAEQRSLSAQPGEFKHSSFQEPRNFSAVNSQL

SEQ ID NO: 26014 - protein, 193 aa, Homo sapiens
THPASPSAFSAPGKPHPPEAKMSSKRAKAKTTKKRPQRATSNVFAMFDQSQIQEFKEAFNMIDQNRDGFIDKEDLHDMLASLGKNPTDEYLEGMMSEAPGPINFTMFLTMFGEKLNGTDPEDVIRNAFACFDEEASGFIHEDHLRELLTTMGDRFTDEEVDEMYREAPIDKKGNFNYVEFTRILKHGAKDKDD

SEQ ID NO: 26015 - protein, 171 aa, Homo sapiens
LKRVAVVEDFFDIIYSMHVESSAEPGKAPKHAGQKKTYRAIAETYAFLPREAVTRFLMSCTECQKRMHFNSNGLEPKENEPPSPLVSGIIDYNMPLTSTYLKQMKLRVMNSQEQDETSVSSEDFDMSDSTWMSADPHLASSLSPSQDERMRSPQNLHSQEDGGVCLQGPTA

SEQ ID NO: 26016 - protein, 531 aa, Homo sapiens
LFSESCVGGCDRAESLCGADGEAFSITWPFAISLAMTTFFTSVPPWIQDAKQEEEVGWKLVPRPRGREAESQVKCQCEISGTPFSNGEKLRPHSLPQPEQRPYSCPQLHCGKAFASKYKLYRHMATHSAQKPHQCMYCDKMFHRKDHLRNHLQTHDPNKEALHCSECGKNYNTKLGYRRHLAMHAASSGDLSCKVCLQTFESTQALLEHLKAHSRRVAGGAKEKKHPCDHCDRRFYTRKDVRRHLVVHTGRKDFLCQYCAQRFGRKDHLTRHVKKSHSQELLKIKTEPVDMLGLLSCSSTVSVKEELSPVLCMASRDVMGTKAFPGMLPMGMYGAHIPTMPSTGVPHSLVHNTLPMGMSYPLESSPISSPAQLPPKYQLGSTSYLPDKLPKVEVDSFLAELPGSLSLSSAEPQPASPQPAAAAALLDEALLAKSPANLSEALCAANVDFSHLLGFLPLNLPPCNPPGATGGLVMGYSQAEAQPLLTTLQAQPQDSPGAGGPLNFGPLHSLPPVFTSGLSSTTLPRFHQAFQ

SEQ ID NO: 26017 - protein, 21 aa, Homo sapiens
LQTDAELPKPTPSLSLKILPG

SEQ ID NO: 26018 - protein, 70 aa, Homo sapiens
TCNIRWFQFLGGKNLKLHFLSIKNRSNYSLNKMMTLKFPPMKTSSGMKRRMKSIQEMTVMGQSLLRSAHG

SEQ ID NO: 26019 - protein, 692 aa, Homo sapiens
KLANMADLEAVLADVSYLMAMEKSKATPAARASKRIVLPEPSIRSVMQKYLAERNEITFDKIFNQKIGFLLFKDFCLNEINEAVPQVKFYEEIKEYEKLDNEEDRLCRSRQIYDAYIMKELLSCSHPFSKQAVEHVQSHLSKKQVTSTLFQPYIEEICESLRGDIFQKFMESDKFTRFCQWKNVELNIHLTMNEFSVHRIIGRGGFGEVYGCRKADTGKMYAMKCLDKKRIKMKQGETLALNERIMLSLVSTGDCPFIVCMTYAFHTPDKLCFILDLMNGGDLHYHLSQHGVFSEKEMRFYATEIILGLEHMHNRFVVYRDLKPANILLDEHGHARISDLGLACDFSKKKPHASVGTHGYMAPEVLQKGTAYDSSADWFSLGCMLFKLLRGHSPFRQHKTKDKHEIDRMTLTVNVELPDTFSPELKSLLEGLLQRDVSKRLGCHGGGSQEVKEHSFFKGVDWQHVYLQKYPPPLIPPRGEVNAADAFDIGSFDEEDTKGIKLLDCDQELYKNFPLVISERWQQEVTETVYEAVNADTDKIEARKRAKNKQLGHEEDYALGKDCIMHGYMLKLGNPFLTQWQRRYFYLFPNRLEWRGEGESRQNLLTMEQILSVEETQIKDKKCILFRIKGGKQFVLQCESDPEFVQWKKELNETFKEAQRLLRRAPKFLNKPRSGTVELPKPSLCHRNSNGL

SEQ ID NO: 26020 - protein, 12 aa, Homo sapiens
VALRPVQQLQGG

SEQ ID NO: 26021 - protein, 360 aa, Homo sapiens
RLNMNPQIRNPMERMYRDTFYDNFENEPILYGRSYTWLCYEVKIKRGRSNLLWDTGVFRGQVYFKPQYHAEMCFLSWFCGNQLPAYKCFQITWFVSWTPCPDCVAKLAEFLSEHPNVTLTISAARLYYYWERDYRRALCRLSQAGARVTIMDYEEFAYCWENFVYNEGQQFMPWYKFDENYAFLHRTLKEILRYLMDPDTFTFNFNNDPLVLRRRQTYLCYEVERLDNGTWVLMDQHMGFLCNELDPAQIYRVTWFISWSPCFSWGCAGEVRAFLQENTHVRLRIFAARIYDYDPLYKEALQMLRDAGAQVSIMTYDEFEYCWDTFVYRQGCPFQPWDGLEEHSQALSGRLRAILQNQGN

SEQ ID NO: 26022 - protein, 167 aa, Homo sapiens
ITTVTRDSSTGFADCRTQRHACTSCLLRNLNTVEKTVYKRDVPCQPCKGQRENYPSPVTKLQEARSQEGKPLSLQNVASTSLMAETAHCTLKPALPTASEINCCNSGTHDAYHSGSSMEPAGSQPFLGPMNSLKRGTEIFLLFVKSLTFPLFFMYTLNCNSSSQIKH

SEQ ID NO: 26023 - protein, 71 aa, Homo sapiens
IPTPAGPAQDALAQAWGCWGWNVELQPQPIWQSPRNSETGTAALSASAVCCHVTHPKHLLAAGSIPQDPKP

SEQ ID NO: 26024 - protein, 150 aa, Homo sapiens
VQQAGVCGPGMQFILLQEILPPLCPGEHQCFSSGNSARLGEKESSIKEDPQPARFSDVSATGARSSGGTLHRAPGPACARDAAELGAAMPGLVSGPLGAALQPRGAGVQLGAATGPGSCSKRVVQRQMPDKTQPGTRPGPPTCPSGPRPE

SEQ ID NO: 26025 - protein, 533 aa, Homo sapiens
VDRCARTLNPTVPTRGRGRVPGLGSGASGRGQRPKQAADPGRVRHPRRPGAMAALMTPGTGAPPAPGDFSGEGSQGLPDPSPEPKQLPELIRMKRDGGRLSEADIRGFVAAVVNGSAQGAQIGAMLMAIRLRGMDLEETSVLTQALAQSGQQLEWPEAWRQQLVDKHSTGGVGDKVSLVLAPALAACGCKVPMISGRGLGHTGGTLDKLESIPGFNVIQSPEQMQVLLDQAGCCIVGQSEQLVPADGILYAARDVTATVDSLPLITASILSKKLVEGLSALVVDVKFGGAAVFPNQEQARELAKTLVGVGASLGLRVAAALTAMDKPLGRCVGHALEVEEALLCMDGAGPPDLRDLVTTLGGALLWLSGHAGTQAQGAARVAAALDDGSALGRFERMLAAQGVDPGLARALCSGSPAERRQLLPRAREQEELLAPADGTVELVRALPLALVLHELGAGRSRAGEPLRLGVGAELLVDVGQRLRRGTPWLRVHRDGPALSGPQSRALQEALVLSDRAPFAAPSPFAELVLPPQQ

SEQ ID NO: 26026 - protein, 33 aa, Homo sapiens
IMINEDTALLVLPCTILPMTRGLASYCILRTSS

SEQ ID NO: 26027 - protein, 28 aa, Homo sapiens
RRRRRRVAAGLGFGSLRSWRRRDPGNRH

SEQ ID NO: 26028 - protein, 1866 aa, Homo sapiens
MNISSRDNAMPVFLLRNCAGHLSGSLRTIGAVAVGQLGVRVFHSSPAASSLDFIGGPAILLGLISLATDDHTMYAAVKVLHSVLTSNAMCDFLMQHICGYQIMAFLLRKKASLLNHRIFQLILSVAGTVELGFRSSAITNTGVFQHILCNFELWMNTADNLELSLFSHLLEILQSPREGPRNAEAAHQAQLIPKLIFLFNEPSLIPSKISTIIGILACQLRGHFSTQDLLRIGLFVVYTLKPSSVNERQICMDGALDPSLPAGSQTSGKTIWLRNQLLEMLLSVISSPQLHLSSESKEEMFLKLGPDWFLLLLQGHLHASTTVLALKLLLYFLASPSLRTRFRDGLCAGSWVERSTEGVDIVMDNLKSQSPLPEQSPCLLPGFRVLNDFLAHHVHIPEVYLIVSTFFLQTPLTELMDGPKDSLDAMLQWLLQRHHQEEVLQAGLCTEGALLLLEMLKATMSQPLAGSEDGAWAQTFPASVLQFLSLVHRTYPQDPAWRAPEFLQTLAIAAFPLGAQKGVGAESTRNTSSPEAAAEGDSTVEGLQAPTKAHPARRKLREFTQLLLRELLLGASSPKQWLPLEVLLEASPDHATSQQKRDFQSEVLLSAMELFHMTSGGDAAMFRDGKEPQPSAEAAAAPSLANISCFTQKLVEKLYSGMFSADPRHILLFILEHIMVVIETASSQRDTVLSTLYSSLNKVILYCLSKPQQSLSECLGLLSILGFLQEHWDVVFATYNSNISFLLCLMHCLLLLNERSYPEGFGLEPKPRMSTYHQVFLSPNEDVKEKREDLPSLSDVQHNIQKTVQTLWQQLVAQRQQTLEDAFKIDLSVKPGEREVKIEEVTPLWEETMLKAWQHYLASEKKSLASRSNVAHHSKVTLWSGSLSSAMKLMPGRQAKDPECKTEDFVSCIENYRRRGQELYASLYKDHVQRRKCGNIKAANAWARIQEQLFGELGLWSQGEETKPCSPWELDWREGPARMRKRIKRLSPLEALSSGRHKESQDKNDHISQTNAENQDELTLREAEGEPDEVGVDCTQLTFFPALHESLHSEDFLELCRERQVILQELLDKEKVTQKFSLVIVQGHLVSEGVLLFGHQHFYICENFTLSPTGDVYCTRHCLSNISDPFIFNLCSKDRSTDHYSCQCHSYADMRELRQARFLLQDIALEIFFHNGYSKFLVFYNNDRSKAFKSFCSFQPSLKGKATSEDTLSLRRYPGSDRIMLQKWQKRDISNFEYLMYLNTAAGRTCNDYMQYPVFPWVLADYTSETLNLANPKIFRDLSKPMGAQTKERKLKFIQRFKEVEKTEGDMTVQCHYYTHYSSAIIVASYLVRMPPFTQAFCALQGGSFDVADRMFHSVKSTWESASRENMSDVRELTPEFFYLPEFLTNCNGVEFGCMQDGTVLGDVQLPPWADGDPRKFISLHRKALESDFVSANLHHWIDLIFGYKQQGPAAVDAVNIFHPYFYGDRMDLSSITDPLIKSTILGFVSNFGQVPKQLFTKPHPARTAAGKPLPGKDVSTPVSLPGHPQPFFYSLQSLRPSQVTVKDMYLFSLGSESPKGAIGHIVSTEKTILAVERNKVLLPPLWNRTFSWGFDDFSCCLGSYGSDKVLMTFENLAAWGRCLCAVCPSPTTIVTSGTSTVVCVWELSMTKGRPRGLRLRQALYGHTQAVTCLAASVTFSLLVSGSQDCTCILWDLDHLTHVTRLPAHREGISAITISDVSGTIVSCAGAHLSLWNVNGQPLASITTAWGPEGAITCCCLMEGPAWDTSQIIITGSQDGMVRVWKTEDVKMSVPGRPAGEEPPAQPPSPRGHKWEKNLALSRELDVSIALTGKPSKTSPAVTALAVSRNHTKLLVGDERGRIFCWSADG

SEQ ID NO: 26029 - protein, 1041 aa, Homo sapiens
MTYLTSIPSLQDAGIGFILVIDRRRDKWTSVKASVLRIAASFPANLQLVLVLRPTGFFQRTLSDIAFKFNRDDFKMKVPVIMLSSVPDLHGYIDKSQLTEDLGGTLDYCHSRWLCQRTAIESFALMVKQTAQMLQSFGTELAETELPNDVQSTSSVLCAHTEKKDKAKEDLRLALKEGHSVLESLRELQAEGSEPSVNQDQLDNQATVQRLLAQLNETEAAFDEFWAKHQQKLEQCLQLRHFEQGFREVKAILDAASQKIATFTDIGNSLAHVEHLLRDLASFEEKSGVAVERARALSLDGEQLIGNKHYAVDSIRPKCQELRHLCDQFSAEIARRRGLLSKSLELHRRLETSMKWCDEGIYLLASQPVDKCQSQDGAEAALQEIEKFLETGAENKIQELNAIYKEYESILNQDLMEHVRKVFQKQASMEEVFHRRQASLKKLAARQTRPVQPVAPRPEALAKSPCPSPGIRRGSENSSSEGGALRRGPYRRAKSEMSESRQGRGSAGEEEESLAILRRHVMSELLDTERAYVEELLCVLEGYAAEMDNPLMAHLLSTGLHNKKDVLFGNMEEIYHFHNRIFLRELENYTDCPELVGRCFLERMEDFQIYEKYCQNKPRSESLWRQCSDCPFFQECQRKLDHKLSLDSYLLKPVQRITKYQLLLKEMLKYSRNCEGAEDLQEALSSILGILKAVNDSMHLIAITGYDGNLGDLGKLLMQGSFSVWTDHKRGHTKVKELARFKPMQRHLFLHEKAVLFCKKREENGEGYEKAPSYSYKQSLNMAAVGITENVKGDAKKFEIWYNAREEVYIVQAPTPEIKAAWVNEIRKVLTSQLQACREASQHRALEQSQSLPLPAPTSTSPSRGNSRNIKKLEERKTDPLSLEGYVSSAPLTKPPEKGKGWSKTSHSLEAPEDDGGWSSAEEQINSSDAEEDGGLGPKKLVPGKYTVVADHEKGGPDALRVRSGDVVELVQEGDEGLWYVRDPTTGKEGWVPASSLSVRLGPSGSAQCLSSSESSPGSAVLSNSSSCSEGGQAPFSDLQG

SEQ ID NO: 26030 - protein, 84 aa, Homo sapiens
MSIRVTLAGQREAKQEGRRLSSCEPMRPAGLRRDNWERRGTRPFRGTPGRGHLLMKFPVPVSAAVELPWQCDSLIPGKSEEQAT

SEQ ID NO: 26031 - protein, 157 aa, Homo sapiens
MVASDMMVLLKTFFSCHKEFQTVPFYIFSESYGGKMAAGIGLELYKAIQRGTIKCNFAGVALGDSWISPVDSVLSWGPYLYSMSLLEDKGLAEVSKVAEQVLNAVNKGLYREATELWGKAEMIIEQVKRGNTQRRACLAFSGGYRAHGWCCQTWSLH

SEQ ID NO: 26032 - protein, 34 aa, Homo sapiens
MIDPRTKALVLNGKPGHLQFYSLQSDKQLYNVRF

SEQ ID NO: 26033 - protein, 178 aa, Homo sapiens
MNLGARKSKKLGKLKGIHEEQPQQQQPPPPPPPPQSPEEGTTYIAPAKEPSVNTALVPQLSTISRALTPSPVMVLENIEPEIVYAGYDSSKPDTAENLLSTLNRLAGKQMIQVVKWAKVLPGFKNLPLEDQITLIQYSWMCLSSFALSWRSYKHTNSQFLYFAPDLVFNELLARVREG

SEQ ID NO: 26034 - protein, 35 aa, Homo sapiens
MGNCIPIQGSIGSSNKSGKTYYKFVAVIQVRGDTG

SEQ ID NO: 26035 - protein, 670 aa, Homo sapiens
MGETLLHRACIEGQLRRVQDLVRQGHPLNPRDYCGWTPLHEACNYGHLEIVRFLLDHGAAVDDPGGQGCEGITPLHDALNCGHFEVAELLLERGASVTLRTRKGLSPLETLQQWVKLYRRDLDLETRQKARAMEMLLQAAASGQDPHSSQAFHTPSSLLFDPETSPPLSPCPEPPSNSTRLPEASQAHVRVSPGQAAPAMARPRRSRHGPASSSSSSEGEDSAGPARPSQKRPRCSATAQRVAAWTPGPASNREAATASTSRAAYQAAIRGVGSAQSRLGPGPPRGHSKALAPQAALIPEEECLAGDWLELDMPLTRSRRPRPRGTGDNRRPSSTSGSDSEESRPRARAKQVRLTCMQSCSAPVNAGPSSLASEPPGSPSTPRVSEPSGDSSAAGQPLGPAPPPPIRVRVQVQDHLFLIPVPHSSDTHSVAWLAEQAAQRYYQTCGLLPRLTLRKEGALLAPQDLIPDVLQSNDEVLAEVTSWDLPPLTDRYRRACQSLGQGEHQQVLQAVELQGLGLSFSACSLALDQAQLTPLLRALKLHTALRELRLAGNRLGDKCVAELVAALGTMPSLALLDLSSNHLGPEGLRQLAMGLPGQATLQSLEELDLSMNPLGDGCGQSLASLLHACPLLSTLRLQACGFGPSFFLSHQTALGSAFQGELTRHSLSTP

SEQ ID NO: 26036 - protein, 68 aa, Homo sapiens [sequence omitted]

SEQ ID NO: 26037 - protein, 136 aa, Homo sapiens
LAMGRSRRTGAHRAHSLARQMKAKRRRPDLDEIHRELRPQGSARPQPDPNAEFDPDLPGGGLHRCLACARYFIDSTNLKTHFRSKDHKKRLKQLSVEPYSQEEAERAAGMGSYVPPRRLAVPTEVSTEVPEMDTST

SEQ ID NO: 26038 - protein, 89 aa, Homo sapiens
LSAAKGHRPGTARGGKVAPGAEAAERSPRRRPDWLPRNCGDSPYSELGLRFPGLSPSPEAPTKPGKEGKDSGGSSSMSAYSRKPERARS

SEQ ID NO: 26039 - protein, 12 aa, Homo sapiens
MLTSWKHVSTAC

SEQ ID NO: 26040 - protein, 71 aa, Homo sapiens
VFKEKKCPCVCRDDLQFSPAEADRMRLWAVPPPSMLPLFKMKRKPRKGKTTRTEMCLAMSIGSNQWKRSNT

SEQ ID NO: 26041 - protein, 170 aa, Homo sapiens
KFLQENDQSLLNFSDSDSSEEEEGPFHSLPDVLEEASEEEDGAEEGEDGDRVPRGLKGKKNSVPVTVAMVERWKQAAKQRLTPKLFHEVVQAFRAAVATTRGDQESAEANKFQVTDSAAFNALVTFCIRDLIGCLQKLLFGKVAKDSSSKCGPKETSLRQLVVPGRPQRC

SEQ ID NO: 26042 - protein, 24 aa, Homo sapiens
LWEDLPPHRLQQGSVSGGLRPYCL

SEQ ID NO: 26043 - protein, 45 aa, Homo sapiens
RPQCLLTVSPACKTWVFCWTSWPRRTRTSGCCRPSCRPKRKSFRA

SEQ ID NO: 26044 - protein, 41 aa, Homo sapiens
TLRGVGDFLLHLDSISGNNRAPPRSVNYRKCQVGNLPMVKW

SEQ ID NO: 26045 - protein, 228 aa, Homo sapiens
TTELMASSTPSSSATSSNAGADPNTTNLRPTTYDTWCGVAHGCTRKLGLKICGFLQRTNSLEEKSRLVSAFKERQSSKNLLSCENSDRDARFRRTETDFSNLFARDLLPAKNGEEQTVQFLLEVVDILLNYVRKTFDRSTKVLDFHHPHQLLEGMEGFNLELSDHPESLEQILVDCRDTLKYGVRTGHPRFFNQLSTGLDIIGLAGEWLTSTANTNMPSDMRECWLLR

SEQ ID NO: 26046 - protein, 11 aa, Homo sapiens
INMMLPIPLKF

SEQ ID NO: 26047 - protein, 334 aa, Homo sapiens
TLLLFKHQKGVFLSQLLGEFSWLTEEILLRGFDVGFSGQLRSLLQHSLSLLRAHVALLRIRQGDLLVVPQPGPGLTHLAQLSAELLPVFLSEAVGACAVRGLLAGRVPPQGPWELQGILLLSQNELYRQILLLMHLLPQDLLLLKPCQSSYCYCQEVLDRLIQCGLLVAEETPGSRPACDTGRQRLSRKLLWKPSGDFTDSDSDDFGEADGRYFRLSQQSHCPDFFLFLCRLLSPLLKAFAQAAAFLRQGQLPDTELGYTEQLFQFLQATAQEEGIFECADPKLAISAVWTFRDLGVLQQTPSPAGPRLHLSPTFASLDNQEKLEQFIRQFICS

SEQ ID NO: 26048 - protein, 54 aa, Homo sapiens
LACLTEACEGGWCPLPSSVSRCPAPAPAARVRRSRGRSWTRRKIMLKRDMEYLQ

SEQ ID NO: 26049 - protein, 20 aa, Homo sapiens
IFITSKDQPHTQRNSPAADI

SEQ ID NO: 26050 - protein, 61 aa, Homo sapiens
MKAYTAITICMKVSPSLAPKKASRHLGSSSCPHCIPWFLYLVCLEILWWFWSCSNTSGSGP

SEQ ID NO: 26051 - protein, 84 aa, Homo sapiens
LMSDNSFLCLQAYNGNTALHVAASLQYRLTQLDAVRLLMRKGADPSTRNLENEQPVHLVPDGPVGEQIRRILKGKSIQQRAPPY

SEQ ID NO: 26052 - protein, 95 aa, Homo sapiens
ISTVPQSLSRDRKQSLISQLQEKSWEYRSWKTLLIATSQIPRVPMYSVLLKREWLKKKKMKKGMKNQPSLMGQGSQMHFPSSKQKIVITCFPRWT

SEQ ID NO: 26053 - protein, 21 aa, Homo sapiens
LSHKAREIARCYWTPLSSCQR

SEQ ID NO: 26054 - protein, 82 aa, Homo sapiens
MPRARKGNTLRKGGQRRGGGARSSAQADSGSSDDEAASEARSTASECPSLLSTTAEDSLGESGWKFDRGLVRAPWAEDKKRC

SEQ ID NO: 26055 - protein, 99 aa, Homo sapiens
KHGPNRAMSGEPELIELRELAPAGRAGKGRTRLERANALRIARGTACNPTRQLVPGRGHRFQPAGPATHTWCDLCGDFIWGVVRKGLQCARRACGVGDT

SEQ ID NO: 26056 - protein, 79 aa, Homo sapiens
VLGTPGAAECISAVQPSACRAPSVSAARTWAGRRGVASELAARGARTALTRAAPRQAGARSSMVGSERDEPPVLHRPQR

SEQ ID NO: 26057 - protein, 45 aa, Homo sapiens
IFVIGFEWLHLTRRPTNFVTSRLVKMKMNQSRRTRQRLPLQGFAY

SEQ ID NO: 26058 - protein, 12 aa, Homo sapiens
KKSKCGTSLASD

SEQ ID NO: 26059 - protein, 87 aa, Homo sapiens
IDEVLEKVRKTQKRITKKNPKKAEKLERKKVYRAEYINFLENLKILEISEDCTYADVKALHTEITRNKDSVRQRIINIIRYSCDILS

SEQ ID NO: 26060 - protein, 650 aa, Homo sapiens
LESDSQDLGLEMPQPSVSGMDPPFGDAFRSHTFSEQTLMSTDLLANSSDPDFMYELDREMNYQQNPRDNFLSLEDCKDIENLESFTDVLDNEGALTSNWEQWDTYCEDLTKYTKLTSCDIWGTKEVDYLGLDDFSSPYQDEEVISKTPTLAQLNSEDSQSVSDSLYYPDSLFSVKQNPLPSSFPGKKITSRAAAPVCSSKTLQAEVPLSDCVQKASKPTSSTQIMVKTNMYHNEKVNFHVECKDYVKKAKVKINPVQQSRPLLSQIHTDAAKENTCYCGAVAKRQEKKGMEPLQGHATPALPFKETQELLLSPLPQEGPGSLAAGESSSLSASTSVSDSSQKKEEHNYSLFVSDNLGEQPTKCSPEEDEEDEEDVDDEDHDEGFGSEHELSENEEEEEEEEDYEDDKDDDISDTFSEPGYENDSVEDLKEVTSISSRKRGKRRYFWEYSEQLTPSQQERMLRPSEWNRDTLPSNMYQKNGLHHGKYAVKKSRRTDVEDLTPNPKKLLQIGNELRKLNKVISDLTPVSELPLTARPRSRKEKNKLASRACRLKKKAQYEANKVKLWGLNTEYDNLLFVINSIKQEIVNRVQNPRDERGPNMGQKLEILIKDTLGLPVAGQTSEFVNQVLEKTAEGNPTGGLVGLRIPTSKV

SEQ ID NO: 26061 - protein, 31 aa, Homo sapiens
KMADDPSAADRNVEIWKIKKLIKSLEAARGR

SEQ ID NO: 26062 - protein, 45 aa, Homo sapiens
RANTLFTDLNISSRPRETVGSSTPSPPPGTGLFSLHNRPRSDLAG

SEQ ID NO: 26063 - protein, 54 aa, Homo sapiens
VWLQRSWPGPMESEGYTHVHTPRSGEGTVLRGSNLYSSGGSRKSQNLLFSGWVM

SEQ ID NO: 26064 - protein, 45 aa, Homo sapiens
MMEKRKSSWSVLRSSQCQPVMRRMKYPPQNPAEGRKPRVVMFLQP

SEQ ID NO: 26065 - protein, 87 aa, Homo sapiens
KSTRAGGRRAGGVAGWDRGSHLPKMQDGSRAAAVQPFLPHHGLHLPAPAQRAPGHPAGPGEFCGMPACCSVCCFLVSHLLTSWYNQL

SEQ ID NO: 26066 - protein, 47 aa, Homo sapiens
ILQRSHGRTAAPVRRPHGRGRPQLLLRRGPQYQGFSIAADHATSEGS

SEQ ID NO: 26067 - protein, 33 aa, Homo sapiens
IFYRRGGKHLGCSSALTQIMIINISLSDQRLYL

SEQ ID NO: 26068 - protein, 27 aa, Homo sapiens
LREIGLKRLSPRWREKRNSSVSSLLVA

SEQ ID NO: 26069 - protein, 117 aa, Homo sapiens
LWTTICQLLSFRRLGGAVATSAFSVSDGVNGGGGWDAAAGLAAGGWVGAGPGDGEGDRRQPLVHAADRLRLHPQPGLPDPSGRRPPGPAARRGEKSSIHFLPNSIPWACHSIWEKSN

SEQ ID NO: 26070 - protein, 30 aa, Homo sapiens
LVCCATGLEGELGPAPGEIRLCRSKSNLRM

SEQ ID NO: 26071 - protein, 68 aa, Homo sapiens
IFCPCTENRKKRIYIRRQTRITFLHNSFHVFCLWTEPHICTSNICFSGPCFSCSTVANTSLTSGPKSS

SEQ ID NO: 26072 - protein, 65 aa, Homo sapiens
ISGLLAASRACLVATETSPARLRGHFITIQKCLPLKASVVVFKPQKSHTQDHLTPTLTSVHDAGP

SEQ ID NO: 26073 - protein, 68 aa, Homo sapiens
LRSCLGQSPPVTVRGGGKDKRARSSSLATPVGFLGAGRSWVGRLPGPWLGRPCPHPPSSWRRSCRSSA

SEQ ID NO: 26074 - protein, 41 aa, Homo sapiens
LAQTLMWRALAGWPSGRAVPGCSLTLANLDLRLTCCGSGRG

SEQ ID NO: 26075 - protein, 138 aa, Homo sapiens
TAPMPAANMMENRPLPALQVPEPQGAPEGSPVWSSSSTPTLRRRRFKMRRMKNVQEQSLEAGLARDLPAVLAPGKEFLQLPSIEITPSSDEDTPWSNCSTPSASPRRKRFLLRKWLRVRERKECSESSSSLRIFTAQS

SEQ ID NO: 26076 - protein, 43 aa, Homo sapiens
VTRQEKMATVWDEAEMELGRRCSRCPRRRSSSAHGCWTVRSRS

SEQ ID NO: 26077 - protein, 7 aa, Homo sapiens
LFKTKSN

SEQ ID NO: 26078 - protein, 55 aa, Homo sapiens
KNMFPCLSDTSLLDEARKIYMKILKIHIADFMEWTSCISTEKQQHNNTKILGTLK

SEQ ID NO: 26079 - protein, 34 aa, Homo sapiens
KKKRGKNQDLITRATDRLQTPVSMESRGLSPGSS

SEQ ID NO: 26080 - protein, 37 aa, Homo sapiens
KMTRGETMEEYMLAYHLKLSIWCPVKQRRFGKKKITS

SEQ ID NO: 26081 - protein, 17 aa, Homo sapiens
ILVADIWSSYNMADIDK

SEQ ID NO: 26082 - protein, 8 aa, Homo sapiens
LLLMQRSL

SEQ ID NO: 26083 - protein, 725 aa, Homo sapiens
VQLNFSAMASELEEVKRCMERKDKEKAHLASQVENLTRELENGEKQQLQMLDRLKEIQNHFDTCEAERKHADLQISELTRHAEDATKQAERYLSELQQSEALKEEAEKRREDLKLKAQESIRQWKLKHKKLERALEKQSETVDELTGKNNQILKEKDELKTQLYAALQQIENLRKELNDVLTKRALQEEELHSKEEKLRDIKSHQADLELEVKNSLDTIHRLESELKKQSKIQSQMKVEKAHLEEEIAELKKSQAQDKAKLLEMQESIKDLSAIRADLANKLAEEERAKKAVLKDLSDLTAQAKSRDEETATIITQLKLERDVHQRELKDLTSSLQSVKTKHEQNIQELMKHFKKEKSEAENHIRTLKAESLEEKNMAKIHRGQLEKLKSQCDRLTEELTQNENENKKLKLKYQCLKDQLEEREKHISIEEEHLRRMEEARLQLKDQLLCLETEQESILGVIGKEIDAACKTFSKDSVEKLKVFSSGPDIHYDPHRWLAESKTKLQWLCEELKERENREKNLRHQLMLCRQQLRNLTENKESELQCLFQQIERQEQLLDEIHREKRDLLEETQRKDEEMGSLQDRVIALETSTQVALDHLESVPEKLSLLEDFKDFRDSCSSSERTDGRYSKYRVRRNSLQHHQDDTKYRTKSFKGDRTFLEGSHTRGLDHSSSWQDHSRFLSSPRFSYVNSFTKRTVAPDSASNKEDATMNGTSSQPKKEEYGS

SEQ ID NO: 26084 - protein, 83 aa, Homo sapiens
IDSAGSAQTIFASLSSLNSTRAMCNSRITIHLNRAKVGYMESTCGPSAQGWILFCSLIAKHCLIWNKSSWVIPISPYHMSTTS

SEQ ID NO: 26085 - protein, 493 aa, Homo sapiens
KKERIADVKKMWEEYPDVYGVRRSNRSRQEPSRFNIKEEASSGSESGSPKRRGQRQLKKQEKWKQEPSEDEQEQGTSAESEPEQKKVKARRPVPRRTVPKPRVKKQPKTQRGKRKKQDSSDEDDDDDEAPKRQTRRRAAKNVSYKEDDDFETDSDDLIEMTGEGVDEQQDNSETIEKVLDSRLGKKGATGASTTVYAIEANGDPSGDFDTEKDEGEIQYLIKWKGWSYIHSTWESEESLQQQKVKGLKKLENFKKKEDEIKQWLGKVSPEDVEYFNCQQELASELNKQYQIVERVIAVKTSKSTLGQTDFPAHSRKPAPSNEPEYLCKWMGLPYSECSWEDEALIGKKFQNCIDSFHSRNNSKTIPTRECKALKQRPRFVALKKQPAYLGGENLELRDYQLEGLNWLAHSWCKNNSVILADEMGLGKTIQTISFLSYLFHQHQLYGPFLIVVPLSTLTSWQREFEIWAPEINVVVYIGDLMSRNTVCKQKELG

SEQ ID NO: 26086 - protein, 43 aa, Homo sapiens
KSMTSRWRSRICGWRTMGVTAVRSLTGWRMKAVWWSWSCGVRC

SEQ ID NO: 26087 - protein, 192 aa, Homo sapiens
VAELQGALDACAQRQLQLEQSLRVCRRLLHAWEPTGTRALKPPPGPETNGEDPLPACTPSPQDLKELEFLTQALEKAVRVRRGITKAGERDKAPSLKSRSIVTSSGTTASAPPHSPGQAGGHASDTRPTKGLRQTTVPAKGHPERRLLSVGDGTRVGMGARTPRPGAGLRDQQMAPSAAPQAPEAFTLKEKG

SEQ ID NO: 26088 - protein, 107 aa, Homo sapiens
IPGPTRPSGATLALRDPPLTPPRTSRDPHTHPSPPADPSLLGAGCPPPSPGPDLLPQVPGAAPARPPSNPAGGPGWGAPCGCGSGFWRCCFCCWHRPRAPRSPRRRT

SEQ ID NO: 26089 - protein, 89 aa, Homo sapiens [sequence omitted]

SEQ ID NO: 26090 - protein, 47 aa, Homo sapiens
RTWACRTPELGQSSSQRRPERFGDAGGSDGRELGAAAAEARGRKVCV

SEQ ID NO: 26091 - protein, 48 aa, Homo sapiens
KQDTLVDLHVLPLFNTLMPEAMVDTKGGFPTIRMHLLCFEIATMDSYG

SEQ ID NO: 26092 - protein, 18 aa, Homo sapiens
IPTSCVSTTIFMTGGGST

SEQ ID NO: 26093 - protein, 349 aa, Homo sapiens
LDDLFSFMQKRGTPVNRIPIMAKQVLDLFMLYVLVTEKGGLVEVINKKLWREITKGLNLPTSITSAAFTLRTQYMKYLYPYECEKRGLSNPNELQAAIDSNRREGRRQSFGGSLFAYSPGGAHGMLSSPKLPVSSLGLAASTNGSSITPAPKIKKEEDSAIPITVPGRLPVSLAGHPVVAAQAAAVQAAAAQAAVAAQAAALEQLREKLESAEPPEKKMALVADEQQRLMQRALQQNFLAMAAQLPMSIRINSQASESRQDSAVNLTGTNGSNSISMSVEINGIMYTGVLFAQPPAPTPTSAPNKGGGGGGGSSSNAGGRGGNTGTSGGQAGPAGLSTPSTSTSNNSLP

SEQ ID NO: 26094 - protein, 95 aa, Homo sapiens
VPRGSCKRRSPTCARPSRVTCSAARTTTRLASSWPRRRRSRLAARREQAARPPRPWTSGGGWRRRPRTRRRKLWPPTAPAWPTRRRRSRSWRIPR

SEQ ID NO: 26095 - protein, 40 aa, Homo sapiens
TARSWSSCRRPRPTTSATSSSSTCVSFPSRSSPSASTTSS

SEQ ID NO: 26096 - protein, 17 aa, Homo sapiens
VMPSPWLDRNSSMPARS

SEQ ID NO: 26097 - protein, 37 aa, Homo sapiens
VTGIYWTQRTGPGTAWLQRVSLDDDDDDATTPAPVCD

SEQ ID NO: 26098 - protein, 100 aa, Homo sapiens
LPAPAALCPVRPGLEPTPPPSCRPCPRAMGCGGSRCSSPTSGTVRAKRRKLRESTRNWPTSAPSSKETKPWMATVRKNMCVNCFSSSCLAMTLTLGTWRL

SEQ ID NO: 26099 - protein, 118 aa, Homo sapiens
TGERPYECSECGKFFRYNSNLIKHWRNHTGERPYECRECGKAFSHKHILVEHQKIHSGERPYECSECQKAFIRKSHLVHHQKIHSEERLVCSMNVGNSLAKTPTSLNIRDFTMEKVYH

SEQ ID NO: 26100 - protein, 106 aa, Homo sapiens
RIYQIYNDHNKIIQEKLQEFTQKMAKISHLETELKQVCHSVETVYKDLCLQPEQSLRLRWGPDHSRGKSPPRPGNSQPPDVFVSSVAETTSQATASEVQTNRDGEC

SEQ ID NO: 26101 - protein, 91 aa, Homo sapiens
THAAYTDSPYSCPASAAENFLPPDFYPPSDPGQPCPFPQGMEAGPWRVSAPPSGPPQFPAVVPGPSLEVARAHMLALGPQQLLAQDEEGDT

SEQ ID NO: 26102 - protein, 19 aa, Homo sapiens
LCLEVPLSRPPRWGLDDAS

SEQ ID NO: 26103 - protein, 19 aa, Homo sapiens
IPSVAVRRLNQGPEKVEES

SEQ ID NO: 26104 - protein, 19 aa, Homo sapiens
TAEVHLPAPSAVRAARPGF

SEQ ID NO: 26105 - protein, 42 aa, Homo sapiens
LMSYKTLMNHDGYTDIKYRQLSRWATDASSNRVKDRTRSKLL

SEQ ID NO: 26106 - protein, 42 aa, Homo sapiens
IWIQILNVLKTPSIICLISGISQKKNYSHSLTPKYQNILQNG

SEQ ID NO: 26107 - protein, 40 aa, Homo sapiens
LSLLALPTQQRRPPARNGLPGASSSSFPKLNCPVSDSDFS

SEQ ID NO: 26108 - protein, 511 aa, Homo sapiens
LGSGASGRGQRPKQAADPGRVRHPRRPGAMAALMTPGTGAPPAPGDFSGEGSQGLPDPSPEPKQLPELIRMKRDGGRLSEADIRGFVAAVVNGSAQGAQIGAMLMAIRLRGMDLEETSVLTQALAQSGQQLEWPEAWRQQLVDKHSTGGVGDKVSLVLAPALAACGCKVPMISGRGLGHTGGTLDKLESIPGFNVIQSPEQMQVLLDQAGCCIVGQSEQLVPADGILYAARDVTATVDSLPLITASILSKKLVEGLSALVVDVKFGGAAVFPNQEQARELAKTLVGVGASLGLRVAAALTAMDKPLGRCVGHALEVEEALLCMDGAGPPDLRDLVTTLGGALLWLSGHAGTQAQGAARVAAALDDGSALGRFERMLAAQGVDPGLARALCSGSPAERRQLLPRAREQEELLAPADGTVELVRALPLALVLHELGAGRSRAGEPLRLGVGAELLVDVGQRLRRGTPWLRVHRDGPALSGPQSRALQEALVLSDRAPFAAPSPFAELVLPPQQ

SEQ ID NO: 26109 - protein, 32 aa, Homo sapiens
MVVSIYPMPFLTMKTRNPLQSPRNPVLGMTLT

SEQ ID NO: 26110 - protein, 205 aa, Homo sapiens
LLTDFRLQFICAPASSLSLRRLRLRPQKEISILCPEQNRMAMSQESLTFKDVFVDFTLEEWQQLDSAQKNLYRDVMLENYSHLVSVGYLVAKPDVIFRLGPGEESWMADGGTPVRTCAEVWQVDEQIDHYKESQDKLPWQAAFIGKETLKDESGQESRTCRKSIYLSTEFDSVRQRLPKYYSWEKAFKTSFKLSWSKWKLCKKER

SEQ ID NO: 26111 - protein, 86 aa, Homo sapiens
MDWQGRLPWAGCTGSASCATLTARKSQIPASVRSSSWRWQSSWSQKAGRMQVMSTSALMTVGWLPKEIQKADFRQTLSAFLMGFAS

SEQ ID NO: 26112 - protein, 207 aa, Homo sapiens
VTYEVTPLESLPFNSSWSACLALGSFCSLRPAPSLRAGLQRRAQPSAACQQPPSRPAAQPRTKPGQSFLAARAMNTEMYQTPMEVAVYQLHNFSISFFSSLLGGDVVSVKLDNSASGASVVAIDNKIEQAMDLVKNHLMYAVREEVEILKEQIRELVEKNSQLERENTLLKTLASPEQLEKFQSCLSPEEPAPESPQVPEAPGGSAV

SEQ ID NO: 26113 - protein, 37 aa, Homo sapiens
TVAPTHTLQSPRELIFSPQRAPPYPAPPTGPPFPPAC

SEQ ID NO: 26114 - protein, 47 aa, Homo sapiens
MSTPCYCRAPRLRGGTLSCWRGPAPRCSWSPSFATAPATPRSNRSAS

SEQ ID NO: 26115 - protein, 18 aa, Homo sapiens
MLRLPFQVVLRIRVVVIH

SEQ ID NO: 26116 - protein, 25 aa, Homo sapiens
MMTSLTWGCSLCPGGLLCAAFCGTV

SEQ ID NO: 26117 - protein, 22 aa, Homo sapiens
MECTKVDRKVAGHDSVQFAGSL

SEQ ID NO: 26118 - protein, 32 aa, Homo sapiens
MTMMSLFGAPRAGFIKLNMQWKLLNKVQPQLV

SEQ ID NO: 26119 - protein, 67 aa, Homo sapiens
MGTGFGPSPVGGSRSAAWAQPTPRRRPWQAPWTWTRAARWRSCSAGASKPSMTPGRCGTRSWCACSS

SEQ ID NO: 26120 - protein, 140 aa, Homo sapiens
MPPAEPFSWPPTSSCAPRAGLAAGAARCCSSPRCPRTTTTRTRMSRPRRPPPARPPRPGPTRAPRHRRLGPGRAARNLRAASRSSTAATSWCRRRTESTRPRRATISTRSTNRRARPTASARLAPATCPSTPRSPSSSSA

SEQ ID NO: 26121 - protein, 77 aa, Homo sapiens
MVLGRWRRKPEAWALSGSWGPRLAVRCCCAPRCWRRAAPWACAWAAGRGRRTAGRSSGSATTRWCTSRWKALLSTCL

SEQ ID NO: 26122 - protein, 152 aa, Homo sapiens
MTSDRPRPPRSFPERDQNRWNPGWSRSSGGAGGGTSLQVGGSLGLATQRSSALPPGARSRLSSPHHFSLQTVPQAPGVPASVAVAPECPSEPRGACPPAPRRGPARHLGRRRTDAGTSTRSRLLDLGTLTRFLWGTAEDYFEFRWSPVVWHI

SEQ ID NO: 26123 - protein, 38 aa, Homo sapiens
MRWPQNKLPASKDSVSELPGRAARSLGPGQKENSGSMF

SEQ ID NO: 26124 - protein, 20 aa, Homo sapiens
MQTTHTGLKYRTFLRKPSPS

SEQ ID NO: 26125 - protein, 48 aa, Homo sapiens
MNKEKQIESYQISAFISLNIFFGISKAKLLNFFFFFFFFRYQHQDDLW

SEQ ID NO: 26126 - protein, 72 aa, Homo sapiens [sequence omitted]

SEQ ID NO: 26127 - protein, 25 aa, Homo sapiens
MEPLAEARESTCSYGTQQGRRGFVA

SEQ ID NO: 26128 - protein, 107 aa, Homo sapiens
MDPRAPPPAPVPPPSPSPSIRPATLVELTLGCNVALVGWDTREEDQRLTETWLCLQPALVGQPRAWLPIMWPHPIKGRRRNAGLEAPGARWQEGDSFLSCVYSVQFL

SEQ ID NO: 26129 - protein, 52 aa, Homo sapiens
MEPGHPHSSCPADAGLVEGGRQQEQCFLGLCSQSWPCCSLRLPAAQTSSWSS

SEQ ID NO: 26130 - protein, 42 aa, Homo sapiens
MEGHICQSLESAKAGTRFPGPQWGCANPRELVKSSPLAGSQE

SEQ ID NO: 26131 - protein, 32 aa, Homo sapiens
MVVGYQNLITLITLKLVYNPPLLNLAIKIKLI

SEQ ID NO: 26132 - protein, 23 aa, Homo sapiens
MRNVGTQARWAAGVASGRVGGLN

SEQ ID NO: 26133 - protein, 38 aa, Homo sapiens
MAALYLGHQLPLLLPHEELLGQPNWEPRCLGLVTTKAL

SEQ ID NO: 26134 - protein, 58 aa, Homo sapiens
MVRPTATAHLLPPAMPARRCASCLATGINSGHGGSCGCGWRRPSRHWVCLSQMNKSRR

SEQ ID NO: 26135 - protein, 77 aa, Homo sapiens
MRPSPLSGILADPLFLFPFSEGLPRRRAASRSRLQTPSARCSPRPDAEVAASQKLGPLHPPSEKGAMLISGSTKGPS

SEQ ID NO: 26136 - protein, 24 aa, Homo sapiens
MQKHSLTFWWLVECWPQVVHWQMT

SEQ ID NO: 26137 - protein, 93 aa, Homo sapiens
MWLEARAGVWARFRRGFLGVAEGPGTGELCLWPSMHRCFGILDPSSEAQPRSLLSAHLPACQAQGKVAGVRGWRRGVLETTLLLSLRILLSTM

SEQ ID NO: 26138 - protein, 52 aa, Homo sapiens
MTLGGHRATVQQESPLLTARVSQKLLLTIPVSEQNISAMVRASIPSLICCQP

SEQ ID NO: 26139 - protein, 52 aa, Homo sapiens
MRLMILSPGKPFITEIHLSIKGQYLKSVGKQWNKIFVKKPCAAWILYQMNFL

SEQ ID NO: 26140 - protein, 21 aa, Homo sapiens
MARCCPPRSSRDSWLAMWWPN

SEQ ID NO: 26141 - protein, 193 aa, Homo sapiens
MRTAAARSCRLTFSRCACQAAPRDPPRPRSARWPAGATSSRGRRNMPASCRRRRYRSSPWSAAQPRTCTDPPSSPACSAQGSSRAAPMRARVIPEARWCVRTKLQSAGSPCKASSAGDRAVVTATSQASTPMWPTTWPGSGSTPFPDCSGTHLSLLGDSAVREWLGHGRQDCVPFPQCGQLRARMAQELNKVL

SEQ ID NO: 26142 - protein, 58 aa, Homo sapiens [sequence omitted]

SEQ ID NO: 26143 - protein, 71 aa, Homo sapiens
MTCKTTHSCTQCTARMGVPVWDSLRPTTRTSFSSSTFPRTLGCLACPNLLTGLRNREMLLPFYLTKSSASG

SEQ ID NO: 26144 - protein, 100 aa, Homo sapiens
MEPKQWRRESQGSSLTIFYCPCARLSYELRFGFFLQSLQGHKFLALKTGWPITDSVIPSVTTIHTGVKLSDSHTSWRTGDSLELLTVMFSKLTWKILHEA

SEQ ID NO: 26145 - protein, 88 aa, Homo sapiens
MEETEILLVKQNKPLNRWSLTLLPRLECSGVISTDCNLRILGSSNSPAAATKNEEAVSTSGRNEPGRGTGTISEAMPLRLELALSPRR

SEQ ID NO: 26146 - protein, 21 aa, Homo sapiens
MASLAPAALLPPAPAGRKNGG

SEQ ID NO: 26147 - protein, 43 aa, Homo sapiens [sequence omitted]

SEQ ID NO: 26148 - protein, 26 aa, Homo sapiens
MIIMDKPSVCWKKLEIGILISFYLID

SEQ ID NO: 26149 - protein, 78 aa, Homo sapiens
MRWTLGSANRAFCGLCGESWRRRLPVAGLGAAPVGGLLPGPAAQPSRRLGGHSQAGLRGSGSVDPSRQNSRSAAAFKT

SEQ ID NO: 26150 - protein, 36 aa, Homo sapiens [sequence omitted]

SEQ ID NO: 26151 - protein, 85 aa, Homo sapiens
MGNQGSSGGPHPTEEMRAWGMPQESRLLQETHQAWRPSTGPSPDTAVLASASWRCRGAQFPQLLGEGQEGWSQSALPLLLTAEIK

SEQ ID NO: 26152 - protein, 36 aa, Homo sapiens
MATPVGVEHGEQSQAFSDDGWLGGLKVLDEKMLSKR

SEQ ID NO: 26153 - protein, 56 aa, Homo sapiens
MMVQSASVSKAGKGSSSSHGVAAALNQDLDPDPKCHVFNVSSQRCQMGSAQPCLCC

SEQ ID NO: 26154 - protein, 26 aa, Homo sapiens
MAAPSLSRDTVGIAAAEQGFWKALRT

SEQ ID NO: 26155 - protein, 180 aa, Homo sapiens
MRSEKREKKPAPSLRGNRSSNCFSEKSSKGGSEGKKQKRGRHASACRGERSRDRRSRGGSATKETVTGSGAAKEEAVLPGSAPGHSWLAAALSAAKGHRPGTARGGKVAPGAEAAERSPRRRPDWLPRNCGDSPYSELGLRFPGLSPSPEAPTKPGKEGKDSGGSSSMSAYSRKPERARS

SEQ ID NO: 26156 - protein, 26 aa, Homo sapiens
MIRRTPSVSEHEVNNGELFCCIDVPD

SEQ ID NO: 26157 - protein, 43 aa, Homo sapiens
MGCFLLASGMGAFASEDLQCHNKHMPALFYREPWRSWDRGHID

SEQ ID NO: 26158 - protein, 90 aa, Homo sapiens [sequence omitted]

SEQ ID NO: 26159 - protein, 301 aa, Homo sapiens
MQDVVEDFKNKYEDEINHRTAAENEFVVLKKDVDAAYMSKVELEAKVDALNDEINFLRTLNETELTELQSQISDTSVVLSMDNSRSLDLDGIIAEVKAQYEEMAKCSRAEAEAWYQTKFETLQAQAGKHGDDLRNTRNEISEMNRAIQRLQAEIDNIKNQRAKLEAAIAEAEERGELALKDARAKQEELEAALQRGKQDMARQLREYQELMSVKLALDIEIATYRKLLEGEESRLAGDGVGAVNISVMNSTGGSSSGGGIGLTLGGTMGSNALSFSSSAGPGLLKAYSIRTASASRRSARD

SEQ ID NO: 26160 - protein, 906 aa, Homo sapiens
MPVAHSPPAATSPGSLSSSSGHGSGSYPPPPGPHPPLPHPLHHGPGQRPSSGSASASGSPSDPGFMSLDEYGSSPGDLRAFCSHRSNTPESIAETPPARDGGGGGEFYGYMTMDRPLSHCGRSYRRVSGDAAQDLDRGLRKRTYSLTTPARQRPVPQPSSASLDEYTLMRATFSGSAGRLCPSCPASSPKVAYHPYPEDYGDIEIGSHRSSSSNLGADDGYMPMTPGAALAGSGSGSCRSDDYMPMSPASVSAPKQILQPRAAAAAAAAVPSAGPAGPAPTSAAGRTFPASGGGYKASSPAESSPEDSGYMRMWCGSKLSMEHADGKLLPNGDYLNVSPSDAVTTGTPPDFFSAALHPGGEPLRGVPGCCYSSLPRSYKAPYTCGGDSDQYVLMSSPVGRILEEERLEPQATPGPSQAASAFGAGPTQPPHPVVPSPVRPSGGRPEGFLGQRGRAVRPTRLSLEGLPSLPSMHEYPLPPEPKSPGEYINIDFGEPGARLSPPAPPLLASAASSSSLLSASSPASSLGSGTPGTSSDSRQRSPLSDYMNLDFSSPKSPKPGAPSGHPVGSLDGLLSPEASSPYPPLPPRPSASPSSSLQPPPPPPAPGELYRLPPASAVATAQGPGAASSLSSDTGDNGDYTEMAFGVAATPPQPIAAPPKPEAARVASPTSGVKRLSLMEQVSGVEAFLQASQPPDPHRGAKVIRADPQGGRRRHSSETFSSTTTVTPVSPSFAHNPKRHNSASVENVSLRKSSEGGVGVGPGGGDEPPTSPRQLQPAPPLAPQGRPWTPGQPGGLVGCPGSGGSPMRRETSAGFQNGLNYIAIDVREEPGLPPQPQPPPPPLPQPGDKSSWGRTRSLGGLISAVGVGSTGGGCGGPGPGALPPANTYASIDFLSHHLKEATIVKE

SEQ ID NO: 26161 - protein, 531 aa, Homo sapiens
MLQELNFGAYLGLPAFLLPLNQEDNTNLARVLTNHIHTGHHSSMFWMRVPLVAPEDLRDDIIENAPTTHTEEYSGEEKTWMWWHNFRTLCDYSKRIAVALEIGADLPSNHVIDRWLGEPIKAAILPTSIFLTNKKGFPVLSKMHQRLIFRLLKLEVQFIITGTNHHSEKEFCSYLQYLEYLSQNRPPPNAYELFAKGYEDYLQSPLQPLMDNLESQTYEVFEKDPIKYSQYQQAIYKCLLDRVPEEEKDTNVQVLMVLGAGRGPLVNASLRAAKQADRRIKLYAVEKNPNAVVTLENWQFEEWGSQVTVVSSDMREWVAPEKADIIVSELLGSFADNELSPECLDGAQHFLKDDGVSIPGEYTSFLAPISSSKLYNEVRACREKDRDPEAQFEMPYVVRLHNFHQLSAPQPCFTFSHPNRDPMIDNNRYCTLEFPVEVNTVLHGFAGYFETVLYQDITLSIRPETHSPGMFSWFPILFPIKQPITVREGQTICVRFWRCSNSKKVWYEWAVTAPVCSAIHNPTGRSYTIGL

SEQ ID NO: 26162 - protein, 24 aa, Homo sapiens
MTVTLHTTSKNPSCSRSSFQWLCV

SEQ ID NO: 26163 - protein, 16 aa, Homo sapiens
MSTSCARQRNPWPTST

SEQ ID NO: 26164 - protein, 471 aa, Homo sapiens
MSTLLINQPQYAWLKELGLREENEGVYNGSWGGRGEIPAPKRGEIVRQIGDALREKIQVLGSLVSLEMGKILVEGVGEVQEYVDICDYAVGLSRMIGGPILPSERSGHALIEQWNPVGLVGIITAFNFPVAVYGWNNAIAMICGNVCLWKGAPTTSLISVAVTKIIAKVLEDNKLPGAICSLTCGGADIGTAMAKDERVNLLSFTGSTQVGKQVGLMVQERFGRSLLELGGNNAIIAFEDADLSLVVPSALFAAVGTAGQRCTTARRLFIHESIHDEVVNRLKKAYAQIRVGNPWDPNVLYGPLHTKQAVSMFLGAVEEAKKEGGTVVYGGKVMDRPGNYVEPTIVTGLGHDASIAHTETFAPILYVFKFKNEEEVFAWNNEVKQGLSSSIFTKDLGRIFRWLGPKGSDCGIVNVNIPTSGAEIGGAFGGEKHTGGGRESGSDAWKQYMRRSTCTINYSKDLPLAQGIKFQ

SEQ ID NO: 26165 - protein, 16 aa, Homo sapiens
MTRLFSCITKYLYKMN

SEQ ID NO: 26166 - protein, 590 aa, Homo sapiens
MAGPGGRRTTSLPKRRGCGSCWRGEAHSPRTARTGRTRRGRAGRRPAPRQVATAEEGPDAFRFENVNGYTNCCFGFHRLAVVDPLFGMQPIRVKKYPYLWLCYNGEIYNHKKMQQHFEFEYQTKVDGEIILHLYDKGGIEQTICMLDGVFAFVLLDTANKKVFLGRDTYGVRPLFKAMTEDGFLAVCSEAKGLVTLKHSATPFLKVEPFLPGHYEVLDLKPNGKVASVEMVKYHHCRDVPLHALYDNVEKLFPGFEIETVKNNLRILFNNAVKKRLMTDRRIGCLLSGGLDSSLVAATLLKQLKEAQVQYPLQTFAIGMEDSPDLLAARKVADHIGSEHYEVLFNSEEGIQALDEVIFSLETYDITTVRASVGMYLISKYIRKNTDSVVIFSGEGSDELTQGYIYFHKAPSPEKAEEESERLLRELYLFDVLRADRTTAAHGLELRVPFLDHRFSSYYLSLPPEMRIPKNGIEKHLLRETFEDSNLIPKEILWRPKEAFSDGITSVKNSWFKILQEYVEHQVDDAMMANAAQKFPFNTPKTKEGYYYRQVFERHYPGRADWLSHYWMPKWINATDPSARTLTHYKSAVKA

SEQ ID NO: 26167 - protein, 730 aa, Homo sapiens [sequence omitted]

SEQ ID NO: 26168 - protein, 380 aa, Homo sapiens
KKSKSFNDPRLCIRKFFPKRKCFVFDWPAPKKYLAHLEQLKEEELNPDFIEQVAEFCSYILSHSNVKTLSGGIPVNGPRLESLVLTYVNAISSGDLPCMENAVLALAQIENSAAVEKAIAHYEQQMGQKVQLPTETLQELLDLHRDSEREAIEVFMKNSFKDVDQMFQRKLGAQLEARRDDFCKQNSKASSDCCMALLQDIFGPLEEDVKQGTFSKPGGYRLFTQKLQELKNKYYQVPRKGIQAKEVLKKYLESKEDVADALLQTDQSLSEKEKAIEVERIKAESAEAAKKMLEEIQKKNEEMMEQKEKSYQEHVKQLTEKMERDRAQLMAEQEKTLALKLQEQERLLKEGFENESKRLQKDIWDIQMRSKSLEPICNIL

SEQ ID NO: 26169 - protein, 31 aa, Homo sapiens
RDPSSANRLRSTCAMKTRFFWKTSQQVRMRW

SEQ ID NO: 26170 - protein, 286 aa, Homo sapiens
MSFLPHMAYTYPTGAATFADMQQRRKYQRKQGFQGELLDGAQDYMSGLDDMTDSDSCLSRKKIKKTESGMYACDLCDKTFQKSSSLLRHKYEHTGKRPHQCQICKKAFKHKHHLIEHSRLHSGEKPYQCDKCGKRFSHSGSYSQHMNHRYSYCKREAEEREAAEREAREKGHLEPTELLMNRAYLQSITPQGYSDSEERESMPRDGESEKEHEKEGEDGYGKLGRQDGDEEFEEEEEESENKSMDTDPETIRDEEETGDHSMDDSSEDGKMETKSDHEEDNMEDGM

SEQ ID NO: 26171 - protein, 1224 aa, Homo sapiens
LILPASIEFRESSEDSFLSAIINYTNSSTVHFKLSPTYVLYMACRYVLSNQYRPDISPTERTHKVIAVVNKMVSMMEGVIQKQKNIAGALAFWMANASELLNFIKQDRDLSRITLDAQDVLAHLVQMAFKYLVHCLQSELNNYMPAFLDDPEENSLQRPKIDDVLHTLTGAMSLLRRCRVNAALTIQLFSQLFHFINMWLFNRLVTDPDSGLCSHYWGAIIRQQLGHIEAWAEKQGLELAADCHLSRIVQATTLLTMDKYAPDDIPNINSTCFKLNSLQLQALLQNYHCAPDEPFIPTDLIENVVTVAENTADELARSDGREVQLEEDPDLQLPFLLPEDGYSCDVVRNIPNGLQEFLDPLCQRGFCRLIPHTRSPGTWTIYFEGADYESHLLRENTELAQPLRKEPEIITVTLKKQNGMGLSIVAAKGAGQDKLGIYVKSVVKGGAADVDGRLAAGDQLLSVDGRSLVGLSQERAAELMTRTSSVVTLEVAKQGAIYHGLATLLNQPSPMMQRISDRRGSGKPRPKSEGFELYNNSTQNGSPESPQLPWAEYSEPKKLPGDDRLMKNRADHRSSPNVANQPPSPGGKSAYASGTTAKITSVSTGNLCTEEQTPPPRPEAYPIPTQTYTREYFTFPASKSQDRMAPPQNQWPNYEEKPHMHTDSNHSSIAIQRVTRSQEELREDKAYQLERHRIEAAMDRKSDSDMWINQSSSLDSSTSSQEHLNHSSKSVTPASTLTKSGPGRWKTPAAIPATPVAVSQPIRTDLPPPPPPPPVHYAGDFDGMSMDLPLPPPPSANQIGLPSAQVAAAERRKREEHQRWYEKEKARLEEERERKRREQERKLGQMRTQSLNPAPFSPLTAQQMKPEKPSTLQRPQETVIRELQPQQQPRTIERRDLQYITVSKEELSSGDSLSPDPWKRDAKEKLEKQQQMHIVDMLSKEIQELQSKPDRSAEESDRLRKLMLEWQFQKRLQESKQKDEDDEEEEDDDVDTMLIMQRLEAERRARDEERRRQQQLEEMRKREAEDRARQEEERRRQEEERTKRDAEEKRRQEEGYYSRLEAERRRQHDEAARRLLEPEAPGLCRPPLPRDYEPPSPSPAPGAPPPPPQRNASYLKTQVLSPDSLFTAKFVAYNEEEEEEDCSLAGPNSYPGSTGAAVGAHDACRDAKEKRSKSQDADSPGSSGAPENLTFKERQRLFSQGQDVSNKVKASRKLTELENELNTK

SEQ ID NO: 26172 - protein, 58 aa, Homo sapiens
LPPNVIDTDFIDEEVLMSLVIEMGLDRIKELPELWLGQNEFDFMTDFVCKQQPSRVSC

SEQ ID NO: 26173 - protein, 120 aa, Homo sapiens [sequence omitted]

SEQ ID NO: 26174 - protein, 222 aa, Homo sapiens
IEDPNQFVPLNTNPNEVLEKRNKIREQNRYDLKTAGPQSQLLAGIVVDKPPSTMQFEDDDHGPPAPPNPFSHLTEGELEEYKRTIERKQQGLEDAEQELLSDDASSVSQIQSQTQSPQNVPEKLEENHELFSKSFISMEVPVMVVNGKDDMHDVEDELAKRVSRLSTSTTIENIEITIKSPEKIEEVLSPEGSPSKSPSKKKKKFRTPSFLKKNKKKEKVEA

SEQ ID NO: 26175 - protein, 49 aa, Homo sapiens
KSKEFVSSDESSSGENKSKKKRRRSEDSEEEELASTPPSSEDSASGSDE

SEQ ID NO: 26176 - protein, 32 aa, Homo sapiens
MDQKERDVIMREFRSGSSRVLITTDLLVSRGN

SEQ ID NO: 26177 - protein, 31 aa, Homo sapiens
VGECRPLSKTVRFNVLKVTKAAGTKKQFQKF

SEQ ID NO: 26178 - protein, 5650 aa, Homo sapiens
MGLLWPESGEILPITDALEQGIVSTELAHKILSNRQHIKALFLPATTEILSWKKAIESGILDRDLANNLKSICIPDVMPHMQLADSAEQNINPGAAVLPCSKSHPKATASQSENLLFQLMTHSYINVQNGQRLLLLDKELMETLTSRDEYQTSPPKVVEIGHQRQKTPEGLQESANVKISGTFSSGWTVRLPEFQFSSQNKEYPDREDCTTEKGKKTTVETEDSSVENPEQDLFVEQKERNPNIDALKVINKVKLEVQRQLIGTQREDQTAVSVRENASRGHLLTIPPAEAEGVPLVVDKDVFSVETPKKEHQPLRNTSFTCQNEQAHTLETEYIHDETGGSHIKPQSKKLQVQVKKTLGIKLELKSETDGNVHPLDKKEMLKKTFLAKDDHKESQEAQNIAGGSMMMSEKTDEEDSGREIFLSCSHPLELLEEATLNVLSAQLLDGGIFHEQTGQKLLLNEAISRGIVPSHTAVKLMEKLNMFQGFFDSQTCESLTTEEVINEGLMDEKLLHNVLMADKAISGVLDPRTQTLCSVKDAVTVGLLDKETATRILERQVVTGGIIDLKRGKKVSVTLASTLGLVDVADQPELINLEKASKGRDAEKTVRERLISLQMETTGLIDPDSKAPLTVVQSIDRGLLEREEAVRLLTKQVVDGGIIHHISGMRLSVDNAFRHGLIGEDLAEKLKRVENLNIHQIFNPETKENISLPKAIKLDLITSDLKREIQEVQAFTGNFVDLISGQRLTLAEAKKEGLLTNEAVLSPGMMHGIVDPENCRIVPYSELVKKCKIDIESGQRYLEVIPFSDIKDGVSDKVLTLSQAIQLGKVDFASTLKVLEAQANTGGIIDTATGKRLTLASALEEKLVDENMVRIIASHQVLNGGIVDIFSDQRVTLVEAIEKRLISPELANMIQIDSSEFSDHRAQIEKQEGIEVCALQNEFLGKDMLIACNQTAEMSCNKVEESERLFQVENQSAQEKVKVRVSDGEQAKKSREISLKEFGCKDQRKPRMSSDAKEFISIINPHNLKGKSLGQVSLTHPYSECDFKLKEVARNNMGNDTNEEQEKAVTKIEIISHMKQSTSCLDSEEIRENQGEVILEVQETYCETSGKLPSEQVLQQPMNARVKSKREKREVIVEESIRTCKPAFLSEEKLYQETAIRDEHDSHIKSQPREMTSSEKGKEADTEMGFSITFKIEESSSQVVPQGISVKHLDALTLFSSKQANEGKVNNLSLCLTLKPEENLSREIACGAQSEPFPCMTPRPEGLHYQESDGKAQVTGPSQISKTDKSFQGTTRQETNYQDSWVTSKTKETKHQISSSNECKEKSYQEVSFDPARGLKLEEITVSRPDSKEVRYLEFSDRKDLHHQGSKSDDKLCGTLKSEIATQELTGEKFLEMANPNVAGLEAGSIEDIVTQRGSRVLGSFLPEKLFKGVSQKENTGQQNAIISPTVLETSEEKTVSLTVCSAVKTEKTPQEKLRESPGSEQTPFMTAPEGKGNGGVNPEPFRATQNVFTRQLCLEHDEKLVSYLSLLRNIEMRTKQIQPLELNLAELQDLLCQAKVLERELKDLTTLVSQELECVNQIIISQPQEVPAQLLKALEKDAKNLQKSLSSVSDTWNSRLLHFQNAVEIEKTKVLNQHTQLEGRLQDLRAWVGNKNLILNSKGSNSEIDVDSLNLCLQQYEDLKQPMAERKAQLDALAFDIQFFISEHAQDLSPQQNRQMLRLLNELQRSFQDILEQTAAQVDALQGHLQQMEQEALVKTLQKQQNTCHQQLEDLCSWVGQAERALAGHQGRTTQQDLSALQKNQSDLKDLQDDIQNRATSFATVVKDIEGFMEENQTKLSPRELTALREKLHQAKEQYEALQEETRVAQKELEEAVTSALQQETEKSKAAKELAENKKKIDALLDWVTSVGSSGGQLLTNLPGMEQLSGASLEKGALDTTDGYMGVNQAPEKLDKQCEMMKARHQELLSQQQNFILATQSAQAFLDQHGHNLTPEEQQMLQQKLGELKEQYSTSLAQSEAELKQVQTLQDELQKFLQDHKEFESWLERSEKELENMHKGGSSPETLPSLLKRQGSFSEDVISHKGDLRFVTISGQKVLDMENSFKEGKEPSEIGNLVKDKLKDATERYTALHSKCTRLGSHLNMLLGQYHQFQNSADSLQAWMQACEANVEKLLSDTVASDPGVLQEQLATTKQLQEELAEHQVPVEKLQKVARDIMEIEGEPAPDHRHVQETTDSILSHFQSLSYSLAERSSLLQKAIAQSQSVQESLESLLQSIGEVEQNLEGKQVSSLSSGVIQEALATNMKLKQDIARQKSSLEATREMVTRFMETADSTTAAVLQGKLAEVSQRFEQLCLQQQEKESSLKKLLPQAEMFEHLSGKLQQFMENKSRMLASGNQPDQDITHFFQQIQELNLEMEDQQENLDTLEHLVTELSSCGFALDLCQHQDRVQNLRKDFTELQKTVKEREKDASSCQEQLDEFRKLVRTFQKWLKETEGSIPPTETSMSAKELEKQIEHLKSLLDDWASKGTLVEEINCKGTSLENLIMEITAPDSQGKTGSILPSVGSSVGSVNGYHTCKDLTEIQCDMSDVNLKYEKLGGVLHERQESLQAILNRMEEVHKEANSVLQWLESKEEVLKSMDAMSSPTKTETVKAQAESNKAFLAELEQNSPKIQKVKEALAGLLVTYPNSQEAENWKKIQEELNSRWERATEVTVARQRQLEESASHLACFQAAESQLRPWLMEKELMMGVLGPLSIDPNMLNAQKQQVQFMLKEFEARRQQHEQLNEAAQGILTGPGDVSLSTSQVQKELQSINQKWVELTDKLNSRSSQIDQAIVKSTQYQELLQDLSEKVRAVGQRLSVQSAISTQPEAVKQQLEETSEIRSDLEQLDHEVKEAQTLCDELSVLIGEQYLKDELKKRLETVALPLQGLEDLAADRINRLQAALASTQQFQQMFDELRTWLDDKQSQQAKNCPISAKLERLQSQLQENEEFQKSLNQHSGSYEVIVAEGESLLLSVPPGEEKRTLQNQLVELKNHWEELSKKTADRQSRLKDCMQKAQKYQWHVEDLVPWIEDCKAKMSELRVTLDPVQLESSLLRSKAMLNEVEKRRSLLEILNSAADILINSSEADEDGIRDEKAGINQNMDAVTEELQAKTGSLEEMTQRLREFQESFKNIEKKVEGAKHQLEIFDALGSQACSNKNLEKLRAQQEVLQALEPQVDYLRNFTQGLVEDAPDGSDASQLLHQAEVAQQEFLEVKQRVNSGCVMMENKLEGIGQFHCRVREMFSQLADLDDELDGMGAIGRDTDSLQSQIEDVRLFLNKIHVLKLDIEASEAECRHMLEEEGTLDLLGLKRELEALNKQCGKLTERGKARQEQLELTLGRVEDFYRKLKGLNDATTAAEEAEALQWVVGTEVEIINQQLADFKMFQKEQVDPLQMKLQQVNGLGQGLIQSAGKDCDVQGLEHDMEEINARWNTLNKKVAQRIAQLQEALLHCGKFQDALEPLLSWLADTEELIANQKPPSAEYKVVKAQIQEQKLLQRLLDDRKATVDMLQAEGGRIAQSAELADREKITGQLESLESRWTELLSKAAARQKQLEDILVLAKQFHETAEPISDFLSVTEKKLANSEPVGTQTAKIQQQIIRHKALEEDIENHATDVHQAVKIGQSLSSLTSPAEQGVLSEKIDSLQARYSEIQDRCCRKAALLDQALSNARLFGEDEVEVLNWLAEVEDKLSSVFVKDFKQDVLHRQHADHLALNEEIVNRKKNVDQAIKNGQALLKQTTGEEVLLIQEKLDGIKTRYADITVTSSKALRTLEQARQLATKFQSTYEELTGWLREVEEELATSGGQSPTGEQIPQFQQRQKELKKEVMEHRLVLDTVNEVSRALLELVPWRAREGLDKLVSDANEQYKLVSDTIGQRVDEIDAAIQRSQQYEQAADAELAWVAETKRKLMALGPIRLEQDQTTAQLQVQKAFSIDIIRHKDSMDELFSHRSEIFGTCGEEQKTVLQEKTESLIQQYEAISLLNSERYARLERAQVLVNQFWETYEELSPWIEETRALIAQLPSPAIDHEQLRQQQEEMRQLRESIAEHKPHIDKLLKIGPQLKELNPEEGEMVEEKYQKAENMYAQIKEEVRQRALALDEAVSQSTQITEFHDKIEPMLETLENLSSRLRMPPLIPAEVDKIRECISDNKSATVELEKLQPSFEALKRRGEELIGRSQGADKDLAAKEIQDKLDQMVFFWEDIKARAEEREIKFLDVLELAEKFWYDMAALLTTIKDTQDIVHDLESPGIDPSIIKQQVEAAETIKEETDGLHEELEFIRILGADLIFACGETEKPEVRKSIDEMNNAWENLNKTWKERLEKLEDAMQAAVQYQDTLQAMFDWLDNTVIKLCTMPPVGTDLNTVKDQLNEMKEFKVEVYQQQIEMEKLNHQGELMLKKATDETDRDIIREPLTELKHLWENLGEKIAHRQHKLEGALLALGQFQHALEELMSWLTHTEELLDAQRPISGDPKVIEVELAKHHVLKNDVLAHQATVETVNKAGNELLESSAGDDASSLRSRLEAMNQCWESVLQKTEEREQQLQSTLQQAQGFHSEIEDFLLELTRMESQLSASKPTGGLPETAREQLDTHMELYSQLKAKEETYNQLLDKGRLMLLSRDDSGSGSKTEQSVALLEQKWHVVSSKMEERKSKLEEALNLATEFQNSLQEFINWLTLAEQSLNIASPPSLILNTVLSQIEEHKVFANEVNAHRDQIIELDQTGNQLKFLSQKQDVVLIKNLLVSVQSRWEKVVQRSIERGRSLDDARKRAKQFHEAWKKLIDWLEDAESHLDSELEISNDPDKIKLQLSKHKEFQKTLGGKQPVYDTTIRTGRALKEKTLLPEDSQKLDNFLGEVRDKWDTVCGKSVERQHKLEEALLFSGQFMDALQALVDWLYKVEPQLAEDQPVHGDLDLVMNLMDAHKVFQKELGKRTGTVQVLKRSGRELIENSRDDTTWVKGQLQELSTRWDTVCKLSVSKQSRLEQALKQAEVFRDTVHMLLEWLSEAEQTLRFRGALPDDTEALQSLIDTHKEFMKKVEEKRVDVNSAVAMGEVILAVCHPDCITTIKHWITIIRARFEEVLTWAKQHQQRLETALSELVANAELLEELLAWIQWAETTLIQRDQEPIPQNIDRVKALIAEHQTFMEEMTRKQPDVDRVTKTYKRKNIEPTHAPFIEKSRSGGRKSLSQPTPPPMPILSQSEAKNPRINQLSARWQQVWLLALERQRKLNDALDRLEELKEFANFDFDVWRKKYMRWMNHKKSRVMDFFRRIDKDQDGKITRQEFIDGILASKFPTTKLEMTAVADIFDRDGDGYIDYYEFVAALHPNKDAYRPTTDADKIEDEVTRQVAQCKCAKRFQVEQIGENKYRFFLGNQFGDSQQLRLVRILRSTVMVRVGGGWMALDEFLVKNDPCRARGRTNIELREKFILPEGASQGMTPFRSRGRRSKPSSRAASPTRSSSSASQSNHSCTSMPSSPATPASGTKVIPSSGSKLKRPTPTFHSSRTSLAGDTSNSSSPASTGAKTNRADPKKSASRPGSRAGSRAGSRASSRRGSDASDFDLLETQSACSDTSESSAAGGQGNSRRGLNKPSKIPTMSKKTTTASPRTPGPKR

SEQ ID NO: 26179 - protein, 196 aa, Homo sapiens
MPGMFFSANPKELKGTTHSLLDDKMQKRRPKTFGMDMKAYLRSMIPHLESGMKSSKSKDVLSAAEVMQWSQSLEKLLANQTGQNVFGSFLKSEFSEENIEFWLACEDYKKTESDLLPCKAEEIYKAFVHSDAAKQINIDFRTRESTAKKIKAPTPTCFDEAQKVIYTLMEKDSYPRFLKSDIYLNLLNDLQANSLK

SEQ ID NO: 26180 - protein, 138 aa, Homo sapiens
MLATEPPPGITCWQDKDQMDDLRAQILGGANTPYEKGVFKLEVIIPERYPFEPPQIRFLTPIYHPNIDSAGRICLDVLKLPPKGAWRPSLNIATVLTSIQLLMSEPNPDDPLMADIVNIPIFLCNTYPTLSIPLTLPV

SEQ ID NO: 26181 - protein, 1963 aa, Homo sapiens
MATLGQYLVHGRGFLLLTKLNSIIDQALTCREELLTLLLSLLPLVWKIPVQEEKATDFNLPLSADIILTKEKNSSSQRSTQEKLHLEGSALSSQVSAKVNVFRKSRRQRKITHRYSVRDARKTQLSTSDSEANSDEKGIAMNKHRRPHLLHHFLTSFPKQDHPKAKLDRLATKEQTPPDAMALENSREIIPRQGSNTDILSEPAALSVISNMNNSPFDLCHVLLSLLEKVCKFDVTLNHNSPLAASVVPTLTEFLAGFGDCCSLSDNLESRVVSAGWTEEPVALIQRMLFRTVLHLLSVDVSTAEMMPENLRKNLTELLRAALKIRICLEKQPDPFAPRQKKTLQEVQEDFVFSKYRHRALLLPELLEGVLQILICCLQSAASNPFYFSQAMDLVQEFIQHHGFNLFETAVLQMEWLVLRDGVPPEASEHLKALINSVMKIMSTVKKVKSEQLHHSMCTRKRHRRCEYSHFMHHHRDLSGLLVSAFKNQVSKNPFEETADGDVYYPERCCCIAVCAHQCLRLLQQASLSSTCVQILSGVHNIGICCCMDPKSVIIPLLHAFKLPALKNFQQHILNILNKLILDQLGGAEISPKIKKAACNICTVDSDQLAQLEETLQGNLCDAELSSSLSSPSYRFQGILPSSGSEDLLWKWDALKAYQNFVFEEDRLHSIQIANHICNLIQKGNIVVQWKLYNYIFNPVLQRGVELAHHCQHLSVTSAQSHVCSHHNQCLPQDVLQIYVKTLPILLKSRVIRDLFLSCNGVSQIIELNCLNGIRSHSLKAFETLIISLGEQQKDASVPDIDGIDIEQKELSSVHVGTSFHHQQAYSDSPQSLSKFYAGLKEAYPKRRKTVNQDVHINTINLFLCVAFLCVSKEAESDRESANDSEDTSGYDSTASEPLSHMLPCISLESLVLPSPEHMHQAADIWSMCRWIYMLSSVFQKQFYRLGGFRVCHKLIFMIIQKLFRSHKEEQGKKEGDTSVNENQDLNRISQPKRTMKEDLLSLAIKSDPIPSELGSLKKSADSLGKLELQHISSINVEEVSATEAAPEEAKLFTSQESETSLQSIRLLEALLAICLHGARTSQQKMELELPNQNLSVESILFEMRDHLSQSKVIETQLAKPLFDALLRVALGNYSADFEHNDAMTEKSHQSAEELSSQPGDFSEEAEDSQCCSFKLLVEEEGYEADSESNPEDGETQDDGVDLKSETEGFSASSSPNDLLENLTQGEIIYPEICMLELNLLSASKAKLDVLAHVFESFLKIIRQKEKNVFLLMQQGTVKNLLGGFLSILTQDDSDFQACQRVLVDLLVSLMSSRTCSEELTLLLRIFLEKSPCTKILLLGILKIIESDTTMSPSQYLTFPLLHAPNLSNGVSSQKYPGILNSKAMGLLRRARVSRSKKEADRESFPHRLLSSWHIAPVHLPLLGQNCWPHLSEGFSVSLWFNVECIHEAESTTEKGKKIKKRNKSLILPDSSFDGTESDRPEGAEYINPGERLIEEGCIHIISLGSKALMIQVWADPHNATLIFRVCMDSNDDMKAVLLAQVESQENIFLPSKWQHLVLTYLQQPQGKRRIHGKISIWVSGQRKPDVTLDFMLPRKTSLSSDSNKTFCMIGHCLSSQEEFLQLAGKWDLGNLLLFNGAKVGSQEAFYLYACGPNHTSVMPCKYGKPVNDYSKYINKEILRCEQIRELFMTKKDVDIGLLIESLSVVYTTYCPAQYTIYEPVIRLKGQMKTQLSQRPFSSKEVQSILLEPHHLKNLQPTEYKTIQGILHEIGGTGIFVFLFARVVELSSCEETQALALRVILSLIKYNQQRVHELENCNGLSMIHQVLIKQKCIVGFYILKTLLEGCCGEDIIYMNENGEFKLDVDSNAIIQDVKLLEELLLDWKIWSKAEQGVWETLLAALEVLIRADHHQQMFNIKQLLKAQVVHHFLLTCQVLQEYKEGQLTPMPREMARSFRRKCGQSCT

SEQ ID NO: 26182 - protein, 1493 aa, Homo sapiens
MATLGQYLVHGRGFLLLTKLNSIIDQALTCREELLTLLLSLLPLVWKIPVQEEKATDFNLPLSADIILTKEKNSSSQRSTQEKLHLEGSALSSQVSAKVNVFRKSRRQRKITHRYSVRDARKTQLSTSDSEANSDEKGIAMNKHRRPHLLHHFLTSFPKQDHPKAKLDRLATKEQTPPDAMALENSREIIPRQGSNTDILSEPAALSVISNMNNSPFDLCHVLLSLLEKVCKFDVTLNHNSPLAASVVPTLTEFLAGFGDCCSLSDNLESRVVSAGWTEEPVALIQRMLFRTVLHLLSVDVSTAEMMPENLRKNLTELLRAALKIRICLEKQPDPFAPRQKKTLQEVQEDFVFSKYRHRALLLPELLEGVLQILICCLQSAASNPFYFSQAMDLVQEFIQHHGFNLFETAVLQMEWLVLRDGVPPEASEHLKALINSVMKIMSTVKKVKSEQLHHSMCTRKRHRRCEYSHFMHHHRDLSGLLVSAFKNQVSKNPFEETADGDVYYPERCCCIAVCAHQCLRLLQQASLSSTCVQILSGVHNIGICCCMDPKSVIIPLLHAFKLPALKNFQQHILNILNKLILDQLGGAEISPKIKKAACNICTVDSDQLAQLEETLQGNLCDAELSSSLSSPSYRFQGILPSSGSEDLLWKWDALKAYQNFVFEEDRLHSIQIANHICNLIQKGNIVVQWKLYNYIFNPVLQRGVELAHHCQHLSVTSAQSHVCSHHNQCLPQDVLQIYVKTLPILLKSRVIRDLFLSCNGVSQIIELNCLNGIRSHSLKAFETLIISLGEQQKDASVPDIDGIDIEQKELSSVHVGTSFHHQQAYSDSPQSLSKFYAGLKEAYPKRRKTVNQDVHINTINLFLCVAFLCVSKEAESDRESANDSEDTSGYDSTASEPLSHMLPCISLESLVLPSPEHMHQAADIWSMCRWIYMLSSVFQKQFYRLGGFRVCHKLIFMIIQKLFRSHKEEQGKKEGDTSVNENQDLNRISQPKRTMKEDLLSLAIKSDPIPSELGSLKKSADSLGKLELQHISSINVEEVSATEAAPEEAKLFTSQESETSLQSIRLLEALLAICLHGARTSQQKMELELPNQNLSVESILFEMRDHLSQSKVIETQLAKPLFDALLRVALGNYSADFEHNDAMTEKSHQSAEELSSQPGDFSEEAEDSQCCSFKLLVEEEGYEADSESNPEDGETQDDGVDLKSETEGFSASSSPNDLLENLTQGEIIYPEICMLELNLLSASKAKLDVLAHVFESFLKIIRQKEKNVFLLMQQGTVKNLLGGFLSILTQDDSDFQACQRVLVDLLVSLMSSRTCSEELTLLLRIFLEKSPCTKILLLGILKIIESDTTMSPSQYLTFPLLHAPNLSNGVSSQKYPGILNSKAMGLLRRARVSRSKKEADRESFPHRLLSSWHIAPVHLPLLGQNCWPHLSEGFSVSLWFNVECIHEAESTTEKGKKIKKRNKSLILPDSSFDGTGMMTGLSDLYTKIVFRL

SEQ ID NO: 26183 - protein, 117 aa, Homo sapiens
MFREVEELMEDTQHKLRSAVEEMEAEEAAAKASSEVNLANLPPSYHNETNTDTKVGNNTIHVHREIHKVSHGQHFLLSIASSPIRELRFFCFCFFICDIQAQTTIENHKIRIENQKE

SEQ ID NO: 26184 - protein, 43 aa, Homo sapiens [sequence omitted]

SEQ ID NO: 26185 - protein, 31 aa, Homo sapiens
MTKTKVSSAGKSQYRSFLISKCLIEFGASGQ

SEQ ID NO: 26186 - protein, 615 aa, Homo sapiens
MAFLQKIEALVKDMQNPETGVRMQNQRVLVTSVPHAMTGSDVLQWIVQRLWISSLEAQNLGNFIVRYGYIYPLQDPKNLILKPDGSLYRFQTPYFWPTQQWPAEDTDYAIYLAKRNIKKKGILEEYEKENYNFLNQKMNYKWDFVIMQAKEQYRAGKERNKADRYALDCQEKAYWLVHRCPPGMDNVLDYGLDRVTNPNEVKKQTVVAVKKEIMYYQQALMRSTVKSSVSLGGIVKYSEQFSSNDAIMSGCLPSNPWITDDTQFWDLNAKLVEIPTKMRVERWAFNFSELIRDPKGRQSFQYFLKKEFSGENLGFWEACEDLKYGDQSKVKEKAEEIYKLFLAPGARRWINIDGKTMDITVKGLKHPHRYVLDAAQTHIYMLMKKDSYARYLKSPIYKDMLAKAIEPQETTKKSSTLPFMRRHLRSSPSPVILRQLEEEAKAREAANTVDITQPGQHMAPSPHLTVYTGTCMPPSPSSPFSSSCRSPRKPFASPSRFIRRPSTTICPSPIRVALESSSGLEQKGECSGSMAPRGPSVTESSEASLDTSWPRSRPRAPPKARMALSFSRFLRRGCLASPVFARLSPKCPAVSHGRVQPLGDVGQQLPRLKSKRVAK

SEQ ID NO: 26187 - protein, 139 aa, Homo sapiens
MQLKEAKHIAEEADRKYEEVARKLVILEGELERAEERAEVSELKCGDLEEELKNVTNNLKSLEAASEKYSEKEDKYEEEIKLLSDKLKEAETRAEFAERTVAKLEKTIDDLEDELYAQKLKYKAISEELDHALNDMTSL

SEQ ID NO: 26188 - protein, 128 aa, Homo sapiens
MTHIVREVDRPGSKVNKKEVVEAVTIVETPPMVVVGIVGYVETPRGLRTFKTVFAEHISDECKRRFYKNCSARLCPMSSIQAPLAGGKGSLEAGNELHPHAVPVCLPLTPRRGDEGLHLVPSPTLLCS

SEQ ID NO: 26189 - protein, 1004 aa, Homo sapiens
MEPALEGTGKEGKKASSRKRTLAEPPAKGLLQPVKLSRAELYKEPTNEELNRLRETEILFHSSLLRLQVEELLKEVRLSEKKKDRIDAFLREVNQRVVRVPSVPETELTDQAWLPAGVRVPLHQVPYAVKGCFRFLPPAQVTVVGSYLLGTCIRPDINVDVALTMPREILQDKDGLNQRYFRKRALYLAHLAHHLAQDPLFGSVCFSYTNGCHLKPSLLLRPRGKDERLVTVRLHPCPPPDFFRPCRLLPTKNNVRSAWYRGQSPAGDGSPEPPTPRYNTWVLQDTVLESHLQLLSTILSSAQGLKDGVALLKVWLRQRELDKGQGGFTGFLVSMLVVFLVSTRKIHTTMSGYQVLRSVLQFLATTDLTVNGISLCLSSDPSLPALADFHQAFSVVFLDSSGHLNLCADVTASTYHQVQHEARLSMMLLDSRADDGFHLLLMTPKPMIRAFDHVLHLRPLSRLQAACHRLKLWPELQDNGGDYVSAALGPLTTLLEQGLGARLNLLAHSRPPVPEWDISQDPPKHKDSGTLTLGLLLRPEGLTSVLELGPEADQPEAAKFRQFWGSRSELRRFQDGAIREAVVWEAASMSQKRLIPHQVVTHLLALHADIPETCVHYVGGPLDALIQGLKETSSTGEEALVAAVRCYDDLSRLLWGLEGLPLTVSAVQGAHPVLRYTEVFPPTPVRPAFSFYETLRERSSLLPRLDKPCPAYVEPMTVVCHLEGSGQWPQDAEAVQRVRAAFQLRLAELLTQQHGLQCRATATHTDVLKDGFVFRIRVAYQREPQILKEVQSPEGMISLRDTAASLRLERDTRQLPLLTSALHGLQQQHPAFSGVARLAKRWVRAQLLGEGFADESLDLVAAALFLHPEPFTPPSSPQVGFLRFLFLVSTFDWKNNPLFVNLNNELTVEEQVEIRSGFLAARAQLPVMVIVTPQDRKNSVWTQDGPSAQILQQLVVLAAEALPMLEKQLMDPRGPGDIRMGPSENVALLSHITDTEQWKGAICV

SEQ ID NO: 26190 - protein, 8 aa, Homo sapiens
LSVSVQCL

SEQ ID NO: 26191 - protein, 48 aa, Homo sapiens
LYETLTITQAVIFLNTRRKVDWLTEKMHARDFTVSALVRGVLKCLDFH

SEQ ID NO: 26192 - protein, 82 aa, Homo sapiens; identical to SEQ ID NO: 23461

SEQ ID NO: 26193 - protein, 6 aa, Homo sapiens
RRKGTG

SEQ ID NO: 26194 - protein, 38 aa, Homo sapiens
KAKVAKPKKAAKSAAKAVKPKAAKPKVVKPKKAAPKKK

SEQ ID NO: 26195 - protein, 57 aa, Homo sapiens
LQRKKTKQNKKNPSPLPGSFCLKAALLKLIFSQERDVLSGEEKYSTHHERSSSDQRR

SEQ ID NO: 26196 - protein, 11 aa, Homo sapiens
TTNDRSAPRFS

SEQ ID NO: 26197 - protein, 387 aa, Homo sapiens
LGVKPNATQEELKKAYRKLALKYHPDKNPNEGEKFKQISQAYEVLSDAKKRELYDKGGEQAIKEGGAGGGFGSPMDIFDMFFGGGGRMQRERRGKNVVHQLSVTLEDLYNGATRKLALQKNVICDKCEGRGGKKGAVECCPNCRGTGMQIRIHQIGPGMVQQIQSVCMECQGHGERISPKDRCKSCNGRKIVREKKILEVHIDKGMKDGQKITFHGEGDQEPGLEPGDIIIVLDQKDHAVFTRRGEDLFMCMDIQLVEALCGFQKPISTLDNRTIVITSHPGQIVKHGDIKCVLNEGMPIYRRPYEKGRLIIEFKVNFPENGFLSPDKLSLLEKLLPERKEVEETDEMDQVELVDFDPNQERRRHYNGEAYEDDEHHPRGGVQCQTS

SEQ ID NO: 26198 - protein, 6 aa, Homo sapiens
IKEYGN

SEQ ID NO: 26199 - protein, 98 aa, Homo sapiens
KTAFQEALDAAGDKLVVVDFSATWCGPCKMIKPFFHSLSEKYSNVIFLEVDVDDCQDVASECEVKCMPTFQFFKKGQKVGEFSGANKEKLEATINELV

SEQ ID NO: 26200 - protein, 17 aa, Homo sapiens
KEESEESDDDMGFGLFD

SEQ ID NO: 26201 - protein, 38 aa, Homo sapiens
MPALAPPEVVMDPALAAQYEHDLEVAQTTALPDEDDDL

SEQ ID NO: 26202 - protein, 50 aa, Homo sapiens
LLAIIEELGKEIRPTYAGSKSAMERLKRGIIHARGLVRECLAETERNARS

SEQ ID NO: 26203 - protein, 20 aa, Homo sapiens
VQPPSLPLLFLPSLAPWLIS

SEQ ID NO: 26204 - protein, 81 aa, Homo sapiens
IEKYYTRLGNDFHTNKRVCEEIAIIPSKKLRNKIAGYVTHLMKRIQRGPVRGISIKLQEEERERRDNYVPEVNFLDIWASG

SEQ ID NO: 26205 - protein, 21 aa, Homo sapiens
LGGPEAGLGEYLFERLTLKHD

SEQ ID NO: 26206 - protein, 103 aa, Homo sapiens
RRPGRGETRKRMSELEKAMVALIDVFHQYSGREGDKHKLKKSELKELINNELSHFLEEIKEQEVVDKVMETLDNDGDGECDFQEFMAFVAMVTTACHEFFEHE

SEQ ID NO: 26207 - protein, 28 aa, Homo sapiens
MAEPSSPLQRRLQLARPCLDSLQWSLLS

SEQ ID NO: 26208 - protein, 470 aa, Homo sapiens
MEPQDLELELCKKHHFGINKPEKIIPSPDDSKFLLKTFTHIKSNVSAPNKKKVKESKEKEKLERRLLEELLKMFMDSESFYYSLTYDLTNSVQRQSTGERDGRPLWQKVDDRFFWNKYMIQDLTEIGTPDVDFWIIPMIQGFVQIEELVVNYTESSDDEKSSPETPPQESTCVDDIHPRFLVALISRRSRHRAGMRYKRRGVDKNGNVANYVETEQLIHVHNHTLSFVQTRGSVPVFWSQVGYRYNPRPRLDRSEKETVAYFCAHFEEQLNIYKKQVIINLVDQAGREKIIGDAYLKQVLLFNNSHLTYVSFDFHEHCRGMKFENVQTLTDAIYDIILDMKWCWVDEAGVICKQEGIFRVNCMDCLDRTNVVQAAIARVVMEQQLKKLGVMPPEQPLPVKCNRIYQIMWANNGDSISRQYAGTAALKGDFTRTGERKLAGVMKDGVNSANRYYLNRFKDAYRQAVIGERT

SEQ ID NO: 26209 - protein, 222 aa, Homo sapiens
MRDLDQRTEDLKAEIDKLATEYMSSARSLSSEEKLALLKQIQEAYGKCKEFGDDKVQLAMQTYEMVDKHIRRLDTDLARFEADLKEKQIESSDYDSSSSKGKKKGRTQKEKKAARARSKGKNSDEEAPKTAQKKLKLVRTSPEYGMPSVTFGSVHPSDVLDMPVDPNEPTYCLCHQVSYGEMIGCDNPDCSIEWFHFACVGLTTKPRGKWFCPRCSQERKKK

SEQ ID NO: 26210 - protein, 574 aa, Homo sapiens
MKAETERSALDVKLKHARNQVDVEIKRRQRAEADCEKLERQIQLIREMLMCDTSGSIQLSEEQKSALAFLNRGQPSSSNAGNKRLSTIDESGSILSDISFDKTDESLDWDSSLVKTFKLKKREKRRSTSRQFVDGPPGPVKKTRSIGSAVDQGNESIVAKTTVTVPNDGGPIEAVSTIETVPYWTRSRRKTGTLQPWNSDSTLNSRQLEPRTETDSVGTPQSNGGMRLHDFVSKTVIKPESCVPCGKRIKFGKLSLKCRDCRVVSHPECRDRCPLPCIPTLIGTPVKIGEGMLADFVSQTSPMIPSIVVHCVNEIEQRGLTETGLYRISGCDRTVKELKEKFLRVKTVPLLSKVDDIHAICSLLKDFLRNLKEPLLTFRLNRAFMEAAEITDEDNSIAAMYQAVGELPQANRDTLAFLMIHLQRVAQSPHTKMDVANLAKVFGPTIVAHAVPNPDPVTMLQDIKRQPKVVERLLSLPLEYWSQFMMVEQENIDPLHVIENSNAFSTPQTPDIKVSLLGPVTTPEHQLLKTPSSSSLSQRVRSTLTKNTPRFGSKSKSATNLGRQGNFFASPMLK

SEQ ID NO: 26211 - protein, 76 aa, Homo sapiens
MLGPESVPPPKRSRSKLMAPPRIGTHNGTFHCDEALACALLRLLPEYRVRSAKSDPGTACMHASGVDGIPPTGSLR

SEQ ID NO: 26212 - protein, 171 aa, Homo sapiens
MGGSVYPADDEMFSDIYKIREIADGLCLEVEGKMVSRTEGNIDDSLIGGNASAEGPEGEGTESTVITGVDIVMNHHLQETSFTKEAYKKYIKDYMKSIKGKLEEQRPERVKPFMTGAAEQIKHILANFKNYQFFIGENMNPDGMVALLDYREDGVTPYMIFFKDGLEMEKC

SEQ ID NO: 26213 - protein, 118 aa, Homo sapiens
MALEYVACDLHRLEELVLDRCVRITDTGLSYLSTMSSLRSLYLRWCCQVQDFGLKHLLALGSLRLLSLAGCPLLTTTGLSGLVQLQELEELELTNCPGATPELFKYFSQHLPRCLVIE

SEQ ID NO: 26214 - protein, 255 aa, Homo sapiens [sequence omitted]

SEQ ID NO: 26215 - protein, 144 aa, Homo sapiens
MSVAVNRPSSGKGKCCPDSEFKKHFPVGNPEILPSSLPSQAAENQTSTMEKDVRPKTRSINRFPLHSESSSKKAPRSKNKTLDPLLMSEPKPRTSSPRGDKAAYDILRRCSQCGILLPLPILNQHQEKCRWLASSKGKQVRNFS

SEQ ID NO: 26216 - protein, 101 aa, Homo sapiens
MRRMRILRRLLRRYRESKKIDRHMYHSLYLKVKGNVFKNKRILMEHIHKLKADKARKKLLADQAEARRSKTKEARKRREERLQAKKEEIIKTLSKEEETKK

SEQ ID NO: 26217 - protein, 280 aa, Homo sapiens
MDLATVSALRKMGVKLTPHNKETVQHSDVLFLAVKPHIIPFILDEIGADIEDRHIVVSCAAGVTISSIEKKLSAFRPAPRVIRCMTNTPVVVREGATVYATGTHAQVEDGRLMEQLLSSVGFCTEVEEDLIDAVTGLSGSGPAYAFTALDALADGGVKMGLPRRLAVRLGAQALLGAAKMLLHSEQHPGQLKDNVSSPGGATIHALHVLESGGFRSLLINAVEASCIRTRELQSMADQEQVSPAAIKKTILDKDHLPLELGSPEGLHPLLLQYQLARAPS

SEQ ID NO: 26218 - protein, 240 aa, Homo sapiens
MQWLWRDAGIRACYERRREFHLLDSAVYYLSHLERITEEGYVPTAQDVLRSRMPTTGINEYCFSVQKTNLRIVDVGGQKSERKKWIHCFENVIALIYLASLSEYDQCLEENNQENRMKESLALFGTILELPWFKSTSVILFLNKTDILEEKIPTSHLATYFPSFQGPKQDAEAAKRFILDMYTRMYTGCVDGPEGSKKGARSRRLFSHYTCATDTQNIRKVFKDVRDSVLARYLDEINLL

SEQ ID NO: 26219 - protein, 66 aa, Homo sapiens
MLSVSPSPKPWWPITRNVNVDEASKKEIKDILIQYDRTLLVADPRRCESKKFGGPGARARYQKSYR

SEQ ID NO: 26220 - protein, 197 aa, Homo sapiens
MASISLTQLTPEEEEKRRVRRERNKLAAAKCRNRRRELTDRLQAETDQLEEEKAELESEIAELQKEKERLEFVLVAHKPGCKIPYEEGPGPGPLAEVRDLPGSAPAKEDGFSWLLPPPPPPPLPFQTSQDAPPNLTASLFTHSEVQVLGDPFPVVNPSYTSSFVLTCPEVSAFAGAQRTSGSDQPSDPLNSPSLLAL

SEQ ID NO: 26221 - protein, 130 aa, Homo sapiens
MAEVQVLVLDGRGHLLGRLAAIVAKQVLLGRKVVVVRCEGINISGNFYRNKLKYLAFLRKRMNTNPSRGPYHFRAPSRIFWRTVRGMLPHKTKRGQAALDRLKVFDGIPPPYDKVSYAKPHRQRPYLWRP

SEQ ID NO: 26222 - protein, 525 aa, Homo sapiens
MPGPCSEGFVQGRDVGELQEPGLPGELPPKENNSTGKVFQAVMLERHEIHDIQDFYFREMQQNIHDFECQCHNDERNYREIPAIKIKNITGRRDQGDGRNAGNKPVENQLELSFWLHLAELQGFQIERKIYECNQIEKSVTRGSSVSLLQTNLPCVNTSISNIYRNDFMHPSLLTQDQKAYIREKPYKCSDCGKAFNQRSNLTTHQRIHTGQKPHKCDICGKGFRRIANLASHHRIHTGEKPYRCNECGKTFNQTFNLTTHQRIHTGQKPYKCDRCGKGFRQIGNLASHHRIHTGEKPYRCNECGKTFNRMFHLTRHQRIHTGQKPYKCDICGKGFRQIANLASHHRIHTGEKPYKCSDCGKTFNYRSHLTRHQRIHTGQKPYKCDTCGKDFSQNSYLENHQRIHTREKSYRCNECGKTFNKMTNLTTHQRIHTGQKTYKCDICGKGFRQIGNLASHHRIHTGEKPYRCNECGKTFNRMFHLTRHQRIHTGQKPYKCDICGKSFSQNSYLENHQRIHTGEKTYKL

SEQ ID NO: 26223 - protein, 4027 aa, Homo sapiens
MQIHRPYVEVFSPSPPKLPHTGIGKRGLFGTRSSAYPKYTFHDREEVVKANIRDPLQIIKIIRENEHLGFLYMIPAVPRSSIEYDTYNLKVVSYENINKNDYYTISQRAVTHIYNEDIEFIEIDRWEQEYLYHRELTKIPIFSLFRKWKAFSVWRKNVRSKKITGCQKSLQKNLFIVNPHLRPALLKINELCYHLSFMGLCYIEKCHTYTLQEFKAAQVIRLAEVTERLGEFRNEAKYVVRRACRFALRAAGFVPDDCAFGPFEDYHKVQSSGSFINTPHELPTYGDSEKMTYTEQASKRHYCMRLTCFIRLNDYLIENTMHILTVNAVNSLLNHLTDKLKRTPSADVIQKWITEEKPEVPDKKGTLMVEKQEEDESLIPMFLTELMLTVQSLLFEPSLEDFLDGILGAVNHCQNTVLSVPNLVPDSYFDAFTSPYINNKLEGKTCGTGPSLAAVFEDDKNFHTIISQIKETIQAAFESARIYAATFEKFQIFFKENESLDLQALKLQEPDINFFSEQLEKYHKQHKDAVALRPTRNVGLLLIDTRLLREKLIPSPLRCLEVLNFMLPRQSKKKVDAIIFEAQDAEYKLEFVPTTTTEYVHSLLFLDEIQERIESLEDEGNIVTQMYKLMEQYQVPTPPEDFAVFATMKPSIVAVRNAIDKSVGDRESSIKQFCVHLGSDLEELNNEVNEVKLQAQDPQILDISADQDKIRLILNNLQSVLADLQKRAFQYKSYQKNFKVEVSKFEALEEVSAELKLKQLLWDSFSEWDKLQQEWLKSKFDCLDPEVLNGQVSKYAKFVTQLEKGLPPNSVVPQLKYKVEKMKEKLPVIIDLRNPTLKARHWAAIEQTVDATLVDAEIPLTLERLSQLHVFDFGQEIQDISGQASGEAALEAILKKVEDSWKTTEFVILPHRDSKDVFILGGTDDIQVLLDDSTINVATLASSRYLGPLKTRVDEWQKQLALFNQTLEEWLTCQRNWLYLESIFNAPDIQRQLPAEAKMFLQVDKSWKEIMRKVNRLPNALRAATQPGLLETFQNNNALLDQIQKCLEAYLESKRVIFPRFYFLSNDELLEILAQTRNPQAVQPHLRKCFDSISKLEFALMPPAEGKIPGIDGEPEKVYTNDILAMLSPEGERVSLGKGLKARGNVEEWLGKVEEAMFTSLRRLCKAAIADYQGKLRTDWVVAGHPSQVILTVSQIMWCRDLTECLETEHSNHIQALKNFEKVNFERLNALAAIVQGSLPKLHRNILTALITIDVHARDIVTELVQSKVETVESFDWQRQLRYYWDIDLDNCVARMALSQYTYGYEYLGACPRLVITPLTDRCYLCLMGALQLDLGGAPAGPAGTGKTETTKDLAKALAIQCVVFNCSDGLDYKMMGRFFSGLAQSGAWCCFDEFNRIDIEVLSVIAQQLITIRNAKAAKLSRFMFEGREIKLVMTCAAFITMNPGYAGRTELPDNLKALFRPFAMMVPNYALIAEVILYSEGFESSKILARKMTQMYKLCSEQLSQQDHYDFGMRAVKSVLVMAGSLKRENPDLNEDVVLIRALQDSNLPKFLTDDALLFSGIISDLFPGVQIPEHDYGILQSTIVDVMNRQNLQPEMCMVRKVIQFYETMLVRHGVMLVGPTGGGKTTVYRILAETLGNLQKLGIENSFYQAVKTYVLNPKSITMGELYGEVNNLTLEWKDGLMALSVRAAVNDTSEDHKWIISDGPVDALWIENMNTVLDDNKMLCLANSERIKLTPQIHMLFEVQDLRVASPATVSRCGMVFVDPEELKWMPYVKTWMKGISKKLTEETQEYILNLFQRYVDEGLHFINKKCSQAIPQVDISKVTTLCCLLESLILGKDGVNLAMEQTKLNTILCQTFVFCYLWSLGGNLTENYYDSFDTFIRTQFDDNPDARLPNSGDLWSIHMDFDTKRLDPWERIIPTFKYNRDVPFFEMLVPTTDTVRYGYLMEKLLAVKHSVLFTGITGVGKSVIAKGLLNKIQESAGYVPVYLNFSAQTSSARTQEIIESKLERKRKNILGAPGNKRIVIFVDDLNMPRLDRYGSQPPIELLRQYQDFGGFYDRNKLFWKEIQDVTIISACAPPGGGRNPVTPRFIRHFSMLCLPMPSEHSLKQIFQAILNGFLSDFPPAVKQTASSIVEASVEIYNKMSVDLLPTPAKSHYVFNLRDLSKCVQGILQCDPGTIREEIQIFRLFCHECQRVFHDRLINNEDKHYFHVILTEMANKHFGIAIDLEYFLNKPIIFGDFIKFGADKADRIYDDMPDIEKTANVLQDYLDDYNLTNPKEVKLVFFQDAIEHVSRIARMIRQERGNALLVGVGGTGKQSLTRLAAHICGYKCLQIELSRGYNYDSFHEDLRKLYKMAGVEDKNMVFLFTDTQIVVEEFLEDINNILNSGEVPNLFEKDELEQVLAATRPRAKEVGISEGNRDEVFQYFISKVRQKLHIVLCMSPVGEAFRSRCRMFPSLVNCCTIDWFVQWPREALLSVSKTFFSQVDAGNEELKEKLPLMCVNVHLSVSSMAERYYNELRRRYYTTPTSYLELINLYLSMLSEKRKQIISARDRVKNGLTKLLETNILVDKMKLDLSALEPVLLAKSEDVEALMEKLAVDQESADQVRNTVQEDEATAKVKAEETQAIADDAQRDLDEALPALDAANKALDSLDKADISEIRVFTKPPDLVMTVMEAISILLNAKPDWPSAKQLLGDSNFLKRLLEYDKENIKPQILAKLQKYINNPDFVPEKVEKVSKACKSMCMWVRAMDLYSRVVKVVEPKRQKLRAAQAELDITMATLREKQALLRQVEDQIQALQDEYDKGVNEKESLAKTMALTKARLVRAGKLTAALEDEQVRWEESIQKFEEEISNITGNVFIAAACVAYYGAFTAQYRQSLIECWIQDCQSLEIPIDPSFSLINILGDPYEIRQWNTDGLPRDLISTENGILVTQGRRWPLMIDPQDQANRWIRNKESKSGLKIIKLTDSNFLRILENSIRLGLPVLLEELKETLDPALEPILLKQIFISGGRLLIRLGDSDIDYDKNFRFYMTTKMPNPHYLPEVCIKVTIINFTVTKSGLEDQLLSDVVRLEKPRLEEQRIKLIVRINTDKNQLKTIEEKILRMLFTSEGNILDNEELIDTLQDSKITSGAIKTRLEEAESTEQMINVAREKYRPVATQGSVMYFVIASLSEIDPMYQYSLKYFKQLFNTTIETSVKTENLQQRLDVLLEQTLLTAYVNVSRGLFEQHKLIYSFMLCVEMMRQQGTLSDAEWNFFLRGSAGLEKERPPKPEAPWLPTATWFACCDLEESFPVFHGLTQNILSHPISIRLGSFETYINPQKWEGYSKMKHEDKHMRQEKEAAHQDPWSAGLSSFHKLILIKCCKEEKVVFALTDFVIENLGKQFIETPPVDLPTLYQDMSCNTPLVFILSTGSDPMGAFQRFARESGYSERVQSISLGQGQGPIAEKMVKDAMKSGNWVFLQNCHLAVSWMLAMEELIKTFTDPDSAIKDTFRLFLSSMPSNTFPVTVLQNSVKVTNEPPKGLRANIRRAFTEMTPSFFEENILGKKWRQIIFGICFFHAIIQERKKFGPLGWNICYEFNDSDRECALLNLKLYCKEGKIPWDALIYITGEITYGGRVTDSWDQRCLRTILKRFFSPETLEEDYKYSESGIYFAPMADSLQEFKDYIENLPLIDDPEIFGMHENANLVFQYKETSTLINTILEVQPRSSTGGEGKSNDEIVQELVASVQTRVPEKLEMEGASESLFVKDLQGRLNSLTTVLGQEVDRFNNLLKLIHTSLETLNKAIAGFVVMSEEMEKVYNSFLNNQVPALWSNTAYPSLKPLGSWVKDLILRTSFVDLWLKRGQPKSYWISGFFFPQGFLTGTLQNHARKYNLPIDELSFKYSVIPTYRDQAAVIEAAKTVQFGQELPMDMELPSPEDGVLVHGMFMDASRWDDKEMVIEDALPGQMNPVLPVVHFEPQQNYKPSPTLYHCPLYKTGARAGTLSTTGHSTNFVVTVLLPSKRSKDYWIAKGSALLCQLSE

SEQ ID NO: 26224 - protein, 70 aa, Homo sapiens
MNGQLNGFHEAFIEEGTFLFTSESVGEGHPDKICDQISDAVLDAHLQQDPDAKVACGRFRMCLSTGGKIA

SEQ ID NO: 26225 - protein, 1527 aa, Homo sapiens
MEEWPCIASKDTESSSENTTDNNSASNPGSEKSTLPGSTTSNKGKGSQCQSASSGNECNLGVWKSDPKAKSVQSSNSTTENNNGLGNWRNVSGQDRIGPGSGFSNFNPNSNPSAWPALVQEGTSRKGALETDNSNSSAQVSTVGQTSREQQSKMENAGVNFVVSGREQAQIHNTDGPKNGNTNSLNLSSPNPMENKGMPFGMGLGNTSRSTDAPSQSTGDRKTGSVGSWGAARGPSGTDTVSGQSNSGNNGNNGKEREDSWKGASVQKSTGSKNDSWDNNNRSTGGSWNFGPQDSNDNKWGEGNKMTSGVSQGEWKQPTGSDELKIGEWSGPNQPNSSTGAWDNQKGHPLPENQGNAQAPCWGRSSSSTGSEVGGQSTGSNHKAGSSDSHNSGRRSYRPTHPDCQAVLQTLLSRTDLDPRVLSNTGWGQTQIKQDTVWDIEEVPRPEGKSDKGTEGWESAATQTKNSGGWGDAPSQSNQMKSGWGELSASTEWKDPKNTGGWNDYKNNNSSNWGGGRPDEKTPSSWNENPSKDQGWGGGRQPNQGWSSGKNGWGEEVDQTKNSNWESSASKPVSGWGEGGQNEIGTWGNGGNASLASKGGWEDCKRSPAWNETGRQPNSWNKQHQQQQPPQQPPPPQPEASGSWGGPPPPPPGNVRPSNSSWSSGPQPATPKDEEPSGWEEPSPQSISRKMDIDDGTSAWGDPNSYNYKNVNLWDKNSQGGPAPREPNLPTPMTSKSASDSKSMQDGWGESDGPVTGARHPSWEEEEDGGVWNTTGSQGSASSHNSASWGQGGKKQMKCSLKGGNNDSWMNPLAKQFSNMGLLSQTEDNPSSKMDLSVGSLSDKKFDVDKRAMNLGDFNDIMRKDRSGFRPPNSKDMGTTDSGPYFEKGGSHGLFGNSTAQSRGLHTPVQPLNSSPSLRAQVPPQFISPQVSASMLKQFPNSGLSPGLFNVGPQLSPQQIAMLSQLPQIPQFQLACQLLLQQQQQQQLLQNQRKISQAVRQQQEQQLARMVSALQQQQQQQQRQPGMKHSPSHPVGPKPHLDNMVPNALNVGLPDLQTKGPIPGYGSGFSSGGMDYGMVGGKEAGTESRFKQWTSMMEGLPSVATQEANMHKNGAIVAPGKTRGGSPYNQFDIIPGDTLGGHTGPAGDSWLPAKSPPTNKIGSKSSNASWPPEFQPGVPWKGIQNIDPESDPYVTPGSVLGGTATSPIVDTDHQLLRDNTTGSNSSLNTSLPSPGAWPYSASDNSFTNVHSTSAKFPDYKSTWSPDPIGHNPTHLSNKMWKNHISSRNTTPLPRPPPGLTNPKPSSPWSSTAPRSVRGWGTQDSRLASASTWSDGGSVRPSYWLVLHNLTPQIDGSTLRTICMQHGPLLTFHLNLTQGTALIRYSTKQEAAKAQTALHMCVLGNTTILAEFATDDEVSRFLAQAQPPTPAATPSAPAAGWQSLETGQNQSDPVGPALNLFGGSTGLGQWSSSAGGSSGADLAGASLWGPPNYSSSLWGVPTVEDPHRMGSPAPLLPGDLLGGGSDSI

SEQ ID NO: 26226 - protein, 4174 aa, Homo sapiens
MKQRGFYSDILSPGTLDQLGEVCRGPRMSQNLLRQADLDKFTPRVGSFEVPEDFQERMEQQCIGSTTRLLAQTDFPLQAYEPKMQVPFQVLPGQHPRKIEIERRKQQYLSLDIEQLLFSQGIDSNKLMPRHLDHQHPQTIEQGHDPIFPIYLPLKVFDNEDFDCRTPREWINMGLEPGSLDRKPVPGKALLPTDDFLGHEDPKSQKLKYKWCEVGVLDYDEEKKLYLVHKTDEKGLVRDEMGRPILNAGVTTEGRPPLQVCQYWVPRIQLLFCAEDPCMFAQRVVQANALRKNTEALLLYNLYVDCMPSDGQHVISEQSLSKIKQWALSTPRMRKGPSVLEHLSSLAREVSLDYERSMNKINFDHVVSSKPETFSYVTLPKKEEEQVPERGLVSVPKYHFWEQKEDFTFVSLLTRPEVITALSKVRAECNKVTAMSLFHSSLSKYSHLEEFEQIQSQTFSQVQMFLKDSWISSLKVAMRSSLRDMSKGWYNLYETNWEVYLMSKLRKLMELVKYMLQDTLRFLVQDSLASFSQFISDTCCSVLNCTDDMVWGDDLINSPYRPRKNPLFIMDLVLDSSGVHYSTPLEQFEASLLNLFDKGILATHAVPQLEKLVMEDIFISGDPLLESVGLHEPLVEELRATIASAVSKAMIPLQAYAKEYRKYLELNNNDIASFLKTYQTQGLLAQEVREVVLTHLREKEILDSSLPSSIIIGPFYINTDNVKQSLSKKRKALATSVLDILAKNLHKEVDSICEEFRSISRKIYEKPNSIEELAELREWMKGIPERLVGLEERIVKVMDDYQVMDEFLYNLSSDDFNDKWIASNWPSKILGQIELVQQQHVEDEEKFRKIQIMDQNNFQEKLEGLQLVVAGFSIHVEISRAHEIANEVRRVKKQLKDCQQLAMLYNNRERIFSLPITNYDKLSRMVKEFQPYLDLWTTASDWLRWSESWMNDPLSAIDAEQLEKNVVEAFKTMHKCVKQFKDMPACQEVALDIRARIEEFKPYIPLIQGLRNPGMRIRHWETLSNQININVRPKANLTFARCLEMNLQDHIESISKVAEVAGKEYAIEQALDKMEKEWSTILFNVLPYKATDTYILKSPDEASQLLDDHIVMTQNMSFSPYKKPFEQRINSWENKLKLTQEVLEEWLNCQRSWLYLEPIFSSEDINQQLPVESKRYQTMERIWKKIMKNAYENREVINVCSDLRMLDSLRDCNKILDLVQKGLSEYLETKRSAFPRFYFLSDDELLEILSQTKDPTAVQPHLRKCFENIARLLFQEDLEITHMYSAEGEEVQLCFSIYPSSNVEDWLREVERSMKASVHDIIEKAIRAYPTMPRTQWVLNWPGQVTIAGCQTYWTMEVAEALEAGNLRSQLFPQLCQQLSDLVALVRGKLSRMQRAVLSALIVIEVHAKDVVSKLIQENVVSVNDFQWISQLRYYWTNNDLYIRAVNAEFIYGYEYLGNSGRLVITPLTDRCYLTLTGALHLKFGGAPAGPAGTGKTETTKDLGKALAIQTVVFNCSDQLDFMAMGKFFKGLASAGAWACFDEFNRIDIEVLSVVAQQITTIQKAQQQRVERFMFEGVEIPLVPSCAVFITMNPGYAGRTELPDNLKALFRPVAMMVPDYAMITEISLYSFGFNEASVLAKKITTTFKLSSEQLSSQDHYDFGMRAVKTVISAAGNLKRENPSMNEELICLRAIRDVNVPKFLQEDLKLFSGIVSDLFPTIKEEDTDYGILDEAIREACRNSNLKDVEGFLTKCIQLYETTVVRHGLMLVGPTGSGKSTCYRVLAAAMTSLKGQPSISGGMYEAVNYYVLNPKSITMGQLYGEFDLLTHEWTDGIFSSFIRAGAITSDTNKKWYMFDGPVDAIWIENMNTVLDDNKKLCLSSGEIIKLTEAMTMMFEVQDLAVASPATVSRCGMVYLEPSILGLMPFIECWLRKLPPLLKPYEEHFKALFVSFLEESISFVRSSVKEVIASTNCNLTMSLLKLLDCFFKPFLPREGLKKIPSEKLSRIVELIEPWFIFSLIWSVGATGDSSGRTSFSHWLRLKMENEQLTLLFPEEGLVFDYRLEDAGISGTNDSEDEEEEYKQVAWVKWMDSSAPFTMVPDTNYCNIIVPTMDTVQMSHLLDMLLTNKKPVLCIGPTGTGKTLTISDKLLKNLALDYISHFLTFSARTSANQTQDFIDSKLDKRRKGVFGPPLGRNFIFFIDDLNMPALETYGAQPPIELLRQWMDHGGWYDRKIIGAFKNLVDINFVCAMGPPGGGRNTVTPRLMRHFNYLSFAEMDEVSKKRIFSTILGNWLDGLLGEKSYRERVPGAPHIAHFTEPLVEATIMVYATITSQLLPTPAKSHYTFNLRDLSKVFQGMLMADPAKVEDQVQLLRLWYHENCRVFRDRLVNEEDRSWFDQLLKRCMEQWEVTFNKVCPFQPILYGDFMSPGSDVKSYELITSESKMMQVIEEYIEDYNQINTAKLKLVLFMDAMSHICRISRTLRQALGNALLLGVGGSGRSSLTRLASHMAEYECFQIELSKNYGMSEWRDDVKKVLLKAGLQNLPITFLFSDTQIKNESFLEDINNVLNSGDIPNLYTADEQDQIVSTMRPYIQEQGLQPTKANLMAAYTGRVRSNIHMVLCMSPIGEVFRARLRQFPSLVNCCTIDWFNEWPAEALKSVATVFLNEIPELESSQEEIQGLIQVCVYIHQSVSKKCIEYLAELTRHNYVTPKSYLELLHIFSILIGQKKLELKTAKNRMKSGLDKLLRTSEDVAKMQEDLESMHPLLEEAAKDTMLTMEQIKVDTAIAEETRNSVQTEEIKANEKAKKAQAIADDAQKDLDEALPALDAALASLRNLNKNDVTEVRAMQRPPPGVKLVIEAVCIMKGIKPKKVPGEKPGTKVDDYWEPGKGLLQDPGHFLESLFKFDKDNIGDVVIKAIQPYIDNEEFQPATIAKVSKACTSICQWVRAMHKYHFVAKAVEPKRQALLEAQDDLGVTQRILDEAKQRLREVEDGIATMQAKYRECITKKEELELKCEQCEQRLGRAGKLINGLSDEKVRWQETVENLQYMLNNISGDVLVAAGFVAYLGPFTGQYRTVLYDSWVKQLRSHNVPHTSEPTLIGTLGNPVKIRSWQIAGLPNDTLSVENGVINQFSQRWTHFIDPQSQANKWIKNMEKDNGLDVFKLSDRDFLRSMENAIRFGKPCLLENVGEELDPALEPVLLKQTYKQQGNTVLKLGDTVIPYHEDFRMYITTKLPNPHYTPEISTKLTLINFTLSPSGLEDQLLGQVVAEERPDLEEAKNQLIISNAKMRQELKDIEDQILYRLSSSEGNPVDDMELIKVLEASKMKAAEIQAKVRIAEQTEKDIDLTRMEYIPVAIRTQILFFCVSDLANVDPMYQYSLEWFLNIFLSGIANSERADNLKKRISNINRYLTYSLYSNVCRSLFEKHKLMFAFLLCVRIMMNEGKINQSEWRYLLSGGSISIMTENPAPDWLSDRAWRDILALSNLPTFSSFSSDFVKHLSEFRVIFDSLEPHREPLPGIWDQYLDQFQKLLVLRCLRGDKVTNAMQDFVATNLEPRFIEPQTANLSVVFKDSNSTTPLIFVLSPGTDPAADLYKFAEEMKFSKKLSAISLGQGQGPRAEAMMRSSIERGKWVFFQNCHLAPSWMPALERLIEHINPDKVHRDFRLWLTSLPSNKFPVSILQNGSKMTIEPPRGVRANLLKSYSSLGEDFLNSCHKVMEFKSLLLSLCLFHGNALERRKFGPLGFNIPYEFTDGDLRICISQLKMFLDEYDDIPYKVLKYTAGEINYGGRVTDDWDRRCIMNILEDFYNPDVLSPEHSYSASGIYHQIPPTYDLHGYLSYIKSLPLNDMPEIFGLHDNANITFAQNETFALLGTIIQLQPKSSSAGSQGREEIVEDVTQNILLKVPEPINLQWVMAKYPVLYEESMNTVLVQEVIRYNRLLQVITQTLQDLLKALKGLVVMSSQLELMAASLYNNTVPELWSAKAYPSLKPLSSWVMDLLQRLDFLQAWIQDGIPAVFWISGFFFPQAFLTGTLQNFARKFVISIDTISFDFKVMFEAPSELTQRPQVGCYIHGLFLEGARWDPEAFQLAESQPKELYTEMAVIWLLPTPNRKAQDQDFYLCPIYKTLTRAGTLSTTGHSTNYVIAVEIPTHQPQRHWIKRGVALICALDY

SEQ ID NO: 26227 - protein, 34 aa, Homo sapiens
MLRRELPGSSQEIGSSPCHLCTHFSSMYSSSARL

SEQ ID NO: 26228 - protein, 30 aa, Homo sapiens
MAGNSILLAAVSILSACQQNKTVWSFILYS

SEQ ID NO: 26229 - protein, 20 aa, Homo sapiens
MCKHQGGLFIKDIEDLAGSC

SEQ ID NO: 26230 - protein, 52 aa, Homo sapiens
MTVVSVPQREPLVLGGRLAPLGFSSRGFKIKDGKIGENCPSPWPACSWYTLV

SEQ ID NO: 26231 - protein, 142 aa, Homo sapiens
MPGPWLCPEFLLRKMTTLSCCLCSVWFSDENSNQSSVSDVYQLKVDSSTNSSPSPQQSESLSPAHTSDFRTDDSQPPTLGQEILEEPSLPSSEVADEPPTLTKEEPVPLETQVVEEEEDSGAPPLKRFCVDQPTVPQTASES

SEQ ID NO: 26232 - protein, 243 aa, Homo sapiens
MGCFRNQKFRKGKVFREPLFLDLPKSVDWRKKGYVTPVKNQKQCGSCWAFSATGALEGQMFRKTGKLVSLSEQNLVDCSRPQGNQGCNGGFMARAFQYVKENGGLDSEESYPYVAVDEICKYRPENSVANDTGFTVVAPGKEKALMKAVATVGPISVAMDAGHSSFQFYKSGIYFEPDCSSKNLDHGVLVVGYGFEGANSNNSKYWLVKNSWGPEWGSNGYVKIAKDKNNHCGIATAASYPNV

SEQ ID NO: 26233 - protein, 70 aa, Homo sapiens
MVGPFKLRSRKQRTLSMIEEEIRAAQEREEELKRQRQVLQSTQSPRTKNAPSLPSRTCYKTAPGPRGHTG

SEQ ID NO: 26234 - protein, 137 aa, Homo sapiens [sequence omitted]

SEQ ID NO: 26235 - protein, 28 aa, Homo sapiens
LAKIGGVRRAGAARHRAPEPLHDGAGLT

SEQ ID NO: 26236 - protein, 12 aa, Homo sapiens
LNWVRCRCCCSC

SEQ ID NO: 26237 - protein, 6 aa, Homo sapiens
RCRPPD

SEQ ID NO: 26238 - protein, 57 aa, Homo sapiens
IGHDPHLLYTLSAVQILTLYDSINVIDVNKVVEYVKGLQKEDGSFAGDIWGPTKQLV

SEQ ID NO: 26239 - protein, 20 aa, Homo sapiens
VGTQARWAAGVASGRVGGLN

SEQ ID NO: 26240 - protein, 18 aa, Homo sapiens
IRLVPTSRPLPSFLVYPL

SEQ ID NO: 26241 - protein, 8 aa, Homo sapiens
LLKNTLIP

SEQ ID NO: 26242 - protein, 219 aa, Homo sapiens
LEPATILPTTCCPAPAAMCRTLAAFPTTCLERAKEFKTRLGIFLHKSELGCDTGSTGKFEWGSKHSKENRNFSEDVLGWRESFDLLLSSKNGVAAFHAFLKTEFSEENLEFWLACEEFKKIRSATKLASRAHQIFEEFICSEAPKEVNIDHETHELTRMNLQTATATCFDAAQGKTRTLMEKDSYPRFLKSPAYRDLAAQASAASATLSSCSLDEPSHT

SEQ ID NO: 26243 - protein, 7 aa, Homo sapiens
VLKRRAD

SEQ ID NO: 26244 - protein, 25 aa, Homo sapiens
RPDAWPLAAWEVAGAAFAFARDSSN

SEQ ID NO: 26245 - protein, 35 aa, Homo sapiens
MATLGQYLVHGRGFLLLTKLNSIIDQRWGFTVLTS

SEQ ID NO: 26246 - protein, 36 aa, Homo sapiens
KRSSQCFFPYNGEFCFSLGWRKSILWCVKRLQRRSQ

SEQ ID NO: 26247 - protein, 201 aa, Homo sapiens
KFSQEKAMFSSSAKIVKPNGEKPDEFESGISQALLELEMNSDLKAQLRELNITAAKEIEVGGGRKAIIIFVPVPQLKSFQKIQVRLVRELEKKFSGKHVVFIAQRRILPKPTRKSRTKNKQKRPRSRTLTAVHDAILEDLVFPSEIVGKRIRVKLDGSRLIKVHLDKAQQNNVEHKVETFSGVYKKLTGKDVNFEFPEFQL

SEQ ID NO: 26248 - protein, 67 aa, Homo sapiens
THKAADPRPGVSRATTAREQRGETHGAPYAPAPPPPPPRQPKRSERTRHRGARVQLATLSPPARSPR

SEQ ID NO: 26249 - protein, 36 aa, Homo sapiens
LTGGQGGVSSWAATVREGLKVCMCEGRERERRAPQR

SEQ ID NO: 26250 - protein, 41 aa, Homo sapiens
VPSLVIPDLTCLFLFLNLRWSRHQNADFRENPYGEDHHPRG

SEQ ID NO: 26251 - protein, 160 aa, Homo sapiens
VRPSPSCSRPAAMAASPARPAVLALTGLALLLLLCWGPGGISGNKLKLMLQKREAPVPTKTKVAVDENKAKEFLGSLKRQKRQLWDRTRPEVQQWYQQFLYMGFDEAKFEDDITYWLNRDRNGHEYYGDYYQRHYDEDSAIGPRSPYGFRHGASVNYDDY

SEQ ID NO: 26252 - protein, 481 aa, Homo sapiens
RMSAEVIHQVEEALDTDEKEMLLFLCRDVAIDVVPPNVRDLLDILRERGKLSVGDLAELLYRVRRFDLLKRILKMDRKAVETHLLRNPHLVSDYRVLMAEIGEDLDKSDVSSLIFLMKDYMGRGKISKEKSFLDLVVELEKLNLVAPDQLDLLEKCLKNIHRIDLKTKIQKYKQSVQGAGTSYRNVLQAAIQKSLKDPSNNFRLHNGRSKEQRLKEQLGAQQEPVKKSIQESEAFLPQSIPEERYKMKSKPLGICLIIDCIGNETELLRDTFTSLGYEVQKFLHLSMHGISQILGQFACMPEHRDYDSFVCVLVSRGGSQSVYGVDQTHSGLPLHHIRRMFMGDSCPYLAGKPKMFFIQNYVVSEGQLEDSSLLEVDGPAMKNVEFKAQKRGLCTVHREADFFWSLCTADMSLLEQSHSSPSLYLQCLSQKLRQERKRPLLDLHIELNGYMYDWNSRVSAKEKYYVWLQHTLRKKLILSYT

SEQ ID NO: 26253 - protein, 14 aa, Homo sapiens
KGAMLISGSTKGPS

SEQ ID NO: 26254 - protein, 66 aa, Homo sapiens
RRLDRWREWWRRWLPRWWLSRFRFPARWLSWWPQQWWLSRRRLWWLPNIFFIYRKWIPGWWLPAGQ

SEQ ID NO: 26255 - protein, 28 aa, Homo sapiens
LGLNLWDLTPFPPPSLTPQPGGSIYSPD

SEQ ID NO: 26256 - protein, 16 aa, Homo sapiens
LGGTGVIRNLFTVKVY

SEQ ID NO: 26257 - protein, 330 aa, Homo sapiens
TLFRQYLRIRTVQPKPDYGAAVAFFEETARQLGLGCQKVEVAPGYVVTVLTWPGTNPTLSSILLNSHTDVVPVFKEHWSHDPFEAFKDSEGYIYARGAQDMKCVSIQYLEAVRRLKVEGHRFPRTIHMTFVPDEEVGGHQGMELFVQRPEFHALRAGFALDEGIANPTDAFTVFYSERSPWWVRVTSTGRPGHASRFMEDTAAEKLAFEEQLQSWCQAAGEGVTLEFAQKWMHPQVTPTDDSNPWWAAFSRVCKDMNLTLEPEIMPAATDNRYIRAVGVPALGFSPMNRTPVLLHDHDERLHEAVFLRGVDIYTRLLPALASVPALPSDS

SEQ ID NO: 26258 - protein, 17 aa, Homo sapiens
RPSEHFTRPLSVSVQCL

SEQ ID NO: 26259 - protein, 119 aa, Homo sapiens
LGTGLLKGTMSGRLWSKAIFAGYKRGLRNQREHTALLKIEGVYARDETEFYLGKRCAYVYKAKNNTVTPGGKPNKTRVIWGKVTRAHGNSGMVRAKFRSNLPAKAIGHRIRVMLYPSRI

SEQ ID NO: 26260 - protein, 331 aa, Homo sapiens
IFCGPTTLGDPRLGGAPPGLSRSFRLPPLPAAMAELGLNEHHQNEVINYMRFARSKRGLRLKTVDSCFQDLKESRLVEDTFTIDEVSEVLNGLQAVVHSEVESELINTAYTNVLLLRQLFAQAEKWYLKLQTDISELENRELLEQVAEFEKAEITSSNKKPILDVTKPKLAPLNEGGTAELLNKEILRLQEENEKLKSRLKTIEIQATNALDEKSKLEKALQDLQLDQGNQKDFIKAQDLSNLENTVAALKSEFQKTLNDKTENQKSLEENLATAKHDLLRVQEQLHMAEKELEKKFQQTAAYRNMKEILTKKNDQIKDLRKRLAQYEPED

SEQ ID NO: 26261 - protein, 26 aa, Homo sapiens
IFNLVVQISFWLTSKHIIKNAVEEVT

SEQ ID NO: 26262 - protein, 17 aa, Homo sapiens
IHLGCLTDSPVGAMLCA

SEQ ID NO: 26263 - protein, 54 aa, Homo sapiens
KARASASPLQRSPLPIWFWNHREELGHSNTRCYHAGHPPLQTPVTAPRKNPKCL

SEQ ID NO: 26264 - protein, 729 aa, Homo sapiens
RDPLKLQQLQNQIRLEQEAGARQPPPAPRSAPPSPPFPPPPAFPELAACTPPASPEPMSALASRSAPAMQSSGSFNYARPKQFIAAQNLGPASGHGTPASSPSSSSLPSPMSPTPRQFGRAPVPPFAQPFGAEPEAPWGSSSPSPPPPPPPVFSPTAAFPVPDVFPLPPPPPPLPSPGQASHCSSPATRFGHSQTPAAFLSALLPSQPPPAAVNALGLPKGVTPAGFPKKASRTARIASDEEIQGTKDAVIQDLERKLRFKEDLLNNGQPRLTYEERMARRLLGADSATVFNIQEPEEETANQEYKVSSCEQRLISEIEYRLERSPVDESGDEVQYGDVPVENGMAPFFEMKLKHYKIFEGMPVTFTCRVAGNPKPKIYWFKDGKQISPKSDHYTIQRDLDGTCSLHTTASTLDDDGNYTIMAANPQGRISCTGRLMVQAVNQRGRSPRSPSGHPHVRRPRSRSRDSGDENEPIQERFFRPHFLQAPGDLTVQEGKLCRMDCKVSGLPTPDLSWQLDGKPVRPDSAHKMLVRENGVHSLIIEPVTSRDAGIYTCIATNRAGQNSFSLELVVAAKEAHKPPVFIEKLQNTGVADGYPVRLECRVLGVPPPQIFWKKENESLTHSTDRVSMHQDNHGYICLLIQGATKEDAGWYTVSAKNEAGIVSCTARLDVYTQWHQQSQSTKPKKVRPSASRYAALSDQGLDIKAAFQPEANPSHLTLNTALVESEDL

SEQ ID NO: 26265 - protein, 315 aa, Homo sapiens
LEQRSFISVRLLSYLSACRHPMEDSMDMDMSPLRPQNYLFGCELKADKDYHFKVDNDENEHQLSLRTVSLGAGAKDELHIVEAEAMNYEGSPIKVTLATLKMSVQPTVSLGGFEITPPVVLRLKCGSGPVHISGQHLVAVEEDAESEDEEEEDVKLLSISGKRSAPGGGSKVPQKKVKLAADEDDDDDDEEDDDEDDDDDDFDDEEAEEKAPVKKSIRDTPAKNAQKSNQNGKDSKPSSTPRSKGQESFKKQEKTPKTPKGPSSVEDIKAKMQASIEKGGSLPKVEAKFINYVKNCFRMTDQEAIQDLWQWRKSL

SEQ ID NO: 26266 - protein, 41 aa, Homo sapiens
VSPAAPAPGCTPPPRHQLSSLLVQDGRGQGRDAADVPAADL

SEQ ID NO: 26267 - protein, 156 aa, Homo sapiens
VLLSFAQARGADRMGKCRGLRTARKLRSHRRDQKWHDKQYKKAHLGTALKANPFGGASHAKGIVLEKVGVEAKQPNSAIRKCVRVQLIKNGKKITAFVPNDGCLNFIEENDEVLVAGFGRKGHAVGDIPGVRFKVVKVANVSLLALYKGKKERPRS

SEQ ID NO: 26268 - protein, 63 aa, Homo sapiens
ITTARGSSTGELEGHASSRLPPQPCGWGQSSDCLLKIDVYFLELFNFVANLDKHGTNPAGRSR

SEQ ID NO: 26269 - protein, 37 aa, Homo sapiens
IIQSSQCPGGRRCPTPACIHPSRVPGVTGPRRQPWFC

SEQ ID NO: 26270 - protein, 545 aa, Homo sapiens
LAQSSVTLPSVTMKLWVSALLMAWFGVLSCVQAEFFTSIGHMTDLIYAEKELVQSLKEYILVEEAKLSKIKSWANKMEALTSKSAADAEGYLAHPVNAYKLVKRLNTDWPALEDLVLQDSAAGFIANLSVQRQFFPTDEDEIGAAKALMRLQDTYRLDPGTISRGELPGTKYQAMLSVDDCFGMGRSAYNEGDYYHTVLWMEQVLKQLDAGEEATTTKSQVLDYLSYAVFQLGDLHRALELTRRLLSLDPSHERAGGNLRYFEQLLEEEREKTLTNQTEAELATPEGIYERPVDYLPERDVYESLCRGEGVKLTPRRQKRLFCRYHHGNRAPQLLIAPFKEEDEWDSPHIVRYYDVMSDEEIERIKEIAKPKLARATVRDPKTGVLTVASYRVSKSSWLEEDDDPVVARVNRRMQHITGLTVKTAELLQVANYGVGGQYEPHFDFSRRPFDSGLKTEGNRLATFLNYMSDVEAGGATVFPDLGAAIWPKKGTAVFWYNLLRSGEGDYRTRHAACPVLVGCKWVSNKWFHERGQEFLRPCGSTEVD

SEQ ID NO: 26271 - protein, 419 aa, Homo sapiens
VTLLSQSKSGFWFGAERPGGLAFPRKAPPCPWPREQTKSTAGPITLGALRPAMVMEVGTLDAGGLRALLGERAAQCLLLDCRSFFAFNAGHIAGSVNVRFSTIVRRRAKGAMGLEHIVPNAELRGRLLAGAYHAVVLLDERSAALDGAKRDGTLALAAGALCREARAAQVFFLKGGYEAFSASCPELCSKQSTPMGLSLPLSTSVPDSAESGCSSCSTPLYDQGGPVEILPFLYLGSAYHASRKDMLDALGITALINVSANCPNHFEGHYQYKSIPVEDNHKADISSWFNEAIDFIDSIKNAGGRVFVHCQAGISRSATICLAYLMRTNRVKLDEAFEFVKQRRSIISPNFSFMGQLLQFESQVLAPHCSAEAGSPAMAVLDRGTSTTTVFNFPVSIPVHSTNSALSYLQSPITTSPSC

SEQ ID NO: 26272 - protein, 66 aa, Homo sapiens
VLTDPPPGPPPCRAAVGRRSPPRRPGLPKQESSFPWGGCCGTSRKATPSTGLEWGHPCTWPPSWNT

SEQ ID NO: 26273 - protein, 349 aa, Homo sapiens
LQGGGRRGCGASFSKPSSAILVAAATHALAAAMTEQMTLRGTLKGHNGWVTQIATTPQFPDMILSASRDKTIIMWKLTRDETNYGIPQRALRGHSHFVSDVVISSDGQFALSGSWDGTLRLWDLTTGTTTRRFVGHTKDVLSVAFSSDNRQIVSGSRDKTIKLWNTLGVCKYTVQDESHSEWVSCVRFSPNSSNPIIVSCGWDKLVKVWNLANCKLKTNHIGHTGYLNTVTVSPDGSLCASGGKDGQAMLWDLNEGKHLYTLDGGDIINALCFSPNRYWLCAATGPSIKIWDLEGKIIVDELKQEVISTSSKAEPPQCTSLAWSADGQTLFAGYTDNLVRVWQVTIGTR

SEQ ID NO: 26274 - protein, 16 aa, Homo sapiens
KREDSSERVDLSRRIF

SEQ ID NO: 26275 - protein, 905 aa, Homo sapiens
LTTRVMLTTAGGTKGTVIKVPLKVEQANNARDALAKTVYSHLFDHVVNRVNQCFPFETSSYFIGVLDIAGFEYFEHNSFEQFCINYCNEKLQQFFNERILKEEQELYQKEGLGVNEVHYVDNQDCIDLIEAKLVGILDILDEENRLPQPSDQHFTSAVHQKHKDHFRLTIPRKSKLAVHRNIRDDEGFIIRHFAGAVCYETTQFVEKNNDALHMSLESLICESRDKFIRELFESSTNNNKDTKQKAGKLSFISVGNKFKTQLNLLLDKLRSTGASFIRCIKPNLKMTSHHFEGAQILSQLQCSGMVSVLDLMQGGYPSRASFHELYNMYKKYMPDKLARLDPRLFCKALFKALGLNENDYKFGLTKVFFRPGKFAEFDQIMKSDPDHLAELVKRVNHWLTCSRWKKVQWCSLSVIKLKNKIKYRAEACIKMQKTIRMWLCKRRHKPRIDGLVKVGTLKKRLDKFNEVVSVLKDGKPEMNKQIKNLEISIDTLMAKIKSTMMTQEQIQKEYDALVKSSEELLSALQKKKQQEEEAERLRRIQEEMEKERKRREEDEKRRRKEEEERRMKLEMEAKRKQEEEERKKREDDEKRIQAEVEAQLARQKEEESQQQAVLEQERRDRELALRIAQSEAELISDEAQADLALRSLDSYPVTSKNDGTRPKMTPEQMAKEMSEFLSRGPAVLATKAAAGTKKYDLSKWKYAELRDTINTSCDIELLAACREEFHRRLKVYHAWKSKNKKRNTETEQRAPKSVTDYDFAPFLNNSPQQNPAAQIPARQREIEMNRQQRFFRIPFIRPADQYKDPQSKKKGWWYAHFDGPWIARQMELHPDKPPILLVAGKDDMEMCELNLEETGLTRKRGAEILPRQFEEIWERCGGIQYLQNAIESRQARPTYATAMLQSLLK

SEQ ID NO: 26276 - protein, 29 aa, Homo sapiens
IIFFFSPTEPSHLPSPAHSTRAGIVSTMK

SEQ ID NO: 26277 - protein, 440 aa, Homo sapiens
TSFCLPAVVMTVKTEAAKGTLTYSRMRGMVAILIAFMKQRRMGLNDFIQKIANNSYACKHPEVQSILKISQPQEPELMNANPSPPPSPSQQINLGPSSNPHAKPSDFHFLKVIGKGSFGKVLLARHKAEEVFYAVKVLQKKAILKKKEEKHIMSERNVLLKNVKHPFLVGLHFSFQTADKLYFVLDYINGGELFYHLQRERCFLEPRARFYAAEIASALGYLHSLNIVYRDLKPENILLDSQGHIVLTDFGLCKENIEHNSTTSTFCGTPEYLAPEVLHKQPYDRTVDWWCLGAVLYEMLYGLPPFYSRNTAEMYDNILNKPLQLKPNITNSARHLLEGLLQKDRTKRLGAKDDFMEIKSHVFFSLINWDDLINKKITPPFNPNVSGPNDLRHFDPEFTEEPVPNSIGKSPDSVLVTASVKEAAEAFLGFSYAPPTDSFL

SEQ ID NO: 26278 - protein, 15 aa, Homo sapiens
RRRRGCHGRAAVPVR

SEQ ID NO: 26279 - protein, 487 aa, Homo sapiens
KTAVWSPPFQAMSGPTWLPPKQPEPARAPQGRAIPRGTPGPPPAHGAALQPHPRVNFCPLPSEQCYQAPGGPEDRGPAWVGSHGVLQHTQGLPADRGGLRPGSLDAEIDLLSSTLAELNGGRGHASRRPDRQAYEPPPPPAYRTGSLKPNPASPLPASPYGGPTPASYTTASTPAGPAFPVQVKVAQPVRGCGPPRRGASQASGPLPGPHFPLPGRGEVWGPGYRSQREPGPGAKEEAAGVSGPAGRGRGGEHGPQVPLSQPPEDELDRLTKKLVHDMNHPPSGEYFGQCGGCGEDVVGDGAGVVALDRVFHVGCFVCSTCRAQLRGQHFYAVERRAYCEGCYVATLEKCATCSQPILDRILRAMGKAYHPGCFTCVVCHRGLDGIPFTVDATSQIHCIEDFHRKFAPRCSVCGGAIMPEPGQEETVRIVALDRSFHIGCYKCEECGLLLSSEGECQGCYPLDGHILCKACSAWRIQELSATVTTDC

SEQ ID NO: 26280 - protein, 29 aa, Homo sapiens
KSLLSQQLLCKMPRPGIVAEHPRPAEVPP

SEQ ID NO: 26281 - protein, 321 aa, Homo sapiens
LPGFHSFAPCTVAPSLRAQPAKQRAPVAGVMQRARPTLWAAALTLLVLLRGPPVARAGASSAGLGPVVRCEPCDARALAQCAPPPAVCAELVREPGCGCCLTCALSEGQPCGIYTERCGSGLRCQPSPDEARPLQALLDGRGLCVNASAVSRLRAYLLPAPPAPGNASESEEDRSAGSVESPSVSSTHRVSDPKFHPLHSKIIIIKKGHAKDSQRYKVDYESQSTDTQNFSSESKRETEYGPCRREMEDTLNHLKFLNVLSPRGVHIPNCDKKGFYKKKQCRPSKGRKRGFCWCVDKYGQPLPGYTTKGKEDVHCYSMQSK

SEQ ID NO: 26282 - protein, 69 aa, Homo sapiens
LWVGPLRHLGSSRALQALQAAPVSSSFSGQTQPREDGGPRATGAESPAGRAGGALRRHGRGHEERDRAE

SEQ ID NO: 26283 - protein, 13 aa, Homo sapiens
KFYWKRNFKATVK

SEQ ID NO: 26284 - protein, 16 aa, Homo sapiens
MPEKDEFQLDRPEARQ

SEQ ID NO: 26285 - protein, 18 aa, Homo sapiens
TAKEEEMAPVRERPWPRQ

SEQ ID NO: 26286 - protein, 10 aa, Homo sapiens
LPSFWMHIPL

SEQ ID NO: 26287 - protein, 24 aa, Homo sapiens
KTFSVALAEQRQALGVEVFGFIRA

SEQ ID NO: 26288 - protein, 9 aa, Homo sapiens
TRSEFFRAV

SEQ ID NO: 26289 - protein, 43 aa, Homo sapiens
LIFVPLRLLPAPLPPAPAPSPGTRSPPLTERSRPVALRAAVPR

SEQ ID NO: 26290 - protein, 35 aa, Homo sapiens
KAASPLCSESSGYCGAFPRRSARRHLHLGPTSWAG

SEQ ID NO: 26291 - protein, 37 aa, Homo sapiens
VAPAPAVVKKQEAKKVVNPLFEKRPKNFGIGVCVQMM

SEQ ID NO: 26292 - protein, 84 aa, Homo sapiens
LPLPLPLPPRGSGASVVRPTPRCRWEEARGKPLAGLSPLLAHRLEEPSPGPVGRLPPLVAVTRGPPQPPAGRGARHGFWSRFKR

SEQ ID NO: 26293 - protein, 367 aa, Homo sapiens
VPTALSCRPHLQPRTCRLHLQPRALPGSSMADQAPFDTDVNTLTRFVMEEGRKARGTGELTQLLNSLCTAVKAISSAVRKAGIAHLYGIAGSTNVTGDQVKKLDVLSNDLVMNMLKSSFATCVLVSEEDKHAIIVEPEKRGKYVVCFDPLDGSSNIDCLVSVGTIFGIYRKKSTDEPSEKDALQPGRNLVAAGYALYGSATMLVLAMDCGVNCFMLDPAIGEFILVDKDVKIKKKGKIYSLNEGYARDFDPAVTEYIQRKKFPPDNSAPYGARYVGSMVADVHRTLVYGGIFLYPANKKSPNGKLRLLYECNPMAYVMEKAGGMATTGKEAVLDVIPTDIHQRAPVILGSPDDVLEFLKVYEKHSAQ

SEQ ID NO: 26294 - protein, 17 aa, Homo sapiens
KSNLDLEPGEIKLGMLS

SEQ ID NO: 26295 - protein, 715 aa, Homo sapiens
TRIAWRMADAGIRRVVPSDLYPLVLGFLRDNQLSEVANKFAKATGATQQDANASSLLDIYSFWLKSAKVPERKLQANGPVAKKAKKKASSSDSEDSSEEEEEVQGPPAKKAAVPAKRVGLPPGKAAAKASESSSSEESSDDDDEEDQKKQPVQKGVKPQAKAAKAPPKKAKSSDSDSDSSSEDEPPKNQKPKITPVTVKAQTKAPPKPARAAPKIANGKAASSSSSSSSSSSSDDSEEEKAAATPKKVWTITSVRAETVPKKQVVAKAPVKAATTPTRKSSSSEDSSSDEEEEQKKPMKNKPGPYSSVPPPSAPPPKKSLGTQPPKKAVEKQQPVESSEDSSDESDSSSEEEKKPPTKAVVSKATTKPPPAKKAAESSSDSSDSDSSEDDEAPSKPAGTTKNSSNKPAVTTKSPAVKPAAAPKQPVGGGQKLLTRKADSSSSEEESSSSEEEKTKKMVATTKPKATAKAALSLPAKQAPQGSRDSSSDSDSSSSEEEEEKTSKSAVKKKPQKVAGGAAPSKPASAKKGKAESSNSSSSDDSSEEEEEKLKGKGSPRPQAPKANGTSALTAQNGKAAKNSEEEEEEKKKAAVVVSKSGSLKKRKQNEAAKEAETPQAKKIKLQTPNTFPKRKKGEKRASSPFRRVREEEIEVDSRVADNSFDAKRGAAGDWGERANQVLKFTKGKSFRHEKTKKKRGSYRGGSISVQVNSIKFDSE

SEQ ID NO: 26296 - protein, 68 aa, Homo sapiens
RRPLPGPFCVPVSSHHLHLFLSGLPTTSFLSIPQASHGPRSLPNDPRLSWILSISVPERPTWYSWPRP

SEQ ID NO: 26297 - protein, 43 aa, Homo sapiens
KRKLLMLKMYHLSFQHLTTTSSVSTGISSSLYLSYRPKCHLSL

SEQ ID NO: 26298 - protein, 40 aa, Homo sapiens
VWAWAMRQGRFPIRAPTCPQSLERDSNPASMSRSLQPPSS

SEQ ID NO: 26299 - protein, 35 aa, Homo sapiens
VFAAPALRFTTLKNLPIPILSPCSNKSHYGDLETL

SEQ ID NO: 26300 - protein, 15 aa, Homo sapiens
VLTMGPERPAPNSRG

SEQ ID NO: 26301 - protein, 54 aa, Homo sapiens
LELTRRPIFITFEGQRRDPAHPALRLLRQHRHLVTLLLWRPGSVVRSRRGRVRG

SEQ ID NO: 26302 - protein, 29 aa, Homo sapiens
RSDWTPGSWAECVWASRSLGKWIWKSNIP

SEQ ID NO: 26303 - protein, 34 aa, Homo sapiens
VVFLVVRGLRPGLKWKRRHHDRTAEPRTLTVSAG

SEQ ID NO: 26304 - protein, 36 aa, Homo sapiens
LRRTMAELGEADEAELQRLVAAEQQKAQFTAQATCP

SEQ ID NO: 26305 - protein, 17 aa, Homo sapiens
LLHLLSLPSPLPRKPPI

SEQ ID NO: 26306 - protein, 62 aa, Homo sapiens
ICHANVIRYIVCRALQFPPEGWLRLSLNNGSITHLVIRPNGRVALRTLGDTGFMPPDKITRS

SEQ ID NO: 26307 - protein, 10 aa, Homo sapiens
LWHQTLPTVR

SEQ ID NO: 26308 - protein, 161 aa, Homo sapiens
RSQDLHCGACRALVDELEWEIAQVDPKKTIQMGSFRINPDGSQSVVEVPYARSEAHLTELLEEICDRMKEYGEQIDPSTHRKNYVRVVGRNGESSELDLQGIRIDSDISGTLKFACESIVEEYEDELIEFFSREADNVKDKLCSKRTDLCDHALHISHDEL

SEQ ID NO: 26309 - protein, 93 aa, Homo sapiens
TAEARQLGAPGPCGASGRGCPSAGTQSRRRRSASCVLASSARSGQAAVGAAGARTARGCCCCPRPARLETERPSQAAAPLMLGGCWRVAAAKR

SEQ ID NO: 26310 - protein, 33 aa, Homo sapiens
RMHPSLETPLKGWSLGDHIKRKMPTTSTTSTRF

SEQ ID NO: 26311 - protein, 20 aa, Homo sapiens
KKAAGAGKVTRFAQKSQKAK

SEQ ID NO: 26312 - protein, 95 aa, Homo sapiens
VRAGATLNVSTTRYAQTPAHIAAFGGHPQCLVWLIQAGANINKPDCEGETPIHKAARSGSLECISALVANGAHVDYVIRIDLIFSSNPRKGEHSI

SEQ ID NO: 26313 - protein, 160 aa, Homo sapiens
LVFPLFFHEGVFGCNCMKSQWCRPVAMDLGVYQLRHFSISFLSSLLGTENASVRLDNSSSGASVVAIDNKIEQAMDLVKSHLMYAVREEVEVLKEQIKELIEKNSQLEQENNLLKTLASPEQLAQFQAQLQTGSPPATTQPQGTTQPPAQPASQGSGPTA

SEQ ID NO: 26314 - protein, 19 aa, Homo sapiens
IQKVPRRNFLLEKMKKQYL

SEQ ID NO: 26315 - protein, 232 aa, Homo sapiens
RREVSRPGGGGRAKCQMQAGKPILYSYFRSSCSWRVRIALALKGIDYETVPINLIKDGGQQFSKDFQALNPMKQVPTLKIDGITIHQSLAIIEYLEEMRPTPRLLPQDPKKRASVRMISDLIAGGIQPLQNLSVLKQVGEEMQLTWAQNAITCGFNALEQILQSTAGIYCVGDEVTMADLCLVPQVANAERFKVDLTPYPTISSINKRLLVLEAFQVSHPCRQPDTPTELRA

SEQ ID NO: 26316 - protein, 409 aa, Homo sapiens
VTVLLPSSAPQRPPVSAPRPLARLCLTATMMFSGFNADYEASSSRCSSASPAGDSLSYYHSPADSFSSMGSPVNAQDFCTDLAVSSANFIPTVTAISTSPDLQWLVQPALVSSVAPSQTRAPHPFGVPAPSAGAYSRAGVVKTMTGGRAQSIGRRGKVEQLSPEEEEKRRIRRERNKMAAAKCRNRRRELTDTLQAETDQLEDEKSALQTEIANLLKEKEKLEFILAAHRPACKIPDDLGFPEEMSVASLDLTGGLPEVATPESEEAFTLPLLNDPEPKPSVEPVKSISSMELKTEPFDDFLFPASSRPSGSETARSVPDMDLSGSFYAADWEPLHSGSLGMGPMATELEPLCTPVVTCTPSCTAYTSSFVFTYPEADSFPSCAAAHRKGSSSNEPSSDSLSSPTLLAL

SEQ ID NO: 26317 - protein, 31 aa, Homo sapiens
RFGLGSVFFRRRTSECTTTGKSYYRWSKGSH

SEQ ID NO: 26318 - protein, 7 aa, Homo sapiens
TGPRDCV

SEQ ID NO: 26319 - protein, 29 aa, Homo sapiens
LSVTSPSPSPLPLPAAAAVAAPWAVGNER

SEQ ID NO: 26320 - protein, 69 aa, Homo sapiens
VAPECPSEPRGACPPAPRRGPARHLGRRRTDAGTSTRSRLLDLGTLTRFLWGTAEDYFEFRWSPVVWHI

SEQ ID NO: 26321 - protein, 12 aa, Homo sapiens
LDSKAFPLGDQH

SEQ ID NO: 26322 - protein, 21 aa, Homo sapiens
LTRLLNKSSDLRPAVNVVPER

SEQ ID NO: 26323 - protein, 24 aa, Homo sapiens
LSLFGLACLQRPWPTSTLGASSAM

SEQ ID NO: 26324 - protein, 11 aa, Homo sapiens
RTLSEHNDFKI

SEQ ID NO: 26325 - protein, 78 aa, Homo sapiens
LACGRPVLLPSPVQPGTRVRLAQVSVRDWEATEGRESGTLLELKLPTLSSLNNYRAGLGGTDSIFRSLMGCWVDGAGK

SEQ ID NO: 26326 - protein, 38 aa, Homo sapiens
VRASSHSTDLMEAMAMGSVEASYKCLAAALIVLTESGR

SEQ ID NO: 26327 - protein, 42 aa, Homo sapiens
KKRRCRTPRPWTCSRRVWLWWCRTRCSAICRSRLLWKKSTPK

SEQ ID NO: 26328 - protein, 17 aa, Homo sapiens
LLSFNPAVTVCQNNLES

SEQ ID NO: 26329 - protein, 13 aa, Homo sapiens
LQCYTYWSRWNAN

SEQ ID NO: 26330 - protein, 71 aa, Homo sapiens
TSPANQRPGLHQSHGRQKSTDRTGSLREDVLQLCHEGGCCSGFEEERMGGGGVGPLCHELQSHHFQKGHHR

SEQ ID NO: 26331 - protein, 46 aa, Homo sapiens
TWACRTPELGQSSSQRRPERFGDAGGSDGRELGAAAAEARGRKVCV

SEQ ID NO: 26332 - protein, 18 aa, Homo sapiens
LPAAMSVLGPGGARSPLD

SEQ ID NO: 26333 - protein, 380 aa, Homo sapiens
VQVKEQSILELGSLLAKTGQAAELGGLLKYVRPFLNSISKAKAARLVRSLLDLFLDMEAATGQEVELCLECIEWAKSEKRTFLRQALEARLVSLYFDTKRYQEALHLGSQLLRELKKMDDKALLVEVQLLESKTYHALSNLPKARAALTSARTTANAIYCPPKLQATLDMQSGIIHAAEEKDWKTAYSYFYEAFEGYDSIDSPKAITSLKYMLLCKIMLNTPEDVQALVSGKLALRYAGRQTEALKCVAQASKNRSLADFEKALTDYRAELRDDPIISTHLAKLYDNLLEQNLIRVIEPFSRVQIEHISSLIKLSKADVERKLSQMILDKKFHGILDQGEGVLIIFDEPPVDKTYEAALETIQNMSKVVDSLYNKAKKLT

SEQ ID NO: 26334 - protein, 6 aa, Homo sapiens
LAIEGS

SEQ ID NO: 26335 - protein, 35 aa, Homo sapiens
RSESLPIVQSSRKKRSQSPTLSALMEVSSFGKSFI

SEQ ID NO: 26336 - protein, 20 aa, Homo sapiens
RGRQAADSANIICPRLKNSS

SEQ ID NO: 26337 - protein, 19 aa, Homo sapiens
LNRAAEPSGVPTQAKLEHG

SEQ ID NO: 26338 - protein, 24 aa, Homo sapiens
LSPAPAAPTRRPTSSWCAEVMFAP

SEQ ID NO: 26339 - protein, 23 aa, Homo sapiens
LQRRRRKRWTSRTRPRGSSAAAS

SEQ ID NO: 26340 - protein, 16 aa, Homo sapiens
LQWRSTLLPCLLTQPK

SEQ ID NO: 26341 - protein, 37 aa, Homo sapiens
RSSSLRERPSTRPPRAAMSPAPRCCLERGGTWREAAP

SEQ ID NO: 26342 - protein, 393 aa, Homo sapiens
KGSYVSIHSSGFRDFLLKPELLRAIVDCGFEHPSEVQHECIPQAILGMDVLCQAKSGMGKTAVFVLATLQQIEPVNGQVTVLVMCHTRELAFQISKEYERFSKYMPSVKVSVFFGGLSIKKDEEVLKKNCPHVVVGTPGRILALVRNRSFSLKNVKHFVLDECDKMLEQLDMRRDVQEIFRLTPHEKQCMMFSATLSKDIRPVCRKFMQDPMEVFVDDETKLTLHGLQQYYVKLKDSEKNRKLFDLLDVLEFNQVIIFVKSVQRCMALAQLLVEQNFPAIAIHRGMAQEERLSRYQQFKDFQRRILVATNLFGRGMDIERVNIVFNYDMPEDSDTYLHRVARAGRFGTKGLAITFVSDENDAKILNDVQDRFEVNVAELPEEIDISTYIEQSR

SEQ ID NO: 26343 - protein, 11 aa, Homo sapiens
TSQGSRRFLSS

SEQ ID NO: 26344 - protein, 85 aa, Homo sapiens
LLLLVLHPSRHSAVSCLGVAAAMARKALPPTHLGQSWFCSCCRDTELAISALRARTATGSPGSCRCTAGPLPCASALESCCCRVT

SEQ ID NO: 26345 - protein, 12 aa, Homo sapiens
LQTPTDLLWEPE

SEQ ID NO: 26346 - protein, 31 aa, Homo sapiens
IWTPPRPDCMISRDPLELHVSAPRTSNPRRS

SEQ ID NO: 26347 - protein, 241 aa, Homo sapiens
VPPPHLQRGRSGLEPGTFRKMAAARPSLGRVLPGSSVLFLCDMQEKFRHNIAYFPQIVSVAARMLKVARLLEVPVMLTEQYPQGLGPTVPELGTEGLRPLAKTCFSMVPALQQELDSRPQLRSVLLCGIEAQACILDPRSYPGLALTSLYPQNTTLDLLDRGLQVHVVVDACSSRSQVDRLVALARMRQSGAFLSTSEGLILQLVGDAVHPQFKEIQKLIKEPAPDSGLLGLFQGQNSLLH

SEQ ID NO: 26348 - protein, 61 aa, Homo sapiens
LELGWDPELGSSAAGRPTCWCPGGSEPRRRPGPRGTTGRDASHPSGCSCGFPVQEEAVGVG

SEQ ID NO: 26349 - protein, 371 aa, Homo sapiens
LEYCLSVILNMGGAVSAGEDNDELIDNLKEAQYIRTELVEQAFRAIDRADYYLEEFKENAYKDLAWKHGNIHLSAPCIYSEVMEALDLQPGLSFLNLGSGTGYLSSMVGLILGPFGVNHGVELHSDVIEYAKQKLDFFIRTSDSFDKFDFCEPSFVTGNCLEISPDCSQYDRVYCGAGVQKEHEEYMKNLLKVGGILVMPLEEKLTKITRTGPSAWETKKILAVSFAPLIQPCHSESGKSRLVQLPPVAVRSLQDLARIAIRGTIKKIIHQETVSKNGNGLKNTPRFKRRRVRRRRMETIVFLDKEVFASRISNPSDDNSCEDLEEERREEEEKTPPETKPDPPVNFLRQKVLSLPLPDPLKYYLLYYREK

SEQ ID NO: 26350 - protein, 27 aa, Homo sapiens
LNLFLSLQNLILALDLRRESLTRDETQ

SEQ ID NO: 26351 - protein, 12 aa, Homo sapiens
RSWRRRDPGNRH

SEQ ID NO: 26352 - protein, 1059 aa, Homo sapiens
MVLLEPLNEETFINNLKKRFDHSEIYTYIGSVVISVNPYRSLPIYSPEKVEEYRNRNFYELSPHIFALSDEAYRSLRDQDKDQCILITGESGAGKTEASKLVMSYVAAVCGKGAEVNQVKEQLLQSNPVLEAFGNAKTVRNDNSSRFGKYMDIEFDFKGDPLGGVISNYLLEKSRVVKQPRGERNFHVFYQLLSGASEELLNKLKLERDFSRYNYLSLDSAKVNGVDDAANFRTVRNAMQIVGFMDHEAESVLAVVAAVLKLGNIEFKPESRVNGLDESKIKDKNELKEICELTGIDQSVLERAFSFRTVEAKQEKVSTTLNVAQAYYARDALAKNLYSRLFSWLVNRINESIKAQTKVRKKVMGVLDIYGFEIFEDNSFEQFIINYCNEKLQQIFIELTLKEEQEEYIREDIEWTHIDYFNNAIICDLIENNTNGILAMLDEECLRPGTVTDETFLEKLNQVCATHQHFESRMSKCSRFLNDTSLPHSCFRIQHYAGKVLYQVEGFVDKNNDLLYRDLSQAMWKASHALIKSLFPEGNPAKINLKRPPTAGSQFKASVATLMKNLQTKNPNYIRCIKPNDKKAAHIFNEALVCHQIRYLGLLENVRVRRAGYAFRQAYEPCLERYKMLCKQTWPHWKGPARSGVEVLFNELEIPVEEYSFGRSKIFIRNPRTLFKLEDLRKQRLEDLATLIQKIYRGWKCRTHFLLMKKSQIVIAAWYRRYAQQKRYQQTKSSALVIQSYIRGWKARKILRELKHQKRCKEAVTTIAAYWHGTQVRREYRKFFRANAGKKIYEFTLQRIVQKYFLEMKNKMPSLSPIDKNWPSRPYLFLDSTHKELKRIFHLWRCKKYRDQFTDQQKLIYEEKLEASELFKDKKALYPSSVGQPFQGAYLEINKNPKYKKLKDAIEEKIIIAEVVNKINRANGKSTSRIFLLTNNNLLLADQKSGQIKSEVPLVDVTKVSMSSQNDGFFAVHLKEGSEAASKGDFLFSSDHLIEMATKLYRTTLSQTKQKLNIEISDEFLVQFRQDKVCVKFIQGNQKNGSVPTCKRKNNRLLEVAVP

SEQ ID NO: 26353 - protein, 329 aa, Homo sapiens
MALVSGISLDPEAAIGVTKRPPPKWVDGVDEIQYDVGRIKQKMKELASLHDKHLNRPTLDDSSEEEHAIEITTQEITQLFHRCQRAVQALPSRARACSEQEGRLLGNVVASLAQALQELSTSFRHAQSGYLKRMKNREERSQHFFDTSVPLMDDGDDNTLYHRGFTEDQLVLVEQNTLMVEEREREIRQIVQSISDLNEIFRDLGAMIVEQGTVLDRIDYNVEQSCIKTEDGLKQLHKDFSHVEGLLSQSLRLWKSYYICQGMALVSHPLGRSSSCLSPLECRVPVCNVFANRKKSERSSYTLACSVPGTGGKKNNKKSKRPAFRMLKL

SEQ ID NO: 26354 - protein, 148 aa, Homo sapiens
MSTCPQRICPRAGTGAMWMVSTMPASPGTSTSPNTAAPAGPTPAPALWRIGSTSRGRERGPPPSCPCRTSSTAVTLAPVKGVMTCPCGTTPTSTASLTRPATTTRPRTRSVTSLTNVGHAMNSKSATPSGTTPSGGWETTAPSLGGRR

SEQ ID NO: 26355 - protein, 1098 aa, Homo sapiens
MDSLCSVPVEGKETKGNFNRTVTTGGFFIPATKMHSTGTGSSCDLTKQEGEWGQEGMPPGAEGGFDVSSDRSHLQGAQARPPPEQLKVFRPVEDPESEQTAPKMLGMFYTSNDSPSKSVFTSSLFQMEPSPRNQRKALNISEPFAVSVPLRVSAVISTNSTPCRTPPKELQSLSSLEEFSFHGSESGGWPEEEKPLGAETSAASVPKKAGLEDAKAVPEAPGTVECSKGLSQEPGAHLEEKKTPESSLSSQHLNELEKRPNPEKVVEEGREAGEMESSTLQESPRARAEAVLLHEMDEDDLANALIWPEIQQELKIIESEEELSSLPPPALKTSPIQPILESSLGPFIPSEPPGSLPCGSFPAPVSTPLEVWTRDPANQSTQGASTAASREKPEPEQGLHPDLASLAPLEIVPFEKASPQATVEVGGPGNLSPPLPPAPPPPTPLEESTPVLLSKGGPEREDSSRKLRTDLYIDQLKSQDSPEISSLCQGEEATPRHSDKQNSKNAASEGKGCGFPSPTREVEIVSQEEEDVTHSVQEPSDCDEDDTVTDIAQHGLEMVEPWEEPQWVTSPLHSPTLKDAHKAQVQGLQGHQLEKRLSHRPSLRQSHSLDSKPTVKSQWTLEVPSSSSCANLETERNSDPLQPQAPRREITGWDEKALRSFREFSGLKGAEAPPNQKGPSGVQPNPAETSPISLAEGKELGTHLGHSSPQIRQGGVPGPESSKESSPSVQDSTSPGEHPAKLQLKSTECGPPKGKNRPSSLNLDPAIPIADLFWFENVASFSSPGMQVSEPGDPKVTWMTSSYCKADPWRVYSQDPQDLDIVAHALTGRRNSAPVSVSAVRTSFMVKMCQARAVPVIPPKIQYTQIPQPLPSQSSGENGVQPLERSQEGPSSTSGTTQKPAKDDSPSSLESSKEEKPKQDPGAIKSSPVDATAPCMCEGPTLSPEPGSSNLLSTQDAVVQCRKRMSETEPSGDNLLSSKLERPSGGSKPFHRSRPGRPQSLILFSPPFPIMDHLPPSSTVTDSKVLLSPIRSPTQTVSPGLLCGELAENTWVTPEGVTLRNKMTIPKNGQRLETSTSCFYQPQRRSVILDGRSGRQIE

SEQ ID NO: 26356 - protein, 188 aa, Homo sapiens [sequence omitted]

SEQ ID NO: 26357 - protein, 159 aa, Homo sapiens
MADAEVIILPKKHKKKKERKSLPEEDVAEIQHAEEFLIKPESKVAKLDTSQWPLLLKNFDKLNVRTTHYTPLACGSNPLKREIGDYIRTGFINLDKPSNPSSHEVVAWIRRILRVEKTGHSGTLDPKVTGCLIVCIERATRLVKSQQSAGMWEREGRTG

SEQ ID NO: 26358 - protein, 234 aa, Homo sapiens
IAYARIEGDMIVCAAYAHELPKYGVKVGLTNYAAAYCTGLLLARRLLNRFGMDKIYEGQVEVTGDEYNVESIDGQPGAFTCYLDAGLARTTTGNKVFGALKGAVDGGLSIPHSTKRFPGYDSESKEFNAEVHRKHIMGQNVADYMRYLMEEDEDAYKKQFSQYIKNSVTPDMMEEMYKKAHAAIRENPVYEKKPKKEVKKKRWNRPKMSLAQKKDRVAQKKASFLRAQERAAES

SEQ ID NO: 26359 - protein, 158 aa, Homo sapiens
LPVACLLFTMASSDIQVKELEKRASGQAFELILSPRSKESVPEFPLSPPKKKDLSLEEIQKKLEAAEERRKSHEAEVLKQLAEKREHEKEVLQKAIEENNNFSKMAEEKLTHKMEANKENREAQMAAKLERLREKDKHIEEVRKNKESKDPADETEAD

SEQ ID NO: 26360 - protein, 52 aa, Homo sapiens [sequence omitted]

SEQ ID NO: 26361 - protein, 36 aa, Homo sapiens
ILLAGEITSRAAVDYQKVVREAVKHIGYDDSSKGVF

SEQ ID NO: 26362 - protein, 55 aa, Homo sapiens
LARSIAKEGFEKISKGANPVEIRRGVMLAVDAVIAELKKQSKPVTTPEEIAQVRT

SEQ ID NO: 26363 - protein, 189 aa, Homo sapiens
LWKFETSKYYVTIIDAPGHRDLIKNMITGTSQADCAVLIVAAGFGEFEAGISKNGQTREHALLAYTLGVKQLIVGVNKMDSTEPPYSHKRYEEIVKEVSTYIKKIGHNTDTVAFVPVSGWNGDNTLEPSANMPWFKGWKVTRKDGNASGTTLLEALDCILPPTRPTDKPLCLPLQDVYKIGGIGTVPVG

SEQ ID NO: 26364 - protein, 19 aa, Homo sapiens
MGLNDFIQKIANNSYACKQ

SEQ ID NO: 26365 - protein, 41 aa, Homo sapiens
IQEQMKKGHNPTGLLALQQIADYIMANSFSGFSSPPLSKNK

SEQ ID NO: 26366 - protein, 97 aa, Homo sapiens
KSNMATLKDQLIYNLLKEEQTPQNKITVVGVGAVGMACAISILMKDLADELALVDVIEDKLKGEMMDLQHGSLFLRTPKIVSGKALPNCSYIKLQLD

SEQ ID NO: 26367 - protein, 210 aa, Homo sapiens
MSKGPAVGIDLGTTYSCVGVFQHGKVEIIANDQGNRTTPSYVAFTDTERLIGDAAKNQVAMNPTNTVFDAKRLIGRRFDDAVVQSDMKHWPFMVVNDAGRPKVQVEYKGETKSFYPEEVSSMVLTKMKEIAEAYLGKTVTNAVVTVPAYFNDSQRQATKDAGTIAGLNVLRIINEPTAAAIAYGLDKKVCTICDASSDYFKINLIHRKFK

SEQ ID NO: 26368 - protein, 112 aa, Homo sapiens
KEDHPFEYRKKEGEKIRKKYPDRVPVIVEKAPKARVPDLDKRKYLVPSDLTVGQFYFLIRKRIHLRPEDALFFFVNNTIPPTSATMGQLYEDNHEEDYFLYVAYSDESVYGK

SEQ ID NO: 26369 - protein, 24 aa, Homo sapiens
LAAQYEHDLEVAQTTALPDEDDDL

SEQ ID NO: 26370 - protein, 13 aa, Homo sapiens
VAKADKLAEEHSS

SEQ ID NO: 26371 - protein, 28 aa, Homo sapiens
VGVIKAVDKKAAGAGKVTRFAQKSQKAK

SEQ ID NO: 26372 - protein, 298 aa, Homo sapiens
IDLNYMVYMFQYGSTHGKFHGTVKAENRKLVITGNLITIFQERDPSKIKWGDAGTEYSVESTSIFTIMEKSGAHLQGGAKRVILSAPSANTLMFVMGVTHENYDSSLKIISNASCTMNCLAPLAKVIRDNFGIMEGLMTTVHAVPATQKTVDGPSRRLWCDSHGALQNIIPAPSDAAKAVAKVIPELNGKLTGMAFCVPTANLSVVDLTCCLEKPAKYDDIKKVVKQVSEGPLKGILGYTEYQLVSSDFNSDTHSSTFDAGASIALNDHFFKLISWYDNEFGYSNRVMDLMAHMSSKE

SEQ ID NO: 26373 - protein, 159 aa, Homo sapiens
VFPLFFHEGVFGCNCMKSQWCRPVAMDLGVYQLRHFSISFLSSLLGTENASVRLDNSSSGASVVAIDNKIEQAMDLVKSHLMYAVREEVEVLKEQIKELIEKNSQLEQENNLLKTLASPEQLAQFQAQLQTGSPPATTQPQGTTQPPAQPASQGSGPTA

SEQ ID NO: 26374 - protein, 41 aa, Homo sapiens
KRCMKTLNAHEHFVTSLDFHKTAPYVVTGSVDQTVKVWECR

SEQ ID NO: 26375 - protein, 30 aa, Homo sapiens
TPIVIQPASATETTQLTADSHPSYHTDGFN

SEQ ID NO: 26376 - protein, 32 aa, Homo sapiens
LLMYRMKKKDEGSYDLGKKPIYKKAPTNEFYA

SEQ ID NO: 26377 - protein, 32 aa, Homo sapiens
KKFGIQLKEIDKEEHLYILISTPESLAGILGT

SEQ ID NO: 26378 - protein, 236 aa, Homo sapiens
KPCAGGGAPLSLRCATEDPGVAMGRRPARCYRYCKNKPYPKSRFCRGVPDAKIRIFDLGRKKAKVDEFPLCGHMVSDEYEQLSSEALEAARICANKYMVKSCGKDGFHIRVRLHPFHVIRINKMLSCAGADRLQTGMRGAFGKPQGTVARVHIGQVIMSIRTKLQNKEHVIEALRRAKFKFPGRQKIHISKKWGFTKFNADEFEDMVAEKRLIPDGCGVKYIPSRGPLDKWRALHS

SEQ ID NO: 26379 - protein, 257 aa, Homo sapiens
MQSENFCSYIFTHAKTKTLREGILVTGNRLGMLVETYLDAINSGATPCLENAMAVLAQCENSAAVQRAANHYSQQMAQQVRFPTDTLQELLDVHAVCEREAIAVFMEYSFKDKSQEFQKKLVDTMEKKKEDFVLQNEEASAKYCQAELKRLSELLTESISRGTFFVPGGHNIYLEAKKKIEQDYTLVPRKGVKVSDIDRAWTLEEAPGRWRGKVKVHSYRERKKREKAVQPNSEEKRGGKGLDFHIGTTFFPVLKDL

SEQ ID NO: 26380 - protein, 1762 aa, Homo sapiens
MAKASAAELKVFKSGSVDSRVPGGPPASNLRKQKSLTNLSFLTDSEKKLQLYEPEWSDDMAKAPKGLGKVGSKGREAPLMSKTLSKSEHSLFQAKGSPAGGAKTPLAPLAPNLGKPSRIPRGPYAEVKPLSKAPEAAVSEDGKSDDELLSSKAKAQKSSGPVPSAKGQEERAFLKVDPELVVTVLGDLEQLLFSQMLDPESQRKRTVQNVLDLRQNLEETMSSLRGSQVTHSSLEMTCYDSDDANPRSVSSLSNRSSPLSWRYGQSSPRLQAGDAPSVGGSCRSEGTPAWYMHGERAHYSHTMPMRSPSKLSHISRLELVESLDSDEVDLKSGYMSDSDLMGKTMTEDDDITTGWDESSSISSGLSDASDNLSSEEFNASSSLNSLPSTPTASRRNSTIVLRTDSEKRSLAESGLSWFSESEEKAPKKLEYDSGSLKMEPGTSKWRRERPESCDDSSKGGELKKPISLGHPGSLKKGKTPPVAVTSPITHTAQSALKVAGKPEGKATDKGKLAVKNTGLQRSSSDAGRDRLSDAKKPPSGIARPSTSGSFGYKKPPPATGTATVMQTGGSATLSKIQKSSGIPVKPVNGRKTSLDVSNSAEPGFLAPGARSNIQYRSLPRPAKSSSMSVTGGRGGPRPVSSSIDPSLLSTKQGGLTPSRLKEPTKVASGRTTPAPVNQTDREKEKAKAKAVALDSDNISLKSIGSPESTPKNQASHPTATKLAELPPTPLRATAKSFVKPPSLANLDKVNSNSLDLPSSSDTTHASKVPDLHATSSASGGPLPSCFTPSPAPILNINSASFSQGLELMSGFSVPKETRMYPKLSGLHRSMESLQMPMSLPSAFPSSTPVPTPPAPPAAPTEEETEELTWSGSPRAGQLDSNQRDRNTLPKKGLRYQLQSQEETKERRHSHTIGGLPESDDQSELPSPPALPMSLSAKGQLTNIVHGSVLSLASSASSTYSSAEERMQSEQIRKLRRELESSQEKVATLTSQLSANANLVAAFEQSLVNMTSRLRHLAETAEEKDTELLDLRETIDFLKKKNSEAQAVIQGALNASETTPKELRIKRQNSSDSISSLNSITSHSSIGSSKDADAKKKKKKSWLRSSFNKAFSIKKGPKSASSYSDIEEIATPDSSAPSSPKLQHGSTETASPSIKSSTSSSVGTDVTEGPAHPAPHTRLFHANEEEEPEKKEVSELRSELWEKEMKLTDIRLEALNSAHQLDQLRETMHNMQLEVDLLKAENDRLKVAPGPSSGSTPGQVPGSSALSSPRRSLGLALTHSFGPSLADTDLSPMDGISTCGPKEEVTLRVVVRMPPQHIIKGDLKQQEFFLGCSKVSGKVDWKMLDEAVFQVFKDYISKMDPASTLGLSTESIHGYSISHVKRVLDAEPPEMPPCRRGVNNISVSLKGLKEKCVDSLVFETLIPKPMMQHYISLLLKHRRLVLSGPSGTGKTYLTNRLAEYLVERSGREVTEGIVSTFNMHQQSCKDLQLYLSNLANQIDRETGIGDVPLVILLDDLSEAGSISELVNGALTCKYHKCPYIIGTTNQPVKMTPNHGLHLSFRMLTFSNNVEPANGFLVRYLRRKLVESDSDINANKEELLRVLDWVPKLWYHLHTFLEKHSTSDFLIGPCFFLSCPIGIEDFRTWFIDLWNNSIIPYLQEGAKDGIKVHGQKAAWEDPVEWVRDTLPWPSAQQDQSKLYHLPPPTVGPHSIASPPEDRTVKDSTPSSLDSDPLMAMLLKLQEAANYIESPDRETILDPNLQATL

SEQ ID NO: 26381 - protein, 143 aa, Homo sapiens
MNDTVTIRTRKFMTNRLLQRKQMVIDVLHPGKATVPKTEIREKLAKMYKTTPDVIFVFGFRTHFGGGKTTGFGMIYDSLDYAKKNEPKHRLARHGLYEKKKTSRKQRKERKNRMKKVRGTAKANVGAGKKKVTCFKKLCSIVS

SEQ ID NO: 26382 - protein, 182 aa, Homo sapiens
MQVLCGRRSSPAGLRHMSGSELTELLDQVEGAIRDFSEELVQQLARRDELEFEKEVKNSFITVLIEVQNKQKEQRELMKKRRKEKGLSLQSSRIEKGNQMPLKRFSMEGISNILQSGIRQTFGSSGTDKQYLNTVIPYEKKASPPSVEDLQMLTNILFAMKEDNEKVPTLLTDYILKVLCPT

SEQ ID NO: 26383 - protein, 1167 aa, Homo sapiens
MGSDILSTQKAAVETSFLDYGENLVQKWQVLSEVLSCSEKLVCHLGRLGSVSEAKAFCLEALKLTTKLQIPRQCALFLVLKGELELARNDIDLCQSDLQQVLFLLESCTEFGGVTQHLDSVKKVHLQKGKQQAQVPCPPQLPEEELFLRGPALELVATVAKEPGPIAPSTNSSPVLKTKPQPIPNFLSHSPTCDCSLCASPVLTAVCLRWVLVTAGVRLAMGHQAQGLDLLQVVLKGCPEAAERLTQALQASLNHKTPPSLVPSLLDEILAQAYTLLALEGLNQPSNESLQKVLQSGLKFVAARIPHLEPWRASLLLIWALTKLGGLSCCTTQLFASSWGWQPPLIKSVPGSEPSKTQGQKRSGRGRQKLASAPLRLNNTSQKGLEGRGLPCTPKPPDRIRQAGPHVPFTVFEEVCPTESKPEVPQAPRVQQRVQTRLKVNFSDDSDLEDPVSAEAWLAEEPKRRGTASRGRGRARKGLSLKTDAVVAPGSAPGNPGLNGRSRRAKKVASRHCEERRPQRASDQARPGPEIMRTIPEEELTDNWRKMSFEILRGSDGEDSASGGKTPAPGPEAASGEWELLRLDSSKKKLPSPCPDKESDKDLGPRLRLPSAPVATGLSTLDSICDSLSVAFRGISHCPPSGLYAHLCRFLALCLGHRDPYATAFLVTESVSITCRHQLLTHLHRQLSKAQKHRGSLEIADQLQGLSLQEMPGDVPLARIQRLFSFRALESGHFPQPEKESFQERLALIPSGVTVCVLALATLQPGTVGNTLLLTRLEKDSPPVSVQIPTGQNKLHLRSVLNEFDAIQKAQKENSSCTDKREWWTGRLALDHRMEVLIASLEKSVLGCWKGLLLPSSEEPGPAQEASRLQELLQDCGWKYPDRTLLKIMLSGAGALTPQDIQALAYGLCPTQPERAQELLNEAVGRLQGLTVPSNSHLVLVLDKDLQKLPWESMPSLQALPVTRLPSFRFLLSYSIIKEYGASPVLSQGVDPRSTFYVLNPHNNLSSTEEQFRANFSSEAGWRGVVGEVPRPEQVQEALTKHDLYIYAGHGAGARFLDGQAVLRLSCRAVALLFGCSSAALAVRGNLEGAGIVLKYIMAGCPLFLGNLWDVTDRDIDRYTEALLQGWLGAGPGAPLLYYVNQARQAPRLKYLIGAAPIAYGLPVSLR

SEQ ID NO: 26384 - protein, 85 aa, Homo sapiens
MAAAAAGPAASQRFFQSFSDALIDQDPQAALEELTKALEQKPDDTQYYCQRAYCHILLGNYCGSFSYKVYCPFLISYLYILPMAN

SEQ ID NO: 26385 - protein, 117 aa, Homo sapiens
MKDLGSHFPPPSIPGYVAFSSPELQAQIEARGLAPLHWADDDGNPTEQYPLNPNGSPGGVAGICSCDGRHLAVMPHPERAVRPWQWAWRPPPFDTLTTSPWLQLFINARNWTLEGSC

SEQ ID NO: 26386 - protein, 534 aa, Homo sapiens
MLLFAWEGWHNAAGIPLKPLYEDFTALSNEAYKQDGFTDTGAYWRSWYNSPTFEDDLEHLYQQLEPLYLNLHAFVRRALHRRYGDRYINLRGPIPAHLLGDMWAQSWENIYDMVVPFPDKPNLDVTSTMLQQGWNATHMFRVAEEFFTSLELSPMPPEFWEGSMLEKPADGREVVCHASAWDFYNRKDFRIKQCTRVTMDQLSTVHHEMGHIQYYLQYKDLPVSLRRGANPGFHEAIGDVLALSVSTPEHLHKIGLLDRVTNDTESDINYLLKMALEKIAFLPFGYLVDQWRWGVFSGRTPPSRYNFDWWYLRTKYQGICPPVTRNETHFDAGAKFHVPNVTPYIRYFVSFVLQFQFHEALCKEAGYEGPLHQCDIYRSTKAGAKLRKVLQAGSSRPWQEVLKDMVGLDALDAQPLLKYFQPVTQWLQEQNQQNGEVLGWPEYQWHPPLPDNYPEGIDLVTDEAEASKFVEEYDRTSQVVWNEYAEANWNYNTNITTETSKILVGATSPPPNLSMCIHTEMLSRSPHSGAATTF

SEQ ID NO: 26387 - protein, 357 aa, Homo sapiens
MHPSLLTQDQKAYIREKPYKCSDCGKAFNQRSNLTTHQRIHTGQKPHKCDICGKGFRRIANLASHHRIHTGEKPYRCNECGKTFNQTFNLTTHQRIHTGQKPYKCDRCGKGFRQIGNLASHHRIHTGEKPYRCNECGKTFNRMFHLTRHQRIHTGQKPYKCDICGKGFRQIANLASHHRIHTGEKPYKCSDCGKTFNYRSHLTRHQRIHTGQKPYKCDTCGKDFSQNSYLENHQRIHTREKSYRCNECGKTFNKMTNLTTHQRIHTGQKTYKCDICGKGFRQIGNLASHHRIHTGEKPYRCNECGKTFNRMFHLTRHQRIHTGQKPYKCDICGKSFSQNSYLENHQRIHTGEKTYKL

SEQ ID NO: 26388 - protein, 423 aa, Homo sapiens
MRRIHSLPQKLLGCSPALKRSHSDSLDHDIFQLIDPDENKENEAFEFKKPVRPVSRGCLHSHGLQEGKDLFTQRQNSAPARMLSSNERDSSEPGNFIPLFTPQSPVTATLSDEDDGFVDLLDGENLKNEEETPSCMASLWTAPLVMRTTNLDNRCKLFDSPSLCSSSTRSVLKRPERSQEESPPGSTKRRKSMSGASPKESTNPEKAHETLHQSLSLASSPKGTIENILDNDPRDLIGDFSKGYLFHTVAGKHQDLKYISPEIMASVLNGKFANLIKEFVIIDCRYPYEYEGGHIKGAVNLHMEEEVEDFLLKKPIVPTDGKRVIVVFHCEFSSERGPRMCRYVRERDRLGNEYPKLHYPELYVLKGGYKEFFMKCQSYCEPPSYRPMHHEDFKEDLKKFRTKSRTWAGEKSKREMYSRLKKL

SEQ ID NO: 26389 - protein, 223 aa, Homo sapiens
MRAILVDWLVEVGEEYKLQNETLHLAVNYIDRFLSSMSVLRGKLQLVGTAAMLLASKFEEIYPPEVAEFVYITDDTYTKKQVLRMEHLVLKVLTFDLAAPTVNQFLTQYFLHQQPANCKVESLAMFLGELSLIDADPYLKYLPSVIAGAAFHLALYTVTGQSWPESLIRKTGYTLESLKPCLMDLHQTYLKAPQHAQQSIREKYKNSKYHGVSLLNPPETLNL

SEQ ID NO: 26390 - protein, 226 aa, Homo sapiens
MFCAQQIHIPPELPDILKQFTKAAIRTQPADVLRWSAGYFSALSRGDPLPVKDRMEMPTATQKTDTGLTQGLLKVLHKQCHHKRYVELTDLEQKWKNLCLPKEKFKALLQLDPCENKIKWINFLALGCSMLGGSLNTALKHLCEILTDDPEGGPARIPFKTFSYVYRYLARLDSDVSPLETESYLASLKENMVLSWLSTTRIWREESLMIHRSAMLGSEHGRARRG

SEQ ID NO: 26391 - protein, 192 aa, Homo sapiens
MFCAQQIHIPPELPDILKQFTKAAIRTQPADVLRWSAGYFSALSRGDPLPVKDRMEMPTATQKTDTGLTQGLLKVLHKQCHHKRYVELTDLEQKWKNLCLPKEKFKALLQLDPCENKIKWINFLALGCSMLGGSLNTALKHLCEILTDDPEGGPARIPFKTFSYVYRYLARLDSDVSPLETESYLASLKENM

SEQ ID NO: 26392 - protein, 72 aa, Homo sapiens
MDPPALPPKPPKPTTVANNGMNNNMSLQDAEWYWGDISREEVNEKLRDTADGTFLVRDASTKMHGDYTLTLR

SEQ ID NO: 26393 - protein, 102 aa, Homo sapiens
MQSGKTSSILCRRGRWRWSDWFTSQLPQAEASPGPVKLEPGCKARRCCVAPEELARSHGIRRLHTHVHTPRSGEGTVLRGSNLYSSGGSRKSQNLLFSGWVM

SEQ ID NO: 26394 - protein, 91 aa, Homo sapiens
MVHTWQKAKSRSTVIRKRNQPSIEQTTEILLCLSPVEVASLKEGINFFRNKSTGKDYVLYKNKSRLRACKNMCKHQGGLFIKDIEDLAGSC

SEQ ID NO: 26395 - protein, 114 aa, Homo sapiens
MRLKSSFLRGLGSWKSNPLRLGGWTILLTLTMGQGEPGGPQGDPWVPHELLLPSLCDSSHASSWGSGSITCAWRGGDSSSHPLVSGHILSNSPVAAVMCSSMGTHLSPFKGTLL

SEQ ID NO: 26396 - protein, 843 aa, Homo sapiens
MKNFAENTMNELLGWYGYDKVELKDGEDIEFRSYPTDGESRQHISVLKENSLPKPKLPEDSVISPYNISTGYSGLATGNGLSDSPAGSKDHGSVPIIVPLIPPPFIKPPAEDDVSNVQIMCAWCQKVGIKRYSLSMGSEVKSFCSEKCFAACRRAYFKRNKARDEDGHAENFPQQHYAKETPRLAFKNNCELLVCDWCKHIRHTKEYLDFGDGERRLQFCSAKCLNQYKMDIFYKETQANLPAGLCSTLHPPMENKAEGTGVQLLTPDSWNIPLTDARRKAPSPVATAGQSQGPGPSASTTVSPSDTANCSVTKIPTPVPKSIPISETPNIPPVSVQPPASIGPPLGVPPRSPPMVMTNRGPVPLPIFMEQQIMQQIRPPFIRGPPHHASNPNSPLSNPMLPGIGPPPGGPRNLGPTSSPMHRPMLSPHIHPPSTPTMPGNPPGLLPPPPPGAPLPSLPFPPVSMMPNGPMPVPQMMNFGLPSLAPLVPPPTLLVPYPVIVPLPVPIPIPIPIPHVSDSKPPNGFSSNGENFIPNAPGDSAAAGGKPSGHSLSPRDSKQGSSKSADSPPGCSGQALSLAPTPAEHGRSEVVDLTRRAGSPPGPPGAGGQLGFPGVLQGPQDGVIDLTVGHRARLHNVIHRALHAHVKAEREPSAAERRTCGGCRDGHCSPPAAGDPGPGAPAGPEAAAACNVIVNGTRGAAAEGAKSAEPPPEQPPPPPPPAPPKKLLSPEEPAVSELESVKENNCASNCHLDGEAAKKLMGEEALAGGDKSDPNLNNPADEDHAYALRMLPKTGCVIQPVPKPAEKAAMAPCIISSPMLSAGPEDLEPPLKRRCLRIRNQNK

SEQ ID NO: 26397 - protein, 199 aa, Homo sapiens
MKIEHLNATFQPAKIGHPHGLQVTYLKDNSTRNIFIYHEDGKIVDWFNALRAARFHYLQVAFPGAGDADLVPKLSRNYLKEGYMEKTGPKQTEGFRKRWFTMDDRRLMYFKDPLDAFARGEVFIGSKESGYTVLHGFPPSTQGHHWPHGITIVTPDRKFLFACETESDQREWVAAFQKAVDRPMLPQEYAVEAHFKHKP

SEQ ID NO: 26398 - protein, 446 aa, Homo sapiens
MKSPPYIFSPIPFLGHAIAFGKSPIEFLENAYEKYGPVFSFTMVGKTFTYLLGSDAAALLFNSKNEDLNAEDVYSRLTTPVFGKGVAYDVPNPVFLEQKKMLKSGLNIAHFKQHVSIIEKETKEYFESWGESGEKNVFEALSELIILTASHCLHGKEIRSQLNEKVAQLYADLDGGFSHAAWLLPGWLPLPSFRRRDRAHREIKDIFYKAIQKRRQSQEKIDDILQTLLDATYKDGRPLTDDEVAGMLIGLLLAGQHTSSTTSAWMGFFLARDKTLQKKCYLEQKTVCGENLPPLTYDQLKDLNLLDRCIKETLRLRPPIMIMMRMARTPQTVAGYTIPPGHQVCVSPTVNQRLKDSWVERLDFNPDRYLQDNPASGEKFAYVPFGAGRHRCIGENFAYVQIKTIWSTMLRLYEFDLIDGYFPTVNYTTMIHTPENPVIRYKRRSK

SEQ ID NO: 26399 - protein, 132 aa, Homo sapiens
MYQDCPMQGRRDTDHWLRSNWIYRGEEASRVHVELQFTVRDCKSFPGGAGPLGCKETFNLLYMESDQDVGIQLRRPLFQKVLLPSMPSGSWCRSLVAPYWVPEKVAETGRGCRGRILKRIWRLKAGHGGLCL

SEQ ID NO: 26400 - protein, 122 aa, Homo sapiens
MVLLLKGVPFTLTTVDTRRSPDVLKDFAPGSQLPILLYDSDAKTDTLQIEDFLEETLGPPDFPSLAPRYRESNTAGNDVFHKFSAFIKNPVPAQDEGEAGSGGRVPRREGALGLVLTAPPAP

SEQ ID NO: 26401 - protein, 223 aa, Homo sapiens
MGDAVSDWSPMHEAAIHGHQLSLRNLISQGWAVNIITADHVSPLHEACLGGHLSCVKILLKHGAQVNGVTADWHTPLFNACVSGSWDCVNLLLQHGASVQPESDLASPIHEAARRAYGGNIDHKISHLGTPLYLACENQQRACVKKLLESGADVNQGKGQDSPLHAVARTASEELACLLMDFGADTQAKNAEGKRPVELVPPESPLAQLFLEREGASLPKPKP

SEQ ID NO: 26402 - protein, 298 aa, Homo sapiens
RMGFVKVVKNKAYFKRYQVKFRRRREGKTDYYARKRLVIQDKNKYNTPKYRMIVRVTNRDIICQIAYARIEGDMIVCAAYAHELPKYGVKVGLTNYAAAYCTGLLLARRLLNRFGMDKIYEGQVEVTGDEYNVESIDGQPGAFTCYLDAGLARTTTGNKVFGALKGAVDGGLSIPHSTKRFPGYDSESKEFNAEVHRKHIMGQNVADYMRYLMEEDEDAYKKQFSQYIKNSVTPDMMEEMYKKAHAAIRENPVYEKKPKKEVKKKRWNRPKMSLAQKKDRVAQKKASFLRAQERAAES

SEQ ID NO: 26403 - protein, 50 aa, Homo sapiens
VGVFLLPAPYWAPRERWLGSLRRPSLVHGYPVLAWHSARCWCQAWTEEPR

SEQ ID NO: 26404 - protein, 760 aa, Homo sapiens
LGASRSWTPAPGGEPVGGSVKVSAASSTAAPAMEETQPPPQPKLPLCDSLMIWLQTFNTASPCQDVKQLTSGVAMAQVLHQIDAAWFNESWLSRIKEDVGDNWRIKASNVKKVLQGIMSYYHEFLGQQISEALIPDLNQITECSDPVELGRLLQLILGCAINCEKKQEHIQNIMTLEESVQHVVMTAIQELMSKEILSSPPNDAVGELEQQLKRALEELQEALAEKEELRQRCEELDMQVTTLQDEKNSLVSENEMMNEKLDQLDGSFDDPNTVVAKKYFHAQLQLEQLQEENFRLEAAKDDYRVHCEELEKQLIEFQHRNDELTSLAEETRALKDEIDVLRATSDKANKLESTVEIYRQKLQDLNDLRKQVKTLQETNMMYMHNTVSLEEELKKANAARTQLETYKRQVQDLHVKLSSESKRADTLAFEMKRLEEKHEALLKEKERLIEQRDTLKETNEELRCSQVQQDHLNQTDASATKSYENLAAEIMPVEYREVFIRLQHENKMLRLQQEGSENERIEELQEQLEQKHRKMNELETEQRLSKERIRELQQQIEDLQKSLQEQGSKSEGESSSKLKQKLEAHMEKLTEVHEELQKKQELIEDLQPDINQNVQKINELEAALQKKDEDMKAMEERYKMYLEKARNVIKTLDPKLNPASAEIMLLRKQLAEKERRIEILESECKVAKFRDYEEKLIVSAWYNKSLAFQKLGMESRLVSGGGACSDTGACTPARSFLAQQRHITNTRRNLSVKVPATTSD

SEQ ID NO: 26405 - protein, 106 aa, Homo sapiens
ILTAVMACPLEKALDVMVSTFHKYSGKEGDKFKLNKSELKELLTRELPSFLGKRTDEAAFQKLMSNLDSNRDNEVDFQEYCVFLSCIAMMCNEFFEGFPDKQPRKK

SEQ ID NO: 26406 - protein, 29 aa, Homo sapiens
KRKRQQHPKKERAGVSTVQKAKKKQKKRD

SEQ ID NO: 26407 - protein, 26 aa, Homo sapiens
KKRRRRTWQPLDSTLSMVEDFYYLPS

SEQ ID NO: 26408 - protein, 20 aa, Homo sapiens
LRSTVGIAAAEQGFWKALRT

SEQ ID NO: 26409 - protein, 2234 aa, Homo sapiens
VAASGSRKGSMFPGCPRLWVLVVLGTSWVGWGSQGTEAAQLRQFYVAAQGISWSYRPEPTNSSLNLSVTSFKKIVYREYEPYFKKEKPQSTISGLLGPTLYAEVGDIIKVHFKNKADKPLSIHPQGIRYSKLSEGASYLDHTFPAEKMDDAVAPGREYTYEWSISEDSGPTHDDPPCLTHIYYSHENLIEDFNSGLIGPLLICKKGTLTEGGTQKTFDKQIVLLFAVFDESKSWSQSSSLMYTVNGYVNGTMPDITVCAHDHISWHLLGMSSGPELFSIHFNGQVLEQNHHKVSAITLVSATSTTANMTVGPEGKWIISSLTPKHLQAGMQAYIDIKNCPKKTRNLKKITREQRRHMKRWEYFIAAEEVIWDYAPVIPANMDKKYRSQHLDNFSNQIGKHYKKVMYTQYEDESFTKHTVNPNMKEDGILGPIIRAQVRDTLKIVFKNMASRPYSIYPHGVTFSPYEDEVNSSFTSGRNNTMIRAVQPGETYTYKWNILEFDEPTENDAQCLTRPYYSDVDIMRDIASGLIGLLLICKSRSLDRRGIQRAADIEQQAVFAVFDENKSWYLEDNINKFCENPDEVKRDDPKFYESNIMSTINGYVPESITTLGFCFDDTVQWHFCSVGTQNEILTIHFTGHSFIYGKRHEDTLTLFPMRGESVTVTMDNVGTWMLTSMNSSPRSKKLRLKFRDVKCIPDDDEDSYEIFEPPESTVMATRKMHDRLEPEDEESDADYDYQNRLAAALGIRSFRNSSLNQEEEEFNLTALALENGTEFVSSNTDIIVGSNYSSPSNISKFTVNNLAEPQKAPSHQQATTAGSPLRHLIGKNSVLNSSTAEHSSPYSEDPIEDPLQPDVTGIRLLSLGAGEFKSQEHAKHKGPKVERDQAAKHRFSWMKLLAHKVGRHLSQDTGSPSGMRPWEDLPSQDTGSPSRMRPWKDPPSDLLLLKQSNSSKILVGRWHLASEKGSYEIIQDTDEDTAVNNWLISPQNASRAWGESTPLANKPGKQSGHPKFPRVRHKSLQVRQDGGKSRLKKSQFLIKTRKKKKEKHTHHAPLSPRTFHPLRSEAYNTFSERRLKHSLVLHKSNETSLPTDLNQTLPSMDFGWIASLPDHNQNSSNDTGQASCPPGLYQTVPPEEHYQTFPIQDPDQMHSTSDPSHRSSSPELSEMLEYDRSHKSFPTDISQMSPSSEHEVWQTVISPDLSQVTLSPELSQTNLSPDLSHTTLSPELIQRNLSPALGQMPISPDLSHTTLSPDLSHTTLSLDLSQTNLSPELSQTNLSPALGQMPLSPDLSHTTLSLDFSQTNLSPELSHMTLSPELSQTNLSPALGQMPISPDLSHTTLSLDFSQTNLSPELSQTNLSPALGQMPLSPDPSHTTLSLDLSQTNLSPELSQTNLSPDLSEMPLFADLSQIPLTPDLDQMTLSPDLGETDLSPNFGQMSLSPDLSQVTLSPDISDTTLLPDLSQISPPPDLDQIFYPSESSQSLLLQEFNESFPYPDLGQMPSPSSPTLNDTFLSKEFNPLVIVGLSKDGTDYIEIIPKEEVQSSEDDYAEIDYVPYDDPYKTDVRTNINSSRDPDNIAAWYLRSNNGNRRNYYIAAEEISWDYSEFVQRETDIEDSDDIPEDTTYKKVVFRKYLDSTFTKRDPRGEYEEHLGILGPIIRAEVDDVIQVRFKNLASRPYSLHAHGLSYEKSSEGKTYEDDSPEWFKEDNAVQPNSSYTYVWHATERSGPESPGSACRAWAYYSAVNPEKDIHSGLIGPLLICQKGILHKDSNMPMDMREFVLLFMTFDEKKSWYYEKKSRSSWRLTSSEMKKSHEFHAINGMIYSLPGLKMYEQEWVRLHLLNIGGSQDIHVVHFHGQTLLENGNKQHQLGVWPLLPGSFKTLEMKASKPGWWLLNTEVGENQRAGMQTPFLIMDRDCRMPMGLSTGIISDSQIKASEFLGYWEPRLARLNNGGSYNAWSVEKLAAEFASKPWIQVDMQKEVIITGIQTQGAKHYLKSCYTTEFYVAYSSNQINWQIFKGNSTRNVMYFNGNSDASTIKENQFDPPIVARYIRISPTRAYNRPTLRLELQGCEVNGCSTPLGMENGKIENKQITASSFKKSWWGDYWEPFRARLNAQGRVNAWQAKANNNKQWLEIDLLKIKKITAIITQGCKSLSSEMYVKSYTIHYSEQGVEWKPYRLKSSMVDKIFEGNTNTKGHVKNFFNPPIISRFIRVIPKTWNQSIALRLELFGCDIY

SEQ ID NO: 26410 - protein, 44 aa, Homo sapiens
THGAPYAPAPPPPPPRQPKRSERTRHRGARVQLATLSPPARSPR

SEQ ID NO: 26411 - protein, 12 aa, Homo sapiens
ITQGLFQENSSC

SEQ ID NO: 26412 - protein, 24 aa, Homo sapiens
LILCGTASAFVLCPPRPRRPFEAA

SEQ ID NO: 26413 - protein, 39 aa, Homo sapiens
RWQRQESPAATGRTPPLERILKEMKSALRNEVDCLLAFC

SEQ ID NO: 26414 - protein, 7 aa, Homo sapiens
TSLRRRE

SEQ ID NO: 26415 - protein, 68 aa, Homo sapiens
LADPLFLFPFSEGLPRRRAASRSRLQTPSARCSPRPDAEVAASQKLGPLHPPSEKGAMLISGSTKGPS

SEQ ID NO: 26416 - protein, 31 aa, Homo sapiens
RVPLGLNLWDLTPFPPPSLTPQPGGSIYSPD

SEQ ID NO: 26417 - protein, 287 aa, Homo sapiens
LLWDSLQPIFIAQVSEAAMAEVPELASEMMAYYSGNEDDLFFEADGPKQMKCSFQDLDLCPLDGGIQLRISDHHYSKGFRQAASVVVAMDKLRKMLVPCPQTFQENDLSTFFPFIFEEEPIFFDTWDNEAYVHDAPVRSLNCTLRDSQQKSLVMSGPYELKALHLQGQDMEQQVVFSMSFVQGEESNDKIPVALGLKEKNLYLSCVLKDDKPTLQLESVDPKNYPKKKMEKRFVFNKIEINNKLEFESAQFPNWYISTSQAENMPVFLGGTKGGQDITDFTMQFVSS

SEQ ID NO: 26418 - protein, 20 aa, Homo sapiens
VTVSEFCSCRMCSTLKGWQQ

SEQ ID NO: 26419 - protein, 23 aa, Homo sapiens
LDSSAPLVRFTLRRHHGEAREGR

SEQ ID NO: 26420 - protein, 39 aa, Homo sapiens
VGISSGKEIGALLQQLREQWKKSGYQMEKDELLSYIKKT

SEQ ID NO: 26421 - protein, 11 aa, Homo sapiens
MWSPEMNIDVL

SEQ ID NO: 26422 - protein, 61 aa, Homo sapiens
IATSQIPRVPMYSVLLKREWLKKKKMKKGMKNQPSLMGQGSQMHFPSSKQKIVITCFPRWT

SEQ ID NO: 26423 - protein, 120 aa, Homo sapiens
LLGTGLLKGTMSGRLWSKAIFAGYKRGLRNQREHTALLKIEGVYARDETEFYLGKRCAYVYKAKNNTVTPGGKPNKTRVIWGKVTRAHGNSGMVRAKFRSNLPAKAIGHRIRVMLYPSRI

SEQ ID NO: 26424 - protein, 14 aa, Homo sapiens
IPGSREAVGVMATR

SEQ ID NO: 26425 - protein, 258 aa, Homo sapiens
VSPQHHELTSLFECPVCFDYVLPPILQCQAGHLVCNQCRQKLSCCPTCRGALTPSIRNLAMEKVASAVLFPCKYATTGCSLTLHHTEKPEHEDICEYRPYSCPCPGASCKWQGSLEAVMSHLMHAHKSITTLQGEDIVFLATDINLPGAVDWVMMQSCFGHHFMLVLEKQEKYEGHQQFFAIVLLIGTRKQAENFAYRLELNGNRRRLTWEATPRSIHDGVAAAIMNSDCLVFDTAIAHLFADNGNLGINVTISTCCP

SEQ ID NO: 26426 - protein, 22 aa, Homo sapiens
RVHPACVWREAGKPVPGSWPQR

SEQ ID NO: 26427 - protein, 23 aa, Homo sapiens
IKFIMSFRLHLEWKLNMHILWRL

SEQ ID NO: 26428 - protein, 500 aa, Homo sapiens
LGSGTIMFEIKKICCIGAGYVGGPTCSVIAHMCPEIRVTVVDVNESRINAWNSPTLPIYEPGLKEVVESCRGKNLFFSTNIDDAIKEADLVFISVNTPTKTYGMGKGRAADLKYIEACARRIVQNSNGYKIVTEKSTVPVRAAESIRRIFDANTKPNLNLQVLSNPEFLAEGTAIKDLKNPDRVLIGGDETPEGQRAVQALCAVYEHWVPREKILTTNTWSSELSKLAANAFLAQRISSINSISALCEATGADVEEVATAIGMDQRIGNKFLKASVGFGGSCFQKDVLNLVYLCEALNLPEVARYWQQVIDMNDYQRRRFASRIIDSLFNTVTDKKIAILGFAFKKDTGDTRESSSIYISKYLMDEGAHLHIYDPKVPREQIVVDLSHPGVSEDDQVSRLVTISKDPYEACDGAHAVVICTEWDMFKELDYERIHKKMLKPAFIFDGRRVLDGLHNELQTIGFQIETIGKKVSSKRIPYAPSGEIPKFSLQDPPNKKPKV

SEQ ID NO: 26429 - protein, 477 aa, Homo sapiens
LQESMPQTPPFSAMFDSSGYNRNLYQSAEDSCGGLYYHDNNLLSGSLEALIQHLVPNVDYYPDRTYIFTFLLSSRLFMHPYELMAKVCHLCVEHQRLSDPDSDKNQMRKIAPKILQLLTEWTETFPYDFRDERMMRNLKDLAHRIASGEEQTYRKNVQQMMQCLIRKLAALSQYEEVLAKISSTSTDRLTVLKTKPQSIQRDIITVCNDPYTLAQQLTHIELERLNYIGPEEFVQAFVQKDPLDNDKSCYSERKKTRNLEAYVEWFNRLSYLVATEICMPVKKKHRARMIEYFIDVARECFNIGNFNSLMAIISGMNMSPVSRLKKTWAKVKTAKFDILEHQMDPSSNFYNYRTALRGAAQRSLTAHSSREKIVIPFFSLLIKDIYFLNEGCANRLPNGHVNFEKFWELAKQVSEFMTWKQVECPFERDRKILQYLLTVPVFSEDALYLASYESEGPENHIEKDRWKSLRSSLLGRV

SEQ ID NO: 26430 - protein, 660 aa, Homo sapiens
RNLQTRKKRSLESDSQDLGLEMPQPSVSGMDPPFGDAFRSHTFSEQTLMSTDLLANSSDPDFMYELDREMNYQQNPRDNFLSLEDCKDIENLESFTDVLDNEGALTSNWEQWDTYCEDLTKYTKLTSCDIWGTKEVDYLGLDDFSSPYQDEEVISKTPTLAQLNSEDSQSVSDSLYYPDSLFSVKQNPLPSSFPGKKITSRAAAPVCSSKTLQAEVPLSDCVQKASKPTSSTQIMVKTNMYHNEKVNFHVECKDYVKKAKVKINPVQQSRPLLSQIHTDAAKENTCYCGAVAKRQEKKGMEPLQGHATPALPFKETQELLLSPLPQEGPGSLAAGESSSLSASTSVSDSSQKKEEHNYSLFVSDNLGEQPTKCSPEEDEEDEEDVDDEDHDEGFGSEHELSENEEEEEEEEDYEDDKDDDISDTFSEPGYENDSVEDLKEVTSISSRKRGKRRYFWEYSEQLTPSQQERMLRPSEWNRDTLPSNMYQKNGLHHGKYAVKKSRRTDVEDLTPNPKKLLQIGNELRKLNKVISDLTPVSELPLTARPRSRKEKNKLASRACRLKKKAQYEANKVKLWGLNTEYDNLLFVINSIKQEIVNRVQNPRDERGPNMGQKLEILIKDTLGLPVAGQTSEFVNQVLEKTAEGNPTGGLVGLRIPTSKV

SEQ ID NO: 26431 - protein, 29 aa, Homo sapiens
RKYQPKSFLRMTGALLSMTFPLKHQHIFW

SEQ ID NO: 26432 - protein, 13 aa, Homo sapiens
KQELSGRSEASHG

SEQ ID NO: 26433 - protein, 91 aa, Homo sapiens
KGGAKRHRKVLRDNIQGITKPAIRRLARRGGVKRISGLIYEETRGVLKVFLENVIRDAVTYTEHAKRKTVTAMDVVYALKRQGRTLYGFGG

SEQ ID NO: 26434 - protein, 231 aa, Homo sapiens
KPRPTLTAAGPRPGLLCFTIYIMNPSMKQKQEEIKENIKNSSVPRRTLKMIQPSASGSLVGRENELSAGLSKRKHRNDHLTSTTSSPGVIVPESSENKNLGGVTQESFDLMIKENPSSQYWKEVAEKRRKALYEALKENEKLHKEIEQKDNEIARLKKENKELAEVAEHVQYMAELIERLNGEPLDNFESLDNQEFDSEEETVEDSLVEDSEIGTCAEGTVSSSTDAKPCI

SEQ ID NO: 26435 - protein, 9 aa, Homo sapiens
LSPFKGTLL

SEQ ID NO: 26436 - protein, 32 aa, Homo sapiens
LGGRWMGSRGPRGTGPGKRRRRRRRSRSPGEA

SEQ ID NO: 26437 - protein, 27 aa, Homo sapiens
LPLAMACRVSGKLPLPGVCHLQPTFQA

SEQ ID NO: 26438 - protein, 336 aa, Homo sapiens
LLSDKLPSAMTVVSVPQREPLVLGGRLAPLGFSSRGYFGALPMVTTAPPPLPRIPDPRALPPTLFLPHFLGGDGPCLTPQPRAPAALPNRSLAVAGGTPRAAPKKRRKKKVRASPAGQLPSRFHQYQQHRPSLEGGRSPATGPSGAQEVPGPAAALAPSPAAAAGTEGASPDLAPLRPAAPGQTPLRKEVLKSKMGKSEKIALPHGQLVHGIHLYEQPKINRQKSKYNLPLTKITSAKRNENNFWQDSVSSDRIQKQEKKPFKNTENIKNSHLKKSAFLTEVSQKENYAGAKFSDPPSPSVLPKPPSHWMGSTVENSNQNRELMAVHLKTLLKVQT

SEQ ID NO: 26439 - protein, 36 aa, Homo sapiens
RSSLDMSWQQAVGRILLDKPVWVQEFPTLFQHGAAR

SEQ ID NO: 26440 - protein, 15 aa, Homo sapiens
ISWTNFQFLGSASVT

SEQ ID NO: 26441 - protein, 21 aa, Homo sapiens
LVPAMGFVSSSALVTDLDTEY

SEQ ID NO: 26442 - protein, 28 aa, Homo sapiens
LPCTVLRFWSTSLQRCWSWQVMLLRISK

SEQ ID NO: 26443 - protein, 12 aa, Homo sapiens
ILLKQMVTMFRY

SEQ ID NO: 26444 - protein, 42 aa, Homo sapiens
LLQVSQSDQSQFRSCYPGAGWGNAQRSVHILSGSPSSGHTGR

SEQ ID NO: 26445 - protein, 36 aa, Homo sapiens
LPGPASLKGSPCSCLDAGFFSGSGKPAASRDDAPQR

SEQ ID NO: 26446 - protein, 15 aa, Homo sapiens
TERSRPVALRAAVPR

SEQ ID NO: 26447 - protein, 9 aa, Homo sapiens
IASDMLLGS

SEQ ID NO: 26448 - protein, 11 aa, Homo sapiens
RHPCVCGSVTS

SEQ ID NO: 26449 - protein, 1307 aa, Homo sapiens
LASPSPAQAQTLTRVPRPAELAPLCGRRGLRTDIDATCTPRRAVNVAPVAVPSLRKSEDHALQTGHVLDYLCFCLLGFQSASEQRSNPDSVVHRMAGVRSTTLLSSPCEWDWHPGCSSRSKYSRKHRAVPVHGPRCQAPGMEELIWEQYTVTLQKDSKRGFGIAVSGGRDNPHFENGETSIVISDVLPGGPADGLLQENDRVVMVNGTPMEDVLHSFAVQQLRKSGKVAAIVVKRPRKVQVAALQASPPLDQDDRAFEVMDEFDGRSFRSGYSERSRLNSHGGRSRSWEDSPERGRPHERARSRERDLSRDRSRGRSLERGLDQDHARTRDRSRGRSLERGLDHDFGPSRDRDRDRSRGRSIDQDYERAYHRAYDPDYERAYSPEYRRGARHDARSRGPRSRSREHPHSRSPSPEPRGRPGPIGVLLMKSRANEEYGLRLGSQIFVKEMTRTGLATKDGNLHEGDIILKINGTVTENMSLTDARKLIEKSRGKLQLVVLRDSQQTLINIPSLNDSDSEIEDISEIESNRSFSPEERRHQYSDYDYHSSSEKLKERPSSREDTPSRLSRMGATPTPFKSTGDIAGTVVPETNKEPRYQEDPPAPQPKAAPRTFLRPSPEDEAIYGPNTKMVRFKKGDSVGLRLAGGNDVGIFVAGIQEGTSAEQEGLQEGDQILKVNTQDFRGLVREDAVLYLLEIPKGEMVTILAQSRADVYRDILACGRGDSFFIRSHFECEKETPQSLAFTRGEVFRVVDTLYDGKLGNWLAVRIGNELEKGLIPNKSRAEQMASVQNAQRDNAGDRADFWRMRGQRSGVKKNLRKSREDLTAVVSVSTKFPAYERVLLREAGFKRPVVLFGPIADIAMEKLANELPDWFQTAKTEPKDAGSEKSTGVVRLNTVRQIIEQDKHALLDVTPKAVDLLNYTQWFPIVIFFNPDSRQGVKTMRQRLNPTSNKSSRKLFDQANKLKKTCAHLFTATINLNSANDSWFGSLKDTIQHQQGEAVWVSEGKMEGMDDDPEDRMSYLTAMGADYLSCDSRLISDFEDTDGEGGAYTDNELDEPAEEPLVSSITRSSEPVQHEESIRKPSPEPRAQMRRAASSDQLRDNSPPPAFKPEPPKAKTQNKEESYDFSKSYEYKSNPSAVAGNETPGASTKGYPPPVAAKPTFGRSILKPSTPIPPQEGEEVGESSEEQDNAPKSVLGKVKIFEKMDHKARLQRMQELQEAQNARIEIAQKHPDIYAVPIKTHKPDPGTPQHTSSRPPEPQKAPSRPYQDTRGSYGSDAEEEEYRQQLSEHSKRGYYGQSARYRDTEL

SEQ ID NO: 26450 - protein, 15 aa, Homo sapiens
RQATVWRTLSMPSPS

SEQ ID NO: 26451 - protein, 41 aa, Homo sapiens
LGLPPPPPDALSRLESWSFCRGLSRRKRRRPVGVGPMLQGV

SEQ ID NO: 26452 - protein, 16 aa, Homo sapiens
LSRDQVHSFMCEQDGG

SEQ ID NO: 26453 - protein, 14 aa, Homo sapiens
LDLEPGEIKLGMLS

SEQ ID NO: 26454 - protein, 388 aa, Homo sapiens
ILEKYDGHLPIEIKAVPEGFVIPRGNVLFTVENTDPECYWLTNWIETILVQSWYPITVATNSREQKKILAKYLLETSGNLDGLEYKLHDFGYRGVSSQETAGIGASAHLVNFKGTDTVAGLALNKKYYGTKDPVPGYSVPAAEHSTITAWGKDHEKDAFEHIVTQFSSVPVSVVSNSYDIYNACEKIWGEDLRHLIVSRSTQAPLIIRPDSGNPLDTVLKVLEILGKKFPVTENSKGYKLLPPYLRVIQGDGVDINTLQEIVEGMKQKMWSIENIAFGSGGGLLQKLTRDLLNCSFKCSYVVTNGLGINVFKDPVADPNKRSKKGRLSLHRTPAGNFVTLEEGKGDLEEYGQDLLHTVFKNGKVTKSYSFDEIRKNAQLNIELEAAHH

SEQ ID NO: 26455 - protein, 683 aa, Homo sapiens
LRLGAPSRTWRTRPQARSVLDPAGLRSPVLGPVPRAAMSFLSRQQPPPPRRAGAACTLRQKLIFSPCSDCEEEEEEEEEEGSGHSTGEDSAFQEPDSPLPPARSPTEPGPERRRSPGPAPGSPGELEEDLLLPGACPGADEAGGGAEGDSWEEEGFGSSSPVKSPAAPYFLGSSFSPVRCGGPGDASPRGCGARRAGEGRRSPRPDHPGTPPHKTFRKLRLFDTPHTPKSLLSKARGIDSSSVKLRGSSLFMDTEKSGKREFDVRQTPQVNINPFTPDSLLLHSSGQCRRRKRTYWNDSCGEDMEASDYELEDETRPAKRITITESNMKSRYTTEFHELEKIGSGEFGSVFKCVKRLDGCIYAIKRSKKPLAGSVDEQNALREVYAHAVLGQHSHVVRYFSAWAEDDHMLIQNEYCNGGSLADAISENYRIMSYFKEAELKDLLLQVGRGLRYIHSMSLVHMDIKPSNIFISRTSIPNAASEEGDEDDWASNKVMFKIGDLGHVTRISSPQVEEGDSRFLANEVLQENYTHLPKADIFALALTVVCAAGAEPLPRNGDQWHEIRQGRLPRIPQVLSQEFTELLKVMIHPDPERRPSAMALVKHSVLLSASRKSAEQLRIELNAEKFKNSLLQKELKKAQMAKAAAEERALFTDRMATRSTTQSNRTSRLIGKKMNRSVSLTIY

SEQ ID NO: 26456 - protein, 350 aa, Homo sapiens
RAQDLGPQPLELKEAFKLFQIQFNRSYLSPEEHAHRLDIFAHNLAQAQRLQEEDLGTAEFGVTPFSDLTEEEFGQLYGYRRAAGGVPSMGREIRSEEPEESVPFSCDWRKVASAISPIKDQKNCNCCWAMAAAGNIETLWRISFWDFVDVSVQELLDCGRCGDGCHGGFVWDAFITVLNNSGLASEKDYPFQGKVRAHRCHPKKYQKVAWIQDFIMLQNNEHRIAQYLATYGPITVTINMKPLQLYRKGVIKATPTTCDPQLVDHSVLLVGFGSVKSEEGIWAETVSSQSQPQPPHPTPYWILKNSWGAQWGEKGYFRLHRGSNTCGITKFPLTARVQKPDMKPRVSCPP

SEQ ID NO: 26457 - protein, 23 aa, Homo sapiens
VENWKTEVREGEEKNREDREIRR

SEQ ID NO: 26458 - protein, 145 aa, Homo sapiens
VRWFWRLGSPRPVGSHLTSVKFLMTSPEIASLSWGQMKVKGSNTTYKDCKVWPGGSRTWDWRETGTEHSPGVQPADVKEVVEKGVQTLVIGRGMSEALKVPSSTVEYLKKHGIDVRVLQTEQAVKEYNALVAQGVRVGGVFHSTC

SEQ ID NO: 26459 - protein, 69 aa, Homo sapiens
KPQLERRRGYKLFLDDRDLLPRAEPSADLLVNLSRCRRLIVVLSDAFLSRAWCSHSFRWVPRGVGWAPA

SEQ ID NO: 26460 - protein, 11 aa, Homo sapiens
VAPRASLLLLP

SEQ ID NO: 26461 - protein, 62 aa, Homo sapiens
VARGCPHSHVKRYASIARLAAPSSPRSSPGSSGGPEVARGGSEASPGARRVAPRSTVTAPCP

SEQ ID NO: 26462 - protein, 501 aa, Homo sapiens
VGRWSVCWVRAAGFALAMAPWLQLLSLLGLLPGAVAAPAQPRAASFQAWGPPSPELLAPTRFALEMFNRGRAAGTRAVLGLVRGRVRRAGQGSLYSLEATLEEPPCNDPMVCRLPVSKKTLLCSFQVLDELGRHVLLRKDCGPVDTKVPGAGEPKSAFTQGSAMISSLSQNHPDNRNETFSSVISLLNEDPLSQDLPVKMASIFKNFVITYNRTYESKEEARWRLSVFVNNMVRAQKIQALDRGTAQYGVTKFSDLTEEEFRTIYLNTLLRKEPGNKMKQAKSVGDLAPPEWDWRSKGAVTKVKDQGMCGSCWAFSVTGNVEGQWFLNQGTLLSLSEQELLDCDKMDKACMGGLPSNAYSAIKNLGGLETEDDYSYQGHMQSCNFSAEKAKVYINDSVELSQNEQKLAAWLAKRGPISVAINAFGMQFYRHGISRPLRPLCSPWLIDHAVLLVGYGNRSDVPFWAIKNSWGTDWGEKGYYYLHRGSGACGVNTMASSAVVD

SEQ ID NO: 26463 - protein, 31 aa, Homo sapiens
KKERELLQERKIGIVQPENIQPPLQCQKSHG

SEQ ID NO: 26464 - protein, 15 aa, Homo sapiens
LLLRLLLSLGTGCQR

SEQ ID NO: 26465 - protein, 29 aa, Homo sapiens
VAALTGELERLWGGPVPPAPRTLIEELPS

SEQ ID NO: 26466 - protein, 223 aa, Homo sapiens
KHLDQTTDTYLLLSLTCDLLRSQLYWTHQKVTKGVSLLLSVLRDPALQKSSKAWYLLRVQVLQLVAAYLSLPSNNLSHSLWEQLCAQGWQTPEIALIDSHKLLRSIILLLMGSDILSTQKAAVETSFLDYGENLVQKWQVLSEVLSCSEKLVCHLGRLGSVSEAKAFCLEALKLTTKLQIPRQCALFLVLKGELELARNDIDLCQSDLQQVLFLLESCTGELQ

SEQ ID NO: 26467 - protein, 7 aa, Homo sapiens
VLMGQVP

SEQ ID NO: 26468 - protein, 15 aa, Homo sapiens
MGRRWAVRPQLPGCA

SEQ ID NO: 26469 - protein, 73 aa, Homo sapiens [sequence omitted]

SEQ ID NO: 26470 - protein, 267 aa, Homo sapiens
VRVPNGGGGGGGLPISTVREVALLRRLEAFEHPNVVRLMDVCATSRTDREIKVTLVFEHVDQDLRTYLDKAPPPGLPAETIKDLMRQFLRGLDFLHANCIVHRDLKPENILVTSGGTVKLADFGLARIYSYQMALTPVVVTLWYRAPEVLLQSTYATPVDMWSVGCIFAEMFRRKPLFCGNSEADQLGKIFDLIGLPPEDDWPRDVSLPRGAFPPRGPRPVQSVVPEMEESGAQLLLEMLTFNPHKRISAFRALQHSYLHKDEGNPE

SEQ ID NO: 26471 - protein, 462 aa, Homo sapiens
LGSFIERDSLTLRASGCSWVQREPPALLLSRLPQPLASAWVRRGGIKPRSESGSFARGALGLCLPRGASGRHPALSRSSTPMIDTLRPVPFASEMAISKTVAWLNEQLELGNERLLLMDCRPQELYESSHIESAINVAIPGIMLRRLQKGNLPVRALFTRGEDRDRFTRRCGTDTVVLYDESSSDWNENTGGESVLGLLLKKLKDEGCRAFYLEGGFSKFQAEFSLHCETNLDGSCSSSSPPLPVLGLGGLRISSDSSSDIESDLDRDPNSATDSDGSPLSNSQPSFPVEILPFLYLGCAKDSTNLDVLEEFGIKYILNVTPNLPNLFENAGEFKYKQIPISDHWSQNLSQFFPEAISFIDEARGKNCGVLVHCLAGISRSVTVTVAYLMQKLNLSMNDAYDIVKMKKSNISPNFNFMGQLLDFERTLGLSSPCDNRVPAQQLYFTTPSNQNVYQVDSLQST

SEQ ID NO: 26472 - protein, 752 aa, Homo sapiens
LSAGARRRLCPGPAALAGRPVRAADPEEPRCGWPREVKFWARASTPPRLPPSFRPLAAPASFPQISDRPFAPPPRPPPVLRSPPLGSPAAGGGAGVTMAEAPQVVEIDPDFEPLPRPRSCTWPLPRPEFSQSNSATSSPAPSGSAAANPDAAAGLPSASAAAVSADFMSNLSLLEESEDFPQAPGSVAAAVAAAAAAAATGGLCGDFQGPEAGCLHPAPPQPPPPGPLSQHPPVPPAAAGPLAGQPRKSSSSRRNAWGNLSYADLITKAIESSAEKRLTLSQIYEWMVKSVPYFKDKGDSNSSAGWKNSIRHNLSLHSKFIRVQNEGTGKSSWWMLNPEGGKSGKSPRRRAASMDNNSKFAKSRSRAAKKKASLQSGQEGAGDSPGSQFSKWPASPGSHSNDDFDNWSTFRPRTSSNASTISGRLSPIMTEQDDLGEGDVHSMVYPPSAAKMASTLPSLSEISNPENMENLLDNLNLLSSPTSLTVSTQSSPGTMMQQTPCYSFAPPNTSLNSPSPNYQKYTYGQSSMSPLPQMPIQTLQDNKSSYGGMSQYNCAPGLLKELLTSDSPPHNDIMTPVDPGVAQPNSRVLGQNVMMGPNSVMSTYGSQASHNKMMNPSSHTHPGHAQQTSAVNGRPLPHTVSTMPHTSGMNRLTQVKTPVQVPLPHPMQMSALGGYSSVSSCNGYGRMGLLHQEKLPSDLDGMFIERLDCDMESIIRNDLMDGDTLDFNFDNVLPNQSFPHSVKTTTHSWVSG

SEQ ID NO: 26473 - protein, 161 aa, Homo sapiens
LLVFPLFFHEGVFGCNCMKSQWCRPVAMDLGVYQLRHFSISFLSSLLGTENASVRLDNSSSGASVVAIDNKIEQAMDLVKSHLMYAVREEVEVLKEQIKELIEKNSQLEQENNLLKTLASPEQLAQFQAQLQTGSPPATTQPQGTTQPPAQPASQGSGPTA

SEQ ID NO: 26474 - protein, 26 aa, Homo sapiens
MMRCLVIDQMLLNPLIHRFYRKHVLH

SEQ ID NO: 26475 - protein, 16 aa, Homo sapiens
LFVAQVQEAYAVAAAR

SEQ ID NO: 26476 - protein, 47 aa, Homo sapiens
TEGRESGTLLELKLPTLSSLNNYRAGLGGTDSIFRSLMGCWVDGAGK

SEQ ID NO: 26477 - protein, 27 aa, Homo sapiens
RVWLWWCRTRCSAICRSRLLWKKSTPK

SEQ ID NO: 26478 - protein, 31 aa, Homo sapiens
VEDEWSHQLQHRAPPVVPAGFSALRSPHVYP

SEQ ID NO: 26479 - protein, 15 aa, Homo sapiens
RFILCRLPHLPVIFL

SEQ ID NO: 26480 - protein, 28 aa, Homo sapiens
LPPHPAHPPLSCARNLLLPAPCPTNIQH

SEQ ID NO: 26481 - protein, 8 aa, Homo sapiens
LSSSRGPS

SEQ ID NO: 26482 - protein, 27 aa, Homo sapiens
KLCAGQKDSDSLVLGSMARLWSMIYRR

SEQ ID NO: 26483 - protein, 135 aa, Homo sapiens
KLSIVPVRRGYWGNKIGKPHTVPCKVTGRCGSVLVRLIPAPRGTGIVSAPVPKKLLMMAGIDDCYTSARGCTATLGNFAKATFDAISKTYSYLTPDLWKETVFTKSPYQEFTDHLVKTHTRVSVQRTQAPAVATT

SEQ ID NO: 26484 - protein, 150 aa, Homo sapiens
VSRCGSAAMATKIDKEACRAAYNLVRDDGSAVIWVTFKYDGSTIVPGEQGAEYQHFIQQCTDDVRLFAFVRFTTGDAMSKRSKFALITWIGENVSGLQRAKTGTDKTLVKEVVQNFAKEFVISDRKELEEDFIKSELKKAGGANYDAQTE

SEQ ID NO: 26485 - protein, 51 aa, Homo sapiens
VRAGPGVRGSGRESGRVSAAALRGMRRCRRPCPAGRGEGGGGRSPVVATVA

SEQ ID NO: 26486 - protein, 16 aa, Homo sapiens
ISLLSLVTGLKTSQLV

SEQ ID NO: 26487 - protein, 11 aa, Homo sapiens
MIGFLGREEVL

SEQ ID NO: 26488 - protein, 44 aa, Homo sapiens
LIMRSMPTNTGMTSTKSTKMGFSRIDIGFLPNSLSWHLAKIKII

SEQ ID NO: 26489 - protein, 7 aa, Homo sapiens
RSKCRSS

SEQ ID NO: 26490 - protein, 22 aa, Homo sapiens
KESGKPHLKSSTMWTTLKLLRI

SEQ ID NO: 26491 - protein, 47 aa, Homo sapiens
LKLCPGGHRPASLSSGCPAGCRLSFNLPPSMLLSVQKCCMPSSLKTC

SEQ ID NO: 26492 - protein, 57 aa, Homo sapiens
VTAMSSWARRRSSSSRRVSARGMHTRLIPSLPGSPVCWAWPWYPDTTSFPLRCRGRV

SEQ ID NO: 26493 - protein, 34 aa, Homo sapiens
IYHPKWSQSCAVSLLSVFQEVQSLKGWVMLHLWS

SEQ ID NO: 26494 - protein, 57 aa, Homo sapiens
LPQRPTLLQGCSPATPRPCCRVLRILIVSRGVHSPPLASAQGATAAIATSSLSQGPV

SEQ ID NO: 26495 - protein, 194 aa, Homo sapiens
LELLMEKVPGEMEIERRERSEELSEAERKAVQAMWARLYANCEDVGVAILVRFFVNFPSAKQYFSQFKHMEDPLEMERSPQLRKHACRVMGALNTVVENLHDPDKVSSVLALVGKAHALKHKVEPVYFKILSGVILEVVAEEFASDFPPETQRAWAKLRGLIYSHVTAAYKEVGWVQQVPNATTPPATLPSSGP

SEQ ID NO: 26496 - protein, 12 aa, Homo sapiens
VVFSGSLGSRVV

SEQ ID NO: 26497 - protein, 29 aa, Homo sapiens
LLPVLSLPGAPAAVAVESPWKCRKRHSAS

SEQ ID NO: 26498 - protein, 451 aa, Homo sapiens
KLILYSGTALSAPGGATPPSPLGPTEPALSRGTAASCGGLGTAGRLHRNFAIVGTGRCSFPELPRTAYFEDSLSSPGTPTAHPGLAPYFPNPAIALASRRPQRGHRGPPVPREMFQAFPGDYDSGSRCSSSPSAESQYLSSVDSFGSPPTAAASQECAGLGEMPGSFVPTVTAITTSQDLQWLVQPTLISSMAQSQGQPLASQPPVVDPYDMPGTSYSTPGMSGYSSGGASGSGGPSTSGTTSGPGPARPARARPRRPREETLTPEEEEKRRVRRERNKLAAAKCRNRRRELTDRLQAETDQLEEEKAELESEIAELQKEKERLEFVLVAHKPGCKIPYEEGPGPGPLAEVRDLPGSAPAKEDGFSWLLPPPPPPPLPFQTSQDAPPNLTASLFTHSEVQVLGDPFPVVNPSYTSSFVLTCPEVSAFAGAQRTSGSDQPSDPLNSPSLLAL

SEQ ID NO: 26499 - protein, 33 aa, Homo sapiens
LWGPGHRRKTAQKLCHCWNGTLLLPRASPDSVL

SEQ ID NO: 26500 - protein, 17 aa, Homo sapiens
MRIVFPALAPDPYYSVN

SEQ ID NO: 26501 - protein, 51 aa, Homo sapiens
LASRPPIPTWGWRPFPGSAWRPALWWPSMPASRSAKGPIAVPKSHSRGRLR

SEQ ID NO: 26502 - protein, 16 aa, Homo sapiens
IPPAGAGFFASHREAG

SEQ ID NO: 26503 - protein, 61 aa, Homo sapiens
LEPAQRCFEDAGGPASAVGSCVAGPGAAGGAAAASEALGLGPVPYRLERVHPAAHPQPAHG

SEQ ID NO: 26504 - protein, 8 aa, Homo sapiens
LRRTGGLD

SEQ ID NO: 26505 - protein, 64 aa, Homo sapiens
KGSYNDFSFVTHTNREGVPMRKGEHLGEFNLGSTIVLIFEAPKDFNFQLKTGQKIRFGEALGSL

SEQ ID NO: 26506 - protein, 23 aa, Homo sapiens
IPSASFYSLWSLWARSMGMCSTS

SEQ ID NO: 26507 - protein, 248 aa, Homo sapiens
MSSCMILCSPCSSHFLLPLSPPPALSPSCSLSLPFPCVLVSPLPGGGGVGAAEVAGSKVVPALPESGQSEPGPPEVEGGTKATGNCFYVSMPSGPPDSSTDHSEAPMSPPQPDSLPAGQTEPQPQLQGGNDDPRRPSRSPPSLALRDVGMIFHTIEQLTLKLNRLKDMELAHRELLKSLGGESSGGTTPVGSFHTEAARWTDGSLSPPAKEPLASDSRNSHELGPCPEDGSDAPLEDSTADAAASPGP

SEQ ID NO: 26508 - protein, 82 aa, Homo sapiens [sequence omitted]

SEQ ID NO: 26509 - protein, 347 aa, Homo sapiens
MAATLYTIKQKIDEKNLSSIKVIVPRHRKTLMKAFIDQLFTDVYNFEFEDLQVTFRGGLFKQSIEINVITAQELRGIQNEIETFLRSLPALRGKLTIITSSLIPDIFIHGFTTRTGGISYIPTLSSFNLFSSSKRRDPKVVVQENLRRLANAAGFNVEKFYRIKTHHSNDIWIMGRKEPDSYDGITTNQRGVTIAALGADCIPIVFADPVKKACGVAHAGWKGTLLGVAMATVNAMIAEYGCSLEDIVVVLGPSVGPCCFTLPRESAEAFHNLHPACVQLFDSPNPCIDIRKATRILLEQGGILPQNIQDQNQDLNLCTSCHPDKFFSHVRDGLNFGTQIGFISIKE

SEQ ID NO: 26510 - protein, 499 aa, Homo sapiens
MTSITSASEASPEHGPEPGPEDSVEACPPIKASCSPSRHEARPKSLNLLPEAKHPGDPQRGFKPKTRTPEERLKWPHEQVCNGLEQPRKQQRSDLNGPVDNNNIPETKKVASFPSFVAVPGPCEPEDLIDGIIFAANYLGSTQLLSERNPSKNIRMMQAQEAVSRVKNSEGDAQTLTEVDLFISTQRIKVLNADTQETMMDHALRTISYIADIGNIVVLMARRRMPRSASQDCIETTPGAQEGKKQYKMICHVFESEDAQLIAQSIGQAFSVAYQEFLRANGINPEDLSQKEYSDIINTQEMYNDDLIHFSNSENCKELQLEKHKGEILGVVVVESGWGSILPTVILANMMNGGPAARSGKLSIGDQIMSINGTSLVGLPLATCQGIIKGLKNQTQVKLNIVSCPPVTTVLIKRPDLKYQLGFSVQNGIICSLMRGGIAERGGVRVGHRIIEINGQSVVATAHEKIVQALSNSVGEIHMKTMPAAMFRLLTGQETPLYI

SEQ ID NO: 26511 - protein, 148 aa, Homo sapiens
MQEPPKSIEEFLKFQNWDYWPREIHFRDDDKWSCTLKKIKEDSSFVSIYTHLWENVPRIFEALLIMESKLKEYSLILQNHTSEIFKWKSMISETSSYRKLERYGEFLKKYHKKKKIMGVWGMGPHSVAQAGVQWRNRGSLQPLPPRFK

SEQ ID NO: 26512 - protein, 145 aa, Homo sapiens
MTPEEKDKLFTAIGYSESTHNLTLPKQYVAHIMTLKLVSTSVTIRENKNIPEILKIQIIGLGTQVSQRPGAQALKVEAKLEHWYITGLRQQDIVPSLVASIGDTTSSLLKIKFETNPEDSPADQTLIVQSQPVEVIYDAVSARRK

SEQ ID NO: 26513 - protein, 2603 aa, Homo sapiens
MPRASPGGRSPQVPTSPVPGDPFDQEDETPDPKFAVVFPRIHRAGRASSSRSSEEASADAPTGEGRGWPRAGVGGHSEGCRTSGEGVSGLRRGSLLAPTAPDGPSLDESGSSSEAELETLNDEPPVRWAQGSGPHEGPRLGAAVLLPRLSLETRLQQEGDPGLRGSLRELWEPEDEDEAVLERDLELSLRPGLEAPPFPGAKGRSLGDGLEDMEDLARLRLVCDSSVLLCLKKRFHLGRIYTFGGPVLLVLNPHRSLPLFSPEVQASYHPRKALSTTPHIFAIVASAYDLAQNTGQDPCILLCGHSGSGKTEAAKKIMQFLSSLEQDQTGNRECQVEDMLPILSSFGHAKTILNANASRFGQVFCLYLQQGVIVGASVSHYLLETSRVVFQAQAERSFHVFYKLLAGLDSIERERLSLQGPETYYYLNQGQACRLQGKEDAQDFEGLLKALQGLGLCPEELNAVWAVLAAILQLGNICFSSSERESQEVAAVSSWAEIHTAARLLRVPPECLEGAVTRRVTETPYGQVSRSLPVESAFDARDALAKALYSRLFHRLLRRTNARLAPPGEGGSIGTVTVVDAYGFEALRVNGLEQLCNNLASERLQLFSSQMLLAQEEEECRRELLSWVPVPQPPRESCLDLLVDQPHSLLSILDAQTWLSQATDHTFLQKSHYHHGDHPSYAKPRLPLPVFTVRHYAGTVTYQVHKFLNRNRDQLDPAVVEMLGQSQLQLVGSLFQEAEPQSRGGRGRPTLASRFQQALEDLIARLGRSHVYFIQCLTPNPGKLPGLFDVGHVTEQLHQAAILEAVGTRSANFPVRVPFEAFLASFQALGSEGQEDLSDREKCGAVLSQVLGAESPLYHLGATKVLLQEQGWQRLEELRDQQRSQALVDLHRSFHTCISRQRVLPRMQARMRGFQARSAGVGARAEVGGPVFTHSSNSCWLTVCLIYPWARCWKRYLRRRAALGQLNTILLVAQPLLQRRQRLQLGRWQGWHSSERALERVPSMELGRLEIPAELAVMLKTAESHRDALAGSITECLPPEVPARPSLTLPADIDLFPFSSFVAIGFQEPSLPRPGQPLAKPLTQLDGDNPQRALDINKVMLRLLGDGSLESWQRQIMGAYLVRQGQCRPGLRNELFSQLVAQLWQNPDEQQSQRGWALMAVLLSAFPPLPVLQKPLLKFVSDQAPRGMAALCQHKLLGALEQSQLASGATRAHPPTQLEWLAGWRRGRMALDVFTFSEECYSAEVESWTTGEQLAGWILQSRDAWQDLAGCDFVLDLISQTEDLGDPARPRSYPITPLGSAEAIPLAPGIQAPSLPPGPPPGPAPTLPSRDHTGEVQRSGSLDGFLDQIFQPVISSGLSDLEQSWALSSRMKGGGAIGPTQQGYPMVYPGMIQMPAYQPGMVPAPMPMMPAMGTVPAMPAMVVPPQPPLPSLDAGQLAVQQQNFIQQQALILAQQMTAQAMSLSLEQQMQQRQQQARASEAASQASPSAVTSKPRKPPTPPEKPQRDLGSEGGCLRETSEEAEDRPYQPKSFQQKRNYFQRMGQPQITVRTMKPPAKVHIPQGEAQEEEEEEEEEEEQEEQEVETRAVPSPPPPPIVKKPLKQGGAKAPKEAEAEPAKETAAKGHGQGPAQGRGTVVRSSDSKPKRPQPSREIGNIIRMYQSRPGPVPVPVQPSRPPKAFLRKIDPKDEALAKLGINGAHSSPPMLSPSPGKGPPPAVAPRPKAPLQLGPSSSIKEKQGPLLDLFGQKLPIAHTPPPPPAPPLPLPEDPGTLSAERRCLTQPVEDQGVSTQLLAPSGSVCFSYTGTPWKLFLRKEVFYPRENFSHPYYLRLLCEQILRDTFSESCIRISQNERRKMKDLLGGLEVDLDSLTTTEDSVKKRIVVAARDNWANYFSRFFPVSGESGSDVQLLAVSHRALAHDPGLEVGAGGKVTSVHARSLRSFAEVLGVECRGGSTLELSLKSEQLVLHTARARAIEALVELFLNELKKDSGYVIALRSYITDNCSLLSFHRGDLIKLLPVATLEPGWQFGSAGGRSGLFPADIVQPAAAPDFSFSKEQRSGWHKGQLSNGEPGLARWDRASERPAHPWSQAHSDDSEATSLSSVAYAFLPDSHSYTMQEFARRYFRRSQALLGQTDGGAAGKDTDSLVQYTKAPIQESLLSLSDDVSKLAVASFLALMRFMGDQSKPRGKDEMDLLYELLKLCQQEKLRDEIYCQVIKQVTGHPRPEHCTRGWSFLSLLTGFFPPSTRLMPYLTKFLQDSGPSQELARSSQEHLQRTVKYGGRRRMPPPGEMKAFLVAAEVQEELCRQMGITEPQEVQEFALFLIKEKSQLVRPLQPAEYLNSVVVDQDVSLHSRRLHWETPLHFDNSTYISTHYSQVLWDYLQGKLPVSAKADAQLARLAALQHLSKANRNTPSGQDLLAYVPKQLQRQVNTASIKNLMGQELRRLEGHSPQEAQISFIADLGDQAEQVPGPQQSDFLPAPSPPAEAMSQLPLFGYTVYGVLRVSMQALSGPTLLGLNRQHLILMDPSSQSLYCRIALKSLQRLHLLSPLEEKGPPGLEVNYGSADNPQTIWFELPQAQELLYTTVFLIDSSASCTEWPSIN

SEQ ID NO: 26514 - protein, 508 aa, Homo sapiens
MSWARQSLAGIPAACDEFHPFIEALLPHVRAFSYTWFNLQARKRKYFKKHEKRMSKDEERAVKDELLGEKPEIKQKWASRLLAKLRKDIRPEFREDFVLTITGKKPPCCVLSNPDQKGKIRRIDCLRQADKVWRLDLVMVILFKGIPLESTDGERLYKSPQCSNPGLCVQPHHIGVTIKELDLYLAYFVHTPESGQSDSSNQQGDADIKPLPNGHLSFQDCFVTSGVWNVTELVRVSQTPVATASGPNFSLADLESPSYYNINQVTLGRRSITSPPSTSTTKRPKSIDDSEMESPVDDVFYPGTGRSPAAGSSQSSGWPNDVDAGPASLKKSGKLDFCSALSSQGSSPRMAFTHHPLPVLAGVRPGSPRATASALHFPSTSIIQQSSPYFTHPTIRYHHHHGQDSLKEFVQFVCSDGSGQATGQPNGSGQGKVPGSFLLPPPPPVARPVPLPMPDSKSTSTAPDGAALTPPSPSFATTGASSANRFVSIGPRDGNFLNIPQQSQSWFL

SEQ ID NO: 26515 - protein, 73 aa, Homo sapiens
MVVAETSQGSWSAPTSPSTSCPPPNTTTTLAPLPHDRLDPPACQPVSVLHHWHMDCVCHGCDEPPCMPCGELV

SEQ ID NO: 26516 - protein, 915 aa, Homo sapiens
MITSKSNPGNNMACISKNQGSELSGVISSACDKESNMERRVITISKSEYSVHSSLASKVDVEQVVMYCKEKLIRGESEFSFEELRAQKYNQRRKHEQWVNEDRHYMKRKEANAFEEQLLKQKMDELHKKLHQVVETSHEDLPASQERSEVNPARMGPSVGSQQELRAPCLPVTYQQTPVNMEKNPREAPPVVPPLANAISAALVSPATSQSIAPPVPLKAQTVTDSMFAVASKDAGCVNKSTHEFKPQSGAEIKEGCETHKVANTSSFHTTPNTSLGMVQATPSKVQPSPTVHTKEALGFIMNMFQAPTLPDISDDKDEWQSLDQNEDAFEAQFQKNVRSSGAWGVNKIISSLSSAFHVFEDGNKENYGLPQPKNKPTGARTFGERSVSRLPSKPKEEVPHAEEFLDDSTVWGIRCNKTLAPSPKSPGDFTSAAQLASTPFHKLPVESVHILEDKENVVAKQCTQATLDSCEENMVVPSRDGKFSPIQEKSPKQALSSHMYSASLLRLSQPAAGGVLTCEAELGVEACRLTDTDAAIAEDPPDAIAGLQAEWMQMSSLGTVDAPNFIVGNPWDDKLIFKLLSGLSKPVSSYPNTFEWQCKLPAIKPKTEFQLGSKLVYVHHLLGEGAFAQVYEATQGDLNDAKNKQKFVLKVQKPANPWEFYIGTQLMERLKPSMQHMFMKFYSAHLFQNGSVLVGELYSYGTLLNAINLYKNTPEKVMPQGLVISFAMRMLYMIEQVHDCEIIHGDIKPDNFILGNGFLEQDDEDDLSAGLALIDLGQSIDMKLFPKGTIFTAKCETSGFQCVEMLSNKPWNYQIDYFGVAATVYCMLFGTYMKVKNEGGECKPEGLFRRLPHLDMWNEFFHVMLNIPDCHHLPSLDLLRQKLKKVFQQHYTNKIRALRNRLIVLLLECKRSRK

SEQ ID NO: 26517 - protein, 1116 aa, Homo sapiens
MRFFTKLDQLIEFYKKENMGLVTHLQYPVPLEEEDTGDDPEEDTESVVSPPELPPRNIPLTASSCEAKEVPFSNENPRATETSRPSLSETLFQRLQSMDTSGLPEEHLKAIQDYLSTQLAQDSEFVKTGSSSLPHLKKLTTLLCKELYGEVIRTLPSLESLQRLFDQQLSPGLRPRPQVPGEANPINMVSKLSQLTSLLSSIEDKVKALLHEGPESPHRPSLIPPVTFEVKAESLGIPQKMQLKVDVESGKLIIKKSKDGSEDKFYSHKKILQLIKSQKFLNKLVILVETEKEKILRKEYVFADSKKREGFCQLLQQMKNKHSEQPEPDMITIFIGTWNMGNAPPPKKITSWFLSKGQGKTRDDSADYIPHDIYVIGTQEDPLSEKEWLEILKHSLQEITSVTFKTVAIHTLWNIRIVVLAKPEHENRISHICTDNVKTGIANTLGNKGAVGVSFMFNGTSLGFVNSHLTSGSEKKLRRNQNYMNILRFLALGDKKLSPFNITHRFTHLFWFGDLNYRVDLPTWEAETIIQKIKQQQYADLLSHDQLLTERREQKVFLHFEEEEITFAPTYRFERLTRDKYAYTKQKATGMKYNLPSWCDRVLWKSYPLVHVVCQSYGSTSDIMTSDHSPVFATFEAGVTSQFVSKNGPGTVDSQGQIEFLRCYATLKTKSQTKFYLEFHSSCLESFVKSQEGENEEGSEGELVVKFGETLPKLKPIISDPEYLLDQHILISIKSSDSDESYGEGCIALRLEATETQLPIYTPLTHHGELTGHFQGEIKLQTSQGKTREKLYDFVKTERDESSGPKTLKSLTSHDPMKQWEVTSRAPPCSGSSITEIINPNYMGVGPFGPPMPLHVKQTLSPDQQPTAWSYDQPPKDSPLGPCRGESPPTPPGQPPISPKKFLPSTANRGLPPRTQESRPSDLGKNAGDTLPQEDLPLTKPEMFENPLYGSLSSFPKPAPRKDQESPKMPRKEPPPCPEPGILSPSIVLTKAQEADRGEGPGKQVPAPRLRSFTCSSSAEGRAAGGDKSQGKPKTPVSSQAPVPAKRPIKPSRSEINQQTPPTPTPRPPLPVKSPAVLHLQHSKGRDYRDNTELPHHGKHRPEEGPPGPLGRTAMQ

SEQ ID NO: 26518 - protein, 285 aa, Homo sapiens
MYRFFPPYSDYRKLIYHLKGCQGLRNKGSSPFTSIVSAAKVCGAASESPSVKSLRLLVADQDFSFKAGQWVDFFIPGVSVVGGFSICSSPRLLEQERVIELAVKYTNHPPALWVHNTCTLDCEVAVRVGGEFFFDPQPADASRNLVLIAGGVGINPLLSILRHAADLLREQANKRNGYEIGTIKLFYSAKNTSELLFKKNILDLVNEFPEKIACSLHVTKQTTQINAELKPYITEGRITEKEIRDHISKETLFYICGPPPMTDFFSKQLENNHVPKEHICFEKWW

SEQ ID NO: 26519 - protein, 121 aa, Homo sapiens
MSSQSSSLSEACSREAYSSHNWALPPASRSNPQPAYPWATRRMKEEAIKPPLKAFMKQRRMGLNDFIQKIANNSYACKHPEVQSILKISQPQEPELMNANPSPPVSFCMCRASVENCKGVS

SEQ ID NO: 26520 - protein, 87 aa, Homo sapiens
MPPEDFCAWKISVNRLLLHLRLHPHDMLSLSPSPLFSLLSLLSSLLSLSSLSRTHTLESQLPYWELPNGEAHIPQGTDVFSQYLART

SEQ ID NO: 26521 - protein, 502 aa, Homo sapiens
MLACTPKGDEEQLALPRANSPTGKEGYQAVLQEWEEQHRNYVSSLKRQIAQLKEELQERSEQLRNGQYQASDAAGLGLDRSPPEKTQADLLAFLHSQVDKAEVNAGVKLATEYAAVPFDSFTLQKVYQLETGLTRHPEEKPVRKDKRDELVEAIESALETLNSPAENSPNHRPYTASDFIEGIYRTERDKGTLYELTFKGDHKHEFKRLILFRPFGPIMKVKNEKLNMANTLINVIVPLAKRVDKFRQFMQNFREMCIEQDGRVHLTVVYFGKEEINEVKGILENTSKAANFRNFTFIQLNGEFSRGKGLDVGARFWKGSNVLLFFCDVDIYFTSEFLNTCRLNTQPGKKVFYPVLFSQYNPGIIYGHHDAVPPLEQQLVIKKETGFWRDFGFGMTCQYRSDFINIGGFDLDIKGWGGEDVHLYRKYLHSNLIVVRTPVRGLFHLWHEKRCMDELTPEQYKMCMQSKAMNEASHGQLGMLVFRHEIEAHLRKQKQKTSSKKT

SEQ ID NO: 26522 - protein, 206 aa, Homo sapiens
MKAFSLPECELQQTAEWPVHSCSLTSVSSDVCFLQIHVLRTVRSSSSGLDCTHIKIMRQPWLLVSVIHACVFFKTYDRPLILQLQLLWNVFLLHISCDALITGHSIVGFAMYYFTYDPWIGKLLYLEDFFVMSDYRGFGIGSEILKNLSQVAMRCRCSSMHFLVAEWNEPSINFYKRRGASDLSSEEGWRLFKIDKEYLLKMATEE

SEQ ID NO: 26523 - protein, 137 aa, Homo sapiens
LLSIMAQDQGEKENPMRELRIRKLCLNICVGESGDRLTRAAKVLEQLTGQTPVFSKARYTVRSFGIRRNEKIAVHCTVRGAKAEEILEKGLKVREYELRKNNFSDTGNFGFGIQEHIDLGIKYDPSIGIYGLDFYVV

SEQ ID NO: 26524 - protein, 948 aa, Homo sapiens
IRHHNMGLTKQYLRYVASAVFGVIGSQKGNIVFVTLRGEKGRYVAVPACEHVFIWDLRKGEKILILQGLKQEVTCLCPSPDGLHLAVGYEDGSIRIFSLLSGEGNVTFNGHKAAITTLKYDQLGGRLASGSKDTDIIVWDVINESGLYRLKGHKDAITQALFLREKNLLVTSGKDTMVKWWDLDTQHCFKTMVGHRTEVWGLVLLSEEKRLITGASDSELRVWDIAYLQEIEDPEEPDPKKIKGSSPGIQDTLEAEDGAFETDEAPEDRILSCRKAGSIMREGRDRVVNLAVDKTGRILACHGTDSVLELFCILSKKEIQKKMDKKMKKARKKAKLHSSKGEEEDPEVNVEMSLQDEIQRVTNIKTSAKIKSFDLIHSPHGELKAVFLLQNNLVELYSLNPSLPTPQPVRTSRITIGGHRSDVRTLSFSSDNIAVLSAAADSIKIWNRSTLQCIRTMTCEYALCSFFVPGDRQVVIGTKTGKLQLYDLASGNLLETIDAHDGALWSMSLSPDQRGFVTGGADKSVKFWDFELVKDENSTQKRLSVKQTRTLQLDEDVLCVSYSPNQKLLAVSLLDCTVKIFYVDTLKFFLSLYGHKLPVICMDISHDGALIATGSADRNVKIWGLDFGDCHKSLFAHDDSVMYLQFVPKSHLFFTAGKDHKIKQWDADKFEHIQTLEGHHQEIWCLAVSPSGDYVVSSSHDKSLRLWERTREPLILEEEREMEREAEYEESVAKEDQPAVPGETQGDSYFTGKKTIETVKAAERIMEAIELYREETAKMKEHKAICKAAGKEVPLPSNPILMAYGSISPSAYVLEIFKGIKSSELEESLLVLPFSYVPDILKLFNEFIQLGSDVELICRCLFFLLRIHFGQITSNQMLVPVIEKLRETTISKVSQVRDVIGFNMAGLDYLKRECEAKSEVMFFADATSHLEEKKRKRKKREKLILTLT

SEQ ID NO: 26525 - protein, 567 aa, Homo sapiens
VQIMKEHGGTFSSTGISGGSGDSAMDSLQPLQPNYMPVCLFAEESYQKLAMETLEELDWCLDQLETIQTYRSVSEMASNKFKRMLNRELTHLSEMSRSGNQVSEYISNTFLDKQNDVEIPSPTQKDREKKKKQQLMTQISGVKKLMHSSSLNNTSISRFGVNTENEDHLAKELEDLNKWGLNIFNVAGYSHNRPLTCIMYAIFQERDLLKTFRISSDTFITYMMTLEDHYHSDVAYHNSLHAADVAQSTHVLLSTPALDAVFTDLEILAAIFAAAIHDVDHPGVSNQFLINTNSELALMYNDESVLENHHLAVGFKLLQEEHCDIFMNLTKKQRQTLRKMVIDMVLATDMSKHMSLLADLKTMVETKKVTSSGVLLLDNYTDRIQVLRNMVHCADLSNPTKSLELYRQWTDRIMEEFFQQGDKERERGMEISPMCDKHTASVEKSQVGFIDYIVHPLWETWADLVQPDAQDILDTLEDNRNWYQSMIPQSPSPPLDEQNRDCQGLMEKFQFELTLDEEDSEGPEKEGEGHSYFSSTKTLCVIDPENRDSLGETDIDIATEDKSPVDT

SEQ ID NO: 26526 - protein, 169 aa, Homo sapiens
RRPKTFGMDMKAYLRSMIPHLESGMKSSKSKDVLSAAEVMQWSQSLEKLLANQTGQNVFGSFLKSEFSEENIEFWLACEDYKKTESDLLPCKAEEIYKAFVHSDAAKQINIDFRTRESTAKKIKAPTPTCFDEAQKVIYTLMEKDSYPRFLKSDIYLNLLNDLQANSLK

SEQ ID NO: 26527 - protein, 205 aa, Homo sapiens
VPPVVYSRQEQEEEGRKRYEAQKLERMETKWRNGDIVQPVLNPEPNTVSYSQSSLIHLVGPSDCTLHGFVHGGVTMKLMDEVAGIVAARHCKTNIVTASVDAINFHDKIRKGCVITISGRMTFTSNKSMEIEVLVDADPVVDSSQKRYRAASAFFTYVSLSQEGRSLPVPQLVPETEDEKKRFEEGKGRYLQMKAKRQGHAEPQP

SEQ ID NO: 26528 - protein, 162 aa, Homo sapiens
VQNTLPVACLLFTMASSDIQVKELEKRASGQAFELILSPRSKESVPEFPLSPPKKKDLSLEEIQKKLEAAEERRKSHEAEVLKQLAEKREHEKEVLQKAIEENNNFSKMAEEKLTHKMEANKENREAQMAAKLERLREKDKHIEEVRKNKESKDPADETEAD

SEQ ID NO: 26529 - protein, 26 aa, Homo sapiens
IRCTFMAILSVRADFCQAQHSIFADK

SEQ ID NO: 26530 - protein, 105 aa, Homo sapiens
LTAVMACPLEKALDVMVSTFHKYSGKEGDKFKLNKSELKELLTRELPSFLGKRTDEAAFQKLMSNLDSNRDNEVDFQEYCVFLSCIAMMCNEFFEGFPDKQPRKK

SEQ ID NO: 26531 - protein, 180 aa, Homo sapiens
LGIFLHKSELGCDTGSTGKFEWGSKHSKENRNFSEDVLGWRESFDLLLSSKNGVAAFHAFLKTEFSEENLEFWLACEEFKKIRSATKLASRAHQIFEEFICSEAPKEVNIDHETHELTRMNLQTATATCFDAAQGKTRTLMEKDSYPRFLKSPAYRDLAAQASAASATLSSCSLDEPSHT

SEQ ID NO: 26532 - protein, 35 aa, Homo sapiens
TGGQGGVSSWAATVREGLKVCMCEGRERERRAPQR

SEQ ID NO: 26533 - protein, 28 aa, Homo sapiens
ITVDMQKHSLTFWWLVECWPQVVHWQMT

SEQ ID NO: 26534 - protein, 76 aa, Homo sapiens
IFSRVARAGLRVSLRRYTRAEYESEAEGVMGGEIQPVSVKVGDKVLLPEYGGTKVVLDDKDYFLFRDGDILGKYVD

SEQ ID NO: 26535 - protein, 529 aa, Homo sapiens
LTTRKFEYHSSMECDLMETDILESLEDLGYKGPLLEDGALSQAVSAGASSPEFTKLCAWLVSELRVLCKLEENVQATNSPSEAEEFQLEVSGLLGEMNCPYLSLTSGDVTKRLLIQKNCLLLLTYLISELEAARMLCVNAPPKKAQEGGGSEVFQELKGICIALGMSKPPANITMFQFFSGIEKKLKETLAKVPPNHVGKPLLKKPMGPAHWEKIEAINQAIANEYEVRRKLLIKRLDVTVQSFGWSDRAKSQTEKLAKVYQPKRSVLSPKTTISVAHLLAARQDLSKILRTSSGSIREKTACAINKVLMGRVPDRGGRPNEIEPPPPEMPPWQKRQDGPQQQTGGRGGGRGGYEHSSYGGRGGHEQGGGRGGRGGYDHGGRGGGRGNKHQGGWTDGGSGGGGGYQDGGYRDSGFQPGGYHGGHSSGGYQGGGYGGFQTSSSYTGSGYQGGGYQQDNRYQDGGHHGDRGGGRGGRGGRGGRGGRAGQGGGWGGRGSQNYHQGGQFEQHFQHGGYQYNHSGFGQGRHYTS

SEQ ID NO: 26536 - protein, 39 aa, Homo sapiens
VSAFASLEPWALLAKEPSTRVCHHVALRAVRRRNQGVCW

SEQ ID NO: 26537 - protein, 65 aa, Homo sapiens
RSWGGTVCLVWVTSPTCPMSWPSFMKPCASPALCLSLFLMPPLPTPLSWATTFPRTLWFLSTSGL

SEQ ID NO: 26538 - protein, 274 aa, Homo sapiens
VSEAAMAEVPELASEMMAYYSGNEDDLFFEADGPKQMKCSFQDLDLCPLDGGIQLRISDHHYSKGFRQAASVVVAMDKLRKMLVPCPQTFQENDLSTFFPFIFEEEPIFFDTWDNEAYVHDAPVRSLNCTLRDSQQKSLVMSGPYELKALHLQGQDMEQQVVFSMSFVQGEESNDKIPVALGLKEKNLYLSCVLKDDKPTLQLESVDPKNYPKKKMEKRFVFNKIEINNKLEFESAQFPNWYISTSQAENMPVFLGGTKGGQDITDFTMQFVSS

SEQ ID NO: 26539 - protein, 40 aa, Homo sapiens
ICGCLSGTNFSSLTQNSWSRFTSFMMTVFPWKSDSTWHSG

SEQ ID NO: 26540 - protein, 9 aa, Homo sapiens
RAVLIQTLR

SEQ ID NO: 26541 - protein, 13 aa, Homo sapiens
LKMNFLYSPDILI

SEQ ID NO: 26542 - protein, 151 aa, Homo sapiens
ILMQMRFDGRLGFPGGFVDTQDRSLEDGLNRELREELGEAAAAFRVERTDYRSSHVGSGPRVVAHFYAKRLTLEELLAVEAGATRAKDHGLEVLGLVRVPLYTLRDGVGGLPTFLENSFIGSAREQLLEALQDLGLLQSGSISGLKIPAHH

SEQ ID NO: 26543 - protein, 28 aa, Homo sapiens
TRVASLSSASVRIAGCLSPDPRARPAPP

SEQ ID NO: 26544 - protein, 738 aa, Homo sapiens
LKKPKTAENQKASEENEITQPGGSSAKPGLPCLNFEAVLSPDPALIHSTHSLTNSHAHTGSSDCDISCKGMTERIHSINLHNFSNSVLETLNEQRNRGHFCDVTVRIHGSMLRAHRCVLAAGSPFFQDKLLLGYSDIEIPSVVSVQSVQKLIDFMYSGVLRVSQSEALQILTAASILQIKTVIDECTRIVSQNVGDVFPGIQDSGQDTPRGTPESGTSGQSSDTESGYLQSHPQHSVDRIYSALYACSMQNGSGERSFYSGAVVSHHETALGLPRDHHMEDPSWITRIHERSQQMERYLSTTPETTHCRKQPRPVRIQTLVGNIHIKQEMEDDYDYYGQQRVQILERNESEECTEDTDQAEGTESEPKGESFDSGVSSSIGTEPDSVEQQFGPGAARDSQAEPTQPEQAAEAPAEGGPQTNQLETGASSPERSNEVEMDSTVITVSNSSDKSVLQQPSVNTSIGQPLPSTQLYLRQTETLTSNLRMPLTLTSNTQVIGTAGNTYLPALFTTQPAGSGPKPFLFSLPQPLAGQQTQFVTVSQPGLSTFTAQLPAPQPLASSAGHSTASGQGEKKPYECTLCNKTFTAKQNYVKHMFVHTGEKPHQCSICWRSFSLKDYLIKHMVTHTGVRAYQCSICNKRFTQKSSLNVHMRLHRGEKSYECYICKKKFSHKTLLERHVALHSASNGTPPAGTPPGARAGPPGVVACTEGTTYVCSVCPAKFDQIEQFNDHMRMHVSDG

SEQ ID NO: 26545 - protein, 16 aa, Homo sapiens
LRPSLRRCGPAPTRKI

SEQ ID NO: 26546 - protein, 6 aa, Homo sapiens
LQSRWG

SEQ ID NO: 26547 - protein, 46 aa, Homo sapiens
MLIVLRHLPAKNHREELGHSNTRCYHAGHPPLQTPVTAPRKNPKCL

SEQ ID NO: 26548 - protein, 483 aa, Homo sapiens
LPGISPEPAPREKEPGSIRPHCPDSRLDSVPSAPAGLRSSGARGAVVAAAPGMFHSPRRLCSALLQRDAPGLRRLPAPGLRRPLSPPAAVPRPASPRLLAAASAASGAARSCSRTVCSMGTGTSRLYSALAKTLNSSAASQHPEYLVSPDPEHLEPIDPKELLEECRAVLHTRPPRFQRDFVDLRTDCPSTHPPIRVMQWNILAQALGEGKDNFVQCPVEALKWEERKCLILEEILAYQPDILCLQEVDHYFDTFQPLLSRLGYQGTFFPKPWSPCLDVEHNNGPDGCALFFLQNRFKLVNSANIRLTAMTLKTNQVAIAQTLECKESGRQFCIAVTHLKARTGWERFRSAQGCDLLQNLQNITQGAKIPLIVCGDFNAEPTEEVYKHFASSSLNLNSAYKLLSADGQSEPPYTTWKIRTSGECRHTLDYIWYSKHALNVRSALDLLTEEQIGPNRLPSFNYPSDHLSLVCDFSFTEESDGLS

SEQ ID NO: 26549 - protein, 220 aa, Homo sapiens
KLAPGGRGSVNMGKGDPNKPRGKMSSYAFFVQTCREEHKKKHPDSSVNFAEFSKKCSERWKTMSAKEKSKFEDMAKSDKARYDREMKNYVPPKGDKKGKKKDPNAPKRPPSAFFLFCSEHRPKIKSEHPGLSIGDTAKKLGEMWSEQSAKDKQPYEQKAAKLKEKYEKDIAAYRAKGKSEAGKKGPGRPTGSKKKNEPEDEEEEEEEEDEDEEEEDEDEE

SEQ ID NO: 26550 - protein, 15 aa, Homo sapiens
MKSILRGAASGSGSN

SEQ ID NO: 26551 - protein, 8 aa, Homo sapiens
KGISRSID

SEQ ID NO: 26552 - protein, 42 aa, Homo sapiens
RPVAPTGWASVVDFVLLGSSVVTDETRSGMINSIRKLIWAQP

SEQ ID NO: 26553 - protein, 374 aa, Homo sapiens
LGALRPAMVMEVGTLDAGGLRALLGERAAQCLLLDCRSFFAFNAGHIAGSVNVRFSTIVRRRAKGAMGLEHIVPNAELRGRLLAGAYHAVVLLDERSAALDGAKRDGTLALAAGALCREARAAQVFFLKGGYEAFSASCPELCSKQSTPMGLSLPLSTSVPDSAESGCSSCSTPLYDQGGPVEILPFLYLGSAYHASRKDMLDALGITALINVSANCPNHFEGHYQYKSIPVEDNHKADISSWFNEAIDFIDSIKNAGGRVFVHCQAGISRSATICLAYLMRTNRVKLDEAFEFVKQRRSIISPNFSFMGQLLQFESQVLAPHCSAEAGSPAMAVLDRGTSTTTVFNFPVSIPVHSTNSALSYLQSPITTSPSC

SEQ ID NO: 26554 - protein, 335 aa, Homo sapiens
KPSSAILVAAATHALAAAMTEQMTLRGTLKGHNGWVTQIATTPQFPDMILSASRDKTIIMWKLTRDETNYGIPQRALRGHSHFVSDVVISSDGQFALSGSWDGTLRLWDLTTGTTTRRFVGHTKDVLSVAFSSDNRQIVSGSRDKTIKLWNTLGVCKYTVQDESHSEWVSCVRFSPNSSNPIIVSCGWDKLVKVWNLANCKLKTNHIGHTGYLNTVTVSPDGSLCASGGKDGQAMLWDLNEGKHLYTLDGGDIINALCFSPNRYWLCAATGPSIKIWDLEGKIIVDELKQEVISTSSKAEPPQCTSLAWSADGQTLFAGYTDNLVRVWQVTIGTR

SEQ ID NO: 26555 - protein, 18 aa, Homo sapiens
LVGVGPEESGKTHRSVWI

SEQ ID NO: 26556 - protein, 178 aa, Homo sapiens
TSRSPRRSQRCPTPLARPPAASPGSALSCPPTRPRPSAPAAATAATPPAATATATAPGIAFGTAPAPAPAAAPLGTVPAPTSWRLGCSCPKSTRLPTCAPRPATTCTPPSWRPARRRSPWSRSTRWARYWAAAASARSTQASASPTTCRWPSNTWRRTGFPTGESCLMALECPWKWSC

SEQ ID NO: 26557 - protein, 29 aa, Homo sapiens
LKWKRSIPEGSFTTSLTALMKRKATGCAM

SEQ ID NO: 26558 - protein, 58 aa, Homo sapiens
ISNQGDFSIFLLSTVRLQIWDFFITSFFFELHLGSFFCARLFHPFSLPPVLLLFDLFD

SEQ ID NO: 26559 - protein, 16 aa, Homo sapiens
KHNMSCAPMLVNSCCN

SEQ ID NO: 26560 - protein, 43 aa, Homo sapiens
RTSFSSSTFPRTLGCLACPNLLTGLRNREMLLPFYLTKSSASG

SEQ ID NO: 26561 - protein, 74 aa, Homo sapiens
IVFCSVSGDHLPRLGLLGQARTHGPWKSWSRGLNSRHLYRAEHDHIPAAAAGAQPGLHRSRWLRGPCGKHLSVG

SEQ ID NO: 26562 - protein, 291 aa, Homo sapiens
LDATSPPSVFGAEIAKTEGLEMADHMMAMNHGRFPDGTNGLHHHPAHRMGMGQFPSPHHHQQQQPQHAFNALMGEHIHYGAGNMNATSGIRHAMGPGTVNGGHPPSALAPAARFNNSQFMGPPVASQGGSLPASMQLQKLNNQYFNHHPYPHNHYMPDLHPAAGHQMNGTNQHFRDCNPKHSGGSSTPGGSGGSSTPGGSGSSSGGGAGSSNSGGGSGSGNMPASVAHVPAAMLPPNVIDTDFIDEEVLMSLVIEMGLDRIKELPELWLGQNEFDFMTDFVCKQQPSRVSC

SEQ ID NO: 26563 - protein, 6 aa, Homo sapiens
IRALPV

SEQ ID NO: 26564 - protein, 6 aa, Homo sapiens
VCFRMF

SEQ ID NO: 26565 - protein, 17 aa, Homo sapiens
LFRERAPDRQLRTGAAV

SEQ ID NO: 26566 - protein, 93 aa, Homo sapiens
VLDIEINEPLDEFTGGMETLELQKDIKEESDEEEEDDEESGRLRFKTERKEGTIIRLSDVTRERRNIPETLGNFFACLPSSFTLISTSSIVLL

SEQ ID NO: 26567 - protein, 103 aa, Homo sapiens
KYGNQLVRLAHREQVALYVDLDDVAEDDPELVDSICENARRYAKLFADAVQELLPQYKEREVVNKDVLDVYIEHRLMMEQRSRDPGMVRSPQNQYPAELMRRL

SEQ ID NO: 26568 - protein, 22 aa, Homo sapiens
LKRLSPRWREKRNSSVSSLLVA

SEQ ID NO: 26569 - protein, 23 aa, Homo sapiens
KSSIHFLPNSIPWACHSIWEKSN

SEQ ID NO: 26570 - protein, 13 aa, Homo sapiens
ILSGSPSSGHTGR

SEQ ID NO: 26571 - protein, 232 aa, Homo sapiens
VDGRRAGELRKIQARMGVFAQADGSAYIEQGNTKALAVVYGPHEIRGSRARALPDRALVNCQYSSATFSTGERKRRPHGDRKSCEMGLQLRQTFEAAILTQLHPRSQIDIYVQVLQADGGTYAACVNAATLAVLDAGIPMRDFVCACSAGFVDGTALADLSHVEEAAGGPQLALALLPASGQIALLEMDARLHEDHLERVLEAAAQAARDVHTLLDRVVRQHVREASILLGD

SEQ ID NO: 26572 - protein, 47 aa, Homo sapiens
RLFCPFGDTSPPLPGPASLKGSPCSCLDAGFFSGSGKPASRDDAPQR

SEQ ID NO: 26573 - protein, 756 aa, Homo sapiens
VIEKECSALGGLFQTIISDMKGSYPVWEDFINKAGKLQSQLRTTVVAAAAFLDAFQKVADMATNTRGGTREIGSALTRMCMRHRSIEAKLRQFSSALIDCLINPLQEQMEEWKKVANQLDKDHAKEYKKARQEIKKKSSDTLKLQKKAKKVDTLGRGDIQPQLDSALQDVNDKYLLLEETEKQAVRKALIEERGRFCTFISMLRPVIEEEISMLGEITHLQTISEDLKSLTMDPHKLPSSSEQVILDLKGSDYSWSYQTPPSSPSTTMSRKSSVCSSLNSVNSSDSRSSGSHSHSPSSHYRYRSSNLAQQAPVRLSSVSSHDSGFISQDAFQSKSPSPMPPEAPNQLSNGFSHYSLSSESHVGPTGAGLFPHCLPASRLLPRVTSVHLPDYAHYYTIGPGMFPSSQIPSWKDWAKPGPYDQPLVNTLQRRKEKREPDPNGGGPTTASGPPAAAEEAQRPRSMTVSAATRPGEEMEACEELALALSRGLQLDTQRSSRDSLQCSSGYSTQTTTPCCSEDTIPSQVSDYDYFSVSGDQEADQQEFDKSSTIPRNSDISQSYRRMFQAKRPASTAGLPTTLGPAMVTPGVATIRRTPSTKPSVRRGTIGAGPIPIKTPVIPVKTPTVPDLPGVLPAPPDGPEERGEHSPESPSVGEGPQGVTSMPSSMWSGQASVNPPLPGPKPSIPEEHRQAIPESEAEDQEREPPSATVSPGQIPESDPADLSPRDTPQGEDMLNAIRRGVKLKKTTTNDRSAPRFS

SEQ ID NO: 26574 - protein, 10 aa, Homo sapiens
VKRKLSKSDD

SEQ ID NO: 26575 - protein, 10 aa, Homo sapiens
LCSRLSCFPS

SEQ ID NO: 26576 - protein, 32 aa, Homo sapiens
KLALNQISQISMKSPQLILVNMASFPEVRWPC

SEQ ID NO: 26577 - protein, 1200 aa, Homo sapiens
LRAYAGPVSEMPVRGDRGFPPRRELSGWLRAPGMEELIWEQYTVTLQKDSKRGFGIAVSGGRDNPHFENGETSIVISDVLPGGPADGLLQENDRVVMVNGTPMEDVLHSFAVQQLRKSGKVAAIVVKRPRKVQVAALQASPPLDQDDRAFEVMDEFDGRSFRSGYSERSRLNSHGGRSRSWEDSPERGRPHERARSRERDLSRDRSRGRSLERGLDQDHARTRDRSRGRSLERGLDHDFGPSRDRDRDRSRGRSIDQDYERAYHRAYDPDYERAYSPEYRRGARHDARSRGPRSRSREHPHSRSPSPEPRGRPGPIGVLLMKSRANEEYGLRLGSQIFVKEMTRTGLATKDGNLHEGDIILKINGTVTENMSLTDARKLIEKSRGKLQLVVLRDSQQTLINIPSLNDSDSEIEDISEIESNRSFSPEERRHQYSDYDYHSSSEKLKERPSSREDTPSRLSRMGATPTPFKSTGDIAGTVVPETNKEPRYQEDPPAPQPKAAPRTFLRPSPEDEAIYGPNTKMVRFKKGDSVGLRLAGGNDVGIFVAGIQEGTSAEQEGLQEGDQILKVNTQDFRGLVREDAVLYLLEIPKGEMVTILAQSRADVYRDILACGRGDSFFIRSHFECEKETPQSLAFTRGEVFRVVDTLYDGKLGNWLAVRIGNELEKGLIPNKSRAEQMASVQNAQRDNAGDRADFWRMRGQRSGVKKNLRKSREDLTAVVSVSTKFPAYERVLLREAGFKRPVVLFGPIADIAMEKLANELPDWFQTAKTEPKDAGSEKSTGVVRLNTVRQIIEQDKHALLDVTPKAVDLLNYTQWFPIVIFFNPDSRQGVKTMRQRLNPTSNKSSRKLFDQANKLKKTCAHLFTATINLNSANDSWFGSLKDTIQHQQGEAVWVSEGKMEGMDDDPEDRMSYLTAMGADYLSCDSRLISDFEDTDGEGGAYTDNELDEPAEEPLVSSITRSSEPVQHEESIRKPSPEPRAQMRRAASSDQLRDNSPPPAFKPEPPKAKTQNKEESYDFSKSYEYKSNPSAVAGNETPGASTKGYPPPVAAKPTFGRSILKPSTPIPPQEGEEVGESSEEQDNAPKSVLGKVKIFEKMDHKARLQRMQELQEAQNARIEIAQKHPDIYAVPIKTHKPDPGTPQHTSSRPPEPQKAPSRPYQDTRGSYGSDAEEEEYRQQLSEHSKRGYYGQSARYRDTEL

SEQ ID NO: 26578 - protein, 24 aa, Homo sapiens
VPKVRRKHHTEGTGRMADADRNQR

SEQ ID NO: 26579 - protein, 134 aa, Homo sapiens
IMNDTVTIRTRKFMTNRLLQRKQMVIDVLHPGKATVPKTEIREKLAKMYKTTPDVIFVFGFRTHFGGGKTTGFGMIYDSLDYAKKNEPKHRLARHGLYEKKKTSRKQRKERKNRMKKVRGTAKANVGAGKKPKE

SEQ ID NO: 26580 - protein, 638 aa, Homo sapiens
TAAGMAHYNFKKITVVPSAKDFIDLTLSKTQRKTPTVIHKHYQIHRIRHFYMRKVKFTQQNYHDRLSQILTDFPKLDDIHPFYADLMNILYDKDHYKLALGQINIAKNLVDNVAKDYVRLMKYGDSLYRCKQLKRAALGRMCTVIKRQKQSLEYLEQVRQHLSRLPTIDPNTRTLLLCGYPNVGKSSFINKVTRADVDVQPYAFTTKSLFVGHMDYKYLRWQVVDTPGILDHPLEDRNTIEMQAITALAHLRAAVLYVMDLSEQCGHGLREQLELFQNIRPLFINKPLIVVANKCDVKRIAELSEDDQKIFTDLQSEGFPVIETSTLTEEGVIKVKTEACDRLLAHRVETKMKGNKVNEVLNRLHLAIPTRRDDKERPPFIPEGVVARRKRMETEESRKKRERDLELEMGDDYILDLQKYWDLMNLSEKHDKIPEIWEGHNIADYIDPAIMKKLEELEKEEELRTAAGEYDSVSESEDEEMLEIRQLAKQIREKKKLKILESKEKNTQGPRMPRTAKKVQRTVLEKEMRSLGVDMDDKDDAHYAVQARRSRSITRKRKREDSAPPSSVARSGSCSRTPRDVSGLRDVKMVKKAKTMMKNAQKKMNRLGKKGEADRHVFDMKPKHLLSGKRKAGKKDRR

SEQ ID NO: 26581 - protein, 11 aa, Homo sapiens
VELPMEVNLNA

SEQ ID NO: 26582 - protein, 6 aa, Homo sapiens
IHRLKT

SEQ ID NO: 26583 - protein, 26 aa, Homo sapiens
VRAPRRMQLKLILWIEKLLELLYKVF

SEQ ID NO: 26584 - protein, 21 aa, Homo sapiens
RILTIRTHISLQEASWPSQTT

SEQ ID NO: 26585 - protein, 37 aa, Homo sapiens
IQKCLPLKASVVVFKPQKSHTQDHLTPTLTSVHDAGP

SEQ ID NO: 26586 - protein, 482 aa, Homo sapiens
RLCEEQMMTAKAVDKIPVTLSGFVHQLSDNIYPVEDLAATSVTIFPNAELGGPFDQMNGVAGDGMINIDMTGEKRSLDLPYPSSFAPVSAPRNQTFTYMGKFSIDPQYPGASCYPEGIINIVSAGILQGVTSPASTTASSSVTSASPNPLATGPLGVCTMSQTQPDLDHLYSPPPPPPPYSGCAGDLYQDPSAFLSAATTSTSSSLAYPPPPSYPSPKPATDPGLFPMIPDYPGFFPSQCQRDLHGTAGPDRKPFPCPLDTLRVPPPLTPLSTIRNFTLGGPSAGVTGPGASGGSEGPRLPGSSSAAAAAAAAAAYNPHHLPLRPILRPRKYPNRPSKTPVHERPYPCPAEGCDRRFSRSDELTRHIRIHTGHKPFQCRICMRNFSRSDHLTTHIRTHTGEKPFACDYCGRKFARSDERKRHTKIHLRQKERKSSAPSASVPAPSTASCSGGVQPGGTLCSSNSSSLGGGPLAPCSSRTRTP

SEQ ID NO: 26587 - protein, 367 aa, Homo sapiens
IPRGNVLFTVENTDPECYWLTNWIETILVQSWYPITVATNSREQKKILAKYLLETSGNLDGLEYKLHDFGYRGVSSQETAGIGASAHLVNFKGTDTVAGLALNKKYYGTKDPVPGYSVPAAEHSTITAWGKDHEKDAFEHIVTQFSSVPVSVVSNSYDIYNACEKIWGEDLRHLIVSRSTQAPLIIRPDSGNPLDTVLKVLEILGKKFPVTENSKGYKLLPPYLRVIQGDGVDINTLQEIVEGMKQKMWSIENIAFGSGGGLLQKLTRDLLNCSFKCSYVVTNGLGINVFKDPVADPNKRSKKGRLSLHRTPAGNFVTLEEGKGDLEEYGQDLLHTVFKNGKVTKSYSFDEIRKNAQLNIELEAAHH

SEQ ID NO: 26588 - protein, 31 aa, Homo sapiens
LGLQRGAESRTRRVLPAAVWTTRGHRQKWAL

SEQ ID NO: 26589 - protein, 42 aa, Homo sapiens
LAAAGGVIVRVVGLEKFRGGGGAGQDKDSGTGPWACRSPCRQ

SEQ ID NO: 26590 - protein, 21 aa, Homo sapiens
LGGSAADLAKWTGLLRRLCRW

SEQ ID NO: 26591 - protein, 48 aa, Homo sapiens
LEAATRPAPPPCFEISMTMMSLFGAPRAGFIKLNMQWKLLNKVQPQLV

SEQ ID NO: 26592 - protein, 65 aa, Homo sapiens
LKAVARGCPHSHVKRYASIARLAAPSSPRSSPGSSGGPEVARGGSEASPGARRVAPRSTVTAPCP

SEQ ID NO: 26593 - protein, 11 aa, Homo sapiens
KQLSRCWGPWC

SEQ ID NO: 26594 - protein, 25 aa, Homo sapiens
KLSMPFRSLGLQLHTWNMRLLPWEI

SEQ ID NO: 26595 - protein, 18 aa, Homo sapiens
MPTLKSFVILAFSNKKAT

SEQ ID NO: 26596 - protein, 15 aa, Homo sapiens
VQMPMSEVMLEKRSS

SEQ ID NO: 26597 - protein, 16 aa, Homo sapiens
IFGKKVGFPPSPSPCY

SEQ ID NO: 26598 - protein, 52 aa, Homo sapiens
LNSPAALGFFVASFVIGARPTPQQPCPRDLQLVLILAPPTLVWVFSSTEKSR

SEQ ID NO: 26599 - protein, 25 aa, Homo sapiens
LQLLGFLWLPSLLEPGLHPSTEKSR

SEQ ID NO: 26600 - protein, 1010 aa, Homo sapiens
LTNNKMMSDASDMLAAALEQMDGIIAGSKALEYSNGIFDCQSPTSPFMGSLRALHLVEDLRGLLEMMETDEKEGLRCQIPDSTAETLVEWLQSQMTNGHLPGNGDVYQERLARLENDKESLVLQVSVLTDQVEAQGEKIRDLEFCLEEHREKVNATEEMLQQELLSRTSLETQKLDLMAEISNLKLKLTAVEKDRLDYEDKFRDTEGLIQEINDLRLKVSEMDSERLQYEKKLKSTKDELASLKEQLEEKESEVKRLQEKLVCKMKGEGVEIVDRDENFKKKLKEKNIEVQKMKKAVESLMAANEEKDRKIEDLRQCLNRYKKMQDTVVLAQGKKGKDGEYEELLNSSSISSLLDAQGFSDLEKSPSPTPVMGSPSCDPFNTSVPEEFHTTILQVSIPSLLPATVSMETSEKSKLTPKPETSFEENDGNIILGATVDTQLCDKLLTSSLQKSSSLGNLKKETSDGEKETIQKTSEDRAPAESRPFGTLPPRPPGQDTSMDDNPFGTRKVRSSFGRGFFKIKSNKRTASAPNLDRKRSASAPTLAETEKETAEHLDLAGASSRPKDSQRNSPFQIPPPSPDSKKKSRGIMKLFGKLRRSQSTTFNPDDMSEPEFKRGGTRATAGPRLGWSRDLGQSNSDLDMPFAKWTKEQVCNWLMEQGLGSYLNSGKHWIASGQTLLQASQQDLEKELGIKHSLHRKKLQLALQALGSEEETNHGKLDFNWVTRWLDDIGLPQYKTQFDEGRVDGRMLHYMTVDDLLSLKVVSVLHHLSIKRAIQVLRINNFEPNCLRRRPSDENTIAPSEVQKWTNHRVMEWLRSVDLAEYAPNLRGSGVHGGLMVLEPRFNVETMAQLLNIPPNKTLLRRHLATHFNLLIGAEAQHQKRDAMELPDYVLLTATAKVKPKKLAFSNFGNLRKKKQEDGEEYVCPMELGQASGSASKKGFKPGLDMRLYEEDDLDRLEQMEDSEGTVRQIGAFSEGINNLTHMLKEDDMFKDFAARSPSASITDEDSNV

SEQ ID NO: 26601 - protein, 550 aa, Homo sapiens
TSCEGIHLCAELLGTMASLSLAPVNIFKAGADEERAETARLTSFIGAIAIGDLVKSTLGPKGMDKILLSSGRDASLMVTNDGATILKNIGVDNPAAKVLVDMSRVQDDEVGDGTTSVTVLAAELLREAESLIAKKIHPQTIIAGWREATKAAREALLSSAVDHGSDEVKFRQDLMNIAGTTLSSKLLTHHKDHFTKLAVEAVLRLKGSGNLEAIHIIKKLGGSLADSYLDEGFLLDKKIGVNQPKRIENAKILIANTGMDTDKIKIFGSRVRVDSTAKVAEIEHAEKEKMKEKVERILKHGINCFINRQLIYNYPEQLFGAAGVMAIEHADFAGVERLALVTGGEIASTFDHPELVKLGSCKLIEEVMIGEDKLIHFSGVALGEACTIVLRGATQQILDEAERSLHDALCVLAQTVKDSRTVYGGGCSEMLMAHAVTQLANRTPGKEAVAMESYAKALRMLPTIIADNAGYDSADLVAQLRAAHSEGNTTAGLDMREGTIGDMAILGITESFQVKRQVLLSAAEAAEVILRVDNIIKAAPRKRVPDHHPC

SEQ ID NO: 26602 - protein, 438 aa, Homo sapiens
LLARAFARPLLEDRGDSDHSLWLGRETEAAAAQGKRGCSGGSRKMSGEDEQQEQTIAEDLVVTKYKMGGDIANRVLRSLVEASSSGVSVLSLCEKGDAMIMEETGKIFKKEKEMKKGIAFPTSISVNNCVCHFSPLKSDQDYILKEGDLVKIDLGVHVDGFIANVAHTFVVDVAQGTQVTGRKADVIKAAHLCAEAALRLVKPGNQNTQVTEAWNKVAHSFNCTPIEGMLSHQLKQHVIDGEKTIIQNPTDQQKKDHEKAEFEVHEVYAVDVLVSSGEGKAKDAGQRTTIYKRDPSKQYGLKMKTSRAFFSEVERRFDAMPFTLRAFEDEKKARMGVVECAKHELLQPFNVLYEKEGEFVAQFKFTVLLMPNGPMRITSGPFEPDLYKSEMEVQDAELKALLQSSASRKTQKKKKKKASKTAENATSGETLEENEAGD

SEQ ID NO: 26603 - protein, 312 aa, Homo sapiens
LSESRGGGGMSEAGEATTTTTTTLPQAPTEAAAAAPQDPAPKSPVGSGAPQAAAPAPAAHVAGNPGGDAAPAATGTAAAASLATAAGSEDAEKKVLATKVLGTVKWFNVRNGYGFINRNDTKEDVFVHQTAIKKNNPRKYLRSVGDGETVEFDVVEGEKGAEAANVTGPDGVPVEGSRYAADRRRYRRGYYGRRRGPPRNAGEIGEMKDGVPEGAQLQGPVHRNPTYRPRYRSRGPPRPRPAPAVGEAEDKENQQATSGPNQPSVRRGYRRPYNYRRRPRPPNAPSQDGKEAKAGEAPTENPAPPTQQSSAE

SEQ ID NO: 26604 - protein, 292 aa, Homo sapiens
IGVGAYGTVYKARDPHSGHFVALKSVRVPNGGGGGGGLPISTVREVALLRRLEAFEHPNVVRLMDVCATSRTDREIKVTLVFEHVDQDLRTYLDKAPPPGLPAETIKDLMRQFLRGLDFLHANCIVHRDLKPENILVTSGGTVKLADFGLARIYSYQMALTPVVVTLWYRAPEVLLQSTYATPVDMWSVGCIFAEMFRRKPLFCGNSEADQLGKIFDLIGLPPEDDWPRDVSLPRGAFPPRGPRPVQSVVPEMEESGAQLLLEMLTFNPHKRISAFRALQHSYLHKDEGNPE

SEQ ID NO: 26605 - protein, 6 aa, Homo sapiens
LLPLPP

SEQ ID NO: 26606 - protein, 94 aa, Homo sapiens
VQDPNDRRLRPIYDYLDNGNNKMAIQQADKLLKKHKDLHCAKVLKAIGLQRTGKQEEAFTLAQEVAALEPTDDNSLQALTILYREMHRRWHGSI

SEQ ID NO: 26607 - protein, 16 aa, Homo sapiens
LIFTESKRKLEMIGSL

SEQ ID NO: 26608 - protein, 1377 aa, Homo sapiens
IGRAAGRKGGREPPPPAPPPPLAPTPGRRARAARPEAPAMASPPRHGPPGPASGDGPNLNNNNNNNNHSVRKCGYLRKQKHGHKRFFVLRGPGAGGDEATAGGGSAPQPPRLEYYESEKKWRSKAGAPKRVIALDCCLNINKRADAKHKYLIALYTKDEYFAVAAENEQEQEGWYRALTDLVSEGRAAAGDAPPAAAPAASCSASLPGALGGSAGAAGAEDSYGLVAPATAAYREVWQVNLKPKGLGQSKNLTGVYRLCLSARTIGFVKLNCEQPSVTLQLMNIRRCGHSDSFFFIEVGRSAVTGPGELWMQADDSVVAQNIHETILEAMKALKELFEFRPRSKSQSSGSSATHPISVPGARRHHHLVNLPPSQTGLVRRSRTDSLAATPPAAKCSSCRVRTASEGDGGAAAGAAAAGARPVSVAGSPLSPGPVRAPLSRSHTLSGGCGGRGSKVALLPAGGALQHSRSMSMPVAHSPPAATSPGSLSSSSGHGSGSYPPPPGPHPPLPHPLHHGPGQRPSSGSASASGSPSDPGFMSLDEYGSSPGDLRAFCSHRSNTPESIAETPPARDGGGGGEFYGYMTMDRPLSHCGRSYRRVSGDAAQDLDRGLRKRTYSLTTPARQRPVPQPSSASLDEYTLMRATFSGSAGRLCPSCPASSPKVAYHPYPEDYGDIEIGSHRSSSSNLGADDGYMPMTPGAALAGSGSGSCRSDDYMPMSPASVSAPKQILQPRAAAAAAAAVPSAGPAGPAPTSAAGRTFPASGGGYKASSPAESSPEDSGYMRMWCGSKLSMEHADGKLLPNGDYLNVSPSDAVTTGTPPDFFSAALHPGGEPLRGVPGCCYSSLPRSYKAPYTCGGDSDQYVLMSSPVGRILEEERLEPQATPGPSQAASAFGAGPTQPPHPVVPSPVRPSGGRPEGFLGQRGRAVRPTRLSLEGLPSLPSMHEYPLPPEPKSPGEYINIDFGEPGARLSPPAPPLLASAASSSSLLSASSPASSLGSGTPGTSSDSRQRSPLSDYMNLDFSSPKSPKPGAPSGHPVGSLDGLLSPEASSPYPPLPPRPSASPSSSLQPPPPPPAPGELYRLPPASAVATAQGPGAASSLSSDTGDNGDYTEMAFGVAATPPQPIAAPPKPEAARVASPTSGVKRLSLMEQVSGVEAFLQASQPPDPHRGAKVIRADPQGGRRRHSSETFSSTTTVTPVSPSFAHNPKRHNSASVENVSLRKSSEGGVGVGPGGGDEPPTSPRQLQPAPPLAPQGRPWTPGQPGGLVGCPGSGGSPMRRETSAGFQNGLNYIAIDVREEPGLPPQPQPPPPPLPQPGDKSSWGRTRSLGGLISAVGVGSTGGGCGGPGPGALPPANTYASIDFLSHHLKEATIVKE

SEQ ID NO: 26609 - protein, 70 aa, Homo sapiens
MVSRTEGNIDDSLIGGNASAEGPEGEGTESTVITGVDIVMNHHLQETSFTKEAYKKYIKDYMKSSLLVKT

SEQ ID NO: 26610 - protein, 27 aa, Homo sapiens
LDLPFLLFSACGGSQRLGRSEPGGRPP

SEQ ID NO: 26611 - protein, 8 aa, Homo sapiens
RTPSMWLT

SEQ ID NO: 26612 - protein, 13 aa, Homo sapiens
LGARSPGKKPSHV

SEQ ID NO: 26613 - protein, 7 aa, Homo sapiens
LELSFDF

SEQ ID NO: 26614 - protein, 10 aa, Homo sapiens
VEKVDKWQSA

SEQ ID NO: 26615 - protein, 123 aa, Homo sapiens
IDMATEGDVELELETETSGPERPPEKPRKHDSGAADLERVTDYAEEKEIQSSNLETAMSVIGDRRSREQKAKQEREKELAKVTIKKEDLELIMTEMEISRAAAERSLREHMGNVVEALIALTN

SEQ ID NO: 26616 - protein, 186 aa, Homo sapiens
LVSSHNVLFSGSLKAIKVWDIVGTELKLKKELTGLNHWVRALVAAQSYLYSGSYQTIKIWDIRTLDCIHVLQTSGGSVYSIAVTNHHIVCGTYENLIHVWDIESKEQVRTLTGHVGTVYALAVISTPDQTKVFSASYDRSLRVWSMDNMICTQTLLRHQGSVTALAVSRGRLFSGAVDSTVKVWTC

SEQ ID NO: 26617 - protein, 14 aa, Homo sapiens
LDFQGRISSEAPAR

SEQ ID NO: 26618 - protein, 24 aa, Homo sapiens
VWVLRKRAWTQINTTKSAVKQFIS

SEQ ID NO: 26619 - protein, 29 aa, Homo sapiens
LWYSKPKEASKSVLIPVNPGSRSTCMTWN

SEQ ID NO: 26620 - protein, 9 aa, Homo sapiens
VSVSRVIRG

SEQ ID NO: 26621 - protein, 31 aa, Homo sapiens
LIPSLPGSPVCWAWPWYPDTTSFPLRCRGRV

SEQ ID NO: 26622 - protein, 139 aa, Homo sapiens
LRDHLDRFSILMTSCTSWLQAPQAPGLCRDEQSSRISVPQLSGAPILLPDLEGTKLSNFQESSPLPHKHERKDKRSTPEEEGRSAPEKIIQSLKLCPGGHRPASLSSGCPAGCRLSFNLPPSMLLSVQKCCMPSSLKTC

SEQ ID NO: 26623 - protein, 406 aa, Homo sapiens
IRNGRGAAGGAEQPGPGGRRAVRVWCDGCYDMVHYGHSNQLRQARAMGDYLIVGVHTDEEIAKHKGPPVFTQEERYKMVQAIKWVDEVVPAAPYVTTLETLDKYNCDFCVHGNDITLTVDGRDTYEEVKQAGRYRECKRTQGVSTTDLVGRMLLVTKAHHSSQEMSSEYREYADSFGKPPHPIPAGDILSSEGCSQCPGGRNPWTGVSQFLQTSQKIIQFASGKEPQPGETVIYVAGAFDLFHIGHVDFLEKVHRLAERPYIIAGLHFDQEVNHYKGKNYPIMNLHERTLSVLACRYVSEVVIGAPYAVTAELLSHFKVDLVCHGKTEIIPDRDGSDPYQEPKRRGIFRQIDSGSNLTTDLIVQRIITNRLEYEARNQKKEAKELAFLEAARQQAAQPLGERDGDF

SEQ ID NO: 26624 - protein, 59 aa, Homo sapiens
LCLWLRLLTGCAQKLREEGGNKYFCLILKPWKELSPCLTRTQPFLLSRRRSCLTLPCGL

SEQ ID NO: 26625 - protein, 15 aa, Homo sapiens
RSWRMPTGRTTTNTS

SEQ ID NO: 26626 - protein, 48 aa, Homo sapiens
LEGFRCFPKVLDERSSSVGRFWALWLGFCNFSLGTAVEPHPLWIIIAT

SEQ ID NO: 26627 - protein, 22 aa, Homo sapiens
ITFPLKPYPLLCIWEIIHREAL

SEQ ID NO: 26628 - protein, 38 aa, Homo sapiens
RYSGILWGPGHRRKTAQKLCHCWNGTLLLPRASPDSVL

SEQ ID NO: 26629 - protein, 44 aa, Homo sapiens
VDSNWIVGATLEKKLPPLPLTLALGAFLNHRKNKFQCGFGLTIG

SEQ ID NO: 26630 - protein, 454 aa, Homo sapiens
LKSRQLFLGRPVDRASAAETMSADGAEADGSTQVTVEEPVQQPSVVDRVASMPLISSTCDMVSAAYASTKESYPHIKTVCDAAEKGVRTLTAAAVSGAQPILSKLEPQIASASEYAHRGLDKLEENLPILQQPTEKVLADTKELVSSKVSGAQEMVSSAKDTVATQLSEAVDATRGAVQSGVDKTKSVVTGGVQSVMGSRLGQMVLSGVDTVLGKSEEWADNHLPLTDAELARIATSLDGFDVASVQQQRQEQSYFVRLGSLSERLRQHAYEHSLGKLRATKQRAQEALLQLSQVLSLMETVKQGVDQKLVEGQEKLHQMWLSWNQKQLQGPEKEPPKPEQVESRALTMFRDIAQQLQATCTSLGSSIQGLPTNVKDQVQQARRQVEDLQATFSSIHSFQDLSSSILAQSRERVASAREALDHMVEYVAQNTPVTWLVGPFAPGITEKAPEEKK

SEQ ID NO: 26631 - protein, 6 aa, Homo sapiens
VNKSGI

SEQ ID NO: 26632 - protein, 27 aa, Homo sapiens
KRITNQRRDSVSEQVFWTMDWLSPSLL

SEQ ID NO: 26633 - protein, 47 aa, Homo sapiens
MFGWFAMVIAYVVYYVRHNQEDARRHLEYLKSLPSAPASKDPIGPGP

SEQ ID NO: 26634 - protein, 281 aa, Homo sapiens
RRSPQFPARTRSGPPNLRPKSGGGSGGKKMKNEIAAVVFFFTRLVRKHDKLKKEAVERFAEKLTLILQEKYKNHWYPEKPSKGQAYRCIRVNKFQRVDPDVLKACENSCILYSDLGLPKELTLWVDPCEVCCRYGEKNNAFIVASFENKDENKDEISRKVTRALDKVTSDYHSGSSSSDEETSKEMEVKPSSVTAAASPVYQISELIFPPLPMWHPLPRKKPGMYRGNGHQNHYPPPVPFGYPNQGRKNKPYRPIPVTWVPPPGMHCDRNHWINPHMLAPH

SEQ ID NO: 26635 - protein, 331 aa, Homo sapiens
RPSPAMLLSKFGSLAHLCGPGGVDHLPVKILQPAKADKESFEKAYQVGAVLGSGGFGTVYAGSRIADGLPVAVKHVVKERVTEWGSLGGATVPLEVVLLRKVGAAGGARGVIRLLDWFERPDGFLLVLERPEPAQDLFDFITERGALDEPLARRFFAQVLAAVRHCHSCGVVHRDIKDENLLVDLRSGELKLIDFGSGALLKDTVYTDFDGTRVYSPPEWIRYHRYHGRSATVWSLGVLLYDMVCGDIPFEQDEEILRGRLLFRRRVSPECQQLIRWCLSLRPSERPSLDQIAAHPWMLGADGGVPESCDLRLCTLDPDDVASTTSSSESL

SEQ ID NO: 26636 - protein, 105 aa, Homo sapiens
KICANHYITPMMELKPNAGSDRAWVWNTHADFADECPKPELLAIRFLNAENAQKFKTKFEECRKEIEEREKKAGSGKNDHAEKVAEKLEALSVKEETKEDAEEKQ

SEQ ID NO: 26637 - protein, 20 aa, Homo sapiens
KTEVLFPCLTQPWLVVPRSI

SEQ ID NO: 26638 - protein, 33 aa, Homo sapiens
LRCFTWLRLCQISMFLSLKCLNTRSSHLGAHCR

SEQ ID NO: 26639 - protein, 62 aa, Homo sapiens
MWCWVGQVSASQTRSAGQAALGPNTESAKRRPCAGSSRSMMGSSFLANKFPFLSKRAIKSFQ

SEQ ID NO: 26640 - protein, 40 aa, Homo sapiens
IFSSCWRCLPPAYSFWPGLGLDCWTSSLCLWLLHGRTQQA

SEQ ID NO: 26641 - protein, 92 aa, Homo sapiens
IHWQIPQATASMKDGKWERKKFMGTELNGKTLGILGLGRIGREVATRMQSFGMKASFSVAPLHINIPGNILHHGDFGSDFNQMKSPTSFLND

SEQ ID NO: 26642 - protein, 9 aa, Homo sapiens
LVSVRSPAV

SEQ ID NO: 26643 - protein, 19 aa, Homo sapiens
LAAGELGAGGVVLVLRIPA

SEQ ID NO: 26644 - protein, 9 aa, Homo sapiens
VGYPAWGSL

SEQ ID NO: 26645 - protein, 10 aa, Homo sapiens
IGGKKAFSLN

SEQ ID NO: 26646 - protein, 490 aa, Homo sapiens
LRGSWRDSGSQTLHWDPSCFREQLVMEPSSLELPADTVQRIAAELKCHPTDERVALHLDEEDKLRHFRECFYIPKIQDLPPVDLSLVNKDENAIYFLGNSLGLQPKMVKTYLEEELDKWAKIAAYGHEVGKRPWITGDESIVGLMKDIVGANEKEIALMNALTVNLHLLMLSFFKPTPKRYKILLEAKAFPSDHYAIESQLQLHGLNIEESMRMIKPREGEETLRIEDILEVIEKEGDSIAVILFSGVHFYTGQHFNIPAITKAGQAKGCYVGFDLAHAVGNVELYLHDWGVDFACWCSYKYLNAGAGGIAGAFIHEKHAHTIKPALVGWFGHELSTRFKMDNKLQLIPGVCGFRISNPPILLVCSLHASLEIFKQATMKALRKKSVLLTGYLEYLIKHNYGKDKAATKKPVVNIITPSHVEERGCQLTITFSVPNKDVFQELEKRGVVCDKRNPNGIRVAPVPLYNSFHDVYKFTNLLTSILDSAETKN

SEQ ID NO: 26647 - protein, 80 aa, Homo sapiens
RCLTTTTSWKADSSSCKMSVKPCRRRPSPSGSIPTLPVCPAGSQTCTLTFEMDGCSSSCWRSSLERGCLNPPRDECASTA

SEQ ID NO: 26648 - protein, 22 aa, Homo sapiens
LTACWLSVDWPGAVLQDPCELP

SEQ ID NO: 26649 - protein, 1139 aa, Homo sapiens
LETMAKMEVKTSLLDNMIGVGDMVLLEPLNEETFINNLKKRFDHSEIYTYIGSVVISVNPYRSLPIYSPEKVEEYRNRNFYELSPHIFALSDEAYRSLRDQDKDQCILITGESGAGKTEASKLVMSYVAAVCGKGAEVNQVKEQLLQSNPVLEAFGNAKTVRNDNSSRFGKYMDIEFDFKGDPLGGVISNYLLEKSRVVKQPRGERNFHVFYQLLSGASEELLNKLKLERDFSRYNYLSLDSAKVNGVDDAANFRTVRNAMQIVGFMDHEAESVLAVVAAVLKLGNIEFKPESRVNGLDESKIKDKNELKEICELTGIDQSVLERAFSFRTVEAKQEKVSTTLNVAQAYYARDALAKNLYSRLFSWLVNRINESIKAQTKVRKKVMGVLDIYGFEIFEDNSFEQFIINYCNEKLQQIFIELTLKEEQEEYIREDIEWTHIDYFNNAIICDLIENNTNGILAMLDEECLRPGTVTDETFLEKLNQVCATHQHFESRMSKCSRFLNDTSLPHSCFRIQHYAGKVLYQVEGFVDKNNDLLYRDLSQAMWKASHALIKSLFPEGNPAKINLKRPPTAGSQFKASVATLMKNLQTKNPNYIRCIKPNDKKAAHIFNEALVCHQIRYLGLLENVRVRRAGYAFRQAYEPCLERYKMLCKQTWPHWKGPARSGVEVLFNELEIPVEEYSFGRSKIFIRNPRTLFKLEDLRKQRLEDLATLIQKIYRGWKCRTHFLLMKKSQIVIAAWYRRYAQQKRYQQTKSSALVIQSYIRGWKARKILRELKHQKRCKEAVTTIAAYWHGTQARRELRRLKEEARNKHAIAVIWAYWLGSKARRELKRLKEEARRKHAVAVIWAYWLGLKVRREYRKFFRANAGKKIYEFTLQRIVQKYFLEMKNKMPSLSPIDKNWPSRPYLFLDSTHKELKRIFHLWRCKKYRDQFTDQQKLIYEEKLEASELFKDKKALYPSSVGQPFQGAYLEINKNPKYKKLKDAIEEKIIIAEVVNKINRANGKSTSRIFLLTNNNLLLADQKSGQIKSEVPLVDVTKVSMSSQNDGFFAVHLKEGSEAASKGDFLFSSDHLIEMATKLYRTTLSQTKQKLNIEISDEFLVQFRQDKVCVKFIQGNQKNGSVPTCKRKNNRLLEVAVP

SEQ ID NO: 26650 - protein, 9 aa, Homo sapiens
ISGSTKGPS

SEQ ID NO: 26651 - protein, 16 aa, Homo sapiens
TKRRILIRFNFLGPMA

SEQ ID NO: 26652 - protein, 230 aa, Homo sapiens
LDCILPPTHPTDKPLRLPLQDVYKIGGIGTVPVGRVETGVLKPGVVVTFAPVNITTEVKSVEMHHEALSEALPGDNVGFNVKNVSVKDVRRGNVAGDSKNDPPMETADFIAQVIILNHPGQISAGYAPILDCHAAHIACKFAELKEKIDRGSGKKLEDGPKFLKSGDAAIVDMVPGKPIVESFSDYPPLGHFAVRDMRQTVAVGVIKAVDKKAAGGGKVTKSAQTAQKAK

SEQ ID NO: 26653 - protein, 34 aa, Homo sapiens
LSITFISMFLEVGKCIGLLVKHVLGIIFSSLGND

SEQ ID NO: 26654 - protein, 418 aa, Homo sapiens
TLLSQSKSGFWFGAERPGGLAFPRKAPPCPWPREQTKSTAGPITLGALRPAMVMEVGTLDAGGLRALLGERAAQCLLLDCRSFFAFNAGHIAGSVNVRFSTIVRRRAKGAMGLEHIVPNAELRGRLLAGAYHAVVLLDERSAALDGAKRDGTLALAAGALCREARAAQVFFLKGGYEAFSASCPELCSKQSTPMGLSLPLSTSVPDSAESGCSSCSTPLYDQGGPVEILPFLYLGSAYHASRKDMLDALGITALINVSANCPNHFEGHYQYKSIPVEDNHKADISSWFNEAIDFIDSIKNAGGRVFVHCQAGISRSATICLAYLMRTNRVKLDEAFEFVKQRRSIISPNFSFMGQLLQFESQVLAPHCSAEAGSPAMAVLDRGTSTTTVFNFPVSIPVHSTNSALSYLQSPITTSPSC

SEQ ID NO: 26655 - protein, 52 aa, Homo sapiens
IIPRHLQLAIRNDEELNKLLGKVTIAQGGVLPNIQAVLLPKKTESHHKAKGK

SEQ ID NO: 26656 - protein, 335 aa, Homo sapiens
LSDKLPSAMTVVSVPQREPLVLGGRLAPLGFSSRGYFGALPMVTTAPPPLPRIPDPRALPPTLFLPHFLGGDGPCLTPQPRAPAALPNRSLAVAGGTPRAAPKKRRKKKVRASPAGQLPSRFHQYQQHRPSLEGGRSPATGPSGAQEVPGPAAALAPSPAAAAGTEGASPDLAPLRPAAPGQTPLRKEVLKSKMGKSEKIALPHGQLVHGIHLYEQPKINRQKSKYNLPLTKITSAKRNENNFWQDSVSSDRIQKQEKKPFKNTENIKNSHLKKSAFLTEVSQKENYAGAKFSDPPSPSVLPKPPSHWMGSTVENSNQNRELMAVHLKTLLKVQT

SEQ ID NO: 26657 - protein, 401 aa, Homo sapiens
RRSKMNAGSDPVVIVSAARTIIGSFNGALAAVPVQDLGSTVIKEVLKRATVAPEDVSEVIFGHVLAAGCGQNPVRQASVGAGIPYSVPAWSCQMICGSGLKAVCLAVQSIGIGDSSIVVAGGMENMSKAPHLAYLRTGVKIGEMPLTDSILCDGLTDAFHNCHMGITAENVAKKWQVSREDQDKVAVLSQNRTENAQKAGHFDKEIVPVLVSTRKGLIEVKTDEFPRHGSNIEAMSKLKPYFLTDGTGTVTPANASGINDGAAAVVLMKKSEADKRGLTPLARIVSWSQVGVEPSIMGIGPIPAIKQAVTKAGWSLEDVDIFEINEAFAAVSAAIVKELGLNPEKVNIEGGAIALGHPLGASGCRILVTLLHTLERMGRSRGVAALCIGGGMGIAMCVQRE

SEQ ID NO: 26658 - protein, 13 aa, Homo sapiens
TARRLHSFPAGES

SEQ ID NO: 26659 - protein, 67 aa, Homo sapiens
TGSDVAKHWMLHFPRITYPLVHLANWLCGLNLFWICKTCFRCLKRLKMSWFLPTVLDTGQGFKLVKS

SEQ ID NO: 26660 - protein, 20 aa, Homo sapiens
MSLMKRDGTTFLRSMMGIFQ

SEQ ID NO: 26661 - protein, 154 aa, Homo sapiens
MEEKLRGVRDSHGRSRLRHQGHGPLQAHLGAESRRGAQGPGRRHRPAGLLLASCRLALQGLASGRGRQAVEPPAPVPLPLPLPLPLPLLLLDVSHRRVCCLPAGLAQQQPENLLQVSQSDQSQFRSCYPGAGWGNAQRSVHILSGSPSSGHTGR

SEQ ID NO: 26662 - protein, 8 aa, Homo sapiens
LEPNLQCL

SEQ ID NO: 26663 - protein, 62 aa, Homo sapiens
KTMKYFSNLLMESFSLEEVLTSDAQIMLKWPKYFITCPYRVLMMETIFLCGAHALDLKSFHC

SEQ ID NO: 26664 - protein, 45 aa, Homo sapiens
LPALFYFSFGRRRHCCTQLVSVPRFYPQVVPAAYGPGRLGYFCSR

SEQ ID NO: 26665 - protein, 58 aa, Homo sapiens
LARAEKKAAGKGDVPTKRPPVLRAGVNTVTTLVENKKAQLVVIAHDVDPIEVRLPVDC

SEQ ID NO: 26666 - protein, 370 aa, Homo sapiens
LRPVPTALSCRPHLQPRTCRLHLQPRALPGSSMADQAPFDTDVNTLTRFVMEEGRKARGTGELTQLLNSLCTAVKAISSAVRKAGIAHLYGIAGSTNVTGDQVKKLDVLSNDLVMNMLKSSFATCVLVSEEDKHAIIVEPEKRGKYVVCFDPLDGSSNIDCLVSVGTIFGIYRKKSTDEPSEKDALQPGRNLVAAGYALYGSATMLVLAMDCGVNCFMLDPAIGEFILVDKDVKIKKKGKIYSLNEGYARDFDPAVTEYIQRKKFPPDNSAPYGARYVGSMVADVHRTLVYGGIFLYPANKKSPNGKLRLLYECNPMAYVMEKAGGMATTGKEAVLDVIPTDIHQRAPVILGSPDDVLEFLKVYEKHSAQ

SEQ ID NO: 26667 - protein, 34 aa, Homo sapiens
VLHPEEPHHRLLLRFTDDTFDPELAATIDNAGIT

SEQ ID NO: 26668 - protein, 59 aa, Homo sapiens
RGQREGSRGFRGQRDGNRRFRGQREGSRGPRGQRSGGGNKSNRSQNKGQKRSFSKAFGQ

SEQ ID NO: 26669 - protein, 288 aa, Homo sapiens
IGRAMWRGLALARAIGCAARGRGQWAVRAADCAQSGRHPGPAVVCGRRLISVLEQIRHFVMMPEINTNHLDKQQVQLLAEMCILIDENDNKIGAETKKNCHLNENIEKGLLHRAFSVFLFNTENKLLLQQRSDAKITFPGCFTNTCCSHPLSNPAELEESDALGVRRAAQRRLKAELGIPLEEVPPEEINYLTRIHYKAQSDGIWGEHEIDYILLVRKNVTLNPDPNEIKSYCYVSKEELKELLKKAASGEIKITPWFKIIAATFLFKWWDNLNHLNQFVDHEKIYRM

SEQ ID NO: 26670 - protein, 378 aa, Homo sapiens
IEIKAVPEGFVIPRGNVLFTVENTDPECYWLTNWIETILVQSWYPITVATNSREQKKILAKYLLETSGNLDGLEYKLHDFGYRGVSSQETAGIGASAHLVNFKGTDTVAGLALNKKYYGTKDPVPGYSVPAAEHSTITAWGKDHEKDAFEHIVTQFSSVPVSVVSNSYDIYNACEKIWGEDLRHLIVSRSTQAPLIIRPDSGNPLDTVLKVLEILGKKFPVTENSKGYKLLPPYLRVIQGDGVDINTLQEIVEGMKQKMWSIENIAFGSGGGLLQKLTRDLLNCSFKCSYVVTNGLGINVFKDPVADPNKRSKKGRLSLHRTPAGNFVTLEEGKGDLEEYGQDLLHTVFKNGKVTKSYSFDEIRKNAQLNIELEAAHH

SEQ ID NO: 26671 - protein, 12 aa, Homo sapiens
VERRFCGLGPNG

SEQ ID NO: 26672 - protein, 15 aa, Homo sapiens
ITFPPPMCFPSFEIF

SEQ ID NO: 26673 - protein, 18 aa, Homo sapiens
LYQSNTILRHLGRTLGES

SEQ ID NO: 26674 - protein, 44 aa, Homo sapiens
LAAPSSPRSSPGSSGGPEVARGGSEASPGARRVAPRSTVTAPCP

SEQ ID NO: 26675 - protein, 17 aa, Homo sapiens
LTRLRCLLLFSELRNAA

SEQ ID NO: 26676 - protein, 210 aa, Homo sapiens
VRERRSCRPGRKMSNVRVSNGSPSLERMDARQAEHPKPSACRNLFGPVDHEELTRDLEKHCRDMEEASQRKWNFDFQNHKPLEGKYEWQEVEKGSLPEFYYRPPRPPKGACKVPAQESQDVSGSRPAAPLIGAPANSEDTHLVDPKTDPSDSQTGLAEQCAGIRKRPATDDSSTQNKRANRTEENVSDGSPNAGSVEQTPKKPGLRRRQT

SEQ ID NO: 26677 - protein, 11 aa, Homo sapiens
LQHCTSSATSS

SEQ ID NO: 26678 - protein, 15 aa, Homo sapiens
MICIRGRILTRSSVP

SEQ ID NO: 26679 - protein, 17 aa, Homo sapiens
MLLLRPTIFKWDILIDE

SEQ ID NO: 26680 - protein, 35 aa, Homo sapiens
KLPTLSSLNNYRAGLGGTDSIFRSLMGCWVDGAGK

SEQ ID NO: 26681 - protein, 99 aa, Homo sapiens
ISVYSEKGESSGKNVTLPAVFKAPIRPDIVNFVHTNLRKNNRQPYAVSELAGHQTSAESWGTGRAVARIPRVRGGGTHRSGQGAFGNVSFVSLPKTGHL

SEQ ID NO: 26682 - protein, 173 aa, Homo sapiens
VNFVHTNLRKNNRQPYAVSELAGHQTSAESWGTGRAVARIPRVRGGGTHRSGQGAFGNMCRGGRMFAPTKTWRRWHRRVNTTQKRYAICSALAASALPALVMSKGHRIEEVPELPLVVEDKVEGYKKTKEAVLLLKKLKAWNDIKKVRSMSTFTVWYSLFTVCHFEFQKIRAV

SEQ ID NO: 26683 - protein, 323 aa, Homo sapiens
VNLPGAAVDLPAVSEKDIQDLKFGVEQDVDMVFASFIRKASDVHEVRKVLGEKGKNIKIISKIENHEGVRRFDEILEASDGIMVARGDLGIEIPAEKVFLAQKMMIGRCNRAGKPVICATQMLESMIKKPRPTRAEGSDVANAVLDGADCIMLSGETAKGDYPLEAVRMQHLIAREAEAAIYHLQLFEELRRLAPITSDPTEATAVGAVEASFKCCSGAIIVLTKSGRSAHQVARYRPRAPIIAVTRNPQTARQAHLYRGIFPVLCKDPVQEAWAEDVDLRVNFAMNVGKARGFFKKGDVVIVLTGWRPGSGFTNTMRVVPVP

SEQ ID NO: 26684 - protein, 431 aa, Homo sapiens
LATQHSPLAPLLQPIWRSGGGGGGGGRRMASELAMSNSDLPTSPLAMEYVNDFDLMKFEVKKEPVETDRIISQCGRLIAGGSLSSTPMSTPCSSVPPSPSFSAPSPGSGSEQKAHLEDYYWMTGYPQQLNPEALGFSPEDAVEALISNSHQLQGGFDGYARGAQQLAAAAGAGAGASLGGSGEEMGPAAAVVSAVIAAAAAQSGAGPHYHHHHHHAAGHHHHPTAGAPGAAGSAAASAGGAGGAGGGGPASAGGGGGGGGGGGGGGAAGAGGALHPHHAAGGLHFDDRFSDEQLVTMSVRELNRQLRGVSKEEVIRLKQKRRTLKNRGYAQSCRFKRVQQRHVLESEKNQLLQQVDHLKQEISRLVRERDAYKEKYEKLVSSGFRENGSSSDNPSSPEFFITEPTRKLEPSVGYATFWKPQHRVLTSVFTK

SEQ ID NO: 26685 - protein, 11 aa, Homo sapiens
KTLLYPQVALL

SEQ ID NO: 26686 - protein, 82 aa, Homo sapiens
TCTHCLFPSRLGTLVSPRVAMDPNCSCAAAGVSCTCASSCKCKECKCTSCKKSCCSCCPVGCAKCAQGCICKGASEKCSCCA

SEQ ID NO: 26687 - protein, 26 aa, Homo sapiens
VSRGSDTARPGHGLVAEGGSGSEAQG

SEQ ID NO: 26688 - protein, 33 aa, Homo sapiens
MTSTKSTKMGFSRIDIGFLPNSLSWHLAKIKII

SEQ ID NO: 26689 - protein, 71 aa, Homo sapiens
TSRLKPCLSSCSFTEDTGRAEGTLDHMVDQVTRSVAFVQKRYPSNKPCVKESGKPHLKSSTMWTTLKLLRI

SEQ ID NO: 26690 - protein, 12 aa, Homo sapiens
TYFSHQPRLECE

SEQ ID NO: 26691 - protein, 69 aa, Homo sapiens
KAGSQWKKRSPRWSLTMAPACAKLVLLGTTLPEPCFLPSSGAPDTRASWWAWARRTPTWATRPRASVAS

SEQ ID NO: 26692 - protein, 34 aa, Homo sapiens
IPFQAQWCPVASRSQTFMWTRKAYRGNGNSPLAH

SEQ ID NO: 26693 - protein, 37 aa, Homo sapiens
KNPPSGFVRASPRTLSTRSTANQSFRKVVKNTSGKTS

SEQ ID NO: 26694 - protein, 9 aa, Homo sapiens
RPVQQLQGG

SEQ ID NO: 26695 - protein, 12 aa, Homo sapiens
ILSGRNICSAVR

SEQ ID NO: 26696 - protein, 188 aa, Homo sapiens
RSKPLPGARGPSWPPSPRVPMEPPNLYPVKLYVYDLSKGLARRLSPIMLGKQLEGIWHTSIVVHKDEFFFGSGGISSCPPGGTLLGPPDSVVDVGSTEVTEEIFLEYLSSLGESLFRGEAYNLFEHNCNTFSNEVAQFLTGRKIPSYITDLPSEVLSTPFGQALRPLLDSIQIQPPGGSSVGRPNGQS

SEQ ID NO: 26697 - protein, 179 aa, Homo sapiens
REEKQKTKMAKFVIRPATAADCSDILRLIKELAKYEYMEEQVILTEKDLLEDGFGEHPFYHCLVAEVPKEHWTPEGHSIVGFAMYYFTYDPWIGKLLYLEDFFVMSDYRGFGIGSEILKNLSQVAMRCRCSSMHFLVAEWNEPSINFYKRRGASDLSSEEGWRLFKIDKEYLLKMATEE

SEQ ID NO: 26698 - protein, 52 aa, Homo sapiens
MVLESTPFTTAWLQKCRKSTGLRKDTALLVLPCTILPMTRGLASYCILRTSS

SEQ ID NO: 26699 - protein, 21 aa, Homo sapiens
MDLTLHNPKIPLWPSTSTRAL

SEQ ID NO: 26700 - protein, 30 aa, Homo sapiens
MKFPVPVSAAVELPWQCDSLIPGKSEEQAT

SEQ ID NO: 26701 - protein, 60 aa, Homo sapiens
MPFRPEGRDRRDGPCGWLLPLHPTLSAPPVAWWRLRTQRDDVGPRHSIYKMAAVGKERRR

SEQ ID NO: 26702 - protein, 33 aa, Homo sapiens
MAKYLAQIIVMGVQVVGRAFARALRQEFAASTP

SEQ ID NO: 26703 - protein, 654 aa, Homo sapiens
MCLITLNNSYRMFESCSGFSGFCASPIEESHGALISSCNSRTMTDGLVTFRDVAIDFSQEEWECLDPAQRDLYVDVMLENYSNLVSLDLESKTYETKKIFSENDIFEINFSQWEMKDKSKTLGLEASIFRNNWKCKSIFEGLKGHQEGYFSQMIISYEKIPSYRKSKSLTPHQRIHNTEKSYVCKECGKACSHGSKLVQHERTHTAEKHFECKECGKNYLSAYQLNVHQRFHTGEKPYECKECGKTFSWGSSLVKHERIHTGEKPYECKECGKAFSRGYHLTQHQKIHTGVKSYKCKECGKAFFWGSSLAKHEIIHTGEKPYKCKECGKAFSRGYQLTQHQKIHTGKKPYECKICGKAFCWGYQLTRHQIFHTGEKPYECKECGKAFNCGSSLIQHERIHTGEKPYECKECGKAFSRGYHLSQHQKIHTGEKPFECKECGKAFSWGSSLVKHERVHTGEKSHECKECGKTFCSGYQLTRHQVFHTGEKPYECKECGKAFNCGSSLVQHERIHTGEKPYECKECGKAFSRGYHLTQHQKIHTGEKPFKCKECGKAFSWGSSLVKHERVHTNEKSYECKDCGKAFGSGYQLSVHQRFHTGEKLYQRKEFGKTFTCGSKLVHERTHSNDKPYKYNECGEAFLWTTYSNEKIDTDETL

SEQ ID NO: 26704 - protein, 34 aa, Homo sapiens
MNGERLHGELLTIQCPSLLWYREDLDRVFMETVK

SEQ ID NO: 26705 - protein, 233 aa, Homo sapiens [sequence omitted]

SEQ ID NO: 26706 - protein, 165 aa, Homo sapiens [sequence omitted]

SEQ ID NO: 26707 - protein, 314 aa, Homo sapiens [sequence omitted]

SEQ ID NO: 26708 - protein, 474 aa, Homo sapiens
VDVQSNNFKEMWPSLLLAIKTANFVAVDTELSGLGDRKSLLNQCIEERYKAVCHAARTRSILSLGLACFKRQPDKGEHSYLAQVFNLTLLCMEEYVIEPKSVQFLIQHGFNFNQQYAQGIPYHKGNDKGDESQSQSVRTLFLELIRARRPLVLHNGLIDLVFLYQNFYAHLPESLGTFTADLCEMFPAGIYDTKYAAEFHARFVASYLEYAFRKCERENGKQRAAGSPHLTLEFCNYPSSMRDHIDYRCCLPPATHRPHPTSICDNFSAYGWCPLGPQCPQSHDIDLIIDTDEAAAEDKRRRRRRREKRKRALLNLPGTQTSGEAKDGPPKKQVCGDSIKPEETEQEVAADETRNLPHSKQGNKNDLEMGIKAARPEIADRATSEVPGSQASPNPVPGDGLHRAGFDAFMTGYVMAYVEVSQGPQPCSSGPWLPECHNKVYLSGKAVPLTVAKSQFSRSSKAHNQKMKLTWGSS

SEQ ID NO: 26709 - protein, 323 aa, Homo sapiens
TEFWLRQRRRRPERAMDALKSAGRALIRSPSLAKQSWGGGGRHRKLPENWTDTRETLLEGMLFSLKYLGMTLVEQPKGEELSAAAIKRIVATAKASGKKLQKVTLKVSPRGIILTDNLTNQLIENVSIYRISYCTADKMHDKVFAYIAQSQHNQSLECHAFLCTKRKMAQAVTLTVAQAFKVAFEFWQVSKEEKEKRDKASQEGGDVLGARQDCTPSLKSLVATGNLLDLEETAKAPLSTVSANTTNMDEVPRPQALSGSSVVWELDDGLDEAFSRLAQSRTNPQVLDTGLTAQDMHYAQCLSPVDWDKPDSSGTEQDDLFSF

SEQ ID NO: 26710 - protein, 24 aa, Homo sapiens
IGYILLKMEKMENLCHLCCVTLWG

SEQ ID NO: 26711 - protein, 31 aa, Homo sapiens
LCLCQGGNGGFLCSTAHWAEDASDWSGYLEE

SEQ ID NO: 26712 - protein, 19 aa, Homo sapiens
KETSSLLWPRTLSSMYGTL

SEQ ID NO: 26713 - protein, 7 aa, Homo sapiens
KPTPLTR

SEQ ID NO: 26714 - protein, 41 aa, Homo sapiens
LDASVTTKGSLSPVTLQPHDLFIAAESSPRRGCCGYRPSTL

SEQ ID NO: 26715 - protein, 56 aa, Homo sapiens
LGRIGREVATRMQSFGMKASFSVAPLHINIPGNILHHGDFGSDFNQMKSPTSFLND

SEQ ID NO: 26716 - protein, 20 aa, Homo sapiens
MFMPKKSRISFSTSPRSLGC

SEQ ID NO: 26717 - protein, 41 aa, Homo sapiens
LFGSQVGLCPGSCWFHVCQDSMSDFLIPQSHRHANVQEVQM

SEQ ID NO: 26718 - protein, 168 aa, Homo sapiens
LQENDQSLLNFSDSDSSEEEEGPFHSLPDVLEEASEEEDGAEEGEDGDRVPRGLKGKKNSVPVTVAMVERWKQAAKQRLTPKLFHEVVQAFRAAVATTRGDQESAEANKFQVTDSAAFNALVTFCIRDLIGCLQKLLFGKVAKDSSSKCGPKETSLRQLVVPGRPQRC

SEQ ID NO: 26719 - protein, 9 aa, Homo sapiens
LPSFLVYPL

SEQ ID NO: 26720 - protein, 28 aa, Homo sapiens
KRPGKLSFLRSTVGIAAAEQGFWKALRT

SEQ ID NO: 26721 - protein, 28 aa, Homo sapiens
ILESIAYLSPQHGGPKAAGKPGVARRAW

SEQ ID NO: 26722 - protein, 1723 aa, Homo sapiens
IEANMSGEVRLRQLEQFILDGPAQTNGQCFSVETLLDILICLYDECNNSPLRREKNILEYLEWAKPFTSKVKQMRLHREDFEILKVIGRGAFGEVAVVKLKNADKVFAMKILNKWEMLKRAETACFREERDVLVNGDNKWITTLHYAFQDDNNLYLVMDYYVGGDLLTLLSKFEDRLPEDMARFYLAEMVIAIDSVHQLHYVHRDIKPDNILMDMNGHIRLADFGSCLKLMEDGTVQSSVAVGTPDYISPEILQAMEDGKGRYGPECDWWSLGVCMYEMLYGETPFYAESLVETYGKIMNHKERFQFPAQVTDVSENAKDLIRRLICSREHRLGQNGIEDFKKHPFFSGIDWDNIRNCEAPYIPEVSSPTDTSNFDVDDDCLKNSETMPPPTHTAFSGHHLPFVGFTYTSSCVLSDRSCLRVTAGPTSLDLDVNVQRTLDNNLATEAYERRIKRLEQEKLELSRKLQESTQTVQALQYSTVDGPLTASKDLEIKNLKEEIEKLRKQVTESSHLEQQLEEANAVRQELDDAFRQIKAYEKQIKTLQQEREDLNKELVQASERLKNQSKELKDAHCQRKLAMQEFMEINERLTELHTQKQKLARHVRDKEEEVDLVMQKVESLRQELRRTERAKKELEVHTEALAAEASKDRKLREQSEHYSKQLENELEGLKQKQISYSPGVCSIEHQQEITKLKTDLEKKSIFYEEELSKREGIHANEIKNLKKELHDSEGQQLALNKEIMILKDKLEKTRRESQSEREEFESEFKQQYEREKVLLTEENKKLTSELDKLTTLYENLSIHNQQLEEEVKDLADKKESVAHWEAQITEIIQWVSDEKDARGYLQALASKMTEELEALRNSSLGTRATDMPWKMRRFAKLDMSARLELQSALDAEIRAKQAIQEELNKVKASNIITECKLKDSEKKNLELLSEIEQLIKDTEELRSEKGIEHQDSQHSFLAFLNTPTDALDQFETVDSTPLSVHTPTLRKKGCPGSTGFPPKRKTHQFFVKSFTTPTKCHQCTSLMVGLIRQGCSCEVCGFSCHITCVNKAPTTCPVPPEQTKGPLGIDPQKGIGTAYEGHVRIPKPAGVKKGWQRALAIVCDFKLFLYDIAEGKASQPSVVISQVIDMRDEEFSVSSVLASDVIHASRKDIPCIFRVTASQLSASNNKCSILMLADTENEKNKWVGVLSELHKILKKNKFRDRSVYVPKEAYDSTLPLIKTTQAAAIIDHERIALGNEEGLFVVHVTKDEIIRVGDNKKIHQIELIPNDQLVAVISGRNRHVRLFPMSALDGRETDFYKLSETKGCQTVTSGKVRHGALTCLCVAMKRQVLCYELFQSKTRHRKFKEIQVPYNVQWMAIFSEQLCVGFQSGFLRYPLNGEGNPYSMLHSNDHTLSFIAHQPMDAICAVEISSKEYLLCFNSIGIYTDCQGRRSRQQELMWPANPSSCCYNAPYLSVYSENAVDIFDVNSMEWIQTLPLKKVRPLNNEGSLNLLGLETIRLIYFKNKMAEGDELVVPETSDNSRKQMVRNINNKRRYSFRVPEEERMQQRREMLRDPEMRNKLISNPTNFNHIAHMGPGDGIQILKDLPMNPRPQESRTVFSGSVSIPSITKSRPEPGRSMSASSGLSARSSAQNGSALKREFSGGSYSAKRQPMPSPSEGSLSSGGMDQGSDAPARDFDGEDSDSPRHSTASNSSNLSSPPSPASPRKTKSLSLESTDRGSWDP

SEQ ID NO: 26723 - protein, 41 aa, Homo sapiens
LASTLGMPLTPTVQGFQWILRGPDVETSPLGAPRAASHGVG

SEQ ID NO: 26724 - protein, 44 aa, Homo sapiens
LDQRETRKAGVTLPKAEAEQQSSGVSCLGSACSAAVDDLSLLHI

SEQ ID NO: 26725 - protein, 15 aa, Homo sapiens
MLSLMPTFSRILMPK

SEQ ID NO: 26726 - protein, 77 aa, Homo sapiens
VIFSRVARAGLRVSLRRYTRAEYESEAEGVMGGEIQPVSVKVGDKVLLPEYGGTKVVLDDKDYFLFRDGDILGKYVD

SEQ ID NO: 26727 - protein, 33 aa, Homo sapiens
LPFVPPEEEFIMGVSKYGIKVSTSDQYVSNIIY

SEQ ID NO: 26728 - protein, 100 aa, Homo sapiens
TRGPSRVRRRRGAPGRPGQLMVVAETSQGSWSAPTSPSTSCPPPNTTTTLAPLPHDRLDPPACQPVSVLHHWHMDCVCHGCDEPPCMPCGELVLQRVLPS

SEQ ID NO: 26729 - protein, 10 aa, Homo sapiens
LYAILESCLG

SEQ ID NO: 26730 - protein, 42 aa, Homo sapiens
VGGSLCRMTIRGPAPAPPHLRLPTSKPRKKQTPPRRRRVKSA

SEQ ID NO: 26731 - protein, 19 aa, Homo sapiens
KRKTKRRILIRFNFLGPMA

SEQ ID NO: 26732 - protein, 23 aa, Homo sapiens
MERNIFLNMQRKFLVNPHRSFLK

SEQ ID NO: 26733 - protein, 36 aa, Homo sapiens
VKQQRSRGALCPRQLHPADPAWAVLRGGGGSPRSTQ

SEQ ID NO: 26734 - protein, 21 aa, Homo sapiens
RGPRTPGLFSERWAAETDLPP

SEQ ID NO: 26735 - protein, 50 aa, Homo sapiens
IHMSLVRLDLKKMKILRCMLKINFVNLNSAKSGVINILLRFRSKTALKTR

SEQ ID NO: 26736 - protein, 13 aa, Homo sapiens
LICEPILLQLVSS

SEQ ID NO: 26737 - protein, 1183 aa, Homo sapiens
LPLPRGWEEARDYDGKVFYIDHNTRRTSWIDPRDRLTKPLSFADCVGDELPWGWEAGFDPQIGVYYIDHINKTTQIEDPRKQWRGEQEKMLKDYLSVAQDALRTQKELYHVKEQRLALALDEYVRLNDAYKEKSSSHTSLFSGSSSSTKYDPDILKAEISTTRLRVKKLKRELSQMKQELLYKEQGFETLQQIDKKMSGGQSGYELSEAKAILTELKSIRKAISSGEKEKQDLMQSLAKLQERFHLDQNIGRSEPDLRCSPVNSHLCLSRQTLDAGSQTSISGDIGVRSRSNLAEKVRLSLQYEEAKRSMANLKIELSKLDSEAWPGALDIEKEKLMLINEKEELLKELQFVTPQKRTQDELERLEAERQRLEEELLSVRGTPSRALAERLRLEERRKELLQKLEETTKLTTYLHSQLKSLSASTLSMSSGSSLGSLASSRGSLNTSSRGSLNSLSSTELYYSSQSDQIDVDYQYKLDFLLQEKSGYIPSGPITTIHENEVVKSPSQPGQSGLCGVAAAATGHTPPLAEAPKSVASLSSRSSLSSLSPPGSPLVLEGTFPMSSSHDASLHQFTADFEDCELSSHFADISLIENQILLDSDSGGASQSLSEDKDLNECAREPLYEGTADVEKSLPKRRVIHLLGEKTTCVSAAVSDESVAGDSGVYEAFVKQPSEMEDVTYSEEDVAIVETAQVQIGLRYNAKSSSFMVIIAQLRNLHAFLIPHTSKVYFRVAVLPSSTDVSCLFRTKVHPPTESILFNDVFRVAISQTALQQKTLRVDLCSVSKHRREECLAGTQISLADLPFSSEVFTLWYNLLPSKQMPCKKNEENEDSVFQPNQPLVDSIDLDAVSALLARTSAELLAVEQELAQEEEEESGQEEPRGPDGDWLTMLREASDEIVAEKEAEVKLPEDSSCTEDLSSCTSVPEMNEDGNRKESNCAKDLRSQPPTRIPTLVDKETNTDEAANDNMAVRPKERSSLSSRQHPFVRSSVIVRSQTFSPGERNQYICRLNRSDSDSSTLAKKSLFVRNSTERRSLRVKRTVCQSVLRRTTQECPVRTSLDLELDLQASLTRQSRLNDELQALRDLRQKLEELKAQGETDLPPGVLEDERFQRLLKQAEKQAEQSKEEQKQGLNAEKLMRQVSKDVCRLREQSQKVPRQVQSFREKIAYFTRAKISIPSLPADDV

SEQ ID NO: 26738 - protein, 59 aa, Homo sapiens
VERPVEKKEARPAGGGGSADCGEETPRHPFWSSPLPPRPCAHSLAGELLSDQESKSGPG

SEQ ID NO: 26739 - protein, 12 aa, Homo sapiens
LRNCIGSVKKAH

SEQ ID NO: 26740 - protein, 27 aa, Homo sapiens
RPEPLAEWTPSRPQVARSGLSGSRKLQ

SEQ ID NO: 26741 - protein, 37 aa, Homo sapiens
MRRTNVLCASPNNFLNDSYSLKKEQNFSRCLFTDTWK

SEQ ID NO: 26742 - protein, 16 aa, Homo sapiens
LWCRASSSPAQPRRLN

SEQ ID NO: 26743 - protein, 33 aa, Homo sapiens
KKNTSPLTLGGCIQLCLLRKQQMERNPTGQSLK

SEQ ID NO: 26744 - protein, 28 aa, Homo sapiens
LQRLQAQRPQAAWAERRFQALARSLNCR

SEQ ID NO: 26745 - protein, 471 aa, Homo sapiens
MEISIKVMVQDMLTGIEKLVSVAFSTFVAKPVGKEKIHLKPVTLLTEQDHVEHNLAAERRKVRLQHEDTFNNLMKESSKFDDLIFDEEEGAVSTRGTSVQSIELVLPPHANHHGNTFGGQIMAWMETVATISASRLCWAHPFLKSVDMFKFRGPSTVGDRLVFTAIVNNTFQTCVEVGVRVEAFDCQEWAEGRGRHINSAFLIYNAADDKENLITFPRIQPISKDDFRRYRGAIARKRIRLGRKYVISHKEEVPLCIHWDISKQASLSDSNVEALKKLAAKRGWEVTSTVEKIKIYTLEEHDVLSVWVEKHVGSPAHLAYRLLSDFTKRPLWDPHFVSCEVIDWVSEDDQLYHITCPILNDDKPKDLVVLVSRRKPLKDGNTYTVAVKSVILPSVPPSPQYIRSEIICAGFLIHAIDSNSCIVSYFNHMSASILPYFAGNLGGWSKSIEETAASCIQFLENPPDDGFVSTF

SEQ ID NO: 26746 - protein, 35 aa, Homo sapiens
ISHSSPMIMEEVEDPIANSMLAMTIRSKADLSLQT

SEQ ID NO: 26747 - protein, 24 aa, Homo sapiens
LDAASGALCPQAPRPRPGGHHGRG

SEQ ID NO: 26748 - protein, 258 aa, Homo sapiens
LDSLKRDYAGKPQPPIKSERRNPPSYAMAGKKVLIVYAHQEPKSFNGSLKNVAVDELSRQGCTVTVSDLYAMNLEPRATDKDITGTLSNPEVFNYGVETHEAYKQRSLASDITDEQKKVREADLVIFQFPLYWFSVPAILKGWMDRVLCQGFAFDIPGFYDSGLLQGKLALLSVTTGGTAEMYTKTGVNGDSRYFLWPLQHGTLHFCGFKVLAPQISFAPEIASEEERKGMVAAWSQRLQTIWKEEPIPCTAHWHFGQ

SEQ ID NO: 26749 - protein, 6 aa, Homo sapiens
KIQLHP

SEQ ID NO: 26750 - protein, 22 aa, Homo sapiens
LPPAPFPSTTARRLHSFPAGES

SEQ ID NO: 26751 - protein, 94 aa, Homo sapiens
ISRGWVSPHHSFGGSRDPGNIVFCSVSGDHLPRLGLLGQARTHGPWKSWSRGLNSRHLYRAEHDHIPAAAAGAQPGLHRSRWLRGPCGKHLSVG

SEQ ID NO: 26752 - protein, 508 aa, Homo sapiens
LSSQFAELLSQSARIVSCLGSFVETPKCQHRWRDTWRPVSGTFATSIKDFRSAKMLKQILSEMYIDPDLLAELSEEQKQILFFKMREEQIRRWKEREAAMERKESLPVKPRPKKENGKSVHWKLGADKEVWVWVMGEHHLDKPYDVLCNEIIAERARLKAEQEAEEPRKTHSEEFTNSLKTKSQYHDLQAPDNQQTKDIWKKVAEKEELEQGSRPAPTLEEEKIRSLSSSSRNIQQMLADSINRMKAYAFHQKKESMKKKQDEEINQIEEERTKQICKSWKEDSEWQASLRKSKAADEKRRSLAKQAREDYKRLSLGAQKGRGGERLQSPLRVPQKPERPPLPPKPQFLNSGAYPQKPLRNQGVVRTLSSSAQEDIIRWFKEEQLPLRAGYQKTSDTIAPWFHGILTLKKANELLLSTGMPGSFLIRVSERIKGYALSYLSEDGCKHFLIDASADAYSFLGVDQLQHATLADLVEYHKEEPITSLGKELLLYPCGQQDQLPDYLELFE

SEQ ID NO: 26753 - protein, 64 aa, Homo sapiens
LELTTPEQGRDSPDAGRLFCPFGDTSPPLPGPASLKGSPCSCLDAGFFSGSGKPAASRDDAPQR

SEQ ID NO: 26754 - protein, 96 aa, Homo sapiens
LRPLFALSFHFLQRASRMAHKQIYYSDKYFDEHYEYRHVMLPRELSKQVPKTHLMSEEEWRRLGVQQSLGWVHYMIHEPEPHILLFRRPLPKDQQK

SEQ ID NO: 26755 - protein, 344 aa, Homo sapiens
TPAVHAFGPPWLTHRPGRRTMDAPRQVVNFGPGPAKLPHSVLLEIQKELLDYKGVGISVLEMSHRSSDFAKIINNTENLVRELLAVPDNYKVIFLQGGGCGQFSAVPLNLIGLKAGRCADYVVTGAWSAKAAEEAKKFGTINIVHPKLGSYTKIPDPSTWNLNPDASYVYYCANETVHGVEFDFIPDVKGAVLVCDMSSNFLSKPVDVSKFGVIFAGAQKNVGSAGVTVVIVRDDLLGFALRECPSVLEYKVQAGNSSLYNTPPCFSIYVMGLVLEWIKNNGGAAAMEKLSSIKSQTIYEIIDNSQGFYVSVGGIRASLYNAVTIEDVQKLAAFMKKFLEMHQL

SEQ ID NO: 26756 - protein, 754 aa, Homo sapiens
IGPRHLLAMGDVLSTHLDDARRQHIAEKTGKILTEFLQFYEDQYGVALFNSMRHEIEGTGLPQAQLLWRKVPLDERIVFSGNLFQHQEDSKKWRNRFSLVPHNYGLVLYENKAAYERQVPPRAVINSAGYKILTSVDQYLELIGNSLPGTTAKSGSAPILKCPTQFPLILWHPYARHYYFCMMTEAEQDKWQAVLQDCIRHCNNGIPEDSKVEGPAFTDAIRMYRQSKELYGTWEMLCGNEVQILSNLVMEELGPELKAELGPRLKGKPQERQRQWIQISDAVYHMVYEQAKARFEEVLSKVQQVQPAMQAVIRTDMDQIITSKEHLASKIRAFILPKAEVCVRNHVQPYIPSILEALMVPTSQGFTEVRDVFFKEVTDMNLNVINEGGIDKLGEYMEKLSRLAYHPLKMQSCYEKMESLRLDGLQQRFDVSSTSVFKQRAQIHMREQMDNAVYTFETLLHQELGKGPTKEELCKSIQRVLERVLKKYDYDSSSVRKRFFREALLQISIPFLLKKLAPTCKSELPRFQELIFEDFARFILVENTYEEVVLQTVMKDILQAVKEAAVQRKHNLYRDSMVMHNSDPNLHLLAEGAPIDWGEEYSNSGGGGSPSPSTPESATLSEKRRRAKQVVSVVQDEEVGLPFEASPESPPPASPDGVTEIRGLLAQGLRPESPPPAGPLLNGAPAGESPQPKAAPEASSPPASPLQHLLPGKAVDLGPPKPSDQETGEQVSSPSSHPALHTTTEDSAGVQTEF

SEQ ID NO: 26757 - protein, 54 aa, Homo sapiens
KELRHPNIVSLQDVLMQDSRLYLIFEFLSMDLKKYLDSIPPGQYMDSSLVKVKA

SEQ ID NO: 26758 - protein, 308 aa, Homo sapiens
LRGLPPRPGLGAAVAAAGDRKGRRKGGGRSRHAEEQPTMPRDNMASLIQRIARQACLTFRGSGGGRGASDRDAASGPEAPMQPGFPENLSKLKSLLTQLRAEDLNIAPRKATLQPLPPNLPPVTYMHIYETDGFSLGVFLLKSGTSIPLHDHPGMHGMLKVLYGTVRISCMDKLDAGGGQRPRALPPEQQFEPPLQPREREAVRPGVLRSRAEYTEASGPCILTPHRDNLHQIDAVEGPAAFLDILAPPYDPDDGRDCHYYRVLEPVRPKEASSSACDLPREVWLLETPQADDFWCEGEPYPGPKVFP

SEQ ID NO: 26759 - protein, 428 aa, Homo sapiens
VPVVQHPHHVHPLTPLITYSNEHFTPGNPPPHLPADVDPKTGIPRPPHPPDISPYYPLSPGTVGQIPHPLGWQGQPVYPITTGGFRHPYPTALTVNASMSRFPPHMVPPHHTLHTTGIPHPAIVTPTVKQESSQSDVGSLHSSKHQDSKKEEEKKKPHIKKPLNAFMLYMKEMRAKVVAECTLKESAAINQILGRRWHALSREEQAKYYELARKERQLHMQLYPGWSARDNYGKKKKRKRDKQPGETNEHSECFLNPCLSLPPITDANTPKKCRALFGLDRQTLWCKPCRRKKKCVRYIQGEGSCLSPPSSDGSLLDSPPPSPNLLGSPPRDAKSQTEQTQPLSLSLKPDPLAHLSMMPPPPALLLAEATHKASALCPNGALDLPPAALQPAAPSSSIAQPSTSSLHSHSSLAGTQPQPLSLVTKSLE

SEQ ID NO: 26760 - protein, 63 aa, Homo sapiens
KRVRAPIGRAMWRGLALARAIGCAARGRGQWAVRAADCAQSGRHPGPAVVCGRRLIRIIASSF

SEQ ID NO: 26761 - protein, 664 aa, Homo sapiens
LDPAGLRSPVLGPVPRAAMSFLSRQQPPPPRRAGAACTLRQKLIFSPCSDCEEEEEEEEEEGSGHSTGEDSAFQEPDSPLPPARSPTEPGPERRRSPGPAPGSPGELEEDLLLPGACPGADEAGGGAEGDSWEEEGFGSSSPVKSPAAPYFLGSSFSPVRCGGPGDASPRGCGARRAGEGRRSPRPDHPGTPPHKTFRKLRLFDTPHTPKSLLSKARGIDSSSVKLRGSSLFMDTEKSGKREFDVRQTPQVNINPFTPDSLLLHSSGQCRRRKRTYWNDSCGEDMEASDYELEDETRPAKRITITESNMKSRYTTEFHELEKIGSGEFGSVFKCVKRLDGCIYAIKRSKKPLAGSVDEQNALREVYAHAVLGQHSHVVRYFSAWAEDDHMLIQNEYCNGGSLADAISENYRIMSYFKEAELKDLLLQVGRGLRYIHSMSLVHMDIKPSNIFISRTSIPNAASEEGDEDDWASNKVMFKIGDLGHVTRISSPQVEEGDSRFLANEVLQENYTHLPKADIFALALTVVCAAGAEPLPRNGDQWHEIRQGRLPRIPQVLSQEFTELLKVMIHPDPERRPSAMALVKHSVLLSASRKSAEQLRIELNAEKFKNSLLQKELKKAQMAKAAAEERALFTDRMATRSTTQSNRTSRLIGKKMNRSVSLTIY

SEQ ID NO: 26762 - protein, 348 aa, Homo sapiens
IDASMSIYQFLIAVRQGGDVLQNEEGETTSHLMGMFYRTIRMMENGIKPVYVFDGKPPQLKSGELAKRSERRAEAEKQLQQAQAAGAEQEVEKFTKRLVKVTKQHNDECKHLLSLMGIPYLDAPSEAEASCAALVKAGKVYAAATEDMDCLTFGSPVLMRHLTASEAKKLPIQEFHLSRILQELGLNQEQFVDLCILLGSDYCESIRGIGPKRAVDLIQKHKSIEEIVRRLDPNKYPVPENWLHKEAHQLFLEPEVLDPESVELKWSEPNEEELIKFMCGEKQFSEERIRSGVKRLSKSRQGSTQGRLDDFFKVTGSLSSAKRKEPEPKGSTKKKAKTGAAGKFKRGK

SEQ ID NO: 26763 - protein, 362 aa, Homo sapiens
VAGLAQGIRGPLRAQDLGPQPLELKEAFKLFQIQFNRSYLSPEEHAHRLDIFAHNLAQAQRLQEEDLGTAEFGVTPFSDLTEEEFGQLYGYRRAAGGVPSMGREIRSEEPEESVPFSCDWRKVASAISPIKDQKNCNCCWAMAAAGNIETLWRISFWDFVDVSVQELLDCGRCGDGCHGGFVWDAFITVLNNSGLASEKDYPFQGKVRAHRCHPKKYQKVAWIQDFIMLQNNEHRIAQYLATYGPITVTINMKPLQLYRKGVIKATPTTCDPQLVDHSVLLVGFGSVKSEEGIWAETVSSQSQPQPPHPTPYWILKNSWGAQWGEKGYFRLHRGSNTCGITKFPLTARVQKPDMKPRVSCPP

SEQ ID NO: 26764 - protein, 41 aa, Homo sapiens
IIVPQFPPRQMGLQRLATHIDGAYVQAPVHRKEQNRHSSWS

SEQ ID NO: 26765 - protein, 41 aa, Homo sapiens
MWGLGTTSSFRWYSSDYRRSFQLNSPVDKMRKTGNSLQLVF

SEQ ID NO: 26766 - protein, 48 aa, Homo sapiens
REQKKPNSADLGTVRAASRNCGQRLCVLAGRACSFLPWQPRAMAIIAL

SEQ ID NO: 26767 - protein, 13 aa, Homo sapiens
LPLSSEFAELWGT

SEQ ID NO: 26768 - protein, 191 aa, Homo sapiens
KGVSLLLSVLRDPALQKSSKAWYLLRVQVLQLVAAYLSLPSNNLSHSLWEQLCAQGWQTPEIALIDSHKLLRSIILLLMGSDILSTQKAAVETSFLDYGENLVQKWQVLSEVLSCSEKLVCHLGRLGSVSEAKAFCLEALKLTTKLQIPRQCALFLVLKGELELARNDIDLCQSDLQQVLFLLESCTGELQ

SEQ ID NO: 26769 - protein, 67 aa, Homo sapiens
LKSARFAKLWAEHSGNHTLRNCGGSGLQPPKAPCQTKHACHTCYNSLDGFFCLQLFTHSKYFARYRK

SEQ ID NO: 26770 - protein, 444 aa, Homo sapiens
LSSARPGGLGSSSLYGLGASRPRVAVRSAYGGPVGAGIREVTINQSLLAPLRLDADPSLQRVRQEESEQIKTLNNKFASFIDKVRFLEQQNKLLETKWTLLQEQKSAKSSRLPDIFEAQIAGLRGQLEALQVDGGRLEAELRSMQDVVEDFKNKYEDEINHRTAAENEFVVLKKDVDAAYMSKVELEAKVDALNDEINFLRTLNETELTELQSQISDTSVVLSMDNSRSLDLDGIIAEVKAQYEEMAKCSRAEAEAWYQTKFETLQAQAGKHGDDLRNTRNEISEMNRAIQRLQAEIDNIKNQRAKLEAAIAEAEERGELALKDARAKQEELEAALQRGKQDMARQLREYQELMSVKLALDIEIATYRKLLEGEESRLAGDGVGAVNISVMNSTGGSSSGGGIGLTLGGTMGSNALSFSSSAGPGLLKAYSIRTASASRRSARD

SEQ ID NO: 26771 - protein, 27 aa, Homo sapiens
LCRSLSVWQQCGRGPSLCSLVSSVTRP

SEQ ID NO: 26772 - protein, 34 aa, Homo sapiens
IRKMTYFTSWILDSDSTHYIPSCNRKSCYKRMWS

SEQ ID NO: 26773 - protein, 23 aa, Homo sapiens
LDSDSTHYIPSCNRKSCYKRMWS

SEQ ID NO: 26774 - protein, 17 aa, Homo sapiens
LRLQFWPLGFKITGTRP

SEQ ID NO: 26775 - protein, 822 aa, Homo sapiens
VAALTWSGTWGEGTMGRKLDPTKEKRGPGRKARKQKGAETELVRFLPAVSDENSKRLSSRARKRAAKRRLGSVEAPKTNKSPEAKPLPGKLPKGAVQTAGKKGPQSLFNAPRGKKRPAPGSDEEEEEEDSEEDGMVNHGDLWGSEDDADTVDDYGADSNSEDEEEGEALLPIERAARKQKAREAAAGIQWSEEETEDEEEEKEVTPESGPPKVEEADGGLQINVDEEPFVLPPAGEMEQDAQAPDLQRVHKRIQDIVGILRDFGAQREEGRSRSEYLNRLKKDLAIYYSYGDFLLGKLMDLFPLSELVEFLEANEVPRPVTLRTNTLKTRRRDLAQALINRGVNLDPLGKWSKTGLVVYDSSVPIGATPEYLAGHYMLQGASSMLPVMALAPQEHERILDMCCAPGGKTSYMAQLMKNTGVILANDANAERLKSVVGNLHRLGVTNTIISHYDGRQFPKVVGGFDRVLLDAPCSGTGVISKDPAVKTNKDEKDILRCAHLQKELLLSAIDSVNATSKTGGYLVYCTCSITVEENEWVVDYALKKRNVRLVPTGLDFGQEGFTRFRERRFHPSLRSTRRFYPHTHNMDGFFIAKFKKFSNSIPQSQTGNSETATPTNVDLPQVIPKSENSSQPAKKAKGAAKTKQQLQKQQHPKKASFQKLNGISKGADSELSTVPSVTKTQASSSFQDSSQPAGKAEGIREPKVTGKLKQRSPKLQSSKKVAFLRQNAPPKGTDTQTPAVLSPSKTQATLKPKDHHQPLGRAKGVEKQQLPEQPFEKAAFQKQNDTPKGPQPPTVSPIRSSRPPPAKRKKSQSRGNSQLLLS

SEQ ID NO: 26776 - protein, 6 aa, Homo sapiens
VTNLSF

SEQ ID NO: 26777 - protein, 15 aa, Homo sapiens
LYANDDKLVRMSRAA

SEQ ID NO: 26778 - protein, 19 aa, Homo sapiens
IVMLIFTESKRKLEMIGSL

SEQ ID NO: 26779 - protein, 20 aa, Homo sapiens
LCSRMWGMAYSPSLDIFEIS

SEQ ID NO: 26780 - protein, 69 aa, Homo sapiens
IKQRVIPLGLTQLGSEKQRPEGSSEPGSLLCRETQGLGRRMESEMLKVYVSFAPSASEPLPLGSTEHRD

SEQ ID NO: 26781 - protein, 76 aa, Homo sapiens
RTFLSPSTATLMNGRYGRAALTQFCTLTCGGGQTSCWWLLLMPTLWGRWPVASVTTCLPASCGPGTAASPCSSARP

SEQ ID NO: 26782 - protein, 35 aa, Homo sapiens
IIPLRAMDSRTSTTAAVVVEVEVEVEVTMAKINPP

SEQ ID NO: 26783 - protein, 28 aa, Homo sapiens
LVDLLWWSWMRPHERGAPGGLQQQRLRG

SEQ ID NO: 26784 - protein, 18 aa, Homo sapiens
LKHRNLLLPAPCPTNIQH

SEQ ID NO: 26785 - protein, 162 aa, Homo sapiens
KALSAAVADSLTNSPRDSPAVSLSEPATQQASLDVEKPVGVAASLSDIPKAAEPGKLEQVRPQELSRVQELAPASGEKARLSEAPGGKKSLSMLHYIRGAAPKDIPVPLSHSTNGKSKPWEPFVAEEFAHQFHESVLQSTQKALQKHKGNEAASPCSALGCG

SEQ ID NO: 26786 - protein, 15 aa, Homo sapiens
VLGSMARLWSMIYRR

SEQ ID NO: 26787 - protein, 33 aa, Homo sapiens
LPPTTPLIMVWVLRKRAWTQINTTKSAVKQFIS

SEQ ID NO: 26788 - protein, 41 aa, Homo sapiens
ITMRPAASAPSQLWYSKPKEASKSVLIPVNPGSRSTCMTWN

SEQ ID NO: 26789 - protein, 68 aa, Homo sapiens
KSKPRRRREKSRRTVSSGCARRNKLIMRSMPTNTGMTSTKSTKMGFSRIDIGFLPNSLSWHLAKIKII

SEQ ID NO: 26790 - protein, 69 aa, Homo sapiens
RPWLCVPLRVGAGLGPNSTAAGFSLISEPRRWQSGRPGQVNPRAAGAQAPTPAQRGRKGPPPAQRAQRP

SEQ ID NO: 26791 - protein, 47 aa, Homo sapiens
LRESETLSASIRRADPAGAAAAMDDREDLVYQAKLAEQAERYDVLWN

SEQ ID NO: 26792 - protein, 178 aa, Homo sapiens
RPPCPVWASRLQEHSPEPRRARAPPTRRAQAALYAPALRLRDHLDRFSILMTSCTSWLQAPQAPGLCRDEQSSRISVPQLSGAPILLPDLEGTKLSNFQESSPLPHKHERKDKRSTPEEEGRSAPEKIIQSLKLCPGGHRPASLSSGCPAGCRLSFNLPPSMLLSVQKCCMPSSLKTC

SEQ ID NO: 26793 - protein, 2012 aa, Homo sapiens
IVPFTMAQRTGLEDPERYLFVDRAVIYNPATQADWTAKKLVWIPSERHGFEAASIKEERGDEVMVELAENGKKAMVNKDDIQKMNPPKFSKVEDMAELTCLNEASVLHNLKDRYYSGLIYTYSGLFCVVINPYKNLPIYSENIIEMYRGKKRHEMPPHIYAISESAYRCMLQDREDQSILCTGESGAGKTENTKKVIQYLAHVASSHKGRKDHNIPQESPKPVKHQGELERQLLQANPILESFGNAKTVKNDNSSRFGKFIRINFDVTGYIVGANIETYLLEKSRAVRQAKDERTFHIFYQLLSGAGEHLKSDLLLEGFNNYRFLSNGYIPIPGQQDKDNFQETMEAMHIMGFSHEEILSMLKVVSSVLQFGNISFKKERNTDQASMPENTVAQKLCHLLGMNVMEFTRAILTPRIKVGRDYVQKAQTKEQADFAVEALAKATYERLFRWLVHRINKALDRTKRQGASFIGILDIAGFEIFELNSFEQLCINYTNEKLQQLFNHTMFILEQEEYQREGIEWNFIDFGLDLQPCIDLIERPANPPGVLALLDEECWFPKATDKTFVEKLVQEQGSHSKFQKPRQLKDKADFCIIHYAGKVDYKADEWLMKNMDPLNDNVATLLHQSSDRFVAELWKDEIQNIQRASFYDSVSGLHEPPVDRIVGLDQVTGMTETAFGSAYKTKKGMFRTVGQLYKESLTKLMATLRNTNPNFVRCIIPNHEKRAGKLDPHLVLDQLRCNGVLEGIRICRQGFPNRIVFQEFRQRYEILTPNAIPKGFMDGKQACERMIRALELDPNLYRIGQSKIFFRAGVLAHLEEERDLKITDIIIFFQAVCRGYLARKAFAKKQQQLSALKVLQRNCAAYLKLRHWQWWRVFTKVKPLLQVTRQEEELQAKDEELLKVKEKQTKVEGELEEMERKHQQLLEEKNILAEQLQAETELFAEAEEMRARLAAKKQELEEILHDLESRVEEEEERNQILQNEKKKMQAHIQDLEEQLDEEEGARQKLQLEKVTAEAKIKKMEEEILLLEDQNSKFIKEKKLMEDRIAECSSQLAEEEEKAKNLAKIRNKQEVMISDLEERLKKEEKTRQELEKAKRKLDGETTDLQDQIAELQAQIDELKLQLAKKEEELQGALARGDDETLHKNNALKVVRELQAQIAELQEDFESEKASRNKAEKQKRDLSEELEALKTELEDTLDTTAAQQELRTKREQEVAELKKALEEETKNHEAQIQDMRQRHATALEELSEQLEQAKRFKANLEKNKQGLETDNKELACEVKVLQQVKAESEHKRKKLDAQVQELHAKVSEGDRLRVELAEKASKLQNELDNVSTLLEEAEKKGIKFAKDAASLESQLQDTQELLQEETRQKLNLSSRIRQLEEEKNSLQEQQEEEEEARKNLEKQVLALQSQLADTKKKVDDDLGTIESLEEAKKKLLKDAEALSQRLEEKALAYDKLEKTKNRLQQELDDLTVDLDHQRQVASNLEKKQKKFDQLLAEEKSISARYAEERDRAEAEAREKETKALSLARALEEALEAKEEFERQNKQLRADMEDLMSSKDDVGKNVHELEKSKRALEQQVEEMRTQLEELEDELQATEDAKLRLEVNMQAMKAQFERDLQTRDEQNEEKKRLLIKQVRELEAELEDERKQRALAVASKKKMEIDLKDLEAQIEAANKARDEVIKQLRKLQAQMKDYQRELEEARASRDEIFAQSKESEKKLKSLEAEILQLQEELASSERARRHAEQERDELADEITNSASGKSALLDEKRRLEARIAQLEEELEEEQSNMELLNDRFRKTTLQVDTLNAELAAERSAAQKSDNARQQLERQNKELKAKLQELEGAVKSKFKATISALEAKIGQLEEQLEQEAKERAAANKLVRRTEKKLKEIFMQVEDERRHADQYKEQMEKANARMKQLKRQLEEAEEEATRANASRRKLQRELDDATEANEGLSREVSTLKNRLRRGGPISFSSSRSGRRQLHLEGASLELSDDDTESKTSDVNETQPPQSE

SEQ ID NO: 26794 - protein, 11 aa, Homo sapiens
KVKDNLLIPAL

SEQ ID NO: 26795 - protein, 183 aa, Homo sapiens
TVHIFKLEQVTNSRPEEPSTWSGYMGKMFMAATNYLPTQVSDMMHQDRAFATARLNFSGQRNICTLSTIQKLPRLLVASSSGHLYMYNLDPQDGGECVLIKTHSLLGSGTTEENKENDLRPSLPQSYAATVARPSASSASTVPGYSEDGGALRGEVIPEHEFATGPVCLDDENEFPPVSIRNP

SEQ ID NO: 26796 - protein, 33 aa, Homo sapiens
ILKPWKELSPCLTRTQPFLLSRRRSCLTLPCGL

SEQ ID NO: 26797 - protein, 8 aa, Homo sapiens
KSRIFLVV

SEQ ID NO: 26798 - protein, 31 aa, Homo sapiens
TSAAPPLKSQSIQDGKPRRQTRIKCREGQYE

SEQ ID NO: 26799 - protein, 482 aa, Homo sapiens
RRPRGGHSSMGQSGRSRHQKRARAQAQLRNLEAYAANPHSFVFTRGCTGRNIRQLSLDVRRVMEPLTASRLQVRKKNSLKDCVAVAGPLGVTHFLILSKTETNVYFKLMRLPGGPTLTFQVKKYSLVRDVVSSLRRHRMHEQQFAHPPLLVLNSFGPHGMHVKLMATMFQNLFPSINVHKVNLNTIKRCLLIDYNPDSQELDFRHYSIKVVPVGASRGMKKLLQEKFPNMSRLQDISELLATGAGLSESEAEPDGDHNITELPQAVAGRGNMRAQQSAVRLTEIGPRMTLQLIKVQEGVGEGKVMFHSFVSKTEEELQAILEAKEKKLRLKAQRQAQQAQNVQRKQEQREAHRKKSLEGMKKARVGGSDEEASGIPSRTASLELGEDDDEQEDDDIEYFCQAVGEAPSEDLFPEAKQKRLAKSPGRKRKRWEMDRGRGRLCDQKFPKTKDKSQGAQARRGPRGASRDGGRGRGRGRPGKRVA

SEQ ID NO: 26800 - protein, 23 aa, Homo sapiens
TTHTQLRDTAGPLVASLYTTTNS

SEQ ID NO: 26801 - protein, 23 aa, Homo sapiens
LVVAAEAAWISASWRETIQAAVA

SEQ ID NO: 26802 - protein, 104 aa, Homo sapiens
IFLHFLLEDRLTFFGLLYYSPPPVGPAGRVEETVAEADSVQRDSAFCPWGSNPSLAPGSYGACTFKRYSGILWGPGHRRKTAQKLCHCWNGTLLLPRASPDSVL

SEQ ID NO: 26803 - protein, 67 aa, Homo sapiens
LHFQEVQRHPVGAWAPQEDCTETLPLLERDVAPSPSFPGQRTLRTRSAHRGLPRLTPDLHLTSPTRP

SEQ ID NO: 26804 - protein, 36 aa, Homo sapiens
VTETLRLCSQDDRVGDSSTSGGRDPRHQALWEVEHR

SEQ ID NO: 26805 - protein, 21 aa, Homo sapiens
LRFTMRIVFPALAPDPYYSVN

SEQ ID NO: 26806 - protein, 32 aa, Homo sapiens
VAGAAAASGLGLLGRLLPGEQLRPCRLKNGRI

SEQ ID NO: 26807 - protein, 2671 aa, Homo sapiens
VGRGQPCWRGESRCQFAHSAVEMAVWEAEQLGGLQRGDLLTPPAPDGDGRTAPLGQPPGAQLYCPACLVTCHSQEAFENHCASSEHAQMVAFDQALPWEHRSPPPGLSKFELCPKPDLCEYGDACTKAHSAQELQEWVRRTQAVELRGQAAWQDGLVPYQERLLAEYQRSSSEVLVLAETLDGVRVTCNQPLMYQAQERKTQYSWTFAVHSEEPLLHVALLKQEPGADFSLVAPGLPPGRLYARGERFRVPSSTADFQVGVRVQAASFGTFEQWVVFDFGRRPVLLQKLGLQLGQGRRPGPCRNLALGHPEEMERWHTGNRHVVPGVERTAEQTALMAKYKGPALALEFNRSSVASGPISPTNYRQRMHQFLYEEEAAQQQLVAKLTLRGQVFLKTALQTPALNMLFAPPGALYAEVPVPSSLMPDTDQGFLLGRAVSTALVAPVPAPDNTVFEVRLERRASSEQALWLLLPARCCLALGLQPEARLVLEVQFQIDPMTFRLWHQAVDTLPEEQLVVPDLPTCALPRPWSVPPLRRGNRKQELAVALIAGWGPGDGRRVPPLLIYGPFGTGKTYTLAMASLEVIRRPETKVLICTHTNSAADIYIREYFHSHVSGGHPEATPLRVMYTDRPLSQTDPVTLQYCCLTDDRQAFRPPTRAELARHRVVVTTTSQARELRVPVGFFSHILIDEAAQMLECEALTPLAYASHGTRLVLAGDHMQVTPRLFSVARARAAEHTLLHRLFLCYQQETHEVARQSRLVFHENYRCTDAIVSFISRHFYVAKGNPIHARGKVPPHPRHYPLMFCHVAGSPDRDMSMASWLNLAEIAQVVEKVQEAYNTWPSCWGGREQRCICVVSHGAQVSALRQELRRRDLGQVSVGSFEILPGRQFRVVVLSTVHTCQSLLSPGALAPEFFTDARVLNTVLTRAQSQLVVVGDAVALCSFGACGKLWESFIRECVERHSVCPEGLSMEQVEQGVAQRRRWPPRGTQAGAAGNWEAAPEPVGDLAEEQAAVVTAMVKAEPGDEALSPASRDITATTAQTEAAAAPAGDAVKEDVVPGACAAGAAAAAGVESTEAEDAEADFWPWDGELNADDAILRELLDESQKVMVTVGEDGLLDTVARPESLQQARLYENLPPAALRKLLHAEPERYRHCSFVPETFERASAIPLDDASSGPIQVRGRLDCGMAFAGDEVLVQLLSGDKAPEGRLRGRVLGVLKRKRHELAFVCRMDTWDPRIMVPINGSVTKIFVAELKDPSQVPIYSLRKGRLQRVGLERLTAEARHSRLFWVQIVLWRQGFYYPLGIVREVLPEASTWEQGLRILGLEYSLRVPPSDQATITKVLQKYHTELGRVAGRREDCRAFLTFTVDPQGACNLDDALSVRDLGPRCEVAVHITDVASFVPRDGVLDVEARRQGAAFYAPGREPVPMLPASLCQDVLSLLPGRDRLAISLFLTMEKASGQLKSLRFAPSVVQSDRQLSYEEAEEVIRQHPGAGRELPARLDSVDACVVAACYFSRLLRRHRLRSDCFYEQPDEDGTLGFRAAHIMVKEYMIQFNRLVAEFLVGSECTRTVTPLRWQPAPRSQQLKALCEKHGDRVPLSLHLGHHLHGGGGSPPDTRLHLLASLWKQVQFAARTQDYEQMVDLVTTDDMHPFLAPAGRDLRKALERSAFGRCARGHQQQGGHYSLQVDWYTWATSPIRRYLDVVLQRQILLALGHGGSAYSARDIDGLCQAFSLQHALAQSYQRRARSLHLAVQLKAQPLDKLGFVVDVEAGSRCFRLLFPSNRETLPDPCPVPYGSLQLAEHPHALAGRPGLRLLWRRRVYSAQGSSPPLPLPGTVPDPHTLAVETALWKQLLELVELQRWPEAAALIQEKGEASQRRELVQVQRSHCGHFLEVARELGSGDTLQVQLGTSLQHGFLVPSPQLWTVAPGFSLCLEHVERPGDCFSGRVYRAPRDRYRDVDEYACVWEPFCALESATGAVAENDSVTLQHLSVSWEASRTPQGQLQGAFRLEAAFLEENCADINFSCCYLCIRLEGLPAPTASPRPGPSSLGPGLNVDPGTYTWVAHGQTQDWDQERRADRQEAPRRVHLFVHHMGMEKVPEEVLRPGTLFTVELLPKQLPDLRKEEAVRGLEEASPLVTSIALGRPVPQPLCRVIPSRFLERQTYNIPGGRHKLNPSQNVAVREALEKPFTVIQGPPGTGKTIVGLHIVFWFHKSNQEQVQPGGPPRGEKRLGGPCILYCGPSNKSVDVLAGLLLRRMELKPLRVYSEQAEASEFPVPRVGSRKLLRKSPREGRPNQSLRSITLHHRIRQAPNPYSSEIKAFDTRLQRGELFSREDLVWYKKVLWEARKFELDRHEVILCTCSCAASASLKILDVRQILVDEAGMATEPETLIPLVQFPQAEKVVLLGDHKQLRPVVKNERLQNLGLDRSLFERYHEDAHMLDTQYRMHEGICAFPSVAFYKSKLKTWQGLRRPPSVLGHAGKESCPVIFGHVQGHERSLLVSTDEGNENSKANLEEVAEVVRITKQLTLGRTVEPQDIAVLTPYNAQASEISKALRREGIAGVAVSSITKSQGSEWRYVLVSTVRTCAKSDLDQRPTKSWLKKFLGFVVDPNQVNVAVTRAQEGLCLIGDHLLLRCCPLWRSLLDFCEAQQTLVPAGQVRVCRRPTMPS

SEQ ID NO: 26808 - protein, 23 aa, Homo sapiens
KPGNINKRIPCIIWISTSEKRSG

SEQ ID NO: 26809 - protein, 18 aa, Homo sapiens
LSGPERAKPSLRRTGGLD

SEQ ID NO: 26810 - protein, 937 aa, Homo sapiens
VTGATGTGDLTRKEPTELGASEMADEALAGLDEGALRKLLEVTADLAERRRIRSAIRELQRQELEREEEALASKRFRAERQDNKENWLHSQQREAEQRAALARLAGQLESMNDVEELTALLRSAGEYEERKLIRAAIRRVRAQEIEAATLAGRLYSGRPNSGSREDSKGLAAHRLEQCEVPEREEQEQQAEVSKPTPTPEGTSQDVTTVTLLLRAPPGSTSSSPASPSSSPTPASPEPPLEPAEAQCLTAEVPGSPEPPPSPPKTTSPEPQESPTLPSTEGQVVNKLLSGPKETPAAQSPTRGPSDTKRADVAGPRPCQRSLSVLSPRQPAQNRESTPLASGPSSFQRAGSVRDRVHKFTSDSPMAARLQDGTPQAALSPLTPARLLGPSLTSTTPASSSSGSSSRGPSDTSSRFSKEQRGVAQPLAQLRSCPQEEGPRGRGLAARPLENRAGGPVARSEEPGAPLPVAVGTAEPGGSMKTTFTIEIKDGRGQASTGRVLLPTGNQRAELTLGLRAPPTLLSTSSGGKSTITRVNSPGTLARLGSVTHVTSFSHAPPSSRGGCSIKMEAEPAEPLAAAVEAANGAEQTRVNKAPEGRSPLSAEELMTIEDEGVLDKMLDQSTDFEERKLIRAALRELRQRKRDQRDKERERRLQEARGRPGEGRGNTATETTTRHSQRAADGSAVSTVTKTERLVHSNDGTRTARTTTVESSFVRRSENGSGSTMMQTKTFSSSSSSKKMGSIFDREDQASPRAGSLAALEKRQAEKKKELMKAQSLPKTSASQARKAMIEKLEKEGAAGSPGGPRAAVQRSTSFGVPNANSIKQMLLDWCRAKTRGYEHVDIQNFSSSWSDGMAFCALVHNFFPEAFDYGQLSPQNRRQNFEVAFSSAETHADCPQLLDTEDMVRLREPDWKCVYTYIQEFYRCLVQKGLVKTKKS

SEQ ID NO: 26811 - protein, 9 aa, Homo sapiens
LAQTGSLGR

SEQ ID NO: 26812 - protein, 1836 aa, Homo sapiens
LHFMREKEQEREEQLMEDKKRKKEDKKKKEATQKVTEQKTKVPEVTKPSLSQPTAASPIGSSPSPPVNGGNNAKRVAVPNGQPPSAARYMPREVPPRFRCQQDHKVLLKRGQPPPPSCMLLGGGAGPPPCTAPGANPNNAQVTGALLQSESGTAPDSTLGGAAASNYANSTWGSGASSNNGTSPNPIHIWDKVIVDGSDMEEWPCIASKDTESSSENTTDNNSASNPGSEKSTLPGSTTSNKGKGSQCQSASSGNECNLGVWKSDPKAKSVQSSNSTTENNNGLGNWRNVSGQDRIGPGSGFSNFNPNSNPSAWPALVQEGTSRKGALETDNSNSSAQVSTVGQTSREQQSKMENAGVNFVVSGREQAQIHNTDGPKNGNTNSLNLSSPNPMENKGMPFGMGLGNTSRSTDAPSQSTGDRKTGSVGSWGAARGPSGTDTVSGQSNSGNNGNNGKEREDSWKGASVQKSTGSKNDSWDNNNRSTGGSWNFGPQDSNDNKWGEGNKMTSGVSQGEWKQPTGSDELKIGEWSGPNQPNSSTGAWDNQKGHPLPENQGNAQAPCWGRSSSSTGSEVGGQSTGSNHKAGSSDSHNSGRRSYRPTHPDCQAVLQTLLSRTDLDPRVLSNTGWGQTQIKQDTVWDIEEVPRPEGKSDKGTEGWESAATQTKNSGGWGDAPSQSNQMKSGWGELSASTEWKDPKNTGGWNDYKNNNSSNWGGGRPDEKTPSSWNENPSKDQGWGGGRQPNQGWSSGKNGWGEEVDQTKNSNWESSASKPVSGWGEGGQNEIGTWGNGGNASLASKGGWEDCKRSPAWNETGRQPNSWNKQHQQQQPPQQPPPPQPEASGSWGGPPPPPPGNVRPSNSSWSSGPQPATPKDEEPSGWEEPSPQSISRKMDIDDGTSAWGDPNSYNYKNVNLWDKNSQGGPAPREPNLPTPMTSKSASVWSKSTPPAPDNGTSAWGEPNESSPGWGEMDDTGASTTGWGNTPANAPNAMKPNSKSMQDGWGESDGPVTGARHPSWEEEEDGGVWNTTGSQGSASSHNSASWGQGGKKQMKCSLKGGNNDSWMNPLAKQFSNMGLLSQTEDNPSSKMDLSVGSLSDKKFDVDKRAMNLGDFNDIMRKDRSGFRPPNSKDMGTTDSGPYFEKLTLPFSNQDGCLGDEAPCSPFSPSPSYKLSPSGSTLPNVSLGAIGTGLNPQNFAARQGGSHGLFGNSTAQSRGLHTPVQPLNSSPSLRAQVPPQFISPQVSASMLKQFPNSGLSPGLFNVGPQLSPQQIAMLSQLPQIPQFQLACQLLLQQQQQQQLLQNQRKISQAVRQQQEQQLARMVSALQQQQQQQQRQPGMKHSPSHPVGPKPHLDNMVPNALNVGLPDLQTKGPIPGYGSGFSSGGMDYGMVGGKEAGTESRFKQWTSMMEGLPSVATQEANMHKNGAIVAPGKTRGGSPYNQFDIIPGDTLGGHTGPAGDSWLPAKSPPTNKIGSKSSNASWPPEFQPGVPWKGIQNIDPESDPYVTPGSVLGGTATSPIVDTDHQLLRDNTTGSNSSLNTSLPSPGAWPYSASDNSFTNVHSTSAKFPDYKSTWSPDPIGHNPTHLSNKMWKNHISSRNTTPLPRPPPGLTNPKPSSPWSSTAPRSVRGWGTQDSRLASASTWSDGGSVRPSYWLVLHNLTPQIDGSTLRTICMQHGPLLTFHLNLTQGTALIRYSTKQEAAKAQTALHMCVLGNTTILAEFATDDEVSRFLAQAQPPTPAATPSAPAAGWQSLETGQNQSDPVGPALNLFGGSTGLGQWSSSAGGSSGADLAGASLWGPPNYSSSLWGVPTVEDPHRMGSPAPLLPGDLLGGGSDSI

SEQ ID NO: 26813 - protein, 28 aa, Homo sapiens
IYPMPFLTMKTRNPLQSPRNPVLGMTLT

SEQ ID NO: 26814 - protein, 15 aa, Homo sapiens
TLAPRVFLFLFFFFF

SEQ ID NO: 26815 - protein, 31 aa, Homo sapiens
VLPSLLRSPPEVKRASRFEPICFQAGHHDET

SEQ ID NO: 26816 - protein, 775 aa, Homo sapiens
VSPVPRRLVSSRVPLPMESVRIEQMLSLPAEVSSDNLESAERGASAAQVDMGPHPKVAAEGPAPLPTREPEQEQSPGTSTPESKVLLTQADALASRGRIREALEVYRQLSERQQLVAEQLEQLVRCLAEKVPQGEALAPAPPDEGSTASGTVAAEETGAAAAAAATEVWDGFKCRKCHGFLSDPVSLSCGHTFCKLCLERGRAADRRCALCGVKLSALMVATGRARGARRAGQQPPPPLRVNVVLSGLLGKLFPGPARASQLRHEGNRLYRERQVEAALLKYNEAVKLAPNDHLLYSNRSQIYFTLESHENALHDAEIACKLRPMGFKAHFRKAQALATLGKVEEALREFLYCVSLDGKNKRARCEAQRDNLELPHCSSQEEAAARGDGSSLMDPAKVKGDGQQHHMKDQEEEEEKWDATSPKAASSKTGKCQEKKRKHCQIESQEETGMPNKASKQDPPTDQGDKPALSLPLASFDASDLECALCMRLFYEPVTTPCGHTFCLKCLERCLDHNAKCPLCKDGLSQCLASRKYSKNVIMEELIAKFLPEELKERRKLYEEEMEELSNLNKNVPIFVCTMAYPTVPCPLHIFEPCYRLMIRRCIETGTRQFGMCLGDPVKGFAEYGCILEIRNVQFFADGRSVVDSIGKRRFRVLHQSQRDGYNTADIEYIEDQKVQGEDCAELMGLHNCVYQQASLWFHSLKLSLKNRILNHFGPMPEKDADPQMNPNGPAWCWWMLAVLPLESRAQLPFLAMRSLKDRLNGIRRVLAFISRNQN

SEQ ID NO: 26817 - protein, 22 aa, Homo sapiens
MNMSSCPLKPWRLPEFVPISTW

SEQ ID NO: 26818 - protein, 316 aa, Homo sapiens
KAPGAATAAPPSSTAQHQNTLFLDSDMGSSKKVTLSVLSREQSEGVGARVRRSIGRPELKNLDPFLLFDEFKGGRPGGFPDHPHRGFETVSYLLEGGSMAHEDFCGHTGKMNPGDLQWMTAGRGILHAEMPCSEEPAHGLQLWVNLRSSEKMVEPQYQELKSEEIPKPSKDGVTVAVISGEALGIKSKVYTRTPTLYLDFKLDPGAKHSQPIPKGWTSFIYTISGDVYIGPDDAQQKIEPHHTAVLGEGDSVQVENKDPKRSHFVLIAGEPLREPVIQHGPFVMNTNEEISQAILDFRNAKNGFERAKTWKSKIGN

SEQ ID NO: 26819 - protein, 24 aa, Homo sapiens
IMIVTLPGASKLLGVGTKYLGSRI

SEQ ID NO: 26820 - protein, 15 aa, Homo sapiens
RWTSKSTVSSCPASP

SEQ ID NO: 26821 - protein, 697 aa, Homo sapiens
IINTFYSNKEIFLRELISNASDALDKIRYESLTDPSKLDSGKELKIDIIPNPQERTLTLVDTGIGMTKADLINNLGTIAKSGTKAFMEALQAGADISMIGQFGVGFYSAYLVAEKVVVITKHNDDEQYAWESSAGGSFTVRADHGEPIGRGTKVILHLKEDQTEYLEERRVKEVVKKHSQFIGYPITLYLEKEREKEISDDEAEEEKGEKEEEDKDDEEKPKIEDVGSDEEDDSGKDKKKKTKKIKEKYIDQEELNKTKPIWTRNPDDITQEEYGEFYKSLTNDWEDHLAVKHFSVEGQLEFRALLFIPRRAPFDLFENKKKKNNIKLYVRRVFIMDSCDELIPEYLNFIRGVVDSEDLPLNISREMLQQSKILKVIRKNIVKKCLELFSELAEDKENYKKFYEAFSKNLKLGIHEDSTNRRRLSELLRYHTSQSGDEMTSLSEYVSRMKETQKSIYYITGESKEQVANSAFVERVRKRGFEVVYMTEPIDEYCVQQLKEFDGKSLVSVTKEGLELPEDEEEKKKMEESKAKFENLCKLMKEILDKKVEKVTISNRLVSSPCCIVTSTYGWTANMERIMKAQALRDNSTMGYMMAKKHLEINPDHPIVETLRQKAEADKNDKAVKDLVVLLFETALLSSGFSLEDPQTHSNRIYRMIKLGLGIDEDEVAAEEPNAAVPDEIPPLEGDEDASRMEEVD

SEQ ID NO: 26822 - protein, 176 aa, Homo sapiens
KERLLDDRHDSGLDSMKDEEYEQMVKELQEIRLEPQEVPRGSEPWKQQLTEDGDSFLHLAIIHEEKALTMEVIRQVKGDLAFLNFQNNLQQTPLHLAVITNQPEIAEALLGAGCDPELRDFRGNTPLHLACEQGCLASVGVLTQSCTTPHLHSILKATNYNGMSASLPCPTPSEGR

SEQ ID NO: 26823 - protein, 43 aa, Homo sapiens
ISQLSIQKETYHSKDLRSCMPGNGMKTKCISHNKYYSNVEVII

SEQ ID NO: 26824 - protein, 24 aa, Homo sapiens
ILTKSTPTSTMESSLEFTQSHLGE

SEQ ID NO: 26825 - protein, 58 aa, Homo sapiens
RTLQYIFPPFLEGFRCFPKVLDERSSSVGRFWALWLGFCNFSLGTAVEPHPLWIIIAT

SEQ ID NO: 26826 - protein, 39 aa, Homo sapiens
LARILQFLPGDCRGAASTVDYNCNMTLEELVACDNAAQK

SEQ ID NO: 26827 - protein, 55 aa, Homo sapiens
RVFLDHNALPDTLKVTYDSFCSNGVTHRNQPRGDCDGVQINVPVSLATRVPIPAC

SEQ ID NO: 26828 - protein, 145 aa, Homo sapiens
IKMTKMYKGFQALGDAADIRFVYTPAMESVCGYFHRSHNRSEEFLIAGKLQDGLLHITTCSFVAPWNSLSLAQRRGFTKTYTVGCEECTVFPCLSIPCKLQSGTHCLWTDQLLQGSEKGFQSRHLACLPREPGLCTWQSLRSQIA

SEQ ID NO: 26829 - protein, 464 aa, Homo sapiens
KPDLTPRNRYRTMEVTTRLTWNDENHLRKLLGNVSLSLLYKSSVHGGSIEDMVERCSRQGCTITMAYIDYNMIVAFMLGNYINLHESSTEPNDSLWFSLQKKNDTTEIETLLLNTAPKIIDEQLVCRLSKTDIFIICRDNKIYLDKMITRNLKLRFYGHRQYLECEVFRVEGIKDNLDDIKRIIKAREHRNRLLADIRDYRPYADLVSEIRILLVGPVGSGKSSFFNSVKSIFHGHVTGQAVVGSDITSITERYRIYSVKDGKNGKSLPFMLCDTMGLDGAEGAGLCMDDIPHILKGCMPDRYQFNSRKPITPEHSTFITSPSLKDRIHCVAYVLDINSIDNLYSKMLAKVKQVHKEVLNCGIAYVALLTKVDDCSEVLQDNFLNMSRSMTSQSRVMNVHKMLGIPISNILMVGNYASDLELDPMKDILILSALRQMLRAADDFLEDLPLEETGAIERALQPCI

SEQ ID NO: 26830 - protein, 34 aa, Homo sapiens
ISTQQQVTFLLKIKRTRKGFRLLNPHPKPNPKNN

SEQ ID NO: 26831 - protein, 352 aa, Homo sapiens
LRPRNLCAQPKLTSREVTDCSMTAKMETTFYDDALNASFLPSESGPYGYSNPKILKQSMTLNLADPVGSLKPHLRAKNSDLLTSPDVGLLKLASPELERLIIQSSNGHITTTPTPTQFLCPKNVTDEQEGFAEGFVRALAELHSQNTLPSVTSAAQPVNGAGMVAPAVASVAGGSGSGGFSASLHSEPPVYANLSNFNPGALSSGGGAPSYGAAGLAFPAQPQQQQQPPHHLPQQMPVQHPRLQALKEEPQTVPEMPGETPPLSPIDMESQERIKAERKRMRNRIAASKCRKRKLERIARLEEKVKTLKAQNSELASTANMLREQVAQLKQKVMNHVNSGCQLMLTQQLQTF

SEQ ID NO: 26832 - protein, 94 aa, Homo sapiens
IMLTELEKALNSIIDVYHKYSLIKGNFHAVYRDDLKKLLETECPQYIRKKGADVWFKELDINTDGAVNFQEFLILVIKMGVAAHKKSHEESHKE

SEQ ID NO: 26833 - protein, 19 aa, Homo sapiens
KKQKFLPADSFSFRLFGPV

SEQ ID NO: 26834 - protein, 21 aa, Homo sapiens
VGIWHCGSCMKTVAGGAWTYK

SEQ ID NO: 26835 - protein, 2077 aa, Homo sapiens
LGTLGTPTALAAHPQLASFPGAEWWRTTDAHTRTGATFFPPLLGIPPLFAPPAQNHDSSSFHSRTSGKSNRNGPEKGVNGSINGSNTSSVIGINTSVLSTTASSSMGQTKSTSSGGGNRKCNQEQSKNQPLDARVDKIKDKKPRKKAMESSSNSDSDSGTSSDTSSEGISSSDSDDLEEDEEEEDQSIEESEDDDSDSESEAQHKSNNQVLLHGISDPKADGQKATEKAQEKRIHQPLPLASESQTHSFQSQQKQPQVLSQQLPFIFQSSQAKEESVNKHTSVIQSTGLVSNVKPLSLVNQAKKETYMKLIVPSPDVLKAGNKNTSEESSLLTSELRSKREQYKQAFPSQLKKQESSKSLKKVIAALSNPKATSSSPAHPKQTLENNHPNPFLTNALLGNHQPNGVIQSVIQEAPLALTTKTKMQSKINENIAAASSTPFSSPVNLSTSGRRTPGNQTPVMPSASPILHSQGKEKAVSNNVNPVKTQHHSHPAKSLVEQFRGTDSDIPSSKDSEDSNEDEEEDDEEEDEEDDEDDESDDSQSESDSNSESDTEGSEEEDDDDKDQDESDSDTEGEKTSMKLNKTTSSVKSPSMSLTGHSTPRNLHIAKAPGSAPAALCSESQSPAFLGTSSSTLTSSPHSGTSKRRRVTDERELRIPLEYGWQRETRIRNFGGRLQGEVAYYAPCGKKLRQYPEVIKYLSRNGIMDISRDNFSFSAKIRVGDFYEARDGPQGMQWCLLKEEDVIPRIRAMEGRRGRPPNPDRQRAREESRMRRRKGRPPNVGNAEFLDNADAKLLRKLQAQEIARQAAQIKLLRKLQKQEQARVAKEAKKQQAIMAAEEKRKQKEQIKIMKQQEKIKRIQQIRMEKELRAQQILEAKKKKKEEAANAKLLEAEKRIKEKEMRRQQAVLLKHQERERRRQHMMLMKAMEARKKAEEKERLKQEKRDEKRLNKERKLEQRRLELEMAKELKKPNEDMCLADQKPLPELPRIPGLVLSGSTFSDCLMVVQFLRNFGKVLGFDVNIDVPNLSVLQEGLLNIGDSMGEVQDLLVRLLSAAVCDPGLITGYKAKTALGEHLLNVGVNRDNVSEILQIFMEAHCGQTELTESLKTKAFQAHTPAQKASVLAFLINELACSKSVVSEIDKNIDYMSNLRRDKWVVEGKLRKLRIIHAKKTGKRDTSGGIDLGEEQHPLGTPTPGRKRRRKGGDSDYDDDDDDDSDDQGDEDDEDEEDKEDKKGKKTDICEDEDEGDQAASVEELEKQIEKLSKQQSQYRRKLFDASHSLRSVMFGQDRYRRRYWILPQCGGIFVEGMESGEGLEEIAKEREKLKKAESVQIKEEMFETSGDSLNCSNTDHCEQKEDLKEKDNTNLFLQKPGSFSKLSKLLEVAKMPPESEVMTPKPNAGANGCTLSYQNSGKHSLGSVQSTATQSNVEKADSNNLFNTGSSGPGKFYSPLPNDQLLKTLTEKNRQWFSLLPRTPCDDTSLTHADMSTASLVTPQSQPPSKSPSPTPAPLGSSAQNPVGLNPFALSPLQVKGGVSMMGLQFCGWPTGVVTSNIPFTSSVPSLGSGLGLSEGNGNSFLTSNVASSKSESPVPQNEKATSAQPAAVEVAKPVDFPSPKPIPEEMQFGWWRIIDPEDLKALLKVLHLRGIREKALQKQIQKHLDYITQACLKNKDVAIIELNENEENQVTRDIVENWSVEEQAMEMDLSVLQQVEDLERRVASASLQVKGWMCPEPASEREDLVYFEHKSFTKLCKEHDGEFTGEDESSAHALERKSDNPLDIAVTRLADLERNIERRIEEDIAPGLRVWRRALSEARSAAQVALCIQQLQKSIAWEKSIMKVYCQICRKGDNEELLLLCDGCDKGCHTYCHRPKITTIPDGDWFCPACIAKASGQTLKIKKLHVKGKKTNESKKGKKVTLTGDTEDEDSASTSSSLKRGNKDLKKRKMEENTSINLSKQESFTSVKKPKRDDSKDLALCSMILTEMETHEDAWPFLLPVNLKLVPGYKKVIKKPMDFSTIREKLSSGQYPNLETFALDVRLVFDNCETFNEDDSDIGRAGHNMRKYFEKKWTDTFKVS

SEQ ID NO: 26836 - protein, 16 aa, Homo sapiens
IYEPPSCPLGSQYVYT

SEQ ID NO: 26837 - protein, 11 aa, Homo sapiens
LQFSGSMVVLR

SEQ ID NO: 26838 - protein, 45 aa, Homo sapiens
LPPPFSLQSGILTLNPVAQGQPILTSLGSNQEEAYVTMSSFYQNQ

SEQ ID NO: 26839 - protein, 881 aa, Homo sapiens
IFTKAGSVRGGWGGVEIAAASFPGIYLMGMCSRQERIQKDIDVVIQKSRAEKDCLFADFRYSDSTFTFTYVGGPRSVSYSVHVSEDYPDNTYVSSSENDEDVLVTTEPIPVIFHRIATELRKTNDINCCLSIKSKLQKENGEESRQNSTVEEDSEGDNDSEEFYYGGQVNYDGELHKHPQLEADLSAVREIYGPHAVSLREYGAIDDVDIDLHIDVSFLDEEIAVAWEVIRTEPIIVRLHCSLTQYLNGPVPTVDVFQISTKERFGLGHQLKKIMQTFVTQQWKQSKEKSNCLHNKKLSEKKVKSPLHLFSTLRRSPSYPPPGCGKSKSKLKSEQDGISKTHKLLRRTCSSTVKTDDVCVTKSHRTFGRSLSSDPRAEQAMTAIKSHKLLNRPCPAAVKSEECLTLKSHRLLTRSCSGDPRCEHNTNLKPHKLLSRSYSSNLRMEELYGLKNHKLLSKSYSSAPKSSKTELFKEPNAEGRRLSLTSGLIGILTPSSSSSSQLAPNGAKCIPVRDRGFLVQTIEFAEQRIPVLNEYCVVCDEPHVFQNGPMLRPTVCERELCVFAFQTLGVMNEAADEIATGAQVVDLLVSMCRSALESPRKVVIFEPYPSVVDPNDPQMLAFNPRKKNYDRVMKALDSITSIREMTQAPYLEIKKQMDKQDPLAHPLLQWVISSNRSHIVKLPVNRQLKFMHTPHQFLLLSSPPAKESNFRAAKKLFGSTFAFHGSHIENWHSILRNGLVVASNTRLQLHGAMYGSGIYLSPMSSISFGYSGMNKKQKVSAKDEPASSSKSSNTSQSQKKGQQSQFLQSRNLKCIALCEVITSSDLHKHGEIWVVPNTDHVCTRFFFVYEDGQVGDANINTQEGGIHKEILRVIGNQTATG

SEQ ID NO: 26840 - protein, 16 aa, Homo sapiens
LILMAPRSSFENMKQH

SEQ ID NO: 26841 - protein, 26 aa, Homo sapiens
IGRIEDVTPIPSDSTRRKGGRRGRRL

SEQ ID NO: 26842 - protein, 82 aa, Homo sapiens
VLKQVHPDTGISSKAMGIMNSFVNDIFERIAGEASRLAHYNKRSTITSREIQTAVRLLLPGELAKHAVSEGTKAVTKYTSSK

SEQ ID NO: 26843 - protein, 744 aa, Homo sapiens
LEKLRDLQGAMDDLDADMKEAESVRNGWKPVGDLLIDSLQDHIEKIMAFREEIAPINFKVKTVNDLSSQLSPLDLHPSLKMSRQLDDLNMRWKLLQVSVDDRLKQLQEAHRDFGPSSQHFLSTSVQLPWQRSISHNKVPYYINHQTQTTCWDHPKMTELFQSLADLNNVRFSAYRTAIKIRRLQKALCLDLLELSTTNEIFKQHKLNQNDQLLSVPDVINCLTTTYDGLEQMHKDLVNVPLCVDMCLNWLLNVYDTGRTGKIRVQSLKIGLMSLSKGLLEEKYRYLFKEVAGPTEMCDQRQLGLLLHDAIQIPRQLGEVAAFGGSNIEPSVRSCFQQNNNKPEISVKEFIDWMHLEPQSMVWLPVLHRVAAAETAKHQAKCNICKECPIVGFRYRSLKHFNYDVCQSCFFSGRTAKGHKLHYPMVEYCIPTTSGEDVRDFTKVLKNKFRSKKYFAKHPRLGYLPVQTVLEGDNLETPITLISMWPEHYDPSQSPQLFHDDTHSRIEQYATRLAQMERTNGSFLTDSSSTTGSVEDEHALIQQYCQTLGGESPVSQPQSPAQILKSVEREERGELERIIADLEEEQRNLQVEYEQLKDQHLRRGLPVGSPPESIISPHHTSEDSELIAEAKLLRQHKGRLEARMQILEDHNKQLESQLHRLRQLLEQPESDSRINGVSPWASPQHSALSYSLDPDASGPQFHQAAGEDLLAPPHDTSTDLTEVMEQIHSTFPSCCPNVPSRPQAM

SEQ ID NO: 26844 - protein, 13 aa, Homo sapiens
RRLVAFSRCFWRT

SEQ ID NO: 26845 - protein, 23 aa, Homo sapiens
KAEEVFYAVKVLQKKAILKKKEV

SEQ ID NO: 26846 - protein, 16 aa, Homo sapiens
KDSKTTDLCQHVKHMV

SEQ ID NO: 26847 - protein, 7 aa, Homo sapiens
IKKKSIS

SEQ ID NO: 26848 - protein, 18 aa, Homo sapiens
KSGRTSKKIVITDCGQLS

SEQ ID NO: 26849 - protein, 259 aa, Homo sapiens
TKDPVPGYSVPAAEHSTITAWGKDHEKDAFEHIVTQFSSVPVSVVSNSYDIYNACEKIWGEDLRHLIVSRSTQAPLIIRPDSGNPLDTVLKVLEILGKKFPVTENSKGYKLLPPYLRVIQGDGVDINTLQEIVEGMKQKMWSIENIAFGSGGGLLQKLTRDLLNCSFKCSYVVTNGLGINVFKDPVADPNKRSKKGRLSLHRTPAGNFVTLEEGKGDLEEYGQDLLHTVFKNGKVTKSYSFDEIRKNAQLNIELEAAHH

SEQ ID NO: 26850 - protein, 15 aa, Homo sapiens
VHSRFLLVPSPIWQL

SEQ ID NO: 26851 - protein, 9 aa, Homo sapiens
LVPSPIWQL

SEQ ID NO: 26852 - protein, 108 aa, Homo sapiens
IASTCNTILESLSREGQPIPESGDPKGTPKSDAEPEPGNLSEKVSHLESMLRKLQEDLQKEKADRAALEEEVRSLRHNNRRLQAESESAATRLLLASKQLGSPTADLA

SEQ ID NO: 26853 - protein, 6 aa, Homo sapiens
MWVIQL

SEQ ID NO: 26854 - protein, 417 aa, Homo sapiens
IKPRSESGSFARGALGLCLPRGASGRHPALSRSSTPMIDTLRPVPFASEMAISKTVAWLNEQLELGNERLLLMDCRPQELYESSHIESAINVAIPGIMLRRLQKGNLPVRALFTRGEDRDRFTRRCGTDTVVLYDESSSDWNENTGGESVLGLLLKKLKDEGCRAFYLEGGFSKFQAEFSLHCETNLDGSCSSSSPPLPVLGLGGLRISSDSSSDIESDLDRDPNSATDSDGSPLSNSQPSFPVEILPFLYLGCAKDSTNLDVLEEFGIKYILNVTPNLPNLFENAGEFKYKQIPISDHWSQNLSQFFPEAISFIDEARGKNCGVLVHCLAGISRSVTVTVAYLMQKLNLSMNDAYDIVKMKKSNISPNFNFMGQLLDFERTLGLSSPCDNRVPAQQLYFTTPSNQNVYQVDSLQST

SEQ ID NO: 26855 - protein, 20 aa, Homo sapiens
LTWAAFLRKCSHSSSCWPFF

SEQ ID NO: 26856 - protein, 381 aa, Homo sapiens
IAWNLVASYYEQLPYGRCGLMTAQEPWSGHYVVESPVWVSAHTTQFTQPGWYYLKTVGHLEKGGSYVALTDGLGNLTIIIETMSHKHSKCIRPFLPYFNVSQQFATFVLKGSFSEIPELQVWYTKLGKTSERFLFKQLDSLWLLDSDGSFTLSLHEDELFTLTTLTTGRKGSYPLPPKSQPFPSTYKDDFNVDYPFFSEAPNFADQTGVFEYFTNIEDPGEHHFTLRQVLNQRPITWAADASNTISIIGDYNWTNLTIKCDVYIETPDTGGVFIAGRVNKGGILIRSARGIFFWIFANGSYRVTGDLAGWIIYALGRVEVTAKKWYTLTLTIKGHFTSGMLNDKSLWTDIPVNFPKNGWAAIGTHSFEFAQFDNFLVEATR

SEQ ID NO: 26857 - protein, 9 aa, Homo sapiens
LFSRWSVFC

SEQ ID NO: 26858 - protein, 355 aa, Homo sapiens
VARIPRVRGGGTHRSGQGAFGNMCRGGRMFAPTKTWRRWHRRVNTTQKRYAICSALAASALPALVMSKGHRIEEVPELPLVVEDKVEGYKKTKEAVLLLKKLKAWNDIKKVYASQRMRAGKGKMRNRRRIQRRGPCIIYNEDNGIIKAFRNIPGITLLNVSKLNILKLAPGGHVGRFCIWTESAFRKLDELYGTWRKAASLKSNYNLPMHKMINTDLSRILKSPEIQRALRAPRKKIHRRVLKKNPLKNLRIMLKLNPYAKTMRRNTILRQARNHKLRVDKAAAAAAALQAKSDEKAAVAGKKPVVGKKGKKAAVGVKKQKKPLVGKKAAATKKPAPEKKPAEKKPTTEEKKPAA

SEQ ID NO: 26859 - protein, 26 aa, Homo sapiens
KHLNEGLITLNSAFVNLICRYVQTTS

SEQ ID NO: 26860 - protein, 136 aa, Homo sapiens
LNEPPLVHTAASLFKEMCYRYREDLMAGIIIAGWDPQEGGQVYSVPMGGMMVRQSFAIGGSGSSYIYGYVDATYREGMTKEECLQFTANALALAMERDGSSGGVIRLAAIAESGVERQVLLGDQIPKFAVATLPPA

SEQ ID NO: 26861 - protein, 30 aa, Homo sapiens
ILQRERWPPFLDLLLLQAQTPPPLFRTGTS

SEQ ID NO: 26862 - protein, 21 aa, Homo sapiens
ILHHVNQAVRDMEDLLVSPST

SEQ ID NO: 26863 - protein, 10 aa, Homo sapiens
LPPVHLFKPP

SEQ ID NO: 26864 - protein, 985 aa, Homo sapiens
VDWYTWATSPIRRYLDVVLQRQILLALGHGGSAYSARDIDGLCQAFSLQHALAQSYQRRARSLHLAVQLKAQPLDKLGFVVDVEAGSRCFRLLFPSNRETLPDPCPVPYGSLQLAEHPHALAGRPGLRLLWRRRVYSAQGSSPPLPLPGTVPDPHTLAVETALWKQLLELVELQRWPEAAALIQEKGEASQRRELVQVQRSHCGHFLEVARELGSGDTLQVQLGTSLQHGFLVPSPQLWTVAPGFSLCLEHVERPGDCFSGRVYRAPRDRYRDVDEYACVWEPFCALESATGAVAENDSVTLQHLSVSWEASRTPQGQLQGAFRLEAAFLEENCADINFSCCYLCIRLEGLPAPTASPRPGPSSLGPGLNVDPGTYTWVAHGQTQDWDQERRADRQEAPRRVHLFVHHMGMEKVPEEVLRPGTLFTVELLPKQLPDLRKEEAVRGLEEASPLVTSIALGRPVPQPLCRVIPSRFLERQTYNIPGGRHKLNPSQNVAVREALEKPFTVIQGPPGTGKTIVGLHIVFWFHKSNQEQVQPGGPPRGEKRLGGPCILYCGPSNKSVDVLAGLLLRRMELKPLRVYSEQAEASEFPVPRVGSRKLLRKSPREGRPNQSLRSITLHHRIRQAPNPYSSEIKAFDTRLQRGELFSREDLVWYKKVLWEARKFELDRHEVILCTCSCAASASLKILDVRQILVDEAGMATEPETLIPLVQFPQAEKVVLLGDHKQLRPVVKNERLQNLGLDRSLFERYHEDAHMLDTQYRMHEGICAFPSVAFYKSKLKTWQGLRRPPSVLGHAGKESCPVIFGHVQGHERSLLVSTDEGNENSKANLEEVAEVVRITKQLTLGRTVEPQDIAVLTPYNAQASEISKALRREGIAGVAVSSITKSQGSEWRYVLVSTVRTCAKSDLDQRPTKSWLKKFLGFVVDPNQVNVAVTRAQEGLCLIGDHLLLRCCPLWRSLLDFCEAQQTLVPAGQVRVCRRPTMPS

SEQ ID NO: 26865 - protein, 290 aa, Homo sapiens
IKMFNQDIEKLVEGEEVVRENETRLYNKIREDFKNWVGILATNTQKVKNIIHEEVEKYEKQYRGKELLGFVNYKTFEIIVHQYIQQLVEPALSMLQKAMEIIQQAFINVAKKHFGEFFNLNQTVQSTIEDIKVKHTAKAENMIQLQFRMEQMVFCQDQIYSVVLKKVREEIFNPLGTPSQNMKLNSHFPSNESSVSSFTEIGIHLNAYFLETSKRLANQIPFIIQYFMLRENGDSLQKAMMQILQEKNRYSWLLQEQSETATKRRILKERIYRLTQARHALCQFSSKEIH

SEQ ID NO: 26866 - protein, 147 aa, Homo sapiens
VRLPGNILLDSIMACGLVASNLNLKPGECLRVRGEVAPDAKSFVLNLGKDSNNLCLHFNPRFNAHGDANTIVCNSKDGGAWGTEQREAVFPFQPGSVAEVCITFDQANLTVKLPDGYEFKFPNRLNLEAINYMAADGDFKIKCVAFD

SEQ ID NO: 26867 - protein, 173 aa, Homo sapiens
TKMAKFVIRPATAADCSDILRLIKELAKYEYMEEQVILTEKDLLEDGFGEHPFYHCLVAEVPKEHWTPEGHSIVGFAMYYFTYDPWIGKLLYLEDFFVMSDYRGFGIGSEILKNLSQVAMRCRCSSMHFLVAEWNEPSINFYKRRGASDLSSEEGWRLFKIDKEYLLKMATEE

SEQ ID NO: 26868 - protein, 7 aa, Homo sapiens
LQPSPRS

SEQ ID NO: 26869 - protein, 34 aa, Homo sapiens
MAPHVNPTLKDKALSPQQPQQLALHPVSLTTTSK

SEQ ID NO: 26870 - protein, 10 aa, Homo sapiens
IQGFFKVGIL

SEQ ID NO: 26871 - protein, 14 aa, Homo sapiens
KKKINQRKGWTQRE

SEQ ID NO: 26872 - protein, 14 aa, Homo sapiens
ILALASFEVEKTKK

SEQ ID NO: 26873 - protein, 12 aa, Homo sapiens
LCTSFTLLREYL

SEQ ID NO: 26874 - protein, 14 aa, Homo sapiens
LGAGGVVLVLRIPA

SEQ ID NO: 26875 - protein, 16 aa, Homo sapiens
LSLLELTEKDSVKVKS

SEQ ID NO: 26876 - protein, 13 aa, Homo sapiens
RNSCHFNRLLLTS

SEQ ID NO: 26877 - protein, 15 aa, Homo sapiens
KSALRNEVDCLLAFC

SEQ ID NO: 26878 - protein, 291 aa, Homo sapiens
RHNRLLWDSLQPIFIAQVSEAAMAEVPELASEMMAYYSGNEDDLFFEADGPKQMKCSFQDLDLCPLDGGIQLRISDHHYSKGFRQAASVVVAMDKLRKMLVPCPQTFQENDLSTFFPFIFEEEPIFFDTWDNEAYVHDAPVRSLNCTLRDSQQKSLVMSGPYELKALHLQGQDMEQQVVFSMSFVQGEESNDKIPVALGLKEKNLYLSCVLKDDKPTLQLESVDPKNYPKKKMEKRFVFNKIEINNKLEFESAQFPNWYISTSQAENMPVFLGGTKGGQDITDFTMQFVSS

SEQ ID NO: 26879 - protein, 84 aa, Homo sapiens
IWSLRSLMRSEMAHTDSSSTQSSSSLGKRMLPTTMPVVTIPLARRSLTQCWIGSASCLTSAQDFRASWCSTALVGALALASPHS

SEQ ID NO: 26880 - protein, 68 aa, Homo sapiens [sequence omitted]

SEQ ID NO: 26881 - protein, 36 aa, Homo sapiens
RELSAPRPLRTDARLPAEISMTTLKMNFLYSPDILI

SEQ ID NO: 26882 - protein, 352 aa, Homo sapiens
KTLNSSAASQHPEYLVSPDPEHLEPIDPKELLEECRAVLHTRPPRFQRDFVDLRTDCPSTHPPIRVMQWNILAQALGEGKDNFVQCPVEALKWEERKCLILEEILAYQPDILCLQEVDHYFDTFQPLLSRLGYQGTFFPKPWSPCLDVEHNNGPDGCALFFLQNRFKLVNSANIRLTAMTLKTNQVAIAQTLECKESGRQFCIAVTHLKARTGWERFRSAQGCDLLQNLQNITQGAKIPLIVCGDFNAEPTEEVYKHFASSSLNLNSAYKLLSADGQSEPPYTTWKIRTSGECRHTLDYIWYSKHALNVRSALDLLTEEQIGPNRLPSFNYPSDHLSLVCDFSFTEESDGLS

SEQ ID NO: 26883 - protein, 45 aa, Homo sapiens
KPKKMKGLFLLTTNVSVPGLLPGSSVLPKILMRTLWRETSELLFL

SEQ ID NO: 26884 - protein, 488 aa, Homo sapiens
TQPGGRGLGVHLQESMPQTPPFSAMFDSSGYNRNLYQSAEDSCGGLYYHDNNLLSGSLEALIQHLVPNVDYYPDRTYIFTFLLSSRLFMHPYELMAKVCHLCVEHQRLSDPDSDKNQMRKIAPKILQLLTEWTETFPYDFRDERMMRNLKDLAHRIASGEEQTYRKNVQQMMQCLIRKLAALSQYEEVLAKISSTSTDRLTVLKTKPQSIQRDIITVCNDPYTLAQQLTHIELERLNYIGPEEFVQAFVQKDPLDNDKSCYSERKKTRNLEAYVEWFNRLSYLVATEICMPVKKKHRARMIEYFIDVARECFNIGNFNSLMAIISGMNMSPVSRLKKTWAKVKTAKFDILEHQMDPSSNFYNYRTALRGAAQRSLTAHSSREKIVIPFFSLLIKDIYFLNEGCANRLPNGHVNFEKFWELAKQVSEFMTWKQVECPFERDRKILQYLLTVPVFSEDALYLASYESEGPENHIEKDRWKSLRSSLLGRV

SEQ ID NO: 26885 - protein, 17 aa, Homo sapiens
KLEMKWKVFCKIRFLSN

SEQ ID NO: 26886 - protein, 96 aa, Homo sapiens
KRSRKESYSVYVYKVLKQVHPDTGISSKAMGIMNSFVNDIFERIAGEASRLAHYNKRSTITSREIQTAVRLLLPGELAKHAVSEGTKAVTKYTSSK

SEQ ID NO: 26887 - protein, 28 aa, Homo sapiens
TVELQISLKNYDPQKDKRFSGTVRLAPF

SEQ ID NO: 26888 - protein, 16 aa, Homo sapiens
VLLPKKTESHHKAKGK

SEQ ID NO: 26889 - protein, 18 aa, Homo sapiens
KPPPPKFYNLEGRRWAWP

SEQ ID NO: 26890 - protein, 53 aa, Homo sapiens
IYEETRGVLKVFLENVIRDAVTYTEHAKRKTVTAMDVVYALKRQGRTLYGFGG

SEQ ID NO: 26891 - protein, 8 aa, Homo sapiens
ICVFRARR

SEQ ID NO: 26892 - protein, 105 aa, Homo sapiens
MLEAHCLLPPLPPAHHVEDSRHRGSKEPLPGHGLSPLPERWKQSRTVHASGDSLGHVSGPGRPELLPLRTVSESVQRNKRDCLVRRCSQPVFEADQFQYAKESYI

SEQ ID NO: 26893 - protein, 100 aa, Homo sapiens
LEGTDLISRGWVSPHHSFGGSRDPGNIVFCSVSGDHLPRLGLLGQARTHGPWKSWSRGLNSRHLYRAEHDHIPAAAAGAQPGLHRSRWLRGPCGKHLSVG

SEQ ID NO: 26894 - protein, 100 aa, Homo sapiens
VQVAKTTPFNTREPVMLACYVWGFYPAEVTITWRKNGKLVMPHSSAHKTAQPNGDWTYQTLSHLALTPSYGDTYTCVVEHTGAPEPILRDWSKCMADGWN

SEQ ID NO: 26895 - protein, 12 aa, Homo sapiens
IPDETMVIGQAG

SEQ ID NO: 26896 - protein, 76 aa, Homo sapiens
VYSAAILEYLTAEVLELAGNASKDLKVKRITPRHLQLAIRGDEELDSLIKATIAGGGVIPHIHKSLIGKKGQQKTA

SEQ ID NO: 26897 - protein, 17 aa, Homo sapiens
RSSRWSPRLPGTAMCRS

SEQ ID NO: 26898 - protein, 48 aa, Homo sapiens
KSLESINSRLQLVMKSGKYVLGYKQTLKMIRQGKAKLVILANNCPALR

SEQ ID NO: 26899 - protein, 23 aa, Homo sapiens
TGLVFATSMPDHSIHLVLWKEHG

SEQ ID NO: 26900 - protein, 9 aa, Homo sapiens
LRAEALPVT

SEQ ID NO: 26901 - protein, 69 aa, Homo sapiens [sequence omitted]

SEQ ID NO: 26902 - protein, 240 aa, Homo sapiens
VASAISPIKDQKNCNCCWAMAAAGNIETLWRISFWDFVDVSVQELLDCGRCGDGCHGGFVWDAFITVLNNSGLASEKDYPFQGKVRAHRCHPKKYQKVAWIQDFIMLQNNEHRIAQYLATYGPITVTINMKPLQLYRKGVIKATPTTCDPQLVDHSVLLVGFGSVKSEEGIWAETVSSQSQPQPPHPTPYWILKNSWGAQWGEKGYFRLHRGSNTCGITKFPLTARVQKPDMKPRVSCPP

SEQ ID NO: 26903 - protein, 7 aa, Homo sapiens
VNSRPPA

SEQ ID NO: 26904 - protein, 8 aa, Homo sapiens
MGRMHAPG

SEQ ID NO: 26905 - protein, 5901 aa, Homo sapiens
KAFAPERNPAKMEKEETTRELLLPNWQGSGSHGLTIAQRDDGVFVQEVTQNSPAARTGVVKEGDQIVGATIYFDNLQSGEVTQLLNTMGHHTVGLKLHRKGDRSPEPGQTWTREVFSSCSSEVVLSGDDEEYQRIYTTKIKPRLKSEDGVEGDLGETQSRTITVTRRVTAYTVDVTGREGAKDIDISSPEFKIKIPRHELTEISNVDVETQSGKTVIRLPSGSGAASPTGSAVDIRAGAISASGPELQGAGHSKLQVTMPGIKVGGSGVNVNAKGLDLGGRGGVQVPAVDISSSLGGRAVEVQGPSLESGDHGKIKFPTMKVPKFGVSTGREGQTPKAGLRVSAPEVSVGHKGGKPGLTIQAPQLEVSVPSANIEGLEGKLKGPQITGPSLEGDLGLKGAKPQGHIGVDASAPQIGGSITGPSVEVQAPDIDVQGPGSKLNVPKMKVPKFSVSGAKGEETGIDVTLPTGEVTVPGVSGDVSLPEIATGGLEGKMKGTKVKTPEMIIQKPKISMQDVDLSLGSPKLKGDIKVSAPGVQGDVKGPQVALKGSRVDIETPNLEGTLTGPRLGSPSGKTGTCRISMSEVDLNVAAPKVKGGVDVTLPRVEGKVKVPEVDVRGPKVDVSAPDVEAHGPEWNLKMPKMKMPTFSTPGAKGEGPDVHMTLPKGDISISGPKVNVEAPDVNLEGLGGKLKGPDVKLPDMSVKTPKISMPDVDLHVKGTKVKGEYDVTVPKLEGELKGPKVDIDAPDVDVHGPDWHLKMPKMKMPKFSVPGFKAEGPEVDVNLPKADVDISGPKIDVTAPDVSIEEPEGKLKGPKFKMPEMNIKVPKISMPDVDLHLKGPNVKGEYDVTMPKVESEIKVPDVELKSAKMDIDVPDVEVQGPDWHLKMPKMKMPKFSMPGFKAEGPEVDVNLPKADVDISGPKVGVEVPDVNIEGPEGKLKGPKFKMPEMNIKAPKISMPDVDLHMKGPKVKGEYDMTVPKLEGDLKGPKVDVSAPDVEMQGPDWNLKMPKIKMPKFSMPSLKGEGPEFDVNLSKANVDISAPKVDTNAPDLSLEGPEGKLKGPKFKMPEMHFRAPKMSLPDVDLDLKGPKMKGNVDISAPKIEGEMQVPDVDIRGPKVDIKAPDVEGQGLDWSLKIPKMKMPKFSMPSLKGEGPEVDVNLPKADVVVSGPKVDIEAPDVSLEGPEGKLKGPKFKMPEMHFKTPKISMPDVDLHLKGPKVKGDVDVSVPKVEGEMKVPDVEIKGPKMDIDAPDVEVQGPDWHLKMPKMKMPKFSMPGFKGEGREVDVNLPKADIDVSGPKVDVEVPDVSLEGPEGKLKGPKFKMPEMHFKAPKISMPDVDLNLKGPKLKGDVDVSLPEVEGEMKVPDVDIKGPKVDISAPDVDVHGPDWHLKMPKVKMPKFSMPGFKGEGPEVDVKLPKADVDVSGPKMDAEVPDVNIEGPDAKLKGPKFKMPEMSIKPQKISIPDVGLHLKGPKMKGDYDVTVPKVEGEIKAPDVDIKGPKVDINAPDVEVHGPDWHLKMPKVKMPKFSMPGFKGEGPEVDMNLPKADLGVSGPKVDIDVPDVNLEAPEGKLKGPKFKMPSMNIQTHKISMPDVGLNLKAPKLKTDVDVSLPKVEGDLKGPEIDVKAPKMDVNVGDIDIEGPEGKLKGPKFKMPEMHFKAPKISMPDVDLHLKGPKVKGDMDVSVPKVEGEMKVPDVDIKGPKVDIDAPDVEVHDPDWHLKMPKMKMPKFSMPGFKAEGPEVDVNLPKADIDVSGPSVDTDAPDLDIEGPEGKLKGSKFKMPKLNIKAPKVSMPDVDLNLKGPKLKGEIDASVPELEGDLRGPQVDVKGPFVEAEVPDVDLECPDAKLKGPKFKMPEMHFKAPKISMPDVDLHLKGPKVKGDADVSVPKLEGDLTGPSVGVEVPDVELECPDAKLKGPKFKMPDMHFKAPKISMPDVDLHLKGPKVKGDVDVSVPKLEGDLTGPSVGVEVPDVELECPDAKLKGPKFKMPEMHFKTPKISMPDVDLHLKGPKVKGDMDVSVPKVEGEMKVPDVDIKGPKMDIDAPDVDVHGPDWHLKMPKMKMPKFSMPGFKAEGPEVDVNLPKADVVVSGPKVDVEVPDVSLEGPEGKLKGPKLKMPEMHFKAPKISMPDVDLHLKGPKVKGDVDVSLPKLEGDLTGPSVDVEVPDVELECPDAKLKGPKFKMPEMHFKTPKISMPDVNLNLKGPKVKGDMDVSVPKVEGEMKVPDVDIRGPKVDIDAPDVDVHGPDWHLKMPKMKMPKFSMPGFKGEGPEVDVNLPKADVDVSGPKVDVEVPDVSLEGPEGKLKGPKFKMPEMHFKTPKISMPDVDFNLKGPKIKGDVDVSAPKLEGELKGPELDVKGPKLDADMPEVAVEGPNGKWKTPKFKMPDMHFKAPKISMPDLDLHLKSPKAKGEVDVDVPKLEGDLKGPHVDVSGPDIDIEGPEGKLKGPKFKMPDMHFKAPNISMPDVDLNLKGPKIKGDVDVSVPEVEGKLEVPDMNIRGPKVDVNAPDVQAPDWHLKMPKMKMPKFSMPGFKAEGPEVDVNLPKADVDISGPKVDIEGPDVNIEGPEGKLKGPKLKMPEMNIKAPKISMPDFDLHLKGPKVKGDVDVSLPKVEGDLKGPEVDIKGPKVDINAPDVGVQGPDWHLKMPKVKMPKFSMPGFKGEGPDGDVKLPKADIDVSGPKVDIEGPDVNIEGPEGKLKGPKFKMPEMNIKAPKISMPDIDLNLKGPKVKGDVDVSLPKVEGDLKGPEVDIKGPKVDIDAPDVDVHGPDWHLKMPKIKMPKISMPGFKGEGPDVDVNLPKADIDVSGPKVDVECPDVNIEGPEGKWKSPKFKMPEMHFKTPKISMPDIDLNLTGPKIKGDVDVTGPKVEGDLKGPEVDLKGPKVDIDVPDVNVQGPDWHLKMPKMKMPKFSMPGFKAEGPEVDVNLPKADVDVSGPKVDVEGPDVNIEGPEGKLKGPKFKMPEMNIKAPKIPMPDFDLHLKGPKVKGDVDISLPKVEGDLKGPEVDIRGPQVDIDVPDVGVQGPDWHLKMPKVKMPKFSMPGFKGEGPDVDVNLPKADLDVSGPKVDIDVPDVNIEGPEGKLKGPKFKMPEMNIKAPKISMPDIDLNLKGPKVKGDMDVSLPKVEGDMKVPDVDIKGPKVDINAPDVDVQGPDWHLKMPKIKMPKISMPGFKGEGPEVDVNLPKADLDVSGPKVDVDVPDVNIEGPDAKLKGPKFKMPEMNIKAPKISMPDLDLNLKGPKMKGEVDVSLANVEGDLKGPALDIKGPKIDVDAPDIDIHGPDAKLKGPKLKMPDMHVNMPKISMPEIDLNLKGSKLKGDVDVSGPKLEGDIKAPSLDIKGPEVDVSGPKLNIEGKSKKSRFKLPKFNFSGSKVQTPEVDVKGKKPDIDITGPKVDINAPDVEVQGKVKGSKFKMPFLSISSPKVSMPDVELNLKSPKVKGDLDIAGPNLEGDFKGPKVDIKAPEVNLNAPDVDVHGPDWNLKMPKMKMPKFSVSGLKAEGPDVAVDLPKGDINIEGPSMNIEGPDLNVEGPEGGLKGPKFKMPDMNIKAPKISMPDIDLNLKGPKVKGDVDISLPKLEGDLKGPEVDIKGPKVDINAPDVDVHGPDWHLKMPKVKMPKFSMPGFKGEGPEVDVTLPKADIDISGPNVDVDVPDVNIEGPDAKLKGPKFKMPEMNIKAPKISMPDFDLNLKGPKMKGDVVVSLPKVEGDLKGPEVDIKGPKVDIDTPDINIEGSEGKFKGPKFKIPEMHLKAPKISMPDIDLNLKGPKVKGDVDVSLPKMEGDLKGPEVDIKGPKVDINAPDVDVQGPDWHLKMPKVKMPKFSMPGFKGEGPDVDVNLPKADLDVSGPKVDIDVPDVNIEGPEGKLKGPKFKMPEMNIKAPKISMPDIDLNLKGPKVKGDMDVSLPKVEGDMQVPDLDIKGPKVDINAPDVDVRGPDWHLKMPKIKMPKISMPGFKGEGPEVDVNLPKADLDVSGPKVDVDVPDVNIEGPDAKLKGPKFKMPEMNIKAPKISMPDFDLHLKGPKVKGDVDVSLPKMEGDLKAPEVDIKGPKVDIDAPDVDVHGPDWHLKMPKVKMPKFSMPGFKGEGPEVDVNLPKADIDVSGPKVDIDTPDIDIHGPEGKLKGPKFKMPDLHLKAPKISMPEVDLNLKGPKMKGDVDVSLPKVEGDLKGPEVDIKGPKVDIDVPDVDVQGPDWHLKMPKVKMPKFSMPGFKGEGPDVDVNLPKADLDVSGPKVDIDVPDVNIEGPDAKLKGPKFKMPEMNIKAPKISMPDFDLHLKGPKVKGDVDVSLPKVEGDLKGPEVDIKGPKVDIDAPDVDVHGPDWHLKMPKVKMPKFSMPGFKGEGPDVDVTLPKADIEISGPKVDIDAPDVSIEGPDAKLKGPKFKMPEMNIKAPKISMPDIDFNLKGPKVKGDVDVSLPKVEGDLKGPEIDIKGPSLDIDTPDVNIEGPEGKLKGPKFKMPEMNIKAPKISMPDFDLHLKGPKVKGDVDVSLPKVESDLKGPEVDIEGPEGKLKGPKFKMPDVHFKSPQISMSDIDLNLKGPKIKGDMDISVPKLEGDLKGPKVDVKGPKVGIDTPDIDIHGPEGKLKGPKFKMPDLHLKAPKISMPEVDLNLKGPKVKGDMDISLPKVEGDLKGPEVDIRDPKVDIDVPDVDVQGPDWHLKMPKVKMPKFSMPGFKGEGPDVDVNLPKADIDVSGPKVDVDVPDVNIEGPDAKLKGPKFKMPEMSIKAPKISMPDIDLNLKGPKVKGDVDVTLPKVEGDLKGPEADIKGPKVDINTPDVDVHGPDWHLKMPKVKMPKFSMPGFKGEGPDVDVSLPKADIDVSGPKVDVDIPDVNIEGPDAKLKGPKFKMPEINIKAPKISIPDVDLDLKGPKVKGDFDVSVPKVEGTLKGPEVDLKGPRLDFEGPDAKLSGPSLKMPSLEISAPKVTAPDVDLHLKAPKIGFSGPKLEGGEVDLKGPKVEAPSLDVHMDSPDINIEGPDVKIPKFKKPKFGFGAKSPKADIKSPSLDVTVPEAELNLETPEISVGGKGKKSKFKMPKIHMSGPKIKAKKQGFDLNVPGGEIDASLKAPDVDVNIAGPDAALKVDVKSPKTKKTMFGKMYFPDVEFDIKSPKFKAEAPLPSPKLEGELQAPDLELSLPAIHVEGLDIKAKAPKVKMPDVDISVPKIEGDLKGPKVQANLGAPDINIEGLDAKVKTPSFGISAPQVSIPDVNVNLKGPKIKGDVPSVGLEGPDVDLQGPEAKIKFPKFSMPKIGIPGVKMEGGGAEVHAQLPSLEGDLRGPDVKLEGPDVSLKGPGVDLPSVNLSMPKVSGPDLDLNLKGPSLKGDLDASVPSMKVHAPGLNLSGVGGKMQVGGDGVKVPGIDATTKLNVGAPDVTLRGPSLQGDLAVSGDIKCPKVSVGAPDLSLEASEGSIKLPKMKLPQFGISTPGSDLHVNAKGPQVSGELKGPGVDVNLKGPRISAPNVDFNLEGPKVKGSLGATGEIKGPTVGGGLPGIGVQGLEGNLQMPGIKSSGCDVNLPGVNVKLPTGQISGPEIKGGLKGSEVGFHGAAPDISVKGPAFNMASPESDFGINLKGPKIKGGADVSGGVSAPDISLGEGHLSVKGSGGEWKGPQVSSALNLDTSKFAGGLHFSGPKVEGGVKGGQIGLQAPGLSVSGPQGHLESGSGKVTFPKMKIPKFTFSGRELVGREMGVDVHFPKAEASIQAGAGDGEWEESEVKLKKSKIKMPKFNFSKPKGKGGVTGSPEASISGSKGDLKSSKASLGSLEGEAEAEASSPKGKFSLFKSKKPRHRSNSFSDEREFSGPSTPTGTLEFEGGEVSLEGGKVKGKHGKLKFGTFGGLGSKSKGHYEVTGSDDETGKLQGSGVSLASKKSRLSSSSSNDSGNKVGIQLPEVELSVSTKKE

SEQ ID NO: 26906 - protein, 466 aa, Homo sapiens
LPSLRLLHRRRPLQVLVMRECISIHVGQAGVQIGNACWELYCLEHGIQPDGQMPSDKTIGGGDDSFNTFFSETGAGKHVPRAVFVDLEPTVIDEVRTGTYRQLFHPEQLITGKEDAANNYARGHYTIGKEIIDLVLDRIRKLADQCTGLQGFLVFHSFGGGTGSGFTSLLMERLSVDYGKKSKLEFSIYPAPQVSTAVVEPYNSILTTHTTLEHSDCAFMVDNEAIYDICRRNLDIERPTYTNLNRLISQIVSSITASLRFDGALNVDLTEFQTNLVPYPRIHFPLATYAPVISAEKAYHEQLTVAEITNACFEPANQMVKCDPRHGKYMACCLLYRGDVVPKDVNAAIATIKTKRTIQFVDWCPTGFKVGINYQPPTVVPGGDLAKVQRAVCMLSNTTAVAEAWARLDHKFDLMYAKRAFVHWYVGEGMEEGEFSEAREDMAALEKDYEEVGADSADGEDEGEEY

SEQ ID NO: 26907 - protein, 75 aa, Homo sapiens
KVGVNGFGRIGRLVTRAAFNSGKVDIVAINDPFIDLNYMVYMFQYDSTHGKFHGTVKAENGKLVINGNPITIFQE

SEQ ID NO: 26908 - protein, 28 aa, Homo sapiens
ISAPSADAPMFVMGVNHEKYDNSLKIIR

SEQ ID NO: 26909 - protein, 12 aa, Homo sapiens
IRKLVCFFSRIK

SEQ ID NO: 26910 - protein, 469 aa, Homo sapiens
LGRNKNYLGSFIERDSLTLRASGCSWVQREPPALLLSRLPQPLASAWVRRGGIKPRSESGSFARGALGLCLPRGASGRHPALSRSSTPMIDTLRPVPFASEMAISKTVAWLNEQLELGNERLLLMDCRPQELYESSHIESAINVAIPGIMLRRLQKGNLPVRALFTRGEDRDRFTRRCGTDTVVLYDESSSDWNENTGGESVLGLLLKKLKDEGCRAFYLEGGFSKFQAEFSLHCETNLDGSCSSSSPPLPVLGLGGLRISSDSSSDIESDLDRDPNSATDSDGSPLSNSQPSFPVEILPFLYLGCAKDSTNLDVLEEFGIKYILNVTPNLPNLFENAGEFKYKQIPISDHWSQNLSQFFPEAISFIDEARGKNCGVLVHCLAGISRSVTVTVAYLMQKLNLSMNDAYDIVKMKKSNISPNFNFMGQLLDFERTLGLSSPCDNRVPAQQLYFTTPSNQNVYQVDSLQST

SEQ ID NO: 26911 - protein, 15 aa, Homo sapiens
VMDQLTPSRSVNWFI

SEQ ID NO: 26912 - protein, 32 aa, Homo sapiens
ITGVDIVMNHHLQETSFTKEAYKKYIKDYMKS

SEQ ID NO: 26913 - protein, 9 aa, Homo sapiens
LEKMKKQYL

SEQ ID NO: 26914 - protein, 8 aa, Homo sapiens
ITGRYHWL

SEQ ID NO: 26915 - protein, 31 aa, Homo sapiens
KSWSAWRSTTPSQTTDLSGSQPPKTPSGRKY

SEQ ID NO: 26916 - protein, 23 aa, Homo sapiens
VSGRGCSLCGGWRLMSAVDSRKY

SEQ ID NO: 26917 - protein, 19 aa, Homo sapiens
RQQKAQVKKQVSIPDQKFL

SEQ ID NO: 26918 - protein, 265 aa, Homo sapiens
LFLEGVNTNSSDLGSLPEKMQPFLLLLAFLLTPGAGTEEIIGGHEAKPHSRPYMAFVQFLQEKSRKRCGGILVRKDFVLTAAHCQGSSINVTLGAHNIKEQERTQQFIPVKRPIPHPAYNPKNFSNDIMLLQLERKAKWTTAVRPLRLPSSKAQVKPGQLCSVAGWGYVSMSTLATTLQEVLLTVQKDCQCERLFHGNYSRATEICVGDPKKTQTGFKGDSGGPLVCKDVAQGILSYGNKKGTPPGVYIKVSHFLPWIKRTMKRL

SEQ ID NO: 26919 - protein, 38 aa, Homo sapiens
IFGKVSILYSKNMNLKLNPLKAPYNEVDIGGNIYTQSA

SEQ ID NO: 26920 - protein, 182 aa, Homo sapiens
LLSTRQKMTDCEFGYIYRLAQDYLQCVLQIPQPGSGPSKTSRVLQNVAFSVQKEVEKNLKSCLDNVNVVSVDTARTLFNQVMEKEFEDGIINWGRIVTIFAFEGILIKKLLRQQIAPDVDTYKEISYFVAEFIMNNTGEWIRQNGGWENGFVKKFEPKSGWMTFLEVTGKICEMLSLLKQYC

SEQ ID NO: 26921 - protein, 1189 aa, Homo sapiens
LPFCLPVSAEILQRGTLGTMSLLNPVLLPPKVKAYLSQGERFIKWDDETTVASPVILRVDPKGYYLYWTYQSKEMEFLDITSIRDTRFGKFAKMPKSQKLRDVFNMDFPDNSFLLKTLTVVSGPDMVDLTFHNFVSYKENVGKAWAEDVLALVKHPLTANASRSTFLDKILVKLKMQLNSEGKIPVKNFFQMFPADRKRVEAALSACHLPKGKNDAINPEDFPEPVYKSFLMSLCPRPEIDEIFTSYHAKAKPYMTKEHLTKFINQKQRDSRLNSLLFPPARPDQVQGLIDKYEPSGINAQRGQLSPEGMVWFLCGPENSVLAQDKLLLHHDMTQPLNHYFINSSHNTYLTAGQFSGLSSAEMYRQVLLSGCRCVELDCWKGKPPDEEPIITHGFTMTTDIFFKEAIEAIAESAFKTSPYPIILSFENHVDSPRQQAKMAEYCRTIFGDMLLTEPLEKFPLKPGVPLPSPEDLRGKILIKNKKNQFSGPTSSSKDTGGEAEGSSPPSAPAGEGTVWAGEEGTELEEEEVEEEEEEESGNLDEEEIKKMQSDEGTAGLEVTAYEEMSSLVNYIQPTKFVSFEFSAQKNRSYVISSFTELKAYDLLSKASVQFVDYNKRQMSRIYPKGTRMDSSNYMPQMFWNAGCQMVALNFQTMDLPMQQNMAVFEFNGQSGYLLKHEFMRRPDKQFNPFSVDRIDVVVATTLSITVISGQFLSERSVRTYVEVELFGLPGDPKRRYRTKLSPSTNSINPVWKEEPFVFEKILMPELASLRVAVMEEGNKFLGHRIIPINALNSGYHHLCLHSESNMPLTMPALFIFLEMKDYIPGAWADLTVALANPIKFFSAHDTKSVKLKEAMGGLPEKPFPLASPVASQVNGALAPTSNGSPEPRTASLEELRELKGVVKLQRRHEKELRELERRGARRWEELLQRGAAQLAELGPPGVGGVGACKLGPGKGSRKKRSLPREESAGAAPGEGPEGVDGRVRELKDRLELELLRQGEEQYECVLKRKEQHVAEQISKMMELAREKQAAELKALKETSENDTKEMKKKLETKRLERIQGMTKVTTDKMAQERLKREINNSHIQEVVQVIKQMTENLERHQEKLEEKQAACLEQIREMEKQFQKEALAEYEARMKGLEAEVKESVRACLRTCFPSEAKDKPERACECPPELCEQDPLIAKADAQESRL

SEQ ID NO: 26922 - protein, 34 aa, Homo sapiens
IELPEVPSEPLPEKIPENVPVKARPRQAELVAAS

SEQ ID NO: 26923 - protein, 16 aa, Homo sapiens
VQRWGARAAFPSRVPD

SEQ ID NO: 26924 - protein, 54 aa, Homo sapiens
LWCCWPLIAGRIPRCSFRSGSFVRIGRLASVTVANGRLSTCLHWAICISWDRCY

SEQ ID NO: 26925 - protein, 18 aa, Homo sapiens
LQLSEVLQLEAEVPGLCS

SEQ ID NO: 26926 - protein, 76 aa, Homo sapiens
RCSSWRLRFPGSVAEWAAAPAEMPGKKARKNAQPSPARAPAELEVECATQLRRFGDKLNFRQKLLNLISKLFCSGT

SEQ ID NO: 26927 - protein, 38 aa, Homo sapiens
VTSRARSRILRAGGKILTFDQLALDSPKGCGTVLLSGE

SEQ ID NO: 26928 - protein, 17 aa, Homo sapiens
VYRHFGKAPGTPHSHTK

SEQ ID NO: 26929 - protein, 506 aa, Homo sapiens
TWLRHRRREAADPGRVRHPRRPGAMAALMTPGTGAPPAPGDFSGEGSQGLPDPSPEPKQLPELIRMKRDGGRLSEADIRGFVAAVVNGSAQGAQIGAMLMAIRLRGMDLEETSVLTQALAQSGQQLEWPEAWRQQLVDKHSTGGVGDKVSLVLAPALAACGCKVPMISGRGLGHTGGTLDKLESIPGFNVIQSPEQMQVLLDQAGCCIVGQSEQLVPADGILYAARDVTATVDSLPLITASILSKKLVEGLSALVVDVKFGGAAVFPNQEQARELAKTLVGVGASLGLRVAAALTAMDKPLGRCVGHALEVEEALLCMDGAGPPDLRDLVTTLGGALLWLSGHAGTQAQGAARVAAALDDGSALGRFERMLAAQGVDPGLARALCSGSPAERRQLLPRAREQEELLAPADGTVELVRALPLALVLHELGAGRSRAGEPLRLGVGAELLVDVGQRLRRGTPWLRVHRDGPALSGPQSRALQEALVLSDRAPFAAPSPFAELVLPPQQ

SEQ ID NO: 26930 - protein, 60 aa, Homo sapiens
VMNSLRVILQASPGKLLWRKFQIPRFMPARPCSLYTCTYKTRNRACEYTTSLKRTKRAPA

SEQ ID NO: 26931 - protein, 53 aa, Homo sapiens
KMVLESTPFTTAWLQKCRKSTGLRKDTALLVLPCTILPMTRGLASYCILRTSS

SEQ ID NO: 26932 - protein, 34 aa, Homo sapiens
MIMINEDTALLVLPCTILPMTRGLASYCILRTSS

SEQ ID NO: 26933 - protein, 47 aa, Homo sapiens
MRVLYYRDARSYNRFQIATVTEKGVEIEGPLSTETNWDIAHMISGFE

SEQ ID NO: 26934 - protein, 16 aa, Homo sapiens
KYHRTDGLGNPLLLNW

SEQ ID NO: 26935 - protein, 6 aa, Homo sapiens
LKRRAD

SEQ ID NO: 26936 - protein, 75 aa, Homo sapiens
RLLSSDPGNLSNLCRLLASSIQNPLSSLPPLTPSAVLPSHENKVSSKILAAAASSLVDLRGGCQWHAGVSCVVLQ

SEQ ID NO: 26937 - protein, 53 aa, Homo sapiens
ILGAPSRRLGERRLRWQRQESPAATGRTPPLERILKEMKSALRNEVDCLLAFC

SEQ ID NO: 26938 - protein, 232 aa, Homo sapiens
KNENKLPTGGCYGVPPDLRTELSKRIAPCYQDYVKKFGENFASCQAGISSFYTKDLIVMGAPGSSYWTGSLFVYNITTNKYKAFLDKQNQVKFGSYLGYSVGAGHFRSQHTTEVVGGAPQHEQIGKAYIFSIDEKELNILHEMKGKKLGSYFGASVCAVDLNADGFSDLLVGAPMQSTIREEGRVFVYINSGSGAVMNAMETNLVGSDKYAARFGESIVNLGDIDNDGFEGN

SEQ ID NO: 26939 - protein, 16 aa, Homo sapiens
LISVVTTASAGGEDER

SEQ ID NO: 26940 - protein, 12 aa, Homo sapiens
MSKTALQFRTEI

SEQ ID NO: 26941 - protein, 13 aa, Homo sapiens
TALCCCCLWDMLT

SEQ ID NO: 26942 - protein, 35 aa, Homo sapiens
VAFSSDNRQIVSGSRDKTIKLWNTLGVCKYTVQVK

SEQ ID NO: 26943 - protein, 105 aa, Homo sapiens
LVMSGRGKGGKGLGKGGAKRHRKVLRDNIQGITKPAIRRLARRGGVKRISGLIYEETRGVLKVFLENVIRDAVTYTEHAKRKTVTAMDVVYALKRQGRTLYGFGG

SEQ ID NO: 26944 - protein, 18 aa, Homo sapiens
KREVLEALGEVMVSRPRE

SEQ ID NO: 26945 - protein, 16 aa, Homo sapiens
VSSEFLALSMRRLVVF

SEQ ID NO: 26946 - protein, 37 aa, Homo sapiens
IRDAVTYTEHAKRKTVTAMDVVYALKRQGRTLYGFGG

SEQ ID NO: 26947 - protein, 11 aa, Homo sapiens
LFLPFFTAHRM

SEQ ID NO: 26948 - protein, 28 aa, Homo sapiens
LAATGSRGGLGRPLPHQSPDPWGFRGRS

SEQ ID NO: 26949 - protein, 15 aa, Homo sapiens
IEEIPDETMVIGQAG

SEQ ID NO: 26950 - protein, 63 aa, Homo sapiens
VDFAERHGYIKGIVKDIIHDPGRGAPLAKVVFRDPYRFKKRTELFIAAEGIHTGQFVYCGKKG

SEQ ID NO: 26951 - protein, 20 aa, Homo sapiens
KHLCTAMCVGICEKKRICEV

SEQ ID NO: 26952 - protein, 33 aa, Homo sapiens
RLNFVNKLASARNITIKIQFMCGEDASNAMPVS

SEQ ID NO: 26953 - protein, 144 aa, Homo sapiens
LALRCGSRWLGLLSVPRSVPLRLPAARACSKGSGDPSSSSSSGNPLVYLDVDANGKPLGRVVLELKADVVPKTAENFRALCTGEKGFGYKGSTFHRVIPSFMCQAGDFTNHNGTGGKSIYGSRFPDENFTLKHVGPGEWGPPLG

SEQ ID NO: 26954 - protein, 15 aa, Homo sapiens
KVYHNEFDFEFDLWK

SEQ ID NO: 26955 - protein, 21 aa, Homo sapiens
RSQCDLVKEARKKEGALTIWW

SEQ ID NO: 26956 - protein, 207 aa, Homo sapiens
RRSCRPGRKMSNVRVSNGSPSLERMDARQAEHPKPSACRNLFGPVDHEELTRDLEKHCRDMEEASQRKWNFDFQNHKPLEGKYEWQEVEKGSLPEFYYRPPRPPKGACKVPAQESQDVSGSRPAAPLIGAPANSEDTHLVDPKTDPSDSQTGLAEQCAGIRKRPATDDSSTQNKRANRTEENVSDGSPNAGSVEQTPKKPGLRRRQT

SEQ ID NO: 26957 - protein, 137 aa, Homo sapiens
RVSGEGGRPRAGISEALRCIMKFQYKEDHPFEYRKKEGEKIRKKYPDRVPVIVEKAPKARVPDLDKRKYLVPSDLTVGQFYFLIRKRIHLRPEDALFFFVNNTIPPTSATMGQLYEDNHEEDYFLYVAYSDESVYGK

SEQ ID NO: 26958 - protein, 12 aa, Homo sapiens
MIIYRDLISHGQ

SEQ ID NO: 26959 - protein, 7 aa, Homo sapiens
LEPLPSP

SEQ ID NO: 26960 - protein, 7 aa, Homo sapiens
LRQRNTN

SEQ ID NO: 26961 - protein, 20 aa, Homo sapiens
INDAWVCTNDMFRLALHNFG

SEQ ID NO: 26962 - protein, 38 aa, Homo sapiens
IQKETYHSKDLRSCMPGNGMKTKCISHNKYYSNVEVII

SEQ ID NO: 26963 - protein, 25 aa, Homo sapiens
TECVSPSGSPTWIRITCLKPSPKPC

SEQ ID NO: 26964 - protein, 16 aa, Homo sapiens
LSHAFLYTSFPANRNH

SEQ ID NO: 26965 - protein, 27 aa, Homo sapiens
MSSFASTRTARTEPPCSEPSAFWALRL

SEQ ID NO: 26966 - protein, 146 aa, Homo sapiens
KETTMSLLPVPYTEAASLSTGSTVTIKGRPLACFLNEPYLQVDFHTEMKEESDIVFHFQVCFGRRVVMNSREYGAWKQQVESKNMPFQDGQEFELSISVLPDKYQVMVNGQSSYTFDHRIKPEAVKMVQVWRDISLTKFNVSYLKR

SEQ ID NO: 26967 - protein, 15 aa, Homo sapiens
IPCIIWISTSEKRSG

SEQ ID NO: 26968 - protein, 37 aa, Homo sapiens
LALPTQQRRPPARNGLPGASSSSFPKLNCPVSDSDFS

SEQ ID NO: 26969 - protein, 185 aa, Homo sapiens
LGSFCSLRPAPSLRAGLQRRAQPSAACQQPPSRPAAQPRTKPGQSFLAARAMNTEMYQTPMEVAVYQLHNFSISFFSSLLGGDVVSVKLDNSASGASVVAIDNKIEQAMDLVKNHLMYAVREEVEILKEQIRELVEKNSQLERENTLLKTLASPEQLEKFQSCLSPEEPAPESPQVPEAPGGSAV

SEQ ID NO: 26970 - protein, 23 aa, Homo sapiens
LASTSPRAPSRCTWISHRVTPAK

SEQ ID NO: 26971 - protein, 40 aa, Homo sapiens
TYSKIPAHRKGHRPAKPQRQDLDDDEHDYEEILEQFQKTI

SEQ ID NO: 26972 - protein, 144 aa, Homo sapiens
LRGSERCLCLTLISVMSGRGKQGGKARAKAKSRSSRAGLQFPVGRVHRLLRKGNYAERVGAGAPVYMAAVLEYLTAEILELAGNAARDNKKTRIIPRHLQLAIRNDEELNKLLGKVTIAQGGVLPNIQAVLLPKKTESHKAKSK

SEQ ID NO: 26973 - protein, 15 aa, Homo sapiens
TVPRRDVLMGPRPMD

SEQ ID NO: 26974 - protein, 39 aa, Homo sapiens
LQGWISANGNILCFVKSLRKCGNRRGSGYFSSGKSSTQS

SEQ ID NO: 26975 - protein, 7 aa, Homo sapiens
LRRPSSL

SEQ ID NO: 26976 - protein, 24 aa, Homo sapiens
IPGVYQSETPESLCTSFTLLREYL

SEQ ID NO: 26977 - protein, 34 aa, Homo sapiens
VSDRDFSKPGSARESTSKSAGGILINPALPGASW

SEQ ID NO: 26978 - protein, 389 aa, Homo sapiens
VRRAQRGRQPAGACALRETFPVKGSGGRGCPPLATALLRPRNLCAQPKLTSREVTDCSMTAKMETTFYDDALNASFLPSESGPYGYSNPKILKQSMTLNLADPVGSLKPHLRAKNSDLLTSPDVGLLKLASPELERLIIQSSNGHITTTPTPTQFLCPKNVTDEQEGFAEGFVRALAELHSQNTLPSVTSAAQPVNGAGMVAPAVASVAGGSGSGGFSASLHSEPPVYANLSNFNPGALSSGGGAPSYGAAGLAFPAQPQQQQQPPHHLPQQMPVQHPRLQALKEEPQTVPEMPGETPPLSPIDMESQERIKAERKRMRNRIAASKCRKRKLERIARLEEKVKTLKAQNSELASTANMLREQVAQLKQKVMNHVNSGCQLMLTQQLQTF

SEQ ID NO: 26979 - protein, 8 aa, Homo sapiens
KRSLPMNF

SEQ ID NO: 26980 - protein, 37 aa, Homo sapiens
RDIVEAHYRACLYAGVKIAGTNAEVMPAQVSIAPIHQ

SEQ ID NO: 26981 - protein, 27 aa, Homo sapiens
RKKRRRRTWQPLDSTLSMVEDFYYLPS

SEQ ID NO: 26982 - protein, 19 aa, Homo sapiens
LESSRSWKSLRRHLQLKRR

SEQ ID NO: 26983 - protein, 23 aa, Homo sapiens
KLTACWLSVDWPGAVLQDPCELP

SEQ ID NO: 26984 - protein, 24 aa, Homo sapiens
VKTAKTIPSTVVNSIAARLLLQII

SEQ ID NO: 26985 - protein, 6 aa, Homo sapiens
MCTRTC

SEQ ID NO: 26986 - protein, 22 aa, Homo sapiens
RGSVYTLQITTPRKWAQGTMTP

SEQ ID NO: 26987 - protein, 14 aa, Homo sapiens
ITTPRKWAQGTMTP

SEQ ID NO: 26988 - protein, 32 aa, Homo sapiens
MRDPIRILVKKEELTLEGIKQFYINVEREVTV

SEQ ID NO: 26989 - protein, 156 aa, Homo sapiens
RVELCSFSGYKIYPGHGRRYARTDGKVFQFLNAKCESAFLSKRNPRQINWTVLYRRKHKKGQSEEIQKKRTRRAVKFQRAITGASLADIMAKRNQKPEVRKAQREQAIRAAKEAKKAKQASKKTAMAAAKAPTKAAPKQKIVKPVKVSAPRVGGKR

SEQ ID NO: 26990 - protein, 54 aa, Homo sapiens
KGWKVTRKDGNASGTTLLEALDCILPPTRPTDKPLCLPLQDVYKIGGIGTVPVG

SEQ ID NO: 26991 - protein, 6 aa, Homo sapiens
IMELIR

SEQ ID NO: 26992 - protein, 28 aa, Homo sapiens
ISCSEPCLLIVSVAHFVSRALGVKLQLI

SEQ ID NO: 26993 - protein, 10 aa, Homo sapiens
IFDSFPPRLN

SEQ ID NO: 26994 - protein, 38 aa, Homo sapiens
VSRGLRSVVDSAGLRQMQAWGSLLSGLRREEWRSPSSH

SEQ ID NO: 26995 - protein, 57 aa, Homo sapiens
KGGGNIHLFMPVCCMQAFWLPTLQQNNCTNSLVPIPPTESPGATVFFALHCRRGTKC

SEQ ID NO: 26996 - protein, 59 aa, Homo sapiens
KRISGLIYEETRGVLKVFLENVIRDAVTYTEHAKRKTVTAMDVVYALKRQGRTLYGFGG

SEQ ID NO: 26997 - protein, 304 aa, Homo sapiens
TPGRSPLCAAEPVLDATSPPSVFGAEIAKTEGLEMADHMMAMNHGRFPDGTNGLHHHPAHRMGMGQFPSPHHHQQQQPQHAFNALMGEHIHYGAGNMNATSGIRHAMGPGTVNGGHPPSALAPAARFNNSQFMGPPVASQGGSLPASMQLQKLNNQYFNHHPYPHNHYMPDLHPAAGHQMNGTNQHFRDCNPKHSGGSSTPGGSGGSSTPGGSGSSSGGGAGSSNSGGGSGSGNMPASVAHVPAAMLPPNVIDTDFIDEEVLMSLVIEMGLDRIKELPELWLGQNEFDFMTDFVCKQQPSRVSC

SEQ ID NO: 26998 - protein, 232 aa, Homo sapiens
ITYCLFWEDKNMSETAPLAPTIPAPAEKTPVKKKAKKAGATAGKRKASGPPVSELITKAVAASKERSGVSLAALKKALAAAGYDVEKNNSRIKLGLKSLVSKGTLVQTKGTGASGSFKLNKKAASGEGKPKAKKAGAAKPRKPAGAAKKPKKVAGAATPKKSIKKTPKKVKKPATAAGTKKVAKSAKKVKTPQPKKAAKSPAKAKAPKPKAAKPKSGKPKVTKAKKAAPKKK

SEQ ID NO: 26999 - protein, 18 aa, Homo sapiens
VEHMANDNGLTDQKQERT

SEQ ID NO: 27000 - protein, 342 aa, Homo sapiens
KTHINIVVIGHVDSGKSTTTGHLIYKCGGIDKRTIEKFEKEAAEMGKGSFKYAWVLDKLKAERERGITIDISLWKFETSKYYVTIIDAPGHRDFIKNMITGTSQADCAVLIVAAGVGEFEAGISKNGQTREHALLAYTLGVKQLIVGVNKMDSTEPPYSQKRYEEIVKEVSTYIKKIGYNPDTVAFVPISGWNGDNMLEPSANMPWFKGWKVTRKDGNASGTTLLEALDCILPPTRPTDKPLRLPLQDVYKIGGIGTVPVGRVETGVLKPGMVVTFAPVNVTTEVKSVEMHHEALSEALPGDNVGFNVKNVSVKDVRRGNVAGDSKNDPPMEAAGFTAQVTI

SEQ ID NO: 27001 - protein, 38 aa, Homo sapiens
TREETRDTHSLAATGSRGGLGRPLPHQSPDPWGFRGRS

SEQ ID NO: 27002 - protein, 12 aa, Homo sapiens
VGICEKKRICEV

SEQ ID NO: 27003 - protein, 59 aa, Homo sapiens
LLARAEKKAAGKGDVPTKRPPVLRAGVNTVTTLVENKKAQLVVIAHDVDPIEVRLPVDC

SEQ ID NO: 27004 - protein, 16 aa, Homo sapiens
LPYPVFGFLSSPSSLC

SEQ ID NO: 27005 - protein, 9 aa, Homo sapiens
VVLFSSLAV

SEQ ID NO: 27006 - protein, 53 aa, Homo sapiens
INTNHLDKQQVQLLAEMCILIDENDNKIGAETKKNCHLNENIEKGAALKQSFL

SEQ ID NO: 27007 - protein, 442 aa, Homo sapiens
RKVKYEETVFYGLQYILNKYLKGKVVTKEKIQEAKDVYKEHFQDDVVNEKGWNYILEKYDGHLPIEIKAVPEGFVIPRGNVLFTVENTDPECYWLTNWIETILVQSWYPITVATNSREQKKILAKYLLETSGNLDGLEYKLHDFGYRGVSSQETAGIGASAHLVNFKGTDTVAGLALNKKYYGTKDPVPGYSVPAAEHSTITAWGKDHEKDAFEHIVTQFSSVPVSVVSNSYDIYNACEKIWGEDLRHLIVSRSTQAPLIIRPDSGNPLDTVLKVLEILGKKFPVTENSKGYKLLPPYLRVIQGDGVDINTLQEIVEGMKQKMWSIENIAFGSGGGLLQKLTRDLLNCSFKCSYVVTNGLGINVFKDPVADPNKRSKKGRLSLHRTPAGNFVTLEEGKGDLEEYGQDLLHTVFKNGKVTKSYSFDEIRKNAQLNIELEAAHH

SEQ ID NO: 27008 - protein, 109 aa, Homo sapiens
IKILQKSRPPQVEPRPRCAPRAAGGWCCRCCSWPRQPWPKATPRGSRRARPPAISWRTSNGCRPSRSTAARSSTGTASETKWRMTISRAGRTISKEMKPWIPPRTPARR

SEQ ID NO: 27009 - protein, 30 aa, Homo sapiens
IPQVSSVLQPKCWIPRDWKGKSLKITSSGV

SEQ ID NO: 27010 - protein, 10 aa, Homo sapiens
KEQNRHSSWS

SEQ ID NO: 27011 - protein, 6 aa, Homo sapiens
VTAPCP

SEQ ID NO: 27012 - protein, 18 aa, Homo sapiens
TWLARPGAQPHVESSPLL

SEQ ID NO: 27013 - protein, 159 aa, Homo sapiens
LGIPSITHSVFPFQSYYFDRDDVALKNFAKYFLHQSHEEREHAEKLMKLQNQRGGRIFLQDIKKPDCDDWESGLNAMECALHLEKNVNQSLLELHKLATDKNDPHLCDFIETHYLNEQVKAIKELGDHVTNLRKMGAPESGLAEYLFDKHTLGDSDNES

SEQ ID NO: 27014 - protein, 20 aa, Homo sapiens
LLFLPRKMGWVPVQLLLHFQ

SEQ ID NO: 27015 - protein, 25 aa, Homo sapiens
TSALSALVYKLKWRKFRWPTWILTS

SEQ ID NO: 27016 - protein, 34 aa, Homo sapiens
INCTSVCAKSTRHWRNSRNNTWYRHMDLSGKRSR

SEQ ID NO: 27017 - protein, 16 aa, Homo sapiens
MLWYLRRTLSHHCHRL

SEQ ID NO: 27018 - protein, 24 aa, Homo sapiens
IVSGRGCSLCGGWRLMSAVDSRKY

SEQ ID NO: 27019 - protein, 65 aa, Homo sapiens
VIPLGLTQLGSEKQRPEGSSEPGSLLCRETQGLGRRMESEMLKVYVSFAPSASEPLPLGSTEHRD

SEQ ID NO: 27020 - protein, 126 aa, Homo sapiens
KVSNKALPAPIEKTISKTKGQPREPQVYTLPPSREEMTKNQVSLTCLVKGFYPSDIAVEWESSGQPENNYNTTPPMLDSDGSFFLYSKLTVDKSRWQQGNIFSCSVMHEALHNRFTQKSLSLSPGK

SEQ ID NO: 27021 - protein, 31 aa, Homo sapiens
LHAPWLRISSSLQRSPSRSAPEDLSSHVEAP

SEQ ID NO: 27022 - protein, 38 aa, Homo sapiens
LVSTCHHGCGFFGVSDYLLSRSICSVRRFLFCYVFVLG

SEQ ID NO: 27023 - protein, 123 aa, Homo sapiens
LLLGPHRIPGIRRCPIDGQLSPEGQRERDRLLHGTKNVTNSSSLRLPRQNSDGGQKNKPREHIIDCGDIVWSLAFGSSVPEKQSRCVNIEWHRFRFGQDQLLLATGLNNGRIKIWDVYTGMDS

SEQ ID NO: 27024 - protein, 12 aa, Homo sapiens
LLAVSVSRVIRG

SEQ ID NO: 27025 - protein, 26 aa, Homo sapiens
RSSNRRLAVSSLKPSNTVMFQPSPEP

SEQ ID NO: 27026 - protein, 52 aa, Homo sapiens
RVSCGGSSPPAPLCSPHLNTEHRYHLGFGKTWRLTTLEAPSVPQPLFGEEAS

SEQ ID NO: 27027 - protein, 36 aa, Homo sapiens
LQAPLGSSLPWLFLPLPLYRRLSVGALGFIKLGSEC

SEQ ID NO: 27028 - protein, 55 aa, Homo sapiens
RGLSPKDGDFDSGPAPRDAVAAAVRRPRSSCSRRRADPRWLRAPWSPTASFPPPG

SEQ ID NO: 27029 - protein, 68 aa, Homo sapiens
KGLDVDSLVIEHIQVNKAPKMRRRTYRAHGRINPYMSSPCHIEMILTEKEQIVPKPEEEVAQKKKVNK

SEQ ID NO: 27030 - protein, 17 aa, Homo sapiens
KRWTSRTRPRGSSAAAS

SEQ ID NO: 27031 - protein, 23 aa, Homo sapiens
LKTGCMTGGQNKEVWFNFYLYTQ

SEQ ID NO: 27032 - protein, 216 aa, Homo sapiens
VDDMVLLPQITEDAIAANLRKRFMDDYIFTYIGSVLISVNPFKQMPYFTDREIDLYQGAAQYENPPHIYALTDNMYRNMLIDCENQCVIISGESGAGKTVAAKYIMGYISKVSGGGEKVQHVKDIILQSNPLLEAFGNAKTVRNNNSSRFGKYFEIQFSRGGEPDGGKISNFLLEKSRVVMQNENERNFHIYYQVQGRGRGRGSTTWSPAGWTMGR

SEQ ID NO: 27033 - protein, 16 aa, Homo sapiens
MLFWMFPKSTAAALPP

SEQ ID NO: 27034 - protein, 46 aa, Homo sapiens
LENVYESIRELGDPAGRSSTCGAGTPPASSCPSLGRGWRPLPASLP

SEQ ID NO: 27035 - protein, 16 aa, Homo sapiens
LALDLRRESLTRDETQ

SEQ ID NO: 27036 - protein, 47 aa, Homo sapiens
LIFPTLSVRSPPPLDARAPGLVGCAAPRTASHQPAPSLSCSTLICTP

SEQ ID NO: 27037 - protein, 140 aa, Homo sapiens
KNLLCGFYGRHAELRFLDLVPSLQLDPAQIYRVTWFISWSPCFSWGCAGEVRAFLQENTHVRLRIFAARIYDYDPLYKEALQMLRDAGAQVSIMTYDEFEYCWDTFVYRQGCPFQPWDGLEEHSQALSGRLRAILQNQGN

SEQ ID NO: 27038 - protein, 86 aa, Homo sapiens
LPRKTHRGLRKVACIGAWHPARVAFSVARAGQKGYHHRTEINKKIYKIGQGYLIKDGKLIKNNASTDYDLSDKSINPLVSNGCSAL

SEQ ID NO: 27039 - protein, 7 aa, Homo sapiens
MIVVRYS

SEQ ID NO: 27040 - protein, 12 aa, Homo sapiens
KMAASMESSTAV

SEQ ID NO: 27041 - protein, 21 aa, Homo sapiens
VSSHTGPLQEAPCAQLGHSPS

SEQ ID NO: 27042 - protein, 11 aa, Homo sapiens
MRWRPRPGTPG

SEQ ID NO: 27043 - protein, 7 aa, Homo sapiens
LFKMEKY

SEQ ID NO: 27044 - protein, 85 aa, Homo sapiens
RGQVVGVRAAKTRRRPATAGSALIRSAGRAAALGSEFACGLRGTAAHEERSVSDRDFSKPGSARESTSKSAGGILINPALPGASW

SEQ ID NO: 27045 - protein, 23 aa, Homo sapiens
IKWMIKIRKRYLKRRGQATSHIS

SEQ ID NO: 27046 - protein, 47 aa, Homo sapiens
KGVQGRLGVATAGIAGPLNRRAFPPLSHSSFLSSIACEKIISEHFYF

SEQ ID NO: 27047 - protein, 57 aa, Homo sapiens
LSLPRSGPEDPLALAFKPTPFPSSLSVIISTAHPSPEHTNHLMQAPPANSNKAMSLF

SEQ ID NO: 27048 - protein, 27 aa, Homo sapiens
IYHLQPSGRFVIGGPQVMSFCCIFLDF

SEQ ID NO: 27049 - protein, 51 aa, Homo sapiens
TPPSPSQVSEPPRNSGGESATGSLFSGSFSKRKKQKFLPADSFSFRLFGPV

SEQ ID NO: 27050 - protein, 33 aa, Homo sapiens
LEQNLITVDMQKHSLTFWWLVECWPQVVHWQMT

SEQ ID NO: 27051 - protein, 102 aa, Homo sapiens
MAEVPELASEMMAYYSGNEDDLFFEADGPKQMKCSFQDLDLCPLDGGIQLRISDHHYSKGFRQAASVVVAMDKLRKMLVPCPQTFQENDLSTFFPFIFEEGS

SEQ ID NO: 27052 - protein, 420 aa, Homo sapiens
RFIEVKMSKKISGGSVVEMQGDEMTRIIWELIKEKLIFPYVELDLHSYDLGIENRDATNDQVTKDAAEAIKKHNVGVKCATITPDEKRVEEFKLKQMWKSPNGTIRNILGGTVFREAIICKNIPRLVSGWVKPIIIGRHAYGDQYRATDFVVPGPGKVEITYTPSDGTQKVTYLVHNFEEGGGVAMGMYNQDKSIEDFAHSSFQMALSKGWPLYLSTKNTILKKYDGRFKDIFQEIYDKQYKSQFEAQKIWYEHRLIDDMVAQAMKSEGGFIWACKNYDGDVQSDSVAQGYGSLGMMTSVLVCPDGKTVEAEAAHGTVTRHYRMYQKGQETSTNPIASIFAWTRGLAHRAKLDNNKELAFFANALEEVSIETIEAGFMTKDLAACIKGLPNVQRSDYLNTFEFMDKLGENLKIKLAQAKL

SEQ ID NO: 27053 - protein, 15 aa, Homo sapiens
VAAETDERRLLAAGP

SEQ ID NO: 27054 - protein, 15 aa, Homo sapiens
TTLKMNFLYSPDILI

SEQ ID NO: 27055 - protein, 20 aa, Homo sapiens
IGSEIYEPPSCPLGSQYVYT

SEQ ID NO: 27056 - protein, 9 aa, Homo sapiens
MLHLALMST

SEQ ID NO: 27057 - protein, 9 aa, Homo sapiens
LKYDECTKS

SEQ ID NO: 27058 - protein, 24 aa, Homo sapiens
IKEARNSVCIIPLRRVPVPPAAGS

SEQ ID NO: 27059 - protein, 13 aa, Homo sapiens
LLPCPWSSRRPCQ

SEQ ID NO: 27060 - protein, 21 aa, Homo sapiens
LRAETWPTSRCSESSGSSRRC

SEQ ID NO: 27061 - protein, 98 aa, Homo sapiens
ISAIRDLTTGYDDSQPDKKAVLPTSKSSQMITFTFANGGVATMRTSGTEPKIKYYAELCAPPGNSDPEQLKKELNELVSAIEEHFFQPQKYNLQPKAD

SEQ ID NO: 27062 - protein, 28 aa, Homo sapiens
IHQGLFGACASADLLRFCKRRLCLAELV

SEQ ID NO: 27063 - protein, 25 aa, Homo sapiens
RMFQFLHLTDMKSILRGAASGSGSN

SEQ ID NO: 27064 - protein, 11 aa, Homo sapiens
RSSRCRPGLGP

SEQ ID NO: 27065 - protein, 9 aa, Homo sapiens
LDLSFSAHG

SEQ ID NO: 27066 - protein, 7 aa, Homo sapiens
LETRRKI

SEQ ID NO: 27067 - protein, 51 aa, Homo sapiens
LPLAARSAGPSLLVIIQSSQCPGGRRCPTPACIHPSRVPGVTGPRRQPWFC

SEQ ID NO: 27068 - protein, 11 aa, Homo sapiens
RKDLLRSPYLS

SEQ ID NO: 27069 - protein, 732 aa, Homo sapiens
TYNPFLFKMPEEVHHGEEEVETFAFQAEIAQLMSLIINTFYSNKEIFLRELISNASDALDKIRYESLTDPSKLDSGKELKIDIIPNPQERTLTLVDTGIGMTKADLINNLGTIAKSGTKAFMEALQAGADISMIGQFGVGFYSAYLVAEKVVVITKHNDDEQYAWESSAGGSFTVRADHGEPIGRGTKVILHLKEDQTEYLEERRVKEVVKKHSQFIGYPITLYLEKEREKEISDDEAEEEKGEKEEEDKDDEEKPKIEDVGSDEEDDSGKDKKKKTKKIKEKYIDQEELNKTKPIWTRNPDDITQEEYGEFYKSLTNDWEDHLAVKHFSVEGQLEFRALLFIPRRAPFDLFENKKKKNNIKLYVRRVFIMDSCDELIPEYLNFIRGVVDSEDLPLNISREMLQQSKILKVIRKNIVKKCLELFSELAEDKENYKKFYEAFSKNLKLGIHEDSTNRRRLSELLRYHTSQSGDEMTSLSEYVSRMKETQKSIYYITGESKEQVANSAFVERVRKRGFEVVYMTEPIDEYCVQQLKEFDGKSLVSVTKEGLELPEDEEEKKKMEESKAKFENLCKLMKEILDKKVEKVTISNRLVSSPCCIVTSTYGWTANMERIMKAQALRDNSTMGYMMAKKHLEINPDHPIVETLRQKAEADKNDKAVKDLVVLLFETALLSSGFSLEDPQTHSNRIYRMIKLGLGIDEDEVAAEEPNAAVPDEIPPLEGDEDASRMEEVD

SEQ ID NO: 27070 - protein, 795 aa, Homo sapiens
VLESTMAEQVLPQALYLSNMRKAVKIRERTPEDIFKPTNGIIHHFKTMHRYTLEMFRTCQFCPQFREIIHKALIDRNIQATLESQKKLNWCREVRKLVALKTNGDGNCLMHATSQYMWGVQDTDLVLRKALFSTLKETDTRNFKFRWQLESLKSQEFVETGLCYDTRNWNDEWDNLIKMASTDTPMARSGLQYNSLEEIHIFVLCNILRRPIIVISDKMLRSLESGSNFAPLKVGGIYLPLHWPAQECYRYPIVLGYDSHHFVPLVTLKDSGPEIRAVPLVNRDRGRFEDLKVHFLTDPENEMKEKLLKEYLMVIEIPVQGWDHGTTHLINAAKLDEANLPKEINLVDDYFELVQHEYKKWQENSEQGRREGHAQNPMEPSVPQLSLMDVKCETPNCPFFMSVNTQPLCHECSERRQKNQNKLPKLNSKPGPEGLPGMALGASRGEAYEPLAWNPEESTGGPHSAPPTAPSPFLFSETTAMKCRSPGCPFTLNVQHNGFCERCHNARQLHASHAPDHTRHLDPGKCQACLQDVTRTFNGICSTCFKRTTAEASSSLSTSLPPSCHQRSKSDPSRLVRSPSPHSCHRAGNDAPAGCLSQAARTPGDRTGTSKCRKAGCVYFGTPENKGFCTLCFIEYRENKHFAAASGKVSPTASRFQNTIPCLGRECGTLGSTMFEGYCQKCFIEAQNQRFHEAKRTEEQLRSSQRRDVPRTTQSTSRPKCARASCKNILACRSEELCMECQHPNQRMGPGAHRGEPAPEDPPKQRCRAPACDHFGNAKCNGYCNECFQFKQMYG

SEQ ID NO: 27071 - protein, 12 aa, Homo sapiens
RGCHGRAAVPVR

SEQ ID NO: 27072 - protein, 86 aa, Homo sapiens
IIPKVLAQNSGFDLQETLVKIQAEHSESGQLVGVDLNTGEPMVAAEVGVWDNYCVKKQLLHSCTVIATNILLVDEIMRAGMSSLKG

SEQ ID NO: 27073 - protein, 92 aa, Homo sapiens
LKTRTTSHGRVGATAAVYSAAILEYLTAEVLELAGNASKDLKVKRITPRHLQLAIRGDEELDSLIKATIAGGGVIPHIHKSLIGKKGQQKTA

SEQ ID NO: 27074 - protein, 37 aa, Homo sapiens
KRKSRKPKMSTKNISKMMSLMKRDGTTFLRSMMGIFQ

SEQ ID NO: 27075 - protein, 13 aa, Homo sapiens
LRLRAPASSCESL

SEQ ID NO: 27076 - protein, 11 aa, Homo sapiens
RTRRCAPASLS

SEQ ID NO: 27077 - protein, 73 aa, Homo sapiens
VSVAMTDQTYCDRLVQDTPFLTGHGRLSEQQVDRIILQLNRYYPQILTNKEAEKVLRSSGTPRHPCVCGSVTS

SEQ ID NO: 27078 - protein, 21 aa, Homo sapiens
LTSPQSCPATPAPATASPAAT

SEQ ID NO: 27079 - protein, 16 aa, Homo sapiens
LGCFASVRGKRRGLYF

SEQ ID NO: 27080 - protein, 26 aa, Homo sapiens
RDGSLHVTCTDQETGKCEAISIEIAS

SEQ ID NO: 27081 - protein, 8 aa, Homo sapiens
LLLSVLMH

SEQ ID NO: 27082 - protein, 25 aa, Homo sapiens
KEAPGLAGWAQPVSKSPNTFSSSST

SEQ ID NO: 27083 - protein, 19 aa, Homo sapiens
IPILSPCSNKSHYGDLETL

SEQ ID NO: 27084 - protein, 41 aa, Homo sapiens
VKDSSNGAIYGADCSNILLKDILSVRKYWCEISQQQWLGMF

SEQ ID NO: 27085 - protein, 29 aa, Homo sapiens
VVKIGKESRSQCDLVKEARKKEGALTIWW

SEQ ID NO: 27086 - protein, 59 aa, Homo sapiens
RTGPLPLSPSTIARGSGLTPESSAPAKSWKRSGTTSSQRWLHSIRISSHLQITNLQQHV

SEQ ID NO: 27087 - protein, 26 aa, Homo sapiens
LRPGLKWKRRHHDRTAEPRTLTVSAG

SEQ ID NO: 27088 - protein, 13 aa, Homo sapiens
LFLTACETRASWM

SEQ ID NO: 27089 - protein, 39 aa, Homo sapiens
RGGLLARHSLLSGILQRWRRRRQPGSCCCPTGRVVAPTG

SEQ ID NO: 27090 - protein, 48 aa, Homo sapiens
VPPPDVLLPLARPSQRPQPSREGAPGRKDPPVCRRPPFSWSPSPSSWW

SEQ ID NO: 27091 - protein, 125 aa, Homo sapiens
ISEALRCIMKFQYKEDHPFEYRKKEGEKIRKKYPDRVPVIVEKAPKARVPDLDKRKYLVPSDLTVGQFYFLIRKRIHLRPEDALFFFVNNTIPPTSATMGQLYEDNHEEDYFLYVAYSDESVYGK

SEQ ID NO: 27092 - protein, 22 aa, Homo sapiens
LGLQTLHVMDQLTPSRSVNWFI

SEQ ID NO: 27093 - protein, 31 aa, Homo sapiens
TPVLDFLLPCFQAVGGYRGREVGSAETWIWF

SEQ ID NO: 27094 - protein, 128 aa, Homo sapiens
KAVVYRGRPIVSASASLTIFPAMFNPEERSCSLEGNPVACINLSFCLNASGKHVADSIGFTVELQLDWQKQKGGVRRALFLASRQATLTQTLLIQNGAREDCREMKIYLRVWPRGRGVDWPGRVATQN

SEQ ID NO: 27095 - protein, 217 aa, Homo sapiens
LGDKNALNLTFHAQNVGEGGAYEAELRVTAPPEAEYSGLVRHPGNFSSLSCDYFAVNQSRLLVCDLGNPMKAGASLWGGLRFTVPHLRDTKKTIQFDFQILSKNLNNSQSDVVSFRLSVEAQAQVTLNGVSKPEAVLFPVSDWHPRDQPQKEEDLGPAVHHVYELINQGPSSISQGVLELSCPQALEGQQLLYVTRVTGLNCTTNHPINPKGLEVRS

SEQ ID NO: 27096 - protein, 17 aa, Homo sapiens
RNNTWYRHMDLSGKRSR

SEQ ID NO: 27097 - protein, 13 aa, Homo sapiens
IKKLFFFRSGKQT

SEQ ID NO: 27098 - protein, 220 aa, Homo sapiens
KKDKSSRPPLTPSLPLSLPPGEEARGGCSAVGAAPPSPSRPGPPPHAAPMHPFYTRAATMIGEIAAAVSFISKFLRTKGLTSERQLQTFSQSLQELLAEHYKHHWFPEKPCKGSGYRCIRINHKMDPLIGQAAQRIGLSSQELFRLLPSELTLWVDPYEVSYRIGEDGSICVLYEASPAGGSTQNSTNVQMVDSRISCKEELLLGRTSPSKNYNMMTVSG

SEQ ID NO: 27099 - protein, 140 aa, Homo sapiens
IAQTQGFQECAQFLLNLQNCHLNHFYNNGILNGGHQNVFPNHISVGTNRKRCLEDSEDFGVKKARTEGETALRVGRAHLFFLSVICFLFMAERTFEMRPSLQVVMRLVDCAVTVEISPVLPLRRWDLTKGNVREILMAQV

SEQ ID NO: 27100 - protein, 11 aa, Homo sapiens
TQTVPVKSSCR

SEQ ID NO: 27101 - protein, 82 aa, Homo sapiens
IALHALCRPPLMPPHPPPGGPHAAHHPLPQCCPCSPAAQPSPLCSLLLPPPLPVLCPPLPQCLPPTSHPMPQVPQTIRTSRP

SEQ ID NO: 27102 - protein, 21 aa, Homo sapiens
LPARSLMTWASQKRCLWLPLI

SEQ ID NO: 27103 - protein, 12 aa, Homo sapiens
LRSQSKKKWKRI

SEQ ID NO: 27104 - protein, 14 aa, Homo sapiens
LGSMARLWSMIYRR

SEQ ID NO: 27105 - protein, 181 aa, Homo sapiens
LTAEELKKFKLKLLSVPLREGYGRIPRGALLSMDALDLTDKLVSFYLETYGAELTANVLRDMGLQEMAGQLQAATHQGSGAAPAGIQAPPQSAAKPGLHFIDQHRAALIARVTNVEWLLDALYGKVLTDEQYQAVRAEPTNPSKMRKLFSFTPAWNWTCKDLLLQALRESQSYLVEDLERS

SEQ ID NO: 27106 - protein, 22 aa, Homo sapiens
LRLSLARNLARAIIREGSLEGS

SEQ ID NO: 27107 - protein, 18 aa, Homo sapiens
RQAADSANIICPRLKNSS

SEQ ID NO: 27108 - protein, 56 aa, Homo sapiens
LGPNSTAAGFSLISEPRRWQSGRPGQVNPRAAGAQAPTPAQRGRKGPPPAQRAQRP

SEQ ID NO: 27109 - protein, 15 aa, Homo sapiens
LTRSEHLGGGGAGFL

SEQ ID NO: 27110 - protein, 22 aa, Homo sapiens
IPANAWLLFWKLPLGDAPQLAL

SEQ ID NO: 27111 - protein, 16 aa, Homo sapiens
IDLEILLIFTPSPRDS

SEQ ID NO: 27112 - protein, 49 aa, Homo sapiens
KMRRRTYRAHGRINPYMSSPCHIEMILTEKEQIVPKPEEEVAQKKKVNK

SEQ ID NO: 27113 - protein, 25 aa, Homo sapiens
KDFAIYFSAFSGRISLLPEGLGRAL

SEQ ID NO: 27114 - protein, 28 aa, Homo sapiens
LWEGFGLSGSDFAISPWGLPWSRIHCGL

SEQ ID NO: 27115 - protein, 43 aa, Homo sapiens
KGTQGNRSSSLRERPSTRPPRAAMSPAPRCCLERGGTWREAAP

SEQ ID NO: 27116 - protein, 23 aa, Homo sapiens
LASLTVRTCDRFWQTEPALLPPG

SEQ ID NO: 27117 - protein, 196 aa, Homo sapiens
ISCFWDLPAPFLWLAPSCQPTMSSQIRQNYSTDVEAAVNSLVNLYLQASYTYLSLGFYFDRDDVALEGVSHFFRELAEEKREGYERLLKMQNQRGGRALFQDIKKPAEDEWGKTPDAMKAAMALEKKLNQALLDLHALGSARTDPHLCDFLETHFLDEEVKLIKKMGDHLTNLHRLGGPEAGLGEYLFERLTLKHD

SEQ ID NO: 27118 - protein, 81 aa, Homo sapiens
LGEQPLPRPWVLRSLHFQEVQRHPVGAWAPQEDCTETLPLLERDVAPSPSFPGQRTLRTRSAHRGLPRLTPDLHLTSPTRP

SEQ ID NO: 27119 - protein, 1123 aa, Homo sapiens; identical to SEQ ID NO: 24759

SEQ ID NO: 27120 - protein, 38 aa, Homo sapiens
KGALTTQDENGQTKRKLQAGKKSQDKQKKRQRDRMVER

SEQ ID NO: 27121 - protein, 42 aa, Homo sapiens
LSLSLLALPTQQRRPPARNGLPGASSSSFPKLNCPVSDSDFS

SEQ ID NO: 27122 - protein, 38 aa, Homo sapiens
IPGPTVAGRLRVLVKLGHPALSDDQQILSGRNICSAVR

SEQ ID NO: 27123 - protein, 36 aa, Homo sapiens
VGIVGYVETPRGLRTFKTVFAEHISDECKRRFYKNW

SEQ ID NO: 27124 - protein, 61 aa, Homo sapiens
VVMNSLRVILQASPGKLLWRKFQIPRFMPARPCSLYTCTYKTRNRACEYTTSLKRTKRAPA

SEQ ID NO: 27125 - protein, 68 aa, Homo sapiens
LWRKFQIPRFMPARPCSLYTCTYKTRNRAFFLLFLILPIHGTSKGQGNGPPQTDVHWFCSSHLGVSTG

SEQ ID NO: 27126 - protein, 27 aa, Homo sapiens
TAVITRRLLGRSGFSFQVTIRKAKFAV

SEQ ID NO: 27127 - protein, 594 aa, Homo sapiens
KGDIIYVTRVEEGGWWEGTLNGRTGWFPSNYVREIKSSERPLSPKAVKGFETAPLTKNYYTVVLQNILDTEKEYAKELQSLLVTYLRPLQSNNNLSTVEVTSLLGNFEEVCTFQQTLCQALEECSKFPENQHKVGGCLLSLMPHFKSMYLAYCANHPSAVNVLTQHSDELEQFMENQGASSPGILILTTNLSKPFMRLEKYVTLLQELERHMEDTHPDHQDILKAIVAFKTLMGQCQDLRKRKQLELQILSEPIQAWEGEDIKNLGNVIFMSQVMVQYGACEEKEERYLMLFSNVLIMLSASPRMSGFIYQGKIPIAGTVVTRLDEIEGNDCTFEITGNTVERIVVHCNNNQDFQEWLEQLNRLIRGPASCSSLSKTSSSSCSAHSSFSSTGQPRGPLEPPQIIKPWSLSCLRPAPPLRPSAALGYKERMSYILKESSKSPKTMKKFLHKRKTERKPSEEEYVIRKSTAALEEDAQILKVIEAYCTSANFQQGHGSSTRKDSIPQVLLPEEEKLIIEETRSNGQTIMEEKSLVDTVYALKDEVRELKQENKRMKQCLEEELKSRRDLEKLVRRLLKQTDECIRGESSSKTSILP

SEQ ID NO: 27128 - protein, 15 aa, Homo sapiens
IPVLLSVSDAIMQPG

SEQ ID NO: 27129 - protein, 31 aa, Homo sapiens
KSKSIQRWMNYKRNLKLQDLRSFSPNLYLLW

SEQ ID NO: 27130 - protein, 16 aa, Homo sapiens
KADCDSPYPHKAILTP

SEQ ID NO: 27131 - protein, 36 aa, Homo sapiens
MAPHVNPTLKDKALSPQQPQQLALHPVSLTTTTKNI

SEQ ID NO: 27132 - protein, 53 aa, Homo sapiens
RREAPPRSRHRRTSMPSPQLASVFRWNIRCTFMAILSVRADFCQAQHSIFADK

SEQ ID NO: 27133 - protein, 19 aa, Homo sapiens
LHSLWLVIHLGPQHTVILF

SEQ ID NO: 27134 - protein, 38 aa, Homo sapiens
IYPFMQGLREAAFPAPGKTVTLKSFIPDSGTEVKVQRN

SEQ ID NO: 27135 - protein, 40 aa, Homo sapiens
LKQRGGSGGARSQADRQTQPASQVGSIVRTANLIFFSPSL

SEQ ID NO: 27136 - protein, 75 aa, Homo sapiens
KTRRRPATAGSALIRSAGRAAALGSEFACGLRGTAAHEERSVSDRDFSKPGSARESTSKSAGGILINPALPGASW

SEQ ID NO: 27137 - protein, 631 aa, Homo sapiens
LLAMESLVFARRSGPTPSAAELARPLAEGLIKSPKPLMKKQAVKRHHHKHNLRHRYEFLETLGKGTYGKVKKARESSGRLVAIKSIRKDKIKDEQDLMHIRREIEIMSSLNHPHIIAIHEVFENSSKIVIVMEYASRGDLYDYISERQQLSEREARHFFRQIVSAVHYCHQNRVVHRDLKLENILLDANGNIKIADFGLSNLYHQGKFLQTFCGSPLYASPEIVNGKPYTGPEVDSWSLGVLLYILVHGTMPFDGHDHKILVKQISNGAYREPPKPSDACGLIRWLLMVNPTRRATLEDVASHWWVNWGYATRVGEQEAPHEGGHPGSDSARASMADWLRRSSRPLLENGAKVCSFFKQHAPGGGSTTPGLERQHSLKKSRKENDMAQSLHSDTADDTAHRPGKSNLKLPKGILKKKVSASAEGVQEDPPELSPIPASPGQAAPLLPKKGILKKPRQRESGYYSSPEPSESGELLDAGDVFVSGDPKEQKPPQASGLLLHRKGILKLNGKFSQTALELAAPTTFGSLDELAPPRPLARASRPSGAVSEDSILSSESFDQLDLPERLPEPPLRGCVSVDNLTGLEEPPSEGPGSCLRRWRQDPLGDSCFSLTDCQEVTATYRQALRVCSKLT

SEQ ID NO: 27138 - protein, 47 aa, Homo sapiens
RKVYSLVPQDSLVRKALQDMSVRPDAWPLAAWEVAGAAFAFARDSSN

SEQ ID NO: 27139 - protein, 35 aa, Homo sapiens
TPPVRPCAVRPSPSVTSGPSLRGFVRLPGGVNRGP

SEQ ID NO: 27140 - protein, 300 aa, Homo sapiens
ISEMWQNDLQPLLIERYPGSPGSYAARQHIMQRIQRLQADWVLEIDTFLSQTPYGYRSFSNIISTLNPTAKRHLVLACHYDSKYFSHWNNRVFVGATDSAVPCAMMLELARALDKKLLSLKTVSDSKPDLSLQLIFFDGEEAFLHWSPQDSLYGSRHLAAKMASTPHPPGARGTSQLHGMDLLVLLDLIGAPNPTFPNFFPNSARWFERLQAIEHELHELGLLKDHSLEGRYFQNYSYGGVIQDDHIPFLRRGVPVLHLIPSPFPEVWHTMDDNEENLDESTIDNLNKILQVFVLEYLHL

SEQ ID NO: 27141 - protein, 38 aa, Homo sapiens
ICDQISDAVLDAHLQQDPDAKVACGRFRMCLSTGGKIA

SEQ ID NO: 27142 - protein, 123 aa, Homo sapiens
TLRSEGKARTKKDQMAKQPSDVSSECDREGRQLQPAERPPQLRPGAPTSLQTEPQDRSPAPMSCDKSTQTPSPPCQAFNHYLSAMASMRQAEPADMRPEIWIAQELRRIGDEFNAYYARRLEK

SEQ ID NO: 27143 - protein, 170 aa, Homo sapiens
LSYLLPSARPELGVGPGRSVDRSLMYSEANRRETFTSWPHVGYRWAQPDPMAQAGFYHQPASSGDDRAMCFTCSVCLVCWEPTDEPWSEHERHSPNCPFVKGEHTQNVPLSVTLATSPAQFPCTDGTDRISCFGSGSCPHFLAAATKRGKICIWDVSKLMKVCLNFEVTN

SEQ ID NO: 27144 - protein, 495 aa, Homo sapiens
IFKEFLRGSWRDSGSQTLHWDPSCFREQLVMEPSSLELPADTVQRIAAELKCHPTDERVALHLDEEDKLRHFRECFYIPKIQDLPPVDLSLVNKDENAIYFLGNSLGLQPKMVKTYLEEELDKWAKIAAYGHEVGKRPWITGDESIVGLMKDIVGANEKEIALMNALTVNLHLLMLSFFKPTPKRYKILLEAKAFPSDHYAIESQLQLHGLNIEESMRMIKPREGEETLRIEDILEVIEKEGDSIAVILFSGVHFYTGQHFNIPAITKAGQAKGCYVGFDLAHAVGNVELYLHDWGVDFACWCSYKYLNAGAGGIAGAFIHEKHAHTIKPALVGWFGHELSTRFKMDNKLQLIPGVCGFRISNPPILLVCSLHASLEIFKQATMKALRKKSVLLTGYLEYLIKHNYGKDKAATKKPVVNIITPSHVEERGCQLTITFSVPNKDVFQELEKRGVVCDKRNPNGIRVAPVPLYNSFHDVYKFTNLLTSILDSAETKN

SEQ ID NO: 27145 - protein, 24 aa, Homo sapiens
MRPWRSCLNSVKHIQSTCIMIWNC

SEQ ID NO: 27146 - protein, 40 aa, Homo sapiens
LPPRPALPWRCLWHCGGLTTARAWAARETRAVRVPRVRCR

SEQ ID NO: 27147 - protein, 207 aa, Homo sapiens
INPALDKYFPSDSGVRIIAEPGRYYVASAFTLAVNIIAKKIVLKEQTGSDDEDESSEQTFMYYVNDGVYGSFNCILYDHAHVKPLLQKRPKPDEKYYSSSIWGPTCDGLDRIVERCDLPEMHVGDWMLFENMGAYTVAAASTFNGFQRPTIYYVMSGPAWQLMQQFQNPDFPPEVEEQDASTLPVSCAWESGMKRHRAACASASINV

SEQ ID NO: 27148 - protein, 107 aa, Homo sapiens
TTPSPPSSVKLVLENTYPGQFLWIWSLRSLMRSEMAHTDSSSTQSSSSLGKRMLPTTMPVVTIPLARRSLTQCWIGSASCLTSAQDFRASWCSTALVGALALASPHS

SEQ ID NO: 27149 - protein, 7 aa, Homo sapiens
LGRAPNI

SEQ ID NO: 27150 - protein, 15 aa, Homo sapiens
KGMSLQERGANVQPA

SEQ ID NO: 27151 - protein, 33 aa, Homo sapiens
VTDPRFLMSITCWMRLCSSPPLSEWSVSINWTP

SEQ ID NO: 27152 - protein, 8 aa, Homo sapiens
RVTSSCWT

SEQ ID NO: 27153 - protein, 780 aa, Homo sapiens
IYFKQSKYFFFCWTSMAGFKRGYDGKIAGLYDLDKTLGRGHFAVVKLARHVFTGEKVAVKVIDKTKLDTLATGHLFQEVRCMKLVQHPNIVRLYEVIDTQTKLYLILELGDGGDMFDYIMKHEEGLNEDLAKKYFAQIVHAISYCHKLHVVHRDLKPENVVFFEKQGLVKLTDFGFSNKFQPGKKLTTSCGSLAYSAPEILLGDEYDAPAVDIWSLGVILFMLVCGQPPFQEANDSETLTMIMDCKYTVPSHVSKECKDLITRMLQRDPKRRASLEEIENHPWLQGVDPSPATKYNIPLVSYKNLSEEEHNSIIQRMVLGDIADRDAIVEALETNRYNHITATYFLLAERILREKQEKEIQTRSASPSNIKAQFRQSWPTKIDVPQDLEDDLTATPLSHATVPQSPARAADSVLNGHRSKGLCDSAKKDDLPELAGPALSTVPPASLKPTASGRKCLFRVEEDEEEDEEDKKPMSLSTQVVLRRKPSVTNRLTSRKSAPVLNQIFEEGESDDEFDMDENLPPKLSRLKMNIASPGTVHKRYHRRKSQGRGSSCSSSETSDDDSESRRRLDKDSGFTYSWHRRDSSEGPPGSEGDGGGQSKPSNASGGVDKASPSENNAGGGSPSSGSGGNPTNTSGTTRRCAGPSNSMQLASRSAGELVESLKLMSLCLGSQLHGSTKYIIDPQNGLSFSSVKVQEKSTWKMCISSTGNAGQVPAVGGIKFFSDHMADTTTELERIKSKNLKNNVLQLPLCEKTISVNIQRNPKEGLLCASSPASCCHVI

SEQ ID NO: 27154 - protein, 18 aa, Homo sapiens
RKTKRRILIRFNFLGPMA

SEQ ID NO: 27155 - protein, 2610 aa, Homo sapiens
LKGCPPPQGRGTQLENVALHALLLCEGLFDPYQTWRRQRSGEVISSKEKSKYKFPPAALPQEFSAFFQESLQNADHLPPILLLRLIHLFCAVLAGGKENGQMAVSDGSVKGLLSVVRGWSRGPAPDPCLVPLALEALVGAVHVLHASRAPPRGPELRALLESYFHVLNADWPAGLSSGPEEALVTLRVSMLDAIPMMLACEDRPVLQATFLSNNCFEHLTRLIQNSKVLDQDTDAIAVHVVRVLTCIMSDSPSAKEVFKERIGYPHLQEVLQSHGPPTHRLLQELLNMAVEGDHSMCPPPPIRNEQPVLVLAQWLPSLPTAELRLFLAQRLRWLCDSCPASRATCVQAGLVGCLLETLSTGLALEARCQEQLLALLQALGRVSIRPMELRHLLRPRPGLDSEPGGAEAGKARHAGAVIRTLSGMARHQGPARALRYFDLTPSMAGIMVPPVQRWPGPGFTFHAWLCLHPMDTAPTPAPTRPLQRKQLYSFFTSSGSGFEAFFTAAGTLVVAVCTRKEYLTMSLPEVSFADSAWHCVAIVHVPGRRPFSQNLVHVYKDGHLVKTAPLRCPSLSEPFSSCCIGSAGYRTTTTTTGLPTPPVPATLAYTHPALTRSQSVPASTGLGWGSGLVAPLQEGSIDSTLAGTQDTRWGSPTSLEGELGAVAIFHEALQATALRTLCTLGPNETAPFKPEGELHELSTRLLLHYSPQACKNNICLDLSPSHGLDGRLTGHRVETWDVKDVVNCVGGMGALLPLLERVAAQPKEAEAGPAETHDLVGPELTSGHNTQGLVLPLGKSSEERMERNAVAAFLLMLRNFLQGHMVNQESLVQCQGPAIIGALLRKVPSWAMDMNVLMSAQLLMEQVAAEGSGPLLYLLYQHLLFNFHLWTLSDFAVRLGHIQYMSSIVREHRQKLRKKYGVQFILDALRTHYSPQRERPLAADDLRTVQTSLLGLAREFLVRSLSADDVQVTQTMLSFLAATGDDGQAVGALDLLLALLHGSLVQESLAVFLLEPGNLEVLLALLVRPGSLPLLPDRVCKILRRLQQNERLPERSRQRLRLRECGLQGLVACLPEGTVSPQLCQGLYKLFLGADCLNLSDLLAVVQLSLQADLSVRLDICRQLFHLIYGQPDVVRLLARQAGWQDVLTRLYVLEAATAGSPPPSSPESPTSPKPAPPKPPTESPAEPSDVFLPSEAPCPDPDGFYHALSPFCTPFDLGLERSSVGSGNTAGGGGSSGTLTPASQPGTPSPLDGPRPFPAAPGRHSSSLSNVLEDGSLPEPTISGDDTSNTSNPQQTSEEELCNLLTNVLFSVTWRGVEGSDEAAWRERGQVFSVLTQLGASATLVRPPDCIKRSLLEMMLESALTDIKEAPVGVLASLTQQALWLLRLLQDFLCAEGHGNQELWSEKLFEGVCSLLDRLGAWPHLANGTADLREMAQIGLRLVLGYILLEDPQLHAQAYVRLHMLLQTAVPARREEACYVLSKLEAALGRVLNTSSLESATDEAGSPLAAAAAAAAAERCSWLVPLVRTLLDRAYEPLGLQWGLPSLPPTNGSPTFFEDFQAFCATPEWRHFIDKQVQPTMSQFEMDTYAKSHDLMSGFWNACYDMLMSSGQRRQWERAQSRRAFQELVLEPAQRRARLEGLRYTAVLKQQATQHSMALLHWGALWRQLASPCGAWALRDTPIPRWKLSSAETYSRMRLKLVPNHHFDPHLEASALRDNLGEVPLTPTEEASLPLAVTKEAKVSTPPELLQEDQLGEDELAELETPMEAAELDEQREKLVLSAECQLVTVVAVVPGLLEVTTQNVYFYDGSTERVETEEGIGYDFRRPLAQLREVHLRRFNLRRSALELFFIDQANYFLNFPCKVGTTPVSSPSQTPRPQPGPIPPHTQVRNQVYSWLLRLRPPSQGYLSSRSPQEMLRASGLTQKWVQREISNFEYLMQLNTIAGRTYNDLSQYPVFPWVLQDYVSPTLDLSNPAVFRDLSKPIGVVNPKHAQLVREKYESFEDPAGTIDKFHYGTHYSNAAGVMHYLIRVEPFTSLHVQLQSGRFDCSDRQFHSVAAAWQARLESPADVKELIPEFFYFPDFLENQNGFDLGCLQLTNEKVGDVVLPPWASSPEDFIQQHRQALESEYVSAHLHEWIDLIFGYKQRGPAAEEALNVFYYCTYEGAVDLDHVTDERERKALEGIISNFGQTPCQLLKEPHPTRLSAEEAAHRLARLDTNSPSIFQHLDELKAFFAEVVSDGVPLVLALVPHRQPHSFITQGSPDLLVTVSASGLLGTHSWLPYDRNISNYFSFSKDPTMGSHKTQRLLSGPWVPGSGVSGQALAVAPDGKLLFSGGHWDGSLRVTALPRGKLLSQLSCHLDVVTCLALDTCGIYLISGSRDTTCMVWRLLHQGGLSVGLAPKPVQVLYGHGAAVSCVAISTELDMAVSGSEDGTVIIHTVRRGQFVAALRPLGATFPGPIFHLALGSEGQIVVQSSAWERPGAQVTYSLHLYSVNGKLRASLPLAEQPTALTVTEDFVLLGTAQCALHILQLNTLLPAAPPLPMKVAIRSVAVTKERSHVLVGLEDGKLIVVVAGQPSEVRSSQFARKLWRSSRRISQVSSGETEYNPTEAR

SEQ ID NO: 27156 - protein, 189 aa, Homo sapiens
KGGKASLAEAPIPFPACSVAGDWKTLCDSVQSLGRKASFQDSSSPGAASSPKGIMAALRPLVKPKIVKKRTKKFIRHQSDRYVKIKRNWRKPRGIDNRVRRRFKGQILMPNIGYGSNKKTKHMLPSGFRKFLVHNVKELEVLLMCNKSYCAEIAHNVSSKNRKAIVERAAQLAIRVTNPNARLRSEENE

SEQ ID NO: 27157 - protein, 491 aa, Homo sapiens
LHPDPEPPPPAMEVAPEQPRWMAHPAVLNAQHPDSHHPGLAHNYMEPAQLLPPDEVDVFFNHLDSQGNPYYANPAHARARVSYSPAHARLTGGQMCRPHLLHSPGLPWLDGGKAALSAAAAHHHNPWTVSPFSKTPLHPSAAGGPGGPLSVYPGAGGGSGGGSGSSVASLTPTAAHSGSHLFGFPPTPPKEVSPDPSTTGAASPASSSAGGSAARGEDKDGVKYQVSLTESMKMESGSPLRPGLATMGTQPATHHPIPTYPSYVPAAAHDYSSGLFHPGGFLGGPASSFTPKQRSKARSCSEGRECVNCGATATPLWRRDGTGHYLCNACGLYHKMNGQNRPLIKPKRRLSAARRAGTCCANCQTTTTTLWRRNANGDPVCNACGLYYKLHNVNRPLTMKKEGIQTRNRKMSNKSKKSKKGAECFEELSKCMQEKSSPFSAAALAGHMAPVGHLPPFSHSGHILPTPTPIHPSSSLSFGHPHPSSMVTAMG

SEQ ID NO: 27158 - protein, 26 aa, Homo sapiens
RPGGGGGSRYSRLKQLRNGSGGGRTN

SEQ ID NO: 27159 - protein, 19 aa, Homo sapiens
TGGGRTGTPESRALPTIRF

SEQ ID NO: 27160 - protein, 135 aa, Homo sapiens
VTENKITNLEIYEWYHRNITRNQAEHLLRQESKEGAFIVRDSRHLGSYTISVFMGARRSTEAAIKHYQIKKNDSGQWYVAERHAFQSIPELIWYHQHNAAGLMTRLRYPVGLMGSCLPATAGFSYGKVCTHAEVK

SEQ ID NO: 27161 - protein, 62 aa, Homo sapiens
KGRVERPVEKKEARPAGGGGSADCGEETPRHPFWSSPLPPRPCAHSLAGELLSDQESKSGPG

SEQ ID NO: 27162 - protein, 24 aa, Homo sapiens
LANFSFSSPPPRPPSSAPPPSLAD

SEQ ID NO: 27163 - protein, 28 aa, Homo sapiens
RIALEINQFTPEPREGSVSVGSGRSAGL

SEQ ID NO: 27164 - protein, 39 aa, Homo sapiens
ISSAAILNPAPYNAPPPLLPRPGLRASTPLPTAPSLWRI

SEQ ID NO: 27165 - protein, 1707 aa, Homo sapiens
TMGSKDHAVFFREMTQLILNEMPKAGYSSILNDFVESNFFVIDGDSLLVTCLGVKSFKWGQNLHFFYLVECYLVDLLSNGGQFTIVFFKDAEYAYFDFPELLSLRTALILHLQHNTNIDVQTEFSGCLSQDWKLFLEQHYPYFLIVSEEGLSDLQTYLFNFLIIHSWGMKVNVVLSSGHESDTLRFYAYTMESTDRNQTFSKENETVIQSAYKSLIQHLEEIRVLVLATHFEHLKWNDMMEEAYQTLFLLQHLWSEGSDIQRVLCVTSCSLSLRMYHRVLVHSNCLSLQEVEDFCRLRCLCVAFQLHLPLSQRACSRVITCSWIRNSDSFLKMNKWCEYFILSNLNVFGCWNLNLNHVSDLYDEQLLKNIAFYYEFESTQEPHLNLGDSIRRDYEDLWNVVSHLVKEFNVGKSFPLRTTRRHFLRQEKSVIQEISLEKMPSVGFIPMTSAVIDEFVGDMMKDLPILKSDDPVVPSLFKQKTSDELLHWHAQRLLSDDYDRIKCHVDEQSRDPHVLDFLKKIQDYQQFYGKSLESISTKVIVTQTTRPKEDSSGASGEILQNTKPHQITKKSKKKSFLKEDQNKAQQNDDLLFSIEEEMKNNLHSGIRKLEDYLTSCASNSVKFGVEMLGLIACFKAWKKHCRGEGKISKDLSIAVQMMKRIHSLLERYPEILEAEHHQYIAKCLKYLGFNDLANSLDPTLIGDDKNKKKYSIDIGPARFQLQYMGHYLIRDERKDRDPRVQDFIPNAWQQELLDVVDKNESAVIVAPTSSGKTYASYYCMEKVLRESDVGVVVYVAPAKSLVGQVAATVENRFTKTLPAGRTLCGAFTRDYCHNVLNCQVLITVPECFEILLLAPHRQKWVERIRYVIFDEVHYLGREVGAKFWELLLVIIRCPFLVLSATINNPNLLTKWLQSVKQYWKQADKIMEEKCISEKQADKCLNFLQDHSYKNQSYEVRLVLCGERYNDLEKHICSVKHDDVYFDHFHPCAALTTDIIEKYGFPPDLTLTPQESIQLYDTMAQVWETWPRAQELCPEEFILFKNKIVIKKLDARKYEENLKAELTNWIKNGQVKKVKRVLKNLSPDSLSSSKDMVKMFPLLVEKLRQMDKLPAIFFLFKNDDVGKRAGSVCTFLEKTETKSHPHTECHSYVFAIDEVLEKVRKTQKRITKKNPKKAEKLERKKVYRAEYINFLENLKILEISEDCTYADVKALHTEITRNKDSTLERVLPRVRFTRHGKELKALAQRGIGYHHSSMYFKEKEFVEILFVKGLIRVVTATETLALGIHMPCKSVVFAQDSVYLDALNYRQMSGRAGRRGQDLLGNVYFFDIPLPKIKRLLASSVPELRGQFPLSITLVLRLMLLASKGDDPEDAKAKVLSVLKHSLLSFKRRRAMETLKLYFLFSLQLLIKEDYLNKKGNPKKFAGLASYLHGHEPSNLVFVNFLKRGLFHNLCKPAWKGSQQFSQDVMEKLVLVLANLFGRKYIPAKFQNANLSFSQSKVILAELPEDFKAALYEYNLAVMKDFASFLLIASKSVNMKKEHQLPLSRIKFTGKECEDSQLVSHLMSCKKGRVAISPFVCLSGNTDNDLLRPETINQVILRTVGVSGTQAPLLWPWKLDNRGRRMPLNAYVLNFYKHNCLTRLDQKNGMRMGQLLKCLKDFAFNIQAISDSLSELCENKRDNVVLAFKQLSQTFYEKLQEMQIQMSQNHLE

SEQ ID NO: 27166 - protein, 14 aa, Homo sapiens
IKQKRKEKAVSNNN

SEQ ID NO: 27167 - protein, 80 aa, Homo sapiens
KRPSTPPSICSCITHPPREQGSTPSRSPRCTRPISPPTVSPNSLSTNISTAHIPPLHLRTSARSKFTGLCRPLTSLASTP

SEQ ID NO: 27168 - protein, 18 aa, Homo sapiens
LPMKMTNEQRIRMTVPCL

SEQ ID NO: 27169 - protein, 31 aa, Homo sapiens
MERTLLMSMGDWIQMESQQMQSTDRKKSTGK

SEQ ID NO: 27170 - protein, 37 aa, Homo sapiens
KPPPDSASDSMQNLGSGDLPQPREEASSSGDRLRTGV

SEQ ID NO: 27171 - protein, 36 aa, Homo sapiens
LRRLPLRVGTSGPRGVIGGEVSGGRRAGALAGAAPA

SEQ ID NO: 27172 - protein, 99 aa, Homo sapiens
LRVGTSGPRGVIGGEEPPRLGLACRKRARSSPWRRRAPPRTDMRPSPKASRRPGLARAPRRGLEARPRRPRAGIRTAPRATRSTPARTRRTREKCSLVA

SEQ ID NO: 27173 - protein, 44 aa, Homo sapiens
TGRIIPAIWFRYDLSPITVKYTERRQPLYRFITTVSGLGQWVGP

SEQ ID NO: 27174 - protein, 444 aa, Homo sapiens
LKVKLERNLQTRKKRSLESDSQDLGLEMPQPSVSGMDPPFGDAFRSHTFSEQTLMSTDLLANSSDPDFMYELDREMNYQQNPRDNFLSLEDCKDIENLESFTDVLDNEGALTSNWEQWDTYCEDLTKYTKLTSCDIWGTKEVDYLGLDDFSSPYQDEEVISKTPTLAQLNSEDSQSVSDSLYYPDSLFSVKQNPLPSSFPGKKITSRAAAPVCSSKTLQAEVPLSDCVQKASKPTSSTQIMVKTNMYHNEKVNFHVECKDYVKKAKVKINPVQQSRPLLSQIHTDAAKENTCYCGAVAKRQEKKGMEPLQGHATPALPFKETQELLLSPLPQEGPGSLAAGESSSLSASTSVSDSSQKKEEHNYSLFVSDNLGEQPTKCSPEEDEEDEEDVDDEDHDEGFGSEHELSENEEEEEEEEDYEDDKDDDISDTFSEPGIIMLASLPD

SEQ ID NO: 27175 - protein, 666 aa, Homo sapiens
LKVKLERNLQTRKKRSLESDSQDLGLEMPQPSVSGMDPPFGDAFRSHTFSEQTLMSTDLLANSSDPDFMYELDREMNYQQNPRDNFLSLEDCKDIENLESFTDVLDNEGALTSNWEQWDTYCEDLTKYTKLTSCDIWGTKEVDYLGLDDFSSPYQDEEVISKTPTLAQLNSEDSQSVSDSLYYPDSLFSVKQNPLPSSFPGKKITSRAAAPVCSSKTLQAEVPLSDCVQKASKPTSSTQIMVKTNMYHNEKVNFHVECKDYVKKAKVKINPVQQSRPLLSQIHTDAAKENTCYCGAVAKRQEKKGMEPLQGHATPALPFKETQELLLSPLPQEGPGSLAAGESSSLSASTSVSDSSQKKEEHNYSLFVSDNLGEQPTKCSPEEDEEDEEDVDDEDHDEGFGSEHELSENEEEEEEEEDYEDDKDDDISDTFSEPGYENDSVEDLKEVTSISSRKRGKRRYFWEYSEQLTPSQQERMLRPSEWNRDTLPSNMYQKNGLHHGKYAVKKSRRTDVEDLTPNPKKLLQIGNELRKLNKVISDLTPVSELPLTARPRSRKEKNKLASRACRLKKKAQYEANKVKLWGLNTEYDNLLFVINSIKQEIVNRVQNPRDERGPNMGQKLEILIKDTLGLPVAGQTSEFVNQVLEKTAEGNPTGGLVGLRIPTSKV

SEQ ID NO: 27176 - protein, 34 aa, Homo sapiens
IQYHSIEEDKWRVAKKTKDVTVWRKPSEEFNGYL

SEQ ID NO: 27177 - protein, 465 aa, Homo sapiens
TGTMGRKKIQITRIMDERNRQVTFTKRKFGLMKKAYELSVLCDCEIALIIFNSTNKLFQYASTDMDKVLLKYTEYNEPHESRTNSDIVETLRKKGLNGCDSPDPDADDSVGHSPESEDKYRKINEDIDLMISRQRLCAVPPPNFEMPVSIPVSSHNSLVYSNPVSSLGNPNLLPLAHPSLQRNSMSPGVTHRPPSAGGLMGGDLTSGAGTSAGNGYGNPRNSPGLLVSPGNLNKNMQAKSPPPMNLGMNNRKPDLRVLIPPGSKNTMPSVNQRINNSQSAQSLATPVVSVATPTLPGQGMGGYPSAISTTYGTEYSLSSADLSSLSGFNTASALHLGSVTGWQQQHLHNMPPSALSQLGACTSTHLSQSSNLSLPSTQSLNIKSEPVSPPRDRTTTPSRYPQHTRHEAGRSPVDSLSSCSSSYDGSDREDHRNEFHSPIGLTRPSPDERESPSVKRMRLSEGWAT

SEQ ID NO: 27178 - protein, 55 aa, Homo sapiens
RDYRYHSDWQMDHRASSSGPRSPLDQRSPYGSRSPFEHSVEHKSTPEHTWSSRKT

SEQ ID NO: 27179 - protein, 66 aa, Homo sapiens
VSCCCCCYYLQGPQKWNTERRSVRMPICPASTPQPPQGTSCPSAGAKEPVLCLNVATWCSGLMKGM

SEQ ID NO: 27180 - protein, 424 aa, Homo sapiens
RVGAVGPRRGPFPAWGNGTSMISLIIPPKDQISRVAKMLADEFGTASNIKSRVNRLSVLGAITSVQQRLKLYNKVPPNGLVVYCGTIVTEEGKEKKVNIDFEPFKPINTSLYLCDNKFHTEALTALLSDDSKFGFIVIDGSGALFGTLQGNTREVLHKFTVDLPKKHGRGGQSALRFARLRMEKRHNYVRKVAETAVQLFISGDKVNVAGLVLAGSADFKTELSQSDMFDQRLQSKVLKLVDISYGGENGFNQAIELSTEVLSNVKFIQEKKLIGRYFDEISQDTGKYCFGVEDTLKALEMGAVEILIVYENLDIMRYVLHCQGTEEEKILYLTPEQEKDKSHFTDKETGQEHELIESMPLLEWFANNYKKFGATLEIVTDKSQEGSQFVKGFGGIGGILRYRVDFQGMEYQGGDDEFFDLDDY

SEQ ID NO: 27181 - protein, 344 aa, Homo sapiens
RRGCGASFSKPSSAILVAAATHALAAAMTEQMTLRGTLKGHNGWVTQIATTPQFPDMILSASRDKTIIMWKLTRDETNYGIPQRALRGHSHFVSDVVISSDGQFALSGSWDGTLRLWDLTTGTTTRRFVGHTKDVLSVAFSSDNRQIVSGSRDKTIKLWNTLGVCKYTVQDESHSEWVSCVRFSPNSSNPIIVSCGWDKLVKVWNLANCKLKTNHIGHTGYLNTVTVSPDGSLCASGGKDGQAMLWDLNEGKHLYTLDGGDIINALCFSPNRYWLCAATGPSIKIWDLEGKIIVDELKQEVISTSSKAEPPQCTSLAWSADGQTLFAGYTDNLVRVWQVTIGTR

SEQ ID NO: 27182 - protein, 74 aa, Homo sapiens
KRGRGRPRKQPPKEPSEVPTPKRPRGRPKGSKNKGAAKTRKTTTTPGRKPRGRPKKLEKEEEEGISQESSEEEQ

SEQ ID NO: 27183 - protein, 35 aa, Homo sapiens
IDTLQFRLQVRCTRNPHAAKDSSDPNELYVNHKGE

SEQ ID NO: 27184 - protein, 888 aa, Homo sapiens
LQSSWRAKRAWSPRGRSGESGRQERSHPQPTLPASEPDPRRPWSVASARSLPRPPPAARSCLDQDLGLCERIAGPGEVTAAPPGEVTAAPPGEVLESTMAEQVLPQALYLSNMRKAVKIRERTPEDIFKPTNGIIHHFKTMHRYTLEMFRTCQFCPQFREIIHKALIDRNIQATLESQKKLNWCREVRKLVALKTNGDGNCLMHATSQYMWGVQDTDLVLRKALFSTLKETDTRNFKFRWQLESLKSQEFVETGLCYDTRNWNDEWDNLIKMASTDTPMARSGLQYNSLEEIHIFVLCNILRRPIIVISDKMLRSLESGSNFAPLKVGGIYLPLHWPAQECYRYPIVLGYDSHHFVPLVTLKDSGPEIRAVPLVNRDRGRFEDLKVHFLTDPENEMKEKLLKEYLMVIEIPVQGWDHGTTHLINAAKLDEANLPKEINLVDDYFELVQHEYKKWQENSEQGRREGHAQNPMEPSVPQLSLMDVKCETPNCPFFMSVNTQPLCHECSERRQKNQNKLPKLNSKPGPEGLPGMALGASRGEAYEPLAWNPEESTGGPHSAPPTAPSPFLFSETTAMKCRSPGCPFTLNVQHNGFCERCHNARQLHASHAPDHTRHLDPGKCQACLQDVTRTFNGICSTCFKRTTAEASSSLSTSLPPSCHQRSKSDPSRLVRSPSPHSCHRAGNDAPAGCLSQAARTPGDRTGTSKCRKAGCVYFGTPENKGFCTLCFIEYRENKHFAAASGKVSPTASRFQNTIPCLGRECGTLGSTMFEGYCQKCFIEAQNQRFHEAKRTEEQLRSSQRRDVPRTTQSTSRPKCARASCKNILACRSEELCMECQHPNQRMGPGAHRGEPAPEDPPKQRCRAPACDHFGNAKCNGYCNECFQFKQMYG

SEQ ID NO: 27185 - protein, 37 aa, Homo sapiens
TQGASVRHMEVMVFLREKITEETSALMALQSWQYYNP

SEQ ID NO: 27186 - protein, 10 aa, Homo sapiens
KAVTKYTSAK

SEQ ID NO: 27187 - protein, 26 aa, Homo sapiens
RPASYGSTLRRVPGCILCLPNSASWV

SEQ ID NO: 27188 - protein, 184 aa, Homo sapiens
KGTVYFKGGKYMQAVIQYGKIVSWLEMEYGLSEKESKASESFLLAAFLNLAMCYLKLREYTKAVECCDKALGLDSANEKGLYRRGEAQLLMNEFESAKGDFEKVLEVNPQNKAARLQISMCQKKAKEHNERDRRIYANMFKKFAEQDAKEEANKAMGKKTSEGVTNEKGTDSQAMEEEKPEGHV

SEQ ID NO: 27189 - protein, 28 aa, Homo sapiens
IFFFSPTEPSHLPSPAHSTRAGIVSTMK

SEQ ID NO: 27190 - protein, 86 aa, Homo sapiens
VMLACYVWGFYPAEVTITWRKNGKLVMPHSSAHKTAQPNGDWTYQTLSHLALTPSYGDTYTCVVEHTGAPEPILRDWSKCMADGWN

SEQ ID NO: 27191 - protein, 22 aa, Homo sapiens
RNPRFQPSSQIPATPPPPVSPL

SEQ ID NO: 27192 - protein, 20 aa, Homo sapiens
TKKLPEHLGEYLMENRLVKT

SEQ ID NO: 27193 - protein, 30 aa, Homo sapiens
LSVFGDRSTGETIRSQNDKESFNEQKTCRI

SEQ ID NO: 27194 - protein, 44 aa, Homo sapiens
IALQVCNKKWPPTKLHCKKWEKNRMERVKKLKRQSLKNLSWKKY

SEQ ID NO: 27195 - protein, 27 aa, Homo sapiens
LWMRQTCSTLSGLLWELIRTMVDRAEA

SEQ ID NO: 27196 - protein, 20 aa, Homo sapiens
LLPFHQCTDTEDPSVMQHLP

SEQ ID NO: 27197 - protein, 27 aa, Homo sapiens
LSGFSNQAAILAPQVWDFWVFSWLASC

SEQ ID NO: 27198 - protein, 49 aa, Homo sapiens
TRRARSGLRSPARPWRPPARLPRSPFRSRLRLFTPRRRSSALWWPQSPK

SEQ ID NO: 27199 - protein, 53 aa, Homo sapiens
LPCPLLPGPLPPDAALPGAVRAAACGAAGAGDARAEEQPGLGPGAAGRSREPL

SEQ ID NO: 27200 - protein, 120 aa, Homo sapiens
KFLQEFYQDDELGKKQFKYGNQLVRLAHREQVALYVDLDDVAEDDPELVDSICENARRYAKLFADAVQELLPQYKEREVVNKDVLDVYIEHRLMMEQRSRDPGMVRSPQNQYPAELMRRL

SEQ ID NO: 27201 - protein, 101 aa, Homo sapiens
IPNLVKADGANVKMNSTTTTAVSASSTSSSAVSTPPLIKPVLMSKSVPPSPEKILNGKGILPTTIDKKHQNGTKNSNKPYRRLSDTFAKPSEGSPRPEKAI

SEQ ID NO: 27202 - protein, 31 aa, Homo sapiens
KWKSLLSQQLLCKMPRPGIVAEHPRPAEVPP

SEQ ID NO: 27203 - protein, 14 aa, Homo sapiens
LASPSSPRSRTGTM

SEQ ID NO: 27204 - protein, 38 aa, Homo sapiens
LFPGLLFRRLKGVDFGMGFAVLRELASFPWLVLSGRTI

SEQ ID NO: 27205 - protein, 85 aa, Homo sapiens
KELQAKIQGMKNAVPKNDKKRRKQLTEDVAKLEKEMEQKHREELEQLKLTTKENKIDSVAVNISNLVLENQPPRISKAQKRRVPG

SEQ ID NO: 27206 - protein, 10 aa, Homo sapiens
RKPSGAAAAI

SEQ ID NO: 27207 - protein, 139 aa, Homo sapiens
RKPLLQAWVSPSETHPVSAQPGAGTGSAKHRLHPVKPMNAMATKVANCSLGTATIISENLNNEVMMKKYSPSDPAFAYAQLTHDELIQLVLKQKETISKKEFQVRELEDYIDNLLVRVMEETPNILRIPTQVGKKAGKM

SEQ ID NO: 27208 - protein, 26 aa, Homo sapiens
RCQRLVMPRIPLGSREAKLRGTASCR

SEQ ID NO: 27209 - protein, 74 aa, Homo sapiens
LPLLILSRSAALQCDESESSSHPARAFLLLPALFYFSFGRRRHCCTQLVSVPRFYPQVVPAAYGPGRLGYFCSR

SEQ ID NO: 27210 - protein, 752 aa, Homo sapiens
VIEKECSALGGLFQTIISDMKGSYPVWEDFINKAGKLQSQLRTTVVAAAAFLDAFQKVADMATNTRGGTREIGSALTRMCMRHRSIEAKLRQFSSALIDCLINPLQEQMEEWKKVANQLDKDHAKEYKKARQEIKKKSSDTLKLQKKAKKGRGDIQPQLDSALQDVNDKYLLLEETEKQAVRKALIEERGRFCTFISMLRPVIEEEISMLGEITHLQTISEDLKSLTMDPHKLPSSSEQVILDLKGSDYSWSYQTPPSSPSTTMSRKSSVCSSLNSVNSSDSRSSGSHSHSPSSHYRYRSSNLAQQAPVRLSSVSSHDSGFISQDAFQSKSPSPMPPEAPNQLSNGFSHYSLSSESHVGPTGAGLFPHCLPASRLLPRVTSVHLPDYAHYYTIGPGMFPSSQIPSWKDWAKPGPYDQPLVNTLQRRKEKREPDPNGGGPTTASGPPAAAEEAQRPRSMTVSAATRPGEEMEACEELALALSRGLQLDTQRSSRDSLQCSSGYSTQTTTPCCSEDTIPSQVSDYDYFSVSGDQEADQQEFDKSSTIPRNSDISQSYRRMFQAKRPASTAGLPTTLGPAMVTPGVATIRRTPSTKPSVRRGTIGAGPIPIKTPVIPVKTPTVPDLPGVLPAPPDGPEERGEHSPESPSVGEGPQGVTSMPSSMWSGQASVNPPLPGPKPSIPEEHRQAIPESEAEDQEREPPSATVSPGQIPESDPADLSPRDTPQGEDMLNAIRRGVKLKKTTTNDRSAPRFS

SEQ ID NO: 27211 - protein, 37 aa, Homo sapiens
KVLCTCFLLLREYLSPPERMGYACVQRTRRCAPASLS

SEQ ID NO: 27212 - protein, 53 aa, Homo sapiens
VQRGAAAGRPSRAHFATLTVPAVAVEVGTAAASSPLVTAQARTPAEPLGCALP

SEQ ID NO: 27213 - protein, 716 aa, Homo sapiens
TEPPQHSKPTAEEGSPASPGPEPGPLAVPGSTAGASPRRTSAPPTLSASAGETPSPTIQRARYPPGPHHLFSSQDFIPYMHDSIRFGNVDMPCVQAQYSPSPPGSSYAAQTYSSEYTTEIMNPDYTKLTMDLGSTEITATATTSLPSISTFVEGYSSNYELKPSCVYQMQRPLIKVEEGRAPSYHHHHHHHHHHHHHHQQQHQQPSIPPASSPEDEVLPSTSMYFKQSPPSTPTTPAFPPQAGALWDEALPSAPGCIAPGPLLDPPMKAVPTVAGARFPLFHFKPSPPHPPAPSPAGGHHLGYDPTAAAALSLPLGAAAAAGSQAAALESHPYGLPLAKRAAPLAFPPLGLTPSPTASSLLGESPSLPSPPSRSSSSGEGTCAVCGDNAACQHYGVRTCEGCKGFFKRTVQKNAKYVCLANKNCPVDKRRRNRCQYCRFQKCLSVGMVKEVVRTDSLKGRRGRLPSKPKSPLQQEPSQPSPPSPPICMMNALVRALTDSTPRDLDYSRYCPTDQAAAGTDAEHVQQFYNLLTASIDVSRSWAEKIPGFTDLPKEDQTLLIESAFLELFVLRLSIRSNTAEDKFVFCNGLVLHRLQCLRGFGEWLDSIKDFSLNLQSLNLDIQALACLSALSMITERHGLKEPKRVEELCNKITSSLKDHQSKGQALEPTESKVLGALVELRKICTLGLQRIFYLKLEDLVSPPSIIDKLFLDTLPF

SEQ ID NO: 27214 - protein, 86 aa, Homo sapiens
LPLPLPLPLPPRGSGASVVRPTPRCRWEEARGKPLAGLSPLLAHRLEEPSPGPVGRLPPLVAVTRGPPQPPAGRGARHGFWSRFKR

SEQ ID NO: 27215 - protein, 53 aa, Homo sapiens
LPSGSCGCWGQPLGVPRHPSPRSPSLSGTGPSLTSPQSCPATPAPATASPAAT

SEQ ID NO: 27216 - protein, 23 aa, Homo sapiens
ICVIRWQRLERLCLRSAFCPVNV

SEQ ID NO: 27217 - protein, 27 aa, Homo sapiens
RLEKRSCHHGCTFTEDQHWECGEDDAV

SEQ ID NO: 27218 - protein, 50 aa, Homo sapiens
RDSASERLRTPVQRSLARRIAESSPLFTTWSRFILPYPVFGFLSSPSSLC

SEQ ID NO: 27219 - protein, 508 aa, Homo sapiens
RSPRQRRSRAPTTHTHRALVRLFSGSQSAPPPPPRPSPPSAAMSTRSVSSSSYRRMFGGPGTASRPSSSRSYVTTSTRTYSLGSALRPSTSRSLYASSPGGVYATRSSAVRLRSSVPGVRLLQDSVDFSLADAINTEFKNTRTNEKVELQELNDRFANYIDKVRFLEQQNKILLAELEQLKGQGKSRLGDLYEEEMRELRRQVDQLTNDKARVEVERDNLAEDIMRLREKLQEEMLQREEAENTLQSFRQDVDNASLARLDLERKVESLQEEIAFLKKLHEEEIQELQAQIQEQHVQIDVDVSKPDLTAALRDVRQQYESVAAKNLQEAEEWYKSKFADLSEAANRNNDALRQAKQESTEYRRQVQSLTCEVDALKGTNESLERQMREMEENFAVEAANYQDTIGRLQDEIQNMKEEMARHLREYQDLLNVKMALDIEIATYRKLLEGEESRISLPLPNFSSLNLRETNLDSLPLVDTHSKRTLLIKTVETRDGQVINETSQHHDDLE

SEQ ID NO: 27220 - protein, 749 aa, Homo sapiens
IRAARAPPVSSASPPLCSLYLTSCCCWCFFFFYPPFLFIIFLHIDRILGNERKKKPKLTRAEDLPPLPLPSSLFSPPQEKKTPKQKKVHLGLVFFLQYFLGGQNFLGVIFFGFSSSFIFLPKLLLVGEKKMPQLNGGGGDDLGANDELISFKDEGEQEEKSSENSSAERDLADVKSSLVNESETNQNSSSDSEAERRPPPRSESFRDKSRESLEEAAKRQDGGLFKGPPYPGYPFIMIPDLTSPYLPNGSLSPTARTLHFQSGSTHYSAYKTIEHQIAVQYLQMKWPLLDVQAGSLQSRQALKDARSPSPAHIVSNKVPVVQHPHHVHPLTPLITYSNEHFTPGNPPPHLPADVDPKTGIPRPPHPPDISPYYPLSPGTVGQIPHPLGWLVPQQGQPVYPITTGGFRHPYPTALTVNASMSRFPPHMVPPHHTLHTTGIPHPAIVTPTVKQESSQSDVGSLHSSKHQDSKKEEEKKKPHIKKPLNAFMLYMKEMRAKVVAECTLKESAAINQILGRRWHALSREEQAKYYELARKERQLHMQLYPGWSARDNYGKKKKRKRDKQPGETNEHSECFLNPCLSLPPITDLSAPKKCRARFGLDQQNNWCGPCRRKKKCVRYIQGEGSCLSPPSSDGSLLDSPPPSPNLLGSPPRDAKSQTEQTQPLSLSLKPDPLAHLSMMPPPPALLLAEATHKASALCPNGALDLPPAALQPAAPSSSIAQPSTSSLHSHSSLAGTQPQPLSLVTKSLE

SEQ ID NO: 27221 - protein, 152 aa, Homo sapiens
LEDSPPEDIDHKDSYLITRSIMAEPDYIEDDNPELIRPQKLINPVKTSRNHQDLHRELLMNQKRGLAPQNKPELQKVMEKRKRDQVIKQKEEEAQKKKSDLEIELLKRQQKLEQLELEKQKLQEEQENAPEFVKVKGNLRRTGQEVAQAQES

SEQ ID NO: 27222 - protein, 44 aa, Homo sapiens
VDRTRLERHLAPEVFREIFGMSIQEFDRLPLWRRNDMKKKAKLF

SEQ ID NO: 27223 - protein, 7 aa, Homo sapiens
TSLPRVS

SEQ ID NO: 27224 - protein, 38 aa, Homo sapiens
MSLFSTCLSVFQSLELPSPHDCVPTELLSVLIPLPTSA

SEQ ID NO: 27225 - protein, 54 aa, Homo sapiens
MPRHNLHKIAPLVKSLCAKHGIEYQEKPLLRALLDIIRSLKKSGKLWLDAYLHK

SEQ ID NO: 27226 - protein, 19 aa, Homo sapiens
LERDSNPASMSRSLQPPSS

SEQ ID NO: 27227 - protein, 23 aa, Homo sapiens
KNLPIPILSPCSNKSHYGDLETL

SEQ ID NO: 27228 - protein, 70 aa, Homo sapiens
LPSHQCLSLDGLPTMTCKACSLIGLRGLRGWGATQRPALGPWLQPRTRLPARTCCMGHLALCVSSGVRVS

SEQ ID NO: 27229 - protein, 8 aa, Homo sapiens
MVNSRPPA

SEQ ID NO: 27230 - protein, 22 aa, Homo sapiens
LHMPKNFKQMKATNLKLRNLPF

SEQ ID NO: 27231 - protein, 51 aa, Homo sapiens
TSSSLCLPPRPLFTSTMSLDIQSLDIQCEELSDARWAELLPLLQQCQVVRL

SEQ ID NO: 27232 - protein, 53 aa, Homo sapiens
VKRYASIARLAAPSSPRSSPGSSGGPEVARGGSEASPGARRVAPRSTVTAPCP

SEQ ID NO: 27233 - protein, 70 aa, Homo sapiens
KNVRNDWLDLRVPIWDQDIQFLPGSQKLVTCTGYHQVRVYDPASPQRRPVLETTYGEYPLTAMTLTPGGK

SEQ ID NO: 27234 - protein, 25 aa, Homo sapiens
LKLMSEAPKWMSVPQMSKRMAQNGT

SEQ ID NO: 27235 - protein, 439 aa, Homo sapiens
RLCALGVMILLRASEVRQLLHNKFVVILGDSVHRAVYKDLVLLLQKDRLLTPGQLRARGELNFEQDELVDGGQRGHMHNGLNYREVREFRSDHHLVRFYFLTRVYSDYLQTILKELQSGEHAPDLVIMNSCLWDISRYGPNSWRSYLENLENLFQCLGQVLPESCLLVWNTAMPVGEEVTGGFLPPKLRRQKATFLKNEVVKANFHSATEARKHNFDVLDLHFHFRHARENLHWDGVHWNGRVHRCLSQLLLAHVADAWGVELPHRHPVGEWIKKKKPGPRVEGPPQANRNHPALPLSPPLPSPTYRPLLGFPPQRLPLLPLLSPQPPPPILHHQGMPRFPQGPPDACFSSDHTFQSDQFYCHSDVPSSAHAGFFVEDNFMVGPQLPMPFFPTPRYQRPAPVVHRGFGRYRPRGPYTPWGQRPRPSKRRAPANPEPRPQ

SEQ ID NO: 27236 - protein, 1392 aa, Homo sapiens
LPLSPEELLKSGGVNQYVVQEVLSIKHLPPQLRAFQAAFRAQGPLAMLQHFDTIYSILHHFRSIDPGLKEDTLQFLIKVVSRHSQELPAILDDTTLSGSDRNAHLNALKMNCYALIRLLESFETMASQTNLVDLDLGGKGKKARTKAAHGFDWEEERQPILQLLTQLLQLDIRHLWNHSIIEEEFVSLVTGCCYRLLENPTINHQKNRPTREAITHLLGVALTRYNHMLSATVKIIQMLQHFEHLAPVLVAAVSLWATDYGMKSIVGEIVREIGQKCPQELSRDPSGTKGFAAFLTELAERVPAILMSSMCILLDHLDGENYMMRNAVLAAMAEMVLQVLSGDQLEAAARDTRDQFLDTLQAHGHDVNSFVRSRVLQLFTRIVQQKALPLTRFQAVVALAVGRLADKSVLVCKNAIQLLASFLANNPFSCKLSDADLAGPLQKETQKLQEMRAQRRTAAASAVLDPEEEWEAMLPELKSTLQQLLQLPQGEEEIPEQIANTETTEDVKGRIYQLLAKASYKKAIILTREATGHFQESEPFSHIDPEESEETRLLNILGLIFKGPAASTQEKNPRESTGNMVTGQTVCKNKPNMSDPEESRGNDELVKQEMLVQYLQDAYSFSRKITEAIGIISKMMYENTTTVVQEVIEFFVMVFQFGVPQALFGVRRMLPLIWSKEPGVREAVLNAYRQLYLNPKGDSARAKAQALIQNLSLLLVDASVGTIQCLEEILCEFVQKDELKPAVTQLLWERATEKVACCPLERCSSVMLLGMMARGKPEIVGSNLDTLVSIGLDEKFPQDYRLAQQVCHAIANISDRRKPSLGKRHPPFRLPQEHRLFERLRETVTKGFVHPDPLWIPFKEVAVTLIYQLAEGPEVICAQILQGCAKQALEKLEEKRTSQEDPKESPAMLPTFLLMNLLSLAGDVALQQLVHLEQAVSGELCRRRVLREEQEHKTKDPKEKNTSSETTMEEELGLVGATADDTEAELIRGICEMELLDGKQTLAAFVPLLLKVCNNPGLYSNPDLSAAASLALGKFCMISATFCDSQLRLLFTMLEKSPLPIVRSNLMVATGDLAIRFPNLVDPWTPHLYARLRDPAQQVRKTAGLVMTHLILKDMVKVKGQVSEMAVLLIDPEPQIAALAKNFFNELSHKGNAIYNLLPDIISRLSDPELGVEEEPFHTIMKQLLSYITKDKQTESLVEKLCQRFRTSRTERQQRDLAYCVSQLPLTERGLRKMLDNFDCFGDKLSDESIFSAFLSVVGKLRRGAKPEGKAIIDEFEQKLRACHTRGLDGIKELEIGQAGSQRAPSAKKPSTGSRYQPLASTASDNDFVTPEPRRTTRRHPNTQQRASKKKPKVVFSSDESSEEDLSAEMTEDETPKKTTPILRASARRHRS

SEQ ID NO: 27237 - protein, 38 aa, Homo sapiens
KDCPGLRAGNLAGLAGAAPPPWPPAPRGGRPRATGPAA

SEQ ID NO: 27238 - protein, 30 aa, Homo sapiens
IQKKKICTMYFKTCVHKTEDFLFYLVQMPS

SEQ ID NO: 27239 - protein, 22 aa, Homo sapiens
MSKIMGKIENNIIKCKTSKVLF

SEQ ID NO: 27240 - protein, 69 aa, Homo sapiens
MCHHAPLARLVSNTLPQVILPPLGLQAEELPRRQEVEQNTPSLVPIIDNIMTLHVMDQLTPSRSVNWFI

SEQ ID NO: 27241 - protein, 184 aa, Homo sapiens
ILNGSDIRSLYNFSGEQMASYFGYAVAATDVNGDGLDDLLVGAPLLMDRTPDGRPQEVGRVYVYLQHPAGIEPTPTLTLTGHDEFGRFGSSLTPLGDLDQDGYNDVAIGAPFGGETQQGVVFVFPGGPGGLGSKPSQVLQPLWAASHTPDFFGSALRGGRDLDGNGYPGELCLRPLFTLKFPGH

SEQ ID NO: 27242 - protein, 224 aa, Homo sapiens
KTAAPRSAGVWVAMEEPPVREEEEEEGEEDEERDEVGPEGALGKSPFQLTAEDVYDISYLLGRELMALGSDPRVTQLQFKVVRVLEMLEALVNEGSLALEELKMERDHLRKEVEGLRRQSPPASGEVNLGPNKMVVDLTDPNRPRFTLQELRDVLQERNKLKSQLLVVQEELQCYKSGLIPPREGPGGRREKDAVVTSAKNAGRNKEEKTIIKKLFFFRSGKQT

SEQ ID NO: 27243 - protein, 11 aa, Homo sapiens
IPTTTTRKSDR

SEQ ID NO: 27244 - protein, 36 aa, Homo sapiens
KEMPGEATETVPATEQELPQPQAETVVSHLRVWNRI

SEQ ID NO: 27245 - protein, 17 aa, Homo sapiens
TVTGTRCLLLSPSPPNP

SEQ ID NO: 27246 - protein, 9 aa, Homo sapiens
LVCSMASPA

SEQ ID NO: 27247 - protein, 29 aa, Homo sapiens
MSETKVYSSVCRCVAPPFSPAAPHIQSRS

SEQ ID NO: 27248 - protein, 14 aa, Homo sapiens
MSLFAVSMRLRAWA

SEQ ID NO: 27249 - protein, 19 aa, Homo sapiens
LSMLLLRPTIFKWDILIDE

SEQ ID NO: 27250 - protein, 20 aa, Homo sapiens
IIVMLIFTESKRKLEMIGSL

SEQ ID NO: 27251 - protein, 49 aa, Homo sapiens
TGFSLEAAFVAAVDAGKRHKVRWPTPFFPPASVEPPARVRRRRRGELAA

SEQ ID NO: 27252 - protein, 58 aa, Homo sapiens
MSHEDPGNVSYSEIGGLSEQIRELREVIELPLTNPELFQRVGIIPPKGCLLYGPPGWY

SEQ ID NO: 27253 - protein, 28 aa, Homo sapiens
ISRKKNLGHRAHPPTRTSFICSQRPRLM

SEQ ID NO: 27254 - protein, 64 aa, Homo sapiens
LVGASASRGGKEPVRGPGLPARAPRHVHRLGREVAIAERQEGRGGPGRRPGGGAPLGPARTGFI

SEQ ID NO: 27255 - protein, 88 aa, Homo sapiens
KMGHQQLYWSHPRKFGQGSRSCRVCSNRHGLIRKYGLNMCRQCFRQYAKDIGFIKVGVCRRTPCCLGREGCGGYFFRERQTDRSSLEW

SEQ ID NO: 27256 - protein, 68 aa, Homo sapiens
LRAPARSQKGEGRRELACGTPDRRGCAFPAPGPSRHTRSSPLARANAQDDHHPRVCHHLRLERSFMQG

SEQ ID NO: 27257 - protein, 73 aa, Homo sapiens
LGSARGDSAAPPAGASLPGELGRSLSWCPPRASEGSVSEKKQKQKQKQAARRKPRNNRTGAVLHCFGFFEGAG

SEQ ID NO: 27258 - protein, 13 aa, Homo sapiens
LVWTYYMDQSLSL

SEQ ID NO: 27259 - protein, 45 aa, Homo sapiens
MQQLLKPSSFIRLMQNSVILIPPRKEQAQLTLRTRKVPPTTPALR

SEQ ID NO: 27260 - protein, 208 aa, Homo sapiens
LDPGAEPWHHDSEAETLSWSHPGEMEPSQCVEELEDDVFQPEDGEPVTQPGSLLSADLFAQSLLDCPLSRLQLFPLTHCCGPGLRPTSQEDKATQTLSPASPSQGVMLPCGVTEEPQRLFYGNAGYRLPLPASFPAVLPIGEQPPEGQWQHQAEVQIARKLQCIADQFHRLHVQQHQQNQNRVWWQILLFLHNLALNGEENRNGAGPR

SEQ ID NO: 27261 - protein, 69 aa, Homo sapiens
MMKLQLPLQLSSVWILRATTYTGRIKVRRWSFWISPASGILALGSLPRCPRARSSGTSSTWTFLITVSC

SEQ ID NO: 27262 - protein, 33 aa, Homo sapiens
MSLGLQKLCAGQKDSDSLVLGSMARLWSMIYRR

SEQ ID NO: 27263 - protein, 35 aa, Homo sapiens
LLGARPAFGTERSASRAPPGKFAVESRPLGPRGPA

SEQ ID NO: 27264 - protein, 20 aa, Homo sapiens
LGFPGPPDPAARPWPSGTLR

SEQ ID NO: 27265 - protein, 84 aa, Homo sapiens
KGAHYWRFPKNSIKTEPDAPQPMGPNWLDCPAPSSGPRAPRPPKATPVSETCDCQCELNQAAGRWPAPIPLLLLPLLVGGVASR

SEQ ID NO: 27266 - protein, 23 aa, Homo sapiens
RPGRAAISSSEPSPLLATLCFFS

SEQ ID NO: 27267 - protein, 53 aa, Homo sapiens
MSSEPPPPPQPPTHQASVGLLDTPRSRERSPSPLRGNVVPSPLPTRRTRTFSA

SEQ ID NO: 27268 - protein, 47 aa, Homo sapiens
LERVTEILDYWGPNSGPLTWRLTPAEVRQVLALRIDFRSEDIKRLRL

SEQ ID NO: 27269 - protein, 22 aa, Homo sapiens
MWLMFQADLGSLRWQVLYGEKT

SEQ ID NO: 27270 - protein, 81 aa, Homo sapiens
LSCDSGLFSPFSAVAADTPTACCFSYTSRQIPQNFIADYFETSSQCSKPSVIFLTKRGRQVCADPSEEWVQKYVSDLELSA

SEQ ID NO: 27271 - protein, 11 aa, Homo sapiens
IATSSLSQGPV

SEQ ID NO: 27272 - protein, 75 aa, Homo sapiens
RRRRARRRLRVLEPHPPARLGRGIGRVWVKGITAWGLEGHIFSAPRISATASTARRPTVVQRWGARAAFPSRVPD

SEQ ID NO: 27273 - protein, 299 aa, Homo sapiens
RLLCGLHGRQHLGAARATAGRLAAASPWGPEGAQPQGRRLRFGTSPPGCGSGRCAEAAKQLQPPPRRSTLAPCAMVTHSKFPAAGMSRPLDTSLRLKTFSSKSEYQLVVNAVRKLQESGFYWSAVTGGEANLLLSAEPAGTFLIRDSSDQRHFFTLSVKTQSGTKNLRIQCEGGSFSLQSDPRSTQPVPRFDCVLKLVHHYMPPPGAPSFPSPPTEPSSEVPEQPSAQPLPGSPPRRAYYIYSGGEKIPLVLSRPLSSNVATLQHLCRKTVNGHLDSYEKVTQLPGPIREFLDQYDAPL

SEQ ID NO: 27274 - protein, 78 aa, Homo sapiens
RARAARGGAAGAQAPDPRRAPPGPRARPGLRETGACHGAPLGPPPLLPGPLLLLLSPAPAAPTRRPTSSWCAEVMFAP

SEQ ID NO: 27275 - protein, 15 aa, Homo sapiens
TDRGFEGGTRTRNLS

SEQ ID NO: 27276 - protein, 79 aa, Homo sapiens
KLLDDGTFMIPGEKVAHTSLDALVTFHQQKPIEPRRELLTQPCRQKDPANVDYEDLFLYSNAVAEEAACPVSAPEEVCI

SEQ ID NO: 27277 - protein, 105 aa, Homo sapiens
KPGPQDTVERPFYDLWASDNPLDRPLVGQDEFFLEQTKKKGVKRPARLHTKPSQAPAVEVAPAGASYNPSFEDHQVHCPVQASLLSGLCLLVRPSLASSLCWELQ

SEQ ID NO: 27278 - protein, 45 aa, Homo sapiens
ILERNPMNLLNVGELLLICCISSNVQVMLKRNPVLLRSIDKPLAR

SEQ ID NO: 27279 - protein, 499 aa, Homo sapiens
LLRRLEASDGGLDSAELAAELGMEHQAVVGAVKSLQALGEVIEAELRSTKHWELTAEGEEIAREGSHEARVFRSIPPEGLAQSELMRLPSGKVGFSKAMSNKWIRVDKSAADGPRVFRVVDSMEDEVQRRLQLVRGGQAEKLGEKERSELRKRKLLAEVTLKTYWVSKGSAFSTSISKQETELSPEMISSGSWRDRPFKPYNFLAHGVLPDSGHLHPLLKVRSQFRQIFLEMGFTEMPTDNFIESSFWNFDALFQPQQHPARDQHDTFFLRDPAEALQLPMDYVQRVKRTHSQGGYGSQGYKYNWKLDEARKNLLRTHTTSASARALYRLAQKKPFTPVKYFSIDRVFRNETLDATHLAEFHQIEGVVADHGLTLGHLMGVLREFFTKLGITQLRFKPAYNPYTEPSMEVFSYHQGLKKWVEVGNSGVFRPEMLLPMGLPENVSVIAWGLSLERPTMIKYGINNIRELVGHKVNLQMVYDSPLCRLDAEPRPPPTQEAA

SEQ ID NO: 27280 - protein, 239 aa, Homo sapiens
VSKMLSKGLKRKREEEEEKEPLAVDSWWLDPGHTAVAQAPPAVASSSLFDLSVLKLHHSLQQSEPDLRHLVLVVNTLRRIQASMAPAAALPPVPSPPAAPSVADNLLASSDAALSASMASLLEDLSHIEGLSQAPQPLADEGPPGRSIGGAAPSLGALDLLGPATGCLLDDGLEGLFEDIDTSMYDNELWAPASEGLKPGPEDGPGKEEAPELDEAELDYLMDVLVGTQALERPPGPGR

SEQ ID NO: 27281 - protein, 33 aa, Homo sapiens
TLPCSCSWAASRCRICWQAPPTPPTSYCRGRSR

SEQ ID NO: 27282 - protein, 15 aa, Homo sapiens
LDTPSPRLHDLPGPS

SEQ ID NO: 27283 - protein, 15 aa, Homo sapiens
LPCASALESCCCRVT

SEQ ID NO: 27284 - protein, 28 aa, Homo sapiens
LSPQMATCMSVRPSWSTFCTRRRRLPGR

SEQ ID NO: 27285 - protein, 47 aa, Homo sapiens
LHGEWKGRLCTLGKVEQGRSYSGRRWRSAAEKLEKVGRKEEKRRRLH

SEQ ID NO: 27286 - protein, 80 aa, Homo sapiens
LARRCPARRQDLGTPDRLPLPPGTLAPSLPPTRRPSGAPIPDQPSGVADPASRKDFSPDLGRTPCTPPSSPACLLSPRAS

SEQ ID NO: 27287 - protein, 18 aa, Homo sapiens
TWMTARNISPNTIRLANG

SEQ ID NO: 27288 - protein, 109 aa, Homo sapiens
RPPGMDVVDPDIFNRDPRDHYDLLQRLGGGTYGEVFKARDKVSGDLVALKMVKMEPDDDVSTLQKEILILKTCRHANIVAYHGSYLWLQKLWICMEFCGAGSLQDIYQG

SEQ ID NO: 27289 - protein, 6 aa, Homo sapiens
MAFQVF

SEQ ID NO: 27290 - protein, 35 aa, Homo sapiens
MARPPPLPGPEGAWRSPSAARPAAWGPERGEEIVF

SEQ ID NO: 27291 - protein, 22 aa, Homo sapiens
IHRPSLLLSSPTSTPSATTAPA

SEQ ID NO: 27292 - protein, 24 aa, Homo sapiens
LSPSLRQPRRTAHQEARARMGSLC

SEQ ID NO: 27293 - protein, 31 aa, Homo sapiens
KAGAPAVGLLLANERSPRRRRGANDPTQDGE

SEQ ID NO: 27294 - protein, 20 aa, Homo sapiens
IHSPRPFSGCPPVPLPALPP

SEQ ID NO: 27295 - protein, 20 aa, Homo sapiens
KNQTAEKEEFEHQQKELKKV

SEQ ID NO: 27296 - protein, 41 aa, Homo sapiens
VGAVGFDGAAARPPWPLTGSCGGSGGCRLSMRRKSKRCAGS

SEQ ID NO: 27297 - protein, 18 aa, Homo sapiens
KGRRAVKMAASMESSTAV

SEQ ID NO: 27298 - protein, 267 aa, Homo sapiens
MELVQHIGIPASKIICANPCKQIAQIKYAAKHGIQLLSFDNEMELAKVVKSHPSAKMVLCIATDDSHSLSCLSLKFGVSLKSCRHLLENAKKHHVEVVGVSFHIGSGCPDPQAYAQSIADARLVFEMGTELGHKMHVLDLGGGFPGTEGAKVRFEEIASVINSALDLYFPEGCGVDIFAELGRYYVTSAFTVAVSIIAKKEVLLDQPGREEENGSTSKTIVYHLDEGVYGIFNSVLFDNICPTPILQKSKNHSPCYMSLESIHFIAV

SEQ ID NO: 27299 - protein, 5891 aa, Homo sapiens
MYQQLRELQDALALISRLTESRGPLSVVEAIEKRIISETVGLKILEAHLATGGFSLSPSENCINLEEAFHQGLISAWLHSVLESYLRTSKNLIDPNTAEKIGLLDLMQRCIVHQESGFKLLPVKQLAGGMVSLKSGRKVSIFRAVQEGLIDRQVTVRLLEAQLFAGGIVDPRTGHRLTVEEAVRHNLIDQDMACAILIRQLQTGGIIDTVTGQRLTIDEAVSNDLVAAKIALVILESLWSFMGLLWPESGEILPITDALEQGIVSTELAHKILSNRQHIKALFLPATTEILSWKKAIESGILDRDLANNLKSICIPDVMPHMQLADSAEQNINPGAAVLPCSKSHPKATASQSENLLFQLMTHSYINVQNGQRLLLLDKELMETLTSRDEYQTSPPKVVEIGHQRQKTPEGLQESANVKISGTFSSGWTVRLPEFQFSSQNKEYPDREDCTTEKGKKTTVETEDSSVENPEQDLFVEQKERNPNIDALKVINKVKLEVQRQLIGTQREDQTAVSVRENASRGHLLTIPPAEAEGVPLVVDKDVFSVETPKKEHQPLRNTSFTCQNEQAHTLETEYIHDETGGSHIKPQSKKLQVQVKKTLGIKLELKSETDGNVHPLDKKEMLKKTFLAKDDHKESQEAQNIAGGSMMMSEKTDEEDSGREIFLSCSHPLELLEEATLNVLSAQLLDGGIFHEQTGQKLLLNEAISRGIVPSHTAVKLMEKLNMFQGFFDSQTCESLTTEEVINEGLMDEKLLHNVLMADKAISGVLDPRTQTLCSVKDAVTVGLLDKETATRILERQVVTGGIIDLKRGKKVSVTLASTLGLVDVADQPELINLEKASKGRDAEKTVRERLISLQMETTGLIDPDSKAPLTVVQSIDRGLLEREEAVRLLTKQVVDGGIIHHISGMRLSVDNAFRHGLIGEDLAEKLKRVENLNIHQIFNPETKENISLPKAIKLDLITSDLKREIQEVQAFTGNFVDLISGQRLTLAEAKKEGLLTNEAVLSPGMMHGIVDPENCRIVPYSELVKKCKIDIESGQRYLEVIPFSDIKDGVSDKVLTLSQAIQLGKVDFASTLKVLEAQANTGGIIDTATGKRLTLASALEEKLVDENMVRIIASHQVLNGGIVDIFSDQRVTLVEAIEKRLISPELANMIQIDSSEFSDHRAQIEKQEGIEVCALQNEFLGKDMLIACNQTAEMSCNKVEESERLFQVENQSAQEKVKVRVSDGEQAKKSREISLKEFGCKDQRKPRMSSDAKEFISIINPHNLKGKSLGQVSLTHPYSECDFKLKEVARNNMGNDTNEEQEKAVTKIEIISHMKQSTSCLDSEEIRENQGEVILEVQETYCETSGKLPSEQVLQQPMNARVKSKREKREVIVEESIRTCKPAFLSEEKLYQETAIRDEHDSHIKSQPREMTSSEKGKEADTEMGFSITFKIEESSSQVVPQGISVKHLDALTLFSSKQANEGKVNNLSLCLTLKPEENLSREIACGAQSEPFPCMTPRPEGLHYQESDGKAQVTGPSQISKTDKSFQGTTRQETNYQDSWVTSKTKETKHQISSSNECKEKSYQEVSFDPARGLKLEEITVSRPDSKEVRYLEFSDRKDLHHQGSKSDDKLCGTLKSEIATQELTGEKFLEMANPNVAGLEAGSIEDIVTQRGSRVLGSFLPEKLFKGVSQKENTGQQNAIISPTVLETSEEKTVSLTVCSAVKTEKTPQEKLRESPGSEQTPFMTAPEGKGNGGVNPEPFRATQNVFTRQLCLEHDEKLVSYLSLLRNIEMRTKQIQPLELNLAELQDLLCQAKVLERELKDLTTLVSQELECVNQIIISQPQEVPAQLLKALEKDAKNLQKSLSSVSDTWNSRLLHFQNAVEIEKTKVLNQHTQLEGRLQDLRAWVGNKNLILNSKGSNSEIDVDSLNLCLQQYEDLKQPMAERKAQLDALAFDIQFFISEHAQDLSPQQNRQMLRLLNELQRSFQDILEQTAAQVDALQGHLQQMEQEALVKTLQKQQNTCHQQLEDLCSWVGQAERALAGHQGRTTQQDLSALQKNQSDLKDLQDDIQNRATSFATVVKDIEGFMEENQTKLSPRELTALREKLHQAKEQYEALQEETRVAQKELEEAVTSALQQETEKSKAAKELAENKKKIDALLDWVTSVGSSGGQLLTNLPGMEQLSGASLEKGALDTTDGYMGVNQAPEKLDKQCEMMKARHQELLSQQQNFILATQSAQAFLDQHGHNLTPEEQQMLQQKLGELKEQYSTSLAQSEAELKQVQTLQDELQKFLQDHKEFESWLERSEKELENMHKGGSSPETLPSLLKRQGSFSEDVISHKGDLRFVTISGQKVLDMENSFKEGKEPSEIGNLVKDKLKDATERYTALHSKCTRLGSHLNMLLGQYHQFQNSADSLQAWMQACEANVEKLLSDTVASDPGVLQEQLATTKQLQEELAEHQVPVEKLQKVARDIMEIEGEPAPDHRHVQETTDSILSHFQSLSYSLAERSSLLQKAIAQSQSVQESLESLLQSIGEVEQNLEGKQVSSLSSGVIQEALATNMKLKQDIARQKSSLEATREMVTRFMETADSTTAAVLQGKLAEVSQRFEQLCLQQQEKESSLKKLLPQAEMFEHLSGKLQQFMENKSRMLASGNQPDQDITHFFQQIQELNLEMEDQQENLDTLEHLVTELSSCGFALDLCQHQDRVQNLRKDFTELQKTVKEREKDASSCQEQLDEFRKLVRTFQKWLKETEGSIPPTETSMSAKELEKQIEHLKSLLDDWASKGTLVEEINCKGTSLENLIMEITAPDSQGKTGSILPSVGSSVGSVNGYHTCKDLTEIQCDMSDVNLKYEKLGGVLHERQESLQAILNRMEEVHKEANSVLQWLESKEEVLKSMDAMSSPTKTETVKAQAESNKAFLAELEQNSPKIQKVKEALAGLLVTYPNSQEAENWKKIQEELNSRWERATEVTVARQRQLEESASHLACFQAAESQLRPWLMEKELMMGVLGPLSIDPNMLNAQKQQVQFMLKEFEARRQQHEQLNEAAQGILTGPGDVSLSTSQVQKELQSINQKWVELTDKLNSRSSQIDQAIVKSTQYQELLQDLSEKVRAVGQRLSVQSAISTQPEAVKQQLEETSEIRSDLEQLDHEVKEAQTLCDELSVLIGEQYLKDELKKRLETVALPLQGLEDLAADRINRLQAALASTQQFQQMFDELRTWLDDKQSQQAKNCPISAKLERLQSQLQENEEFQKSLNQHSGSYEVIVAEGESLLLSVPPGEEKRTLQNQLVELKNHWEELSKKTADRQSRLKDCMQKAQKYQWHVEDLVPWIEDCKAKMSELRVTLDPVQLESSLLRSKAMLNEVEKRRSLLEILNSAADILINSSEADEDGIRDEKAGINQNMDAVTEELQAKTGSLEEMTQRLREFQESFKNIEKKVEGAKHQLEIFDALGSQACSNKNLEKLRAQQEVLQALEPQVDYLRNFTQGLVEDAPDGSDASQLLHQAEVAQQEFLEVKQRVNSGCVMMENKLEGIGQFHCRVREMFSQLADLDDELDGMGAIGRDTDSLQSQIEDVRLFLNKIHVLKLDIEASEAECRHMLEEEGTLDLLGLKRELEALNKQCGKLTERGKARQEQLELTLGRVEDFYRKLKGLNDATTAAEEAEALQWVVGTEVEIINQQLADFKMFQKEQVDPLQMKLQQVNGLGQGLIQSAGKDCDVQGLEHDMEEINARWNTLNKKVAQRIAQLQEALLHCGKFQDALEPLLSWLADTEELIANQKPPSAEYKVVKAQIQEQKLLQRLLDDRKATVDMLQAEGGRIAQSAELADREKITGQLESLESRWTELLSKAAARQKQLEDILVLAKQFHETAEPISDFLSVTEKKLANSEPVGTQTAKIQQQIIRHKALEEDIENHATDVHQAVKIGQSLSSLTSPAEQGVLSEKIDSLQARYSEIQDRCCRKAALLDQALSNARLFGEDEVEVLNWLAEVEDKLSSVFVKDFKQDVLHRQHADHLALNEEIVNRKKNVDQAIKNGQALLKQTTGEEVLLIQEKLDGIKTRYADITVTSSKALRTLEQARQLATKFQSTYEELTGWLREVEEELATSGGQSPTGEQIPQFQQRQKELKKEVMEHRLVLDTVNEVSRALLELVPWRAREGLDKLVSDANEQYKLVSDTIGQRVDEIDAAIQRSQQYEQAADAELAWVAETKRKLMALGPIRLEQDQTTAQLQVQKAFSIDIIRHKDSMDELFSHRSEIFGTCGEEQKTVLQEKTESLIQQYEAISLLNSERYARLERAQVLVNQFWETYEELSPWIEETRALIAQLPSPAIDHEQLRQQQEEMRQLRESIAEHKPHIDKLLKIGPQLKELNPEEGEMVEEKYQKAENMYAQIKEEVRQRALALDEAVSQSTQITEFHDKIEPMLETLENLSSRLRMPPLIPAEVDKIRECISDNKSATVELEKLQPSFEALKRRGEELIGRSQGADKDLAAKEIQDKLDQMVFFWEDIKARAEEREIKFLDVLELAEKFWYDMAALLTTIKDTQDIVHDLESPGIDPSIIKQQVEAAETIKEETDGLHEELEFIRILGADLIFACGETEKPEVRKSIDEMNNAWENLNKTWKERLEKLEDAMQAAVQYQDTLQAMFDWLDNTVIKLCTMPPVGTDLNTVKDQLNEMKEFKVEVYQQQIEMEKLNHQGELMLKKATDETDRDIIREPLTELKHLWENLGEKIAHRQHKLEGALLALGQFQHALEELMSWLTHTEELLDAQRPISGDPKVIEVELAKHHVLKNDVLAHQATVETVNKAGNELLESSAGDDASSLRSRLEAMNQCWESVLQKTEEREQQLQSTLQQAQGFHSEIEDFLLELTRMESQLSASKPTGGLPETAREQLDTHMELYSQLKAKEETYNQLLDKGRLMLLSRDDSGSGSKTEQSVALLEQKWHVVSSKMEERKSKLEEALNLATEFQNSLQEFINWLTLAEQSLNIASPPSLILNTVLSQIEEHKVFANEVNAHRDQIIELDQTGNQLKFLSQKQDVVLIKNLLVSVQSRWEKVVQRSIERGRSLDDARKRAKQFHEAWKKLIDWLEDAESHLDSELEISNDPDKIKLQLSKHKEFQKTLGGKQPVYDTTIRTGRALKEKTLLPEDSQKLDNFLGEVRDKWDTVCGKSVERQHKLEEALLFSGQFMDALQALVDWLYKVEPQLAEDQPVHGDLDLVMNLMDAHKVFQKELGKRTGTVQVLKRSGRELIENSRDDTTWVKGQLQELSTRWDTVCKLSVSKQSRLEQALKQAEVFRDTVHMLLEWLSEAEQTLRFRGALPDDTEALQSLIDTHKEFMKKVEEKRVDVNSAVAMGEVILAVCHPDCITTIKHWITIIRARFEEVLTWAKQHQQRLETALSELVANAELLEELLAWIQWAETTLIQRDQEPIPQNIDRVKALIAEHQTFMEEMTRKQPDVDRVTKTYKRKNIEPTHAPFIEKSRSGGRKSLSQPTPPPMPILSQSEAKNPRINQLSARWQQVWLLALERQRKLNDALDRLEELKEFANFDFDVWRKKYMRWMNHKKSRVMDFFRRIDKDQDGKITRQEFIDGILASKFPTTKLEMTAVADIFDRDGDGYIDYYEFVAALHPNKDAYRPTTDADKIEDEVTRQVAQCKCAKRFQVEQIGENKYRFFLGNQFGDSQQLRLVRILRSTVMVRVGGGWMALDEFLVKNDPCRARGRTNIELREKFILPEGASQGMTPFRSRGRRSKPSSRAASPTRSSSSASQSNHSCTSMPSSPATPASGTKVIPSSGSKLKRPTPTFHSSRTSLAGDTSNSSSPASTGAKTNRADPKKSASRPGSRAGSRAGSRASSRRGSDASDFDLLETQSACSDTSESSAAGGQGNSRRGLNKPSKIPTMSKKTTTASPRTPGPKR

SEQ ID NO: 27300 - protein, 67 aa, Homo sapiens
MEFKQLETVAQGVKEGQLSKQKCSSAFQNLLPFYSPVVEDFIKILREVDKALADDLEKNFPSLKVQT

SEQ ID NO: 27301 - protein, 440 aa, Homo sapiens
MLGSADEPGVMYLTMLHLYKCMDEIKEEKICSTAVSYLEVYNEQIRDLLVNSGPLAVREDTQKGVVVHGLTLHQPKSSEEILHLLDNGNKNRTQHPTDMNATSSRSHAVFQIYLRQQDKTASINQNVRIAKMSLIDLAGSERASTSGAKGTRFVEGTNINRSLLALGNVINALADSKRKNQHIPYRNSKLTRLLKDSLGGNCQTIMIAAVSPSSVFYDDTYNTLKYANRAKDIKSSLKSNVLNVNNHITQYVKICNEQKAEILLLKEKLKAYEEQKAFTNENDQAKLMISNPQEKEIERFQEILNCLFQNREEIRQEYLKLEMLLKENELKSFYQQQCHKQIEMMCSEDKVEKKESLLLLPKLECSGTTSAHCNLCLPDSSNSPASASQLAGITSVHHYAQLIFVFLVEMMFHNVGHASLELLTSGDPSASASQSAGITG

SEQ ID NO: 27302 - protein, 16 aa, Homo sapiens
MFVANDRLFSLCKNYG

SEQ ID NO: 27303 - protein, 63 aa, Homo sapiens
MCVLAFLTTPLLCISFFHFLFQAFLFLPCGNSFGASDCSSSECAAIPVDPVPGLQLLHLCQLS

SEQ ID NO: 27304 - protein, 161 aa, Homo sapiens
MGRQEGRLVSPSLQLHCCPQRAKLEAAIAEAEERGELALKDARAKQEELEAALQRGKQDMARQLREYQELMSVKLALDIEIATYRKLLEGEESRLAGDGVGAVNISVMNSTGGSSSGGGIGLTLGGTMGSNALSFSSSAGPGLLKAYSIRTASASRRSARD

SEQ ID NO: 27305 - protein, 142 aa, Homo sapiens
MLGPESVPPPKRSRSKLMAPPRIGTHNGTFHCDEALACALLRLLPEYRDAEIVRTRDPEKLASCDIVVDVGGEYDPRRHRYDHHQRSFTETMSSLSPGKPWQTKLSSAGLIYLHFGHKLLAQLLGTSEEDSMVGTLYDKVGT

SEQ ID NO: 27306 - protein, 231 aa, Homo sapiens
MIKEFRKNWRALCNSERTTLCGADSMLLALQLSMAENNKQHSGEFTVSLSDVLLTWKYLLHEKLNLPVENMDVTDHYEDVRKIYDDFLKNSNMLDLIDVYQKCRALTSNCENYNTVSPGSTIQPPSERGSLLLSRPDLLAPGEDPPVSASLTLERQKGESLLAWSWSLNFRLPGIPITVQKKRRDLKKLAAVMRQVRQWESHPLQNIEEATWHQLTVQAEKKEPGTQGASV

SEQ ID NO: 27307 - protein, 161 aa, Homo sapiens
MIKEFRKNWRALCNSERTTLCGADSMLLALQLSMAENNKQHSGEFTVSLSDVLLTWKYLLHEKLNLPVENMDVTDHYEDVRKIYDDFLKNSNMLDLIDVYQKCRALTSNCENYNTVSPSQLLDFLSGKQYAVGDETDLSIPTSPTSKYNRDNEKALPVLKR

SEQ ID NO: 27308 - protein, 403 aa, Homo sapiens
MSAPSSTGPQYCPGLPSRKEATPEGRPETCLLPSSPQAQRPIQGLEQRADGERCWAAGWPRDGGRSSPGGQDEGGGSWPLEEVVLLVSISSSVQEGEKYPHPCAARHRTPSLRSPDQPPPCPQFMAQGKTGSSSPPGGPPKPGSQLDSMLGSLQSDLNKLGVATVAKGVCGACKKPIAGQVVTAMGKTWHPEHFVCTHCQEEIGSRNFFERDGQPYCEKDYHNLFSPRCYYCNGPILDKVVTALDRTWHPEHFFCAQCGAFFGPEGFHEKDGKAYCRKDYFDMFAPKCGGCARAILENYISALNTLWHPECFVCRECFTPFVNGSFFEHDGQPYCEVHYHERRGSLCSGCQKPITGRCITAMAKKFHPEHFVCAFCLKQLNKGTFKEQNDKPYCQNCFLKLFC

SEQ ID NO: 27309 - protein, 102 aa, Homo sapiens [sequence omitted]

SEQ ID NO: 27310 - protein, 110 aa, Homo sapiens
MKPGAGTRQPSAPIQSAQAGVSSGSTTWQARTRPRAPANRSLHSSPRAPRPRPAPPRPVSPAERPLVLERVRQSVCSRSCRSPAAAGLDSETFLVSLLRHLCCKIEAVLW

SEQ ID NO: 27311 - protein, 44 aa, Homo sapiens
MRPSLQVVMRLVDCAVTVEISPVLPLRRWDLTKGNVREILMAQV

SEQ ID NO: 27312 - protein, 195 aa, Homo sapiens
MLSGIEAAAGEYEDSELRCRVAVEELSPGGQPRRRQALRTAELSLGRNERRELMLRLQAPGPAGRPRCFPLRAARLFTRFAEAGRSTLRLPAHDTPGAGAVQLLLSDCPPDRLRRFLRTLRLKLAAAPGPGPASARAQLLGPRPRDFVTISPVQPEERRLRAATRVPDTTLVKRPVEPQAGAEPSTVRTGKKGHL

SEQ ID NO: 27313 - protein, 885 aa, Homo sapiens
MRCLAPRPAGSYLSEPQGSSQCATMELGPLEGGYLELLNSDADPLCLYHFYDQMDLAGEEEIELYSEPDTDTINCDQFSRLLCDMEGDEETREAYANIAELDQYVFQDSQLEGLSKDIFIEHIGPDEVIGESMEMPAEVGQKSQKRPFPEELPADLKHWKPVPFSSSSLSCLNLPEGPIQFVPTISTLPHGLWQISEAGTGVSSIFIYHGEVPQASQVPPPSGFTVHGLPTSPDRPGSTSPFAPSATDLPSMPEPALTSRANMTEHKTSPTQCPAAGEVSNKLPKWPEPVEQFYRSLQDTYGAEPAGPDGILVEVDLVQARLERSSSKSLERELATPDWAERQLAQGGLAEVLLAAKEHRRPRETRVIAVLGKAGQGKSYWAGAVSRAWACGRLPQYDFVFSVPCHCLNRPGDAYGLQDLLFSLGPQPLVAADEVFSHILKRPDRVLLILDGFEELEAQDGFLHSTCGPAPAEPCSLRGLLAGLFQKKLLRGCTLLLTARPRGRLVQSLSKADALFELSGFSMEQAQAYVMRYFESSGMTEHQDRALTLLRDRPLLLSHSHSPTLCRAVCQLSEALLELGEDAKLPSTLTGLYVGLLGRAALDSPPGALAELAKLAWELGRRHQSTLQEDQFPSADVRTWAMAKGLVQHPPRAAESELAFPSFLLQCFLGALWLALSGEIKDKELPQYLALTPRKKRPYDNWLEGVPRFLAGLIFQPPARCLGALLGPSAAASVDRKQKVLARYLKRLQPGTLRARQLLELLHCAHEAEEAGIWQHVVQELPGRLSFLGTRLTPPDAHVLGKALEAAGQDFSLDLRSTGICPSGLGSLVGLSCVTRFRWGEGLGEETSLCWALTAVLVPSPVLCGVSFSMQSSRVGQNGFSPFLR

SEQ ID NO: 27314 - protein, 166 aa, Homo sapiens
MSRQVVRSSKFRHVFGQPAKADQCYEDVRVSQTTWDSGFCAVNPKFVALICEASGGGAFLVLPLGKTGRVDKNAPTVCGHTAPVLDIAWCPHNDNVIASGSEDCTVMVWEIPDGGLMLPLREPVVTLEGHTKRVGIVAWHTTAQNVLLSAGAAGGGAWGWLVACSG

SEQ ID NO: 27315 - protein, 89 aa, Homo sapiens
MLNCAVLAGWCPRAWRGLKKPGSQQPGAPLWVLKAHSLLCGSSHPTSSQPCSSRVDLRSPGPRRGKNLRNTEQCPGIYKTGFRMLNKRR

SEQ ID NO: 27316 - protein, 27 aa, Homo sapiens
MVDTKGGFPTIRMHLLCFEIATMDSYG

SEQ ID NO: 27317 - protein, 114 aa, Homo sapiens
MDSPPVPRSERAADPEWPHMRIDPQEGGGVKAIGPLGRRSMRLGPRRRAACGRVAFGSSTFALVPVFAHLSILQSLVPAAGAASPVAISAQHLCYSHVTPGDPGAGAGQGPAPS

SEQ ID NO: 27318 - protein, 466 aa, Homo sapiens
MQQNIHDFECQCHNDERNYREIPAIKIKNITGRRDQGDGRNAGNKPVENQLELSFWLHLAELQGFQIERKIYECNQIEKSVTRGSSVSLLQTNLPCVNTSISNIYRNDFMHPSLLTQDQKAYIREKPYKCSDCGKAFNQRSNLTTHQRIHTGQKPHKCDICGKGFRRIANLASHHRIHTGEKPYRCNECGKTFNQTFNLTTHQRIHTGQKPYKCDRCGKGFRQIGNLASHHRIHTGEKPYRCNECGKTFNRMFHLTRHQRIHTGQKPYKCDICGKGFRQIANLASHHRIHTGEKPYKCSDCGKTFNYRSHLTRHQRIHTGQKPYKCDTCGKDFSQNSYLENHQRIHTREKSYRCNECGKTFNKMTNLTTHQRIHTGQKTYKCDICGKGFRQIGNLASHHRIHTGEKPYRCNECGKTFNRMFHLTRHQRIHTGQKPYKCDICGKSFSQNSYLENHQRIHTGEKTYKL

SEQ ID NO: 27319 - protein, 206 aa, Homo sapiens
MSYFPRGLKYQEGGVESAFHKTSTGAPAAIKKLYQVKGKKNIRATERALNWDSFNTGDCFILDLGQNIFAWCGGKSNILERNKARDLALAIRDSERQGKAQVEIVTDGEEPAEMIQVLGPKPALKEGNPEEDLTADKANAQAAALYKVSDATGQMNLTKVADSSPFALELLISDDCFVLDNGLCGKIYIWKVFQKRLDEFKRAKSE

SEQ ID NO: 27320 - protein, 766 aa, Homo sapiens
MHCEYPKELYSCSLDGTIKLWDYIDGILIKTFIVGCKLHALFTLAQAEDSVFVIVNKEKPDIFQLVSVKLPKSSSQEVEAKELSFVLDYINQSPKCIAFGNEGVYVAAVREFYLSVYFFKKKTTSRFTLSSSRNKKHAKNNFTCVACHPTEDCIASGHMDGKIRLWRNFYDDKKYTYTCLHWHHDMVMDLAFSVTGTSLLSGGRESVLVEWRDATEKNKEFLPRLGATIEHISVSPAGDLFCTSHSDNKIIIIHRNLEASAVIQGLVKDRSIFTGLMIDPRTKALVLNGKPGHLQFYSLQSDKQLYNLDIIQQEYINDYGLIQIELTKAAFGCFGNWLATVEQRQEKETELELQMKLWMYNKKTQGFILNTKINMPHEDCITALCFCNAEKSEQPTLVTASKDGYFKVWILTDDSDIYKKAVGWTCDFVGSYHKYQATNCCFSEDGSLLAVSFEEIVTIWDSVTWELKCTFCQRAGKIRHLCFGRLTCSKYLLGATENGILCCWNLLSCALEWNAKLNVRVMEPDPNSENIAAISQSSVGSDLFVFKPSEPRPLYIQKGISREKVQWGVFVPRDVPESFTSEAYQWLNRSQFYFLTKSQSLLTFSTKSPEEKLTPTSKQLLAEESLPTTPFYFILGKHRQQQDEKLNETLENELVQLPLTENIPAISELLHTPAHVLPSAAFLCSMFVNSLLLSKETKSAKEIPEDVDMEEEKESEDSDEENDFTEKVQDTSNTGLGEDIIHQLSKSEEKELRKFRKIDYSWIAAL

SEQ ID NO: 27321 - protein, 75 aa, Homo sapiens [sequence omitted]

SEQ ID NO: 27322 - protein, 170 aa, Homo sapiens
MRLVVTADDFGYCPRRDEGIVEAFLAGAVTSVSLLVNGAATESAAELARRHSIPTGLHANLSEGRPVGPARRGASSLLGPEGFFLGKMGFREAVAAGDVDLPQVREELEAQLSCFRELLGRAPTHADGHQHVHVLPGAWLVIPVWRALLPGGAGGVGEVRCPQVKGRAPP

SEQ ID NO: 27323 - protein, 70 aa, Homo sapiens
MTHIVREVDRPGSKVNKKEVVEAVTIVETPPMVVVGIVGYVETPRGLRTFKTVFAEHISDECKRRFYKNW

SEQ ID NO: 27324 - protein, 53 aa, Homo sapiens
MGFTLAPSLGCFVGSRFVHGEGLRWYAGLQKPSWHPPHWVLGPVWGTLYSAMG

SEQ ID NO: 27325 - protein, 104 aa, Homo sapiens
MASPRELTQNPLKKIWMPYSNGRPALHACQRGVCMTNCPTLIVMVGLPARGKTYISKKLTRYLNWIGVPTREFNVGQYRRDVVKTYKSFEFFLPDNEEGLKIRK

SEQ ID NO: 27326 - protein, 746 aa, Homo sapiens
MYLKITQESRQNSTVEEDSEGDNDSEEFYYGGQVNYDGELHKHPQLEADLSAVREIYGPHAVSLREYGAIDDVDIDLHIDVSFLDEEIAVAWEVIRTEPIIVRLHCSLTQYLNGPVPTVDVFQISTKERFGLGHQLKKIMQTFVTQQWKQSKEKSNCLHNKKLSEKKVKSPLHLFSTLRRSPSYPPPGCGKSKSKLKSEQDGISKTHKLLRRTCSSTVKTDDVCVTKSHRTFGRSLSSDPRAEQAMTAIKSHKLLNRPCPAAVKSEECLTLKSHRLLTRSCSGDPRCEHNTNLKPHKLLSRSYSSNLRMEELYGLKNHKLLSKSYSSAPKSSKTELFKEPNAEGRRLSLTSGLIGILTPSSSSSSQLAPNGAKCIPVRDRGFLVQTIEFAEQRIPVLNEYCVVCDEPHVFQNGPMLRPTVCERELCVFAFQTLGVMNEAADEIATGAQVVDLLVSMCRSALESPRKVVIFEPYPSVVDPNDPQMLAFNPRKKNYDRVMKALDSITSIREMTQAPYLEIKKQMDKQDPLAHPLLQWVISSNRSHIVKLPVNRQLKFMHTPHQFLLLSSPPAKESNFRAAKKLFGSTFAFHGSHIENWHSILRNGLVVASNTRLQLHGAMYGSGIYLSPMSSISFGYSGMNKKQKVSAKDEPASSSKSSNTSQSQKKGQQSQFLQSRNLKCIALCEVITSSDLHKHGEIWVVPNTDHVCTRFFFVYEDGQVGDANINTQEGGIHKEILRVIGNQTATG

SEQ ID NO: 27327 - protein, 57 aa, Homo sapiens [sequence omitted]

SEQ ID NO: 27328 - protein, 87 aa, Homo sapiens
MPLGADCARYTTLSLLRRARMHIQKLEDQEQRARQLKERLRSKQQSLQRQLEQLRGLAGAAERERLRADSLDSSGLSSERSDSDQGP

SEQ ID NO: 27329 - protein, 21 aa, Homo sapiens
MFKNTSASLPQVWHAAFWKEN

SEQ ID NO: 27330 - protein, 1122 aa, Homo sapiens
MAGVRSTTLLSSPCEWDWHPGCSSRSKYSRKHRAVPVHGPRCQAPGMEELIWEQYTVTLQKDSKRGFGIAVSGGRDNPHFENGETSIVISDVLPGGPADGLLQENDRVVMVNGTPMEDVLHSFAVQQLRKSGKVAAIVVKRPRKVQVAALQASPPLDQDDRAFEVMDEFDGRSFRSGYSERSRLNSHGGRSRSWEDSPERGRPHERARSRERDLSRDRSRGRSLERGLDQDHARTRDRSRGRSLERGLDHDFGPSRDRDRDRSRGRSIDQDYERAYHRAYDPDYERAYSPEYRRGARHDARSRGPRSRSREHPHSRSPSPEPRGRPGPIGVLLMKSRANEEYGLRLGSQIFVKEMTRTGLATKDGNLHEGDIILKINGTVTENMSLTDARKLIEKSRGKLQLVVLRDSQQTLINIPSLNDSDSEIEDISEIESNRSFSPEERRHQYSDYDYHSSSEKLKERPSSREDTPSRLSRMGATPTPFKSTGDIAGTVVPETNKEPRYQEDPPAPQPKAAPRTFLRPSPEDEAIYGPNTKMVRFKKGDSVGLRLAGGNDVGIFVAGIQEGTSAEQEGLQEGDQILKVNTQDFRGLVREDAVLYLLEIPKGEMVTILAQSRADVYRDILACGRGDSFFIRSHFECEKETPQSLAFTRGEVFRVVDTLYDGKLGNWLAVRIGNELEKGLIPNKSRAEQMASVQNAQRDNAGDRADFWRMRGQRSGVKKNLRKSREDLTAVVSVSTKFPAYERVLLREAGFKRPVVLFGPIADIAMEKLANELPDWFQTAKTEPKDAGSEKSTGVVRLNTVRQIIEQDKHALLDVTPKAVDLLNYTQWFPIVIFFNPDSRQGVKTMRQRLNPTSNKSSRKLFDQANKLKKTCAHLFTATINLNSANDSWFGSLKDTIQHQQGEAVWVSEGKMEGMDDDPEDRMSYLTAMGADYLSCDSRLISDFEDTDGEGGAYTDNELDEPAEEPLVSSITRSSEPVQHEEAKTQNKEESYDFSKSYEYKSNPSAVAGNETPGASTKGYPPPVAAKPTFGRSILKPSTPIPPQEGEEVGESSEEQDNAPKSVLGKVKIFEKMDHKARLQRMQELQEAQNARIEIAQKHPDIYAVPIKTHKPDPGTPQHTR

SEQ ID NO: 27331 - protein, 57 aa, Homo sapiens
MLLLTRAEGKKYKPLDLRPKKTRAMRRRLNKHEENLKTKKQQRKERLYPLRKYAVKA

SEQ ID NO: 27332 - protein, 820 aa, Homo sapiens
MWAEAAGPAGGAEPLFPGSRRSRSVWDAVRLEVGVPDSCPVVLHSFTQLDPDLPRPESSTQEIGEELINGVIYSISLRKVQLHHGGNKGQRWLGYENESALNLYETCKVRTVKAGTLEKLVEHLVPAFQGSDLSYVTIFLCTYRAFTTTQQVLDLLFKRYGCILPYSDEDGGPQDQLKNAISSILGTWLDQYSEDFCQPPDFPCLKQLVAYVQLNMPGSDLERRAHLLLAQLEHSEPIEAEPEALSPVPALKPTPELELALTPARAPSPVPAPAPEPEPAPTPAPGSELEVAPAPAPELQQAPEPAVGLESAPAPALELEPAPEQDPAPSQTLELEPAPAPVPSLQPSWPSPVVAENGLSEEKPHLLVFPPDLVAEQFTLMDAELFKKVVPYHCLGSIWSQRDKKGKEHLAPTIRATVTQFNSVANCVITTCLGNRSTKAPDRARVVEHWIEVARECRILKNFSSLYAILSALQSNSIHRLKKTWEDVSRDSFRIFQKLSEIFSDENNYSLSRELLIKEGTSKFATLEMNPKRAQKRPKETGIIQGTVPYLGTFLTDLVMLDTAMKDYLYGRLINFEKRRKEFEVIAQIKLLQSACNNYSIAPDEQFGAWFRAVERLSETESYNLSCELEPPSESASNTLRTKKNTAIVKRWSDRQAPSTELSTSGSSHSKSCDQLRCGPYLSSGDIADALSVHSAGSSSSDVEEINISFVPESPDGQEKKFWESASQSSPETSGISSASSSTSSSSASTTPVAATRTHKRSVSGLCNSSSALPLYNQQVGDCCIIRVSLDVDNGNMYKSILVSRRGWPGCLPPLAANAP

SEQ ID NO: 27333 - protein, 71 aa, Homo sapiens
MAKFVIRPATAADCSDILRLIKELAKYEYMEEQVILTEKDLLEDGFGEHPFYHCLVAEVPKEHWTPEGYSL

SEQ ID NO: 27334 - protein, 85 aa, Homo sapiens
KGHRPGTARGGKVAPGAEAAERSPRRRPDWLPRNCGDSPYSELGLRFPGLSPSPEAPTKPGKEGKDSGGSSSMSAYSRKPERARS

SEQ ID NO: 27335 - protein, 492 aa, Homo sapiens
LCLMESMFSSPAEAALQRETGVPGLLTPLPDLDGVYELERVAGFVRDLGCERVALQFPDQLLGDAVAVAARLEETTGSKMFILGDTAYGSCCVDVLGAEQAGAQALIHFGPACLSPPARPLPVAFVLRQRSVALELCVKAFEAQNPDPKAPVVLLSEPACAHALEALATLLRPRYLDLLVSSPAFPQPVGSLSPEPMPLERFGRRFPLAPGRRLEEYGAFYVGGSKASPDPDLDPDLSRLLLGWAPGQPFSSCCPDTGKTQDEGARAGRLRARRRYLVERARDARVVGLLAGTLGVAQHREALAHLRNLTQAAGKRSYVLALGRPTPAKLANFPEVDVFVLLACPLGALAPQLSGSFFQPILAPCELEAACNPAWPPPGLAPHLTHYADLLPGSPFHVALPPPESELWETPDVSLITGDLRPPPAWKSSNDHGSLALTPRPQLELAESSPAASFLSSRSWQGLEPRLGQTPVTEAVSGRRGIAIAYEDEGSG

SEQ ID NO: 27336 - protein, 12 aa, Homo sapiens
LSAAGTVGAQTM

SEQ ID NO: 27337 - protein, 73 aa, Homo sapiens
LSAAGTVGERERTEEGSLQTDAFSIPRRGQVPGRWAWRCFRRAQRWEEAEETRAWEINRKLPRWKLCLSPDIM

SEQ ID NO: 27338 - protein, 743 aa, Homo sapiens
TTFLSAEAFPPTLMLFNSVLRQPQLGVLRNGWSSQYPLQSLLTGYQCSGNDEHTSYGETGVPVPPFGCTFSSAPNMEHVLAVANEEGFVRLYNTESQSFRKKCFKEWMAHWNAVFDLAWVPGELKLVTAAGDQTAKFWDVKAGELIGTCKGHQCSLKSVAFSKFEKAVFCTGGRDGNIMVWDTRCNKKDGFYRQVNQISGAHNTSDKQTPSKPKKKQNSKGLAPSVDFQQSVTVVLFQDENTLVSAGAVDGIIKVWDLRKNYTAYRQEPIASKSFLYPGSSTRKLGYSSLILDSTGSTLFANCTDDNIYMFNMTGLKTSPVAIFNGHQNSTFYVKSSLSPDDQFLVSGSSDEAAYIWKVSTPWQPPTVLLGHSQEVTSVCWCPSDFTKIATCSDDNTLKIWRLNRGLEEKPGGDKLSTVGWASQKKKESRPGLVTVTSSQSTPAKAPRAKCNPSNSSPSSAACAPSCAGDLPLPSNTPTFSIKTSPAKARSPINRRGSVSSVSPKPPSSFKMSIRNWVTRTPSSSPPITPPASETKIMSPRKALIPVSQKSSQAEACSESRNRVKRRLDSSCLESVKQKCVKSCNCVTELDGQVENLHLDLCCLAGNQEDLSKDSLGPTKSSKIEGAGTSISEPPSPISPYASESCGTLPLPLRPCGEGSEMVGKENSSPENKNWLLAMAAKRKAENPSPRSPSSQTPNSRRQSGKKLPSPVTITPSSMRKICTYFHRKSQEDFCGPEHSTEL

SEQ ID NO: 27339 - protein, 12 aa, Homo sapiens
VRRNSEQVVHYG

SEQ ID NO: 27340 - protein, 7 aa, Homo sapiens
LKVVHYG

SEQ ID NO: 27341 - protein, 29 aa, Homo sapiens
TVGKKTEDHTKREQEIQISSQSAHCDSGR

SEQ ID NO: 27342 - protein, 16 aa, Homo sapiens
LARTRRVFPPTASRWW

SEQ ID NO: 27343 - protein, 20 aa, Homo sapiens
LERAGEEGAAGTTASGCVRS

SEQ ID NO: 27344 - protein, 142 aa, Homo sapiens
LPDVLEEASEEEDGAEEGEDGDRVPRGLKGKKNSVPVTVAMVERWKQAAKQRLTPKLFHEVVQAFRAAVATTRGDQESAEANKFQVTDSAAFNALVTFCIRDLIGCLQKLLFGKVAKDSSSKCGPKETSLRQLVVPGRPQRC

SEQ ID NO: 27345 - protein, 40 aa, Homo sapiens
VGWQMRKKTPRLRKKMKKLEEVQKVDRVKERDFFLKNCDV

SEQ ID NO: 27346 - protein, 48 aa, Homo sapiens
LEAAERKPHHGCNPKEAGDRWGWCLWEDLPPHRLQQGSVSGGLRPYCL

SEQ ID NO: 27347 - protein, 28 aa, Homo sapiens
LGASEMLPSAREGRARRRQPGSRHDALA

SEQ ID NO: 27348 - protein, 455 aa, Homo sapiens
RQRDSGDWPAMPSRAEDYEVLYTIGTGSYGRCQKIRRKSDGKILVWKELDYGSMTEAEKQMLVSEVNLLRELKHPNIVRYYDRIIDRTNTTLYIVMEYCEGGDLASVITKGTKERQYLDEEFVLRVMTQLTLALKECHRRSDGGHTVLHRDLKPANVFLDGKQNVKLGDFGLARILNHDTSFAKTFVGTPYYMSPEQMNRMSYNEKSDIWSLGCLLYELCALMPPFTAFSQKELAGKIREGKFRRIPYRYSDELNEIITRMLNLKDYHRPSVEEILENPLIADLVADEQRRNLERRGRQLGEPEKSQDSSPVLSELKLKEIQLQERERALKAREERLEQKEQELCVRERLAEDKLARAENLLKNYSLLKERKFLSLASNPELLNLPSSVIKKKVHFSGESKENIMRSENSESQLTSKSKCKDLKKRLHAAQLRAQALSDIEKNYQLKSRQILGMR

SEQ ID NO: 27349 - protein, 10 aa, Homo sapiens
MWEARLHNLW

SEQ ID NO: 27350 - protein, 19 aa, Homo sapiens
LAQVNYRKCQVGNLPMVKW

SEQ ID NO: 27351 - protein, 13 aa, Homo sapiens
LSALPLALLPVPR

SEQ ID NO: 27352 - protein, 37 aa, Homo sapiens
LGMPLTPTVQGFQWILRGPDVETSPLGAPRAASHGVG

SEQ ID NO: 27353 - protein, 11 aa, Homo sapiens
LTCSREIWVSS

SEQ ID NO: 27354 - protein, 21 aa, Homo sapiens
REGLKVCMCEGRERERRAPQR

SEQ ID NO: 27355 - protein, 21 aa, Homo sapiens
ILAKQCLKMVLLSSKKSFGKS

SEQ ID NO: 27356 - protein, 12 aa, Homo sapiens
RTGVDKARWQGS

SEQ ID NO: 27357 - protein, 257 aa, Homo sapiens
LGRAVCLLTGASRGFGRTLAPLLASLLSPGSVLVLSARNDEALRQLEAELGAERSGLRVVRVPADLGAEAGLQQLLGALRELPRPKGLQRLLLINNAGSLGDVSKGFVDLSDSTQVNNYWALNLTSMLCLTSSVLKAFPDSPGLNRTVVNISSLCALQPFKGWALYCAGKAARDMLFQVLALEEPNVRVLNYAPGPLDTDMQQLARETSVDPDMRKGLQELKAKGKLVDCKVSAQKLLSLLEKDEFKSGAHVDFYDK

SEQ ID NO: 27358 - protein, 1149 aa, Homo sapiens
VAPGEVAPGELETMAKMEVKTSLLDNMIGVGDMVLLEPLNEETFINNLKKRFDHSEIYTYIGSVVISVNPYRSLPIYSPEKVEEYRNRNFYELSPHIFALSDEAYRSLRDQDKDQCILITGESGAGKTEASKLVMSYVAAVCGKGAEVNQVKEQLLQSNPVLEAFGNAKTVRNDNSSRFGKYMDIEFDFKGDPLGGVISNYLLEKSRVVKQPRGERNFHVFYQLLSGASEELLNKLKLERDFSRYNYLSLDSAKVNGVDDAANFRTVRNAMQIVGFMDHEAESVLAVVAAVLKLGNIEFKPESRVNGLDESKIKDKNELKEICELTGIDQSVLERAFSFRTVEAKQEKVSTTLNVAQAYYARDALAKNLYSRLFSWLVNRINESIKAQTKVRKKVMGVLDIYGFEIFEDNSFEQFIINYCNEKLQQIFIELTLKEEQEEYIREDIEWTHIDYFNNAIICDLIENNTNGILAMLDEECLRPGTVTDETFLEKLNQVCATHQHFESRMSKCSRFLNDTSLPHSCFRIQHYAGKVLYQVEGFVDKNNDLLYRDLSQAMWKASHALIKSLFPEGNPAKINLKRPPTAGSQFKASVATLMKNLQTKNPNYIRCIKPNDKKAAHIFNEALVCHQIRYLGLLENVRVRRAGYAFRQAYEPCLERYKMLCKQTWPHWKGPARSGVEVLFNELEIPVEEYSFGRSKIFIRNPRTLFKLEDLRKQRLEDLATLIQKIYRGWKCRTHFLLMKKSQIVIAAWYRRYAQQKRYQQTKSSALVIQSYIRGWKARKILRELKHQKRCKEAVTTIAAYWHGTQARRELRRLKEEARNKHAIAVIWAYWLGSKARRELKRLKEEARRKHAVAVIWAYWLGLKVRREYRKFFRANAGKKIYEFTLQRIVQKYFLEMKNKMPSLSPIDKNWPSRPYLFLDSTHKELKRIFHLWRCKKYRDQFTDQQKLIYEEKLEASELFKDKKALYPSSVGQPFQGAYLEINKNPKYKKLKDAIEEKIIIAEVVNKINRANGKSTSRIFLLTNNNLLLADQKSGQIKSEVPLVDVTKVSMSSQNDGFFAVHLKEGSEAASKGDFLFSSDHLIEMATKLYRTTLSQTKQKLNIEISDEFLVQFRQDKVCVKFIQGNQKNGSVPTCKRKNNRLLEVAVP

SEQ ID NO: 27359 - protein, 16 aa, Homo sapiens
LHVARRSAWLSWCSVW

SEQ ID NO: 27360 - protein, 36 aa, Homo sapiens
LSNLKGPSALNSSPDHLILQGPRSRSWSHQNFWAKG

SEQ ID NO: 27361 - protein, 167 aa, Homo sapiens
IFFDTWDNEAYVHDAPVRSLNCTLRDSQQKSLVMSGPYELKALHLQGQDMEQQVVFSMSFVQGEESNDKIPVALGLKEKNLYLSCVLKDDKPTLQLESVDPKNYPKKKMEKRFVFNKIEINNKLEFESAQFPNWYISTSQAENMPVFLGGTKGGQDITDFTMQFVSS

SEQ ID NO: 27362 - protein, 6 aa, Homo sapiens
KMVMEL

SEQ ID NO: 27363 - protein, 16 aa, Homo sapiens
LDSFRKASLDVNEDPP

SEQ ID NO: 27364 - protein, 35 aa, Homo sapiens
KETEGPRMPRTCRPHRGLVLNRGGAGGTLMWHQMK

SEQ ID NO: 27365 - protein, 24 aa, Homo sapiens
LKEEEVGFKAKDGQGKMPEKVLSR

SEQ ID NO: 27366 - protein, 470 aa, Homo sapiens
IMPIRALCTICSDFFDHSRDVAAIHCGHTFHLQCLIQWFETAPSRTCPQCRIQVGKRTIINKLFFDLAQEEENVLDAEFLKNELDNVRAQLSQKDKEKRDSQVIIDTLRDTLEERNATVVSLQQALGKAEMLCSTLKKQMKYLEQQQDETKQAQEEARRLRSKMKTMEQIELLLQSQRPEVEEMIRDMGVGQSAVEQLAVYCVSLKKEYENLKEARKASGEVADKLRKDLFSSRSKLQTVYSELDQAKLELKSAQKDLQSADKEIMSLKKKLTMLQETLNLPPVASETVDRLVLESPAPVEVNLKLRRPSFRDDIDLNATFDVDTPPARPSSSQHGYYEKLCLEKSHSPIQDVPKKICKGPRKESQLSLGGQSCAGEPDEELVGAFPIFVRNAILGQKQPKRPRSESSCSKDVVRTGFDGLGGRTKFIQPTDTVMIRPLPVKPKTKVKQRVRVKTVPSLFQAKLDTFLWS

SEQ ID NO: 27367 - protein, 60 aa, Homo sapiens
VEEVPGAVPKLTRVPVTMRQPVRPAAPPVNAPAFSAPLQRTALGGMSWMSRASRKTLRKS

SEQ ID NO: 27368 - protein, 303 aa, Homo sapiens
LPAAMAELGLNEHHQNEVINYMRFARSKRGLRLKTVDSCFQDLKESRLVEDTFTIDEVSEVLNGLQAVVHSEVESELINTAYTNVLLLRQLFAQAEKWYLKLQTDISELENRELLEQVAEFEKAEITSSNKKPILDVTKPKLAPLNEGGTAELLNKEILRLQEENEKLKSRLKTIEIQATNALDEKSKLEKALQDLQLDQGNQKDFIKAQDLSNLENTVAALKSEFQKTLNDKTENQKSLEENLATAKHDLLRVQEQLHMAEKELEKKFQQTAAYRNMKEILTKKNDQIKDLRKRLAQYEPED

SEQ ID NO: 27369 - protein, 425 aa, Homo sapiens
VGLPARGKTYISKKLTRYLNWIGVPTREFNVGQYRRDVVKTYKSFEFFLPDNEEGLKIRKQCALAALRDVRRFLSEEGGHVAVFDATNTTRERRATIFNFGEQNGYKTFFVESICVDPEVIAANIVQVKLGSPDYVNRDSDEATEDFMRRIECYENSYESLDEDLDRDLSYIKIMDVGQSYVVNRVADHIQSRIVYYLMNIHVTPRSIYLCRHGESELNLKGRIGGDPGLSPRGREFAKSLAQFISDQNIKDLKVWTSQMKRTIQTAEALGVPYEQWKVLNEIDAGVCEEMTYEEIQDNYPLEFALRDQDKYRYRYPKGESYEDLVQRLEPVIMELERQENVLVICHQAVMRCLLAYFLDKAAEQLPYLKCPLHTVLKLTPVAYGCKVESIFLNVAAVNTHRDRPQNVDISRPPEEALVTVPAHQ

SEQ ID NO: 27370 - protein, 12 aa, Homo sapiens
LDMALRGRPAGR

SEQ ID NO: 27371 - protein, 42 aa, Homo sapiens
IQSAAPGERDPSLVEAQSSGRVHPACVWREAGKPVPGSWPQR

SEQ ID NO: 27372 - protein, 1036 aa, Homo sapiens
LAGWQAVAERGQDSSRQGSRAMGAERRLLSIKEAFRLAQQPHQNQAKLVVALSRTYRTMDDKTVFHEEFIHYLKYVMVVYKREPAVERVIEFAAKFVTSFHQSDMEDDEEEEDGGLLNYLFTFLLKSHEANSNAVRFRVCLLINKLLGSMPENAQIDDDVFDKINKAMLIRLKDKIPNVRIQAVLALSRLQDPKDDECPVVNAYATLIENDSNPEVRRAVLSCIAPSAKTLPKIVGRTKDVKEAVRKLAYQVLAEKVHMRAMSIAQRVMLLQQGLNDRSDAVKQAMQKHLLQGWLRFSEGNILELLHRLDVENSSEVAVSVLNALFSITPLSELVGLCKNNDGRKLIPVETLTPEIALYWCALCEYLKSKGDEGEEFLEQILPEPVVYADYLLSYIQSIPVVNEEHRGDFSYIGNLMTKEFIGQQLILIIKSLDTSEEGGRKKLLAVLQEILILPTIPISLVSFLVERLLHIIIDDNKRTQIVTEIISEIRAPIVTVGVNNDPADVRKKELKMAEIKVKLIEAKEALENCITLQDFNRASELKEEIKALEDARINLLKETEQLEIKEVHIEKNDAETLQKCLILCYELLKQMSISTGLSATMNGIIESLILPGIISIHPVVRNLAVLCLGCCGLQNQDFARKHFVLLLQVLQIDDVTIKISALKAIFDQLMTFGIEPFKTKKIKTLHCEGTEINSDDEQESKEVEETATAKNVLKLLSDFLDSEVSELRTGAAEGLAKLMFSGLLVSSRILSRLILLWYNPVTEEDVQLRHCLGVFFPVFAYASRTNQECFEEAFLPTLQTLANAPASSPLAEIDITNVAELLVDLTRPSGLNPQAKTSQDYQALTVHDNLAMKICNEILTSPCSPEIRVYTKALSSLELSSHLAKDLLVLLNEILEQVKDRTCLRALEKIKIQLEKGNKEFGDQAEAAQDATLTTTTFQNEDEKNKEVYMTPLRGVKATQASKSTQLKTNRGQRKVTVSARTNRRCQTAEADSESDHEVPEPESEMKMRLPRRAKTAALEKSKLNLAQFLNEDLS

SEQ ID NO: 27373 - protein, 437 aa, Homo sapiens
VAAAPGMFHSPRRLCSALLQRDAPGLRRLPAPGLRRPLSPPAAVPRPASPRLLAAASAASGAARSCSRTVCSMGTGTSRLYSALAKTLNSSAASQHPEYLVSPDPEHLEPIDPKELLEECRAVLHTRPPRFQRDFVDLRTDCPSTHPPIRVMQWNILAQALGEGKDNFVQCPVEALKWEERKCLILEEILAYQPDILCLQEVDHYFDTFQPLLSRLGYQGTFFPKPWSPCLDVEHNNGPDGCALFFLQNRFKLVNSANIRLTAMTLKTNQVAIAQTLECKESGRQFCIAVTHLKARTGWERFRSAQGCDLLQNLQNITQGAKIPLIVCGDFNAEPTEEVYKHFASSSLNLNSAYKLLSADGQSEPPYTTWKIRTSGECRHTLDYIWYSKHALNVRSALDLLTEEQIGPNRLPSFNYPSDHLSLVCDFSFTEESDGLS

SEQ ID NO: 27374 - protein, 109 aa, Homo sapiens
MSLAAPDANPVVGFLAYSRPSVLPGWHRPHRTSRVGLSGSSTAGPRNSRFGAAPSRLGHTGARCRSPVLRHLVWNFRLAVSSRSGALCGVVWWKNGPCVGLTPSVCVSE

SEQ ID NO: 27375 - protein, 35 aa, Homo sapiens
VCAAREWEAKGAGQGEAQEPLQPRARLPCLVCFAR

SEQ ID NO: 27376 - protein, 14 aa, Homo sapiens
KSILRGAASGSGSN

SEQ ID NO: 27377 - protein, 29 aa, Homo sapiens
VEIRGGRQDSLAAVPAAVHWVKNDNQHQP

SEQ ID NO: 27378 - protein, 54 aa, Homo sapiens
LLLSRLEPPLADSGERECASHPPRPAAGPSASGNVSGAACTLLRPWTHHMMVLR

SEQ ID NO: 27379 - protein, 38 aa, Homo sapiens
LRDRGSVFELLVRWSARCPRPRAKPGGRSLVTVSTESV

SEQ ID NO: 27380 - protein, 711 aa, Homo sapiens
VRVLYPASRAGERTRVPGSPAPSSLPLHSPGACGTEVDMDPQRSPLLEVKGNIELKRPLIKAPSQLPLSGSRLKRRPDQMEDGLEPEKKRTRGLGATTKITTSHPRVPSLTTVPQTQGQTTAQKVSKKTGPRCSTAIATGLKNQKPVPAVPVQKSGTSGVPPMAGGKKPSKRPAWDLKGQLCDLNAELKRCRERTQTLDQENQQLQDQLRDAQQQVKALGTERTTLEGHLAKVQAQAEQGQQELKNLRACVLELEERLSTQEGLVQELQKKQVELQEERRGLMSQLEEKERRLQTSEAALSSSQAEVASLRQETVAQAALLTEREERLHGLEMERRRLHNQLQELKGNIRVFCRVRPVLPGEPTPPPGLLLFPSGPGGPSDPPTRLSLSRSDERRGTLSGAPAPPTRHDFSFDRVFPPGSGQDEVFEEIAMLVQSALDGYPVCIFAYGQTGSGKTFTMEGGPGGDPQLEGLIPRALRHLFSVAQELSGQGWTYSFVASYVEIYNETVRDLLATGTRKGQGGECEIRRAGPGSEELTVTNARYVPVSCEKEVDALLHLARQNRAVARTAQNERSSRSHSVFQLQISGEHSSRGLQCGAPLSLVDLAGSERLDPGLALGPGERERLRETQAINSSLSTLGLVIMALSNKESHVPYRNSKLTYLLQNSLGGSAKMLMFVNISPLEENVSESLNSLRFASKVNQCVIGTAQANRK

SEQ ID NO: 27381 - protein, 20 aa, Homo sapiens
MARSASAAARRAIPCTCTRC

SEQ ID NO: 27382 - protein, 25 aa, Homo sapiens
LDFIVPQPAPVPIVCVFFKIWQRFR

SEQ ID NO: 27383 - protein, 87 aa, Homo sapiens
INRLGKKRKCSRRRSSSSSNSNSSSKKKSEIPEKAGGRRMWMMMEKRKSSWSVLRSSQCQPVMRRMKYPPQNPAEGRKPRVVMFLQP

SEQ ID NO: 27384 - protein, 25 aa, Homo sapiens
LRHLLSGPQALARFGGGACRTQHTQ

SEQ ID NO: 27385 - protein, 675 aa, Homo sapiens
LSFRRSEGLSSCRGSRPPFPAPSLRAEPTEQGTGMAKAAAIGIDLGTTYSCVGVFQHGKVEIIANDQGNRTTPSYVAFTDTERLIGDAAKNQVALNPQNTVFDAKRLIGRKFGDPVVQSDMKHWPFQVINDGDKPKVQVSYKGETKAFYPEEISSMVLTKMKEIAEAYLGYPVTNAVITVPAYFNDSQRQATKDAGVIAGLNVLRIINEPTAAAIAYGLDRTGKGERNVLIFDLGGGTFDVSILTIDDGIFEVKATAGDTHLGGEDFDNRLVNHFVEEFKRKHKKDISQNKRAVRRLRTACERAKRTLSSSTQASLEIDSLFEGIDFYTSITRARFEELCSDLFRSTLEPVEKALRDAKLDKAQIHDLVLVGGSTRIPKVQKLLQDFFNGRDLNKSINPDEAVAYGAAVQAAILMGDKSENVQDLLLLDVAPLSLGLETAGGVMTALIKRNSTIPTKQTQIFTTYSDNQPGVLIQVYEGERAMTKDNNLLGRFELSGIPPAPRGVPQIEVTFDIDANGILNVTATDKSTGKANKITITNDKGRLSKEEIERMVQEAEKYKAEDEVQRERVSAKNALESYAFNMKSAVEDEGLKGKISEADKKKVLDKCQEVISWLDANTLAEKDEFEHKRKELEQVCNPIISGLYQGAGGPGPGGFGAQGPKGGSGSGPTIEEVD

SEQ ID NO: 27386 - protein, 432 aa, Homo sapiens
VMTVKTEAAKGTLTYSRMRGMVAILIAFMKQRRMGLNDFIQKIANNSYACKHPEVQSILKISQPQEPELMNANPSPPPSPSQQINLGPSSNPHAKPSDFHFLKVIGKGSFGKVLLARHKAEEVFYAVKVLQKKAILKKKEEKHIMSERNVLLKNVKHPFLVGLHFSFQTADKLYFVLDYINGGELFYHLQRERCFLEPRARFYAAEIASALGYLHSLNIVYRDLKPENILLDSQGHIVLTDFGLCKENIEHNSTTSTFCGTPEYLAPEVLHKQPYDRTVDWWCLGAVLYEMLYGLPPFYSRNTAEMYDNILNKPLQLKPNITNSARHLLEGLLQKDRTKRLGAKDDFMEIKSHVFFSLINWDDLINKKITPPFNPNVSGPNDLRHFDPEFTEEPVPNSIGKSPDSVLVTASVKEAAEAFLGFSYAPPTDSFL

SEQ ID NO: 27387 - protein, 6 aa, Homo sapiens
IFPYQK

SEQ ID NO: 27388 - protein, 1213 aa, Homo sapiens
VRSRRVALGMAMDQVNALCEQLVKAVTVMMDPNSTQRYRLEALKFCEEFKEKCPICVPCGLRLAEKTQVAIVRHFGLQILEHVVKFRWNGMSRLEKVYLKNSVMELIANGTLNILEEENHIKDALSRIVVEMIKREWPQHWPDMLIELDTLSKQGETQTELVMFILLRLAEDVVTFQTLPPQRRRDIQQTLTQNMERIFSFLLNTLQENVNKYQQVKTDTSQESKAQANCRVGVAALNTLAGYIDWVSMSHITAENCKLLEILCLLLNEQELQLGAAECLLIAVSRKGKLEDRKPLMVLFGDVAMHYILSAAQTADGGGLVEKHYVFLKRLCQVLCALGNQLCALLGADSDVETPSNFGKYLESFLAFTTHPSQFLRSSTQMTWGALFRHEILSRDPLLLAIIPKYLRASMTNLVKMGFPSKTDSPSCEYSRFDFDSDEDFNAFFNSSRAQQGEVMRLACRLDPKTSFQMAGEWLKYQLSTFLDAGSVNSCSAVGTGEGSLCSVFSPSFVQWEAMTLFLESVITQMFRTLNREEIPVNDGIELLQMVLNFDTKDPLILSCVLTNVSALFPFVTYRPEFLPQVFSKLFSSVTFETVEESKAPRTRAVRNVRRHACSSIIKMCRDYPQLVLPNFDMLYNHVKQLLSNELLLTQMEKCALMEALVLISNQFKNYERQKVFLEELMAPVASIWLSQDMHRVLSDVDAFIAYVGTDQKSCDPGLEDPCGLNRARMSFCVYSILGVVKRTCWPTDLEEAKAGGFVVGYTSSGNPIFRNPCTEQILKLLDNLLALIRTHNTLYAPEMLAKMAEPFTKALDMLDAEKSAILGLPQPLLELNDSPVFKTVLERMQRFFSTLYENCFHILGKAGPSMQQDFYTVEDLATQLLSSAFVNLNNIPDYRLRPMLRVFVKPLVLFCPPEHYEALVSPILGPLFTYLHMRLSQKWQVINQRSLLCGEDEAADENPESQEMLEEQLVRMLTREVMDLITVCCVSKKGADHSSAPPADGDDEEMMATEVTPSAMAELTDLGKCLMKHEDVCTALLITAFNSLAWKDTLSCQRTTSQLCWPLLKQVLSGTLLADAVTWLFTSVLKGLQMHGQHDGCMASLVHLAFQIYEALRPRYLEIRAVMEQIPEIQKDSLDQFDCKLLNPSLQKVADKRRKDQFKRLIAGCIGKPLGEQFRKEVHIKNLPSLFKKTKPMLETEVLDNDGGGLATIFEP

SEQ ID NO: 27389 - protein, 43 aa, Homo sapiens
LHELKGHYAITRKAFSDAIKKWQELSPETSGKRKKRKEMNQYS

SEQ ID NO: 27390 - protein, 118 aa, Homo sapiens
KDTGNVKKQGSGTPPKEPSNSPATDPHPKEIQEMSYRELWKLILTKIRGIQETSEKESKEMSTAILDMVEVFTNQIQSFPEHMANVELKKSLDEIQSILESFNDRLDQAEKKLSKLKI

SEQ ID NO: 27391 - protein, 31 aa, Homo sapiens
IASAKEVLESCVLAARDPAWVGRCFCEKPKD

SEQ ID NO: 27392 - protein, 6 aa, Homo sapiens
VTVAFP

SEQ ID NO: 27393 - protein, 26 aa, Homo sapiens
LCFRSEPPWPGRSCVDQASQECGHVF

SEQ ID NO: 27394 - protein, 488 aa, Homo sapiens
VNLLGLGEAVWTKQVRSVAMFSEQAAQRAHTLLSPPSANNATFARVPVATYTNSSQPFRLGERSFSRQYAHIYATRLIQMRPFLENRAQQHWGSGVGVKKLCELQPEEKCCVVGTLFKAMPLQPSILREVSEEHNLLPQPPRSKYIHPDDELVLEDELQRIKLKGTIDVSKLVTGTVLAVFGSVRDDGKFLVEDYCFADLAPQKPAPPLDTDRFVLLVSGLGLGGGGGESLLGTQLLVDVVTGQLGDEGEQCSAAHVSRVILAGNLLSHSTQSRDSINKAKYLTKKTQAASVEAVKMLDEILLQLSASVPVDVMPGEFDPTNYTLPQQPLHPCMFPLATAYSTLQLVTNPYQATIDGVRFLGTSGQNVSDIFRYSSMEDHLEILEWTLRVRHISPTAPDTLGCYPFYKTDPFIFPECPHVYFCGNTPSFGSKIIRGPEDQTVLLVTVPDFSATQTACLVNLRSLACQPISFSGFGAEDDDLGGLGLGP

SEQ ID NO: 27395 - protein, 23 aa, Homo sapiens
LTRRAEPGLESGDHCGSRKEEMM

SEQ ID NO: 27396 - protein, 20 aa, Homo sapiens
LVRARETAGPRAQGYKINAI

SEQ ID NO: 27397 - protein, 15 aa, Homo sapiens
KKTTWKLRKKMESWS

SEQ ID NO: 27398 - protein, 18 aa, Homo sapiens
TALGSDGTEGLRAREGKG

SEQ ID NO: 27399 - protein, 617 aa, Homo sapiens
LRRARRALRRRNSIKKMAALTPRKRKQDSLKCDSLLHFTENLFPSPNKKHCFYQNSDKNEENLHCSQQEHFVLSALKTTEINRLPSANQGSPFKSALSTVSFYNQNKWYLNPLERKLIKESRSTCLKTNDEDKSFPIVTEKMQGKPVCSKKNNKKPQKSLTAKYQPKYRHIKPVSRNSRNSKQNRVIYKPIVEKENNCHSAENNSNAPRVLSQKIKPQVTLQGGAAFFVRKKSSLRKSSLENEPSLGRTQKSKSEVIEDSDVETVSEKKTFATRQVPKCLVLEEKLKIGLLSASSKNKEKLIKDSSDDRVSSKEHKVDKNEAFSSEDSLGENKTISPKSTVYPIFSASSVNSKRSLGEEQFSVGSVNFMKQTNIQKNTNTRDTSKKTKDQLIIDAGQKHFGATVCKSCGMIYTASNPEDEMQHVQHHHRFLEGIKYVGWKKERVVAEFWDGKIVLVLPHDPSFAIKKVEDVQELVDNELGFQQVVPKCPNKIKTFLFISDEKRVVGCLIAEPIKQAFRVLSEPIGPESPSSTECPRAWQCSDVPEPAVCGISRIWVFRLKRRKRIARRLVDTLRNCFMFGCFLSTDEIAFSDPTPDGKLFATKYCNTPNFLVYNFNS

SEQ ID NO: 27400 - protein, 40 aa, Homo sapiens
ISIRPVAVSQLLSRRWMGKCATQCAYFIWFSELWTHWKMT

SEQ ID NO: 27401 - protein, 339 aa, Homo sapiens
LLDADDAAAVAAKCPRLSECSSPPDYLSPPGSPCSPQPPPAAPGAGGGSGSAPGPSRIADYLLLPLAEREHVSRALCIHTGRELRCKVFPIKHYQDKIRPYIQLPSHSNITGIVEVILGETKAYVFFEKDFGDMHSYVRSRKRLREEEAARLFKQIVSAVAHCHQSAIVLGDLKLRKFVFSTEERTQLRLESLEDTHIMKGEDDALSDKHGCPAYVSPEILNTTGTYSGKAADVWSLGVMLYTLLVGRYPFHDSDPSALFSKIRRGQFCIPEHISPKARCLIRSLLRREPSERLTAPEILLHPWFESVLEPGYIDSEIGTSDQIVPEYQEDSDISSFFC

SEQ ID NO: 27402 - protein, 62 aa, Homo sapiens
RLTAGNLGDPSALPAVAAADPRLRREGRPRCARPEVTRPGPSSLPSTIPLRLRAPASSCESL

SEQ ID NO: 27403 - protein, 10 aa, Homo sapiens
VWHAAFWKEN

SEQ ID NO: 27404 - protein, 36 aa, Homo sapiens
IPVLFSVSSRLGAVPLLRQEDGGRKEDEKVAGVDQL

SEQ ID NO: 27405 - protein, 53 aa, Homo sapiens
VGWSRMESPSRAGGVGLGKAASPLCSESSGYCGAFPRRSARRHLHLGPTSWAG

SEQ ID NO: 27406 - protein, 10 aa, Homo sapiens
VDRPRSAAVE

SEQ ID NO: 27407 - protein, 31 aa, Homo sapiens
IALQQPTHGDCANLLLSYNAGPVIGLSEDHG

SEQ ID NO: 27408 - protein, 21 aa, Homo sapiens
ICSSRKRDVEAATQTSQTRAS

SEQ ID NO: 27409 - protein, 40 aa, Homo sapiens
LRQTYKISSADLEKFRMWRSSHGKMTKETHRKFLHISTSV

SEQ ID NO: 27410 - protein, 741 aa, Homo sapiens
LRDRPRAMAASPGPAGVGGAGAVYGSGSSGFALDSGLEIKTRSVEQTLLPLVSQITTLINHKDNTKKSDKTLQAIQRVGQAVNLAVGRFVKVGEAIANENWDLKEEINIACIEAKQAGETIAALTDITNLNHLESDGQITIFTDKTGVIKAARLLLSSVTKVLLLADRVVIKQIITSRNKVLATMERLEKVNSFQEFVQIFSQFGNEMVEFAHLSGDRQNDLKDEKKKAKMAAARAVLEKCTMMLLTASKTCLRHPNCESAHKNKEGVFDRMKVALDKVIEIVTDCKPNGETDISSISIFTGIKEFKMNIEALRENLYFQSKENLSVTLEVILERMEDFTDSAYTSHEHRERILELSTQARMELQQLISVWIQAQSKKTKSIAEELELSILKISHSLNELKKELHSTATQLAADLLKYHADHVVLKALKLTGVEGNLEALAEYACKLSEQKEQLVETCRLLRHISGTEPLEITCIHAEETFQVTGQQIISAAETLTLHPSSKIAKENLDVFCEAWESQISDMSTLLREINDVFEGRRGEKYGYLSLPKPMKNNANLKSLKPDKPDSEEQAKIAKLGLKLGLLTSDADCEIEKWEDQENEIVQYGRNMSSMAYSLYLFTRGEGPLKTSQDLIHQLEVFAAEGLKLTSSVQAFSKQLKDDDKLMLLLEINKLIPLCHQLQTVTKTSLQNKVFLKVDKCITKTRSMMALLVQLLSLCYKLLKKLQMENNGWVSVTNKDTMDSKT

SEQ ID NO: 27411 - protein, 26 aa, Homo sapiens
TEVPKVRRKHHTEGTGRMADADRNQR

SEQ ID NO: 27412 - protein, 299 aa, Homo sapiens
LGAAVAAAGDRKGRRKGGGRSRHAEEQPTMPRDNMASLIQRIARQACLTFRGSGGGRGASDRDAASGPEAPMQPGFPENLSKLKSLLTQLRAEDLNIAPRKATLQPLPPNLPPVTYMHIYETDGFSLGVFLLKSGTSIPLHDHPGMHGMLKVLYGTVRISCMDKLDAGGGQRPRALPPEQQFEPPLQPREREAVRPGVLRSRAEYTEASGPCILTPHRDNLHQIDAVEGPAAFLDILAPPYDPDDGRDCHYYRVLEPVRPKEASSSACDLPREVWLLETPQADDFWCEGEPYPGPKVFP

SEQ ID NO: 27413 - protein, 545 aa, Homo sapiens
LGSMVAHDETGGLLPIKRTIRVLDVNNQSFREQEEPSNKRVRPLARVTSLANLISPVRNGAVRRFGQTIQSFTLRGDHRSPASAQKFSSRSTVPTPAKRRSSALWSEMLDITMKESLTTREIRRQEAIYEMSRGEQDLIEDLKLARKAYHDPMLKLSIMSEEELTHIFGDLDSYIPLHEDLLTRIGEATKPDGTVEQIGHILVSWLPRLNAYRGYCSNQLAAKALLDQKKQDPRVQDFLQRCLESPFSRKLDLWSFLDIPRSRLVKYPLLLKEILKHTPKEHPDVQLLEDAILIIQGVLSDINLKKGESECQYYIDKLEYLDEKQRDPRIEASKVLLCHGELRSKSGHKLYIFLFQDILVLTRPVTRNERHSYQVYRQPIPVQELVLEDLQDGDVRMGGSFRGAFSNSEKAKNIFRIRFHDPSPAQSHTLQANDVFHKQQWFNCIRAAIAPFQSAGSPPELQGLPELHEECEGNHPSARKLTAQRRASTVSSVTQVEVDENAYRCGSGMQMAEDSKSLKTHQTQPGIRRARDKALSGGKRKETLV

SEQ ID NO: 27414 - protein, 654 aa, Homo sapiens
LQYFLGGQNFLGVIFFGFSSSFIFLPKLLLVGEKKMPQLNGGGGDDLGANDELISFKDEGEQEEKSSENSSAERDLADVKSSLVNESETNQNSSSDSEAERRPPPRSESFRDKSRESLEEAAKRQDGGLFKGPPYPGYPFIMIPDLTSPYLPNGSLSPTARTLHFQSGSTHYSAYKTIEHQIAVQYLQMKWPLLDVQAGSLQSRQALKDARSPSPAHIVSNKVPVVQHPHHVHPLTPLITYSNEHFTPGNPPPHLPADVDPKTGIPRPPHPPDISPYYPLSPGTVGQIPHPLGWLVPQQGQPVYPITTGGFRHPYPTALTVNASMSRFPPHMVPPHHTLHTTGIPHPAIVTPTVKQESSQSDVGSLHSSKHQDSKKEEEKKKPHIKKPLNAFMLYMKEMRAKVVAECTLKESAAINQILGRRWHALSREEQAKYYELARKERQLHMQLYPGWSARDNYGKKKKRKRDKQPGETNEHSECFLNPCLSLPPITDLSAPKKCRARFGLDQQNNWCGPCRRKKKCVRYIQGEGSCLSPPSSDGSLLDSPPPSPNLLGSPPRDAKSQTEQTQPLSLSLKPDPLAHLSMMPPPPALLLAEATHKASALCPNGALDLPPAALQPAAPSSSIAQPSTSSLHSHSSLAGTQPQPLSLVTKSLE

SEQ ID NO: 27415 - protein, 48 aa, Homo sapiens
LPALITVLFPGAHFVPGTRLGASRPLSLRSLLWTWRPFQRCLPEVPKI

SEQ ID NO: 27416 - protein, 33 aa, Homo sapiens
KRDTDFWRKFESLRLRRRRMLINSQRRTKKYSD

SEQ ID NO: 27417 - protein, 24 aa, Homo sapiens
LPRRREGKHKAGYALRDNKSNPQT

SEQ ID NO: 27418 - protein, 30 aa, Homo sapiens
KEVAQEVDKMVEDEVGIEIDQEVGHKRSFD

SEQ ID NO: 27419 - protein, 27 aa, Homo sapiens
ISFCYSKDQMLRLPFQVVLRIRVVVIH

SEQ ID NO: 27420 - protein, 80 aa, Homo sapiens
LTLEQPQGDSMMTCEQAQLLANLARLIQAKKALDLGTFTGYSALALALALPADGRVVTCEVDAQPPELGRPLWRQVSARA

SEQ ID NO: 27421 - protein, 40 aa, Homo sapiens
LPCTALLEATWRVRPRGGHGHKCPQLAPGGVERSCWEAAG

SEQ ID NO: 27422 - protein, 13 aa, Homo sapiens
LEAGHLSSFLATA

SEQ ID NO: 27423 - protein, 102 aa, Homo sapiens
LNFQEKYVNRSQHVVSQDLASLLTLMRKLKIPRPIQKSLKEKFQEILRYISRMSKKTVPQMTQKTVLLREQLMFIPQNMLDVMAEMQLIPFLGILKKFPALN

SEQ ID NO: 27424 - protein, 521 aa, Homo sapiens
KGRSQEAAREGARARPFFSSVAGSHARPPRRLGAICDSGGGGGGGGGSGNFAASSGRACLTAVWRRPRPRRQEPGGRRRNMSEREVSTAPAGTDMPAAKKQKLSSDENSNPDLSGDENDDAVSIESGTNTERPDTPTNTPNAPGRKSWGKGKWKSKKCKYSFKCVNSLKEDHNQPLFGVQFNWHSKEGDPLVFATVGSNRVTLYECHSQGEIRLLQSYVDADADENFYTCAWTYDSNTSHPLLAVAGSRGIIRIINPITMQCIKHYVGHGNAINELKFHPRDPNLLLSVSKDHALRLWNIQTDTLVAIFGGVEGHRDEVLSADYDLLGEKIMSCGMDHSLKLWRINSKRMMNAIKESYDYNPNKTNRPFISQKIHFPDFSTRDIHRNYVDCVRWLGDLILSKSCENAIVCWKPGKMEDDIDKIKPSESNVTILGRFDYSQCDIWYMRFSMDFWQKMLALGNQVGKLYVWDLEVEDPHKAKCTTLTHHKCGAAIRQTSFSRDSSILIAVCDDASIWRWDRLR

SEQ ID NO: 27425 - protein, 72 aa, Homo sapiens
VPSRSTAVPGMLSAHRLPAAPSCPAASCPWAPARTCARPPSAPSAKGSTACTAWRWCRVAARTRPARIRSAR

SEQ ID NO: 27426 - protein, 13 aa, Homo sapiens
VFQLNHPFIFKPS

SEQ ID NO: 27427 - protein, 30 aa, Homo sapiens
MHPWRSDHAGTHPPAVLTMGPERPAPNSRG

SEQ ID NO: 27428 - protein, 10 aa, Homo sapiens
TACETRASWM

SEQ ID NO: 27429 - protein, 42 aa, Homo sapiens
RFVTVTSGESWKKERELLQERKIGIVQPENIQPPLQCQKSHG

SEQ ID NO: 27430 - protein, 1494 aa, Homo sapiens
IRVRLPHPRRREAPGSPPLSPRGHCPPAPAKPMHPENKLTNHGKTGNGGAQSQHQNVNQGPTCNVGSKGVGAGNHGAKANQISPSNSSLKNPQAGVPPFSSLKGKVKRDRSVSVDSGEQREAGTPSLDSEAKEVAPRSKRRCVLERKQPYSGDEWCSGPDSEEDDKPIGATHNCNVADPAMAAPQLGPGQTTQLPLSESSVPGAPHGPPPGLRPDAPGGGGGGGGVPGKPPSQFVYVFTTHLANTAAEAVLQGRADSILAYHQQNVPRAKLDQAPKVPPTPEPLPLSTPSAGTPQSQPPPLPPPPPPAPGSAPPALPPEGPPEDSSQDLAPNSVGAASTGGGTGGTHPNTPTATTANNPLPPGGDPSSAPGPALLGEAAAPGNGQRSLVGSEGLSKEQLEHRERSLQTLRDIERLLLRSGETEPFLKGPPGGAGEGGPPAQAPPPPQQPPTAPPSGLKKYEEPLQSMISQTQSLGGPPLEHEVPGHPPGGDMGQQMNMMIQRLGQDSLTPEQVAWRKLQEEYYEEKRRKEEQIGLHGSRPLQDMMGMGGMMVRGPPPPYHSKPGDQWPPGMGAQLRGPMDVQDPMQLRGGPPFPGPRFPGNQIQRVPGFGGMQSMPMEVPMNAMQRPVRPGMGWTEDLPPMGGPSNFAQNTMPYPGGQGEAERFMTPRVREELLRHQLLEKRSMGMQRPLGMAGSGMGQSMEMERMMQAHRQMDPAMFPGQMAGGEGLAGTPMGMEFGGGRGLLSPPMGQSGLREVDPPMGPGNLNMNMNVNMNMNMNLNVQMTPQQQMLMSQKMRGPGDLMGPQGLSPEEMARVRAQNSSGVMGGPQKMLMPSQFPNQGQQGFSGGQGPYQAMSQDMGNTQDMFSPDQSSMPMSNVGTTRLSHMPLPPASNPPGTVHSAPNRGLGRRPSDLTISINQMGSPGMGHLKSPTLSQVHSPLVTSPSANLKSPQTPSQMVPLPSANPPGPLKSPQVLGSSLSVRSPTGSPSRLKSPSMAVPSPGWVASPKTAMPSPGVSQNKQPPLNMNSSTTLSNMEQGTLPPSGPRSSSSAPPANPPSGLMNPSLPFTSSPDPTPSQNPLSLMMTQMSKYAMPSSTPLYHNAIKTIATSDDELLPDRPLLPPPPPPQGSGPGISNSQPSQMHLNSAAAQSPMGMNLPGQQPLSHEPPPAMLPSPTPLGSNIPLHPNAQGTGGPPQNSMMMAPGGPDSLNAPCGPVPSSSQMMPFPPRLQQPHGAMAPTGGGGGGPGLQQHYPSGMALPPEDLPNQPPGPMPPQQHLMGKAMAGRMGDAYPPGVLPGVASVLNDPELSEVIRPTPTGIPEFDLSRIIPSEKPSSTLQYFPKSENQPPKAQPPNLHLMNLQNMMAEQTPSRPPNLPGQQGVQRGLNMSMCHPGQMSLLGRTGVPPQQGMVPHGLHQGVMSPPQGLMTQQNFMLMKQRGVGGEVYSQPPHMLSPQGSLMGPPPQQNLMVSHPLRQRSVSLDSQMGYLPAPGGMANLPF

SEQ ID NO: 27431 - protein, 281 aa, Homo sapiens
VYPAEPPAPGMFRDFGEPGPSSGNGGGYGGPAQPPAAAQAAQQKFHLVPSINTMSGSQELQWMVQPHFLGPSSYPRPLTYPQYSPPQPRPGVIRALGPPPGVRRRPCEQISPEEEERRRVRRERNKLAAAKCRNRRKELTDFLQAETDKLEDEKSGLQREIEELQKQKERLELVLEAHRPICKIPEGAKEGDTGSTSGTSSPPAPCRPVPCISLSPGPVLEPEALHTPTLMTTPSLTPFTPSLVFTYPSTPEPCASAHRKSSSSSGDPSSDPLGSPTLLAL

SEQ ID NO: 27432 - protein, 35 aa, Homo sapiens
RAGLTRLAGASWRTSKRWKRSERARTELCTKPETS

SEQ ID NO: 27433 - protein, 248 aa, Homo sapiens
RPPARDGTGSMSSGYSSLEEDAEDFFFTARTSFFRRAPQGKPRSGQQDVEKEKETHSYLSKEEIKEKVHKYNLAVTDKLKMTLNSNGIYTGFIKVQMELCKPPQTSPNSGKLSPSSNGCMNTLHISSTNTVGEVIEALLKKFLVTESPAKFALYKRCHREDQVYACKLSDREHPLYLRLVAGPRTDTLSFVLREHEIGEWEAFSLPELQNFLRILDKEEDEQLQNLKRRYTAYRQKLEEALREVWKPD

SEQ ID NO: 27434 - protein, 490 aa, Homo sapiens
VVLQRDDLQNGLLSTCRELSRATAELERAWREYDKLEYDVTVTRNQMQEQLDHLGEVQTESAGIQRAQIQKELWRIQDVMEGLSKHKQQRGTTEIGMIGSKPFSTVKYKNEEEEVVPPRPPLPRSYDFTEQPPIIPPLPSDSSSLLCYSRGPVHLPEEKKMYQVQGYPRNGSHCGPDYRLYKSEPELTTVAEVDESNGEEKSEPVSEIETSVVKGSHFPVGVVPPRAKSPTPESSTIASYVTLRKTKKMMDLRTERPRSAVEQLCLAESTRPRMTVEEQMERIRRHQQACLREKKKGLNVIGASDQSPLQSPSNLRDNPFRTTQTRRRDDKELDTAIRENDVKPDHETPATEIVQLKETEPQNVDFSKELKKTENISYEMLFEPEPNGVNSVEMMDKERNKDKMPEDVTFSPQDETQTANHKPEEHPEENTKNSVDEQEETVISYESTPEVSRGNQTMAVKSLSPSPESSASPVPSTQPQLTEGSHFMCV

SEQ ID NO: 27435 - protein, 37 aa, Homo sapiens
VAGPSPVAGVGSGAQSSCGAAALAVGPAGSSLFRRPP

SEQ ID NO: 27436 - protein, 170 aa, Homo sapiens
VFNQKSVSDMIKEFRKNWRALCNSERTTLCGADSMLLALQLSMAENNKQHSGEFTVSLSDVLLTWKYLLHEKLNLPVENMDVTDHYEDVRKIYDDFLKNSNMLDLIDVYQKCRALTSNCENYNTVSPSQLLDFLSGKQYAVGDETDLSIPTSPTSKYNRDNEKALPVLKR

SEQ ID NO: 27437 - protein, 391 aa, Homo sapiens
VADGTMKDCSNGCSAECTGEGGSKEVVGTFKAKDLIVTPATILKEKPDPNNLVFGTVFTDHMLTVEWSSEFGWEKPHIKPLQNLSLHPGSSALHYAVELFEGLKAFRGVDNKIRLFQPNLNMDRMYRSAVRATLPVFDKEELLECIQQLVKLDQEWVPYSTSASLYIRPTFIGTEPSLGVKKPTKALLFVLLSPVGPYFSSGTFNPVSLWANPKYVRAWKGGTGDCKMGGNYGSSLFAQCEAVDNGCQQVLWLYGEDHQITEVGTMNLFLYWINEDGEEELATPPLDGIILPGVTRRCILDLAHQWGEFKVSERYLTMDDLTTALEGNRVREMFGSGTACVVCPVSDILYKGETIHIPTMENGPKLASRILSKLTDIQYGREESDWTIVLS

SEQ ID NO: 27438 - protein, 31 aa, Homo sapiens
VAAAEELVCGAERPMDEEDAAAPVCSHEQDG

SEQ ID NO: 27439 - protein, 37 aa, Homo sapiens
VALVFQVERCATWERKPSGQLTVLLQRMRRSMLWRRC

SEQ ID NO: 27440 - protein, 53 aa, Homo sapiens
LLLEPKLTKKNKSTPDLDSGHLLKPSFRVDIPTSRTVRILKTTQQKVKKWKIV

SEQ ID NO: 27441 - protein, 275 aa, Homo sapiens
LASPLTSLLSCGDRMDRFLVKGAQGGLLRKQEEQEPTGEEPAVLGGDKESTRKRPRREAPGNGGHSAGPSWRHIRAEGLDCSYTVLFGKAEADEIFQELEKEVEYFTGALARVQVFGKWHSVPRKQATYGDAGLTYTFSGLTLSPKPWIPVLERIRDHVSGVTGQTFNFVLINRYKDGCDHIGEHRDDERELAPGSPIASVSFGACRDFVFRHKDSRGKSPSRRVAVVRLPLAHGSLLMMNHPTNTHWYHSLPVRKKVLAPRVNLTFRKILLTKK

SEQ ID NO: 27442 - protein, 35 aa, Homo sapiens
LLRMHPSLETPLKGWSLGDHIKRKMPTTSTTSTRF

SEQ ID NO: 27443 - protein, 46 aa, Homo sapiens
VGAAGARTARGCCCCPRPARLETERPSQAAAPLMLGGCWRVAAAKR

SEQ ID NO: 27444 - protein, 36 aa, Homo sapiens
LRVKESWRLYWATGFLLAPGPPDKMGSAVGVLAKAG

SEQ ID NO: 27445 - protein, 295 aa, Homo sapiens
LRQGTKRMAGEKVEKPDTKEKKPEAKKVDAGGKVKKGNLKAKKPKKGKPHCSRNPVLVRGIGRYSRSAMYSRKAMYKRKYSAAKSKVEKKKKEKVLATVTKPVGGDKNGGTRVVKLRKMPRYYPTEDVPRKLLSHGKKPFSQHVRKLRASITPGTILIILTGRHRGKRVVFLKQLASGLLLVTGPLVLNRVPLRRTHQKFVIATSTKIDISNVKIPKHLTDAYFKKKKLRKPRHQEGEIFDTEKEKYEITEQRKIDQKAVDSQILPKIKAIPQLQGYLRSVFALTNGIYPHKLVF

SEQ ID NO: 27446 - protein, 530 aa, Homo sapiens
ILDPLDQWQPSSSRFIHQQPQSSSPVYGSSAKTSSVSNPQDSVGSPCSRVGEEEHVYSFPNKQKSAEPSPTVMSTSLGSNLSELDRLLLELNAVQHNPPGFPADEANSSPPLPGALSPLYGVPETNSPLGGKAGPLTKEKPKRNGGRGLEDVRPSVESLLDELESSVPSPVPAITVNQGEMSSPQRVTSTQQQTRISASSATRELDELMASLSDFKIQGLEQRADGERCWAAGWPRDGGRSSPGGQDEGGFMAQGKTGSSSPPGGPPKPGSQLDSMLGSLQSDLNKLGVATVAKGVCGACKKPIAGQVVTAMGKTWHPEHFVCTHCQEEIGSRNFFERDGQPYCEKDYHNLFSPRCYYCNGPILDKVVTALDRTWHPEHFFCAQCGAFFGPEGFHEKDGKAYCRKDYFDMFAPKCGGCARAILENYISALNTLWHPECFVCRECFTPFVNGSFFEHDGQPYCEVHYHERRGSLCSGCQKPITGRCITAMAKKFHPEHFVCAFCLKQLNKGTFKEQNDKPYCQNCFLKLFC

SEQ ID NO: 27447 - protein, 106 aa, Homo sapiens
KDQVLDTVYLFHMPRKRMISLRFLAWYFLDLKIQGETHDSIEDARTALQLYRKYLELSKNGTEPESFHKVLKGLYEKGRKMDWKVPEPEGQTSPKNAAVFSSVLAL

SEQ ID NO: 27448 - protein, 76 aa, Homo sapiens
VSACVGRLPFFRKRGKYPHRLSVFSETIFFPRKKSLTVGVSLRQRRGQPTGPCKARAAAPPLSFRPEPPSSSNSPK

SEQ ID NO: 27449 - protein, 8 aa, Homo sapiens
KWDILIDE

SEQ ID NO: 27450 - protein, 1370 aa, Homo sapiens
KGGREPPPPAPPPPLAPTPGRRARAARPEAPAMASPPRHGPPGPASGDGPNLNNNNNNNNHSVRKCGYLRKQKHGHKRFFVLRGPGAGGDEATAGGGSAPQPPRLEYYESEKKWRSKAGAPKRVIALDCCLNINKRADAKHKYLIALYTKDEYFAVAAENEQEQEGWYRALTDLVSEGRAAAGDAPPAAAPAASCSASLPGALGGSAGAAGAEDSYGLVAPATAAYREVWQVNLKPKGLGQSKNLTGVYRLCLSARTIGFVKLNCEQPSVTLQLMNIRRCGHSDSFFFIEVGRSAVTGPGELWMQADDSVVAQNIHETILEAMKALKELFEFRPRSKSQSSGSSATHPISVPGARRHHHLVNLPPSQTGLVRRSRTDSLAATPPAAKCSSCRVRTASEGDGGAAAGAAAAGARPVSVAGSPLSPGPVRAPLSRSHTLSGGCGGRGSKVALLPAGGALQHSRSMSMPVAHSPPAATSPGSLSSSSGHGSGSYPPPPGPHPPLPHPLHHGPGQRPSSGSASASGSPSDPGFMSLDEYGSSPGDLRAFCSHRSNTPESIAETPPARDGGGGGEFYGYMTMDRPLSHCGRSYRRVSGDAAQDLDRGLRKRTYSLTTPARQRPVPQPSSASLDEYTLMRATFSGSAGRLCPSCPASSPKVAYHPYPEDYGDIEIGSHRSSSSNLGADDGYMPMTPGAALAGSGSGSCRSDDYMPMSPASVSAPKQILQPRAAAAAAAAVPSAGPAGPAPTSAAGRTFPASGGGYKASSPAESSPEDSGYMRMWCGSKLSMEHADGKLLPNGDYLNVSPSDAVTTGTPPDFFSAALHPGGEPLRGVPGCCYSSLPRSYKAPYTCGGDSDQYVLMSSPVGRILEEERLEPQATPGPSQAASAFGAGPTQPPHPVVPSPVRPSGGRPEGFLGQRGRAVRPTRLSLEGLPSLPSMHEYPLPPEPKSPGEYINIDFGEPGARLSPPAPPLLASAASSSSLLSASSPASSLGSGTPGTSSDSRQRSPLSDYMNLDFSSPKSPKPGAPSGHPVGSLDGLLSPEASSPYPPLPPRPSASPSSSLQPPPPPPAPGELYRLPPASAVATAQGPGAASSLSSDTGDNGDYTEMAFGVAATPPQPIAAPPKPEAARVASPTSGVKRLSLMEQVSGVEAFLQASQPPDPHRGAKVIRADPQGGRRRHSSETFSSTTTVTPVSPSFAHNPKRHNSASVENVSLRKSSEGGVGVGPGGGDEPPTSPRQLQPAPPLAPQGRPWTPGQPGGLVGCPGSGGSPMRRETSAGFQNGLNYIAIDVREEPGLPPQPQPPPPPLPQPGDKSSWGRTRSLGGLISAVGVGSTGGGCGGPGPGALPPANTYASIDFLSHHLKEATIVKE

SEQ ID NO: 27451 - protein, 295 aa, Homo sapiens
LPDISTMSFVAYEELIKEGDTAILSLGHGAMVAVRVQRGAQTQTRHGVLRHSVDLIGRPFGSKVTCGRGGWVYVLHPTPELWTLNLPHRTQILYSTDIALITMMLELRPGSVVCESGTGSGSVSHAIIRTIAPTGHLHTVEFHQQRAEKAREEFQEHRVGRWVTVRTQDVCRSGFGVSHVADAVFLDIPSPWEAVGHAWDALKVEGGRFCSFSPCIEQVQRTCQALAARGFSELSTLEVLPQVYNVRTVSLPPPDLGTGTDGPAGSDTSPFRSGTPMKEAVGHTGYLTFATKTPG

SEQ ID NO: 27452 - protein, 60 aa, Homo sapiens
LGCRRCWPARPSRGSRHRLESFSCPRIRIPRKSNGIRGFLLTWRRDGNTSTSVQQTTSSL

SEQ ID NO: 27453 - protein, 67 aa, Homo sapiens
LNSTRAMCNSRITIHLNRAKVGYMESTCGPSAQGWILFCSLIAKHCLIWNKSSWVIPISPYHMSTTS

SEQ ID NO: 27454 - protein, 66 aa, Homo sapiens
VQPGTRVRLAQVSVRDWEATEGRESGTLLELKLPTLSSLNNYRAGLGGTDSIFRSLMGCWVDGAGK

SEQ ID NO: 27455 - protein, 45 aa, Homo sapiens
LEGLGERAETSSSSARDLPPGCLGSRWTLLEVSWIQISLSKILLA

SEQ ID NO: 27456 - protein, 27 aa, Homo sapiens
VVVALGAVWSRSGPGLTAAWSVRHEEK

SEQ ID NO: 27457 - protein, 632 aa, Homo sapiens
LDLDSRLLGASAMRRSEVLAEESIVCLQKALNHLREIWELIGIPEDQRLQRTEVVKKHIKELLDMMIAEEESLKERLIKSISVCQKELNTLCSELHVEPFQEEGETTILQLEKDLRTQVELMRKQKKERKQELKLLQEQDQELCEILCMPHYDIDSASVPSLEELNQFRQHVTTLRETKASRREEFVSIKRQIILCMEALDHTPDTSFERDVVCEDEDAFCLSLENIATLQKLLRQLEMQKSQNEAVCEGLRTQIRELWDRLQIPEEEREAVATIMSGSKAKVRKALQLEVDRLEELKMQNMKKVIEAIRVELVQYWDQCFYSQEQRQAFAPFCAEDYTESLLQLHDAEIVRLKNYYEVHKELFEGVQKWEETWRLFLEFERKASDPNRFTNRGGNLLKEEKQRAKLQKMLPKLEEELKARIELWEQEHSKAFMVNGQKFMEYVAEQWEMHRLEKERAKQERQLKNKKQTETEMLYGSAPRTPSKRRGLAPNTPGKARKLNTTTMSNATANSSIRPIFGGTVYHSPVSRLPPSGSKPVAASTCSGKKTPRTGRHGANKENLELNGSILSGGYPGSAPLQRNFSINSVASTYSEFAKDPSLSDSSTVGLQRELSKASKSDATSGILNSTNIQS

SEQ ID NO: 27458 - protein, 62 aa, Homo sapiens
RGSSEQQDTCSNPGPCSSPTGNPEWGLRDTALLEDLGKASGLLLERMVDMPANNKCLIFRKN

SEQ ID NO: 27459 - protein, 25 aa, Homo sapiens
MAPTAVCPSQPWVSASVPSPRTLPL

SEQ ID NO: 27460 - protein, 22 aa, Homo sapiens
MAPTAVCPSQPWALVRTRPWRC

SEQ ID NO: 27461 - protein, 1365 aa, Homo sapiens
TNLIHLSSKGHISPAKDTSLQQRTPAEMSPVLHFYVRPSGHEGAAPGHTRRKLQGKLPELQGVETELCYNVNWTAEALPSAEETKKLMWLFGCPLLLDDVARESWLLPGSNDLLLEVGPRLNFSTPTSTNIVSVCRATGLGPVDRVETTRRYRLSFAHPPSAEVEAIALATLHDRMTEQHFPHPIQSFSPESMPEPLNGPINILGEGRLALEKANQELGLALDSWDLDFYTKRFQELQRNPSTVEAFDLAQSNSEHSRHWFFKGQLHVDGQKLVHSLFESIMSTQESSNPNNVLKFCDNSSAIQGKEVRFLRPEDPTRPSRFQQQQGLRHVVFTAETHNFPTGVCPFSGATTGTGGRIRDVQCTGRGAHVVAGTAGYCFGNLHIPGYNLPWEDPSFQYPGNFARPLEVAIEASNGASDYGNKFGEPVLAGFARSLGLQLPDGQRREWIKPIMFSGGIGSMEADHISKEAPEPGMEVVKVGGPVYRIGVGGGAASSVQVQGDNTSDLDFGAVQRGDPEMEQKMNRVIRACVEAPKGNPICSLHDQGAGGNGNVLKELSDPAGAIIYTSRFQLGDPTLNALEIWGAEYQESNALLLRSPNRDFLTHVSARERCPACFVGTITGDRRIVLVDDRECPVRRNGQGDAPPTPLPTPVDLELEWVLGKMPRKEFFLQRKPPMLQPLALPPGLSVHQALERVLRLPAVASKRYLTNKVDRSVGGLVAQQQCVGPLQTPLADVAVVALSHEELIGAATALGEQPVKSLLDPKVAARLAVAEALTNLVFALVTDLRDVKCSGNWMWAAKLPGEGAALADACEAMVAVMAALGVAVDGGKDSLSMAARVGTETVRAPGSLVISAYAVCPDITATVTPDLKHPEGRGHLLYVALSPGQHRLGGTALAQCFSQLGEHPPDLDLPENLVRAFSITQGLLKDRLLCSGHDVSDGGLVTCLLEMAFAGNCGLQVDVPVPRVDVLSVLFAEEPGLVLEVQEPDLAQVLKRYRDAGLHCLELGHTGEAGPHAMVRVSVNGAVVLEEPVGELRALWEETSFQLDRLQAEPRCVAEEERGLRERMGPSYCLPPTFPKASVPREPGGPSPRVAILREEGSNGDREMADAFHLAGFEVWDVTMQDLCSGAIGLDTFRGVAFVGGFSYADVLGSAKGWAAAVTFHPRAGAELRRFRKRPDTFSLGVCNGCQLLALLGWVGGDPNEDAAEMGPDSQPARPGLLLRHNLSGRYESRWASVRVGPGPALMLRGMEGAVLPVWSAHGEGYVAFSSPELQAQIEARGLAPLHWADDDGNPTEQYPLNPNGSPGGVAGICSCDGRHLAVMPHPERAVRPWQWAWRPPPFDTLTTSPWLQLFINARNWTLEGSC

SEQ ID NO: 27462 - protein, 14 aa, Homo sapiens
LGSLRWQVLYGEKT

SEQ ID NO: 27463 - protein, 26 aa, Homo sapiens
RRCRRPCPAGRGEGGGGRSPVVATVA

SEQ ID NO: 27464 - protein, 42 aa, Homo sapiens
RTPELGQSSSQRRPERFGDAGGSDGRELGAAAAEARGRKVCV

SEQ ID NO: 27465 - protein, 27 aa, Homo sapiens
LTFTFHSATLGNGDRGSMGIREKHPQN

SEQ ID NO: 27466 - protein, 33 aa, Homo sapiens
VHSFPRSLAATYPILSCEQGPRAALTKATVNTV

SEQ ID NO: 27467 - protein, 16 aa, Homo sapiens
LLSSLGQTSEDFSDGS

SEQ ID NO: 27468 - protein, 32 aa, Homo sapiens
TRAEQTERTRPSRGPFLAWHTRSGADLCFHVM

SEQ ID NO: 27469 - protein, 926 aa, Homo sapiens
LDLGGSVACSRRETRCRGEPSGRTFQDRNRPSAEKMSLRIDVDTNFPECVVDAGKVTLGTQQRQEMDPRLREKQNEIILRAVCALLNSGGGIIKAEIENKGYNYERHGVGLDVPPIFRSHLDKMQKENHFLIFVKSWNTEAGVPLATLCSNLYHRERTSTDVMDSQEALAFLKCRTQTPTNINVSNSLGPQAAQGSVQYEGNINVSAAALFDRKRLQYLEKLNLPESTHVEFVMFSTDVSHCVKDRLPKCVSAFANTEGGYVFFGVHDETCQVIGCEKEKIDLTSLRASIDGCIKKLPVHHFCTQRPEIKYVLNFLEVHDKGALRGYVCAIKVEKFCCAVFAKVPSSWQVKDNRVRQLPTREWTAWMMEADPDLSRCPEMVLQLSLSSATPRSKPVCIHKNSECLKEQQKRYFPVFSDRVVYTPESLYKELFSQHKGLRDLINTEMRPFSQGILIFSQSWAVDLGLQEKQGVICDALLISQNNTPILYTIFSKWDAGCKGYSMIVAYSLKQKLVNKGGYTGRLCITPLVCVLNSDRKAQSVYSSYLQIYPESYNFMTPQHMEALLQSLVIVLLGFKSFLSEELGSEVLNLLTNKQYELLSKNLRKTRELFVHGLPGSGKTILALRIMEKIRNVFHCEPANILYICENQPLKKLVSFSKKNICQPVTRKTFMKNNFEHIQHIIIDDAQNFRTEDGDWYGKAKFITQTARDGPGVLWIFLDYFQTYHLSCSGLPPPSDQYPREEINRVVRNAGPIANYLQQVMQEARQNPPPNLPPGSLVMLYEPKWAQGVPGNLEIIEDLNLEEILIYVANKCRFLLRNGYSPKDIAVLFTKASEVEKYKDRLLTAMRKRKLSQLHEESDLLLQIGDASDVLTDHIVLDSVCRFSGLERNIVFGINPGVAPPAGAYNLLLCLASRAKRHLYILKASV

SEQ ID NO: 27470 - protein, 21 aa, Homo sapiens
LAVTEAETRVMIGFLGREEVL

SEQ ID NO: 27471 - protein, 33 aa, Homo sapiens
RWRWRWKLKLKQSQRRRGGVLGGAARGPEALES

SEQ ID NO: 27472 - protein, 15 aa, Homo sapiens
VGAAPERGSHSLPCR

SEQ ID NO: 27473 - protein, 223 aa, Homo sapiens
LFRPAGNMGVLRVGLCPGLTEEMIQLLRSHRIKTVVDLVSADLEEVAQKCGLSYKAEALRRIQVVHAFDIFQMLDVLQELRGTVAQQVTGSSGTVKVVVVDSVTAVVSPLLGGQQREGLALMMQLARELKTLARDLGMAVVVTNHITRDRDSGRLKPALGRSWSFVPSTRILLDTIEGAGASGGRRMACLAKSSRQPTGFQEMVDIGTWGTSEQSATLQGDQT

SEQ ID NO: 27474 - protein, 282 aa, Homo sapiens
TALESTRVRELPGGAMSCINLPTVLPGSPSKTRGQIQVILGPMFSGKSTELMRRVRRFQIAQYKCLVIKYAKDTRYSSSFCTHDRNTMEALPACLLRDVAQEALGVAVIGIDEGQFFPDIVEFCEAMANAGKTVIVAALDGTFQRKPFGAILNLVPLAESVVKLTAVCMECFREAAYTKRLGTEKEVAPPAFPAGRRGGGMALPPSCPGPSPIPCPCGQVEVIGGADKYHSVCRLCYFKKASGQPAGPDNKENCPVPGKPGEAVAARKLFAPQQILQCSPAN

SEQ ID NO: 27475 - protein, 93 aa, Homo sapiens
IPACRTVRVQLASCSCPRCSSWRLRFPGSVAEWAAAPAEMPGKKARKNAQPSPARAPAELEVECATQLRRFGDKLNFRQKLLNLISKLFCSGT

SEQ ID NO: 27476 - protein, 58 aa, Homo sapiens
LGFQRRLRYPQLETQRRVAFCSRTDLRLESVCWGPCLWKRPRGLKDGLVRSGTIMLSC

SEQ ID NO: 27477 - protein, 52 aa, Homo sapiens
LASGAPASRPPGGELLGLLNPRWRRWLLMREDVAEGLTLGAGVICENGSLFT

SEQ ID NO: 27478 - protein, 52 aa, Homo sapiens
LVPVFAHLSILQSLVPAAGAASPVAISAQHLCYSHVTPGDPGAGAGQGPAPS

SEQ ID NO: 27479 - protein, 218 aa, Homo sapiens
RSEAQPDPAMEQPRKAVVVTGFGPFGEHTVNASWIAVQELEKLGLGDSVDLHVYEIPVEYQTVQRLIPALWEKHSPQLVVHVGVSGMATTVTLEKCGHNKGYKGLDNCRFCPGSQCCVEDGPESIDSIIDMDAVCKRVTTLGLDVSVTISQDAGRYLCDFTYYTSLYQSHGRSAFVHVPPLGKPYNADQLGRALRAIIEEMLDLLEQSEGKINYCHKH

SEQ ID NO: 27480 - protein, 7 aa, Homo sapiens
LGRPDVH

SEQ ID NO: 27481 - protein, 6 aa, Homo sapiens
RGPRPK

SEQ ID NO: 27482 - protein, 10 aa, Homo sapiens
VEGDRSHGDV

SEQ ID NO: 27483 - protein, 47 aa, Homo sapiens
ILRYPSHQTRKRVRLREETTGNGAAAGLSSRNEDRDEARSTHQLPPA

SEQ ID NO: 27484 - protein, 83 aa, Homo sapiens
LAQGWSAGGLQVQSGKCESSVLGYSATCLPDMGRWRVSSVESWPFASTGGKLAIATAGTGTQAAPRPFLIRPPDSWALALALM

SEQ ID NO: 27485 - protein, 449 aa, Homo sapiens
LFLGRPVDRASAAETMSADGAEADGSTQVTVEEPVQQPSVVDRVASMPLISSTCDMVSAAYASTKESYPHIKTVCDAAEKGVRTLTAAAVSGAQPILSKLEPQIASASEYAHRGLDKLEENLPILQQPTEKVLADTKELVSSKVSGAQEMVSSAKDTVATQLSEAVDATRGAVQSGVDKTKSVVTGGVQSVMGSRLGQMVLSGVDTVLGKSEEWADNHLPLTDAELARIATSLDGFDVASVQQQRQEQSYFVRLGSLSERLRQHAYEHSLGKLRATKQRAQEALLQLSQVLSLMETVKQGVDQKLVEGQEKLHQMWLSWNQKQLQGPEKEPPKPEQVESRALTMFRDIAQQLQATCTSLGSSIQGLPTNVKDQVQQARRQVEDLQATFSSIHSFQDLSSSILAQSRERVASAREALDHMVEYVAQNTPVTWLVGPFAPGITEKAPEEKK

SEQ ID NO: 27486 - protein, 243 aa, Homo sapiens
VRVPPPHLQRGRSGLEPGTFRKMAAARPSLGRVLPGSSVLFLCDMQEKFRHNIAYFPQIVSVAARMLKVARLLEVPVMLTEQYPQGLGPTVPELGTEGLRPLAKTCFSMVPALQQELDSRPQLRSVLLCGIEAQACILDPRSYPGLALTSLYPQNTTLDLLDRGLQVHVVVDACSSRSQVDRLVALARMRQSGAFLSTSEGLILQLVGDAVHPQFKEIQKLIKEPAPDSGLLGLFQGQNSLLH

SEQ ID NO: 27487 - protein, 102 aa, Homo sapiens
LLSAGQGGETKTLQGLQLFTICSSLKRRKNGALLSSDVARIKKISFFMTLPLPEFPALFHLIQLQLALRHGLAARRAGPAAGPAAAQRLTVAQHSHSAHRAG

SEQ ID NO: 27488 - protein, 40 aa, Homo sapiens
LRPACSGETARAVSQLFLSLQNLILALDLRRESLTRDETQ

SEQ ID NO: 27489 - protein, 21 aa, Homo sapiens
LNNLILALDLRRESLTRDETQ

SEQ ID NO: 27490 - protein, 462 aa, Homo sapiens
TAGTRGGWSEWRSVKSPVGSSVPECPWRCLVPAQRLCIRSWAPRRPVGYCLLLITARGIMDRSKENCISGPVKATAPVGGPKRVLVTQQFPCQNPLPVNSGQAQRVLCPSNSSQRIPLQAQKLVSSHKPVQNQKQKQLQATSVPHPVSRPLNNTQKSKQPLPSAPENNPEEELASKQKNEESKKRQWALEDFEIGRPLGKGKFGNVYLAREKQSKFILALKVLFKAQLEKAGVEHQLRREVEIQSHLRHPNILRLYGYFHDATRVYLILEYAPLGTVYRELQKLSKFDEQRTATYITELANALSYCHSKRVIHRDIKPENLLLGSAGELKIADFGWSVHAPSSRRTTLCGTLDYLPPEMIEGRMHDEKVDLWSLGVLCYEFLVGKPPFEANTYQETYKRISRVEFTFPDFVTEGARDLISRLLKHNPSQRPMLREVLEHPWITANSSKPSNCQNKESASKQS

SEQ ID NO: 27491 - protein, 33 aa, Homo sapiens
VGTFRQTMWGSTWMSTTPRTRGRMKSTSAAMEL

SEQ ID NO: 27492 - protein, 15 aa, Homo sapiens
LERVHPAAHPQPAHG

SEQ ID NO: 27493 - protein, 925 aa, Homo sapiens
KEPTELGASEMADEALAGLDEGALRKLLEVTADLAERRRIRSAIRELQRQELEREEEALASKRFRAERQDNKENWLHSQQREAEQRAALARLAGQLESMNDVEELTALLRSAGEYEERKLIRAAIRRVRAQEIEAATLAGRLYSGRPNSGSREDSKGLAAHRLEQCEVPEREEQEQQAEVSKPTPTPEGTSQDVTTVTLLLRAPPGSTSSSPASPSSSPTPASPEPPLEPAEAQCLTAEVPGSPEPPPSPPKTTSPEPQESPTLPSTEGQVVNKLLSGPKETPAAQSPTRGPSDTKRADVAGPRPCQRSLSVLSPRQPAQNRESTPLASGPSSFQRAGSVRDRVHKFTSDSPMAARLQDGTPQAALSPLTPARLLGPSLTSTTPASSSSGSSSRGPSDTSSRFSKEQRGVAQPLAQLRSCPQEEGPRGRGLAARPLENRAGGPVARSEEPGAPLPVAVGTAEPGGSMKTTFTIEIKDGRGQASTGRVLLPTGNQRAELTLGLRAPPTLLSTSSGGKSTITRVNSPGTLARLGSVTHVTSFSHAPPSSRGGCSIKMEAEPAEPLAAAVEAANGAEQTRVNKAPEGRSPLSAEELMTIEDEGVLDKMLDQSTDFEERKLIRAALRELRQRKRDQRDKERERRLQEARGRPGEGRGNTATETTTRHSQRAADGSAVSTVTKTERLVHSNDGTRTARTTTVESSFVRRSENGSGSTMMQTKTFSSSSSSKKMGSIFDREDQASPRAGSLAALEKRQAEKKKELMKAQSLPKTSASQARKAMIEKLEKEGAAGSPGGPRAAVQRSTSFGVPNANSIKQMLLDWCRAKTRGYEHVDIQNFSSSWSDGMAFCALVHNFFPEAFDYGQLSPQNRRQNFEVAFSSAETHADCPQLLDTEDMVRLREPDWKCVYTYIQEFYRCLVQKGLVKTKKS

SEQ ID NO: 27494 - protein, 30 aa, Homo sapiens
LTVTSRSNVWPLTEISQPMAPNKGSCLCSL

SEQ ID NO: 27495 - protein, 385 aa, Homo sapiens
LEPGRSPPSFAHHLPTMDPRKVNELRAFVKMCKQDPSVLHTEEMRFLREWVESMGGKVPPATQKAKSEENTKEEKPDSKKVEEDLKADEPSSEESDLEIDKEGVIEPDTDAPQEMGDENAEITEEMMDQANDKKVAAIEALNDGELQKAIDLFTDAIKLNPRLAILYAKRASVFVKLQKPNAAIRDCDRAIEINPDSAQPYKWRGKAHRLLGHWEEAAHDLALACKLDYDEDASAMLKEVQPRAQKIAEHRRKYERKREEREIKERIERVKKAREEHERAQREEEARRQSGAQYGSFPGGFPGGMPGNFPGGMPGMGGGMPGMAGMPGLNEILSDPEVLAAMQDPEVMVAFQDVAQNPANMSKYQSNPKVMNLISKLSAKFGGQA

SEQ ID NO: 27496 - protein, 12 aa, Homo sapiens
ILAGISGLSAGP

SEQ ID NO: 27497 - protein, 6 aa, Homo sapiens
LPALPP

SEQ ID NO: 27498 - protein, 321 aa, Homo sapiens
MGGTESSISEPGSPSRNRENETSRQNLSECKVWRNPLNLFRGAEYRRYTWVTGKEPLTYYDMNLSAQDHQTFFTCDTDFLRPSDTVMQKAWRERNPPARIKAAYQALELNNDCATAYVLLAEEEATTIVDAERLFKQALKAGETIYRQSQQCQHQSPQHEAQLRRDTNVLVYIKRRLAMCARKLGRIREAVKIMRDLMKEFPPLTMLNIHENLLESLLELQAYPDVQAVLAKYDDISLPKSAAICYTAALLKTRTVSEKFSPETASRRGLSTAEINAVEAIHRAVEFNPHVPKVEIYPFSPQLNIKAVDNSAISKYPANIY

SEQ ID NO: 27499 - protein, 148 aa, Homo sapiens
MPREELARLFPNLPELIEIHNSWCEAMKKLREEGPIIKEISDLMLARFDGPAREELQQVAAQFCSYQSIALELIKTKQRKESRFQLFMQEAESHPQCRRLQLRDLIISEMQRLTKYPLLLESIIKHTEGSTWGGAGITGSGPRARPSF

SEQ ID NO: 27500 - protein, 1754 aa, Homo sapiens
MIRAVQPGETYTYKWNILEFDEPTENDAQCLTRPYYSDVDIMRDIASGLIGLLLICKSRSLDRRGIQRAADIEQQAVFAVFDENKSWYLEDNINKFCENPDEVKRDDPKFYESNIMSTINGYVPESITTLGFCFDDTVQWHFCSVGTQNEILTIHFTGHSFIYGKRHEDTLTLFPMRGESVTVTMDNVGTWMLTSMNSSPRSKKLRLKFRDVKCIPDDDEDSYEIFEPPESTVMATRKMHDRLEPEDEESDADYDYQNRLAAALGIRSFRNSSLNQEEEEFNLTALALENGTEFVSSNTDIIVGSNYSSPSNISKFTVNNLAEPQKAPSHQQATTAGSPLRHLIGKNSVLNSSTAEHSSPYSEDPIEDPLQPDVTGIRLLSLGAGEFKSQEHAKHKGPKVERDQAAKHRFSWMKLLAHKVGRHLSQDTGSPSGMRPWEDLPSQDTGSPSRMRPWKDPPSDLLLLKQSNSSKILVGRWHLASEKGSYEIIQDTDEDTAVNNWLISPQNASRAWGESTPLANKPGKQSGHPKFPRVRHKSLQVRQDGGKSRLKKSQFLIKTRKKKKEKHTHHAPLSPRTFHPLRSEAYNTFSERRLKHSLVLHKSNETSLPTDLNQTLPSMDFGWIASLPDHNQNSSNDTGQASCPPGLYQTVPPEEHYQTFPIQDPDQMHSTSDPSHRSSSPELSEMLEYDRSHKSFPTDISQMSPSSEHEVWQTVISPDLSQVTLSPELSQTNLSPDLSHTTLSPELIQRNLSPALGQMPISPDLSHTTLSPDLSHTTLSLDLSQTNLSPELSQTNLSPALGQMPLSPDLSHTTLSLDFSQTNLSPELSHMTLSPELSQTNLSPALGQMPISPDLSHTTLSLDFSQTNLSPELSQTNLSPALGQMPLSPDPSHTTLSLDLSQTNLSPELSQTNLSPDLSEMPLFADLSQIPLTPDLDQMTLSPDLGETDLSPNFGQMSLSPDLSQVTLSPDISDTTLLPDLSQISPPPDLDQIFYPSESSQSLLLQEFNESFPYPDLGQMPSPSSPTLNDTFLSKEFNPLVIVGLSKDGTDYIEIIPKEEVQSSEDDYAEIDYVPYDDPYKTDVRTNINSSRDPDNIAAWYLRSNNGNRRNYYIAAEEISWDYSEFVQRETDIEDSDDIPEDTTYKKVVFRKYLDSTFTKRDPRGEYEEHLGILGPIIRAEVDDVIQVRFKNLASRPYSLHAHGLSYEKSSEGKTYEDDSPEWFKEDNAVQPNSSYTYVWHATERSGPESPGSACRAWAYYSAVNPEKDIHSGLIGPLLICQKGILHKDSNMPMDMREFVLLFMTFDEKKSWYYEKKSRSSWRLTSSEMKKSHEFHAINGMIYSLPGLKMYEQEWVRLHLLNIGGSQDIHVVHFHGQTLLENGNKQHQLGVWPLLPGSFKTLEMKASKPGWWLLNTEVGENQRAGMQTPFLIMDRDCRMPMGLSTGIISDSQIKASEFLGYWEPRLARLNNGGSYNAWSVEKLAAEFASKPWIQVDMQKEVIITGIQTQGAKHYLKSCYTTEFYVAYSSNQINWQIFKGNSTRNVMYFNGNSDASTIKENQFDPPIVARYIRISPTRAYNRPTLRLELQGCEVNGCSTPLGMENGKIENKQITASSFKKSWWGDYWEPFRARLNAQGRVNAWQAKANNNKQWLEIDLLKIKKITAIITQGCKSLSSEMYVKSYTIHYSEQGVEWKPYRLKSSMVDKIFEGNTNTKGHVKNFFNPPIISRFIRVIPKTWNQSIALRLELFGCDIY

SEQ ID NO: 27501 - protein, 53 aa, Homo sapiens
MWRGLALARAIGCAARGRGQWAVRAADCAQSGRHPGPAVVCGRRLIRIIASSF

SEQ ID NO: 27502 - protein, 2912 aa, Homo sapiens
MKTPVQYSQQQNSPQKHKNKDLYTTGRRESVNLGKSEGFKAGDKTLTPRKLSTRNRTPAKVEDAADSATKPENLSSKTRGSIPTDVEVLPTETEIHNEPFLTLWLTQVERKIQKDSLSKPEKLGTTAGQMCSGLPGLSSVDINNFGDSINESEGIPLKRRRVSFGGHLRPELFDENLPPNTPLKRGEAPTKRKSLVMHTPPVLKKIIKEQPQPSGKQESGSEIHVEVKAQSLVISPPAPSPRKTPVASDQRRRSCKTAPASSSKSQTEVPKRGGRKSGNLPSKRVSISRSQHDILQMICSKRRSGASEANLIVAKSWADVVKLGAKQTQTKVIKHGPQRSMNKRQRRPATPKKPVGEVHSQFSTGHANSPCTIIIGKAHTEKVHVPARPYRVLNNFISNQKMDFKEDLSGIAEMFKTPVKEQPQLTSTCHIAISNSENLLGKQFQGTDSGEEPLLPTSESFGGNVFFSAQNAAKQPSDKCSASPPLRRQCIRENGNVAKTPRNTYKMTSLETKTSDTETEPSKTVSTANRSGRSTEFRNIQKLPVESKSEETNTEIVECILKRGQKATLLQQRREGEMKEIERPFETYKENIELKENDEKMKAMKRSRTWGQKCAPMSDLTDLKSLPDTELMKDTARGQNLLQTQDHAKAPKSEKGKITKMPCQSLQPEPINTPTHTKQQLKASLGKVGVKEELLAVGKFTRTSGETTHTHREPAGDGKSIRTFKESPKQILDPAARVTGMKKWPRTPKEEAQSLEDLAGFKELFQTPGPSEESMTDEKTTKIACKSPPPESVDTPTSTKQWPKRSLRKADVEEEFLALRKLTPSAGKAMLTPKPAGGDEKDIKAFMGTPVQKLDLAGTLPGSKRQLQTPKEKAQALEDLAGFKELFQTPGHTEELVAAGKTTKIPCDSPQSDPVDTPTSTKQRPKRSIRKADVEGELLACRNLMPSAGKAMHTPKPSVGEEKDIIIFVGTPVQKLDLTENLTGSKRRPQTPKEEAQALEDLTGFKELFQTPGHTEEAVAAGKTTKMPCESSPPESADTPTSTRRQPKTPLEKRDVQKELSALKKLTQTSGETTHTDKVPGGEDKSINAFRETAKQKLDPAASVTGSKRHPKTKEKAQPLEDLAGLKELFQTPVCTDKPTTHEKTTKIACRSQPDPVDTPTSSKPQSKRSLRKVDVEEEFFALRKRTPSAGKAMHTPKPAVSGEKNIYAFMGTPVQKLDLTENLTGSKRRLQTPKEKAQALEDLAGFKELFQTRGHTEESMTNDKTAKVACKSSQPDPDKNPASSKRRLKTSLGKVGVKEELLAVGKLTQTSGETTHTHTEPTGDGKSMKAFMESPKQILDSAASLTGSKRQLRTPKGKSEVPEDLAGFIELFQTPSHTKESMTNEKTTKVSYRASQPDLVDTPTSSKPQPKRSLRKADTEEEFLAFRKQTPSAGKAMHTPKPAVGEEKDINTFLGTPVQKLDQPGNLPGSNRRLQTRKEKAQALEELTGFRELFQTPCTDNPTTDEKTTKKILCKSPQSDPADTPTNTKQRPKRSLKKADVEEEFLAFRKLTPSAGKAMHTPKAAVGEEKDINTFVGTPVEKLDLLGNLPGSKRRPQTPKEKAKALEDLAGFKELFQTPGHTEESMTDDKITEVSCKSPQPDPVKTPTSSKQRLKISLGKVGVKEEVLPVGKLTQTSGKTTQTHRETAGDGKSIKAFKESAKQMLDPANYGTGMERWPRTPKEEAQSLEDLAGFKELFQTPDHTEESTTDDKTTKIACKSPPPESMDTPTSTRRRPKTPLGKRDIVEELSALKQLTQTTHTDKVPGDEDKGINVFRETAKQKLDPAASVTGSKRQPRTPKGKAQPLEDLAGLKELFQTPICTDKPTTHEKTTKIACRSPQPDPVGTPTIFKPQSKRSLRKADVEEESLALRKRTPSVGKAMDTPKPAGGDEKDMKAFMGTPVQKLDLPGNLPGSKRWPQTPKEKAQALEDLAGFKELFQTPGTDKPTTDEKTTKIACKSPQPDPVDTPASTKQRPKRNLRKADVEEEFLALRKRTPSAGKAMDTPKPAVSDEKNINTFVETPVQKLDLLGNLPGSKRQPQTPKEKAEALEDLVGFKELFQTPGHTEESMTDDKITEVSCKSPQPESFKTSRSSKQRLKIPLVKVDMKEEPLAVSKLTRTSGETTQTHTEPTGDSKSIKAFKESPKQILDPAASVTGSRRQLRTRKEKARALEDLVDFKELFSAPGHTEESMTIDKNTKIPCKSPPPELTDTATSTKRCPKTRPRKEVKEELSAVERLTQTSGQSTHTHKEPASGDEGIKVLKQRAKKKPNPVEEEPSRRRPRAPKEKAQPLEDLAGFTELSETSGHTQESLTAGKATKIPCESPPLEVVDTTASTKRHLRTRVQKVQVKEEPSAVKFTQTSGETTDADKEPAGEDKGIKALKESAKQTPAPAASVTGSRRRPRAPRESAQAIEDLAGFKDPAAGHTEESMTDDKTTKIPCKSSPELEDTATSSKRRPRTRAQKVEVKEELLAVGKLTQTSGETTHTDKEPVGEGKGTKAFKQPAKRKLDAEDVIGSRRQPRAPKEKAQPLEDLASFQELSQTPGHTEELANGAADSFTSAPKQTPDSGKPLKISRRVLRAPKVEPVGDVVSTRDPVKSQSKSNTSLPPLPFKRGGGKDGSVTGTKRLRCMPAPEEIVEELPASKKQRVAPRARGKSSEPVVIMKRSLRTSAKRIEPAEELNSNDMKTNKEEHKLQDSVPENKGISLRSRRQNKTEAEQQITEVFVLAERIEINRNEKKPMKTSPEMDIQNPDDGARKPIPRDKVTENKRCLRSARQNESSQPKVAEESGGQKSAKVLMQNQKGKGEAGNSDSMCLRSRKTKSQPAASTLESKSVQRVTRSVKRCAENPKKAEDNVCVKKIRTRSHRDSEDI

SEQ ID NO: 27503 - protein, 148 aa, Homo sapiens
MKAGASLWGGLRFTVPHLRDTKKTIQFDFQILSKNLNNSQSDVVSFRLSVEAQAQVTLNGVSKPEAVLFPVSDWHPRDQPQKEEDLGPAVHHVYELINQGPSSISQGVLELSCPQALEGQQLLYVTRVTGLNCTTNHPINPKGLEVRS

SEQ ID NO: 27504 - protein, 176 aa, Homo sapiens
MELIMAVFNQKSVSDMIKEFRKNWRALCNSERTTLCGADSMLLALQLSMAENNKQHSGEFTVSLSDVLLTWKYLLHEKLNLPVENMDVTDHYEDVRKIYDDFLKNSNMLDLIDVYQKCRALTSNCENYNTVSPSQLLDFLSGKQYAVGDETDLSIPTSPTSKYNRDNEKALPVLKR

SEQ ID NO: 27505 - protein, 17 aa, Homo sapiens
METEGKSVKGMGERTCP

SEQ ID NO: 27506 - protein, 78 aa, Homo sapiens [sequence omitted]

SEQ ID NO: 27507 - protein, 160 aa, Homo sapiens
MSFIPVAEDSDFPIHNLPYGVFSTRGDPRPRIGVAIGDQILDLSIIKHLFTGPVLSKHQDVFNQPTLNSFMGLGQAAWKEARVFLQNLLSVSQARLRDDTELRKCAFISQASATMHLPATIGDYTDFYSSRQHATNVGIMFRDKENALMPNWYELGQMSA

SEQ ID NO: 27508 - protein, 109 aa, Homo sapiens [sequence omitted]

SEQ ID NO: 27509 - protein, 77 aa, Homo sapiens
MQNPETGVRMQNQRVLVTSVPHAMTGSDVLQWIVQRLWISSLGESSSGTQLSGTALCTAPWEKLNRDLACVSEKFTF

SEQ ID NO: 27510 - protein, 45 aa, Homo sapiens
MVDQVTRSVAFVQKRYPSNKPCVKESGKPHLKSSTMWTTLKLLRI

SEQ ID NO: 27511 - protein, 21 aa, Homo sapiens
MQQDKRVAGKSWKKEDTTDNI

SEQ ID NO: 27512 - protein, 260 aa, Homo sapiens
MQVIGIPPSIQQLVLQLVAGILHLGNISFCEDGNYARVESVDLLAFPAYLLGIDSGRLQEKLTSRKMDSRWGGRSESINVTLNVEQAAYTRDALAKGLYARLFDFLVEAINRAMQKPQEEYSIGVLDIYGFEIFQKNGFEQFCINFVNEKLQQIFIELTLKAEQEEYVQEGIRWTPIQYFNNKVVCDLIENKLVRAGSTLAGASHWSPELSLEDEGEGQGCYGILRPFSTLHSGLPATDNNQNVPSAPHPFIPPTCPPFT

SEQ ID NO: 27513 - protein, 163 aa, Homo sapiens
MSQEGVELEKSVRRLREKFHGKVSSKKAGALMRKFGSDHTGVGRSIVYGVKQKDGQELSNDLDAQDPPEDMKQDRDIQAVATSLLPLTEANLRMFQRAQDDLIPAVDRQFACSSCDHVWWRRVPQRKEVSRCRKCRKRYEPVPADKMWGLAEFHCPKCRHNFR

SEQ ID NO: 27514 - protein, 575 aa, Homo sapiens
MRCGRRSRVEELLRCGADPNLVLEDGAAAVHLAAGARHPRGLRCLGALLRQGGDPNARSVEALTPLHVAAAWGCRRGLELLLSQGADPALRDQDGLRPLDLALQQGHLECARVLQDLDTRTRTRTRIGAETQEPEPAPGTPGLSGPTDETLDSIALQKQPCRGDNRDIGLEADPGPPSLPVPLETVDKHGSSASPPGHWDYSSDASFVTAVEVSGAEDPASDTPPWAGSLPPTRQGLLHVVHANQRVPRSQGTEAELNARLQALTLTPPNAAGFQSSPSSMPLLDRSPAHSPPRTPTPGASDCHCLWEHQTSIDSDMATLWLTEDEASSTGGREPVGPCRHLPVSTVSDLELLKGLRALGPEFSGHSLELAAALRTGCIPDVQADEDALAQQFEQPDPARRWREGVVKSSFTYLLLDPRETQDLPARAFSLTPAERLQTFIRAIFYVGKGTRARPYVHLWEALGHHGRSRKQPHQACPKVRQILDIWASGCGVVSLHCFQHVVAVEAYTREACIVEALGIQTLTNQKQGHCYGVVAGWPPARRRRLGVHLLHRALLVFLAEGERQLHPQDIQARG

SEQ ID NO: 27515 - protein, 502 aa, Homo sapiens
MIISYEKIPSYRKSKSLTPHQRIHNTEKSYVCKECGKACSHGSKLVQHERTHTAEKHFECKECGKNYLSAYQLNVHQRFHTGEKPYECKECGKTFSWGSSLVKHERIHTGEKPYECKECGKAFSRGYHLTQHQKIHTGVKSYKCKECGKAFFWGSSLAKHEIIHTGEKPYKCKECGKAFSRGYQLTQHQKIHTGKKPYECKICGKAFCWGYQLTRHQIFHTGEKPYECKECGKAFNCGSSLIQHERIHTGEKPYECKECGKAFSRGYHLSQHQKIHTGEKPFECKECGKAFSWGSSLVKHERVHTGEKSHECKECGKTFCSGYQLTRHQVFHTGEKPYECKECGKAFNCGSSLVQHERIHTGEKPYECKECGKAFSRGYHLTQHQKIHTGEKPFKCKECGKAFSWGSSLVKHERVHTNEKSYECKDCGKAFGSGYQLSVHQRFHTGEKLYQRKEFGKTFTCGSKLVHERTHSNDKPYKYNECGEAFLWTTYSNEKIDTDETL

SEQ ID NO: 27516 - protein, 1117 aa, Homo sapiens
MVLLEPLNEETFINNLKKRFDHSEIYTYIGSVVISVNPYRSLPIYSPEKVEEYRNRNFYELSPHIFALSDEAYRSLRDQDKDQCILITGESGAGKTEASKLVMSYVAAVCGKGAEVNQVKEQLLQSNPVLEAFGNAKTVRNDNSSRFGKYMDIEFDFKGDPLGGVISNYLLEKSRVVKQPRGERNFHVFYQLLSGASEELLNKLKLERDFSRYNYLSLDSAKVNGVDDAANFRTVRNAMQIVGFMDHEAESVLAVVAAVLKLGNIEFKPESRVNGLDESKIKDKNELKEICELTGIDQSVLERAFSFRTVEAKQEKVSTTLNVAQAYYARDALAKNLYSRLFSWLVNRINESIKAQTKVRKKVMGVLDIYGFEIFEDNSFEQFIINYCNEKLQQIFIELTLKEEQEEYIREDIEWTHIDYFNNAIICDLIENNTNGILAMLDEECLRPGTVTDETFLEKLNQVCATHQHFESRMSKCSRFLNDTSLPHSCFRIQHYAGKVLYQVEGFVDKNNDLLYRDLSQAMWKASHALIKSLFPEGNPAKINLKRPPTAGSQFKASVATLMKNLQTKNPNYIRCIKPNDKKAAHIFNEALVCHQIRYLGLLENVRVRRAGYAFRQAYEPCLERYKMLCKQTWPHWKGPARSGVEVLFNELEIPVEEYSFGRSKIFIRNPRTLFKLEDLRKQRLEDLATLIQKIYRGWKCRTHFLLMKKSQIVIAAWYRRYAQQKRYQQTKSSALVIQSYIRGWKARKILRELKHQKRCKEAVTTIAAYWHGTQARRELRRLKEEARNKHAIAVIWAYWLGSKARRELKRLKEEARRKHAVAVIWAYWLGLKVRREYRKFFRANAGKKIYEFTLQRIVQKYFLEMKNKMPSLSPIDKNWPSRPYLFLDSTHKELKRIFHLWRCKKYRDQFTDQQKLIYEEKLEASELFKDKKALYPSSVGQPFQGAYLEINKNPKYKKLKDAIEEKIIIAEVVNKINRANGKSTSRIFLLTNNNLLLADQKSGQIKSEVPLVDVTKVSMSSQNDGFFAVHLKEGSEAASKGDFLFSSDHLIEMATKLYRTTLSQTKQKLNIEISDEFLVQFRQDKVCVKFIQGNQKNGSVPTCKRKNNRLLEVAVP

SEQ ID NO: 27517 - protein, 45 aa, Homo sapiens
MNCVKYKVFQQELHWEPEVLTFLSVTTERTFPCLGKEKTSSDHRS

SEQ ID NO: 27518 - protein, 189 aa, Homo sapiens [sequence omitted]

SEQ ID NO: 27519 - protein, 277 aa, Homo sapiens
MVDEEGFKELPPSEFLQVAEATWLVLNVSSHSGAAVQAAGVTKIARSVIAPLAEHHVSVLMLSTYQTDFILVREQDLSVVIHTLAQEFDIYREVGGEPVPVTRDDSSNGFPRTQHAGPSPTVHPIQSPQNRFCVLTLDPETLPAIATTLIDVLFYSHSTPKEAASSSPEPSSITFFAFSLIEGYISIVMDAETQKKFPSDLLLTSSSGELWRMVRIGGQPLGFDECGIVAQIAGPLAAADISAYYISTFNFDHALVPEDGIGSVIEVLQRRQEGLAS

SEQ ID NO: 27520 - protein, 20 aa, Homo sapiens
MMKRQLHRMRQLAQTGSLGR

SEQ ID NO: 27521 - protein, 178 aa, Homo sapiens
MKLVQHPNIVRLYEVIDTQTKLYLILELGDGGDMFDYIMKHEEGLNEDLAKKYFAQIVHAISYCHKLHVVHRDLKPENVVFFEKQGLVKLTDFGFSNKFQPGKKLTTSCGSLAYSAPEILLGDEYDAPAVDIWSLGVILFMLVCGQPPFQEANDSETLTMIMDCKYTVPSHVSKECKE

SEQ ID NO: 27522 - protein, 625 aa, Homo sapiens
MMMTDQIPLELPPLLNGEVAMMPHLVNGDAAQQVILVQVNPGETFTIRAEDGTLQCIQGPAEVPMMSPNGSIPPIHVPPGYISQVIEDSTGVRRVVVTPQSPECYPPSYPSAMSPTHHLPPYLTHHPHFIHNSHTAYYPPVTGPGDMPPQFFPQHHLPHTIYGEQEIIPFYGMSTYITREDQYSKPPHKKLKDRQIDRQNRLNSPPSSIYKSSCTTVYNGYGKGHSGGSGGGGSGSGPGIKKTERRARSSPKSNDSDLQEYELEVKRVQDILSGIEKPQVSNIQARAVVLSWAPPVGLSCGPHSGLSFPYSYEVALSDKGRDGKYKIIYSGEELECNLKDLRPATDYHVRVYAMYNSVKGSCSEPVSFTTHSCAPECPFPPKLAHRSKSSLTLQWKAPIDNGSKITNYLLEWDEGKRNSGFRQCFFGSQKHCKLTKLCPAMGYTFRLAARNDIGTSGYSQEVVCYTLGNIPQMPSAPRLVRAGITWVTLQWSKPEGCSPEEVITYTLEIQEDENDNLFHPKYTGEDLTCTVKNLKRSTQYKFRLTASNTEGKSCPSEVLVCTTSPDRPGPPTRPLVKGPVTSHGFSVKWDPPKDNGGSEILKYLLEITDGNSEGEVFGNCFIQIQ

SEQ ID NO: 27523 - protein, 32 aa, Homo sapiens
MSGGSADYNREHGGPEGMDPDGVIEVRNGCGS

SEQ ID NO: 27524 - protein, 77 aa, Homo sapiens
MSGGSADYNSREHGGPEGMDPDGVIESNWNEIVDNFDDMNLKESLLRGIYAYGFEKPSAIQQRAIIPCIKGKRNWHF

SEQ ID NO: 27525 - protein, 33 aa, Homo sapiens
MSGGSADYNSREHGGPEGMDPDGVIEVRNGCGS

SEQ ID NO: 27526 - protein, 322 aa, Homo sapiens
MTASEAAARKSQIKARITDTIGPTETSIAPRQRPKANSATTATPSVLTIQSSATPVKVLAPGEFGNHRPKGALRPGNGPEILLGQGPPQQPPQQHRVLQQLQQGDWRLQQLHLQHRHPHQQQQQQQQQQQQQQQQQQQQQQQQQQQHHHHHHHHLLQDAYMQQYQHATQQQQMLQQQFLMHSVYQPQPSASQYPTMMPQYQQAFFQQQMLAQHQPSQQQASPEYLTSPQEFSPALVSYTSSLPAQVGTIMDSSYSANRSVADKEAIANFTNQKNISNPPDMSGWNPFGEDNFSKLTEEELLDREFDLLRSSKGHLKAYFASQ

SEQ ID NO: 27527 - protein, 289 aa, Homo sapiens
MDEAVGDLKQALPCVAESPTVHVEVHQRGSSTAKKEDINLSVRKLLNRHNIVFGDYTWTEFDEPFLTRNVQSVSIIDTELKVKDSQPIDLSACTVALHIFQLNEDGPSSENLEEETENIIAANHWVLPAAEFHGLWDSLVYDVEVKSHLLDYVMTTLLFSDKNVNSNLITWNRVVLLHGPPGTGKTSLCKALAQKLTIRLSSRYRYGQLIEINSHSLFSKWFSESGKLVTKMFQKIQDLIDDKDALVFVLIDEVESLTAARNACRAGTEPSDAIRVVNAVLTQIDQIKR

SEQ ID NO: 27528 - protein, 24 aa, Homo sapiens
MIQGCARCSLGTQIEVKNDNQHQP

SEQ ID NO: 27529 - protein, 162 aa, Homo sapiens [sequence omitted]

SEQ ID NO: 27530 - protein, 67 aa, Homo sapiens
MHIQKLEDQEQRARQLKERLRSKQQSLQRQLEQLRGLAGAAERERLRADSLDSSGLSSERSDSDQGP

SEQ ID NO: 27531 - protein, 83 aa, Homo sapiens
MPAPLLKNVQLSESKARELYLQVIQYMRRMYQDARLVHADLSEFNMLYHGGGVYIIDVSQSVEHDHPHALEFLRKDCANVNGE

SEQ ID NO: 27532 - protein, 141 aa, Homo sapiens [sequence omitted]

SEQ ID NO: 27533 - protein, 25 aa, Homo sapiens
MGQGSSEESEKGTGAFKSPLGDGLQ

SEQ ID NO: 27534 - protein, 140 aa, Homo sapiens
MTVKTEAAKGTLTYSRMRGMVAILIAFMKQRRMGLNDFIQKIANNSYACKHPEVQSILKISQPQEPELMNANPSPPPSPSQQINLGPSSNPHAKPSDFHFLKVIGKGSFGKVLLARHKAEEVFYAVKVLQKKAILKKKEV

SEQ ID NO: 27535 - protein, 82 aa, Homo sapiens
MPTLLPLPNSGTVSDSAPCARSVSLPLALGKWRRRRRRPRRRRRRRQVHGMHSTIHRRFEEVSVFGGTGSFPLSPSGPQVWI

SEQ ID NO: 27536 - protein, 504 aa, Homo sapiens
MGRTRETGTEKNTSSLELEESLPEQPETGRQEEELPRFPCKKQDYSPSSGEAQEVPFALSLSSDGAVSPVGELAAGGDRDLESQAGSLVESKARDAAEEVAPPLPMGASVPSIDSMMRKLEEMGLNLRKDQKKTKKRVSFSEQLFTEEAVAGAALLVEGHSSCPQELNPAWSVAGNASDGEPPESPHAEDSERESVTTPGPATCGAPASPADHLLLPSQEESFSEVPMSEASSAKDTPLFRMEGEDALVTQYQSKASDHEGLLSDPLSDLQLVSDFKSPIMADLNLSLPSIPEVASDDERIDQVEDDGDQVEDDGETAKSSTLDIGALSLGLVVPCPERGKGPSGEADRLVLGEGLCDFRLQAPQASVTAPSEQTTEFGIHKPHLGKSSSLDKQLPGPSGGEEEKPMGNGSPSPPPGTSLDNPVPSPSPSEIFPVTHSFPSSAHSDTHHTSTAESQKKATAEGSAGRVENFGKRKPLLQAWVSPSETHPVSAQPGAGTGSAKHR

SEQ ID NO: 27537 - protein, 1016 aa, Homo sapiens
MAGVRSTTLLSSPCEWDWHPGCSSRSKYSRKHRAVPVHGPRCQAPGMEELIWEQYTVTLQKDSKRGFGIAVSGGRDNPHFENGETSIVISDVLPGGPADGLLQENDRVVMVNGTPMEDVLHSFAVQQLRKSGKVAAIVVKRPRKVQVAALQASPPLDQDDRAFEVMDEFDGRSFRSGYSERSRLNSHGGRSRSWEDSPERGRPHERARSRERDLSRDRSRGRSLERGLDQDHARTRDRSRGRSLERGLDHDFGPSRDRDRDRSRGRSIDQDYERAYHRAYDPDYERAYSPEYRRGARHDARSRGPRSRSREHPHSRSPSPEPRGRPGPIGVLLMKSRANEEYGLRLGSQIFVKEMTRTGLATKDGNLHEGDIILKINGTVTENMSLTDARKLIEKSRGKLQLVVLRDSQQTLINIPSLNDSDSEIEDISEIESNRSFSPEERRHQYSDYDYHSSSEKLKERPSSREDTPSRLSRMGATPTPFKSTGDIAGTVVPETNKEPRYQEDPPAPQPKAAPRTFLRPSPEDEAIYGPNTKMVRFKKGDSVGLRLAGGNDVGIFVAGIQEGTSAEQEGLQEGDQILKVNTQDFRGLVREDAVLYLLEIPKGEMVTILAQSRADVYRDILACGRGDSFFIRSHFECEKETPQSLAFTRGEVFRVVDTLYDGKLGNWLAVRIGNELEKGLIPNKSRAEQMASVQNAQRDNAGDRADFWRMRGQRSGVKKNLRKSREDLTAVVSVSTKFPAYERVLLREAGFKRPVVLFGPIADIAMEKLANELPDWFQTAKTEPKDAGSEKSTGVVRLNTVRQIIEQDKHALLDVTPKAVDLLNYTQWFPIVIFFNPDSRQGVKTMRQRLNPTSNKSSRKLFDQANKLKKTCAHLFTATINLNSANDSWFGSLKDTIQHQQGEAVWVSEGKMEGMDDDPEDRMSYLTAMGADYLSCDSRLISDFEDTDGEGGAYTDNELDEPAEEPLVSSITRSSEPVQHEEVRRGRPRAGTGEPGVFLALSWTAVCSGCCGRHS

SEQ ID NO: 27538 - protein, 91 aa, Homo sapiens
LLLAGVALQGEPRALRGRRVTSFRKKARNALCGVSRTPQLRTISPGLRAPKSPTTSKRPQKDKSRSPSRAPWPRPPFVCATSPSTCPPGSP

SEQ ID NO: 27539 - protein, 604 aa, Homo sapiens
TGGSEAGRRSKSKMKYILVTGGVISGIGKGIIASSVGTILKSCGLHVTSIKIDPYINIDAGTFSPYEHGEVFVLDDGGEVDLDLGNYERFLDIRLTKDNNLTTGKIYQYVINKERKGDYLGKTVQVVPHITDAIQEWVMRQALIPVDEDGLEPQVCVIELGGTVGDIESMPFIEAFRQFQFKVKRENFCNIHVSLVPQPSSTGEQKTKPTQNSVRELRGLGLSPDLVVCRCSNPLDTSVKEKISMFCHVEPEQVICVHDVSSIYRVPLLLEEQGVVDYFLRRLDLPIERQPRKMLMKWKEMADRYDRLLETCSIALVGKYTKFSDSYASVIKALEHSALAINHKLEIKYIDSADLEPITSQEEPVRYHEAWQKLCSAHGVLVPGGFGVRGTEGKIQAIAWARNQKKPFLGVCLGMQLAVVEFSRNVLGWQDANSTEFDPTTSHPVVVDMPEHNPGQMGGTMRLGKRRTLFQTKNSVMRKLYGDADYLEERHRHRFEVNPVWKKCLEEQGLKFVGQDVEGERMEIVELEDHPFFVGVQYHPEFLSRPIKPSPPYFGLLLASVGRLSHYLQKGCRLSPRDTYSDRSGSSSPDSEITELKFPSINHD

SEQ ID NO: 27540 - protein, 497 aa, Homo sapiens
IPPPKLCLMESMFSSPAEAALQRETGVPGLLTPLPDLDGVYELERVAGFVRDLGCERVALQFPDQLLGDAVAVAARLEETTGSKMFILGDTAYGSCCVDVLGAEQAGAQALIHFGPACLSPPARPLPVAFVLRQRSVALELCVKAFEAQNPDPKAPVVLLSEPACAHALEALATLLRPRYLDLLVSSPAFPQPVGSLSPEPMPLERFGRRFPLAPGRRLEEYGAFYVGGSKASPDPDLDPDLSRLLLGWAPGQPFSSCCPDTGKTQDEGARAGRLRARRRYLVERARDARVVGLLAGTLGVAQHREALAHLRNLTQAAGKRSYVLALGRPTPAKLANFPEVDVFVLLACPLGALAPQLSGSFFQPILAPCELEAACNPAWPPPGLAPHLTHYADLLPGSPFHVALPPPESELWETPDVSLITGDLRPPPAWKSSNDHGSLALTPRPQLELAESSPAASFLSSRSWQGLEPRLGQTPVTEAVSGRRGIAIAYEDEGSG

SEQ ID NO: 27541 - protein, 746 aa, Homo sapiens
RRSLAPSQLAKRKPEGRSCDDEDWQPGLVTPRKRKSSSETQIQECFLSPFRKPLSQLTNQPPCLDSSQHEAFIRSILSKPFKVPIPNYQGPLGSRALGLKRAGVRRALHDPLEKDALVLYEPPPLSAHDQLKLDKEKLPVHVVVDPILSKVLRPHQREGVKFLWECVTSRRIPGSHGCIMADEMGLGKTLQCITLMWTLLRQSPECKPEIDKAVVVSPSSLVKNWYNEVGKWLGGRIQPLAIDGGSKDEIDQKLEGFMNQRGARVSSPILIISYETFRLHVGVLQKGSVGLVICDEGHRLKNSENQTYQALDSLNTSRRVLISGTPIQNDLLEYFSLVHFVNSGILGTAHEFKKHFELPILKGRDAAASEADRQLGEERLRELTSIVNRCLIRRTSDILSKYLPVKIEQVVCCRLTPLQTELYKRFLRQAKPAEELLEGKMSVSSLSSITSLKKLCNHPALIYDKCVEEEDGFVGALDLFPPGYSSKALEPQLSGKMLVLDYILAVTRSRSSDKVVLVSNYTQTLDLFEKLCRARRYLYVRLDGTMSIKKRAKVVERFNSPSSPDFVFMLSSKAGGCGLNLIGANRLVMFDPDWNPANDEQAMARVWRDGQKKTCYIYRLLSAGTIEEKIFQRQSHKKALSSCVVDEEQDVERHFSLGELKELFILDEASLSDTHDRLHCRRCVNSRQIRPPPDGSDCTSDLAGWNHCTDKWGLRDEVLQAAWDAASTAITFVFHQRSHEEQRGLR

SEQ ID NO: 27542 - protein, 13 aa, Homo sapiens
ILNWVRCRCCCSC

SEQ ID NO: 27543 - protein, 49 aa, Homo sapiens
RMQKEITTRAPSTMKIKMIASPEHKYSVWISGSILASLSAFQQMWISKQ

SEQ ID NO: 27544 - protein, 311 aa, Homo sapiens
RSLSSSGRRSLFRRMGFVKVVKNKAYFKRYQVKFRRRREGKTDYYARKRLVIQDKNKYNTPKYRMIVRVTNRDIICQIAYARIEGDMIVCAAYAHELPKYGVKVGLTNYAAAYCTGLLLARRLLNRFGMDKIYEGQVEVTGDEYNVESIDGQPGAFTCYLDAGLARTTTGNKVFGALKGAVDGGLSIPHSTKRFPGYDSESKEFNAEVHRKHIMGQNVADYMRYLMEEDEDAYKKQFSQYIKNSVTPDMMEEMYKKAHAAIRENPVYEKKPKKEVKKKRWNRPKMSLAQKKDRVAQKKASFLRAQERAAES

SEQ ID NO: 27545 - protein, 25 aa, Homo sapiens
LAVFSSCSAVGGGGRNQSLGGAQTM

SEQ ID NO: 27546 - protein, 175 aa, Homo sapiens
LLLSHFSWELRAALSYWRAGRAPPPPARLHAGPASGFWVLTPSGGEEGEPRTHCGEEEEEEEEGGRKKTRRTGAGGGRLATFSPPANAQGAHILTNSAARWIFFVFKEKKCPCVCRDDLQFSPAEADRMRLWAVPPPSMLPLFKMKRKPRKGKTTRTEMCLAMSIGSNQWKRSNT

SEQ ID NO: 27547 - protein, 3118 aa, Homo sapiens
RQNKMSWALEEWKEGLPTRALQKIQELEGQLDKLKKEKQQRQFQLDSLEAALQKQKQKVENEKTEGTNLKRENQRLMEICESLEKTKQKISHELQVKESQVNFQEGQLNSGKKQIEKLEQELKRCKSELERSQQAAQSADVSLNPCNTPQKIFTTPLTPSQYYSGSKYEDLKEKYNKEVEERKRLEAEVKALQAKKASQTLPQATMNHRDIARHQASSSVFSWQQEKTPSHLSSNSQRTPIRRDFSASYFSGEQEVTPSRSTLQIGKRDANSSFFDNSSSPHLLDQLKAQNQELRNKINELELRLQGHEKEMKGQVNKFQELQLQLEKAKVELIEKEKVLNKCRDELVRTTAQYDQASTKYTALEQKLKKLTEDLSCQRQNAESARCSLEQKIKEKEKEFQEELSRQQRSFQTLDQECIQMKARLTQELQQAKNMHNVLQAELDKLTSVKQQLENNLEEFKQKLCRAEQAFQASQIKENELRRSMEEMKKENNLLKSHSEQKAREVCHLEAELKNIKQCLNQSQNFAEEMKAKNTSQETMLRDLQEKINQQENSLTLEKLKLAVADLEKQRDCSQDLLKKREHHIEQLNDKLSKTEKESKALLSALELKKKEYEELKEEKTLFSCWKSENEKLLTQMESEKENLQSKINHLETCLKTQQIKSHEYNERVRTLEMDRENLSVEIRNLHNVLDSKSVEVETQKLAYMELQQKAEFSDQKHQKEIENMCLKTSQLTGQVEDLEHKLQLLSNEIMDKDRCYQDLHAEYESLRDLLKSKDASLVTNEDHQRSLLAFDQQPAMHHSFANIIGEQGSMPSERSECRLEADQSPKNSAILQNRVDSLEFSLESQKQMNSDLQKQCEELVQIKGEIEENLMKAEQMHQSFVAETSQRISKLQEDTSAHQNVVAETLSALENKEKELQLLNDKVETEQAEIQELKKSNHLLEDSLKELQLLSETLSLEKKEMSSIISLNKREIEELTQENGTLKEINASLNQEKMNLIQKSESFANYIDEREKSISELSDQYKQEKLILLQRCEETGNAYEDLSQKYKAAQEKNSKLECLLNECTSLCENRKNELEQLKEAFAKEHQEFLTKLAFAEERNQNLMLELETVQQALRSEMTDNQNNSKSEAGGLKQEIMTLKEEQNKMQKEVNDLLQENEQLMKVMKTKHECQNLESEPIRNSVKERESERNQCNFKPQMDLEVKEISLDSYNAQLVQLEAMLRNKELKLQESEKEKECLQHELQTIRGDLETSNLQDMQSQEISGLKDCEIDAEEKYISGPHELSTSQNDNAHLQCSLQTTMNKLNELEKICEILQAEKYELVTELNDSRSECITATRKMAEEVGKLLNEVKILNDDSGLLHGELVEDIPGGEFGEQPNEQHPVSLAPLDESNSYEHLTLSDKEVQMHFAELQEKFLSLQSEHKILHDQHCQMSSKMSELQTYVDSLKAENLVLSTNLRNFQGDLVKEMQLGLEEGLVPSLSSSCVPDSSSLSSLGDSSFYRALLEQTGDMSLLSNLEGAVSANQCSVDEVFCSSLQEENLTRKETPSAPAKGVEELESLCEVYRQSLEKLEEKMESQGIMKNKEIQELEQLLSSERQELDCLRKQYLSENEQWQQKLTSVTLEMESKLAAEKKQTEQLSLELEVARLQLQGLDLSSRSLLGIDTEDAIQGRNESCDISKEHTSETTERTPKHDVHQICDKDAQQDLNLDIEKITETGAVKPTGECSGEQSPDTNYEPPGEDKTQGSSECISELSFSGPNALVPMDFLGNQEDIHNLQLRVKETSNENLRLLHVIEDRDRKVESLLNEMKELDSKLHLQEVQLMTKIEACIELEKIVGELKKENSDLSEKLEYFSCDHQELLQRVETSEGLNSDLEMHADKSSREDIGDNVAKVNDSWKERFLDVENELSRIRSEKASIEHEALYLEADLEVVQTEKLCLEKDNENKQKVIVCLEEELSVVTSERNQLRGELDTMSKKTTALDQLSEKMKEKTQELESHQSECLHCIQVAEAEVKEKTELLQTLSSDVSELLKDKTHLQEKLQSLEKDSQALSLTKCELENQIAQLNKEKELLVKESESLQARLSESDYEKLNVSKALEAALVEKGEFALRLSSTQEEVHQLRRGIEKLRVRIEADEKKQLHIAEKLKERERENDSLKDKVENLERELQMSEENQELVILDAENSKAEVETLKTQIEEMARSLKVFELDLVTLRSEKENLTKQIQEKQGQLSELDKLLSSFKSLLEEKEQAEIQIKEESKTAVEMLQNQLKELNEAVAALCGDQEIMKATEQSLDPPIEEEHQLRNSIEKLRARLEADEKKQLCVLQQLKESEHHADLLKGRVENLERELEIARTNQEHAALEAENSKGEVETLKAKIEGMTQSLRGLELDVVTIRSEKENLTNELQKEQERISELEIINSSFENILQEKEQEKVQMKEKSSTAMEMLQTQLKELNERVAALHNDQEACKAKEQNLSSQVECLELEKAQLLQGLDEAKNNYIVLQSSVNGLIQEVEDGKQKLEKKDEEISRLKNQIQDQEQLVSKLSQVEGEHQLWKEQNLELRNLTVELEQKIQVLQSKNASLQDTLEVLQSSYKNLENELELTKMDKMSFVEKVNKMTAKETELQREMHEMAQKTAELQEELSGEKNRLAGELQLLLEEIKSSKDQLKELTLENSELKKSLDCMHKDQVEKEGKVREEIAEYQLRLHEAEKKHQALLLDTNKQYEVEIQTYREKLTSKEECLSSQKLEIDLLKSSKEELNNSLKATTQILEELKKTKMDNLKYVNQLKKENERAQGKMKLLIKSCKQLEEEKEILQKELSQLQAAQEKQKTGTVMDTKVDELTTEIKELKETLEEKTKEADEYLDKYCSLLISHEKLEKAKEMLETQVAHLCSQQSKQDSRGSPLLGPVVPGPSPIPSVTEKRLSSGQNKASGKRQRSSGIWENGRGPTPATPESFSKKSKKAVMSGIHPAEDTEGTEFEPEGLPEVVKKGFADIPTGKTSPYILRRTTMATRTSPRLAAQKLALSPLSLGKENLAESSKPTAGGSRSQKVKVAQRSPVDSGTILREPTTKSVPVNNLPERSPTDSPREGLRVKRGRLVPSPKAGLESNGSENCKVQ

SEQ ID NO: 27548 - protein, 91 aa, Homo sapiens
KQESPEPGRGMNREGAPGKSPEEMYIQQKVRVLLMLRKMGSNLTASEEEFLRTYAGVVNSQLSQLPPHSIDQGAEDVVMAFSRSETEDRRQ

SEQ ID NO: 27549 - protein, 111 aa, Homo sapiens
RGLRAGNLEWAVCSARNWSRWPRPRRMLAWKGTSEATGQQTTMGLTPLRPGLHPHLPTSPTTATSPLRPSTLASLIVAPSGVCQVSPRGRRQELPGSWEKLREEEEMRTCP

SEQ ID NO: 27550 - protein, 388 aa, Homo sapiens
RRAQRGRQPAGACALRETFPVKGSGGRGCPPLATALLRPRNLCAQPKLTSREVTDCSMTAKMETTFYDDALNASFLPSESGPYGYSNPKILKQSMTLNLADPVGSLKPHLRAKNSDLLTSPDVGLLKLASPELERLIIQSSNGHITTTPTPTQFLCPKNVTDEQEGFAEGFVRALAELHSQNTLPSVTSAAQPVNGAGMVAPAVASVAGGSGSGGFSASLHSEPPVYANLSNFNPGALSSGGGAPSYGAAGLAFPAQPQQQQQPPHHLPQQMPVQHPRLQALKEEPQTVPEMPGETPPLSPIDMESQERIKAERKRMRNRIAASKCRKRKLERIARLEEKVKTLKAQNSELASTANMLREQVAQLKQKVMNHVNSGCQLMLTQQLQTF

SEQ ID NO: 27551 - protein, 50 aa, Homo sapiens
KPGNFSRLEPHHGCNPKEAGDRWGWCLWEDLPPHRLQQGSVSGGLRPYCL

SEQ ID NO: 27552 - protein, 203 aa, Homo sapiens
KGGRERNSASTLRAGGCQERGPRTRRAEEGPGEKGRDGGESGIAWQKKRREFLNPGKRRRGFKDRCVSILCCKFCKQVLSSRGMKAVLLADTEIDLFSTDIPPTNAVDFTGRCYFTKICKCKLKDIACLKCGNIVGYHVIVPCSSCLPSCNNGHFWMFHSQAVYDINRLDSTGVNILLWGNLPEIEESTDEDVLNISAEECIR

SEQ ID NO: 27553 - protein, 26 aa, Homo sapiens
VCMCVRACVRVCARASVWTRRWGQLS

SEQ ID NO: 27554 - protein, 196 aa, Homo sapiens
RDNNLDVEPKFEGVTYLMRSGPLRISEWKMEQIKRANRLYTNDSIFLKKTLYIPILTEPRDLFNGLDSEEEKDGEEKVHPSNSEVWPHSTERKKQETGAGRANGEVLPTPGQETPTPIHDLSASDFLKKLDSQISLSKKAAAQKLKKGENGVPGEDAGLHLSSPWMQQRAVLGPVPLTRTSRTRTLRDQEDEIFKL

SEQ ID NO: 27555 - protein, 48 aa, Homo sapiens
LQQVKLKTEARAGSACQWRHWARHPGWTQNLREPCRPLTAPPRQMGKN

SEQ ID NO: 27556 - protein, 50 aa, Homo sapiens
VRQARESGADGSNMAAPSLSREKRPGKLSFLRSTVGIAAAEQGFWKALRT

SEQ ID NO: 27557 - protein, 32 aa, Homo sapiens
IVQCSCSARTQSVNPEEKFNLETSMLPRSQIF

SEQ ID NO: 27558 - protein, 223 aa, Homo sapiens
TRSLLEPATILPTTCCPAPAAMCRTLAAFPTTCLERAKEFKTRLGIFLHKSELGCDTGSTGKFEWGSKHSKENRNFSEDVLGWRESFDLLLSSKNGVAAFHAFLKTEFSEENLEFWLACEEFKKIRSATKLASRAHQIFEEFICSEAPKEVNIDHETHELTRMNLQTATATCFDAAQGKTRTLMEKDSYPRFLKSPAYRDLAAQASAASATLSSCSLDEPSHT

SEQ ID NO: 27559 - protein, 10 aa, Homo sapiens
IMLLTRTETV

SEQ ID NO: 27560 - protein, 35 aa, Homo sapiens
LLRRGCIGERASSREFSVALPLPFSLHGLAPRPST

SEQ ID NO: 27561 - protein, 40 aa, Homo sapiens
REEAGFLEPSQPSKTDRQTDRQLARGSLGATAASADLMAE

SEQ ID NO: 27562 - protein, 12 aa, Homo sapiens
KISVERNKSVIS

SEQ ID NO: 27563 - protein, 487 aa, Homo sapiens
RGGGSVLLGGFSIQVPGVPGPWSSALGGATCVRQRDSGDWPAMPSRAEDYEVLYTIGTGSYGRCQKIRRKSDGKILVWKELDYGSMTEAEKQMLVSEVNLLRELKHPNIVRYYDRIIDRTNTTLYIVMEYCEGGDLASVITKGTKERQYLDEEFVLRVMTQLTLALKECHRRSDGGHTVLHRDLKPANVFLDGKQNVKLGDFGLARILNHDTSFAKTFVGTPYYMSPEQMNRMSYNEKSDIWSLGCLLYELCALMPPFTAFSQKELAGKIREGKFRRIPYRYSDELNEIITRMLNLKDYHRPSVEEILENPLIADLVADEQRRNLERRGRQLGEPEKSQDSSPVLSELKLKEIQLQERERALKAREERLEQKEQELCVRERLAEDKLARAENLLKNYSLLKERKFLSLASNPELLNLPSSVIKKKVHFSGESKENIMRSENSESQLTSKSKCKDLKKRLHAAQLRAQALSDIEKNYQLKSRQILGMR

SEQ ID NO: 27564 - protein, 33 aa, Homo sapiens
VTTKVVFPGLRLIHCTPDVLTPAISPNVGNSTA

SEQ ID NO: 27565 - protein, 37 aa, Homo sapiens
LPENCRRCSAGRPPFPLYLQEGWGDAGQTHRSSVARD

SEQ ID NO: 27566 - protein, 157 aa, Homo sapiens
ISPKGNGVVSSIGYRKKPGWAGRRHDNRYRKRRVVPPGQPYAGKGLEMQAALEVTARYCGRELEQYGQCVAAKPESWQRDCHYLKMSIAQCTSSHPIIRQIRQACAQPFEAFEECLRQNEAAVGNCAEHMRRFLQCAEQVQPPRSPATVEAQPLPAS

SEQ ID NO: 27567 - protein, 92 aa, Homo sapiens
IAGLQTEPRRVCAAAAVASVFASPQRQDKGPYRGIRLPPVFRRERKNKIYLGKLYLPELARAFFKKTFVKLNKLKVNTLRVVVTDQKYGQTS

SEQ ID NO: 27568 - protein, 27 aa, Homo sapiens
TLAFLSPGWERGWCAEWFAFFSLELDA

SEQ ID NO: 27569 - protein, 10 aa, Homo sapiens
LRGEGTQLKA

SEQ ID NO: 27570 - protein, 8 aa, Homo sapiens
ILSILGIS

SEQ ID NO: 27571 - protein, 57 aa, Homo sapiens
INHLLNLLLDPKMMLPTMLFCLSNLKGPSALNSSPDHLILQGPRSRSWSHQNFWAKG

SEQ ID NO: 27572 - protein, 48 aa, Homo sapiens
LAGLRELSLESGCWLEWARIWCGEGGGTQACLRSIVLHNGRGRTGTFR

SEQ ID NO: 27573 - protein, 50 aa, Homo sapiens
ILPAALQTHMVHCCHSPDCIFETQALSNLQRTKRQPPRYVCWEGVIVTAL

SEQ ID NO: 27574 - protein, 21 aa, Homo sapiens
ISSRQAINYIQLSLQDWEELG

SEQ ID NO: 27575 - protein, 93 aa, Homo sapiens
VEAETAERLYWGAAQCLLGSAAELLRRVCSKFGSSLKSWRNWNRNTPTNMTLSQKTNKCYGTAPSVFSSSSFRARLWWKDSPACQRTLRGRWS

SEQ ID NO: 27576 - protein, 61 aa, Homo sapiens
IGSVGRLAVSLRYQVRVRGSGVLGRHNGVSSRPASGRHRRQRLSAPGARRHALPDECDSQV

SEQ ID NO: 27577 - protein, 70 aa, Homo sapiens
LQPTSEEDLCPICYAHPISAVFQPCGHKSCKACINQHLMNNKDCFFCKTTIVSVEDWEKGANTSTTSSAA

SEQ ID NO: 27578 - protein, 87 aa, Homo sapiens
LAEGNRRAARRRRRQVARSRAGAGPGHGRLGAAVRVVAALLRAEGPGLPAAVAEGLCRCLQEEHLTVLSGATKARGGRCRGPAATTG

SEQ ID NO: 27579 - protein, 11 aa, Homo sapiens
VGTTQPSPALV

SEQ ID NO: 27580 - protein, 111 aa, Homo sapiens
LRRGLSLLKYLVGQKRWYRGRVGSGRAVLHTWVSLPRAVCSGSFGPVGGCGAAGVACAVRPGILPVMEAAAAAAAGSRCAPSTAAREVGKFAARRPKARGAAPLCRELSPI

SEQ ID NO: 27581 - protein, 80 aa, Homo sapiens
LISQLQEKSWEYRSWKTLLIATSQIPRVPMYSVLLKREWLKKKKMKKGMKNQPSLMGQGSQMHFPSSKQKIVITCFPRWT

SEQ ID NO: 27582 - protein, 150 aa, Homo sapiens
RSQGRAAAMSYCRQEGKDRIIFVTKEDHETPSSAELVADDPNDPYEEHGLILPNGNINWNCPCLGGMASGPCGEQFKSAFSCFHYSTEEIKGSDCVDQFRAMQECMQKYPDLYPQEDEDEEEEREKKPAEQAEETAPIEATATKEEEGSS

SEQ ID NO: 27583 - protein, 528 aa, Homo sapiens
KMAKERCLKKSFQDSLEDIKKRMKEKRNKNLAEIGKRRSFIAAPCQIITNTSTLLKNYQDNNKMLVLALENEKSKVKEAQDIILQLRKECYYLTCQLYALKGKLTSQQTVEPAQNQEICSSGMDPNSDDSSRNLFVKDLPQIPLEETELPGQGESFQIEDQIPTIPQDTLGVDFDSGEAKSTDNVLPRTVSVRSSLKKHCNSICQFDSLDDFETSHLAGKSFEFERVGFLDPLVNMHIPENVQHNACQWSKDQVNLSPKLIQPGTFTKTKEDILESKSEQTKSKQRDTQERKREEKRKANRRKSKRMSKYKENKSENKKTVPQKKMHKSVSSNDAYNFNLEEGVHLTPFRQKVSNDSNREENNESEVSLCESSGSGDDSDDLYLPTCKYIQNPTSNSDRPVTRPLAKRALKYTDEKETEGSKPTKTPTTTPPETQQSPHLSLKDITNVSLYPVVKIRRLSLSPKKNKASPAVALPKRRCTASVNYKEPTLASKLRRGDPFTDLCFLNSPIFKQKKDLRRSKKSMKQIQ

SEQ ID NO: 27584 - protein, 23 aa, Homo sapiens
LSSASVRIAGCLSPDPRARPAPP

SEQ ID NO: 27585 - protein, 71 aa, Homo sapiens
RATRSGRVVSAVEEVPGAVPKLTRVPVTMRQPVRPAAPPVNAPAFSAPLQRTALGGMSWMSRASRKTLRKS

SEQ ID NO: 27586 - protein, 23 aa, Homo sapiens
ISEGENGNRAPKMKMLLAFAVST

SEQ ID NO: 27587 - protein, 337 aa, Homo sapiens
RQAPAVPWLVRSAMSRPSSTGPSANKPCSKQPPPQPQHTPSPAAPPAAATISAAGPGSSAVPAAAAVISGPGGGGGAGPVSPQHHELTSLFECPVCFDYVLPPILQCQAGHLVCNQCRQKLSCCPTCRGALTPSIRNLAMEKVASAVLFPCKYATTGCSLTLHHTEKPEHEDICEYRPYSCPCPGASCKWQGSLEAVMSHLMHAHKSITTLQGEDIVFLATDINLPGAVDWVMMQSCFGHHFMLVLEKQEKYEGHQQFFAIVLLIGTRKQAENFAYRLELNGNRRRLTWEATPRSIHDGVAAAIMNSDCLVFDTAIAHLFADNGNLGINVTISTCCP

SEQ ID NO: 27588 - protein, 90 aa, Homo sapiens
LGPPFPPAPQALADRDLRPRVGKKQRPGRRGVWLTLFLAMSSHKTFTIKRFLAKKQKQNRPIPQWIQMKPGSKIRYNSKRRHWRRTKLGL

SEQ ID NO: 27589 - protein, 24 aa, Homo sapiens
RVLWSELEGEAGGAGGWASECQNG

SEQ ID NO: 27590 - protein, 30 aa, Homo sapiens
LGHSNTRCYHAGHPPLQTPVTAPRKNPKCL

SEQ ID NO: 27591 - protein, 48 aa, Homo sapiens
MSLVRLDLKKMKILRCMLKINFVNLNSAKSGVINILLRFRSKTALKTR

SEQ ID NO: 27592 - protein, 76 aa, Homo sapiens
LTRQVRIWLSGAASSSARTRGRLPALFAGRALGRHKTKEWPPRPREAARLSQPALRGPASRKSPSKGTSLQGSQHL

SEQ ID NO: 27593 - protein, 88 aa, Homo sapiens
IPSALPEPMTASEAAARKSQIKARITDTIGPTETSIAPRQRPKANSATTATPSVLTIQSSATPVKVLAPGEFGNHRPKGNRAPPTSSS

SEQ ID NO: 27594 - protein, 52 aa, Homo sapiens
VHSGTPVKPVQPSVSCGHLESTLSLLCPSTPRTVSLSQMEAELNTLRWMMET

SEQ ID NO: 27595 - protein, 55 aa, Homo sapiens
LPPPLPSPAGRPAPLRRESPPAPGGRTRTRHPASEWQKMIHIWEGLNKCFIWILL

SEQ ID NO: 27596 - protein, 961 aa, Homo sapiens
TVAAHGEEPLTFRDVAIEFSPEEWKCLDPAQQNLYRDVMLENYRNLVSLAMCSHFTQDFLPVQGIEDSFHKLILRRYEKCGHDNLQLRKGCKSMNVCKVQKGVYNGINKCLSNTQSKIFQCNARVKVFSKFANSNKDKTRHTGEKHFKCNECGKSFQKFSDLTQHKGIHAGEKPYTCEERGKDFGWYTDLNQHKKIHTGEKPYKCEECGKAFNRSTNLTAHKRIHNREKAYTGEDRDRAFGWSTNLNEYKKIHTGDKPYKCKECGKAFMHSSHLNKHEKIHTGEKPYKCKECGKVISSSSSFAKHKRIHTGEKPFKCLECGKAFNISTTLTKHRRIHTGEKPYTCEVCGKAFRQSANLYVHRRIHTGEKPYTCGECGKTFRQSANLYVHRRIHTGEKPYKCEDCGKAFGRYTALNQHKKIHTGEKPYKCEECGKAFNSSTNLTAHKRIHTREKPYTCEDRGRAFGLSTNLNEYKKIHTGDKPYKCKECGKAFIHSLHLNKHEKIHTGKKPYKCKQCGKVITSSSSFAKHKRIHTGEKPFECLECGKAFTSSTTLTKHRRIHTGEKPYTCEVCGKAFRQSAILYVHRRIHTGEKPYTCEECGKTFRQSANLYVHRRIHTGEKPYKCEECGKAFGRYTDLNQHKKIHTGEKLYKCEECGKDFVWYTDLNQQKKIYTGEKPYKCEECGKAFAPSTDLNQHTKILTGEQSYKCEECGKAFGWSIALNQHKKIHTGEKPYKCEECGKAFSRSRNLTTHRRVHTREKPYKCEDRGRSFGWSTNLNEYKKIHTGDKLYKCKECGKVFKQSSHLNRHEKIHTGKKPYKCKECGKVITSSSSFAKHKRIHTGEKPFKCLECGKAFTSSTTLTKHRRIHTGEKPYTCEECGKAFRQSAILYVHRRIHTGEKPYTCGECGKTFRQSANLYAHKKIHTGEKPYTCGDCGKTFRQSANLYAHKKIHTGDKTIQV

SEQ ID NO: 27597 - protein, 154 aa, Homo sapiens
IADHRPGLEKPTASSGKRARGLEVPEASGLGTHGRDTQGRPCAVSPGITGGDFMEPGGWASGWGERLQTGSSPWLCPPLSLLEWWGPCILSCPPPPFSPNCRRLLSPGDTVPASSGLGKHGLSSPALAPAPPASWTWAFLHPVEPHSQERCLEG

SEQ ID NO: 27598 - protein, 42 aa, Homo sapiens
LGSLSGGWVLLVPAVPASKNHWVCRFELVLEAVRHRNEACNS

SEQ ID NO: 27599 - protein, 36 aa, Homo sapiens
KVATASWVAGRSKGYHEVSRAFGKPEIVFPVGKGNH

SEQ ID NO: 27600 - protein, 378 aa, Homo sapiens
IMKFPGPLENQRLSFLLEKAITREAQMWKVNVRKMPSNQNVSPSQRDEVIQWLAKLKYQFNLYPETFALASSLLDRFLATVKAHPKYLSCIAISCFFLAAKTVEEDERIPVLKVLARDSFCGCSSSEILRMERIILDKLNWDLHTATPLDFLHIFHAIAVSTRPQLLFSLPKLSPSQHLAVLTKQLLHCMACNQLLQFRGSMLALAMVSLEMEKLIPDWLSLTIELLQKAQMDSSQLIHCRELVAHHLSTLQSSLPLNSVYVYRPLKHTLVTCDKGVFRLHPSSVPGPDFSKDNSKPEVPVRGTAAFYHHLPAASGCKQTSTKRKVEEMEVDDFYDGIKRLYNEDNVSENVGSVCGTDLSRQEGHASPCPPLQPVSVM

SEQ ID NO: 27601 - protein, 302 aa, Homo sapiens
RCLAARLAAMSSASGLRRGHPAGGEENMTETDAFYKREMFDPAEKYKMDHRRRGIALIFNHERFFWHLTLPERRGTCADRDNLTRRFSDLGFEVKCFNDLKAEELLLKIHEVSTVSHADADCFVCVFLSHGEGNHIYAYDAKIEIQTLTGLFKGDKCHSLVGKPKIFIIQACRGNQHDVPVIPLDVVDNQTEKLDTNITEVDAASVYTLPAGADFLMCYSVAEGYYSHRETVNGSWYIQDLCEMLGKYGSSLEFTELLTLVNRKVSQRRVDFCKDPSAIGKKQVPCFASMLTKKLHFFPKSN

SEQ ID NO: 27602 - protein, 139 aa, Homo sapiens
LTAAAGLRLSALGSAASAPLHSTSAPSDSLPSASTPPAPVRIVSQLLATRPVPGCFSISRPPLLEYFTPCIWGQGLEKGRVERPVEKKEARPAGGGGSADCGEETPRHPFWSSPLPPRPCAHSLAGELLSDQESKSGPG

SEQ ID NO: 27603 - protein, 53 aa, Homo sapiens
LGHTGARCRSPVLRHLVWNFRLAVSSRSGALCGVVWWKNGPCVGLTPSVCVSE

SEQ ID NO: 27604 - protein, 54 aa, Homo sapiens
RMNEGDAYYLLKDFALTIKSISVSLRELCENEDDNVVLAFEQLSTTFWEKLNKV

SEQ ID NO: 27605 - protein, 39 aa, Homo sapiens
VGRIHRHLKSRTTSHGRVGATAAVYSAAILEYLTAEVNG

SEQ ID NO: 27606 - protein, 865 aa, Homo sapiens
IAAASFPGIYLMGMCSRQERIQKDIDVVIQKSRAEKDCLFADFRYSDSTFTFTYVGGPRSVSYSVHVSEDYPDNTYVSSSENDEDVLVTTEPIPVIFHRIATELRKTNDINCCLSIKSKLQKENGEESRQNSTVEEDSEGDNDSEEFYYGGQVNYDGELHKHPQLEADLSAVREIYGPHAVSLREYGAIDDVDIDLHIDVSFLDEEIAVAWEVIRTEPIIVRLHCSLTQYLNGPVPTVDVFQISTKERFGLGHQLKKIMQTFVTQQWKQSKEKSNCLHNKKLSEKKVKSPLHLFSTLRRSPSYPPPGCGKSKSKLKSEQDGISKTHKLLRRTCSSTVKTDDVCVTKSHRTFGRSLSSDPRAEQAMTAIKSHKLLNRPCPAAVKSEECLTLKSHRLLTRSCSGDPRCEHNTNLKPHKLLSRSYSSNLRMEELYGLKNHKLLSKSYSSAPKSSKTELFKEPNAEGRRLSLTSGLIGILTPSSSSSSQLAPNGAKCIPVRDRGFLVQTIEFAEQRIPVLNEYCVVCDEPHVFQNGPMLRPTVCERELCVFAFQTLGVMNEAADEIATGAQVVDLLVSMCRSALESPRKVVIFEPYPSVVDPNDPQMLAFNPRKKNYDRVMKALDSITSIREMTQAPYLEIKKQMDKQDPLAHPLLQWVISSNRSHIVKLPVNRQLKFMHTPHQFLLLSSPPAKESNFRAAKKLFGSTFAFHGSHIENWHSILRNGLVVASNTRLQLHGAMYGSGIYLSPMSSISFGYSGMNKKQKVSAKDEPASSSKSSNTSQSQKKGQQSQFLQSRNLKCIALCEVITSSDLHKHGEIWVVPNTDHVCTRFFFVYEDGQVGDANINTQEGGIHKEILRVIGNQTATG

SEQ ID NO: 27607 - protein, 732 aa, Homo sapiens
LHGSRFANMSAEGYQYRALYDYKKEREEDIDLHLGDILTVNKGSLVALGFSDGQEARPEEIGWLNGYNETTGERGDFPGTYVEYIGRKKISPPTPKPRPPRPLPVAPGSSKTEADVEQQALTLPDLAEQFAPPDIAPPLLIKLVEAIEKKGLECSTLYRTQSSSNLAELRQLLDCDTPSVDLEMIDVHVLADAFKRYLLDLPNPVIPAAVYSEMISLAPEVQSSEEYIQLLKKLIRSPSIPHQYWLTLQYLLKHFFKLSQTSSKNLLNARVLSEIFSPMLFRFSAASSDNTENLIKVIEILISTEWNERQPAPALPPKPPKPTTVANNGMNNNMSLQDAEWYWGDISREEVNEKLRDTADGTFLVRDASTKMHGDYTLTLRKGGNNKLIKIFHRDGKYGFSDPLTFSSVVELINHYRNESLAQYNPKLDVKLLYPVSKYQQDQVVKEDNIEAVGKKLHEYNTQFQEKSREYDRLYEEYTRTSQEIQMKRTAIEAFNETIKIFEEQCQTQERYSKEYIEKFKREGNEKEIQRIMHNYDKLKSRISEIIDSRRRLEEDLKKQAAEYREIDKRMNSIKPDLIQLRKTRDQYLMWLTQKGVRQKKLNEWLGNENTEDQYSLVEDDEDLPHHDEKTWNVGSSNRNKAENLLRGKRDGTFLVRESSKQGCYACSVVVDGEVKHCVINKTATGYGFAEPYNLYSSLKELVLHYQHTSLVQHNDSLNVTLAYPVYAQQRR

SEQ ID NO: 27608 - protein, 38 aa, Homo sapiens
LEESDLPSRKLGSQKIGNSYQHGKPIENSGDWLLVSST

SEQ ID NO: 27609 - protein, 88 aa, Homo sapiens
VSAALAEDCSTRHAEGTGYVFSFRTRAERSWDRGGNGTGLRKAHGQRAFCGVPGLGTFQQRHSTRGAVQRAQAPVLCNNLRGQEFPHL

SEQ ID NO: 27610 - protein, 94 aa, Homo sapiens
RTMIPPGECTYAGRKRRRPLQKQRPAVGAEKSNPSKRHRDRLNAELDHLASLLPFPPDIISKLDKLSVLRLSVSYLRVKSFFQGVGSGRCRRCG

SEQ ID NO: 27611 - protein, 160 aa, Homo sapiens
LRGNKVLRAGDGGGANPAGPPVTLVLHFPACVCEWVCVFSYKGYFAIDRLIRSSPPRAFALCAVIELPPSQVLLRSSKRQRLDVSAGRRFVPSVPASPPAVPSLSRSRSRPRRPAVSAARHGDCDPRAAADGQPRWRPHHAAEPHAPVAAPGEGGAARAQ

SEQ ID NO: 27612 - protein, 8 aa, Homo sapiens
LRRFRRRR

SEQ ID NO: 27613 - protein, 731 aa, Homo sapiens
LELAVNMSFPKAPLKRFNDPSGCAPSPGAYDVKTLEVLKGPVSFQKSQRFKQQKESKQNLNVDKDTTLPASARKVKSSESKKESQKNDKDLKILEKEIRVLLQERGAQDRRIQDLETELEKMEARLNAALREKTSLSANNATLEKQLIELTRTNELLKSKFSENGNQKNLRILSLELMKLRNKRETKMRGMMAKQEGMEMKLQVTQRSLEESQGKIAQLEGKLVSIEKEKIDEKSETEKLLEYIEEISCASDQVEKYKLDIAQLEENLKEKNDEILSLKQSLEENIVILSKQVEDLNVKCQLLEKEKEDHVNRNREHNENLNAEMQNLKQKFILEQQEREKLQQKELQIDSLLQQEKELSSSLHQKLCSFQEEMVKEKNLFEEELKQTLDELDKLQQKEEQAERLVKQLEEEAKSRAEELKLLEEKLKGKEAELEKSSAAHTQATLLLQEKYDSMVQSLEDVTAQFESYKALTASEIEDLKLENSSLQEKAAKAGKNAEDVQHQILATESSNQEYVRMLLDLQTKSALKETEIKEITVSFLQKITDLQNQLKQQEEDFRKQLEDEEGRKAEKENTTAELTEEINKWRLLYEELYNKTKPFQLQLDAFEVEKQALLNEHGAAQEQLNKIRDSYAKLLGHQNLKQKIKHVVKLKDENSQLKSEVSKLRCQLAKKKQSETKLQEELNKVLGIKHFDPSKAFHHESKENFALKTPLKEGNTNCYRAPMECQESWK

SEQ ID NO: 27614 - protein, 684 aa, Homo sapiens
KHSGETCCLLWKSSSILELKVKLERNLQTRKKRSLESDSQDLGLEMPQPSVSGMDPPFGDAFRSHTFSEQTLMSTDLLANSSDPDFMYELDREMNYQQNPRDNFLSLEDCKDIENLESFTDVLDNEGALTSNWEQWDTYCEDLTKYTKLTSCDIWGTKEVDYLGLDDFSSPYQDEEVISKTPTLAQLNSEDSQSVSDSLYYPDSLFSVKQNPLPSSFPGKKITSRAAAPVCSSKTLQAEVPLSDCVQKASKPTSSTQIMVKTNMYHNEKVNFHVECKDYVKKAKVKINPVQQSRPLLSQIHTDAAKENTCYCGAVAKRQEKKGMEPLQGHATPALPFKETQELLLSPLPQEGPGSLAAGESSSLSASTSVSDSSQKKEEHNYSLFVSDNLGEQPTKCSPEEDEEDEEDVDDEDHDEGFGSEHELSENEEEEEEEEDYEDDKDDDISDTFSEPGYENDSVEDLKEVTSISSRKRGKRRYFWEYSEQLTPSQQERMLRPSEWNRDTLPSNMYQKNGLHHGKYAVKKSRRTDVEDLTPNPKKLLQIGNELRKLNKVISDLTPVSELPLTARPRSRKEKNKLASRACRLKKKAQYEANKVKLWGLNTEYDNLLFVINSIKQEIVNRVQNPRDERGPNMGQKLEILIKDTLGLPVAGQTSEFVNQVLEKTAEGNPTGGLVGLRIPTSKV

SEQ ID NO: 27615 - protein, 514 aa, Homo sapiens
RRFVWRKQERERKGRKKYIISGTRERRKTGTMGRKKIQITRIMDERNRQVTFTKRKFGLMKKAYELSVLCDCEIALIIFNSTNKLFQYASTDMDKVLLKYTEYNEPHESRTNSDIVETLRKKGLNGCDSPDPDADDSALNKKENKGCESPDPDSSYALTPRTEEKYKKINEEFDNMIKSHKIPAVPPPNFEMPVSIPVSSHNSLVYSNPVSSLGNPNLLPLAHPSLQRNSMSPGVTHRPPSAGNTGGLMGGDLTSGAGTSAGNGYGNPRNSPGLLVSPGNLNKNMQAKSPPPMNLGMNNRKPDLRVLIPPGSKNTMPSVNQRINNSQSAQSLATPVVSVATPTLPGQGMGGYPSAISTTYGTEYSLSSADLSSLSGFNTASALHLGSVTGWQQQHLHNMPPSALSQLGACTSTHLSQSSNLSLPSTQSLNIKSEPVSPPRDRTTTPSRYPQHTRHEAGRSPVDSLSSCSSSYDGSDREDHRNEFHSPIGLTRPSPDERESPSVKRMRLSEGWAT

SEQ ID NO: 27616 - protein, 504 aa, Homo sapiens
RRFVWRKQERERKGRKKYIISGTRERRKTGTMGRKKIQITRIMDERNRQVTFTKRKFGLMKKAYELSVLCDCEIALIIFNSTNKLFQYASTDMDKVLLKYTEYNEPHESRTNSDIVETLRKKGLNGCDSPDPDADDSVGHSPESEDKYRKINEDIDLMISRQRLCAVPPPNFEMPVSIPVSSHNSLVYSNPVSSLGNPNLLPLAHPSLQRNSMSPGVTHRPPSAGNTGGLMGGDLTSGAGTSAGNGYGNPRNSPGLLVSPGNLNKNMQAKSPPPMNLGMNNRKPDLRVLIPPGSKNTMPSVSEDVDLLLNQRINNSQSAQSLATPVVSVATPTLPGQGMGGYPSAISTTYGTEYSLSSADLSSLSGFNTASALHLGSVTGWQQQHLHNMPPSALSQLGACTSTHLSQSSNLSLPSTQSLNIKSEPVSPPRDRTTTPSRYPQHTRHEAGRSPVDSLSSCSSSYDGSDREDHRNEFHSPIGLTRPSPDERESPSVKRMRLSEGWAT

SEQ ID NO: 27617 - protein, 51 aa, Homo sapiens
LRLSTAGRQGQTSRGKRKQPAQTGTARVLFDQHWNWKLGFEEVKSKYNIVF

SEQ ID NO: 27618 - protein, 485 aa, Homo sapiens
RFCFSPGENSKTMSTELFSSTREEGSSGSGPSFRSNQRKMLNLLLERDTSFTVCPDVPRTPVGKFLGDSANLSILSGGTPKRCLDLSNLSSGEITATQLTTSADLDETGHLDSSGLQEVHLAGMNHDQHLMKCSPAQLLCSTPNGLDRGHRKRDAMCSSSANKENDNGNLVDSEMKYLGSPITTVPKLDKNPNLGEDQAEEISDELMEFSLKDQEAKVSRSGLYRSPSMPENLNRPRLKQVEKFKDNTIPDKVKKKYFSGQGKLRKGLCLKKTVSLCDITITQMLEEDSNQGHLIGDFSKVCALPTVSGKHQDLKYVNPETVAALLSGKFQGLIEKFYVIDCRYPYEYLGGHIQGALNLYSQEELFNFFLKKPIVPLDTQKRIIIVFHCEFSSERGPRMCRCLREEDRSLNQYPALYYPELYILKGGYRDFFPEYMELCEPQSYCPMHHQDHKTELLRCRSQSKVQEGERQLREQIALLVKDMSP

SEQ ID NO: 27619 - protein, 144 aa, Homo sapiens
RMGKCRGLRTARKLRSHRRDQKWHDKQYKKAHLGTALKANPFGGASHAKGIVLEKVGVEAKQPNSAIRKCVRVQLIKNGKKITAFVPNDGCLNFIEENDEVLVAGFGRKGHAVGDIPGVRFKVVKVANVSLLALYKGKKERPRS

SEQ ID NO: 27620 - protein, 37 aa, Homo sapiens
VPRVFIGKDCIGGCSDLVSMQQIGELLTRLKQIGALQ

SEQ ID NO: 27621 - protein, 203 aa, Homo sapiens
TTWLCCAFRRMRTAAARSCRLTFSRCACQAAPRDPPRPRSARWPAGATSSRGRRNMPASCRRRRYRSSPWSAAQPRTCTDPPSSPACSAQGSSRAAPMRARVIPEARWCVRTKLQSAGSPCKASSAGDRAVVTATSQASTPMWPTTWPGSGSTPFPDCSGTHLSLLGDSAVREWLGHGRQDCVPFPQCGQLRARMAQELNKVL

SEQ ID NO: 27622 - protein, 549 aa, Homo sapiens
LETPGAASVQTLPSVTMKLWVSALLMAWFGVLSCVQAEFFTSIGHMTDLIYAEKELVQSLKEYILVEEAKLSKIKSWANKMEALTSKSAADAEGYLAHPVNAYKLVKRLNTDWPALEDLVLQDSAAGFIANLSVQRQFFPTDEDEIGAAKALMRLQDTYRLDPGTISRGELPGTKYQAMLSVDDCFGMGRSAYNEGDYYHTVLWMEQVLKQLDAGEEATTTKSQVLDYLSYAVFQLGDLHRALELTRRLLSLDPSHERAGGNLRYFEQLLEEEREKTLTNQTEAELATPEGIYERPVDYLPERDVYESLCRGEGVKLTPRRQKRLFCRYHHGNRAPQLLIAPFKEEDEWDSPHIVRYYDVMSDEEIERIKEIAKPKLARATVRDPKTGVLTVASYRVSKSSWLEEDDDPVVARVNRRMQHITGLTVKTAELLQVANYGVGGQYEPHFDFSRRPFDSGLKTEGNRLATFLNYMSDVEAGGATVFPDLGAAIWPKKGTAVFWYNLLRSGEGDYRTRHAACPVLVGCKWVSNKWFHERGQEFLRPCGSTEVD

SEQ ID NO: 27623 - protein, 13 aa, Homo sapiens
IYWRSESQGNKDE

SEQ ID NO: 27624 - protein, 31 aa, Homo sapiens
KAAAGEVVVLVSLSHPVPSSSLQRHTLSPPP

SEQ ID NO: 27625 - protein, 102 aa, Homo sapiens
KRRAGQRGARREKARAARRAQAETPCSCRRRHRAAAVLTDPPPGPPPCRAAVGRRSPPRRPGLPKQESSFPWGGCCGTSRKATPSTGLEWGHPCTWPPSWNT

SEQ ID NO: 27626 - protein, 248 aa, Homo sapiens
VGISVGELWPFARCCSHSYVRSLRGLSVSTHLLCFTIYIMNPSMKQKQEEIKENIKNSSVPRRTLKMIQPSASGSLVGRENELSAGLSKRKHRNDHLTSTTSSPGVIVPESSENKNLGGVTQESFDLMIKENPSSQYWKEVAEKRRKALYEALKENEKLHKEIEQKDNEIARLKKENKELAEVAEHVQYMAELIERLNGEPLDNFESLDNQEFDSEEETVEDSLVEDSEIGTCAEGTVSSSTDAKPCI

SEQ ID NO: 27627 - protein, 45 aa, Homo sapiens
LPVLRALDYRPAVSCPLPGPRSLLHLLPGSPACLGLGLGSPHDTT

SEQ ID NO: 27628 - protein, 220 aa, Homo sapiens
LGDEEGTEIDTLQFRLQVRCTRNPHAAKDSSDPNELYVNHKVYTRHMTWIPLGNQADLFPEGTIRPVHDDILIAQLRPGQEIDLLMHCVKGIGKDHAKFSPVATASYRLLPDITLLEPVEGEAAEELSRCFSPGVIEVQEVQGKKVARVANPRLDTFSREIFRNEKLKKVVRLARVRDHYIFSVESTGVLPPDVLVSEAIKVLMGKCRRFLDELDAVQMD

SEQ ID NO: 27629 - protein, 62 aa, Homo sapiens
LALARLQEGIRICYQRRPRRSQAGPQRPAPPLPATRSAHRRPAAELAHPSHHSSTCSLEKGR

SEQ ID NO: 27630 - protein, 108 aa, Homo sapiens
KMSESSSKSSQPLASKQEKDGTEKRGRGRPRKQPPVSPGTALVGSQKEPSEVPTPKRPRGRPKGSKNKGAAKTRKTTTTPGRKPRGRPKKLEKEEEEGISQESSEEEQ

SEQ ID NO: 27631 - protein, 888 aa, Homo sapiens
IATGKFKRVCGKEFGFHLFISPAQLSVVFFLEMESEDLSGRELTIDSIMNKVRDIKNKFKNEDLTDELSLNKISADTTDNSGTVNQIMMMANNPEDWLSLLLKLEKNSVPLSDALLNKLIGRYSQAIEALPPDKYGQNESFARIQVRFAELKAIQEPDDARDYFQMARANCKKFAFVHISFAQFELSQGNVKKSKQLLQKAVERGAVPLEMLEIALRNLNLQKKQLLSEEEKKNLSASTVLTAQESFSGSLGHLQNRNNSCDSRGQTTKARFLYGENMPPQDAEIGYRNSLRQTNKTKQSCPFGRVPVNLLNSPDCDVKTDDSVVPCFMKRQTSRSECRDLVVPGSKPSGNDSCELRNLKSVQNSHFKEPLVSDEKSSELIITDSITLKNKTESSLLAKLEETKEYQEPEVPESNQKQWQSKRKSECINQNPAASSNHWQIPELARKVNTEKHTTFEQPVFSVSKQSPPISTSKWFDPKSICKTPSSNTLDDYMSCFRTPVVKNDFPPACQLSTPYGQPACFQQQQHQILATPLQNLQVLASSSANECISVKGRIYSILKQIGSGGSSKVFQVLNEKKQIYAIKYVNLEEADNQTLDSYRNEIAYLNKLQQHSDKIIRLYDYEITDQYIYMVMECGNIDLNSWLKKKKSIDPWERKSYWKNMLEAVHTIHQHGIVHSDLKPANFLIVDGMLKLIDFGIANQMQPDTTSVVKDSQVGTVNYMPPEAIKDMSSSRENGKSKSKISPKSDVWSLGCILYYMTYGKTPFQQIINQISKLHAIIDPNHEIEFPDIPEKDLQDVLKCCLKRDPKQRISIPELLAHPYVQIQTHPVNQMAKGTTEEMKYVLGQLVGLNSPNSILKAAKTLYEHYSGGESHNSSSSKTFEKKRGKK

SEQ ID NO: 27632 - protein, 9 aa, Homo sapiens
LEGRRWAWP

SEQ ID NO: 27633 - protein, 246 aa, Homo sapiens
RATMTDYGEEQRNELEALESIYPDSFTVLSENPPSFTITVTSEAGENDETVQTTLKFTYSEKYPDEAPLYEIFSQENLEDNDVSDILKLLALQAEENLGMVMIFTLVTAVQEKLNEIVDQIKTRREEEKKQKEKEAEEAEKQLFHGTPVTIENFLNWKAKFDAELLEIKKKRMKEEEQAGKNKLSGKQLFETDHNLDTSDIQFLEDAGNNVEVDESLFQEMDDLELEDDEDDPDYNPADPESDSAD

SEQ ID NO: 27634 - protein, 243 aa, Homo sapiens
VMMPLAEAGALAQGGGPSATEWACILRRKTPRHKQPTLLMVRASRRSGKTSAVLKAGRQSVSGRKNSTSKDLVTLGASSLREERGHPLHPRHRKAVHLRTRGRTRGWVQTLARMSRRTRGPVERAAAAAAAAAGGDAGHAPFPPPPAADGARAPRSPGQVTPRGLRLRLPRRESLLRGLCRPLRPLLGFRESDSAKPASLRLLQHTPSARRNYRIAGARLMRSNYPPPLSSAALRGAGPTRRN

SEQ ID NO: 27635 - protein, 36 aa, Homo sapiens
LALGPNGARLPGGRSAHRARLPLLLPDHLVSTRNEI

SEQ ID NO: 27636 - protein, 38 aa, Homo sapiens
VPGASFWDPEMRMCLADYEGDDSITSAHPRLKRDVSRA

SEQ ID NO: 27637 - protein, 20 aa, Homo sapiens
MARSASAVVRRATPCMCTRC

SEQ ID NO: 27638 - protein, 582 aa, Homo sapiens
LTPPPNPAPAMEPEAPRRRHTHQRGYLLTRNPHLNKDLAFTLEERQQLNIHGLLPPSFNSQEIQVLRVVKNFEHLNSDFDRYLLLMDLQDRNEKLFYRVLTSDIEKFMPIVYTPTVGLACQQYSLVFRKPRGLFITIHDRGHIASVLNAWPEDVIKAIVVTDGERILGLGDLGCNGMGIPVGKLALYTACGGMNPQECLPVILDVGTENEELLKDPLYIGLRQRRVRGSEYDDFLDEFMEAVSSKYGMNCLIQFEDFANVNAFRLLNKYRNQYCTFNDDIQGTASVAVAGLLAALRITKNKLSDQTILFQGAGEAALGIAHLIVMALEKEGLPKEKAIKKIWLVDSKGLIVKGRASLTQEKEKFAHEHEEMKNLEAIVQEIKPTALIGVAAIGGAFSEQILKDMAAFNERPIIFALSNPTSKAECSAEQCYKITKGRAIFASGSPFDPVTLPNGQTLYPGQGNNSYVFPGVALGVVACGLRQITDNIFLTTAEVIAQQVSDKHLEEGRLYPPLNTIRDVSLKIAEKIVKDAYQEKTATVYPEPQNKEAFVRSQMYSTDYDQILPDCYSWPEEVQKIQTKVDQ

SEQ ID NO: 27639 - protein, 15 aa, Homo sapiens
MANDNGLTDQKQERT

SEQ ID NO: 27640 - protein, 52 aa, Homo sapiens
VMTVKTEAAKGTLTYSRMRGMVAILIAFMKQRRMGLNDFIQKIANNSYACKQ

SEQ ID NO: 27641 - protein, 19 aa, Homo sapiens
VFYAVKVLQKKAILKKKEV

SEQ ID NO: 27642 - protein, 52 aa, Homo sapiens
LNKPLQLKPNITNSARHLLEGLLQKDRTKRLGAKDDFVSDVFLSSWAGRDVH

SEQ ID NO: 27643 - protein, 29 aa, Homo sapiens
LNVTVACRKWSIGMKWLLVAAWRTPAALL

SEQ ID NO: 27644 - protein, 93 aa, Homo sapiens
LVPLPPPIPSFRHLCRVVPSLPGAPSSPPTGLPFPAGLSPPRFPQPFSLPAEPRRQQQQQQQQEEEPGGGGGRGAHGVQSRRRQKKSLLLLRR

SEQ ID NO: 27645 - protein, 473 aa, Homo sapiens
RSVKQAGCSAAPGAVPPPEADSTSAGMSRRPCSCALRPPRCSCSASPSAVTAAGRPRPSDSCKEESSTLSVKMKCDFNCNHVHSGLKLVKPDDIGRLVSYTPAYLEGSCKDCIKDYERLSCIGSPIVSPRIVQLETESKRLHNKENQHVQQTLNSTNEIEALETSRLYEDSGYSSFSLQSGLSEHEEGSLLEENFGDSLQSCLLQIQSPDQYPNKNLLPVLHFEKVVCSTLKKNAKRNPKVDREMLKEIIARGNFRLQNIIGRKMGLECVDILSELFRRGLRHVLATILAQLSDMDLINVSKVSTTWKKILEDDKGAFQLYSKAIQRVTENNNKFSPHASTREYVMFRTPLASVQKSAAQTSLKKDAQTKLSNQGDQKGSTYSRHNEFSEVAKTLKKNESLKACIRCNSPAKYDCYLQRATCKREGCGFDYCTKCLCNYHTTKDCSDGKLLKASCKIGPLPGTKKSKKNLRRL

SEQ ID NO: 27646 - protein, 34 aa, Homo sapiens
LRKRMREGRPWPWGRRELLCLHRSPCAALMCCAR

SEQ ID NO: 27647 - protein, 610 aa, Homo sapiens
LKNSKPDGVAGREQLLAQQRMHSMISSVDVKSEVPVGLEPISPLDLRTDLRMMMPVVDPVVREKQLQQELLLIQQQQQIQKQLLIAEFQKQHENLTRQHQAQLQEHIKELLAIKQQQELLEKEQKLEQQRQEQEVERHRREQQLPPLRGKDRGRERAVASTEVKQKLQEFLLSKSATKDTPTNGKNHSVSRHPKLWYTAAHHTSLDQSSPPLSGTSPSYKYTLPGAQDAKDDFPLRKTASEPNLKVRSRLKQKVAERRSSPLLRRKDGNVVTSFKKRMFEVTESSVSSSSPGSGPSSPNNGPTGSVTENETSVLPPTPHAEQMVSQQRILIHEDSMNLLSLYTSPSLPNITLGLPAVPSQLNASNSLKEKQKCETQTLRQGVPLPGQYGGSIPASSSHPHVTLEGKPPNSSHQALLQHLLLKEQMRQQKLLVAGGVPLHPQSPLATKERISPGIRGTHKLPRHRPLNRTQSAPLPQSTLAQLVIQQQHQQFLEKQKQYQQQIHMNKLLSKSIEQLKQPGSHLEEAEEELQGDQAMQEDRAPSSGNSTRSDSSACVDDTLGQVGAVKVKEEPVDSDEDAQIQEMESGEQAAFMQQVIGKDLAPGFVIKVII

SEQ ID NO: 27648 - protein, 90 aa, Homo sapiens
RPSPSLEAERRGQLVVGEFPRLRLLVFSRRHTELRLTFLFLNLNHRFHRLVVRRLGRWIRLRRNCWSEPVPGERIFREKWLRGPQQLQGL

SEQ ID NO: 27649 - protein, 162 aa, Homo sapiens
VQNPGTMGASRLYTLVLVLQPQRVLLGMKKRGFGAGRWNGFGGKVQEGETIEDGARRELQEESGLTVDALHKVGQIVFEFVGEPELMDVHVFCTDSIQGTPVESDEMRPCWFQLDQIPFKDMWPDDSYWFPLLLQKKKFHGYFKFQGQDTILDYTLREVDTV

SEQ ID NO: 27650 - protein, 142 aa, Homo sapiens
KSSPTKQIHKLGRSNLHRMCRSQWKDTGNVKKQGSGTPPKEPSNSPATDPHPKEIQEMSYRELWKLILTKIRGIQETSEKESKEMSTAILDMVEVFTNQIQSFPEHMANVELKKSLDEIQSILESFNDRLDQAEKKLSKLKI

SEQ ID NO: 27651 - protein, 155 aa, Homo sapiens
LLRSSQNSESKNFPEVSESPDRRARPHPQPPLLIPTSLQSWLLPSRRWGLWPSGAERQSPPPQSDFPLPPKGKHEERQDEHGYISRCFTRKYTLPPGVDPTQVSSSLSPEGTLTVEAPMPKLATQSNEITIPVTFESRAQLGGPEAAKSDETAAK

SEQ ID NO: 27652 - protein, 95 aa, Homo sapiens
LWTVVAAVQAIERKVEIHSRRLLHLEGRTGTAEKKLASCEKTVTELGNQLEGKWAVLGTLLQEYGLLQRRLENLENLLRNRNFWILRLPPGACGI

SEQ ID NO: 27653 - protein, 76 aa, Homo sapiens
VAGLLGLDRQVREEGIASAKEVLESCVLAARDPAWVGRCFCVGVWPFHQSCGGPRDFLPVLLGFQVVAPSSEKPKD

SEQ ID NO: 27654 - protein, 124 aa, Homo sapiens
VAAAPARSPEPVRRVDCPESAAGARECLVLLPRLECGDTTLTHCSICLPGSSDSPASASQVAGITGAKPPWPTTASWWSPSAATPGTRTAPRLPSAPTTMRCISMKRAVPNGPRCTSSRSTTGR

SEQ ID NO: 27655 - protein, 400 aa, Homo sapiens
TGQGARGSAGNRKEAATLAMASPPACPSEEDESLKGCELYVQLHGIQQVLKDCIVHLCISKPERPMKFLREHFEKLEKEENRQILARQKSNSQSDSHDEEVSPTPPNPVVKARRRRGGVSAEVYTEEDAVSYVRKVIPKDYKTMTALAKAISKNVLFAHLDDNERSDIFDAMFPVTHIAGETVIQQGNEGDNFYVVDQGEVDVYVNGEWVTNISEGGSFGELALIYGTPRAATVKAKTDLKLWGIDRDSYRRILMGSTLRKRKMYEEFLSKVSILESLEKWERLTVADALEPVQFEDGEKIVVQGEPGDDFYIITEGTASVLQRRSPNEEYVEVGRLGPSDYFGEIALLLNRPRAATVVARGPLKCVKLDRPRFERVLGPCSEILKRNIQRYNSFISLTV

SEQ ID NO: 27656 - protein, 91 aa, Homo sapiens
IRSHPAYQQISRERSVEALGLHSSPPWELLARASEPALAPCSRKVAAAGAPEAQDTGLLLLQNPQVFLEEICRQNFVLRFYLGKEQKSVVS

SEQ ID NO: 27657 - protein, 63 aa, Homo sapiens
LLRLQGRAENNCLYIEYGINEKITIPITPAFLGQLRSGRSIEKVSFYLGFSIGGPLAYDIEIV

SEQ ID NO: 27658 - protein, 72 aa, Homo sapiens
LLALWVGPLRHLGSSRALQALQAAPVSSSFSGQTQPREDGGPRATGAESPAGRAGGALRRHGRGHEERDRAE

SEQ ID NO: 27659 - protein, 58 aa, Homo sapiens
LGRKMEETEILLVKQNKPLNRKNEEAVSTSGRNEPGRGTGTISEAMPLRLELALSPRR

SEQ ID NO: 27660 - protein, 22 aa, Homo sapiens
LNLVRARETAGPRAQGYKINAI

SEQ ID NO: 27661 - protein, 620 aa, Homo sapiens
LARLRRARRALRRRNSIKKMAALTPRKRKQDSLKCDSLLHFTENLFPSPNKKHCFYQNSDKNEENLHCSQQEHFVLSALKTTEINRLPSANQGSPFKSALSTVSFYNQNKWYLNPLERKLIKESRSTCLKTNDEDKSFPIVTEKMQGKPVCSKKNNKKPQKSLTAKYQPKYRHIKPVSRNSRNSKQNRVIYKPIVEKENNCHSAENNSNAPRVLSQKIKPQVTLQGGAAFFVRKKSSLRKSSLENEPSLGRTQKSKSEVIEDSDVETVSEKKTFATRQVPKCLVLEEKLKIGLLSASSKNKEKLIKDSSDDRVSSKEHKVDKNEAFSSEDSLGENKTISPKSTVYPIFSASSVNSKRSLGEEQFSVGSVNFMKQTNIQKNTNTRDTSKKTKDQLIIDAGQKHFGATVCKSCGMIYTASNPEDEMQHVQHHHRFLEGIKYVGWKKERVVAEFWDGKIVLVLPHDPSFAIKKVEDVQELVDNELGFQQVVPKCPNKIKTFLFISDEKRVVGCLIAEPIKQAFRVLSEPIGPESPSSTECPRAWQCSDVPEPAVCGISRIWVFRLKRRKRIARRLVDTLRNCFMFGCFLSTDEIAFSDPTPDGKLFATKYCNTPNFLVYNFNS

SEQ ID NO: 27662 - protein, 54 aa, Homo sapiens
VLCQESPSGQRSRGLEGAADATLACHGALGVSLSAWRAFRCGVRDGCQFKRQAP

SEQ ID NO: 27663 - protein, 51 aa, Homo sapiens
LSSRFLVPRLRPHERPVLTAGCCGVPRCLPGPRVPGFREDDRRSGFPGTGL

SEQ ID NO: 27664 - protein, 11 aa, Homo sapiens
KMAVAAAVGAA

SEQ ID NO: 27665 - protein, 930 aa, Homo sapiens
LRSTMTTKDYPSLWGFGTTKTFKIPIEHLDFKYIEKCSDVKHLEKILCVLRSGEEGYYPELTEFCEKHLQALAPESRALRKDKPAATAASFTAEEWEKIDGDIKSWVSEIKKEEDKMHFHETETFPAMKDNLPPVRGSNSCLHVGKEKYSKRPTKKKTPRDYAEWDKFDVEKECLKIDEDYKEKTVIDKSHLSKIETRIDTAGLTEKEKDFLATREKEKGNEAFNSGDYEEAVMYYTRSISALPTVVAYNNRAQAEIKLQNWNSAFQDCEKVLELEPGNVKALLRRATTYKHQNKLREATEDLSKVLDVEPDNDLAKKTLSEVERDLKNSEAASETQTKGKRMVIQEIENSEDEEGKSGRKHEDGGGDKKPAEPAGAARAAQPCVMGNIQKKLTGKAEGGKRPARGAPQRGQTPEAGADKRSPRRASAAAAAGGGATGHPGGGQGAENPAGLKSQGNELFRSGQFAEAAGKYSAAIALLEPAGSEIADDLSILYSNRAACYLKEGNCSGCIQDCNRALELHPFSMKPLLRRAMAYETLEQYGKAYVDYKTVLQIDCGLQLANDSVNRLSRILMELDGPNWREKLSPIPAVPASVPLQAWHPAKEMISKQAGDSSSHRQQGITDEKTFKALKEEGNQCVNDKNYKDALSKYSECLKINNKECAIYTNRALCYLKLCQFEEAKQDCDQALQLADGNVKAFYRRALAHKGLKNYQKSLIDLNKVILLDPSIIEAKMELEEVTRLLNLKDKTAPFNKEKERRKIEIQEVNEGKEEPGRPAGEVSMGCLASEKGGKSSRSPEDPEKLPIAKPNNAYEFGQIINALSTRKDKEACAHLLAITAPKDLPMFLSNKLEGDTFLLLIQSLKNNLIEKDPSLVYQHLLYLSKAERFKMMLTLISKGQKELIEQLFEDLSDTPNNHFTLEDIQALKRQYEL

SEQ ID NO: 27666 - protein, 80 aa, Homo sapiens
LLLVRKEIIARRASIRRVSITRSNRSGNTIKKEKKGISGFPGRGGASLLGSCSSRRFLNTAFYALYNLASHTFTLTLYDF

SEQ ID NO: 27667 - protein, 39 aa, Homo sapiens
MIYTHRTRMRFVKQYCYGGAAEKGRGFEREQKKMVGARS

SEQ ID NO: 27668 - protein, 107 aa, Homo sapiens
KGDPERIGGFASGPALPLIPQPAVRNPCRIHETLPIAAGGHFALELTTPEQGRDSPDAGRLFCPFGDTSPPLPGPASLKGSPCSCLDAGFFSGSGKPAASRDDAPQR

SEQ ID NO: 27669 - protein, 28 aa, Homo sapiens
KAETARLARGEERGRVWARGTTGCPRAR

SEQ ID NO: 27670 - protein, 303 aa, Homo sapiens
LKRTMVGKARSSNFTLSEKLDLLKLVKPYVKILEEHTNKHSVIVEKNRCWDIIAVNYNAIGVDRPPRTAQGLRTLYKRLKEYAKQELLQQKETQSDFKSNISEPTKKVMEMIPQISSFCLVRDRNHIQSANLDEEAQAGTSSLQVMLDHHPVAITVEVKQEEDIKPPPPLVLNSQQSDTLEQREEHELVHVMERSLSPSLSSVDMRMTSSPSSIPRRDDFFRHESGEHFRSLLGYDPQILQMLKEEHQIILENQKNFGLYVQEKRDGLKRRQQLEEELLRAKIEVEKLKAIRLRHDLPEYNSL

SEQ ID NO: 27671 - protein, 102 aa, Homo sapiens
VDPVTSEHELTCQAEGYPKAEVIWTSSDHQVLSGKTTTTNSKREEKLFNVTSTLRINTTTNEIFYCTFRRLDPEENHTAELVIPGNILNVSIKICLTLSPST

SEQ ID NO: 27672 - protein, 42 aa, Homo sapiens
VDRIILQLNRYYPQILTNKEAEKVLRSSGTPRHPCVCGSVTS

SEQ ID NO: 27673 - protein, 1207 aa, Homo sapiens
KQKRGPELRAYAGPVSEMPVRGDRGFPPRRELSGWLRAPGMEELIWEQYTVTLQKDSKRGFGIAVSGGRDNPHFENGETSIVISDVLPGGPADGLLQENDRVVMVNGTPMEDVLHSFAVQQLRKSGKVAAIVVKRPRKVQVAALQASPPLDQDDRAFEVMDEFDGRSFRSGYSERSRLNSHGGRSRSWEDSPERGRPHERARSRERDLSRDRSRGRSLERGLDQDHARTRDRSRGRSLERGLDHDFGPSRDRDRDRSRGRSIDQDYERAYHRAYDPDYERAYSPEYRRGARHDARSRGPRSRSREHPHSRSPSPEPRGRPGPIGVLLMKSRANEEYGLRLGSQIFVKEMTRTGLATKDGNLHEGDIILKINGTVTENMSLTDARKLIEKSRGKLQLVVLRDSQQTLINIPSLNDSDSEIEDISEIESNRSFSPEERRHQYSDYDYHSSSEKLKERPSSREDTPSRLSRMGATPTPFKSTGDIAGTVVPETNKEPRYQEDPPAPQPKAAPRTFLRPSPEDEAIYGPNTKMVRFKKGDSVGLRLAGGNDVGIFVAGIQEGTSAEQEGLQEGDQILKVNTQDFRGLVREDAVLYLLEIPKGEMVTILAQSRADVYRDILACGRGDSFFIRSHFECEKETPQSLAFTRGEVFRVVDTLYDGKLGNWLAVRIGNELEKGLIPNKSRAEQMASVQNAQRDNAGDRADFWRMRGQRSGVKKNLRKSREDLTAVVSVSTKFPAYERVLLREAGFKRPVVLFGPIADIAMEKLANELPDWFQTAKTEPKDAGSEKSTGVVRLNTVRQIIEQDKHALLDVTPKAVDLLNYTQWFPIVIFFNPDSRQGVKTMRQRLNPTSNKSSRKLFDQANKLKKTCAHLFTATINLNSANDSWFGSLKDTIQHQQGEAVWVSEGKMEGMDDDPEDRMSYLTAMGADYLSCDSRLISDFEDTDGEGGAYTDNELDEPAEEPLVSSITRSSEPVQHEESIRKPSPEPRAQMRRAASSDQLRDNSPPPAFKPEPPKAKTQNKEESYDFSKSYEYKSNPSAVAGNETPGASTKGYPPPVAAKPTFGRSILKPSTPIPPQEGEEVGESSEEQDNAPKSVLGKVKIFEKMDHKARLQRMQELQEAQNARIEIAQKHPDIYAVPIKTHKPDPGTPQHTSSRPPEPQKAPSRPYQDTRGSYGSDAEEEEYRQQLSEHSKRGYYGQSARYRDTEL

SEQ ID NO: 27674 - protein, 78 aa, Homo sapiens
RETTIVPPSWSLLPALFPQITKTWKLRCLLQNVKVFLESPLPHIPWTIPPLSIHPRIMASLLITTNPWIMMLPERSAI

SEQ ID NO: 27675 - protein, 184 aa, Homo sapiens
TFHVPWKRLLLCDFAEQPPPPPLWIRPPGVAHAGQLLGVPEQHRKRKIDAGTMAEPSASPSKRRDSGDNSAPSGQEREDHGLETGDPPLPPPPVLPGPGEELPGARLPGGGGDDGAGRAGPPRGDWGVASRQHNEEFWQYNTFQYWRNPLPPIDLADIEDLSEDTLTEATLQGRNEGAEVDMES

SEQ ID NO: 27676 - protein, 379 aa, Homo sapiens
LRLGAERVRGRAVLRSAARGRRSWGSGRAMIRGFEAPMAENPPPPPPPVIFCHDSPKRVLVSVIRTTPIKPTCGGGGEPEPPPPLIPTSPGFSDFMVYPWRWGENAHNVTLSPGAAGAAASAALPAAAAAEHSGLRGRGAPPPAASASAAASGGEDEEEASSPDSGHLKDGIRRGRPRADTVRDLINEGEHSSSRIRCNICNRVFPREKSLQAHKRTHTGERPYLCDYPDCGKAFVQSGQLKTHQRLHTGEKPFVCSENGCLSRFTHANRHCPKHPYARLKREEPTDTLSKHQAADNKAAAEWLARYWEMREQRTPTLKGKLVQKADQEQQDPLEYLQSDEEDDEKRGAQRRLQEQRERLHGALALIELANLTGAPLRQ

SEQ ID NO: 27677 - protein, 45 aa, Homo sapiens
RPGIMWTPRCRRRPPCLSACSPRPSMTYPGSQPFFGEWRPWSSES

SEQ ID NO: 27678 - protein, 193 aa, Homo sapiens
LPPNLPPVTYMHIYETDGFSLGVFLLKSGTSIPLHDHPGMHGMLKVLYGTVRISCMDKLDAGGGQRPRALPPEQQFEPPLQPREREAVRPGVLRSRAEYTEASGPCILTPHRDNLHQIDAVEGPAAFLDILAPPYDPDDGRDCHYYRVLEPVRPKEASSSACDLPREVWLLETPQADDFWCEGEPYPGPKVFP

SEQ ID NO: 27679 - protein, 38 aa, Homo sapiens
VESKAGSPVSCVTSLLFKVPSTDLLMGSMSITWELAAL

SEQ ID NO: 27680 - protein, 74 aa, Homo sapiens
LFPEMNAMIMRRFSLPGDVDRARQYVLQSDGVQQTTYLAQQYCHEAIREISKLRPSPERDALIQLSEIVLTRDK

SEQ ID NO: 27681 - protein, 512 aa, Homo sapiens
ISKLKTKSTGTPAFQNCRETAIMSEVTKNSLEKILPQLKCHFTWNLFKEDSVSRDLEDRVCNQIEFLNTEFKATMYNLLAYIKHLDGNNEAALECLRQAEELIQQEHADQAEIRSLVTWGNYAWVYYHLGRLSDAQIYVDKVKQTCKKFSNPYSIEYSELDCEEGWTQLKCGRNERAKVCFEKALEEKPNNPEFSSGLAIAMYHLDNHPEKQFSTDVLKQAIELSPDNQYVKVLLGLKLQKMNKEAEGEQFVEEALEKSPCQTDVLRSAAKFYRRKGDLDKAIELFQRVLESTPNNGYLYHQIGCCYKAKVRQMQNTGESEASGNKEMIEALKQYAMDYSNKALEKGLNPLNAYSDLAEFLETECYQTPFNKEVPDAEKQQSHQRYCNLQKYNGKSEDTAVQHGLEGLSISKKSTDKEEIKDQPQNVSENLLPQNAPNYWYLQGLIHKQNGDLLQAAKCYEKELGRLLRDAPSGIGSIFLSASELEDGSEEMGQGAVSSSPRELLSNSEQLN

SEQ ID NO: 27682 - protein, 3189 aa, Homo sapiens
LLCHGMEAEDLSKAEDRNEDPGSKNEGQLAAVQPDVPHGGQSSSPTALWDMLERKFLEYQQLTHKSPIERQKSLLSLLPLFLKAWEHSVGIICFPSLQRLAEDVSDQLAQQLQKALVGKPAEQARLAAGQLLWWKGDVDQDGYLLLKSVYVLTGTDSETLGRVAESGLPALLLQCLYLFFVFPLDKDELLESDLQVQKMFVQMLLNICSDSQGLEGLLSGSELQSLLIATTCLREHSCCFWKEPTFCVLRAISKAQNLSIIQYLQATDCVRLSLQNLSRLTDTLPAPEVSEAVSLILGFVKDSYPVSSALFLEFENSEGYPLLLKVLLRYDGLTQSEVDPHLEELLGLVVWLTTCGRSELKVFDSITYPQLEGFKFHHEASGVTVKNLQAFQVLQNVFHKASDSVLCIQVLSVIRTMWAWNARNFFLLEWTLQPISQFVEIMPLKPAPVQEHFFQLLEALVFELHYVPHEILRKVQHLIKESPGPSCTLMALQSILSIAGGDPLFTDIFRDSGLLGLLLAQLRKQAKIMRKSGNKVSTPGVQDPERELTCVMLRIVVTLLKGSVRNAVVLKDHGMVPFIKIFLDDECYREASLSILEQLSAINAEEYMSIIVGALCSSTQGELQLKLDLLKSLLRILVTPKGRAAFRVSSGFNGLLSLLSDLEGSLQEPPLQAWGAVSPRQTLELVLYTLCAVSAALHWDPVNGYFFRRNGLFEKLAEDLCLLGCFGALEEEGNLLRSWVDTKARPFADLLGTAFSSSGSLPPRIQSCLQILGFLDSMASGTLHLRGDLKESLRTKQGPVVDVQKGETGSDPQRNFKQWPDLEERMDEGDAAIMHPGVVCIMVRLLPRLYHEDHPQLSEEIQCSLASHIQSLVKSEKNRQVMCEAGLLGTLMASCHRALVTSGSPLHSRLIRIFEKLASQAIEPDVLRQFLGLGIPSSLSATTKILDSSHTHRGNPGCSGSQTAQGLAEGPWPAAPDAGLHPGVTQAPQPLGESQDSTTALQTALSLISMTSPRNLQPQRAALAPSFVEFDMSVEGYGCLFIPTLSTVMGTSTEYSVSGGIGTGATRPFPPPGGLTFSCWFLISRHGAATEGHPLRFLTLVRHLARTEQPFVCFSVSLCPDDLSLVVSTEEKEFQPLDVMEPEDDSEPSAGCQLQVRCGQLLACGQWHHLAVVVTKEMKRHCTVSTCLDGQVIGSAKMLYIQALPGPFLSMDPSAFVDVYGYIATPRVWKQKSSLIWRLGPTYLFEEAISMETLEVINKLGPRYCGNFQAVHVQGEDLDSEATPFVAEERVSFGLHIASSSITSVADIRNAYNEVDSRLIAKEMNISSRDNAMPVFLLRNCAGHLSGSLRTIGAVAVGQLGVRVFHSSPAASSLDFIGGPAILLGLISLATDDHTMYAAVKVLHSVLTSNAMCDFLMQHICGYQIMAFLLRKKASLLNHRIFQLILSVAGTVELGFRSSAITNTGVFQHILCNFELWMNTADNLELSLFSHLLEILQSPREGPRNAEAAHQAQLIPKLIFLFNEPSLIPSKISTIIGILACQLRGHFSTQDLLRIGLFVVYTLKPSSVNERQICMDGALDPSLPAGSQTSGKTIWLRNQLLEMLLSVISSPQLHLSSESKEEMFLKLGPDWFLLLLQGHLHASTTVLALKLLLYFLASPSLRTRFRDGLCAGSWVERSTEGVDIVMDNLKSQSPLPEQSPCLLPGFRVLNDFLAHHVHIPEVYLIVSTFFLQTPLTELMDGPKDSLDAMLQWLLQRHHQEEVLQAGLCTEGALLLLEMLKATMSQPLAGSEDGAWAQTFPASVLQFLSLVHRTYPQDPAWRAPEFLQTLAIAAFPLGAQKGVGAESTRNTSSPEAAAEGDSTVEGLQAPTKAHPARRKLREFTQLLLRELLLGASSPKQWLPLEVLLEASPDHATSQQKRDFQSEVLLSAMELFHMTSGGDAAMFRDGKEPQPSAEAAAAPSLANISCFTQKLVEKLYSGMFSADPRHILLFILEHIMVVIETASSQRDTVLSTLYSSLNKVILYCLSKPQQSLSECLGLLSILGFLQEHWDVVFATYNSNISFLLCLMHCLLLLNERSYPEGFGLEPKPRMSTYHQVFLSPNEDVKEKREDLPSLSDVQHNIQKTVQTLWQQLVAQRQQTLEDAFKIDLSVKPGEREVKIEEVTPLWEETMLKAWQHYLASEKKSLASRSNVAHHSKVTLWSGSLSSAMKLMPGRQAKDPECKTEDFVSCIENYRRRGQELYASLYKDHVQRRKCGNIKAANAWARIQEQLFGELGLWSQGEETKPCSPWELDWREGPARMRKRIKRLSPLEALSSGRHKESQDKNDHISQTNAENQDELTLREAEGEPDEVGVDCTQLTFFPALHESLHSEDFLELCRERQVILQELLDKEKVTQKFSLVIVQGHLVSEGVLLFGHQHFYICENFTLSPTGDVYCTRHCLSNISDPFIFNLCSKDRSTDHYSCQCHSYADMRELRQARFLLQDIALEIFFHNGYSKFLVFYNNDRSKAFKSFCSFQPSLKGKATSEDTLSLRRYPGSDRIMLQKWQKRDISNFEYLMYLNTAAGRTCNDYMQYPVFPWVLADYTSETLNLANPKIFRDLSKPMGAQTKERKLKFIQRFKEVEKTEGDMTVQCHYYTHYSSAIIVASYLVRMPPFTQAFCALQGGSFDVADRMFHSVKSTWESASRENMSDVRELTPEFFYLPEFLTNCNGVEFGCMQDGTVLGDVQLPPWADGDPRKFISLHRKALESDFVSANLHHWIDLIFGYKQQGPAAVDAVNIFHPYFYGDRMDLSSITDPLIKSTILGFVSNFGQVPKQLFTKPHPARTAAGKPLPGKDVSTPVSLPGHPQPFFYSLQSLRPSQVTVKDMYLFSLGSESPKGAIGHIVSTEKTILAVERNKVLLPPLWNRTFSWGFDDFSCCLGSYGSDKVLMTFENLAAWGRCLCAVCPSPTTIVTSGTSTVVCVWELSMTKGRPRGLRLRQALYGHTQAVTCLAASVTFSLLVSGSQDCTCILWDLDHLTHVTRLPAHREGISAITISDVSGTIVSCAGAHLSLWNVNGQPLASITTAWGPEGAITCCCLMEGPAWDTSQIIITGSQDGMVRVWKTEDVKMSVPGRPAGEEPPAQPPSPRGHKWEKNLALSRELDVSIALTGKPSKTSPAVTALAVSRNHTKLLVGDERGRIFCWSADG

SEQ ID NO: 27683 - protein, 10 aa, Homo sapiens
LRDNKSNPQT

SEQ ID NO: 27684 - protein, 713 aa, Homo sapiens
IAWRMADAGIRRVVPSDLYPLVLGFLRDNQLSEVANKFAKATGATQQDANASSLLDIYSFWLKSAKVPERKLQANGPVAKKAKKKASSSDSEDSSEEEEEVQGPPAKKAAVPAKRVGLPPGKAAAKASESSSSEESSDDDDEEDQKKQPVQKGVKPQAKAAKAPPKKAKSSDSDSDSSSEDEPPKNQKPKITPVTVKAQTKAPPKPARAAPKIANGKAASSSSSSSSSSSSDDSEEEKAAATPKKVWTITSVRAETVPKKQVVAKAPVKAATTPTRKSSSSEDSSSDEEEEQKKPMKNKPGPYSSVPPPSAPPPKKSLGTQPPKKAVEKQQPVESSEDSSDESDSSSEEEKKPPTKAVVSKATTKPPPAKKAAESSSDSSDSDSSEDDEAPSKPAGTTKNSSNKPAVTTKSPAVKPAAAPKQPVGGGQKLLTRKADSSSSEEESSSSEEEKTKKMVATTKPKATAKAALSLPAKQAPQGSRDSSSDSDSSSSEEEEEKTSKSAVKKKPQKVAGGAAPSKPASAKKGKAESSNSSSSDDSSEEEEEKLKGKGSPRPQAPKANGTSALTAQNGKAAKNSEEEEEEKKKAAVVVSKSGSLKKRKQNEAAKEAETPQAKKIKLQTPNTFPKRKKGEKRASSPFRRVREEEIEVDSRVADNSFDAKRGAAGDWGERANQVLKFTKGKSFRHEKTKKKRGSYRGGSISVQVNSIKFDSE

SEQ ID NO: 27685 - protein, 82 aa, Homo sapiens
TQLTLEQPQGDSMMTCEQAQLLANLARLIQAKKALDLGTFTGYSALALALALPADGRVVTCEVDAQPPELGRPLWRQVSARA

SEQ ID NO: 27686 - protein, 45 aa, Homo sapiens
VWWLFLSVEGKRRYHPRLSPTPLQNGFSDTPGSEGVGSPGCARSK

SEQ ID NO: 27687 - protein, 27 aa, Homo sapiens
VVVFKPQKSHTQDHLTPTLTSVHDAGP

SEQ ID NO: 27688 - protein, 495 aa, Homo sapiens
KMATEAQSEGEVPARESGRSDAICSFVICNDSSLRGQPIIFNPDFFVEKLRHEKPEIFTELVVSNITRLIDLPGTELAQLMGEVDLKLPGGAGPASGFFRSLMSLKRKEKGVIFGSPLTEEGIAQIYQLIEYLHKNLRVEGLFRVPGNSVRQQILRDALNNGTDIDLESGEFHSNDVATLLKMFLGELPEPLLTHKHFNAHLKIADLMQFDDKGNKTNIPDKDRQIEALQLLFLILPPPNRNLLKLLLDLLYQTAKKQDKNKMSAYNLALMFAPHVLWPKNVTANDLQENITKLNSGMAFMIKHSQKLFKAPAYIRECARLHYLGSRTQASKDDLDLIASCHTKSFQLAKSQKRNRVDSCPHQEETQHHTEEALRELFQHVHDMPESAKKKQLIRQFNKQSLTQTPGREPSTSQVQKRARSRSFSGLIKRKVLGNQMMSEKKKKNPTPESVAIGELKGTSKENRNLLFSGSPAVTMTPTRLKWSEGKKEGKKGFL

SEQ ID NO: 27689 - protein, 174 aa, Homo sapiens
IESYRDPFGSRGEFEGFVAVVNKAMSAKFERLVASAEQLLKELPWPPTFEKDKFLTPDFTSLDVLTFAGSGIPAGINIPNYDDLRQTEGFKNVSLGNVLAVAYATQREKLTFLEEDDKDLYILWKGPSFDVQVGLHELLGHGSGKLFVQDEKGAFNFDQETVINPETGEQDLWL

SEQ ID NO: 27690 - protein, 77 aa, Homo sapiens
IRPEIAARSAFSVWFSLPNGSAWCHPWRACAGPFPAALGCRAEPNGCWQCDRFSPRRRSALASSSLPGTLRQPWLVV

SEQ ID NO: 27691 - protein, 14 aa, Homo sapiens
LAASPTPLLGAKRR

SEQ ID NO: 27692 - protein, 78 aa, Homo sapiens
RPSVTVTSCSLCACWRTGPSGMQLVTTWCSNSFPARASGTPMRRHSKRAWPALPAGGLRCTCCASMAIERTQISRRTL

SEQ ID NO: 27693 - protein, 63 aa, Homo sapiens
LGFPRCCRRCPHHCSHDLLNGHAEGFFPVVVGFIRRVPVLGSLLNLPGIRSFVDKVGESNNMV

SEQ ID NO: 27694 - protein, 221 aa, Homo sapiens
RGLQRQRGWRWLWGHQCDRAGHRAVAEGQSVRGPPGECCLWQRGRLPPLREEDLRIENGRMGRQEGRLVSPSLQLHCCPQRAKLEAAIAEAEERGELALKDARAKQEELEAALQRGKQDMARQLREYQELMSVKLALDIEIATYRKLLEGEESRLAGDGVGAVNISVMNSTGGSSSGGGIGLTLGGTMGSNALSFSSSAGPGLLKAYSIRTASASRRSARD

SEQ ID NO: 27695 - protein, 219 aa, Homo sapiens
RMNCRSEVLEVSVEGRQVEEAMLAVLHTVLLHRSTGKFHYKKEGTYSIGTVGTQDVDCDFIDFTYVRVSSEELDRALRKVVGEFKDALRNSGGDGLGQMSLEFYQKKKSRWPFSDECIPWEVWTVKVHVVALATEQERQICREKVGEKLCEKIINIVEVMNRHEYLPKMPTQSEVDNVFDTGLRDVQPYLYKISFQITDALGTSVTTTMRRLIKDTLAL

SEQ ID NO: 27696 - protein, 46 aa, Homo sapiens
IERRPQLHKDCPGLRAGNLAGLAGAAPPPWPPAPRGGRPRATGPAA

SEQ ID NO: 27697 - protein, 100 aa, Homo sapiens
VGGGGPHSVPGPSRPRQPPARGAPPFVWVSAPRTRGRELRSAASPAGCAMGCGNSTATSAGAGQGPAGAAKDVNYGGVYVGLPSEAVNMVSSQTKTVRKN

SEQ ID NO: 27698 - protein, 76 aa, Homo sapiens
LGRATRTRLRPPRHVLGLRRGRPLPPAPPSLEKRLPAAREGAAGPECGGCGPTRSNIIASCCFLGTFGICSSLTPT

SEQ ID NO: 27699 - protein, 142 aa, Homo sapiens
RGGGRGGGGGGRIPRSHVVRSPTGVCSGESHPSWRTCRGTWQGSTGCILELENIPPASTPQQWESGPQLTQHWYQAGLGCGQASVTGHKLSGWTKEDLELINKWAFQGERMIHGNPSGVDNAVSTWGGALRYHQGKISSLKR

SEQ ID NO: 27700 - protein, 22 aa, Homo sapiens
LLVGDPCCRPFASFTAADPFKF

SEQ ID NO: 27701 - protein, 27 aa, Homo sapiens
LLLLFDSQPHLLLRRQPSHIAQTPWGR

SEQ ID NO: 27702 - protein, 25 aa, Homo sapiens
TSLQGAGGHVGCVFGGLPGYKNGCG

SEQ ID NO: 27703 - protein, 47 aa, Homo sapiens
LTKKNKSTPDLDSGHLLKPSFRVDIPTSRTVRILKTTQQKVKKWKIV

SEQ ID NO: 27704 - protein, 16 aa, Homo sapiens
KITSSRSQSSVMSVPG

SEQ ID NO: 27705 - protein, 132 aa, Homo sapiens
LPPFPLSLRAPNHILERTLQRGWQRGRCAGAQAQESRARPLAPSPRAHPRAALIGQVGTLPSGKFWVPGGSLTFGRLQDSSSEVGGGLGGHGGAPCARRGRGGGRGGRGEGRGWARGGAGQEPLPADRRGRV

SEQ ID NO: 27706 - protein, 315 aa, Homo sapiens
LPATMPNVLLPPKESNLFKRILKCYEQKQYKNGLKFCKMILSNPKFAEHGETLAMKGLTLNCLGKKEEAYEFVRKGLRNDVKSHVCWHVYGLLQRSDKKYDEAIKCYRNALKLDKDNLQILRDLSLLQIQMRDLEGYRETRYQLLQLRPTQRASWIGYAIAYHLLKDYDMALKLLEEFRQTQQVPPNKIDYEYSELILYQNQVMREADLLQESLEHIEMYEKQICDKLLVEEIKGEILLKLGRLKEASEVFKNLIDRNAENWCYYEGLEKALQISTLEERLQIYEEISKQHPKAITPRRLPLTLVPGFYNPGTCY

SEQ ID NO: 27707 - protein, 117 aa, Homo sapiens
KVIPELNGKLTGMAFCVPTANLSVVDLTCCLEKPAKYDDIKKVVKQVSEGPLKGILGYTEYQLVSSDFNSDTHSSTFDAGASIALNDHFFKLISWYDNEFGYSNRVMDLMAHMSSKE

SEQ ID NO: 27708 - protein, 492 aa, Homo sapiens
KKMNLAEICDNAKKGREYALLGNYDSSMVYYQGVMQQIQRHCQSVRDPAIKGKWQQVRQELLEEYEQVKSIVSTLESFKIDKPPDFPVSCQDEPFRDPAVWPPPVPAEHRAPPQIRRPNREVRPLRKEMAGVGARGPVGRAHPISKSEKPSTSRDKDYRARGRDDKGRKNMQDGASDGEMPKFDGAGYDKDLVEALERDIVSRNPSIHWDDIADLEEAKKLLREAVVLPMWMPDFFKGIRRPWKGVLMVGPPGTGKTMLAKAVATECGTTFFNVSSSTLTSKYRGESEKLVRLLFEMARFYAPTTIFIDEIDSICSRRGTSDEHEASRRVKSELLIQMDGVGGALENDDPSKMVMVLAATNFPWDIDEALRRRLEKRIYIPLPTAKGRAELLKINLREVELDPDIQLEDIAEKIEGYSGADITNVCRDASLMAMRRRINGLSPEEIRALSKEELQMPVTKGDFELALKKIAKSVSAADLEKYEKWMVEFGSA

SEQ ID NO: 27709 - protein, 948 aa, Homo sapiens
RQPEVRSDLRRLSPAFSQGFLSASRRCPRGSRRLLTGRGCLCVLLSVRGTARPRGPEQNAARAESGGRRSRQGAGGRRPRPEAEADREPAMSVVGLDVGSQSCYIAVARAGGIETIANEFSDRCTPSVISFGSKNRTIGVAAKNQQITHANNTVSNFKRFHGRAFNDPFIQKEKENLSYDLVPLKNGGVGIKVMYMGEEHLFSVEQITAMLLTKLKETAENSLKKPVTDCVISVPSFFTDAERRSVLDAAQIVGLNCLRLMNDMTAVALNYGIYKQDLPSLDEKPRIVVFVDMGHSAFQVSACAFNKGKLKVLGTAFDPFLGGKNFDEKLVEHFCAEFKTKYKLDAKSKIRALLRLYQECEKLKKLMSSNSTDLPLNIECFMNDKDVSGKMNRSQFEELCAELLQKIEVPLYSLLEQTHLKVEDVSAVEIVGGATRIPAVKERIAKFFGKDISTTLNADEAVARGCALQCAILSPAFKVREFSVTDAVPFPISLIWNHDSEDTEGVHEVFSRNHAAPFSKVLTFLRRGPFELEAFYSDPQGVPYPEAKIGRFVVQNVSAQKDGEKSRVKVKVRVNTHGIFTISTASMVEKVPTEENEMSSEADMECLNQRPPENPDTDKNVQQDNSEAGTQPQVQTDAQQTSQSPPSPELTSEENKIPDADKANEKKVDQPPEAKKPKIKVVNVELPIEANLVWQLGKDLLNMYIETEGKMIMQDKLEKERNDAKNAVEEYVYEFRDKLCGPYEKFICEQDHQNFLRLLTETEDWLYEEGEDQAKQAYVDKLEELMKIGTPVKVRFQEAEERPKMFEELGQRLQHYAKIAADFRNKDEKYNHIDESEMKKVEKSVNEVMEWMNNVMNAQAKKSLDQDPVVRAQEIKTKIKELNNTCEPVVTQPKPKIESPKLERTPNGPNIDKKEEDLEDKNNFGAEPPHQNGECYPNEKNSVNMDLD

SEQ ID NO: 27710 - protein, 1197 aa, Homo sapiens
LRGKMERHQPRLHHPAQGSAAGTPYPSSASLRGCRESKMPRRKGPQHPPPPSGPEEPGEKRPKFHLNIRTLTDDMLDKFASIRIPGSKKERPPLPNLKTAFASSDCSAAPLEMMENFPKPLSENELLELFEKMMEDMNLNEDKKAPLREKDFSIKKEMVMQYINTASKTGSLKRSRQISPQEFIHELKMGSADERLVTCLESLRVSLTSNPVSWVESFGHEGLGLLLDILEKLISGKIQEKVVKKNQHKVIQCLKALMNTQYGLERIMSEERSLSLLAKAVDPRHPNMMTDVVKLLSAVCIVGEESILEEVLEALTSAGEEKKIDRFFCIVEGLRHNSVQLQVACMQLINALVTSPDDLDFRLHIRNEFMRCGLKEILPNLKCIKNDGLDIQLKVFDEHKEEDLFELSHRLEDIRAELDEAYDVYNMVWSTVKETRAEGYFISILQHLLLIRNDYFIRQQYFKLIDECVSQIVLHRDGMDPDFTYRKRLDLDLTQFVDICIDQAKLEEFEEKASELYKKFEKEFTDHQETQAELQKKEAKINELQAELQAFKSQFGALPADCNIPLPPSKEGGTGHSALPPPPPLPSGGGVPPPPPPPPPPPLPGMRMPFSGPVPPPPPLGFLGGQNSPPLPILPFGLKPKKEFKPEISMRRLNWLKIRPHEMTENCFWIKVNENKYENVDLLCKLENTFCCQQKERREEEDIEEKKSIKKKIKELKFLDSKIAQNLSIFLSSFRVPYEEIRMMILEVDETRLAESMIQNLIKHLPDQEQLNSLSQFKSEYSNLCEPEQFVVVMSNVKRLRPRLSAILFKLQFEEQVNNIKPDIMAVSTACEEIKKSKSFSKLLELVLLMGNYMNAGSRNAQTFGFNLSSLCKLKDTKSADQKTTLLHFLVEICEEKYPDILNFVDDLEPLDKASKVSVETLEKNLRQMGRQLQQLEKELETFPPPEDLHDKFVTKMSRFVISAKEQYETLSKLHENMEKLYQSIIGYYAIDVKKVSVEDFLTDLNNFRTTFMQAIKENIKKREAEEKEKRVRIAKELAERERLERQQKKKRLLEMKTEGDETGVMDNLLEALQSGAAFRDRRKRTPMPKDVRQSLSPMSQRPVLKVCNHENQKVQLTEGSRSHYNINCNSTRTPVAKELNYNLDTHTSTGRIKAAEKKEACNVESNRKKETELLGSFSKNESVPEVEALLARLRAL

SEQ ID NO: 27711 - protein, 45 aa, Homo sapiens
LIQAGANINKPDCEGETPIHKAARSGSLECISALVANGAHVDSQH

SEQ ID NO: 27712 - protein, 145 aa, Homo sapiens
LTAADIAQTQGFQECAQFLLNLQNCHLNHFYNNGILNGGHQNVFPNHISVGTNRKRCLEDSEDFGVKKARTEGETALRVGRAHLFFLSVICFLFMAERTFEMRPSLQVVMRLVDCAVTVEISPVLPLRRWDLTKGNVREILMAQV

SEQ ID NO: 27713 - protein, 34 aa, Homo sapiens
LLVFSVENMMTVLINTEKRKLRRNGISLYITTVC

SEQ ID NO: 27714 - protein, 33 aa, Homo sapiens
TQGSEVATGQAEEAPVGGGGLVAQEKSGREPSW

SEQ ID NO: 27715 - protein, 159 aa, Homo sapiens
VGWWPRRSQEGSPAGDKRAQRCLGLSVRARKISAMPHSSDSSDSSFSRSPPPGKQDSSDDVRRVQRREKNRIAAQKSRQRQTQKADTLHLESEDLEKQNAALRKEIKQLTEELKYFTSVLNSHEPLCSVLAASTPSPPEVVYSAHAFHQPHVSSPRFQP

SEQ ID NO: 27716 - protein, 22 aa, Homo sapiens
ILWYRGSAPGLESLRVPLGLAR

SEQ ID NO: 27717 - protein, 50 aa, Homo sapiens
KVKFCVLPPARDFVSSRTVTWKSKNPSGGSPRRRGQPWERRVDGTQAGLL

SEQ ID NO: 27718 - protein, 40 aa, Homo sapiens
IHPVSRLQPVPPQPLPPAPDPEPSCPSVPSATRRCTSPRG

SEQ ID NO: 27719 - protein, 136 aa, Homo sapiens
LGEMKLHCEVEVISRHLPALGLRNRGKGVRAVLSLCQQTSRSQPPVRAFLLISTLKDKRGTRYELRENIEQFFTKFVDEGKATVRLKEPPVDICLSKMESHSVTQVGVQWEELGSLQPTGHFQQFKRFPFSYETGS

SEQ ID NO: 27720 - protein, 57 aa, Homo sapiens
LRPCWKLPIKKKRMSNKGKKLKRIILAIPPAAPATVAMRPVEAAPSGRQATITKPSL

SEQ ID NO: 27721 - protein, 34 aa, Homo sapiens
MPREGGAMIGSRVAMVGRQSQFSGRRLRPQRRLC

SEQ ID NO: 27722 - protein, 684 aa, Homo sapiens
LAAVRSGGGRGRPAMIASCLCYLLLPATRLFRALSDAFFTCRKNVLLANSSSPQVEGDFAMAPRGPEQEECEGLLQQWREEGLSQVLSTASEGPLIDKGLAQSSLALLMDNPGEENAASEDRWSSRQLSDLRAAENLDEPFPEMLGEEPLLEVEGVEGSMWAAIPMQSEPQYADCAALPVGALATEQWEEDPAVLAWSIAPEPVPQEEASIWPFEGLGQLQPPAVEIPYHEILWREWEDFSTQPDAQGLKAGDGPQFQFTLMSYNILAQDLMQQSSELYLHCHPDILNWNYRFVNLMQEFQHWDPDILCLQEVQEDHYWEQLEPSLRMMGFTCFYKRRTGCKTDGCAVCYKPTRFRLLCASPVEYFRPGLELLNRDNVGLVLLLQPLVPEGLGQVSVAPLCVANTHILYNPRRGDVKLAQMAILLAEVDKVARLSDGSHCPIILCGDLNSVPDSPLYNFIRDGELQYHGMPAWKVSGQEDFSHQLYQRKLQAPLWPSSLGITDCCQYVTSCHPKRSERRKYGRDFLLRFRFCSIACQRPVGLVLMEGVTDTKPERPAGWAESVLEEDASELEPAFSRTVGTIQHCLHLTSVYTHFLPQRGRPEVTTMPLGLGMTVDYIFFSAESCENGNRTDHRLYRDGTLKLLGRLSLLSEEILWAANGLPNPFCSSDHLCLLASFGMEVTAP

SEQ ID NO: 27723 - protein, 58 aa, Homo sapiens
RPAGLRRDNWERRGTRPFRGTPGRGHLLMKFPVPVSAAVELPWQCDSLIPGKSEEQAT

SEQ ID NO: 27724 - protein, 1076 aa, Homo sapiens
VEVAGGRGRRSARRGRKAAERSSNLRAFGNWKTWWRTRVRTCILPQRVIDVSGMWDQRLVRLALLQHLRAFYGIKVKGVRGQCDRRRHETAATEIGGKIFGVPFNALPHSAVPEYGHIPSFLVDACTSLEDHIHTEGLFRKSGSVIRLKALKNKVDHGEGCLSSAPPCDIAGLLKQFFRELPEPILPADLHEALLKAQQLGTEEKNKATLLLSCLLADHTVHVLRYFFNFLRNVSLRSSENKMDSSNLAVIFAPNLLQTSEGHEKMSSNTEKKLRLQAAVVQTLIDYASDIGRVPDFILEKIPAMLGIDGLCATPSLEGFEEGEYETPGEYKRKRRQSVGDFVSGALNKFKPNRTPSITPQEERIAQLSESPVILTPNAKRTLPVDSSHGFSSKKRKSIKHNFNFELLPSNLFNSSSTPVSVHIDTSSEGSSQSSLSPVLIGGNHLITAGVPRRSKRIAGKKVCRVESGKAGCFSPKISHKEKVRRSLRLKFNLGKNGREVNGCSGVNRYESVGWRLANQQSLKNRIESVKTGLLFSPDVDEKLPKKGSEKISKSEETLLTPERLVGTNYRMSWTGPNNSSFQEVDANEASSMVENLEVENSLEPDIMVEKSPATSCELTPSNLNNKHNSNITSSPLSGDENNMTKETLVKVQKAFSESGSNLHALMNQRQSSVTNVGKVKLTEPSYLEDSPEENLFETNDLTIVESKEKYEHHTGKGEKCFSERDFSPLQTQTFNRETTIKCYSTQMKMEHEKDIHSNMPKDYLSKQEFSSDEEIKKQQSPKDKLNNKLKENENMMEGNLPKCAAHSKDEARSSFSQQSTCVVTNLSKPRPMRIAKQQSLETCEKTVSESSQMTEHRKVSDHIQWFNKLSLNEPNRIKVKSPLKFQRTPVRQSVRRINSLLEYSRQPTGHKLASLGDTASPLVKSVSCDGALSSCIESASKDSSVSCIKSGPKEQKSMSCEESNIGAISKSSMELPSKSFLKMRKHPDSVNASLRSTTVYKQKILSDGQVKVPLDDLTNHDIVKPVVNNNMGISSGINNRVLRRPSERGRAWYKGSPKHPIGKTQLLPTSKPVDL

SEQ ID NO: 27725 - protein, 27 aa, Homo sapiens
ICTLFPSHRHGQALIPAFKMELECLLD

SEQ ID NO: 27726 - protein, 45 aa, Homo sapiens
RLGQASREVERKPGALGAVRVGRVPRPRGEVGARGLLERGALRTE

SEQ ID NO: 27727 - protein, 351 aa, Homo sapiens
RLGQASREVELMAMQMQLEANADTSVEEESFGPQPISRLEQCGINANDVKKLEEAGFHTVEAVAYAPKKELINIKGISEAKADKILTESRSVARLECNSVILVYCTLRLSGSSDSPASASRVVGTTGGIETGSITEMFGEFRTGKTQICHTLAVTCQLPIDRGGGEGKAMYIDTEGTFRPERLLAVAERYGLSGSDVLDNVAYARAFNTDHQTQLLYQASAMMVESRYALLIVDSATALYRTDYSGRGELSARQMHLARFLRMLLRLADEFGVAVVITNQVVAQVDGAAMFAADPKKPIGGNIIAHASTTRLYLRKGRGETRICKIYDSPCLPEAEAMFAINADGVGDAKD

SEQ ID NO: 27728 - protein, 51 aa, Homo sapiens
TEVWRRWVERAFWKFVAEFCDMSNNGPEDFISSSRKNSRQTARISSNPERR

SEQ ID NO: 27729 - protein, 209 aa, Homo sapiens
TLDPGAEPWHHDSEAETLSWSHPGEMEPSQCVEELEDDVFQPEDGEPVTQPGSLLSADLFAQSLLDCPLSRLQLFPLTHCCGPGLRPTSQEDKATQTLSPASPSQGVMLPCGVTEEPQRLFYGNAGYRLPLPASFPAVLPIGEQPPEGQWQHQAEVQIARKLQCIADQFHRLHVQQHQQNQNRVWWQILLFLHNLALNGEENRNGAGPR

SEQ ID NO: 27730 - protein, 643 aa, Homo sapiens
VTMLSGIEAAAGEYEDSELRCRVAVEELSPGGQPRRRQALRTAELSLGRNERRELMLRLQAPGPAGRPRCFPLRAARLFTRFAEAGRSTLRLPAHDTPGAGAVQLLLSDCPPDRLRRFLRTLRLKLAAAPGPGPASARAQLLGPRPRDFVTISPVQPEERRLRAATRVPDTTLVKRPVEPQAGAEPSTEAPRWPLPVKRLSLPSTKPQLSEEQAAVLRAVLKGQSIFFTGSAGTGKSYLLKRILGSLPPTGTVATASTGVAACHIGGTTLHAFAGIGSGQAPLAQCVALAQRPGVRQGWLNCQRLVIDEISMVEADLFDKLEAVARAVRQQNKPFGGIQLIICGDFLQLPPVTKGSQPPRFCFQSKSWKRCVPVTLELTKVWRQADQTFISLLQAVRLGRCSDEVTRQLQATASHKVGRDGIVATRLCTHQDDVALTNERRLQELPGKVHRFEAMDSNPELASTLDAQCPVSQLLQLKLGAQVMLVKNLSVSRGLVNGARGVVVGFEAEGRGLPQVRFLCGVTEVIHADRWTVQATGGQLLSRQQLPLQLAWAMSIHKSQGMTLDCVEISLGRVFASGQAYVALSRARSLQGLRVLDFDPMAVRCDPRVLHFYATLRRGRSLSLESPDDDEAASDQENMDPIL

SEQ ID NO: 27731 - protein, 46 aa, Homo sapiens
LAFVWWGYTRVQHAYRKVLFLFGAHLSWTRHDVRPQRLQGVQILQI

SEQ ID NO: 27732 - protein, 80 aa, Homo sapiens
LASPNGVALLWAPVPCELPGPAAGGKLWEHEGLAGAHLRLRLHEHLYLRVEDEWSHQLQHRAPPVVPAGFSALRSPHVYP

SEQ ID NO: 27733 - protein, 68 aa, Homo sapiens
ILRGGKLLREDLWVRGGRILDPEKLFFEERRVADERRDCGGRILAPGFIDVQINGAARGRQGNPGEEL

SEQ ID NO: 27734 - protein, 193 aa, Homo sapiens
LRARGGAARLRELLPGWDSYTMRCLAPRPAGSYLSEPQGSSQCATMELGPLEGGYLELLNSDADPLCLYHFYDQMDLAGEEEIELYSEPDTDTINCDQFSRLLCDMEGDEETREAYANIAELDQYVFQDSQLEGLSKDIFKHIGPDEVIGESMEMPAEVGQKSQKRPFPEELPADLKHWKPALRVEALGSCSA

SEQ ID NO: 27735 - protein, 169 aa, Homo sapiens
ILCDDTADIQMVTVREAALQGTKTEAERHLVYERWDFLCKLEMVGEEGAFVIGREEVLTEEELTTTLKVLCMPAEEFRELKDQDGGGDDKREEGSLTITNIPKLKASWRQLLQNSVLLTLQTYATDLKTDQGLLSNKEVYAKLSWREQQALQVRYGQKMILHQLLELTS

SEQ ID NO: 27736 - protein, 21 aa, Homo sapiens
IIYTGIWHFSKPREDRMAFCS

SEQ ID NO: 27737 - protein, 25 aa, Homo sapiens
KGGSIRWISTPSFSLQAFLDSVLLV

SEQ ID NO: 27738 - protein, 66 aa, Homo sapiens
LGGDARREGASVGGTSRDWSEEGICLTVDPWGSTLSSEMLQLGPPLSERSFAALKLTGEGKASPGV

SEQ ID NO: 27739 - protein, 13 aa, Homo sapiens
MHLFSPQSDWNIG

SEQ ID NO: 27740 - protein, 120 aa, Homo sapiens
ILGSGKGGAPVGPPGSQGTALIESLAGPLGIGPENGPISGEEKRRPPVTLWKLDTYVTRKVIWTRGSPMMTSTHPLLSQPAKPRAPTAPSMGTVKQNSPWSLKCRAWSGAKNSPRGPTRC

SEQ ID NO: 27741 - protein, 89 aa, Homo sapiens
LPSSGPLRLHPCPPQAPSASTPALLRPPPPPPLPSSGPLRPRLVLLRPPPPPAPSSSGPLRLRLRPPLAPSAPGPGPTAGCGTTPAPSA

SEQ ID NO: 27742 - protein, 33 aa, Homo sapiens
VELGSLRGGTMASEKPLAAVTCTAPVNIAVIKY

SEQ ID NO: 27743 - protein, 1375 aa, Homo sapiens
RCSVAASASSTNLIHLSSKGHISPAKDTSLQQRTPAEMSPVLHFYVRPSGHEGAAPGHTRRKLQGKLPELQGVETELCYNVNWTAEALPSAEETKKLMWLFGCPLLLDDVARESWLLPGSNDLLLEVGPRLNFSTPTSTNIVSVCRATGLGPVDRVETTRRYRLSFAHPPSAEVEAIALATLHDRMTEQHFPHPIQSFSPESMPEPLNGPINILGEGRLALEKANQELGLALDSWDLDFYTKRFQELQRNPSTVEAFDLAQSNSEHSRHWFFKGQLHVDGQKLVHSLFESIMSTQESSNPNNVLKFCDNSSAIQGKEVRFLRPEDPTRPSRFQQQQGLRHVVFTAETHNFPTGVCPFSGATTGTGGRIRDVQCTGRGAHVVAGTAGYCFGNLHIPGYNLPWEDPSFQYPGNFARPLEVAIEASNGASDYGNKFGEPVLAGFARSLGLQLPDGQRREWIKPIMFSGGIGSMEADHISKEAPEPGMEVVKVGGPVYRIGVGGGAASSVQVQGDNTSDLDFGAVQRGDPEMEQKMNRVIRACVEAPKGNPICSLHDQGAGGNGNVLKELSDPAGAIIYTSRFQLGDPTLNALEIWGAEYQESNALLLRSPNRDFLTHVSARERCPACFVGTITGDRRIVLVDDRECPVRRNGQGDAPPTPLPTPVDLELEWVLGKMPRKEFFLQRKPPMLQPLALPPGLSVHQALERVLRLPAVASKRYLTNKVDRSVGGLVAQQQCVGPLQTPLADVAVVALSHEELIGAATALGEQPVKSLLDPKVAARLAVAEALTNLVFALVTDLRDVKCSGNWMWAAKLPGEGAALADACEAMVAVMAALGVAVDGGKDSLSMAARVGTETVRAPGSLVISAYAVCPDITATVTPDLKHPEGRGHLLYVALSPGQHRLGGTALAQCFSQLGEHPPDLDLPENLVRAFSITQGLLKDRLLCSGHDVSDGGLVTCLLEMAFAGNCGLQVDVPVPRVDVLSVLFAEEPGLVLEVQEPDLAQVLKRYRDAGLHCLELGHTGEAGPHAMVRVSVNGAVVLEEPVGELRALWEETSFQLDRLQAEPRCVAEEERGLRERMGPSYCLPPTFPKASVPREPGGPSPRVAILREEGSNGDREMADAFHLAGFEVWDVTMQDLCSGAIGLDTFRGVAFVGGFSYADVLGSAKGWAAAVTFHPRAGAELRRFRKRPDTFSLGVCNGCQLLALLGWVGGDPNEDAAEMGPDSQPARPGLLLRHNLSGRYESRWASVRVGPGPALMLRGMEGAVLPVWSAHGEGYVAFSSPELQAQIEARGLAPLHWADDDGNPTEQYPLNPNGSPGGVAGICSCDGRHLAVMPHPERAVRPWQWAWRPPPFDTLTTSPWLQLFINARNWTLEGSC

SEQ ID NO: 27744 - protein, 159 aa, Homo sapiens
RQLAEAAAAAPARLLCPWAREGPTWRHAPQRSPLSSLLLGPHRIPGIRRCPIDGQLSPEGQRERDRLLHGTKNVTNSSSLRLPRQNSDGGQKNKPREHIIDCGDIVWSLAFGSSVPEKQSRCVNIEWHRFRFGQDQLLLATGLNNGRIKIWDVYTGMDS

SEQ ID NO: 27745 - protein, 32 aa, Homo sapiens
LGGLLARARALCMVYRRQLTFEEEIAALRSFL

SEQ ID NO: 27746 - protein, 43 aa, Homo sapiens
LSDFERVTFSRRNLSCSIHKMGNMNSHPKTVWGGLNETTFPKL

SEQ ID NO: 27747 - protein, 423 aa, Homo sapiens
KMAAAAVVEFQRAQSLLSTDREASIDILHSIVKRDIQENDEEAVQVKEQSILELGSLLAKTGQAAELGGLLKYVRPFLNSISKAKAARLVRSLLDLFLDMEAATGQEVELCLECIEWAKSEKRTFLRQALEARLVSLYFDTKRYQEALHLGSQLLRELKKMDDKALLVEVQLLESKTYHALSNLPKARAALTSARTTANAIYCPPKLQATLDMQSGIIHAAEEKDWKTAYSYFYEAFEGYDSIDSPKAITSLKYMLLCKIMLNTPEDVQALVSGKLALRYAGRQTEALKCVAQASKNRSLADFEKALTDYRAELRDDPIISTHLAKLYDNLLEQNLIRVIEPFSRVQIEHISSLIKLSKADVERKLSQMILDKKFHGILDQGEGVLIIFDEPPVDKTYEAALETIQNMSKVVDSLYNKAKKLT

SEQ ID NO: 27748 - protein, 125 aa, Homo sapiens
IAVRRSESLPIVQSSRKKRSQSPTLSALMEVSSFGAGSPGSTHQGSLASRVLPIKGSHVEFGMWKGGRSHPFLPCSSRRAGSGGQLDSILPHQSPAWGPWGCKDLSSGVPSFLTSSILWKSAVVK

SEQ ID NO: 27749 - protein, 7 aa, Homo sapiens
RSKCRSS

SEQ ID NO: 27750 - protein, 38 aa, Homo sapiens
LLMLPCGTCHGAGTAALSRPAVVAAAAAAAGPERRSCH

SEQ ID NO: 27751 - protein, 78 aa, Homo sapiens
LNEPLRKPPTRKSAFSHLQFLSPASPCCLLPSAVRLLVLHPPLSPQTHPNFCPFPKIGPGKSLPQKLSHFQTLRKKPP

SEQ ID NO: 27752 - protein, 52 aa, Homo sapiens
RVRGARTWACRTPELGQSSSQRRPERFGDAGGSDGRELGAAAAEARGRKVCV

SEQ ID NO: 27753 - protein, 52 aa, Homo sapiens
KTWPLQSVLSTASSLRPLVMMIKGGGCGLENSHVKTHHLKVLSVRIFMMKFL

SEQ ID NO: 27754 - protein, 46 aa, Homo sapiens
RPLVMMVQSASVSKAGKGSSSSHGVAAALNQDLDPDPKCHVFNVSK

SEQ ID NO: 27755 - protein, 62 aa, Homo sapiens
LKKKSAYGLSLKNWLTTSLVLMTGSMNKRWTQQQSPSARRGVSLDTALHSIDLEATGLIILL

SEQ ID NO: 27756 - protein, 23 aa, Homo sapiens
TAAPKDSRSGGAAAVAGEMSREA

SEQ ID NO: 27757 - protein, 831 aa, Homo sapiens
LKSTVKTTDTRGGSPKTSASLGLGTSLRTVGSWLKDLGSPEAATEPRTTSVQKSNHLVLYSAARDNHILLLLHPKAPMESSDVELDLQRSVQAVLRELSTQAPALQSNQGMWRWSLHKKVERDPGKSPVLVRILLRELEKAESQDLRHVIIPLLHTVMYVLTKATGITEELYQRIYAFCTRLLTLPTPYCTVALDCAIRLKTEMAVPGTLYQRMVIAEQNLTNELYPYQERVFLFVDPELVSASVCSALLLEIEAAQAQQTPETCMRHVVSHALQAALGEACHAGALHRKLQASPRRTLEHYFHAVVAALEQMASEASPSREGHVERLEEIYCSLLGPAAGRCGGDLVQERPPSIPLPSPYITFHLWTGEEQLWKELVLFLRPRSQLRLSADLEVLDLQGLRPDRELARVSVLSTDSGIERDLPTGADELPAPGSPEMERAGLQRKGGIKKRAWPLDFLMPGSWDGPPGLHRRTGRPSGDGEMLPGVSRLHTARVLVLGDDRMLGRLAQAYHRLRKRETQKFCLTPRLSLQLYYIPVLAPEKPAASRQPELGELATFLGRVDPWYQSNVNTLCPAIHKLAEMPPSLDTSRTVDPFILDVITYYIRMGTQPIYFQIYTVKIFFSDLSQDPTEDIFLIELKVKIQDSKFPKDGFSPRRRGVAEGPGAELSLCYQKALLSHRPREVTVSLRATGLILKAIPASDTEVSGSSHCPLPAAPVTDHTCLNVNVTEVVKSSNLAGKSFSTVTNTFRTNNIQIQSRDQRLLTLSLDKDDQRTFRDVVRFEVAPCPEPCSGAQKSKAPWLNLHGQQEVEAIKAKPKPLLMPINTFSGIVQ

SEQ ID NO: 27758 - protein, 357 aa, Homo sapiens
LDPSSPPPFSLRMAQKENSYPWPYGRQTAPSGLSTLPQRVLRKEPVTPSALVLMSRSNVQPTAAPGQKVMENSSGTPDILTRRHFTIDDFEIGRPLGKGKFGNVYLAREKKSHFIVALKVLFKSQIEKEGVEHQLRREIEIQAHLHHPNILRLYNYFYDRRRIYLILEYAPRGELYKELQKSCTFDEQRTATIMEELADALMYCHGKKVIHRDIKPENLLLGLKGELKIADFGWSVHAPSLRRKTMCGTLDYLPPEMIEGRMHNEKVDLWCIGVLCYELLVGNPPFESASHNETYRRIVKVDLKFPASVPMGAQDLISKLLRHNPSERLPLAQVSAHPWVRANSRRVLPPSALQSVA

SEQ ID NO: 27759 - protein, 75 aa, Homo sapiens
IFSSPSQDWHSNEGTVRTEAQVAQMQKLPLVMISASPWQILIYHPKWSQSCAVSLLSVFQEVQSLKGWVMLHLWS

SEQ ID NO: 27760 - protein, 290 aa, Homo sapiens
RCGEGRMAELVPFAVPIESDKTLLVWELSSGPTAEALHHSLFTAFSQFGLLYSVRVFPNAAVAHPGFYAVIKFYSARAAHRAQKACDRKQLFQKSPVKVRLGTRHKAVQHQALALNSSKCQELANYYFGFNGCSKRIIKLQELSDLEERENEDSMVPLPKQSLKFFCALEVVLPSCDCRSPGIGLVEEPMDKVEEGPLSFLMKRKTAQKLAIQKALSDAFQKLLIVVLESGKIAVEYRPSEDIVGVRCEEELHGLIQVPCSPWKQYGQEEEGYLSDFSLEEEEFRLPELD

SEQ ID NO: 27761 - protein, 46 aa, Homo sapiens
KGITAWGLEGHIFSAPRISATASTARRPTVVQRWGARAAFPSRVPD

SEQ ID NO: 27762 - protein, 17 aa, Homo sapiens
RGHCKCGGKTHQSRDGK

SEQ ID NO: 27763 - protein, 53 aa, Homo sapiens
LPGWIVPGAGSMLPVLSPIWVPWSPAIQHYSLSTTQLRSLVNPASQSQSCSLG

SEQ ID NO: 27764 - protein, 49 aa, Homo sapiens
TWCRCGLALPCARLGGKACSRVRAFRHRHVGRWCDSWPRREQRLPHLRG

SEQ ID NO: 27765 - protein, 538 aa, Homo sapiens
LLPAMASRCWRWWGWSAWPRTRLPPAGSTPSFCHHFSTQEKTPQICVVGSGPAGFYTAQHLLKRVEALCSQPRVLNSPALSGEGEDLGASQPLSLGPTSCHPVPQQHPQAHVDIYEKQPVPFGLVRFGVAPDHPEVKNVINTFTQTAHSGRCAFWGNVEVGRDVTVPELQEAYHAVVLSYGAEDHRALEIPGEELPGVCSARAFVGWYNGLPENQELEPDLSCDTAVILGQGNVALDVARILLTPPEHLERTDITKAALGVLRQSRVKTVWLVGRRGPLQVAFTIKELREMIQLPGARPILDPVDFLGLQDKIKEVPRPRKRLTELLLRTATEKPGPAEAARQASASRAWGLRFFRSPQQVLPSPDGRRAAGVRLAVTRLEGVDEATRAVPTGDMEDLPCGLVLSSIGYKSRPVDPSVPFDSKLGVIPNVEGRVMDVPGLYCSGWVKRGPTGVIATTMTDSFLTGQMLLQDLKAGLLPSGPRPGYAAIQALLSSRGVRPVSFSDWEKLDAEEVARGQGTGKPREKLVDPQEMLRLLGH

SEQ ID NO: 27766 - protein, 34 aa, Homo sapiens
LSNFSRFEGRIFFSCSLEGSLVWLMKSQSSEIPS

SEQ ID NO: 27767 - protein, 311 aa, Homo sapiens
IATPHLDALARRSLLFRNAFTSVSSCSPSRASLLTGLPQHQNGMYGLHQDVHHFNSFDKVRSLPLLLSQAGVRTGIIGKKHVGPETVYPFDFAYTEENGSVLQVGRNITRIKLLVRKFLQTQDDRPFFLYVAFHDPHRCGHSQPQYGTFCEKFGNGESGMGRIPDWTPQAYDPLDVLVPYFVPNTPAARADLAAQYTTVGRMDQGVGLVLQELRDAGVLNDTLVIFTSDNGIPFPSGRTNLYWPGTAEPLLVSSPEHPKRWGQVSEAYVSLLGMPLSVSVRKGVGVDLGRGHDLSDAAPHPLPNVALISSG

SEQ ID NO: 27768 - protein, 397 aa, Homo sapiens
LQARVMAALRQPQVAELLAEARRAFREEFGAEPELAVSAPGRVNLIGEHTDYNQGLVLPMALELMTVLVGSPRKDGLVSLLTTSEGADEPQRLQFPLPTAQRSLEPGTPRWANYVKGVIQYYPAAPLPGFSAVVVSSVPLGGGLSSSASLEVATYTFLQQLCPDSGTIAARAQVCQQAEHSFAGMPCGIMDQFISLMGQKGHALLIDCRSLETSLVPLSDPKLAVLITNSNVRHSLASSEYPVRRRQCEEVARALGKESLREVQLEELEAARDLVSKEGFRRARHVVGEIRRTAQAAAALRRGDYRAFGRLMVESHRSLRDDYEVSCPELDQLVEAALAVPGVYGSRMTGGGFGGCTVTLLEASAAPHAMRHIQEHYGGTATFYLSQAADGAKVLCL

SEQ ID NO: 27769 - protein, 30 aa, Homo sapiens
LLLRCASLRSPSVLFCGKAFPSVPTRKATA

SEQ ID NO: 27770 - protein, 1200 aa, Homo sapiens
RPAFWLKMWRVKKLSLSLSPSPQTGKPSMRTPLRELTLQPGALTNSGKRSPACSSLTPSLCKLGLQEGSNNSSPVDFVNNKRTDLSSEHFSHSSKWLETCQHESDEQPLDPIPQISSTPKTSEEAVDPLGNYMVKTIVLVPSPLGQQQDMIFEARLDTMAETNSISLNGPLRTDDLVREEVAPCMGDRFSEVAAVSEKPIFQESPSHLLEESPPNPCSEQLHCSKESLSSRTEAVREDLVPSESNAFLPSSVLWLSPSTALAADFRVNHVDPEEEIVEHGAMEEREMRFPTHPKESETEDQALVSSVEDILSTCLTPNLVEMESQEAPGPAVEDVGRILGSDTESWMSPLAWLEKGVNTSVMLENLRQSLSLPSMLRDAAIGTTPFSTCSVGTWFTPSAPQEKSTNTSQTGLVGTKHSTSETEQLLCGRPPDLTALSRHDLEDNLLSSLVILEVLSRQLRDWKSQLAVPHPETQDSSTQTDTSHSGITNKLQHLKESHEMGQALQQARNVMQSWVLISKELISLLHLSLLHLEEDKTTVSQESRRAETLVCCCFDLLKKLRAKLQSLKAEREEARHREEMALRGKDAAEIVLEAFCAHASQRISQLEQDLASMREFRGLLKDAQTQLVGLHAKQEELVQQTVSLTSTLQQDWRSMQLDYTTWTALLSRSRQLTEKLTVKSQQALQERDVAIEEKQEVSRVLEQVSAQLEECKGQTEQLELENSRLATDLRAQLQILANMDSQLKELQSQHTHCAQDLAMKDELLCQLTQSNEEQAAQWQKEEMALKHMQAELQQQQAVLAKEVRDLKETLEFADQENQVAHLELGQVECQLKTTLEVLRERSLQCENLKDTVENLTAKLASTIADNQEQDLEKTRQYSQKLGLLTEQLQSLTLFLQTKLKEKTEQETLLLSTACPPTQEHPLPNDRTFLGSILTAVADEEPESTPVPLLGSDKSAFTRVASMVSLQPAETPGMEESLAEMSIMTTELQSLCSLLQESKEEAIRTLQRKICELQARLQAQEEQHQEVQKAKEADIEKLNQALCLRYKNEKELQEVIQQQNEKILEQIDKSGELISLREEVTHLTRSLRRAETETKVLQEALAGQLDSNCQPMATNWIQEKVWLSQEVDKLRVMFLEMKNEKEKLMIKFQSHRNILEENLRRSDKELEKLDDIVQHIYKTLLSIPEVVRGCKELQGLLEFLS

SEQ ID NO: 27771 - protein, 235 aa, Homo sapiens
LREPVPSVGALGQGSPDSMSVGFIGAGQLAFALAKGFTAAGVLAAHKIMASSPDMDLATVSALRKMGVKLTPHNKETVQHSDVLFLAVKPHIIPFILDEIGADIEDRHIVVSCAAGVTISSIEKKLSAFRPAPRVIRCMTNTPVVVREGATVYATGTHAQVEDGRLMEQLLSSVGFCTEVEEDLIDAVTGLSGSGPAYAFTALDALADGGVKMGLPRRLAVRLGAQALLGAAVHG

SEQ ID NO: 27772 - protein, 59 aa, Homo sapiens
KVRDARVLPCSGRPSLTSLLRPPRLSPAMLWNPNRTGVGCRAPSLPSPLLPEPQRQSCR

SEQ ID NO: 27773 - protein, 59 aa, Homo sapiens
KTFRLKGTIRIQLLKWKWLFRVLSKELEGYCQSLGVGLDAEVKVLFALKEKGTRSKICP

SEQ ID NO: 27774 - protein, 11 aa, Homo sapiens
RMRRLIKEEAS

SEQ ID NO: 27775 - protein, 29 aa, Homo sapiens
VGRGDHCPRALMELGPAFALRSPRFRDQA

SEQ ID NO: 27776 - protein, 67 aa, Homo sapiens
LPGDPARGRLKPRPACPGLGRRSRALDPAAPLGLGATSAAPPLKSQSIQDGKPRRQTRIKCREGQYE

SEQ ID NO: 27777 - protein, 63 aa, Homo sapiens
LEAVASYAGGRGGGPDFGSRGLTGLVRPVWLLLWKQCCSYWKIKGKASPWWGKVICENGSLFT

SEQ ID NO: 27778 - protein, 21 aa, Homo sapiens
IYFSAFSGRISLLPEGLGRAL

SEQ ID NO: 27779 - protein, 95 aa, Homo sapiens
RNPALWDKGMRFRKGQGVARSRTARLQPDRCPDLSVPSPAQSHHGLLDTADAAALEEFHVSPETAGPAPGRIAVASLPLLHPGGCSPLPPAPGAP

SEQ ID NO: 27780 - protein, 251 aa, Homo sapiens
VSEPVVRSAPAACSVPPGSPRRCRRRVAMEVQKEAQRIMTLSVWKMYHSRMQRGGLRLHRSLQLSLVMRSARELYLSAKVEALEPEVSLPAALPSDPRLHPPREAESTAETATPDGEHPFPEPMDTQEAPTAEETSACCAPRPAKVSRKRRSSSLSDGGDAGLVPSKKARLEEKEEEEGASSEVADRLQPPPAQAEGAFPNLARVLQRRFSGLLNCSPAAPPTAPPACEAKPACRPADSMLNVLVRAVVAF

SEQ ID NO: 27781 - protein, 209 aa, Homo sapiens
LRAMARGGWRRLRRLLSAGQLLFQGRALLVTNTLGCGALMAAGDGVRQSWEIRARPGQVFDPRRSASMFAVGCSMGPFLHYWYLSLDRLFPASGLRGFPNVLKKVLVDQLVASPLLGVWYFLGLGCLEGQTVGESCQELREKFWEFYKADWCVWPAAQFVNFLFVPPQFRVTYINGLTLGWDTYLSYLKYRSPVPLTPPGCVALDTRAD

SEQ ID NO: 27782 - protein, 62 aa, Homo sapiens
LERAVRRGQDPGLRPEQPHHAEGAQGAGCEGAGHHEGGRRRGVLGSLQEEEGKRDRFFAGSR

SEQ ID NO: 27783 - protein, 21 aa, Homo sapiens
IGALLPNMVTAAPLVLPEDVH

SEQ ID NO: 27784 - protein, 659 aa, Homo sapiens
KPRATGQGRAQVGSVRPPGAPLSQLCGPGGDVMAAAVLTDRAQVSVTFDDVAVTFTKEEWGQLDLAQRTLYQEVMLENCGLLVSLGCPVPKAELICHLEHGQEPWTRKEDLSQDTCPGDKGKPKTTEPTTCEPALSEGISLQGQVTQGNSVDSQLGQAEDQDGLSEMQEGHFRPGIDPQEKSPGKMSPECDGLGTADGVCSRIGQEQVSPGDRVRSHNSCESGKDPMIQEEENNFKCSECGKVFNKKHLLAGHEKIHSGVKPYECTECGKTFIKSTHLLQHHMIHTGERPYECMECGKAFNRKSYLTQHQRIHSGEKPYKCNECGKAFTHRSNFVLHNRRHTGEKSFVCTECGQVFRHRPGFLRHYVVHSGENPYECLECGKVFKHRSYLMWHQQTHTGEKPYECSECGKVFLESAALIHHYVIHTGEKPFECLECGKAFNHRSYLKRHQRIHTGEKPFVCSECGKAFTHCSTFILHKRAHTGEKPFECKECGKAFSNRKDLIRHFSIHTGEKPYECVECGKAFTRMSGLTRHKRIHSGEKPYECVECGKSFCWSTNLIRHAIIHTGEKPYKCSECGKAFSRSSSLTQHQRMHTGKNPISVTDVGRPFTSGQTSVTLRELLLGKDFLNVTTEANILPEETSSSASDQPYQRETPQVSSL

SEQ ID NO: 27785 - protein, 33 aa, Homo sapiens
TLRLCSQDDRVGDSSTSGGRDPRHQALWEVEHR

SEQ ID NO: 27786 - protein, 436 aa, Homo sapiens
LTQETPLKPVSQLPGPAGAPTGRRGQAEDPGSVMASALRPPRVPKPKGVLPSHYYESFLEKKGPCDRDYKKFWAGLQGLTIYFYNSNRDFQHVEKLNLGAFEKLTDEIPWGSSRDPGTHFSLILRDQEIKFKVETLECREMWKGFILTVVELRVPTDLTLLPGHLYMMSEVLAKEEARRALETPSCFLKVSRLEAQLLLERYPECGNLLLRPSGDGADGVSVTTRQMHNGTHVVRHYKVKREGPKYVIDVEQPFSCTSLDAVVNYFVSHTKKALVPFLLDEDYEKVLGYVEADKENGENVWVAPSAPGPGPAPCTGGPKPLSPASSQDKLPPLPPLPNQEENYVTPIGDGPAVDYENQDVASSSWPVILKPKKLPKPPAKLPKPPVGPKPEPKVFNGGLGRKLPVSSAQPLFPTAGLADMTAELQKKLEKRRALEH

SEQ ID NO: 27787 - protein, 13 aa, Homo sapiens
VHSPGVLSNFGFL

SEQ ID NO: 27788 - protein, 675 aa, Homo sapiens
VATRAGLAGGGASGCLMQGSSLWLSLTFRSARVLSRARFFEWQSPGLPNTAAMENGTGPYGEERPREVQETTVTEGAAKIAFPSANEVFYNPVQEFNRDLTCAVITEFARIQLGAKGIQIKVPGEKDTQKVVVDLSEQEEEKVELKESENLASGDQPRTAAVGEICEEGLHVLEGLAASGLRSIRFALEVPGLRSVVANDASTRAVDLIRRNVQLNDVAHLVQPSQADARMLMYQHQRVSERFDVIDLDPYGSPATFLDAAVQAVSEGGLLCVTCTDMAVLAGNSGETCYSKYGAMALKSRACHEMALRIVLHSLDLRANCYQRFVVPLLSISADFYVRVFVRVFTGQAKVKASASKQALVFQCVGCGAFHLQRLGKASGVPSGRAKFSAACGPPVTPECEHCGQRHQLGGPMWAEPIHDLDFVGRVLEAVSANPGRFHTSERIRGVLSVITEELPDVPLYYTLDQLSSTIHCNTPSLLQLRSALLHADFRVSLSHACKNAVKTDAPASALWDIMRCWEKECPVKRERLSETSPAFRILSVEPRLQANFTIREDANPSSRQRGLKRFQANPEANWGPRPRARPGGKAADEAMEERRRLLQNKRKEPPEDVAQRAARLKTFPCKRFKEGTCQRGDQCCYSHSPPTPRVSADAAPDCPETSNQTPPGPGAAAGPGID

SEQ ID NO: 27789 - protein, 103 aa, Homo sapiens
ISSLYTNDGDMEALEADLKHRFTRQEWDLAKSLQKTIQAARSENYSLTDFWAYMVISKQTRELPESHLSNMKKPVEEGTLPYPIFAAIDNDLQPSWQEARAPG

SEQ ID NO: 27790 - protein, 138 aa, Homo sapiens
RSENYSLTDFWAYMVISKQTRELPESHLSNMKKPVEEGTLPYPIFAAIDNDLQPSWQEARAPETWFEFTPHHAGFSALGAFVSITHFGSKFKKGRLVRTHPERDLTFLRGLWGSALGNTEVIREYIFGEYLGNRKVKP

SEQ ID NO: 27791 - protein, 81 aa, Homo sapiens
IQHPSRHSAVSCLGVAAAMARKALPPTHLGQSWFCSCCRDTELAISALRARTATGSPGSCRCTAGPLPCASALESCCCRVT

SEQ ID NO: 27792 - protein, 111 aa, Homo sapiens
LAPPCSEPEGPPLHVLGARIPVWTWTRIPLPTRALGFCSGASSLPARGPDRGFFPGLICAARRAPRRSRRRGGALGGGGVAGAAAASGLGLLGRLLPGEQLRPCRLKNGRI

SEQ ID NO: 27793 - protein, 29 aa, Homo sapiens
RVSSAILRVELGACRHFPNLGGPGLDFHE

SEQ ID NO: 27794 - protein, 77 aa, Homo sapiens
KRRKNGALLSSDVARIKKISFFMTLPLPEFPALFHLIQLQLALRHGLAARRAGPAAGPAAAQRLTVAQHSHSAHRAG

SEQ ID NO: 27795 - protein, 69 aa, Homo sapiens
LSSDVARIKKISFFMTLPLPEFPALFHLIQLQLALRHGLAARRAGPAAGPAAAQRLTVAQHSHSAHRAG

SEQ ID NO: 27796 - protein, 225 aa, Homo sapiens
LKAGKYGMERQGVDVPHVKCKDQEPQPLGESKEHPRWEENCEEEAGGGPASASCQLTVLEGKSGLYFSSLDSSIDILQKRAQELIENINKSRQKDHALMTNFRNSLKTKVSDLTEKLEERIYQIYNDHNKIIQEKLQEFTQKMAKISHLETELKQVCHSVETVYKDLCLQPEQSLRLRWGPDHSRGKSPPRPGNSQPPDVFVSSVAETTSQATASEVQTNRDGEC

SEQ ID NO: 27797 - protein, 64 aa, Homo sapiens
LMCGYCLGGCPWPSGMQPQPRCVSSLWTSSRPTSTSMRYTMRRRSGGPSRRHPRIRATRRRRRS

SEQ ID NO: 27798 - protein, 224 aa, Homo sapiens
RSEAPRAQIPFWRESWWLARPREWEASAMFCEKAMELIRELHRAPEGQLPAFNEDGLRQVLEEMKALYEQNQSDVNEAKSGGRSDLIPTIKFRHCSLLRNRRCTVAYLYDRLLRIRALRWEYGSVLPNALRFHMAAEEMEWFNNYKRSLATYMRSLGGDEGLDITQDMKPPKSLYIEVRCLKDYGEFEVDDGTSVLLKKNSQHFLPRWKCEQLIRQGVLEHILS

SEQ ID NO: 27799 - protein, 50 aa, Homo sapiens
VTNGAEAVSTEAKMTAFPDWPWLFHTLCDPCPMTLWLTLPEAMTTAAFCH

SEQ ID NO: 27800 - protein, 391 aa, Homo sapiens
TRPRSCRWQPRRSEPVGRPSLEYCLSVILNMGGAVSAGEDNDELIDNLKEAQYIRTELVEQAFRAIDRADYYLEEFKENAYKDLAWKHGNIHLSAPCIYSEVMEALDLQPGLSFLNLGSGTGYLSSMVGLILGPFGVNHGVELHSDVIEYAKQKLDFFIRTSDSFDKFDFCEPSFVTGNCLEISPDCSQYDRVYCGAGVQKEHEEYMKNLLKVGGILVMPLEEKLTKITRTGPSAWETKKILAVSFAPLIQPCHSESGKSRLVQLPPVAVRSLQDLARIAIRGTIKKIIHQETVSKNGNGLKNTPRFKRRRVRRRRMETIVFLDKEVFASRISNPSDDNSCEDLEEERREEEEKTPPETKPDPPVNFLRQKVLSLPLPDPLKYYLLYYREK

SEQ ID NO: 27801 - protein, 46 aa, Homo sapiens
LPPPPPPPGVSRLRSASAAAQQRRESGSGAAEPAGGRAGGRTGRIA

SEQ ID NO: 27802 - protein, 35 aa, Homo sapiens
TSVASLSCGLSPSPSLAVLRHRTPPHPISRNLQTS

SEQ ID NO: 27803 - protein, 36 aa, Homo sapiens
VETETFLGSPRYSRRVRSLLLVTWPHGGPSFVREQL

SEQ ID NO: 27804 - protein, 420 aa, Homo sapiens
ILTAELLEDLGPWVAGIMDRSKENCISGPVKATAPVGGPKRVLVTQQFPCQNPLPVNSGQAQRVLCPSNSSQRIPLQAQKLVSSHKPVQNQKQKQLQATSVPHPVSRPLNNTQKSKQPLPSAPENNPEEELASKQKNEESKKRQWALEDFEIGRPLGKGKFGNVYLAREKQSKFILALKVLFKAQLEKAGVEHQLRREVEIQSHLRHPNILRLYGYFHDATRVYLILEYAPLGTVYRELQKLSKFDEQRTATYITELANALSYCHSKRVIHRDIKPENLLLGSAGELKIADFGWSVHAPSSRRTTLCGTLDYLPPEMIEGRMHDEKVDLWSLGVLCYEFLVGKPPFEANTYQETYKRISRVEFTFPDFVTEGARDLISRLLKHNPSQRPMLREVLEHPWITANSSKPSNCQNKESASKQS

SEQ ID NO: 27805 - protein, 113 aa, Homo sapiens
TAGTRGGWSEWRSVKSPVGSSVPECPWRCLVPAQRLCIRSWAPRRPVGYCLLLITARGSHSIAQARVRGYLIRNFSEGRARWLMPVIPAFSEAEAGVQWCDLSSLQPLLPGFK

SEQ ID NO: 27806 - protein, 6 aa, Homo sapiens
IKRLQA

SEQ ID NO: 27807 - protein, 236 aa, Homo sapiens
LGRGRGRGGIQSGSRRGIWDSERDPERDPGAGAGPWRGAGQGGGRFCCSCCWRARRRAASTSAGDRPATGLCGGTGWLRWGAAHTPGLMSTCPQRICPRAGTGAMWMVSTMPASPGTSTSPNTAAPAGPTPAPALWRIGSTSRGRERGPPPSCPCRTSSTAVTLAPVKGVMTCPCGTTPTSTASLTRPATTTRPRTRSVTSLTNVGHAMNSKSATPSGTTPSGGWETTAPSLGGRR

SEQ ID NO: 27808 - protein, 19 aa, Homo sapiens
KLEMLHFQGEDVWAHVMAD

SEQ ID NO: 27809 - protein, 39 aa, Homo sapiens
KVFQQELHWEPEVLTFLSVTTERTFPCLGKEKTSSDHRS

SEQ ID NO: 27810 - protein, 292 aa, Homo sapiens
LRSLLPSAGPLRRSPQFPARTRSGPPNLRPKSGGGSGGKKMKNEIAAVVFFFTRLVRKHDKLKKEAVERFAEKLTLILQEKYKNHWYPEKPSKGQAYRCIRVNKFQRVDPDVLKACENSCILYSDLGLPKELTLWVDPCEVCCRYGEKNNAFIVASFENKDENKDEISRKVTRALDKVTSDYHSGSSSSDEETSKEMEVKPSSVTAAASPVYQISELIFPPLPMWHPLPRKKPGMYRGNGHQNHYPPPVPFGYPNQGRKNKPYRPIPVTWVPPPGMHCDRNHWINPHMLAPH

SEQ ID NO: 27811 - protein, 64 aa, Homo sapiens
LCVTPIGQSMSSMYTTIPRSNYSLNKMMTLKFPPMKTSSGMKRRMKSIQEMTVMGQSLLRSAHG

SEQ ID NO: 27812 - protein, 386 aa, Homo sapiens
KRLNMNPQIRNPMERMYRDTFYDNFENEPILYGRSYTWLCYEVKIKRGRSNLLWDTGVFRGQVYFKPQYHAEMCFLSWFCGNQLPAYKCFQITWFVSWTPCPDCVAKLAEFLSEHPNVTLTISAARLYYYWERDYRRALCRLSQAGARVTIMDYEEFAYCWENFVYNEGQQFMPWYKFDENYAFLHRTLKEILRYLMDPDTFTFNFNNDPLVLRRRQTYLCYEVERLDNGTWVLMDQHMGFLCNEAKNLLCGFYGRHAELRFLDLVPSLQLDPAQIYRVTWFISWSPCFSWGCAGEVRAFLQENTHVRLRIFAARIYDYDPLYKEALQMLRDAGAQVSIMTYDEFEYCWDTFVYRQGCPFQPWDGLEEHSQALSGRLRAILQNQGN

SEQ ID NO: 27813 - protein, 520 aa, Homo sapiens
VAAGAQAAGAAGMAKSNGENGPRAPAAGESLSGTRESLAQGPDAATTDELSSLGSDSEANGFAERRIDKFGFIVGSQGAEGALEEVPLEVLRQRESKWLDMLNNWDKWMAKKHKKIRLRCQKGIPPSLRGRAWQYLSGGKVKLQQNPGKFDELDMSPGDPKWLDVIERDLHRQFPFHEMFVSRGGHGQQDLFRVLKAYTLYRPEEGYCQAQAPIAAVLLMHMPAEQAFWCLVQICEKYLPGYYSEKLEAIQLDGEILFSLLQKVSPVAHKHLSRQKIDPLLYMTEWFMCAFSRTLPWSSVLRVWDMFFCEGVKIIFRVGLVLLKHALGSPEKVKACQGQYETIERLRSLSPKIMQEAFLVQEVVELPVTERQIEREHLIQLRRWQETRGELQCRSPPRLHGAKAILDAEPGPRPALQPSPSIRLPLDAPLPGSKAKPKPPKQAQKEQRKQMKGRGQLEKPPAPNQAMVVAAAGDACPPQHVPPKDSAPKDSAPQDLAPQVSAHHRSQESLTSQESEDTYL

SEQ ID NO: 27814 - protein, 400 aa, Homo sapiens
TVTRAGRCPTMSVRVARVAWVRGLGASYRRGASSFPVPPPGAQGVAELLRDATGAEEEAPWAATERRMPGQCSVLLFPGQGSQVVGMGRGLLNYPRVRELYAAARRVLGYDLLELSLHGPQETLDRTVHCQPAIFVASLAAVEKLHHLQPSVIENCVAAAGFSVGEFAALVFAGAMEFAEGLYAVKIRAEAMQEASEAVPSGMLSVLGQPQSKFNFACLEAREHCKSLGIENPVCEVSNYLFPDCRVISGHQEALRFLQKNSSKFHFRRTRMLPVSGAFHTRLMEPAVEPLTQALKAVDIKKPLVSVYSNVHAHRYRHPGHIHKLLAQQLVSPVKWEQTMHAIYERKKGRGFPQTFEVGPGRQLGAILKSCNMQAWKSYSAVDVLQTLEHVDLDPQEPPR

SEQ ID NO: 27815 - protein, 277 aa, Homo sapiens
IARRSRGPAAPPPARPGPGPARPPPRMELSAIGEQVFAVESIRKKRVRKGKVEYLVKWKGWPPKYSTWEPEEHILDPRLVMAYEEKEERDRASGYRKRGPKPKRLLLQRLYSMDLRSSHKAKGKEKLCFSLTCPLGSGSPEGVVKAGAPELVDKGPLVPTLPFPLRKPRKAHKYLRLSRKKFPPRGPNLESHSHRRELFLQEPPAPDVLQAAGEWEPAAQPPEEEADADLAEGPPPWTPALPSSEVTVTDITANSITVTFREAQAAEGFFRDRSGKF

SEQ ID NO: 27816 - protein, 221 aa, Homo sapiens
RFQALGGEGQSADLRPLLTDFRLQFICAPASSLSLRRLRLRPQKEISILCPEQNRMAMSQESLTFKDVFVDFTLEEWQQLDSAQKNLYRDVMLENYSHLVSVGYLVAKPDVIFRLGPGEESWMADGGTPVRTCAEVWQVDEQIDHYKESQDKLPWQAAFIGKETLKDESGQESRTCRKSIYLSTEFDSVRQRLPKYYSWEKAFKTSFKLSWSKWKLCKKER

SEQ ID NO: 27817 - protein, 30 aa, Homo sapiens
LPSLLRSPPEVKRASRFEPICFQAGHHDET

SEQ ID NO: 27818 - protein, 136 aa, Homo sapiens
LEARQAMQEQLSKNKELTQKLQVASESEEEEGGTEDVEELLVPDVVNEVQMNADGPNPWMLRSCTSDTKEAATQEDPEQLPELEAHGVSESEGEERPVAEEEILLREFEERRSLRKRSELSQDAEPAGSQETKGEL

SEQ ID NO: 27819 - protein, 607 aa, Homo sapiens
VLASPRSVRGGPKPPGRGGARASGGAAGPAPAMPPGKVLQPVLKMKVDELFLYWLSEASTQRMLQDCLRRIKAPGRDQPTPGDGEQPGAWPTAPLAAPRPSGLEPPGTPGPGPALPLGAASSPRNAPHVRGTRRSAGTRVVQTRKEEPLPPATSQSIPTFYFPRGRPQDSVNVDAVISKIESTFARFPHERATMDDMGLVAKACGCPLYWKGPLFYGAGGERTGSVSVHKFVAMWRKILQNCHDDAAKFVHLLMSPGCNYLVQEDFVPFLQDVVNTHPGLSFLKEASEFHSRYITTVIQRIFYAVNRSWSGRITCAELRRSSFLQNVALLEEEADINQLTEFFSYEHFYVIYCKFWELDTDHDLLIDADDLARHNDHALSTKMIDRIFSGAVTRGRKVQKEGKISYADFVWFLISEEDKKTPTSIEYWFRCMDLDGDGALSMFELEYFYEEQCRRLDSMAIEALPFQDCLCQMLDLVKPRTEGKITLQDLKRCKLANVFFDTFFNIEKYLDHEQKEQISLLRDGDSGGPELSDWEKYAAEEYDILVAEETAGEPWEDGFEAELSPVEQKLSALRSPLAQRPFFEAPSPLGAVDLYEYACGDEDLEPL

SEQ ID NO: 27820 - protein, 344 aa, Homo sapiens
TVRLLDPHSLNLPSLHSLPAALRVTPAAKAPGAATAAPPSSTAQHQNTLFLDSDMGSSKKVTLSVLSREQSEGVGARVRRSIGRPELKNLDPFLLFDEFKGGRPGGFPDHPHRGFETVSYLLEGGSMAHEDFCGHTGKMNPGDLQWMTAGRGILHAEMPCSEEPAHGLQLWVNLRSSEKMVEPQYQELKSEEIPKPSKDGVTVAVISGEALGIKSKVYTRTPTLYLDFKLDPGAKHSQPIPKGWTSFIYTISGDVYIGPDDAQQKIEPHHTAVLGEGDSVQVENKDPKRSHFVLIAGEPLREPVIQHGPFVMNTNEEISQAILDFRNAKNGFERAKTWKSKIGN

SEQ ID NO: 27821 - protein, 46 aa, Homo sapiens
VEGRRGGGAGDRGMKDTDGKRDSDGTAGSKDEWSPPFGCCGLQART

SEQ ID NO: 27822 - protein, 86 aa, Homo sapiens
LKSLVPSLERERRAPQTSVPASGEEAGKKDAASGEHPGSKTGPGLSTVGSVTRLGKAGAPAVGLLLANERSPRRRRGANDPTQDGE

SEQ ID NO: 27823 - protein, 36 aa, Homo sapiens
MRHASLHPSALTSTQQTLRLQEIQISSQSAHCDSGR

SEQ ID NO: 27824 - protein, 37 aa, Homo sapiens
MLPLFKMKRKPRKGKTTRTEMCLAMSIGSNQWKRSNT

SEQ ID NO: 27825 - protein, 21 aa, Homo sapiens
MGLLPVTGKLTRWNWLNWDPC

SEQ ID NO: 27826 - protein, 53 aa, Homo sapiens
MSGPRPVVLSGPSGAGKSTLLKRLLQEHSGIFGFSVSHTTRNPRPGEENGKGR

SEQ ID NO: 27827 - protein, 201 aa, Homo sapiens
MQKYLEDRGEVTFEKIFSQKLGYLLFRDFCLNHLEEARPLVEFYEEIKKYEKLETEEERVARSREIFDSYIMKELLACSHPFSKSATEHVQGHLGKKQVPPDLFQPYIEEICQNLRGDVFQKFIESDKFTRFCQWKNVELNIHVSGLGWGMESHAPCCSSPGSWACGLAGRGRSGDVCPLAPRAVAMGVRAGIPAWGGRSR

SEQ ID NO: 27828 - protein, 81 aa, Homo sapiens
MQTYEMVDKHIRRLDTDLARFEADLKEKQIESSDYDSSSSKGKKKGRTQKEKKAARARSKGKNSDEEAPKTAQKKLKLVRT

SEQ ID NO: 27829 - protein, 43 aa, Homo sapiens
MVRRGKEEVRRKKQGNDPACDGSADTIQIGKLVHLILCPPPRN

SEQ ID NO: 27830 - protein, 30 aa, Homo sapiens
MVRRGKEEVRRKKQGNDRVLLSYPGWSAMA

SEQ ID NO: 27831 - protein, 11 aa, Homo sapiens
MQRESFYRVLL

SEQ ID NO: 27832 - protein, 59 aa, Homo sapiens
MRPAGLRRDNWERRGTRPFRGTPGRGHLLMKFPVPVSAAVELPWQCDSLIPGKSEEQAT

SEQ ID NO: 27833 - protein, 424 aa, Homo sapiens
MLGKNRLIFPGEKVLLAWSGGPSSSSMVWQVLEGLSQDSAKRLRFVAGVIFVDEGAACGQSLEERSKTLAEVKPILQATGFPWHVVALEEVFSLPPSVLWCSAQELVGSEGAYKAAVDSFLQQQHVLGAGGGPGPTQGEEQPPQPPLDPQNLARPPAPAQTEALSQLFCSVRTLTAKEELLQTLRTHLILHMARAHGYSKVMTGDSCTRLAIKLMTNLALGRGAFLAWDTGFSDERHGDVVVVRPMRDHTLKEVAFYNRLFSVPSVFTPAVDTKAPEKASIHRLMEAFILRLQTQFPSTVSTVYRTSEKLVKGPRDGPAAGDSGPRCLLCMCALDVDAADSATAFGAQTSSRLSQMQSPIPLTETRTPPGPCCSPGVGWAQRCGQGACRREDPQACIEEQLCYSCRVNMKDLGLGLAGDPGLSD

SEQ ID NO: 27834 - protein, 272 aa, Homo sapiens
MENPHHLSETEGGKPGPPACHHSLAAHCNATGITEELYQRIYAFCTRLLTLPTPYCTVALDCAIRLKTEMAVPGTLYQRMVIAEQNLTNELYPYQERVFLFVDPELVSASVCSALLLEIEAAQAQQTPETCMRHVVSHALQAALGEACHAGALHRKLQVTLSKSGHQAFPCPAPTSPSTCGPVRSSSGRNWCSSSAQDPSCASVLTWRSWICRASGRTGSWPGFLCCPLTAALSGTFPRGLMSCLHPAALRWSEPGCSAKGASRSVHGPWTS

SEQ ID NO: 27835 - protein, 103 aa, Homo sapiens
MTIRHQGQQYRPRMAFLQKIEALVKDMQNPETGVRMQNQRVLVTSVPHAMTGSDVLQWIVQRLWISSLGESSSGTQLSGTALCTAPWEKLNRDLACVSEKFTF

SEQ ID NO: 27836 - protein, 1588 aa, Homo sapiens
MVTLVADCEAQPPVLGHGPRFISIAGLTVLGTQDLGEKTFEGDIQELLISPDPQAAFQACERYLPDCDNLAPAATVAPQGEPETPRPRRKGKGKGRKKGRGRKGKGRKKNKEIWTSSPPPDSAENQTSTDIPKTETPAPNLPPTPTPLVVTSTVTTGLNATILERSLDPDSGTELGTLETKAAREDEEGDDSTMGPDFRAAEYPSRTQFQIFPGAGEKGAKGEPAVIEKGQQFEGPPGAPGPQGVVGPSGPPGPPGFPGDPGPPGPAGLPGIPGIDGIRGPPGTVIMMPFQFAGGSFKGPPVSFQQAQAQAVLQQTQLSMKGPPGPVGLTGRPGPVGLPGHPGLKGEEGAEGPQGPRGLQGPHGPPGRVGKMGRPGADGARGLPGDTGPKGDRGFDGLPGLPGEKGQRGDFGHVGQPGPPGEDGERGAEGPPGPTGQAGEPGPRGLLGPRGSPGPTGRPGVTGIDGAPGAKGNVGPPGEPGPPGQQGNHGSQGLPGPQGLIGTPGEKGPPGNPGIPGLPGSDGPLGHPGHEGPTGEKGAQGPPGSAGPPGYPGPRGVKGTSGNRGLQGEKGEKGEDGFPGFKGDVGLKGDQGKPGAPGPRGEDGPEGPKGQAGQAGEEGPPGSAGEKGKLGVPGLPGYPGRPGPKGSIGFPGPLGPIGEKGKSGKTGQPGLEGERGPPGSRGERGQPGATGQPGPKGDVGQDGAPGIPGEKGLPGLQGPPGFPGPKGPPGHQGKDGRPGHPGQRGELGFQGQTGPPGPAGVLGPQGKTGEVGPLGERGPPGPPGPPGEQGLPGLEGREGAKGELGPPGPLGKEGPAGLRGFPGPKGGPGDPGPTGLKGDKGPPGPVGANGSPGERGPLGPAGGIGLPGQSGSEGPVGPAGKKGSRGERGPPGPTGKDGIPGPLGPLGPPGAAGPSGEEGDKGDVGAPGHKGSKGDKGDAGPPGQPGIRGPAGHPGPPGADGAQGRRGPPGLFGQKGDDGVRGFVGVIGPPGLQGLPGPPGEKGEVGDVGSMGPHGAPGPRGPQGPTGSEGTPGLPGGVGQPGAVGEKGERGDAGDPGPPGAPGIPGPKGDIGEKGDSGPSGAAGPPGKKGPPGEDGAKGSVGPTGLPGDLGPPGDPGVSGIDGSPGEKGDPGDVGGPGPPGASGEPGAPGPPGKRGPSGHMGREGREGEKGAKGEPGPDGPPGRTGPMGARGPPGRVGPEGLRGIPGPVGEPGLLGAPGQMGPPGPLGPSGLPGLKGDTGPKGEKGHIGLIGLIGPPGEAGEKGDQGLPGVQGPPGPKGDPGPPGPIGSLGHPGPPGVAGPLGQKGSKGSPGSMGPRGDTGPAGPPGPPGAPAELHGLRRRRRFVPVPLPVVEGGLEEVLASLTSLSLELEQLRRPPGTAERPGLVCHELHRNHPHLPDGEYWIDPNQGCARDSFRVFCNFTAGGETCLYPDKKFEIVKLASWSKEKPGGWYSTFRRGKKFSYVDADGSPVNVVQLNFLKLLSATARQNFTYSCQNAAAWLDEATGDYSHSARFLGTNGEELSFNQTTAATVSVPQDGCRLRKGQTKTLFEFSSSRAGFLPLWDVAATDFGQTNQKFGFELGPVCFSS

SEQ ID NO: 27837 - protein, 53 aa, Homo sapiens
MAARRAGRAGGGQGAGPPRAPGQGSRPGSGYPRVETGQEKGAMLISGSTKGPS

SEQ ID NO: 27838 - protein, 6 aa, Homo sapiens
MLEENE

SEQ ID NO: 27839 - protein, 30 aa, Homo sapiens
MTCSFLKTAVEEVLGVFIEPNGYHRTRRWL

SEQ ID NO: 27840 - protein, 285 aa, Homo sapiens
MTPGTGAPPAPGDFSGEGSQGLPDPSPEPKQLPELIRMKRDGGRLSEADIRGFVAAVVNGSAQGAQIGAMLMAIRLRGMDLEETSVLTQALAQSGQQLEWPEAWRQQLVDKHSTGGVGDKVSLVLAPALAACGCKVPMISGRGLGHTGGTLDKLESIPGFNVIQSPEQMQVLLDQAGCCIVGQSEQLVPADGILYAARDVTATVDSLPLITGDLTPWPASACSQAPDLQTQVKGLSLGVTRHLTVCPPTPITRCLTTTMWGGLILNPPGAATPIIRDLTLNAQGP

SEQ ID NO: 27841 - protein, 231 aa, Homo sapiens
MHYPPPSGAGQHPQPQPPLHKANQPPHGVPQLSLYEHFNSPHPTPAPADISQKQVHRPLQTPDLSGFYSLTSGSMGQLPHTVSWPSPPLYPLSPSCGYRQHFPAPTAAPGAPYPRFTHPSLMLGSGVPGHPAAIPHPAIVPPSGKQELQPFDRNLKTQAESKAEKEAKKPTIKKPLNAFMLYMKEMRAKVIAECTLKESAAINQILGRRVRPWAGGLAGMLPDHLQPGAAC

SEQ ID NO: 27842 - protein, 85 aa, Homo sapiens
MSYRELWKLILTKIRGIQETSEKESKEMSTAILDMVEVFTNQIQSFPEHMANVELKKSLDEIQSILESFNDRLDQAEKKLSKLKI

SEQ ID NO: 27843 - protein, 175 aa, Homo sapiens
MVNCHAHFWTTKAFLPTMLEINHGHIVTVASSLGLFSTAGVEDYCASKFGVVGFHESLSHELKAAEKDGIKTTLVCPYLVDTGMFRGCRIRKEIEPFLPPLKPDYCVKQAMKAILTDQPMICTPRLMYIVTFMKSILPFEAVVCMYRFLGADKCMYPFIAQRKQATNNNEAKNGI

SEQ ID NO: 27844 - protein, 103 aa, Homo sapiens
MTDQTYCDRLVQDTPFLTGHGRLSEQQVDRIILQLNRYYPQILTNKEAEKVLRRCHVQGYPEGWGISWNNEVGPQQNRSQHGPCYWLSSGTPRHPCVCGSVTS

SEQ ID NO: 27845 - protein, 105 aa, Homo sapiens [sequence omitted]

SEQ ID NO: 27846 - protein, 18 aa, Homo sapiens
LSSSAGVHPASWVPELPV

SEQ ID NO: 27847 - protein, 348 aa, Homo sapiens
TGGSEAGRRSKSKMKYILVTGGVISGIGKGIIASSVGTILKSCGLHVTSIKIDPYINIDAGTFSPYEHGEVFVLDDGGEVDLDLGNYERFLDIRLTKDNNLTTGKIYQYVINKERKGDYLGKTVQVVPHITDAIQEWVMRQALIPVDEDGLEPQVCVIELGGTVGDIESMPFIEAFRQFQFKVKRENFCNIHVSLVPQPSSTGEQKTKPTQNSVRELRGLGLSPDLVVCRCSNPLDTSVKEKISMFCHVEPEQVICVHDVSSIYRVPLLLEEQGVVDYFLRRLDLPIERQPRKMLMKWKEMADRYDRLLETCSIALVGKYTKFSDSYASVIKALEHSALAINHKLEIK

SEQ ID NO: 27848 - protein, 729 aa, Homo sapiens
LTLRMAMDSSLQARLFPGLAIKIQRSNGLIHSANVRTVNLEKSCVSVEWAEGGATKGKEIDFDDVAAINPELLQLLPLHPKDNLPLQENVTIQKQKRRSVNSKIPAPKESLRSRSTRMSTVSELRITAQENDMEVELPAAANSRKQFSVPPAPTRPSCPAVAEIPLRMVSEEMEEQVHSIRGSSSANPVNSVRRKSCLVKEVEKMKNKREEKKAQNSEMRMKRAQEYDSSFPNWEFARMIKEFRATLECHPLTMTDPIEEHRICVCVRKRPLNKQELAKKEIDVISIPSKCLLLVHEPKLKVDLTKYLENQAFCFDFAFDETASNEVVYRFTARPLVQTIFEGGKATCFAYGQTGSGKTHTMGGDLSGKAQNASKGIYAMASRDVFLLKNQPCYRKLGLEVYVTFFEIYNGKLFDLLNKKAKLRVLEDGKQQVQVVGLQEHLVNSADDVIKMIDMGSACRTSGQTFANSNSSRSHACFQIILRAKGRMHGKFSLVDLAGNERGADTSSADRQTRMEGAEINKSLLALKECIRALGQNKAHTPFRESKLTQVLRDSFIGENSRTCMIATISPGISSCEYTLNTLRYADRVKELSPHSGPSGEQLIQMETEEMEACSNGALIPGNLSKEEEELSSQMSSFNEAMTQIRELEEKAMEELKEIIQQGPDWLELSEMTEQPDYDLETFVNKAESALAQQAKHFSALRDVIKALRLAMQLEEQASRQISSKKRPQ

SEQ ID NO: 27849 - protein, 35 aa, Homo sapiens
LPALRTSHGEVISVPHKIITHLRKEVGDLDRGGCQ

SEQ ID NO: 27850 - protein, 154 aa, Homo sapiens
IAERILLLGVPANKRDRAGIRIWEQVLEYNAIGGKYNRGLTVVVAFRELVEPRKQDADSLQRAWTVGWCVELLQAFFLVADDIMDSSLTRRGQICWYQKPGVGLDAINDANLLEACIYRLLKLYCREQPYYLNLIELFLQVYCRQGPMPRGCPW

SEQ ID NO: 27851 - protein, 50 aa, Homo sapiens
KTQGEVFPLSPPQQAPQRPWRFVLFLDTCTPMLCGGGLKYSRREWELLEF

SEQ ID NO: 27852 - protein, 131 aa, Homo sapiens
KLRDREIQLEISGKERLEDLNFPEIKRRKMADRKDEDRKQFKDLFDLNSSEEDDTEGFSERGILRPLSTRHGVEDDEEDEEEGEEDSSNSEGEWSWDGDPDAEAGLAPGELQQLAQGPEDELEDLQLSEDD

SEQ ID NO: 27853 - protein, 51 aa, Homo sapiens
IQSHKYNKEILVLMEEEQDLPEQPVKKAKMQESGEQTISYDMHRLHPSLIQ

SEQ ID NO: 27854 - protein, 34 aa, Homo sapiens
KKTPRLRKKMKKLEEVQKVDRVKERDFFLKNCDV

SEQ ID NO: 27855 - protein, 214 aa, Homo sapiens
ILPTTCCPAPAAMCRTLAAFPTTCLERAKEFKTRLGIFLHKSELGCDTGSTGKFEWGSKHSKENRNFSEDVLGWRESFDLLLSSKNGVAAFHAFLKTEFSEENLEFWLACEEFKKIRSATKLASRAHQIFEEFICSEAPKEVNIDHETHELTRMNLQTATATCFDAAQGKTRTLMEKDSYPRFLKSPAYRDLAAQASAASATLSSCSLDEPSHT

SEQ ID NO: 27856 - protein, 138 aa, Homo sapiens
LSFFLDSEMSGRGKQGGKARAKAKSRSSRAGLQFPVGRVHRLLRKGNYSERVGAGAPVYLAAVLEYLTAEILELAGNAARDNKKTRIIPRHLQLAIRNDEELNKLLGRVTIAQGGVLPNIQAVLLPKKTESHHKAKGK

SEQ ID NO: 27857 - protein, 56 aa, Homo sapiens
TDLRFQSSAVMALQEASEAYLVGLFEDTNLCAIHAKRVTIMPKDIQLARRIRGERA

SEQ ID NO: 27858 - protein, 41 aa, Homo sapiens
MLEDNVCLPSNGKLYTKVINWVQRSIWENGDSLEELMEEVY

SEQ ID NO: 27859 - protein, 65 aa, Homo sapiens
IMNSFVNDIFERIAGEASRLAHYNKRSTITSREIQTAVRLLLPGKLAKHAVSEGTKAVTKYTSSK

SEQ ID NO: 27860 - protein, 67 aa, Homo sapiens
IFKFIIPNAVKYSPNCKLLIVSNPVDILTYVAWKISGFPKNRVIGSGCNLDSAQFGYLMGESWEFTH

SEQ ID NO: 27861 - protein, 37 aa, Homo sapiens
VIPDLTCLFLFLNLRWSRHQNADFRENPYGEDHHPRG

SEQ ID NO: 27862 - protein, 16 aa, Homo sapiens
RRKPTSAASMISRGFS

SEQ ID NO: 27863 - protein, 1367 aa, Homo sapiens
LTGMERDLVAIEAKLSDLQKEAEKLESEHPDQAQAILSRLAEISDVWEEMKTTLKNREASLGEASKLQQFLRDLDDFQSWLSRTQTAIASEDMPNTLTEAEKLLTQHENIKNEIDNYEEDYQKMRDMGEMVTQGQTDAQYMFLRQRLQALDTGWNELHKMWENRQNLLSQSHAYQQFLRDTKQAEAFLNNQEYVLAHTEMPTTLEGAEAAIKKQEDFMTTMDANEEKINAVVETGRRLVSDGNINSDRIQEKVDSIDDRHRKNRETASELLMRLKDNRDLQKFLQDCQELSLWINEKMLTAQDMSYDEARNLHSKWLKHQAFMAELASNKEWLDKIEKEGMQLISEKPETEAVVKEKLTGLHKMWEVLESTTQTKAQRLFDANKAELFTQSCADLDKWLHGLESQIQSDDYGKDLTSVNILLKKQQMLENQMEVRKKEIEELQSQAQALSQEGKSTDEVDSKRLTVQTKFMELLEPLNERKHNLLASKEIHQFNRDVEDEILWVGERMPLATSTDHGHNLQTVQLLIKKNQTLQKEIQGHQPRIDDIFERSQNIVTDSSSLSAEAIRQRLADLKQLWGLLIEETEKRHRRLEEAHRAQQYYFDAAEAEAWMSEQELYMMSEEKAKDEQSAVSMLKKHQILEQAVEDYAETVHQLSKTSRALVADSHPESERISMRQSKVDKLYAGLKDLAEERRGKLDERHRLFQLNREVDDLEQWIAEREVVAGSHELGQDYEHVTMLQERFREFARDTGNIGQERVDTVNHLADELINSGHSDAATIAEWKDGLNEAWADLLELIDTRTQILAASYELHKFYHDAKEIFGRIQDKHKKLPEELGRDQNTVETLQRMHTTFEHDIQALGTQVRQLQEDAARLQAAYAGDKADDIQKRENEVLEAWKSLLDACESRRVRLVDTGDKFRFFSMVRDLMLWMEDVIRQIEAQEKPRDVSSVELLMNNHQGIKAEIDARNDSFTTCIELGKSLLARKHYASEEIKEKLLQLTEKRKEMIDKWEDRWEWLRLILEVHQFSRDASVAEAWLLGQEPYLSSREIGQSVDEVEKLIKRHEAFEKSAATWDERFSALERLTTLELLEVRRQQEEEERKRRPPSPEPSTKVSEEAESQQQWDTSKGEQVSQNGLPAEQGSPRMAETVDTSEMVNGATEQRTSSKESSPIPSPTSDRKAKTALPAQSAATLPARTQETPSAQMEGFLNRKHEWEAHNKKASSRSWHNVYCVINNQEMGFYKDAKTAASGIPYHSEVPVSLKEAVCEVALDYKKKKHVFKLRLNDGNEYLFQAKDDEEMNTWIQAISSAISSDKHEVSASTQSTPASSRAQTLPTSVVTITSESSPGKREKDKEKDKEKRFSLFGKKK

SEQ ID NO: 27864 - protein, 37 aa, Homo sapiens
LGCGSDSRRPSLLLSCYCFGFPATPRTVKAAQLWMVR

SEQ ID NO: 27865 - protein, 40 aa, Homo sapiens
VAAAAAARQAGSGFGGQKQTGSSRSNICRFRWGPLSYFKS

SEQ ID NO: 27866 - protein, 41 aa, Homo sapiens
LKDDDSGDHDQNEENSTQKDGEKEKTERDKNQSSSKRKVRR

SEQ ID NO: 27867 - protein, 24 aa, Homo sapiens
LFSEEEGSYCRRWCSRNRVGPTIN

SEQ ID NO: 27868 - protein, 39 aa, Homo sapiens
LRENLAEAVHWNAFTVIVMEAKYMKEKLLFVSLLIAPDD

SEQ ID NO: 27869 - protein, 430 aa, Homo sapiens
KSCVLLAMAQLQTRFYTDNKKYAVDDVPFSIPAASEIADLSNIINKLLKDKNEFHKHVEFDFLIKGQFLRMPLDKHMEMENISSEEVVEIEYVEKYTAPQPEQCMFHDDWISSIKGAEEWILTGSYDKTSRIWSLEGKSIMTIVGHTDVVKDVAWVKKDSLSCLLLSASMDQTILLWEWNVERNKVKALHCCRGHAGSVDSIAVDGSGTKFCSGSWDKMLKIWSTVPTDEEDEMEESTNRPRKKQKTEQLGLTRTPIVTLSGHMEAVSSVLWSDAEEICSASWDHTIRVWDVESGSLKSTLTGNKVFNCISYSPLCKRLASGSTDRHIRLWDPRTKDGSLVSLSLTSHTGWVTSVKWSPTHEQQLISGSLDNIVKLWDTRSCKAPLYDLAAHEDKVLSVDWTDTGLLLSGGADNKLYSYRYSPTTSHVGA

SEQ ID NO: 27870 - protein, 8 aa, Homo sapiens
MLMLEENE

SEQ ID NO: 27871 - protein, 47 aa, Homo sapiens
ISAGCGVSAAGRELSAPRPLRTDARLPAEISMTTLKMNFLYSPDILI

SEQ ID NO: 27872 - protein, 74 aa, Homo sapiens
TLRKGGQRRGGGARSSAQADSGSSDDEAASEARSTASECPSLLSTTAEDSLGESGWKFDRGLVRAPWAEDKKRC

SEQ ID NO: 27873 - protein, 74 aa, Homo sapiens
LYLKVKGNVFKNKRILMEHIHKLKADKARKKLLADQAEAPRSKTKEARKHGEERLQAKKEEIIKTLSKEEETKK

SEQ ID NO: 27874 - protein, 18 aa, Homo sapiens
TDGQTDSQVLQWYLPPFS

SEQ ID NO: 27875 - protein, 46 aa, Homo sapiens
LVLGQSSPGFIVFASQDLFESCPPDPTGGTFEKKRAMLLLRVGTLS

SEQ ID NO: 27876 - protein, 227 aa, Homo sapiens
IEKFEKEAAEMGKCSFKYAWVLDKLKAEREHGITIDISLWKFETSKYYVTIIDAPGHRDLIKNMITGTSQADCAVLIVAAGFGEFEAGISKNGQTREHALLAYTLGVKQLIVGVNKMDSTEPPYSHKRYEEIVKEVSTYIKKIGHNTDTVAFVPVSGWNGDNTLEPSANMPWFKGWKVTRKDGNASGTTLLEALDCILPPTRPTDKPLCLPLQDVYKIGGIGTVPVG

SEQ ID NO: 27877 - protein, 32 aa, Homo sapiens
RPQDISCSEPCLLIVSVAHFVSRALGVKLQLI

SEQ ID NO: 27878 - protein, 116 aa, Homo sapiens
LRDSEEKLAPGGRGSVNMGKGDPNKPRGKMSSYAFFVQTCREEHKKKHPDSSVNFAEFSKKCSERWKTMSAKEKSKFEDMAKSDKARYDREMKNYVPPKGDKKGKKKDPNAPKRPP

SEQ ID NO: 27879 - protein, 51 aa, Homo sapiens
LIDDKDALVFVLIDEVESLTAARNACRAGTEPSDAIRVVNAVLTQIDQIKR

SEQ ID NO: 27880 - protein, 74 aa, Homo sapiens
VICLQGNWGVRKLGTHINMANLLKTVVTGCSCPLLSNLGSCKGLRVKKDFLRTFYTHQELWCKAPVKPGASPYG

SEQ ID NO: 27881 - protein, 38 aa, Homo sapiens
RRSREKHQESTTGGKRNAFGTYPEKAAAPAPFLPMTVL

SEQ ID NO: 27882 - protein, 17 aa, Homo sapiens
RMASRETRKWTPWLLES

SEQ ID NO: 27883 - protein, 18 aa, Homo sapiens
KFPEYRSQRAGGMISSKI

SEQ ID NO: 27884 - protein, 7 aa, Homo sapiens
IHSKLVF

SEQ ID NO: 27885 - protein, 36 aa, Homo sapiens
LEVDVESLVFGGEAELLRGFVAGQEHSYSHGGGAWL

SEQ ID NO: 27886 - protein, 56 aa, Homo sapiens
VTLTSWHLSQGCSQVVLMPPVVLSSDCRQMESCAEPESSKKQPTICDHHKMCPDGS

SEQ ID NO: 27887 - protein, 140 aa, Homo sapiens
IQNSKEVLSLLQEKNPAFKPVLAIIQAGDDNLMQEINQNLAEEAGLNITHICLPPDSSEAEIIDEILKINEDTRVHGLALQISENLFSNKVLNALKPEKDVDGVTDINLGKLVRGDAHECFVSPVAKAVIELLEKSASRG

SEQ ID NO: 27888 - protein, 147 aa, Homo sapiens
ICLPPDSSEAEIIDEILKINEDTRVHGLALQISENLFSNKVLNALKPEKDVDGVTDINLGKLVRGDAHECFVSPVAKAVIELLEKSGVNLDGKKILVVGAHGSLEAALQCLFQRKGSMTMSIQWKTRQLQSKTESRSVTRLECRRVI

SEQ ID NO: 27889 - protein, 141 aa, Homo sapiens
VLSLQMARTKQTARKSTGGKAPRKQLATKAARKSAPATGGVKKPHRYRPGTVALREIRRYQKSTELLIRKLPFQRLVREIAQDFKTDLRFQSSAVMALQEACEAYLVGLFEDTNLCAIHAKRVTIMPKDIQLARRIRGERA

SEQ ID NO: 27890 - protein, 14 aa, Homo sapiens
VVSRCLAAVRAERV

SEQ ID NO: 27891 - protein, 62 aa, Homo sapiens
LPFPAGLSPPRFPQPFSLPAEPRRQQQQQQQQEEEPGGGGGRGAHGVQSRRRQKKSLLLLRR

SEQ ID NO: 27892 - protein, 73 aa, Homo sapiens
LKSSPSERESNGRGRTKAPSDRAMGDSDDEYDRRRRDKFRRERSDYDRSRERDERRRGDDWNDRDRVSLCHPG

SEQ ID NO: 27893 - protein, 26 aa, Homo sapiens
VGNIGRQLAMVSEMIILSSKTCVSLP

SEQ ID NO: 27894 - protein, 34 aa, Homo sapiens
TVSKWKSLLSQQLLCKMPRPGIVAEHPRPAEVPP

SEQ ID NO: 27895 - protein, 60 aa, Homo sapiens
MKKMTTSKSAKALKGSSTSRTPTGWHRQPKRSHNWIWTGQRSFRGENEKRLRSRRQKSVT

SEQ ID NO: 27896 - protein, 88 aa, Homo sapiens
KTPPKRPGGRRRGRLPNNSSRPSTPTINVLESKDTDSDREAGTETGGENNDKEEEEKKDETSSSSGKTRLITGFYCSVKVRVVRIKDV

SEQ ID NO: 27897 - protein, 24 aa, Homo sapiens
IGLKRLSPRWREKRNSSVSSLLVA

SEQ ID NO: 27898 - protein, 437 aa, Homo sapiens
LTWESGQVLGDQTVSDNELQEMSNQGSKYVNKEIQNAVNGVKQIKTLIEKTNEERKTLLSNLEEAKKKKEDALNETRESETKLKELPGVCNETMMALWEECKPCLKQTCMKFYARVCRSGSGLVGRQLEEFLNQSSPFYFWMNGDRIDSLLENDRQQTHMLDVMQDHFSRASSIIDELFQDRFFTREPQDTYHYLPFSLPHRRPHFFFPKSRIVRSLMPFSPYEPLNFHAMFQPFLEMIHEAQQAMDIHFHSPAFQHPPTEFIREGDDDRTVCREIRHNSTGCLRMKDQCDKCREILSVDCSTNNPSQAKLRRELDESLQVAERLTRKYNELLKSYQWKMLNTSSLLEQLNEQFNWVSRLANLTQGEDQYYLRVTTVASHTSDSDVPSGVTEVVVKLFDSDPITVTVPVEVSRKNPKFMETVAEKALQEYRKKHREE

SEQ ID NO: 27899 - protein, 12 aa, Homo sapiens
RLLCSRLSCFPS

SEQ ID NO: 27900 - protein, 304 aa, Homo sapiens
THQLSTEGIGTDATLLELRRYRKMATNFLAHEKIWFDKFKYDDAERRFYEQMNGPVAGASRQENGASVILRDIARARENIQKSLAGSSGPGASSGTSGDHGELVVRIASLEVENQSLRGVVQELQQAISKLEARLNVLEKSSPGHRATAPQTQHVSPMRQVEPPAKKPATPAEDDEDDDIDLFGSDNEEEDKEAAQLREERLRQYAEKKAKKPALVAKSSILLDVKPWDDETDMAQLEACVRSIQLDGLVWGASKLVPVGYGIRKLQIQCVVEDDKVGTDLLEEEITKFEEHVQSVDIAAFNKI

SEQ ID NO: 27901 - protein, 23 aa, Homo sapiens
IVRVVPLLPGLVIGGNPVSAERL

SEQ ID NO: 27902 - protein, 23 aa, Homo sapiens
RRAPTAWAAGREAAREWGVEGPA

SEQ ID NO: 27903 - protein, 27 aa, Homo sapiens
VQQQEVYGMMPRVSFGCCVWILNMRRT

SEQ ID NO: 27904 - protein, 65 aa, Homo sapiens
VEYAYNDKAILEQRNMLTEELYGNTFQLYKSADHRTLDKVLEVQPEKLELIMDEMKQILTPMAQK

SEQ ID NO: 27905 - protein, 187 aa, Homo sapiens
RPRCNFLRSSRIRVHPTPAASTMPPKFDPNEIKVVYLRCTGGEVGATSALAPKIGPLGLSPKKVGDDIAKATGDWKGLRITVKLTIQNRQAQIEVVPSASALIIKALKEPPRDRKKQKNIKHSGNITFDEIVNIARQMRHRSLARELSGTIKEILGTAQSVGCNVDGRHPHDIIDDINSGAVECPAS

SEQ ID NO: 27906 - protein, 10 aa, Homo sapiens
ITRVIHRLKT

SEQ ID NO: 27907 - protein, 450 aa, Homo sapiens
KKTENSKLRKVKYEETVFYGLQYILNKYLKGKVVTKEKIQEAKDVYKEHFQDDVVNEKGWNYILEKYDGHLPIEIKAVPEGFVIPRGNVLFTVENTDPECYWLTNWIETILVQSWYPITVATNSREQKKILAKYLLETSGNLDGLEYKLHDFGYRGVSSQETAGIGASAHLVNFKGTDTVAGLALNKKYYGTKDPVPGYSVPAAEHSTITAWGKDHEKDAFEHIVTQFSSVPVSVVSNSYDIYNACEKIWGEDLRHLIVSRSTQAPLIIRPDSGNPLDTVLKVLEILGKKFPVTENSKGYKLLPPYLRVIQGDGVDINTLQEIVEGMKQKMWSIENIAFGSGGGLLQKLTRDLLNCSFKCSYVVTNGLGINVFKDPVADPNKRSKKGRLSLHRTPAGNFVTLEEGKGDLEEYGQDLLHTVFKNGKVTKSYSFDEIRKNAQLNIELEAAHH

SEQ ID NO: 27908 - protein, 88 aa, Homo sapiens
RMKARRNKKQIPSFRKLIKTSKVKLENKLKNKQFKQQSTLKKYRKEQRKLRQAVKDAVSKKPIPLENPKEKRPDLPRVGKDSSPIGLL

SEQ ID NO: 27909 - protein, 69 aa, Homo sapiens
IQDISGGRINSILVSPSYRVVEVSYILFELIMNSMKTEENKSFSAMEDDQRTRPEVSKVYLLFYNSSEE

SEQ ID NO: 27910 - protein, 29 aa, Homo sapiens
LQRGAESRTRRVLPAAVWTTRGHRQKWAL

SEQ ID NO: 27911 - protein, 134 aa, Homo sapiens
ISTPETPLTKRSVSTRSPHQLLSPSSFSPSATPSQKYNSRSNRGEVVTSFGLAQGVSWSGRGGAGNISLKVLGCPEALTGSYKSMFQKLPDIREVLTCKIEELGSELKEHYKIEAFTPLLAPAQVRVVLIVLTN

SEQ ID NO: 27912 - protein, 10 aa, Homo sapiens
RFTKEENDFF

SEQ ID NO: 27913 - protein, 490 aa, Homo sapiens
VVGKGQSAEVLGGVMAVPFVEDWDLVQTLGEGAYGEVQLAVNRVTEEAVAVKIVDMKRAVDCPENIKKEICINKMLNHENVVKFYGHRREGNIQYLFLEYCSGGELFDRIEPDIGMPEPDAQRFFHQLMAGVVYLHGIGITHRDIKPENLLLDERDNLKISDFGLATVFRYNNRERLLNKMCGTLPYVAPELLKRREFHAEPVDVWSCGIVLTAMLAGELPWDQPSDSCQEYSDWKEKKTYLNPWKKIDSAPLALLHKILVENPSARITIPDIKKDRWYNKPLKKGAKRPRVTSGGVSESPSGFSKHIQSNLDFSPVNSASSEENVKYSSSQPEPRTGLSLWDTSPSYIDKLVQGISFSQPTCPDHMLLNSQLLGTPGSSQNPWQRLVKRMTRFFTKLDADKSYQCLKETCEKLGYQWKKSCMNQVTISTTDRRNNKLIFKVNLLEMDDKILVDFRLSKGDGLEFKRHFLKIKGKLIDIVSSQKIWLPAT

SEQ ID NO: 27914 - protein, 29 aa, Homo sapiens
IPDLIATRPRRPPDVHSRFLLVPSPIWQL

SEQ ID NO: 27915 - protein, 26 aa, Homo sapiens
VARGGSEASPGARRVAPRSTVTAPCP

SEQ ID NO: 27916 - protein, 150 aa, Homo sapiens
LSRSEKDDEDTWERAAAGLGRAGAGWRLCSSACCCLWELGASAEGLPADRDPLPRLPCPPCRGGRKMPVKKKRKSPGVAAAVAEDGGLKKCKISSYCRSQPPARLISGEEHFSSKKCLAWFYEYAGPDEVVGPEGMEKFCEDIGVEPENV

SEQ ID NO: 27917 - protein, 14 aa, Homo sapiens
LRGRFRKLFKTKSN

SEQ ID NO: 27918 - protein, 32 aa, Homo sapiens
VSAAILRASQCRLRTTRRRRTLESRPRKTKTQ

SEQ ID NO: 27919 - protein, 69 aa, Homo sapiens
RSDSGGRRVWGTPQRWASWRPETTGTEVGHLFPESGLEISELPILRPSSGERVPGSQESWALPLTSWRP

SEQ ID NO: 27920 - protein, 53 aa, Homo sapiens
VHRVDFPSSVRIHLLTKMADIEYRLSVGTNEKIQLSSLIAAFQVTRDLIVAEA

SEQ ID NO: 27921 - protein, 11 aa, Homo sapiens
KEYLSKVSCRS

SEQ ID NO: 27922 - protein, 45 aa, Homo sapiens
LKMTEYKLVVVGAGGVGKSALTIQLIQNHFVDEYDPTIEVLLSSM

SEQ ID NO: 27923 - protein, 26 aa, Homo sapiens
LPLDCDRKQSVRVKDGYYDAECAESV

SEQ ID NO: 27924 - protein, 56 aa, Homo sapiens
VPLLSIRSHPPFFRAKPPRGLRVKESWRLYWATGFLLAPGPPDKMGSAVGVLAKAG

SEQ ID NO: 27925 - protein, 80 aa, Homo sapiens
LIGQVGTLPSGKFWVPGGSLTFGRLQDSSSEVGGGLGGHGGAPCARRGRGGGRGGRGEGRGWARGGAGQEPLPADRRGRV

SEQ ID NO: 27926 - protein, 14 aa, Homo sapiens
TALSVARKLSSVNC

SEQ ID NO: 27927 - protein, 59 aa, Homo sapiens
VAGGCELSGGVCVRLESFPAVLSMDPIRSFCGKLRSLASTLDCETARLQRALDGEESGA

SEQ ID NO: 27928 - protein, 904 aa, Homo sapiens
LSVRGTARPRGPEQNAARAESGGRRSRQGAGGRRPRPEAEADREPAMSVVGLDVGSQSCYIAVARAGGIETIANEFSDRCTPSVISFGSKNRTIGVAAKNQQITHANNTVSNFKRFHGRAFNDPFIQKEKENLSYDLVPLKNGGVGIKVMYMGEEHLFSVEQITAMLLTKLKETAENSLKKPVTDCVISVPSFFTDAERRSVLDAAQIVGLNCLRLMNDMTAVALNYGIYKQDLPSLDEKPRIVVFVDMGHSAFQVSACAFNKGKLKVLGTAFDPFLGGKNFDEKLVEHFCAEFKTKYKLDAKSKIRALLRLYQECEKLKKLMSSNSTDLPLNIECFMNDKDVSGKMNRSQFEELCAELLQKIEVPLYSLLEQTHLKVEDVSAVEIVGGATRIPAVKERIAKFFGKDISTTLNADEAVARGCALQCAILSPAFKVREFSVTDAVPFPISLIWNHDSEDTEGVHEVFSRNHAAPFSKVLTFLRRGPFELEAFYSDPQGVPYPEAKIGRFVVQNVSAQKDGEKSRVKVKVRVNTHGIFTISTASMVEKVPTEENEMSSEADMECLNQRPPENPDTDKNVQQDNSEAGTQPQVQTDAQQTSQSPPSPELTSEENKIPDADKANEKKVDQPPEAKKPKIKVVNVELPIEANLVWQLGKDLLNMYIETEGKMIMQDKLEKERNDAKNAVEEYVYEFRDKLCGPYEKFICEQDHQNFLRLLTETEDWLYEEGEDQAKQAYVDKLEELMKIGTPVKVRFQEAEERPKMFEELGQRLQHYAKIAADFRNKDEKYNHIDESEMKKVEKSVNEVMEWMNNVMNAQAKKSLDQDPVVRAQEIKTKIKELNNTCEPVVTQPKPKIESPKLERTPNGPNIDKKEEDLEDKNNFGAEPPHQNGECYPNEKNSVNMDLD

SEQ ID NO: 27929 - protein, 109 aa, Homo sapiens
TQGSEDSSDDVRRVQRREKNRIAAQKSRQRQTQKADTLHLESEDLEKQNAALRKEIKQLTEELKYFTSVLNSHEPLCSVLAASTPSPPEVVYSAHAFHQPHVSSPRFQP

SEQ ID NO: 27930 - protein, 8 aa, Homo sapiens
VPVKSSCR

SEQ ID NO: 27931 - protein, 878 aa, Homo sapiens
VRVPASESAVVVQTECSLLFVWLRFHARRWLRMSSSHFASRHRKDISTEMIRTKIAHRKSLSQKENRHKEYERNRHFGLKDVNIPTLEGRILVELDETSQGLVPEKTNVKPRAMKTILGDQRKQMLQKYKEEKQLQKLKEQREKAKRGIFKVGRYRPDMPCFLLSNQNAVKAEPKKAIPSSVRITRSKAKDQMEQTKIDNESDVRAIRPGPRQTSEKKVSDKEKKVVQPVMPTSLRMTRSATQAAKQVPRTVSSTTARKPVTRAANENEPEGKVPSKGRPAKNVETKPDKGISCKVDSEENTLNSQTNATSGMNPDGVLSKMENLPEINTAKIKGKNSFAPKDFMFQPLDGLKTYQVTPMTPRSANAFLTPSYTWTPLKTEVDESQATKEILAQKCKTYSTKTIQQDSNKLPCPLGPLTVWHEEHVLNKNEATTKNLNGLPIKEVPSLERNEGRIAQPHHGVPYFRNILQSETEKLTSHCFEWDRKLELDIPDDAKDLIRTAVGQTRLLMKERFKQFEGLVDDCEYKRGIKETTCTDLDGFWDMVSFQIEDVIHKFNNLIKLEESGWQVNNNMNHNMNKNVFRKKVVSGIASKPKQDDAGRIAARNRLAAIKNAMRERIRQEECAETAVSVIPKEVDKIVFDAGFFRVESPVKLFSGLSVSSEGPSQRLGTPKSVNKAVSQSRNEMGIPQQTTSPENAGPQNTKSEHVKKTLFLSIPESRSSIEDAQCPGLPDLIEENHVVNKTDLKVDCLSSERMSLPLLAGGVADDINTNKKEGISDVVEGMELNSSITSQDVLMSSPEKNTASQNSILEEGETKISQSELFDNKSLTTECHLLDSPGLNCSNPFTQLERRHQEHARHISFGGNLITFSPLQPGEF

SEQ ID NO: 27932 - protein, 17 aa, Homo sapiens
VFSGGNDEQVILHDVER

SEQ ID NO: 27933 - protein, 17 aa, Homo sapiens
LNKSSDLRPAVNVVPER

SEQ ID NO: 27934 - protein, 17 aa, Homo sapiens
TKFGDPSSEYRRDFESR

SEQ ID NO: 27935 - protein, 49 aa, Homo sapiens
VWRRWVERAFWKFVAEFCDMSNNGPEDFISSSRKNSRQTARISSNPERR

SEQ ID NO: 27936 - protein, 35 aa, Homo sapiens
LNPKSTMEYYNKLRQHGEFQTSLSIPYSQRRRPNT

SEQ ID NO: 27937 - protein, 55 aa, Homo sapiens
KLICKVSTLRALCGRHTEKLMAFKAIYPDIVRLHFPPLYKELFTSEFEPAMQIDG

SEQ ID NO: 27938 - protein, 46 aa, Homo sapiens
LDIFTGWLRTICSASYRYHNLDQVQAKRPECYKMLRSQSKKKWKRI

SEQ ID NO: 27939 - protein, 14 aa, Homo sapiens
INVRASIALSSSLR

SEQ ID NO: 27940 - protein, 35 aa, Homo sapiens
VKARPGLLELLWRSRDPSTPQSCLLCPITEGPSWP

SEQ ID NO: 27941 - protein, 34 aa, Homo sapiens
VEVEVEAEAEAEPEAARRGARRRGTRPRSVGILN

SEQ ID NO: 27942 - protein, 158 aa, Homo sapiens
KQLEGTMANCERTFIAIKPDGVQRGLVGEIIKRFEQKGFRLVGLKFMQASEDLLKEHYVDLKDRPFFAGLVKYMHSGPVVAMVWEGLNVVKTGRVMLGETNPADSKPGTIRGDFCIQVGRNIIHGSDSVESAEKEIGLWFHPEELVDYTSCAQNWIYE

SEQ ID NO: 27943 - protein, 273 aa, Homo sapiens
KQLEGTMANCERTFIAIKPDGVQRGLVGEIIKRFEQKGFRLVGLKFMQASEDLLKEHYVDLKDRPFFAGLVKYMHSGPVVAMVWEGLNVVKTGRVMLGETNPADSKPGTIRGDFCIQVGRTMANLERTFIAIKPDGVQRGLVGEIIKRFEQKGFRLVAMKFLRASEEHLKQHYIDLKDRPFFPGLVKYMNSGPVVAMVWEGLNVVKTGRVMLGETNPADSKPGTIRGDFCIQVGRNIIHGSDSVKSAEKEISLWFKPEELVDYKSCAHDWVYE

SEQ ID NO: 27944 - protein, 41 aa, Homo sapiens
KPLLQKIASPQSQLPQPMPKKDRADKLTPDRQHWETEAIVP

SEQ ID NO: 27945 - protein, 36 aa, Homo sapiens
IPHLASLLPTSDHPTSLLRRGRMSRARPSPVRVAAL

SEQ ID NO: 27946 - protein, 27 aa, Homo sapiens
VNDTIQIDLETGKITDFIKIDTGTCVW

SEQ ID NO: 27947 - protein, 63 aa, Homo sapiens
VGRLDPSAVFPLRLQDQQVRPRGAETVRPGPQAPDGPWEGQRGGAPALRAASKEEICDTPRRG

SEQ ID NO: 27948 - protein, 43 aa, Homo sapiens
RNPGAPNSQLSDIWHTGQSREASAPSLGNLNTPASKSQGTSVL

SEQ ID NO: 27949 - protein, 50 aa, Homo sapiens
LFRFSWLLGPFLPCCSWERTKREAGIFYCLLKNLTQTWISDQIIQFISTI

SEQ ID NO: 27950 - protein, 80 aa, Homo sapiens
INTKINTKIENTGTKNTRRRRTGKSPSIATVNIKILKRNTKRRRRPNTKMEAQKSIKTNIKTETRKNEKRKRFEPLGMQK

SEQ ID NO: 27951 - protein, 167 aa, Homo sapiens
KQKTEFVVDNGLNPVWPAKPFHFQISNPEFAFLRFVVYEEDMFSDQNFLAQATFPVKGLKTGYRAVPLKNNYSEDLELASLLIKIDIFPAKQENGDLSPFSGTSLRERGSDASGQLFHGRAREGSFESRYQQPFEDFRISQEHLADHFDSRERRAPRRTRVNGDNRL

SEQ ID NO: 27952 - protein, 52 aa, Homo sapiens
LIPRFRLTYLMRSVRETKSNLQCTQRFHLLLRSPTLMVLERRCRNWEKVKGL

SEQ ID NO: 27953 - protein, 136 aa, Homo sapiens
VDILKTERLGHGYHTLEDQALYNRLRQENMHFEICPWSSYLTGAWKPDTEHAVIRLKNDQANYSLNTDDPLIFKSTLDTDYQMTKRDMGFTEEEFKRLNINAAKSSFLPEDEKRELLDLLYKAYGMPPSASAGQNL

SEQ ID NO: 27954 - protein, 51 aa, Homo sapiens
LALQITCLHFKNNLPETLPVTLALPPNGDGSNGGTNQEGEICGLNSLCLIL

SEQ ID NO: 27955 - protein, 53 aa, Homo sapiens
VGRREERAGGRRRRQTRREGATSSRREAAEPATTDPAEPPPPPRPHGGRQGHS

SEQ ID NO: 27956 - protein, 80 aa, Homo sapiens
LTHPGKAILAGGLAGGIEICITFPTEYVKTQLQLDERSHPPRYRGIGDCVRQTVRSHGVLGLYRGLSSLLYGSIPKAAVR

SEQ ID NO: 27957 - protein, 85 aa, Homo sapiens
KLRSRVQIGVVGGSDYCKIAEQLGDGDEVIEKFDYVFAENGTVQYKHGRLLSKQTIQNHLGEELLQDLINFCLSYMALLRLPKKR

SEQ ID NO: 27958 - protein, 187 aa, Homo sapiens
TVGPAAVMSVLRPLDKLPGLNTATILLVGTEDALLQQLADSMLKEDCASELKVHLAKSLPLPSSVNRPRIDLIVFVVNLHSKYSLQNTEESLRHVDASFFLGKVCFLATGAGRESHCSIHRHTVVKLAHTYQSPLLYCDLEVEGFRATMAQRLVRVLQICAGHVPGVSALNLLSLLRSSEGPSLEDL

SEQ ID NO: 27959 - protein, 41 aa, Homo sapiens
IERACFVLEKKFGIQLKEIDKEEHLYILISTPESLAGILGT

SEQ ID NO: 27960 - protein, 17 aa, Homo sapiens
VATAQTRLRSYSCASLR

SEQ ID NO: 27961 - protein, 76 aa, Homo sapiens
IYTISGDVYIGPDDAQQKIEPHHTAVLGEGDSVQVENKDPKRSHFVLIAGEPLREPVIQHGKTKMTMIFLVDFPFL

SEQ ID NO: 27962 - protein, 23 aa, Homo sapiens
VNLTGRLNKCGVISPDLMCNSKV

SEQ ID NO: 27963 - protein, 367 aa, Homo sapiens [sequence omitted]

SEQ ID NO: 27964 - protein, 4257 aa, Homo sapiens
MANPNVAGLEAGSIEDIVTQRGSRVLGSFLPEKLFKGVSQKENTGQQNAIISPTVLETSEEKTVSLTVCSAVKTEKTPQEKLRESPGSEQTPFMTAPEGKGNGGVNPEPFRATQNVFTRQLCLEHDEKLVSYLSLLRNIEMRTKQIQPLELNLAELQDLLCQAKVLERELKDLTTLVSQELECVNQIIISQPQEVPAQLLKALEKDAKNLQKSLSSVSDTWNSRLLHFQNAVEIEKTKVLNQHTQLEGRLQDLRAWVGNKNLILNSKGSNSEIDVDSLNLCLQQYEDLKQPMAERKAQLDALAFDIQFFISEHAQDLSPQQNRQMLRLLNELQRSFQDILEQTAAQVDALQGHLQQMEQEALVKTLQKQQNTCHQQLEDLCSWVGQAERALAGHQGRTTQQDLSALQKNQSDLKDLQDDIQNRATSFATVVKDIEGFMEENQTKLSPRELTALREKLHQAKEQYEALQEETRVAQKELEEAVTSALQQETEKSKAAKELAENKKKIDALLDWVTSVGSSGGQLLTNLPGMEQLSGASLEKGALDTTDGYMGVNQAPEKLDKQCEMMKARHQELLSQQQNFILATQSAQAFLDQHGHNLTPEEQQMLQQKLGELKEQYSTSLAQSEAELKQVQTLQDELQKFLQDHKEFESWLERSEKELENMHKGGSSPETLPSLLKRQGSFSEDVISHKGDLRFVTISGQKVLDMENSFKEGKEPSEIGNLVKDKLKDATERYTALHSKCTRLGSHLNMLLGQYHQFQNSADSLQAWMQACEANVEKLLSDTVASDPGVLQEQLATTKQLQEELAEHQVPVEKLQKVARDIMEIEGEPAPDHRHVQETTDSILSHFQSLSYSLAERSSLLQKAIAQSQSVQESLESLLQSIGEVEQNLEGKQVSSLSSGVIQEALATNMKLKQDIARQKSSLEATREMVTRFMETADSTTAAVLQGKLAEVSQRFEQLCLQQQEKESSLKKLLPQAEMFEHLSGKLQQFMENKSRMLASGNQPDQDITHFFQQIQELNLEMEDQQENLDTLEHLVTELSSCGFALDLCQHQDRVQNLRKDFTELQKTVKEREKDASSCQEQLDEFRKLVRTFQKWLKETEGSIPPTETSMSAKELEKQIEHLKSLLDDWASKGTLVEEINCKGTSLENLIMEITAPDSQGKTGSILPSVGSSVGSVNGYHTCKDLTEIQCDMSDVNLKYEKLGGVLHERQESLQAILNRMEEVHKEANSVLQWLESKEEVLKSMDAMSSPTKTETVKAQAESNKAFLAELEQNSPKIQKVKEALAGLLVTYPNSQEAENWKKIQEELNSRWERATEVTVARQRQLEESASHLACFQAAESQLRPWLMEKELMMGVLGPLSIDPNMLNAQKQQVQFMLKEFEARRQQHEQLNEAAQGILTGPGDVSLSTSQVQKELQSINQKWVELTDKLNSRSSQIDQAIVKSTQYQELLQDLSEKVRAVGQRLSVQSAISTQPEAVKQQLEETSEIRSDLEQLDHEVKEAQTLCDELSVLIGEQYLKDELKKRLETVALPLQGLEDLAADRINRLQAALASTQQFQQMFDELRTWLDDKQSQQAKNCPISAKLERLQSQLQENEEFQKSLNQHSGSYEVIVAEGESLLLSVPPGEEKRTLQNQLVELKNHWEELSKKTADRQSRLKDCMQKAQKYQWHVEDLVPWIEDCKAKMSELRVTLDPVQLESSLLRSKAMLNEVEKRRSLLEILNSAADILINSSEADEDGIRDEKAGINQNMDAVTEELQAKTGSLEEMTQRLREFQESFKNIEKKVEGAKHQLEIFDALGSQACSNKNLEKLRAQQEVLQALEPQVDYLRNFTQGLVEDAPDGSDASQLLHQAEVAQQEFLEVKQRVNSGCVMMENKLEGIGQFHCRVREMFSQLADLDDELDGMGAIGRDTDSLQSQIEDVRLFLNKIHVLKLDIEASEAECRHMLEEEGTLDLLGLKRELEALNKQCGKLTERGKARQEQLELTLGRVEDFYRKLKGLNDATTAAEEAEALQWVVGTEVEIINQQLADFKMFQKEQVDPLQMKLQQVNGLGQGLIQSAGKDCDVQGLEHDMEEINARWNTLNKKVAQRIAQLQEALLHCGKFQDALEPLLSWLADTEELIANQKPPSAEYKVVKAQIQEQKLLQRLLDDRKATVDMLQAEGGRIAQSAELADREKITGQLESLESRWTELLSKAAARQKQLEDILVLAKQFHETAEPISDFLSVTEKKLANSEPVGTQTAKIQQQIIRHKALEEDIENHATDVHQAVKIGQSLSSLTSPAEQGVLSEKIDSLQARYSEIQDRCCRKAALLDQALSNARLFGEDEVEVLNWLAEVEDKLSSVFVKDFKQDVLHRQHADHLALNEEIVNRKKNVDQAIKNGQALLKQTTGEEVLLIQEKLDGIKTRYADITVTSSKALRTLEQARQLATKFQSTYEELTGWLREVEEELATSGGQSPTGEQIPQFQQRQKELKKEVMEHRLVLDTVNEVSRALLELVPWRAREGLDKLVSDANEQYKLVSDTIGQRVDEIDAAIQRSQQYEQAADAELAWVAETKRKLMALGPIRLEQDQTTAQLQVQKAFSIDIIRHKDSMDELFSHRSEIFGTCGEEQKTVLQEKTESLIQQYEAISLLNSERYARLERAQVLVNQFWETYEELSPWIEETRALIAQLPSPAIDHEQLRQQQEEMRQLRESIAEHKPHIDKLLKIGPQLKELNPEEGEMVEEKYQKAENMYAQIKEEVRQRALALDEAVSQSTQITEFHDKIEPMLETLENLSSRLRMPPLIPAEVDKIRECISDNKSATVELEKLQPSFEALKRRGEELIGRSQGADKDLAAKEIQDKLDQMVFFWEDIKARAEEREIKFLDVLELAEKFWYDMAALLTTIKDTQDIVHDLESPGIDPSIIKQQVEAAETIKEETDGLHEELEFIRILGADLIFACGETEKPEVRKSIDEMNNAWENLNKTWKERLEKLEDAMQAAVQYQDTLQAMFDWLDNTVIKLCTMPPVGTDLNTVKDQLNEMKEFKVEVYQQQIEMEKLNHQGELMLKKATDETDRDIIREPLTELKHLWENLGEKIAHRQHKLEGALLALGQFQHALEELMSWLTHTEELLDAQRPISGDPKVIEVELAKHHVLKNDVLAHQATVETVNKAGNELLESSAGDDASSLRSRLEAMNQCWESVLQKTEEREQQLQSTLQQAQGFHSEIEDFLLELTRMESQLSASKPTGGLPETAREQLDTHMELYSQLKAKEETYNQLLDKGRLMLLSRDDSGSGSKTEQSVALLEQKWHVVSSKMEERKSKLEEALNLATEFQNSLQEFINWLTLAEQSLNIASPPSLILNTVLSQIEEHKVFANEVNAHRDQIIELDQTGNQLKFLSQKQDVVLIKNLLVSVQSRWEKVVQRSIERGRSLDDARKRAKQFHEAWKKLIDWLEDAESHLDSELEISNDPDKIKLQLSKHKEFQKTLGGKQPVYDTTIRTGRALKEKTLLPEDSQKLDNFLGEVRDKWDTVCGKSVERQHKLEEALLFSGQFMDALQALVDWLYKVEPQLAEDQPVHGDLDLVMNLMDAHKVFQKELGKRTGTVQVLKRSGRELIENSRDDTTWVKGQLQELSTRWDTVCKLSVSKQSRLEQALKQAEVFRDTVHMLLEWLSEAEQTLRFRGALPDDTEALQSLIDTHKEFMKKVEEKRVDVNSAVAMGEVILAVCHPDCITTIKHWITIIRARFEEVLTWAKQHQQRLETALSELVANAELLEELLAWIQWAETTLIQRDQEPIPQNIDRVKALIAEHQTFMEEMTRKQPDVDRVTKTYKRKNIEPTHAPFIEKSRSGGRKSLSQPTPPPMPILSQSEAKNPRINQLSARWQQVWLLALERQRKLNDALDRLEELKEFANFDFDVWRKKYMRWMNHKKSRVMDFFRRIDKDQDGKITRQEFIDGILASKFPTTKLEMTAVADIFDRDGDGYIDYYEFVAALHPNKDAYRPTTDADKIEDEVTRQVAQCKCAKRFQVEQIGENKYRFFLGNQFGDSQQLRLVRILRSTVMVRVGGGWMALDEFLVKNDPCRARGRTNIELREKFILPEGASQGMTPFRSRGRRSKPSSRAASPTRSSSSASQSNHSCTSMPSSPATPASGTKVIPSSGSKLKRPTPTFHSSRTSLAGDTSNSSSPASTGAKTNRADPKKSASRPGSRAGSRAGSRASSRRGSDASDFDLLETQSACSDTSESSAAGGQGNSRRGLNKPSKIPTMSKKTTTASPRTPGPKR

SEQ ID NO: 27965 - protein, 457 aa, Homo sapiens [sequence omitted]

SEQ ID NO: 27966 - protein, 67 aa, Homo sapiens
MFLAVQHDCRPMDKSAGSGHKSEEKREKMKRTLLKDWKTRLSYFLQNSSTPGKPKTGKKSKQQAFIK

SEQ ID NO: 27967 - protein, 38 aa, Homo sapiens
MRSNKPSPSRQRDTIPLKKRAPRRNHNFSKRDAQVIEL

SEQ ID NO: 27968 - protein, 29 aa, Homo sapiens
MFRLPQTGISSLSEELLHFIWEQKTAGSC

SEQ ID NO: 27969 - protein, 52 aa, Homo sapiens [sequence omitted]

SEQ ID NO: 27970 - protein, 471 aa, Homo sapiens
MAFLQKIEALVKDMQNPETGVRMQNQRVLVTSVPHAMTGSDVLQWIVQRLWISSLEAQNLGNFIVRYGYIYPLQDPKNLILKPDGSLYRFQTPYFWPTQQWPAEDTDYAIYLAKRNIKKKGILEEYEKENYNFLNQKMNYKWDFVIMQAKEQYRAGKERNKADRYALDCQEKAYWLVHRCPPGMDNVLDYGLDRVTNPNEVKKQTVVAVKKEIMYYQQALMRSTVKSSVSLGGIVKYSEQFSSNDAIMSGCLPSNPWITDDTQFWDLNAKLVEIPTKMRVERWAFNFSELIRDPKGRQSFQYFLKKEFSGENLGFWEACEDLKYGDQSKVKEKAEEIYKLFLAPGARRWINIDGKTMDITVKGLKHPHRYVLDAAQTHIYMLMKKDSYARYLKSPIYKDMLAKAIEPQETTKKSSTLPFMRRHLRSSPSPVILRQLEEEAKAREAANTVDITQVMSKLDRRSQLQKELPPK

SEQ ID NO: 27971 - protein, 217 aa, Homo sapiens
MIRNGRGAAGGAEQPGPGGRRAVRVWCDGCYDMVHYGHSNQLRQARAMGDYLIVGVHTDEEIAKHKGPPVFTQEERYKMVQAIKWVDEVVPAAPYVTTLETLDKYNCDFCVHGNDITLTVDGRDTYEEVKQAGRYRECKRTQGVSTTDLVGRMLLVTKAHHSSQVSRRRNPRGPWVEVSRGKEGHLPALSGSSCPLLPIPSRFWGGHAGRAGPSALL

SEQ ID NO: 27972 - protein, 23 aa, Homo sapiens
MWQPRAMALAVRVVYCIFSSRRS

SEQ ID NO: 27973 - protein, 36 aa, Homo sapiens
MLFGGGQERNFRPGTENTPMIAGLGKVSPGELEEMS

SEQ ID NO: 27974 - protein, 852 aa, Homo sapiens
MNDVEELTALLRSAGEYEERKLIRAAIRRVRAQEIEAATLAGRLYSGRPNSGSREDSKGLAAHRLEQCEVPEREEQEQQAEVSKPTPTPEGTSQDVTTVTLLLRAPPGSTSSSPASPSSSPTPASPEPPLEPAEAQCLTAEVPGSPEPPPSPPKTTSPEPQESPTLPSTEGQVVNKLLSGPKETPAAQSPTRGPSDTKRADVAGPRPCQRSLSVLSPRQPAQNRESTPLASGPSSFQRAGSVRDRVHKFTSDSPMAARLQDGTPQAALSPLTPARLLGPSLTSTTPASSSSGSSSRGPSDTSSRFSKEQRGVAQPLAQLRSCPQEEGPRGRGLAARPLENRAGGPVARSEEPGAPLPVAVGTAEPGGSMKTTFTIEIKDGRGQASTGRVLLPTGNQRAELTLGLRAPPTLLSTSSGGKSTITRVNSPGTLARLGSVTHVTSFSHAPPSSRGGCSIKMEAEPAEPLAAAVEAANGAEQTRVNKAPEGRSPLSAEELMTIEDEGVLDKMLDQSTDFEERKLIRAALRELRQRKRDQRDKERERRLQEARGRPGEGRGNTATETTTRHSQRAADGSAVSTVTKTERLVHSNDGTRTARTTTVESSFVRRSENGSGSTMMQTKTFSSSSSSKKMGSIFDREDQASPRAGSLAALEKRQAEKKKELMKAQSLPKTSASQARKAMIEKLEKEGAAGSPGGPRAAVQRSTSFGVPNANSIKQMLLDWCRAKTRGYEHVDIQNFSSSWSDGMAFCALVHNFFPEAFDYGQLSPQNRRQNFEVAFSSAETHADCPQLLDTEDMVRLREPDWKMLVDCVPLVEVDDMMIMGKKPDPKCVFTYVQSLYNHLRRHELRLRGKNV

SEQ ID NO: 27975 - protein, 12 aa, Homo sapiens
MSRASRKTLRKS

SEQ ID NO: 27976 - protein, 177 aa, Homo sapiens [sequence omitted]

SEQ ID NO: 27977 - protein, 896 aa, Homo sapiens
MKLTLLQKKIDNISLTVNDVRNTYSSLEGKVSEDKSREFQSLLKGLKSKSINVLIRDIVREQFKIFQNDMQETVAQLFKTVSSLSEDLESTRQIIQKVNESVVSIAAQQKFVLVQENRPTLTDIVELRNHIVNVRQEMTLTCEKPIKELEVKQTHLEGALEQEHSRSILYYESLNKTLSKLKEVHEQLLSTEQVSDQKNAPAAESVSNNVTEYMSTLHENIKKQSLMMLQMFEDLHIQESKINNLTVSLEMEKESLRGECEDMLSKCRNDFKFQLKDTEENLHVLNQTLAEVLFPMDNKMDKMSEQLNDLTYDMEILQPLLEQGASLRQTMTYEQPKEAIVIRKKIENLTSAVNSLNFIIKELTKRHNLLRNEVQGRDDALERRINEYALEMEDGLNKTMTIINNAIDFIQDNYALKETLSTIKDNSEIHHKCTSDMETILTFIPQFHRLNDSIQTLVNDNQRYNFVLQVAKTLAGIPRDEKLNQSNFQKMYQMFNETTSQVRKYQQNMSHLEEKLLLTTKISKNFETRLQDIESKVTQTLIPYYISVKKGSVVTNERDQALQLQVLNSRFKALEAKSIHLSINFFSLNKTLHEVLTMCHNASTSVSELNATIPKWIKHSLPDIQLLQKGLTEFVEPIIQIKTQAALSNLTCCIDRSLPGSLANVVKSQKQVKSLPKKINALKKPTVNLTTVLIGRTQRNTDNIIYPEEYSSCSRHPCQNGGTCINGRTSFTCACRHPFTGDNCTIKLVEENALAPDFSKGSYRYAPMVAFFASHTYGMTIPGPILFNNLDVNYGASYTPRTGKFRIPYLGVYVFKYTIESFSAHISGFLVVDGIDKLAFESENINSEIHCDRVLTGDALLELNYGQEVWLRLAKGTIPAKFPPVTTFSGYLLYRT

SEQ ID NO: 27978 - protein, 115 aa, Homo sapiens
MELSEGSQKHASLQKSIEKAKIGRCETEERTRLAKELSSLRDQREQLKAEVEKYKDCDPQVVEEIRQANKVAKEAANRWTDNIFAIKSWAKRKFGFEENKIDRTFGIPEDFDYID

SEQ ID NO: 27979 - protein, 355 aa, Homo sapiens
MLLTVTEVEGLAEGTEDLDGELLPTPSAHPSVVMDIAYYQALSAERLQTDAAKIHPSTSASQEFYEPGLEPSATAKLGDLQRSWETLKNVISEKQRTLYEALERQQKYQDSLQSISTKMEAIELKLSESPEPGRSPESQMAEHQSFLQALMDEILMLQDEINELQSSLAEELVSESCEADPAEQLALQSTLTVLAERMSTIRMKASGKRQLLEEKLNDQLEEQRQEQALQRYRCEADELDSWLLSTKATLDTALSPPKEPMDMEAQLMDCQNMLVEIEQKVVALSELSVHNENLLLEGKAHTKDEAEQLAGKLRRLKGSLLELQRALHDKQLNMQVRVPAAGPQLKVGTLFTCSF

SEQ ID NO: 27980 - protein, 30 aa, Homo sapiens [sequence omitted]

SEQ ID NO: 27981 - protein, 317 aa, Homo sapiens [sequence omitted]

SEQ ID NO: 27982 - protein, 47 aa, Homo sapiens
MAKIKARDLRGKKKEELLKQLDDLKVELSQLRVAKVTGGAASKLSKM

SEQ ID NO: 27983 - protein, 161 aa, Homo sapiens [sequence omitted]

SEQ ID NO: 27984 - protein, 75 aa, Homo sapiens
KPSCTSSQVLGLQQHARLPKPKAKTLPEFIKDGSSTYSKIPAHRKGHRPAKPQRQDLDDDEHDYEEILEQFQKTI

SEQ ID NO: 27985 - protein, 28 aa, Homo sapiens
TVGKKTEDHTKREEIQISSQSAHCDSGR

SEQ ID NO: 27986 - protein, 15 aa, Homo sapiens
VRGAGGARVETKALM

SEQ ID NO: 27987 - protein, 15 aa, Homo sapiens
VVFPGRGLSIALRMC

SEQ ID NO: 27988 - protein, 44 aa, Homo sapiens
LSGDQSQPGDSGSVRDRIEGLGPRAPLTSNGEETEKQERRQHQG

SEQ ID NO: 27989 - protein, 8 aa, Homo sapiens
LQGHSTMC

SEQ ID NO: 27990 - protein, 37 aa, Homo sapiens
MEATTAGVGRLEEEALRRKERLKALREKTGRKVRSVE

SEQ ID NO: 27991 - protein, 20 aa, Homo sapiens
IVALATDREAVAEDTCHGRL

SEQ ID NO: 27992 - protein, 24 aa, Homo sapiens
IGWRLGTEDALVFFCVAVQNDGSS

SEQ ID NO: 27993 - protein, 53 aa, Homo sapiens
MGPWSCKIRCRHSSPIETCPDVLRYGLKRWVSAQQKHYLCQLECWRLWIGWCH

SEQ ID NO: 27994 - protein, 25 aa, Homo sapiens
KATQEENRELRSRCEELHGKNLELG

SEQ ID NO: 27995 - protein, 105 aa, Homo sapiens
LGPAALRDSEEKLAPGKNTLQYPRVDADLSTWVKETPTSRGAKCPRTPSSCRPAGKSTRRNTRTLPSISRNSPRSVRRDGRPCLQRRSRSLKIWQKVTKLAMTGR

SEQ ID NO: 27996 - protein, 95 aa, Homo sapiens
TSGPRGVIGGEEPPRLGLACRKRARSSPWRRRAPPRTDMRPSPKASRRPGLARAPRRGLEARPRRPRAGIRTAPRATRSTPARTRRTREKCSLVA

SEQ ID NO: 27997 - protein, 19 aa, Homo sapiens
LAAVPAAVHWVKNDNQHQP

SEQ ID NO: 27998 - protein, 323 aa, Homo sapiens
LAYTLGVKQLIVGVNKMDSTEPPYSQKREEEIVKEVSTYIKKIGYNPDTVAFVPISGWNGDNMLEPSANMPWLKGWKATRKDGSASGTMLLEALDCILPPTHPTDKPLRLPLQDVYKIGGIGTVPVGRVETGVLKPGVVVTFAPVNITTEVKSVEMHHEALSEALPGDNVGFNVKNVSVKDVRRGNVAGDSKNDPPMETADFIAQVIILNHPGQISAGYAPILDCHAAHIACKFAELKEKIDRGSGKKLEDGPKFLKSGDAAIVDMVPGKPIVESFSDYPPLGHFAVRDMRQTVAVGVIKAVDKKAAGGGKVTKSAQTAQKAK

SEQ ID NO: 27999 - protein, 15 aa, Homo sapiens
VPSSSLQRHTLSPPP

SEQ ID NO: 28000 - protein, 157 aa, Homo sapiens
VVSYTLKDIHDDQDYLHSLGKARTAQVQKDARIGEAEAKRDAGIREAKAKQEKVSAQYLSEIEMAKAQRDYELKKAAYDIEVNTRRAQADLAYQLQVAKTKQQIEEQRVQVQVVERAQQVAVQEQEIARREKELEARVRKPAEAERYKLERLAEAEK

SEQ ID NO: 28001 - protein, 93 aa, Homo sapiens
LQNHTFLHTVYCQDGSPSVGLSEAYDEDQLFFFDFSQNTRVPRLPEFADWAQEQGDAPAILFDKEFCEWMIQQIGPKLDGKIPVSRGQEFSGE

SEQ ID NO: 28002 - protein, 61 aa, Homo sapiens
IASAKEVLESCVLAARDPAWVGRCFCVGVWPFHQSCGGPRDFLPVLLGFQVVAPSSEKPKD

SEQ ID NO: 28003 - protein, 68 aa, Homo sapiens
IHPDDELVLEDELQRIKLKGTIDVSKLVTGTVLAVFGSVRDDGKFLVEDYCFADLAPQKPAPPLDTDR

SEQ ID NO: 28004 - protein, 55 aa, Homo sapiens
RQRPRGAEERRHGPSRVTREETRDTHSLAATGSRGGLGRPLPHQSPDPWGFRGRS

SEQ ID NO: 28005 - protein, 44 aa, Homo sapiens
ILRNAVPAASLRTAGPCPSVGRRSAVPSAPQVLFLIPNKLARGL

SEQ ID NO: 28006 - protein, 36 aa, Homo sapiens
LKSVCEMAENGVKTITSVAMTSALPIIQKLEPQSEF

SEQ ID NO: 28007 - protein, 23 aa, Homo sapiens
RMGWRRVRVRCLALRAAGHGGLD

SEQ ID NO: 28008 - protein, 56 aa, Homo sapiens
IHTSEKLKRQGKGGLTEHRPSIRTPQRPFAPRRKPHFSNLHSTLPSPKPEDAQGGT

SEQ ID NO: 28009 - protein, 21 aa, Homo sapiens
VRISDLGLACDFSKKKPHASV

SEQ ID NO: 28010 - protein, 6 aa, Homo sapiens
VSAFPA

SEQ ID NO: 28011 - protein, 671 aa, Homo sapiens
IELACSSWVFCGFLRYWSQAYTPATMSKGPAVGIDLGTTYSCVGVFQHGKVEIIANDQGNRTTPSYVAFTDTERLIGDAAKNQVAMNPTNTVFDAKRLIGRRFDDAVVQSDMKHWPFMVVNDAGRPKVQVEYKGETKSFYPEEVSSMVLTKMKEIAEAYLGKTVTNAVVTVPAYFNDSQRQATKDAGTIAGLNVLRIINEPTAAAIAYGLDKKVGAERNVLIFDLGGGTFDVSILTIEDGIFEVKSTAGDTHLGGEDFDNRMVNHFIAEFKRKHKKDISENKRAVRRLRTACERAKRTLSSSTQASIEIDSLYEGIDFYTSITRARFEELNADLFRGTLDPVEKALRDAKLDKSQIHDIVLVGGSTRIPKIQKLLQDFFNGKELNKSINPDEAVAYGAAVQAAILSGDKSENVQDLLLLDVTPLSLGIETAGGVMTVLIKRNTTIPTKQTQTFTTYSDNQPGVLIQVYEGERAMTKDNNLLGKFELTGIPPAPRGVPQIEVTFDIDANGILNVSAVDKSTGKENKITITNDKGRLSKEDIERMVQEAEKYKAEDEKQRDKVSSKNSLESYAFNMKATVEDEKLQGKINDEDKQKILDKCNEIINWLDKNQTAEKEEFEHQQKELEKVCNPIITKLYQSAGGMPGGMPGGFPGGGAPPSGGASSGPTIEEVD

SEQ ID NO: 28012 - protein, 350 aa, Homo sapiens
RLADTFVSLLLSARGRRRRSIVKVSLHPAVMSKSESPKEPEQLRKLFIGGLSFETTDESLRSHFEQWGTLTDCVVMRDPNTKRSRGFGFVTYATVEEVDAAMNARPHKVDGRVVEPKRAVSREDSQRPGAHLTVKKIFVGGIKEDTEEHHLRDYFEQYGKIEVIEIMTDRGSGKKRGFAFVTFDDHDSVDKIVIQKYHTVNGHNCEVRKALSKQEMASASSSQRGRSGSGNFGGGRGGGFGGNDNFGRGGNFSGRGGFGGSRGGGGYGGSGDGYNGFGNDGSNFGGGGSYNDFGNYNNQSSNFGPMKGGNFGGRSSGPYGGGGQYFAKPRNQGGYGGSSSSSSYGSGRRF

SEQ ID NO: 28013 - protein, 545 aa, Homo sapiens
IHLCAELLGTMASLSLAPVNIFKAGADEERAETARLTSFIGAIAIGDLVKSTLGPKGMDKILLSSGRDASLMVTNDGATILKNIGVDNPAAKVLVDMSRVQDDEVGDGTTSVTVLAAELLREAESLIAKKIHPQTIIAGWREATKAAREALLSSAVDHGSDEVKFRQDLMNIAGTTLSSKLLTHHKDHFTKLAVEAVLRLKGSGNLEAIHIIKKLGGSLADSYLDEGFLLDKKIGVNQPKRIENAKILIANTGMDTDKIKIFGSRVRVDSTAKVAEIEHAEKEKMKEKVERILKHGINCFINRQLIYNYPEQLFGAAGVMAIEHADFAGVERLALVTGGEIASTFDHPELVKLGSCKLIEEVMIGEDKLIHFSGVALGEACTIVLRGATQQILDEAERSLHDALCVLAQTVKDSRTVYGGGCSEMLMAHAVTQLANRTPGKEAVAMESYAKALRMLPTIIADNAGYDSADLVAQLRAAHSEGNTTAGLDMREGTIGDMAILGITESFQVKRQVLLSAAEAAEVILRVDNIIKAAPRKRVPDHHPC

SEQ ID NO: 28014 - protein, 45 aa, Homo sapiens
LTTACGWEGRQRRRRLRGNEAAVVVVGRCRARTSNRSKLSLRTWS

SEQ ID NO: 28015 - protein, 481 aa, Homo sapiens
RHLGPDTMRRVVRQSKFRHVFGQAVKNDQCYDDIRVSRVTWDSSFCAVNPRFVAIIIEASGGGAFLVLPLHKTGRIDKSYPTVCGHTGPVLDIDWCPHNDQVIASGSEDCTVMVWQIPENGLTLSLTEPVVILEGHSKRVGIVAWHPTARNVLLSAGCDNAIIIWNVGTGEALINLDDMHSDMIYNVSWNRNGSLICTASKDKKVRVIDPRKQEIVAEKEKAHEGARPMRAIFLADGNVFTTGFSRMSERQLALWNPKNMQEPIALHEMDTSNGVLLPFYDPDTSIIYLCGKGDSSIRYFEITDESPYVHYLNTFSSKEPQRGMGYMPKRGLDVNKCEIARFFKLHERKCEPIIMTVPRKSDLFQDDLYPDTAGPEAALEAEEWFEGKNADPILISLKHGYIPGKNRDLKVVKKNILDSKPTANKKCDLISIPKKTTDTASVQNEAKLDEILKEIKSIKDTICNQDERISKLEQQMAKIAA

SEQ ID NO: 28016 - protein, 18 aa, Homo sapiens
KMETEGKSVKGMGERTCP

SEQ ID NO: 28017 - protein, 138 aa, Homo sapiens
ILVPRSLHSLLFIPFLQKCPAKPQKPSLLQSRSCRSPRLRQGLEQNLTVMNQYQSLKNRIPPRQPHNKPSWRQQLKLMKNQSVKQNRVGVKRRHGRLCPNWVFGRLQELLESLSGNLRISSLSSQNQMSTRALLQILT

SEQ ID NO: 28018 - protein, 22 aa, Homo sapiens
VDKKAAGAGKVTRFAQKSQKAK

SEQ ID NO: 28019 - protein, 53 aa, Homo sapiens
LGASKRRALGNNFYEYYVDDPPRIVLDKLERRGFRVLSMTGVGQTLVWCLHKE

SEQ ID NO: 28020 - protein, 404 aa, Homo sapiens
LPSPSLMALLRRPTVSSDLENIDTGVNSKVKSHVTIRRTVLEEIGNRVTTRAAQVAKKAQNTKVPVQPTKTTNVNKQLKPTASVKPVQMEKLAPKGPSPTPEDVSMKEENLCQAFSDALLCKIEDIDNEDWENPQLCSDYVKDIYQYLRQLEVLQSINPHFLDGRDINGRMRAILVDWLVQVHSKFRLLQETLYMCVGIMDRFLQVQPVSRKKLQLVGITALLLASKYEEMFSPNIEDFVYITDNAYTSSQIREMETLILKELKFELGRPLPLHFLRRASKAGEVDVEQHTLAKYLMELTLIDYDMVHYHPSKVAAAASCLSQKVLGQGKWNLKQQYYTGYTENEVLEVMQHMAKNVVKVNENLTKFIAIKNKYASSKLLKISMIPQLNSKAVKDLASPLIGRS

SEQ ID NO: 28021 - protein, 451 aa, Homo sapiens
IFRVSPGFRIAMIIPSLEELDSLKYSDLQNLAKSLGLRANLRATKLLKALKGYIKHEARKGNENQDESQTSASSCDETEIQISNQEEAERQPLGHVTKTRRRCKTVRVDPDSQQNHSEIKISNPTEFQNHEKQESQDLRATAKVPSPPDEHQEAENAVSSGNRDSKVPSEGKKSLYTDESSKPGKNKRTAITTPNFKKLHEAHFKEMESIDQYIERKKKHFEEHNSMNELKQPINKGGVRTPVPPRGRLSVASTPISQRRSQGRSCGPASQSTLGLKGSLKRSAISAAKTGVRFSAATKDNEHKRSLTKTPARKSAHVTVSGGTPKGEAVLGTHKLKTITGNSAAVITPFKLTTEATQTPVSNKKPVFDLKASLSRPLNYEPHKGKLKPWGQSKENNYLNQHVNRINFYKKTYKQPHLQTKEEQRKKREQERKEKKAKVLGMRRGLILAED

SEQ ID NO: 28022 - protein, 40 aa, Homo sapiens
LRQWLLAQQLHAPWLRISSSLQRSPSRSAPEDLSSHVEAP

SEQ ID NO: 28023 - protein, 57 aa, Homo sapiens
VERRRPSPQPSPRDQQSSSSERGSRRGQRGDSRSPSHKRRRETPSPRPMRHRSSRSP

SEQ ID NO: 28024 - protein, 6 aa, Homo sapiens
ISLRSL

SEQ ID NO: 28025 - protein, 33 aa, Homo sapiens
VRPDAISRSCAGPARLLVPGARVNARPRPRSPD

SEQ ID NO: 28026 - protein, 43 aa, Homo sapiens
VALVAAVAEVEVEVEAEAEAEPEAARRGARRRGTRPRSVGILN

SEQ ID NO: 28027 - protein, 249 aa, Homo sapiens
TALESTRVRELPGGAMSCINLPTVLPGSPSKTRGQIQVILGPMFSGKSTELMRRVRRFQIAQYKCLVIKYAKDTRYSSSFCTHDRNTMEALPACLLRDVAQEALGVAVIGIDEGQFFPDIVEFCEAMANAGKTVIVAALDGTFQRKPFGAILNLVPLAESVVKLTAVCMECFREAAYTKRLGTEKEVEVIGGADKYHSVCRLCYFKKASGQPAGPDNKENCPVPGKPGEAVAARKLFAPQQILQCSPAN

SEQ ID NO: 28028 - protein, 234 aa, Homo sapiens
REPVPSVGALGQGSPDSMSVGFIGAGQLAFALAKGFTAAGVLAAHKIMASSPDMDLATVSALRKMGVKLTPHNKETVQHSDVLFLAVKPHIIPFILDEIGADIEDRHIVVSCAAGVTISSIEKKLSAFRPAPRVIRCMTNTPVVVREGATVYATGTHAQVEDGRLMEQLLSSVGFCTEVEEDLIDAVTGLSGSGPAYAFTALDALADGGVKMGLPRRLAVRLGAQALLGAAVHG

SEQ ID NO: 28029 - protein, 25 aa, Homo sapiens
LSLPGAPAAVAVESPWKCRKRHSAS

SEQ ID NO: 28030 - protein, 311 aa, Homo sapiens
LFPSINVHKVNLNTIKRCLLIDYNPDSQELDFRHYSIKVVPVGASRGMKKLLQEKFPNMSRLQDISELLATGAGLSESEAEPDGDHNITELPQAVAGRGNMRAQQSAVRLTEIGPRMTLQLIKVQEGVGEGKVMFHSFVSKTEEELQAILEAKEKKLRLKAQRQAQQAQNVQRKQEQREAHRKKSLEGMKKARVGGSDEEASGIPSRTASLELGEDDDEQEDDDIEYFCQAVGEAPSEDLFPEAKQKRLAKSPGRKRKRWEMDRGRGRLCDQKFPKTKDKSQGAQARRGPRGASRDGGRGRGRGRPGKRVA

SEQ ID NO: 28031 - protein, 12 aa, Homo sapiens
RMPTGRTTTNTS

SEQ ID NO: 28032 - protein, 231 aa, Homo sapiens
VVCLGEVRWCAFSLGFGLDGGPGLPSFHERRRGSGANMPVARSWVCRKTYVTPRRPFEKSRLDQELKLIGEYGLRNKREVWRVKFTLAKIRKAARELLTLDEKDPRRLFEGNALLRRLVRIGVLDEGKMKLDYILGLKIEDFLERRLQTQVFKLGLAKSIHHARVLIRQRHIRVRKQVVNIPSFIVRLDSQKHIDFSLRSPYGGGRPGRVKRKNAKKGQGGAGAGDDEEED

SEQ ID NO: 28033 - protein, 56 aa, Homo sapiens
VSGAKEEDEEKQSKGTQGNRSSSLRERPSTRPPRAAMSPAPRCCLERGGTWREAAP

SEQ ID NO: 28034 - protein, 21 aa, Homo sapiens
ISRDPLELHVSAPRTSNPRRS

SEQ ID NO: 28035 - protein, 130 aa, Homo sapiens
IRVDKSAADGPRVFRVVDSMEDEVQRRLQLVRGGQAEKLGEKERSELRKRKLLAEVTLKTYWVSKGSAFSTSISKQETELSPEMISSGSWRDRPFKPYNFLAHGVLPDSGHLHPLLKVRSQFRQIFLEMG

SEQ ID NO: 28036 - protein, 46 aa, Homo sapiens
RPSPLRPFPSRVPPACLTNCPTKSPTSAWLPGDARPWTLLRTRCRA

SEQ ID NO: 28037 - protein, 52 aa, Homo sapiens
RERIAEPRAARRASAGNQGDAPGTADNLSAFQEQPTRDLTCHLGSPTQWRWL

SEQ ID NO: 28038 - protein, 6 aa, Homo sapiens
IAAVGG

SEQ ID NO: 28039 - protein, 39 aa, Homo sapiens
LQGQSGADMDKRVKKLPLMALSTTMAESFKELDPDSSMG

SEQ ID NO: 28040 - protein, 187 aa, Homo sapiens
RRALDRQGGLGCASLRSHCREMAQRLLLRRFLASVISRKPSQGQWPPLTSRALQTPQCSPGGLTVTPNPARTIYTTRISLTTFNIQDGPDFQDRVVNSETPVVVDFHAQWCGPCKILGPRLEKMVAKQHGKVVMAKVDIDDHTDLAIEYEVSAVPTVLAMKNGDVVDKFVGIKDEDQLEAFLKKLIG

SEQ ID NO: 28041 - protein, 56 aa, Homo sapiens
LRDIIREYTDVYPEIIERACFVLEKKFGIQLKEIDKEEHLYILISTPESLAGILGT

SEQ ID NO: 28042 - protein, 201 aa, Homo sapiens
RMAKGDPKKPKGKMSAYAFFVQTCREEHKKKNPEVPVNFAEFSKKCSERWKTMSGKEKSKFDEMAKADKVRYDREMKDYGPAKGGKKKKDPNAPKRPPSGFFLFCSEFRPKIKSTNPGISIGDVAKKLGEMWNNLNDSEKQPYITKAAKLKEKYEKDVADYKSKGKFDGAKGPAKVARKKVEEEDEEEEEEEEEEEEEEDE

SEQ ID NO: 28043 - protein, 19 aa, Homo sapiens
MEVAAGTERQLRWQLLSSR

SEQ ID NO: 28044 - protein, 290 aa, Homo sapiens
MFQYGSTHGKFHGTVKAENRKLVITGNLITIFQERDPSKIKWGDAGTEYSVESTSIFTIMEKSGAHLQGGAKRVILSAPSANTLMFVMGVTHENYDSSLKIISNASCTMNCLAPLAKVIRDNFGIMEGLMTTVHAVPATQKTVDGPSRRLWCDSHGALQNIIPAPSDAAKAVAKVIPELNGKLTGMAFCVPTANLSVVDLTCCLEKPAKYDDIKKVVKQVSEGPLKGILGYTEYQLVSSDFNSDTHSSTFDAGASIALNDHFFKLISWYDNEFGYSNRVMDLMAHMSSKE

SEQ ID NO: 28045 - protein, 43 aa, Homo sapiens [sequence omitted]

SEQ ID NO: 28046 - protein, 74 aa, Homo sapiens [sequence omitted]

SEQ ID NO: 28047 - protein, 44 aa, Homo sapiens
MAWREDKSHNQFCDMSNNGPEDFISSSRKNSRQTARISSNPERR

SEQ ID NO: 28048 - protein, 65 aa, Homo sapiens
MPQESRLLQETHQAWRPSTGPSPDTAVLASASWRCRGAQFPQLLGEGQEGWSQSALPLLLTAEIK

SEQ ID NO: 28049 - protein, 194 aa, Homo sapiens [sequence omitted]

SEQ ID NO: 28050 - protein, 2098 aa, Homo sapiens
MVSHPVFGLHSASSGHSEFGGLGTLGTPTALAAHPQLASFPGAEWWRTTDAHTRTGATFFPPLLGIPPLFAPPAQNHDSSSFHSRTSGKSNRNGPEKGVNGSINGSNTSSVIGINTSVLSTTASSSMGQTKSTSSGGGNRKCNQEQSKNQPLDARVDKIKDKKPRKKAMESSSNSDSDSGTSSDTSSEGISSSDSDDLEEDEEEEDQSIEESEDDDSDSESEAQHKSNNQVLLHGISDPKADGQKATEKAQEKRIHQPLPLASESQTHSFQSQQKQPQVLSQQLPFIFQSSQAKEESVNKHTSVIQSTGLVSNVKPLSLVNQAKKETYMKLIVPSPDVLKAGNKNTSEESSLLTSELRSKREQYKQAFPSQLKKQESSKSLKKVIAALSNPKATSSSPAHPKQTLENNHPNPFLTNALLGNHQPNGVIQSVIQEAPLALTTKTKMQSKINENIAAASSTPFSSPVNLSTSGRRTPGNQTPVMPSASPILHSQGKEKAVSNNVNPVKTQHHSHPAKSLVEQFRGTDSDIPSSKDSEDSNEDEEEDDEEEDEEDDEDDESDDSQSESDSNSESDTEGSEEEDDDDKDQDESDSDTEGEKTSMKLNKTTSSVKSPSMSLTGHSTPRNLHIAKAPGSAPAALCSESQSPAFLGTSSSTLTSSPHSGTSKRRRVTDERELRIPLEYGWQRETRIRNFGGRLQGEVAYYAPCGKKLRQYPEVIKYLSRNGIMDISRDNFSFSAKIRVGDFYEARDGPQGMQWCLLKEEDVIPRIRAMEGRRGRPPNPDRQRAREESRMRRRKGRPPNVGNAEFLDNADAKLLRKLQAQEIARQAAQIKLLRKLQKQEQARVAKEAKKQQAIMAAEEKRKQKEQIKIMKQQEKIKRIQQIRMEKELRAQQILEAKKKKKEEAANAKLLEAEKRIKEKEMRRQQAVLLKHQERERRRQHMMLMKAMEARKKAEEKERLKQEKRDEKRLNKERKLEQRRLELEMAKELKKPNEDMCLADQKPLPELPRIPGLVLSGSTFSDCLMVVQFLRNFGKVLGFDVNIDVPNLSVLQEGLLNIGDSMGEVQDLLVRLLSAAVCDPGLITGYKAKTALGEHLLNVGVNRDNVSEILQIFMEAHCGQTELTESLKTKAFQAHTPAQKASVLAFLINELACSKSVVSEIDKNIDYMSNLRRDKWVVEGKLRKLRIIHAKKTGKRDTSGGIDLGEEQHPLGTPTPGRKRRRKGGDSDYDDDDDDDSDDQGDEDDEDEEDKEDKKGKKTDICEDEDEGDQAASVEELEKQIEKLSKQQSQYRRKLFDASHSLRSVMFGQDRYRRRYWILPQCGGIFVEGMESGEGLEEIAKEREKLKKAESVQIKEEMFETSGDSLNCSNTDHCEQKEDLKEKDNTNLFLQKPGSFSKLSKLLEVAKMPPESEVMTPKPNAGANGCTLSYQNSGKHSLGSVQSTATQSNVEKADSNNLFNTGSSGPGKFYSPLPNDQLLKTLTEKNRQWFSLLPRTPCDDTSLTHADMSTASLVTPQSQPPSKSPSPTPAPLGSSAQNPVGLNPFALSPLQVKGGVSMMGLQFCGWPTGVVTSNIPFTSSVPSLGSGLGLSEGNGNSFLTSNVASSKSESPVPQNEKATSAQPAAVEVAKPVDFPSPKPIPEEMQFGWWRIIDPEDLKALLKVLHLRGIREKALQKQIQKHLDYITQACLKNKDVAIIELNENEENQVTRDIVENWSVEEQAMEMDLSVLQQVEDLERRVASASLQVKGWMCPEPASEREDLVYFEHKSFTKLCKEHDGEFTGEDESSAHALERKSDNPLDIAVTRLADLERNIERRIEEDIAPGLRVWRRALSEARSAAQVALCIQQLQKSIAWEKSIMKVYCQICRKGDNEELLLLCDGCDKGCHTYCHRPKITTIPDGDWFCPACIAKASGQTLKIKKLHVKGKKTNESKKGKKVTLTGDTEDEDSASTSSSLKRGNKDLKKRKMEENTSINLSKQESFTSVKKPKRDDSKDLALCSMILTEMETHEDAWPFLLPVNLKLVPGYKKVIKKPMDFSTIREKLSSGQYPNLETFALDVRLVFDNCETFNEDDSDIGRAGHNMRKYFEKKWTDTFKVS

SEQ ID NO: 28051 - protein, 111 aa, Homo sapiens
MERVARHSSVSKEEKELRMEIAKQELIAHAREAASRVLSALSDRQMSERMALDARKREQFQRLKEQFVKDQERRQAARQEELDDDFSYARELRDRERRLKSLEEELERKAR

SEQ ID NO: 28052 - protein, 124 aa, Homo sapiens
MAIQKALQPDWFQCLSDGEVSCKEATSIKRVRKSVDRSLLFLDNCLRLQEESEVLQKSVIIGVIEGGDVMEERLRSARETAKRPVGGFLLDGFQGNPTTLEARLRLLSSVTAELPEDKPRPVFG

SEQ ID NO: 28053 - protein, 164 aa, Homo sapiens
MITGTSQADCAVLIVAAGFGEFEAGISKNGQTREHALLAYTLGVKQLIVGVNKMDSTEPPYSHKRYEEIVKEVSTYIKKIGHNTDTVAFVPVSGWNGDNTLEPSANMPWFKGWKVTRKDGNASGTTLLEALDCILPPTRPTDKPLCLPLQDVYKIGGIGTVPVG

SEQ ID NO: 28054 - protein, 84 aa, Homo sapiens
MESQQRIRMMKELDVCSPEFSFLRAESEVKKQKGRMLGDVLMDQNVLPGVGNIIKNEALFDSGLHPAVKIQCSRVKKILLSLAT

SEQ ID NO: 28055 - protein, 617 aa, Homo sapiens [sequence omitted]

SEQ ID NO: 28056 - protein, 148 aa, Homo sapiens
MMGCGESELKSADGEEAAAVPGPPPEPQVPQLRAPVPEPGLDLSLSPRPDSPQPRHGSPGRRKGRAERRGAARQRRQVSGGGWPPARDGLAPTWSLPCPLLPGPLPPDAALPGAVRAAACGAAGAGDARAEEQPGLGPGAAGRSREPL

SEQ ID NO: 28057 - protein, 596 aa, Homo sapiens
MNPDYTKLTMDLGSTEITATATTSLPSISTFVEGYSSNYELKPSCVYQMQRPLIKVEEGRAPSYHHHHHHHHHHHHHHQQQHQQPSIPPASSPEDEVLPSTSMYFKQSPPSTPTTPAFPPQAGALWDEALPSAPGCIAPGPLLDPPMKAVPTVAGARFPLFHFKPSPPHPPAPSPAGGHHLGYDPTAAAALSLPLGAAAAAGSQAAALESHPYGLPLAKRAAPLAFPPLGLTPSPTASSLLGESPSLPSPPSRSSSSGEGTCAVCGDNAACQHYGVRTCEGCKGFFKRTVQKNAKYVCLANKNCPVDKRRRNRCQYCRFQKCLSVGMVKEVVRTDSLKGRRGRLPSKPKSPLQQEPSQPSPPSPPICMMNALVRALTDSTPRDLDYSRYCPTDQAAAGTDAEHVQQFYNLLTASIDVSRSWAEKIPGFTDLPKEDQTLLIESAFLELFVLRLSIRSNTAEDKFVFCNGLVLHRLQCLRGFGEWLDSIKDFSLNLQSLNLDIQALACLSALSMITERHGLKEPKRVEELCNKITSSLKDHQSKGQALEPTESKVLGALVELRKICTLGLQRIFYLKLEDLVSPPSIIDKLFLDTLPF

SEQ ID NO: 28058 - protein, 138 aa, Homo sapiens
LFLAMGRSRRTGAHRAHSLARQMKAKRRRPDLDEIHRELRPQGSARPQPDPNAEFDPDLPGGGLHRCLACARYFIDSTNLKTHFRSKDHKKRLKQLSVEPYSQEEAERAAGMGSYVPPRRLAVPTEVSTEVPEMDTST

SEQ ID NO: 28059 - protein, 278 aa, Homo sapiens
LPENWTDTRETLLEGMLFSLKYLGMTLVEQPKGEELSAAAIKRIVATAKASGKKLQKVTLKVSPRGIILTDNLTNQLIENVSIYRISYCTADKMHDKVFAYIAQSQHNQSLECHAFLCTKRKMAQAVTLTVAQAFKVAFEFWQVSKEEKEKRDKASQEGGDVLGARQDCTPSLKSLVATGNLLDLEETAKAPLSTVSANTTNMDEVPRPQALSGSSVVWELDDGLDEAFSRLAQSRTNPQVLDTGLTAQDMHYAQCLSPVDWDKPDSSGTEQDDLFSF

SEQ ID NO: 28060 - protein, 44 aa, Homo sapiens
LAQRGFAQPLSRDRSLRRAPWLLGRAVVGWPRPTPYGGGSSPPF

SEQ ID NO: 28061 - protein, 80 aa, Homo sapiens
VSLITGDLRPPPAWKSSNDHGSLALTPRPQLELAESSPAASFLSSRSWQGLEPRLGQTPVTEAVSGRRGIAIAYEDEGSG

SEQ ID NO: 28062 - protein, 37 aa, Homo sapiens
ISARVCPLFSSLLVAKCSWNQFDTGELRLKPRRNNHF

SEQ ID NO: 28063 - protein, 581 aa, Homo sapiens
ICSPGGESWKEGASVQIMKEHGGTFSSTGISGGSGDSAMDSLQPLQPNYMPVCLFAEESYQKLAMETLEELDWCLDQLETIQTYRSVSEMASNKFKRMLNRELTHLSEMSRSGNQVSEYISNTFLDKQNDVEIPSPTQKDREKKKKQQLMTQISGVKKLMHSSSLNNTSISRFGVNTENEDHLAKELEDLNKWGLNIFNVAGYSHNRPLTCIMYAIFQERDLLKTFRISSDTFITYMMTLEDHYHSDVAYHNSLHAADVAQSTHVLLSTPALDAVFTDLEILAAIFAAAIHDVDHPGVSNQFLINTNSELALMYNDESVLENHHLAVGFKLLQEEHCDIFMNLTKKQRQTLRKMVIDMVLATDMSKHMSLLADLKTMVETKKVTSSGVLLLDNYTDRIQVLRNMVHCADLSNPTKSLELYRQWTDRIMEEFFQQGDKERERGMEISPMCDKHTASVEKSQVGFIDYIVHPLWETWADLVQPDAQDILDTLEDNRNWYQSMIPQSPSPPLDEQNRDCQGLMEKFQFELTLDEEDSEGPEKEGEGHSYFSSTKTLCVIDPENRDSLGETDIDIATEDKSPVDT

SEQ ID NO: 28064 - protein, 564 aa, Homo sapiens
LPSYSSAPGRTAASWLRYFYSQRPIPRPTPAMAFANLRKVLISDSLDPCCRKILQDGGLQVVEKQNLSKEELIAELQDCEGLIVRSATKVTADVINAAEKLQVVGRAGTGVDNVDLEAATRKGILVMNTPNGNSLSAAELTCGMIMCLARQIPQATASMKDGKWERKKFMGTELNGKTLGILGLGRIGREVATRMQSFGMKTIGYDPIISPEVSASFGVQQLPLEEIWPLCDFITVHTPLLPSTTGLLNDNTFAQCKKGVRVVNCARGGIVDEGALLRALQSGQCAGAALDVFTEEPPRDRALVDHENVISCPHLGASTKEAQSRCGEEIAVQFVDMVKGKSLTGVVNAQALTSAFSPHTKPWIGLAEALGTLMRAWAGSPKGTIQVITQGTSLKNAGNCLSPAVIVGLLKEASKQADVNLVNAKLLVKEAGLNVTTSHSPAAPGEQGFGECLLAVALAGAPYQAVGLVQGTTPVLQGLNGAVFRPEVPLRRDLPLLLFRTQTSDPAMLPTMIGLLAEAGVRLLSYQTSLVSDGETWHVMGISSLLPSLEAWKQHVTEAFQFHF

SEQ ID NO: 28065 - protein, 44 aa, Homo sapiens
KCTSTIPAADTGIWLCPYRIDEVTSWKVPGPFLGAALRDFWVKG

SEQ ID NO: 28066 - protein, 226 aa, Homo sapiens
LNTQAPSTMASRGGGRGRGRGQLTFNVEAVGIGKGDALPPPTLQPSPLFPPLEFRPVPLPSGEEGEYVLALKQELRGAMRQLPYFIRPAVPKRDVERYSDKYQMSGPIDNAIDWNPDWRRLPRELKIRVRKLQKERITILLPKRPPKTTEDKEETIQKLETLEKKEEEVTSEEDEEKEEEEEKEEEEEEEYDEEEHEEETDYIMSYFDNGEDFGGDSDDNMDEAIY

SEQ ID NO: 28067 - protein, 45 aa, Homo sapiens
KPMTRAELVAISSSEDEGNLRFVYELLSWVEEMQVGAYPKAYAVH

SEQ ID NO: 28068 - protein, 167 aa, Homo sapiens
LLALERQRKLNDALDRLEELKEFANFDFDVWRKKYMRWMNHKKSRVMDFFRRIDKDQDGKITRQEFIDGILASKFPTTKLEMTAVADIFDRDGDGYIDYYEFVAALHPNKDAYRPTTDADKIEDEVTRQVAQCKCAKRFQVEQIGENKYRVRKRKSSPLLWWFLICG

SEQ ID NO: 28069 - protein, 17 aa, Homo sapiens
LRMDHWRGSKVRVPVRE

SEQ ID NO: 28070 - protein, 752 aa, Homo sapiens
ISAELGGISTTFLSAEAFPPTLMLFNSVLRQPQLGVLRNGWSSQYPLQSLLTGYQCSGNDEHTSYGETGVPVPPFGCTFSSAPNMEHVLAVANEEGFVRLYNTESQSFRKKCFKEWMAHWNAVFDLAWVPGELKLVTAAGDQTAKFWDVKAGELIGTCKGHQCSLKSVAFSKFEKAVFCTGGRDGNIMVWDTRCNKKDGFYRQVNQISGAHNTSDKQTPSKPKKKQNSKGLAPSVDFQQSVTVVLFQDENTLVSAGAVDGIIKVWDLRKNYTAYRQEPIASKSFLYPGSSTRKLGYSSLILDSTGSTLFANCTDDNIYMFNMTGLKTSPVAIFNGHQNSTFYVKSSLSPDDQFLVSGSSDEAAYIWKVSTPWQPPTVLLGHSQEVTSVCWCPSDFTKIATCSDDNTLKIWRLNRGLEEKPGGDKLSTVGWASQKKKESRPGLVTVTSSQSTPAKAPRAKCNPSNSSPSSAACAPSCAGDLPLPSNTPTFSIKTSPAKARSPINRRGSVSSVSPKPPSSFKMSIRNWVTRTPSSSPPITPPASETKIMSPRKALIPVSQKSSQAEACSESRNRVKRRLDSSCLESVKQKCVKSCNCVTELDGQVENLHLDLCCLAGNQEDLSKDSLGPTKSSKIEGAGTSISEPPSPISPYASESCGTLPLPLRPCGEGSEMVGKENSSPENKNWLLAMAAKRKAENPSPRSPSSQTPNSRRQSGKKLPSPVTITPSSMRKICTYFHRKSQEDFCGPEHSTEL

SEQ ID NO: 28071 - protein, 375 aa, Homo sapiens
LPSPFMARPGLIHSAPGLPDTCALLQPPAASAAAAPSMSGPDVETPSAIQICRIMRPDDANVAGNVHGGTILKMIEEAGAIISTRHCNSQNGERCVAALARVERTDFLSPMCIGEVAHVSAEITYTSKHSVEVQVNVMSENILTGAKKLTNKATLWYVPLSLKNVDKVLEVPPVVYSRQEQEEEGRKRYEAQKLERMETKWRNGDIVQPVLNPEPNTVSYSQSSLIHLVGPSDCTLHGFVHGGVTMKLMDEVAGIVAARHCKTNIVTASVDAINFHDKIRKGCVITISGRMTFTSNKSMEIEVLVDADPVVDSSQKRYRAASAFFTYVSLSQEGRSLPVPQLVPETEDEKKRFEEGKGRYLQMKAKRQGHAEPQP

SEQ ID NO: 28072 - protein, 158 aa, Homo sapiens
VLCCAEEVDLDELLAGRLVSFLMDHHQEILQVPSYLQTAVEKHLDYLKKGHIENPGDGLFAPLPTYSYCKQISAQEFDEQKVSTSQAAIAELLENIIKNRSLPLKEKRKKLKQFQKEYPLIYQKRFPTTESEAALFGDKPTIKQPMLILRKPKFRSLR

SEQ ID NO: 28073 - protein, 13 aa, Homo sapiens
LLVIMLLTRTETV

SEQ ID NO: 28074 - protein, 25 aa, Homo sapiens
LLHVFSEPSSLPMPHLDSHPHLSVP

SEQ ID NO: 28075 - protein, 50 aa, Homo sapiens
VCVGGSKEGRREEAGFLEPSQPSKTDRQTDRQLARGSLGATAASADLMAE

SEQ ID NO: 28076 - protein, 475 aa, Homo sapiens
IQVPGVPGPWSSALGGATCVRQRDSGDWPAMPSRAEDYEVLYTIGTGSYGRCQKIRRKSDGKILVWKELDYGSMTEAEKQMLVSEVNLLRELKHPNIVRYYDRIIDRTNTTLYIVMEYCEGGDLASVITKGTKERQYLDEEFVLRVMTQLTLALKECHRRSDGGHTVLHRDLKPANVFLDGKQNVKLGDFGLARILNHDTSFAKTFVGTPYYMSPEQMNRMSYNEKSDIWSLGCLLYELCALMPPFTAFSQKELAGKIREGKFRRIPYRYSDELNEIITRMLNLKDYHRPSVEEILENPLIADLVADEQRRNLERRGRQLGEPEKSQDSSPVLSELKLKEIQLQERERALKAREERLEQKEQELCVRERLAEDKLARAENLLKNYSLLKERKFLSLASNPELLNLPSSVIKKKVHFSGESKENIMRSENSESQLTSKSKCKDLKKRLHAAQLRAQALSDIEKNYQLKSRQILGMR

SEQ ID NO: 28077 - protein, 26 aa, Homo sapiens
LVSGGLRSTILPQSMVAEYPELRGVF

SEQ ID NO: 28078 - protein, 25 aa, Homo sapiens
REGASRRSRGGRGEDGGLLRDGCNA

SEQ ID NO: 28079 - protein, 71 aa, Homo sapiens
IIFTSGGTESNNLVIHSVVKHFHANQTSKGHTGGHHSPVKGAKPHFITSSVEHDSIRLPLEHLVEEQVAGE

SEQ ID NO: 28080 - protein, 47 aa, Homo sapiens
LAAPRLPARRHLVLGFHCSRWAGRFSVIAAGGGGGVTSGQPRNPTIL

SEQ ID NO: 28081 - protein, 35 aa, Homo sapiens
IGEAFLTLLDFRFLFCKMRSLEDPENEAHRKQVTC

SEQ ID NO: 28082 - protein, 447 aa, Homo sapiens
KAGASCCGSANPYVSVGKSCVLLAMAQLQTRFYTDNKKYAVDDVPFSIPAASEIADLSNIINKLLKDKNEFHKHVEFDFLIKGQFLRMPLDKHMEMENISSEEVVEIEYVEKYTAPQPEQCMFHDDWISSIKGAEEWILTGSYDKTSRIWSLEGKSIMTIVGHTDVVKDVAWVKKDSLSCLLLSASMDQTILLWEWNVERNKVKALHCCRGHAGSVDSIAVDGSGTKFCSGSWDKMLKIWSTVPTDEEDEMEESTNRPRKKQKTEQLGLTRTPIVTLSGHMEAVSSVLWSDAEEICSASWDHTIRVWDVESGSLKSTLTGNKVFNCISYSPLCKRLASGSTDRHIRLWDPRTKDGSLVSLSLTSHTGWVTSVKWSPTHEQQLISGSLDNIVKLWDTRSCKAPLYDLAAHEDKVLSVDWTDTGLLLSGGADNKLYSYRYSPTTSHVGA

SEQ ID NO: 28083 - protein, 22 aa, Homo sapiens
KSFCRQVKIKVTPRKWLLLQRR

SEQ ID NO: 28084 - protein, 30 aa, Homo sapiens
LRPPAPATASPAPRRYLSKVPLEAPGWGRL

SEQ ID NO: 28085 - protein, 884 aa, Homo sapiens
IMAENSVLTSTTGRTSLADSSIFDSKVTEISKENLLIGSTSYVEEEMPQIETRVILVQEAGKQEELIKALKDIKVGFVKMESVEEFEGLDSPEFENVFVVTDFQDSVFNDLYKADCRVIGPPVVLNCSQKGEPLPFSCRPLYCTSMMNLVLCFTGFRKKEELVRLVTLVHHMGGVIRKDFNSKVTHLVANCTQGEKFRVAVSLGTPIMKPEWIYKAWERRNEQDFYAAVDDFRNEFKVPPFQDCILSFLGFSDEEKTNMEEMTEMQGGKYLPLGDERCTHLVVEENIVKDLPFEPSKKLYVVKQEWFWGSIQMDARAGETMYLYEKANTPELKKSVSMLSLNTPNSNRKRRRLKETLAQLSRETDVSPFPPRKRPSAEHSLSIGSLLDISNTPESSINYGDTPKSCTKSSKSSTPVPSKQSARWQVAKELYQTESNYVNILATIIQLFQVPLEEEGQRGGPILAPEEIKTIFGSIPDIFDVHTKIKDDLEDLIVNWDESKSIGDIFLKYSKDLVKTYPPFVNFFEMSKETIIKCEKQKPRFHAFLKINQAKPECGRQSLVELLIRPVQRLPSVALLLNDLKKHTADENPDKSTLEKAIGSLKEVMTHINEDKRKTEAQKQIFDVVYEVDGCPANLLSSHRSLVQRVETISLGEHPCDRGEQVTLFLFNDCLEIARKRHKVIGTFRSPHGQTRPPASLKHIHLMPLSQIKKVLDIRETEDCHNAFALLVRPPTEQANVLLSFQMTSDELPKENWLKMLCRHVANTICKADAENLIYTADPESFEVNTKDMDSTLSRASRAIKKTSKKVTRAFSFSKTPKRALRRALMTSHGSVEGRSPSSNDKHVMSRLSSTSSLAGIPSPSLVSLPSFFERRSHTLSRSTTHLI

SEQ ID NO: 28086 - protein, 35 aa, Homo sapiens
KMVARVACGSRRLAKSQRSAPAGVSLAWSPHPPGP

SEQ ID NO: 28087 - protein, 17 aa, Homo sapiens
LKKGRKARASGWMGTKI

SEQ ID NO: 28088 - protein, 59 aa, Homo sapiens
LGNFRVLQRLLWGRGGAESGEGAVRRAGARPQPPPCGQRVPRLAARRPRGSNEFRNVQK

SEQ ID NO: 28089 - protein, 423 aa, Homo sapiens
LPARGKTYISKKLTRYLNWIGVPTREFNVGQYRRDVVKTYKSFEFFLPDNEEGLKIRKQCALAALRDVRRFLSEEGGHVAVFDATNTTRERRATIFNFGEQNGYKTFFVESICVDPEVIAANIVQVKLGSPDYVNRDSDEATEDFMRRIECYENSYESLDEDLDRDLSYIKIMDVGQSYVVNRVADHIQSRIVYYLMNIHVTPRSIYLCRHGESELNLKGRIGGDPGLSPRGREFAKSLAQFISDQNIKDLKVWTSQMKRTIQTAEALGVPYEQWKVLNEIDAGVCEEMTYEEIQDNYPLEFALRDQDKYRYRYPKGESYEDLVQRLEPVIMELERQENVLVICHQAVMRCLLAYFLDKAAEQLPYLKCPLHTVLKLTPVAYGCKVESIFLNVAAVNTHRDRPQNVDISRPPEEALVTVPAHQ

SEQ ID NO: 28090 - protein, 84 aa, Homo sapiens
ITANAAAIHAQAKKHVPFKYTHAAPAPLADRGAQPTRTAARGLEIRAGWAPGPGGPTRGGSGSGAVGLGWAGEAGPGASGATPA

SEQ ID NO: 28091 - protein, 50 aa, Homo sapiens
LLPDLVLGQSSPGFIVFASQDLFESCPPDPTGGTFEKKRAMLLLRVGTLS

SEQ ID NO: 28092 - protein, 9 aa, Homo sapiens
KMAPVVTGH

SEQ ID NO: 28093 - protein, 224 aa, Homo sapiens
KMQLKPMEINPEMLNKVLSRLGVAGQWRFVDVLGLEEESLGSVPAPACALLLLFPLTAQHENFRKKQIEELKGQEVSPKVYFMKQTIGNSCGTIGLIHAVANNQDKLGFEDGSVLKQFLSETEKMSPEDRAKCFEKNEAIQAAHDAVAQEGQCRVDDKVNFHFILFNNVDGHLYELDGRMPFPVNHGASSEDTLLKDAAKVCREFTEREQGEVRFSAVALCKAA

SEQ ID NO: 28094 - protein, 34 aa, Homo sapiens
RPLCQLELRGLTRHYVAGFGRATRAGQEPNPSRP

SEQ ID NO: 28095 - protein, 454 aa, Homo sapiens
VPSAPAGLRSSGARGAVVAAAPGMFHSPRRLCSALLQRDAPGLRRLPAPGLRRPLSPPAAVPRPASPRLLAAASAASGAARSCSRTVCSMGTGTSRLYSALAKTLNSSAASQHPEYLVSPDPEHLEPIDPKELLEECRAVLHTRPPRFQRDFVDLRTDCPSTHPPIRVMQWNILAQALGEGKDNFVQCPVEALKWEERKCLILEEILAYQPDILCLQEVDHYFDTFQPLLSRLGYQGTFFPKPWSPCLDVEHNNGPDGCALFFLQNRFKLVNSANIRLTAMTLKTNQVAIAQTLECKESGRQFCIAVTHLKARTGWERFRSAQGCDLLQNLQNITQGAKIPLIVCGDFNAEPTEEVYKHFASSSLNLNSAYKLLSADGQSEPPYTTWKIRTSGECRHTLDYIWYSKHALNVRSALDLLTEEQIGPNRLPSFNYPSDHLSLVCDFSFTEESDGLS

SEQ ID NO: 28096 - protein, 97 aa, Homo sapiens
LHIPILQSRFIAPAASLGFCFHHAESDSSTLTLWLREGPSRLPGYASHQVGVAGAVFDESTRKILVVQDRNKLKNMWKFPGGLSEPEEDIGVYLLYF

SEQ ID NO: 28097 - protein, 44 aa, Homo sapiens
ISCSEPCLLIGSICDDYMATLCCPHCTLCQIKRDINRRRAMRTF

SEQ ID NO: 28098 - protein, 51 aa, Homo sapiens
LGERAGGLVGWPGLRPAATTILWPGRCEWSAGQSARCLAPQADPAVHSREQ

SEQ ID NO: 28099 - protein, 128 aa, Homo sapiens
LGSAASAPLHSTSAPSDSLPSASTPPAPVRIVSQLLATRPVPGCFSISRPPLLEYFTPCIWGQGLEKGRVERPVEKKEARPAGGGGSADCGEETPRHPFWSSPLPPRPCAHSLAGELLSDQESKSGPG

SEQ ID NO: 28100 - protein, 463 aa, Homo sapiens
LVSAGCRSLAGRASGVLLLPAELLPGEEEAMALRVTRNSKINAENKAKINMAGAKRVPTAPAATSKPGLRPRTALGDIGNKVSEQLQAKMPMKKEAKPSATGKVIDKKLPKPLEKVPMLVPVPVSEPVPEPEPEPEPEPVKEEKLSPEPILVDTASPSPMETSGCAPAEEDLCQAFSDVILAVNDVDAEDGADPNLCSEYVKDIYAYLRQLEEEQAVRPKYLLGREVTGNMRAILIDWLVQVQMKFRLLQETMYMTVSIIDRFMQNNCVPKKMLQLVGVTAMFIASKYEEMYPPEIGDFAFVTDNTYTKHQIRQMEMKILRALNFGLGRPLPLHFLRRASKIGEVDVEQHTLAKYLMELTMLDYDMVHFPPSQIAAGAFCLALKILDNGEWTPTLQHYLSYTEESLLPVMQHLAKNVVMVNQGLTKHMTVKNKYATSKHAKISTLPQLNSALVQDLAKAVAKV

SEQ ID NO: 28101 - protein, 18 aa, Homo sapiens
KRRRRERGGGGGGAVKLR

SEQ ID NO: 28102 - protein, 123 aa, Homo sapiens
RLVSAGQLREEEEAVEGKAPRIHHRRKKKCIRYLPGEGRCPSPVPSDDSALGCPGSPAPQDSPSYHLLPRFPTELLTSPAEPAPTSPGLSTALSLPTPGPPQAPRSTLQSTQVQQQESQRQVA

SEQ ID NO: 28103 - protein, 28 aa, Homo sapiens
TQLREGFVLSSVLWCRASSSPAQPRRLN

SEQ ID NO: 28104 - protein, 136 aa, Homo sapiens
TGRTIRPWPVMRRITIKIPQNRFGVRSTSINAFTQQSGKTSSILCRRGRWRWSDWFTSQLPQAEASPGPVKLEPGCKARRCCVAPEELARSHGIRRLHTHVHTPRSGEGTVLRGSNLYSSGGSRKSQNLLFSGWVM

SEQ ID NO: 28105 - protein, 125 aa, Homo sapiens
LVPVHSAAAPGGGGERGPRGREAKRRAGQRGARREKARAARRAQAETPCSCRRRHRAAAVLTDPPPGPPPCRAAVGRRSPPRRPGLPKQESSFPWGGCCGTSRKATPSTGLEWGHPCTWPPSWNT

SEQ ID NO: 28106 - protein, 21 aa, Homo sapiens
RFSSSHILTHGSTLSPLERTP

SEQ ID NO: 28107 - protein, 62 aa, Homo sapiens
RSPSIFLPVGTEPSIFGNRCWQFCQVFVTLKNGYWTGSSGCSRGHGLFFCSSGAAAKSSFEE

SEQ ID NO: 28108 - protein, 24 aa, Homo sapiens
VEAKTKLRSPVIWVMVYVKHQRNL

SEQ ID NO: 28109 - protein, 8 aa, Homo sapiens
LFVFDHVW

SEQ ID NO: 28110 - protein, 105 aa, Homo sapiens
LGTVPAPTSWRLGCSCPKSTRLPTCAPRPATTCTPPSWRPARRRSPWSRSTRWARYWAAAASARSTQASASPTTCRWPSNTWRRTGFPTGESCLMALECPWKWSC

SEQ ID NO: 28111 - protein, 37 aa, Homo sapiens
LRSSNWDSEPGLFLALARLQEGHPSHHSSTCSLEKGR

SEQ ID NO: 28112 - protein, 246 aa, Homo sapiens
RSGVMMPLAEAGALAQGGGPSATEWACILRRKTPRHKQPTLLMVRASRRSGKTSAVLKAGRQSVSGRKNSTSKDLVTLGASSLREERGHPLHPRHRKAVHLRTRGRTRGWVQTLARMSRRTRGPVERAAAAAAAAAGGDAGHAPFPPPPAADGARAPRSPGQVTPRGLRLRLPRRESLLRGLCRPLRPLLGFRESDSAKPASLRLLQHTPSARRNYRIAGARLMRSNYPPPLSSAALRGAGPTRRN

SEQ ID NO: 28113 - protein, 1020 aa, Homo sapiens
RRKRQVLPAAAAAAAACSPGTRPAALGSRSSVSPENQPSRAMGTRLPLVLRQLRRPPQPPGPPRRLRVPCRASSGGGGGGGGGREGLLGQRRPQDGQARSSCSPGGRTPAARDSIVREVIQNSKEVLSLLQEKNPAFKPVLAIIQAGDDNLMQEINQNLAEEAGLNITHICLPPDSSEAEIIDEILKINEDTRVHGLALQISENLFSNKVLNALKPEKDVDGVTDINLGKLVRGDAHECFVSPVAKAVIELLEKSVGVNLDGKKILVVGAHGSLEAALQCLFQRKGSMTMSIQWKTRQLQSKLHEADIVVLGSPKPEEIPLTWIQPGTTVLNCSHDFLSGKVGCGSPRIHFGGLIEEDDVILLAAALRIQNMVSSGRRWLREQQHRRWRLHCLKLQPLSPVPSDIEISRGQTPKAVDVLAKEIGLLADEIEIYGKSKAKVRLSVLERLKDQADGKYVLVAGITPTPLGEGKSTVTIGLVQALTAHLNVNSFACLRQPSQGPTFGVKGGAAGGGYAQVIPMEEFNLHLTGDIHAITAANNLLAAAIDTRILHENTQTDKALYNRLVPLVNGVREFSEIQLARLKKLGINKTDPSTLTEEEVSKFARLDIDPSTITWQRVLDTNDRFLRKITIGQGNTEKGHYRQAQFDIAVASEIMAVLALTDSLADMKARLGRMVVASDKSGQPVTADDLGVTGALTVLMKDAIKPNLMQTLEGTPVFVHAGPFANIAHGNSSVLADKIALKLVGEEGFVVTEAGFGADIGMEKFFNIKCRASGLVPNVVVLVATVRALKMHGGGPSVTAGVPLKKEYTEENIQLVADGCCNLQKQIQITQLFGVPVVVALNVFKTDTRAEIDLVCELAKRAGAFDAVPCYHWSVGGKGSVDLARAVREAASKRSRFQFLYDVQVPIVDKIRTIAQAVYGAKDIELSPEAQAKIDRYTQQGFGNLPICMAKTHLSLSHQPDKKGVPRDFILPISDVRASIGAGFIYPLVGTMSTMPGLPTRPCFYDIDLDTETEQVKGLF

SEQ ID NO: 28114 - protein, 74 aa, Homo sapiens
LPPACPRPCCPFSTPTCTATRPPYRIIMVIKFVTLTPGLKTPTVNRLRPLWRPRIRLLCHFLSSVPSEVYTKRE

SEQ ID NO: 28115 - protein, 27 aa, Homo sapiens
LEPRARFYAAEIASALGYLHSLNIVYR

SEQ ID NO: 28116 - protein, 42 aa, Homo sapiens
ITNSARHLLEGLLQKDRTKRLGAKDDFVSDVFLSSWAGRDVH

SEQ ID NO: 28117 - protein, 29 aa, Homo sapiens
REGRPWPWGRRELLCLHRSPCAALMCCAR

SEQ ID NO: 28118 - protein, 615 aa, Homo sapiens
RREDEGNKTSWIHPSPWVVLIFRFFSLFFFKQPLFTMNKLYIGNLSENAAPSDLESIFKDAKIPVSGPFLVKTGYAFVDCPDESWALKAIEALSGKIELHGKPIEVEHSVPKRQRIRKLQIRNIPPHLQWEVLDSLLVQYGVVESCEQVNTDSETAVVNVTYSSKDQARQALDKLNGFQLENFTLKVAYIPDEMAAQQNPLQQPRGRRGLGQRGSSRQGSPGSVSKQKPCDLPLRLLVPTQFVGAIIGKEGATIRNITKQTQSKIDVHRKENAGAAEKSITILSTPEGTSAACKSILEIMHKEAQDIKFTEEIPLKILAHNNFVGRLIGKEGRNLKKIEQDTDTKITISPLQELTLYNPERTITVKGNVETCAKAEEEIMKKIRESYENDIASMNLQAHLIPGLNLNALGLFPPTSGMPPPTSGPPSAMTPPYPQFEQSETETVHLFIPALSVGAIIGKQGQHIKQLSRFAGASIKIAPAEAPDAKVRMVIITGPPEAQFKAQGRIYGKIKEENFVSPKEEVKLEAHIRVPSFAAGRVIGKGGKTVNELQNLSSAEVVVPRDQTPDENDQVVVKITGHFYACQVAQRKIQEILTQVKQHQQQKALQSGPPQSRRK

SEQ ID NO: 28119 - protein, 373 aa, Homo sapiens
KRVSRAGAMEGQSVEELLAKAEQDEAEKLQRITVHKELELQFDLGNLLASDRNPPTGLRCAGPTPEAELQALARDNTQLLINQLWQLPTERVEEAIVARLPEPTTRLPREKPLPRPRPLTRWQQFARLKGIRPKKKTNLVWDEVSGQWRRRWGYQRARDDTKEWLIEVPGNADPLEDQFAKRIQAKKERVAKNELNRLRNLARAHKMQLPSAAGLHPTGHQSKEELGRAMQVAKVSTASVGRFQERLPKEKVPRGSGKKRKFQPLFGDFAAEKKNQLELLRVMNSKKPQLDVTRATNKQMREEDQEEAAKRRKMSQKGKRKGGRQGPGGKRKGGPPSQGGKRKGGLGGKMNSGPPGLGGKRKGGQRPGGKRRK

SEQ ID NO: 28120 - protein, 30 aa, Homo sapiens
KANHEKIAQIMFETFNIPAMYMAIWVMLSV

SEQ ID NO: 28121 - protein, 56 aa, Homo sapiens
VSRVVAAAGSCALRTEVASLGRTAVSRRGGKPALERERTGRGTGRRRDRTAPESPT

SEQ ID NO: 28122 - protein, 77 aa, Homo sapiens
VRKEIIARRASIRRVSITRSNRSGNTIKKEKKGISGFPGRGGASLLGSCSSRRFLNTAFYALYNLASHTFTLTLYDF

SEQ ID NO: 28123 - protein, 59 aa, Homo sapiens
VAWRWARSAFSVWRAAVPPAMIYTHRTRMRFVKQYCYGGAAEKGRGFEREQKKMVGARS

SEQ ID NO: 28124 - protein, 354 aa, Homo sapiens
KELPGVCNETMMALWEECKPCLKQTCMKFYARVCRSGSGLVGRQLEEFLNQSSPFYFWMNGDRIDSLLENDRQQTHMLDVMQDHFSRASSIIDELFQDRFFTREPQDTYHYLPFSLPHRRPHFFFPKSRIVRSLMPFSPYEPLNFHAMFQPFLEMIHEAQQAMDIHFHSPAFQHPPTEFIREGDDDRTVCREIRHNSTGCLRMKDQCDKCREILSVDCSTNNPSQAKLRRELDESLQVAERLTRKYNELLKSYQWKMLNTSSLLEQLNEQFNWVSRLANLTQGEDQYYLRVTTVASHTSDSDVPSGVTEVVVKLFDSDPITVTVPVEVSRKNPKFMETVAEKALQEYRKKHREE

SEQ ID NO: 28125 - protein, 88 aa, Homo sapiens
KKEPRDRGLPAARTRHRHPRSPPAAGSQRQWIDPVLRPLSSFQFRLIFVPLRLLPAPLPPAPAPSPGTRSPPLTERSRPVALRAAVPR

SEQ ID NO: 28126 - protein, 589 aa, Homo sapiens
IEKILRNAVPAASLRTAGPCPSVGRRSAVPSAPQSDLPRIKTEIEALKNLRHQHICQLYHVLETANKIFMVLEENLLFDEYHKLKLIDFGLCAKPKGNKDYHLQTCCGSLAYAAPELIQGKSYLGSEADVWSMGILLYVLMCGFLPFDDDNVMALYKKIMRGKYDVPKWLSPSSILLLQQMLQVDPKKRISMKNLLNHPWIMQDYNYPVEWQSKNPFIHLDDDCVTELSVHHRNNRQTMEDLISLWQYDHLTATYLLLLAKKARGKPVRLRLSSFSCGQASATPFTDIKSNNWSLEDVTASDKNYVAGLIDYDWCEDDLSTGAATPRTSQFTKYWTESNGVESKSLTPALCRTPANKLKNKENVYTPKSAVKNEEYFMFPEPKTPVNKNQHKREILTTPNRYTTPSKARNQCLKETPIKIPVNSTGTDKLMTGVISPERRCRSVELDLNQAHMEETPKRKGAKVFGSLERGLDKVITVLTRSKRKGSARDGPRRLKLHYNVTTTRLVNPDQLLNEIMSILPKKHVDFVQKGYTLKCQTQSDFGKVTMQFELEVCQLQKPDVVGIRRQRLKGDAWVYKRLVEDILSSCKV

SEQ ID NO: 28127 - protein, 610 aa, Homo sapiens
RRRGTRRSEPGDSRSAMAPIGLKAVVGEKIMHDVIKKVKKKGEWKVLVVDQLSMRMLSSCCKMTDIMTEGITIVEDINKRREPLPSLEAVYLITPSEKSVHSLISDFKDPPTAKYRAAHVFFTDSCPDALFNELVKSRAAKVIKTLTEINIAFLPYESQVYSLDSADSFQSFYSPHKAQMKNPILERLAEQIATLCATLKEYPAVRYRGEYKDNALLAQLIQDKLDAYKADDPTMGEGPDKARSQLLILDRGFDPSSPVLHELTFQAMSYDLLPIENDVYKYETSGIGEARVKEVLLDEDDDLWIALRHKHIAEVSQEVTRSLKDFSSSKRMNTGEKTTMRDLSQMLKKMPQYQKELSKYSTHLHLAEDCMKHYQGTVDKLCRVEQDLAMGTDAEGEKIKDPMRAIVPILLDANVSTYDKIRIILLYIFLKNGITEENLNKLIQHAQIPPEDSEIITNMAHLGVPIVTDSTLRRRSKPERKERISEQTYQLSRWTPIIKDIMEDTIEDKLDTKHYPYISTRSSASFSTTAVSARYGHWHKNKAPGEYRSGPRLIIFILGGVSLNEMRCAYEVTQANGKWEVLIGSTHILTPQKLLDTLKKLNKTDEEISS

SEQ ID NO: 28128 - protein, 236 aa, Homo sapiens
LSPPRPTSACPSLTRSVLALRPPQLSALGLPRLAGSARASGPMAKRRAAEPVTFHVPWKRLLLCDFAEQPPPPPLWIRPPGVAHAGQLLGVPEQHRKRKIDAGTMAEPSASPSKRRDSGDNSAPSGQEREDHGLETGDPPLPPPPVLPGPGEELPGARLPGGGGDDGAGRAGPPRGDWGVASRQHNEEFWQYNTFQYWRNPLPPIDLADIEDLSEDTLTEATLQGRNEGAEVDMES

SEQ ID NO: 28129 - protein, 106 aa, Homo sapiens
LPLPLPLPLPPRGSGASVVRPTPRCRWEEARGKPLAGLSPLLAHRLEEPSPGPVGRLPPLVAVTRGPPQPPAGRGARHGFWSRVSVRAPFACCGGAHRDQPRRFKR

SEQ ID NO: 28130 - protein, 97 aa, Homo sapiens
LVPEVAAAVGNAGARGAGHWGPFAEGLSTGFWPRSAPRLLWIAPKHRGTVRAAAGGLGGGANGPIPPDPGAWFEHPHPCVRPDPICAESQGNCHQRA

SEQ ID NO: 28131 - protein, 50 aa, Homo sapiens
IRGRDALESLWKRSRCMGTCIIYRQDGCLKTQSQTSRIQLLEALPGLQRR

SEQ ID NO: 28132 - protein, 33 aa, Homo sapiens
IGGDAGGCSGRPDAGGWREREAPRCLMGPLGGR

SEQ ID NO: 28133 - protein, 18 aa, Homo sapiens
LPFFPSHSQGRADKALMR

SEQ ID NO: 28134 - protein, 198 aa, Homo sapiens
MDISCAYSGSYPMAITPTQKRRSCMPHQTPNQIKSGTPYRTPKSVRRGVAPVDDGRILGTPDYLAPELLLGRAHGPAVDWWALGVCLFEFLTGIPPFNDETPQQVFQNILKRDIPWPEGEEKLSDNAQSAVEILLTIDDTKRAGMKELKRHPLFSDVDWENLQHQTMPFIPQPDDETDTSYFEARNTAQHLTVSGFSL

SEQ ID NO: 28135 - protein, 30 aa, Homo sapiens
VSCVTSLLFKVPSTDLLMGSMSITWELAAL

SEQ ID NO: 28136 - protein, 18 aa, Homo sapiens
TKSNLDLEPGEIKLGMLS

SEQ ID NO: 28137 - protein, 197 aa, Homo sapiens
TCDGVVLVRHHGAWGYVCNQEWTLAEASVVCRQLGCGPAVGAPKYVPLPGEMAQPWLHNVSCRGNESSLWECSLGSWCQSPCPHAWVVVALCSNGTFRELRLVKGRSPCAGLPEIRNVNGVDRLCVLHVEEAMVFCRELGCGPVLQAPRRDVGVVRKYLACRGTEPTIRSCRLDNNFRSGCDLRLDAEVVCSGEAAT

SEQ ID NO: 28138 - protein, 9 aa, Homo sapiens
ILADCAVPP

SEQ ID NO: 28139 - protein, 59 aa, Homo sapiens
KRAPSGTGGCLWPEADQDYCIELLVSSYSTPKISFCYSKDQMLRLPFQVVLRIRVVVIH

SEQ ID NO: 28140 - protein, 288 aa, Homo sapiens
VGRQLNSAPGKMEAAETEAEAAALEVLAEVAGILEPVGLQEEAELPAKILVEFVVDSQKKDKLLCSQLQVADFLQNILAQEDTAKGLDPLASEDTSRQKAIAAKEQWKELKATYREHVEAIKIGLTKALTQMEEAQRKRTQLREAFEQLQAKKQMAMEKRRAVQNQWQLQQEKHLQHLAEVSAEVRERKTGTQQELDRVFQKLGNLKQQAEQERDKLQRYQTFLQLLYTLQGKLLFPEAEAEAENLPDDKPQQPTRPQEQSTGDTMGRDPGVSFKAVGLQPAGDVNLP

SEQ ID NO: 28141 - protein, 131 aa, Homo sapiens
VRWTSVKFLMTSPEIASLSWGQMKVKGSNTTYKDCKVWPGGSRTWDWRETGTEHSPGVQPADVKEVVEKGVQTLVIGRGMSEALKVPSSTVEYLKKHGIDVRVLQTEQAVKEYNALVAQGVRVGGVFHSTC

SEQ ID NO: 28142 - protein, 152 aa, Homo sapiens
KMSIPFSNTHYRIPQGFGNLLEGLTREILREQPDNIPAFAAAYFESLLEKREKTNFDPAEWGSKVEDRFYNNHAFEEQEPPEKSDPKQEESQISGKEEETSVTILDSSEEDKEKEEVAAVKIQAAFRGHIAREEAKKMKTNSLQNEEKEENK

SEQ ID NO: 28143 - protein, 27 aa, Homo sapiens
IRYTIMSLILNLICGNKGKVILAGAYC

SEQ ID NO: 28144 - protein, 29 aa, Homo sapiens
LNGWLREPRGSFRKAGQLIVVCCHPFMSR

SEQ ID NO: 28145 - protein, 475 aa, Homo sapiens
LWGEVFHWSREGFKKDGINLPLRLPPGPIFCPLLQEMNLLPNIESPVTRQEKMATVWDEAEQDGIGEEVLKMSTEEIIQRTRLLDSEIKIMKSEVLRVTHELQAMKDKIKENSEKIKVNKTLPYLVSNVIELLDVDPNDQEEDGANIDLDSQRKGKCAVIKTSTRQTYFLPVIGLVDAEKLKPGDLVGVNKDSYLILETLPTEYDSRVKAMEVDERPTEQYSDIGGLDKQIQELVEAIVLPMNHKEKFENLGIQPPKGVLMYGPPGTGKTLLARACAAQTKATFLKLAGPQLVQMFIGDGAKLVRDAFALAKEKAPSIIFIDELDAIGTKRFDSEKAGDREVQRTMLELLNQLDGFQPNTQVKVIAATNRVDILDPALLRSGRLDRKIEFPMPNEEARARIMQIHSRKMNVSPDVNYEELARCTDDFNGAQCKAVCVEAGMIALRRGATELTHEDYMEGILEVQAKKKANLQYYA

SEQ ID NO: 28146 - protein, 52 aa, Homo sapiens
LPRPAPPRLRTLAPLSAAALPRSSQPRVRQYVQLGQQGCPPQEGAGALPDGG

SEQ ID NO: 28147 - protein, 27 aa, Homo sapiens
IHWPGMECTKVDRKVAGHDSVQFAGSL

SEQ ID NO: 28148 - protein, 96 aa, Homo sapiens
LASRPHPPSSFSNSAPLDTELSPCTRILKTGGPSRLSSLLSTAGLRSACSPHHPTSILAKPTAPLNFSANFLPARSQHLRVMMDSVCLRATPLPTM

SEQ ID NO: 28149 - protein, 10 aa, Homo sapiens
IRDDTDRQAD

SEQ ID NO: 28150 - protein, 80 aa, Homo sapiens
RTRGRELRSAASPAGCAMGCGNSTATSAGAGQGPAGAAKDVTEESVTEDDKRRNYGGVYVGLPSEAVNMVSSQTKTVRKN

SEQ ID NO: 28151 - protein, 45 aa, Homo sapiens
RREICQHGKPLLRMHPSLETPLKGWSLGDHIKRKMPTTSTTSTRF

SEQ ID NO: 28152 - protein, 38 aa, Homo sapiens
LVALVFQVERCATWERKPSGQLTVLLQRMRRSMLWRRC

SEQ ID NO: 28153 - protein, 305 aa, Homo sapiens
LRMATSRYEPVAEIGVGAYGTVYKARDPHSGHFVALKSVRVPNGGGGGGGLPISTVREVALLRRLEAFEHPNVVRLMDVCATSRTDREIKVTLVFEHVDQDLRTYLDKAPPPGLPAETIKDLMRQFLRGLDFLHANCIVHRDLKPENILVTSGGTVKLADFGLARIYSYQMALTPVVVTLWYRAPEVLLQSTYATPVDMWSVGCIFAEMFRRKPLFCGNSEADQLGKIFDLIGLPPEDDWPRDVSLPRGAFPPRGPRPVQSVVPEMEESGAQLLLEMLTFNPHKRISAFRALQHSYLHKDEGNPE

SEQ ID NO: 28154 - protein, 84 aa, Homo sapiens
RRARLVCAQPRSGQARMGPQVCAPYSPPITYQRALQELLTNRLSMVLHSRINCTSVCAKSTRHWRNSRNNTWYRHMDLSGKRSR

SEQ ID NO: 28155 - protein, 290 aa, Homo sapiens
KRMAGEKVEKPDTKEKKPEAKKVDAGGKVKKGNLKAKKPKKGKPHCSRNPVLVRGIGRYSRSAMYSRKAMYKRKYSAAKSKVEKKKKEKVLATVTKPVGGDKNGGTRVVKLRKMPRYYPTEDVPRKLLSHGKKPFSQHVRKLRASITPGTILIILTGRHRGKRVVFLKQLASGLLLVTGPLVLNRVPLRRTHQKFVIATSTKIDISNVKIPKHLTDAYFKKKKLRKPRHQEGEIFDTEKEKYEITEQRKIDQKAVDSQILPKIKAIPQLQGYLRSVFALTNGIYPHKLVF

SEQ ID NO: 28156 - protein, 113 aa, Homo sapiens
MAGRHDWLVAHKPRALVGPRQRGSGELKSLCLSWKLAWPPELPGVGTGGFVLYAPFSLCAMGDVKESKMQITPETPGRIPVLNPFESPSDYSNLHEQTLASPSVFKSTKLPNR

SEQ ID NO: 28157 - protein, 81 aa, Homo sapiens
VQLVRAGATLNVSTTRYAQTPAHIAAFGGHPQCLVWLIQAGANINKPDCEGETPIHKAARSGSLECISALVANGAHVDSQH

SEQ ID NO: 28158 - protein, 111 aa, Homo sapiens
ILNGGHQNVFPNHISVGTNRKRCLEDSEDFGVKKARTEGETALRVGRAHLFFLSVICFLFMAERTFEMRPSLQVVMRLVDCAVTVEISPVLPLRRWDLTKGNVREILMAQV

SEQ ID NO: 28159 - protein, 175 aa, Homo sapiens
VREDPDGGAGWREGGSFKASLTWLWPLGEMKLHCEVEVISRHLPALGLRNRGKGVRAVLSLCQQTSRSQPPVRAFLLISTLKDKRGTRYELRENIEQFFTKFVDEGKATVRLKEPPVDICLSKDSIWLSYHSIPSLPRFGYRKNLCLWKILSELFHSRNYYHESAFCCPHCGLSR

SEQ ID NO: 28160 - protein, 30 aa, Homo sapiens
IKENAGLSWPLKSGLPRLPPSIKMVVGRPS

SEQ ID NO: 28161 - protein, 376 aa, Homo sapiens
RGAGNWRVGLQTGEAAPSPHRDLRDTPDPRPWLARTHRMTTTLVSATIFDLSEVLCKGNKMLNYSAPSAGGCLLDRKAVGTPAGGGFPRRHSVTLPSSKFHQNQLLSSLKGEPAPALSSRDSRFRDRSFSEGGERLLPTQKQPGGGQVNSSRYKTELCRPFEENGACKYGDKCQFAHGIHELRSLTRHPKYKTELCRTFHTIGFCPYGPRCHFIHNAEERRALAGARDLSADRPRLQHSFSFAGFPSAAATAAATGLLDSPTSITPPPILSADDLLGSPTLPDGTNNPFAFSSQELASLFAPSMGLPGGGSPTTFLFRPMSESPHMFDSPPSPQDSLSDQEGYLSSSSSSHSGSDSPTLDNSRRLPIFSRLSISDD

SEQ ID NO: 28162 - protein, 84 aa, Homo sapiens
LQTVPQAPGVPASVAVAPECPSEPRGACPPAPRRGPARHLGRRRTDAGTSTRSRLLDLGTLTRFLWGTAEDYFEFRWSPVVWHI

SEQ ID NO: 28163 - protein, 9 aa, Homo sapiens
ITCCCVLWT

SEQ ID NO: 28164 - protein, 780 aa, Homo sapiens
RPRRLRVLRINRTSVALRLAGTGRFVAKTPGHPGSWEMGLLTFRDVAVEFSLEEWEHLEPAQKNLYQDVMLENYRNLVSLGLVVSKPDLITFLEQRKEPWNVKSEETVAIQPDVFSHYNKDLLTEHCTEASFQKVISRRHGSCDLENLHLRKRWKREECEGHNGCYDEKTFKYDQFDESSVESLFHQQILSSCAKSYNFDQYRKVFTHSSLLNQQEEIDIWGKHHIYDKTSVLFRQVSTLNSYRNVFIGEKNYHCNNSEKTLNQSSSPKNHQENYFLEKQYKCKEFEEVFLQSMHGQEKQEQSYKCNKCVEVCTQSLKHIQHQTIHIRENSYSYNKYDKDLSQSSNLRKQIIHNEEKPYKCEKCGDSLNHSLHLTQHQIIPTEEKPCKWKECGKVFNLNCSLYLTKQQQIDTGENLYKCKACSKSFTRSSNLIVHQRIHTGEKPYKCKECGKAFRCSSYLTKHKRIHTGEKPYKCKECGKAFNRSSCLTQHQTTHTGEKLYKCKVCSKSYARSSNLIMHQRVHTGEKPYKCKECGKVFSRSSCLTQHRKIHTGENLYKCKVCAKPFTCFSNLIVHERIHTGEKPYKCKECGKAFPYSSHLIRHHRIHTGEKPYKCKACSKSFSDSSGLTVHRRTHTGEKPYTCKECGKAFSYSSDVIQHRRIHTGQRPYKCEECGKAFNYRSYLTTHQRSHTGERPYKCEECGKAFNSRSYLTTHRRRHTGERPYKCDECGKAFSYRSYLTTHRRSHSGERPYKCEECGKAFNSRSYLIAHQRSHTREKL

SEQ ID NO: 28165 - protein, 35 aa, Homo sapiens
VVLRGAALLSSGRGTPGVEGGRGGQWRQNVGYQGI

SEQ ID NO: 28166 - protein, 74 aa, Homo sapiens
LVPGRGRPLGGDARREGASVGGTSRDWSEEGICLTVDPWGSTLSSEMLQLGPPLSERSFAALKLTGEGKASPGV

SEQ ID NO: 28167 - protein, 16 aa, Homo sapiens
RASVWISKEEFPLKHR

SEQ ID NO: 28168 - protein, 38 aa, Homo sapiens
RGSSEQQDTCSNPGPCSSPTGPMPSMGRSPPRATWTLT

SEQ ID NO: 28169 - protein, 137 aa, Homo sapiens
KQEKRNQDRLRRREEREREERLSRRSGSRTRDRRRSRSRDRRRRRSRSTSRERRKLSRSRSRDRHRRHRSRSRSHSRGHRRASRDRSAKYKFSRERASREESWESGRSERGPPDWRLESSNGKMASRRSEEKEAGEI

SEQ ID NO: 28170 - protein, 349 aa, Homo sapiens
RRGAGELRTMCAQYCISFADVEKAHINIRDSIHLTPVLTSSILNQLTGRNLFFKCELFQKTGSFKIRGALNAVRSLVPDALERKPKAVVTHSSGNHGQALTYAAKLEGIPAYIVVPQTAPDCKKLAIQAYGASIVYCEPSDESRENVAKRVTEETEGIMVHPNQEPAVIAGQGTIALEVLNQVPLVDALVVPVGGGGMLAGIAITVKALKPSVKVYAAEPSNADDCYQSKLKGKLMPNLYPPETIADGVKSSIGLNTWPIIRDLVDDIFTVTEDEIKCATQLVWERMKLLIEPTAGVGVAAVLSQHFQTVSPEVKNICIVLSGGNVDLTSSITWVKQAERPASYQSVSV

SEQ ID NO: 28171 - protein, 85 aa, Homo sapiens
LAPLHWADDDGNPTEQYPLNPNGSPGGVAGICSCDGRHLAVMPHPERAVRPWQWAWRPPPFDTLTTSPWLQLFINARNWTLEGSC

SEQ ID NO: 28172 - protein, 10 aa, Homo sapiens
IICPRLKNSS

SEQ ID NO: 28173 - protein, 46 aa, Homo sapiens
LQATESLQGEVSSLEIAEEPAASTSVKEDVPFLGSLSRGSPASCIF

SEQ ID NO: 28174 - protein, 34 aa, Homo sapiens
VWEEGFISMLESRVNGQGKLWGLLPAGPSLQPSP

SEQ ID NO: 28175 - protein, 35 aa, Homo sapiens
RSRSLSLGNMRVTSTATSSMDWLLPNSHTVGLFLT

SEQ ID NO: 28176 - protein, 43 aa, Homo sapiens
KPEEDDFQDFQDASKSGSLDDSFSDFQELPASSKTSNSQHGNR

SEQ ID NO: 28177 - protein, 39 aa, Homo sapiens
TPSCEACRPWRPWAAPQSSAPTRRARSPPIRCLSAGCSW

SEQ ID NO: 28178 - protein, 222 aa, Homo sapiens
VAGKAMSKGRAEAAAGAAGILLRYLQEQNRPYSSQDVFGNLQREHGLGKAVVVKTLEQLAQQGKIKEKMYGKQKIYFADQDQFDMVSDADLQVLDGKIVALTAKVQSLQQSCRYMEAELKELSSALTTPEMQKEIQELKKECAGYRERLKNIKAATNHVTPEEKEQVYRERQKYCKEWRKRKRMATELSDAILEGYPKSKKQFFEEVGIETDEDYNVTLPDP

SEQ ID NO: 28179 - protein, 60 aa, Homo sapiens
LAAAEVPSSPSTTTARCSFGAGAAGPCSGTLSAPPGPASACTTWSWTPRPWRRRRSRASW

SEQ ID NO: 28180 - protein, 29 aa, Homo sapiens
RFEGRIFFSCSLEGSLVWLMKSQSSEIPS

SEQ ID NO: 28181 - protein, 49 aa, Homo sapiens
IQLLKWKWLFRVLSKELEGYCQSLGVGLDAEVKVLFALKEKGTRSKICP

SEQ ID NO: 28182 - protein, 71 aa, Homo sapiens
RRSRLPGDPARGRLKPRPACPGLGRRSRALDPAAPLGLGATSAAPPLKSQSIQDGKPRRQTRIKCREGQYE

SEQ ID NO: 28183 - protein, 22 aa, Homo sapiens
KIKGKASPWWGKVICENGSLFT

SEQ ID NO: 28184 - protein, 273 aa, Homo sapiens
RPSSSDCSCATSVSLPGTGNRGVSEPVVRSAPAACSVPPGSPRRCRRRVAMEVQKEAQRIMTLSVWKMYHSRMQRGGLRLHRSLQLSLVMRSARELYLSAKVEALEPEVSLPAALPSDPRLHPPREAESTAETATPDGEHPFPEPMDTQEAPTAEETSACCAPRPAKVSRKRRSSSLSDGGDAGLVPSKKARLEEKEEEEGASSEVADRLQPPPAQAEGAFPNLARVLQRRFSGLLNCSPAAPPTAPPACEAKPACRPADSMLNVLVRAVVAF

SEQ ID NO: 28185 - protein, 629 aa, Homo sapiens
LVEAVKGAALVEAGLEGEARTPLAIPHTPWGRRPEEEAEDSGGPGEDRETLGLKTSSSLPEAWGLLDDDDGMYGEREATSVPRGQGSQFADGQRAPLSPSLLIRTLQGSDKNPGEEKAEEEGVAEEEGVNKFSYPPSHRECCPAVEEEDDEEAVKKEAHRTSTSALSPGSKPSTWVSCPGEEENQATEDKRTERSKGARKTSVSPRSSGSDPRSWEYRSGEASEEKEEKAHKETGKGEAAPGPQSSAPAQRPQLKSWWCQPSDEEEGEVKALGAAEKDGEAECPPCIPPPSAFLKAWVYWPGEDTEEEEDEEEDEDSDSGSDEEEGEAEASSSTPATGVFLKSWVYQPGEDTEEEEDEDSDTGSAEDEREAETSASTPPASAFLKAWVYRPGEDTEEEEDEDVDSEDKEDDSEAALGEAESDPHPSHPDQRAHFRGWGYRPGKETEEEEAAEDWGEAEPCPFRVAIYVPGEKPPPPWAPPRLPLRLQRRLKRPETPTHDPDPETPLKARKVRFSEKVTVHFLAVWAGPAQAARQGPWEQLARDRSRFARRITQAQEELSPCLTPAARARAWARLRNPPLAPIPALTQTLPSSSVPSSPVQTTPLSQAVATPSRSSAAAAAALDLSGRRG

SEQ ID NO: 28186 - protein, 61 aa, Homo sapiens
RKALPPTHLGQSWFCSCCRDTELAISALRARTATGSPGSCRCTAGPLPCASALESCCCRVT

SEQ ID NO: 28187 - protein, 111 aa, Homo sapiens
KEQLTDEEKCWTGRENSDANMQRSIMSFFHPKKEGKAKKPEKEASNSSRETEPPPKAALKEWNGVVSESDSPVKRPGRKKRRPRKKASQRLKWPQRRKEKTGTSPPRLPSP

SEQ ID NO: 28188 - protein, 67 aa, Homo sapiens
VGEREAFTHALVAAFCTCFSAQVSVQRNWLPRNPNCSFRVSSAILRVELGACRHFPNLGGPGLDFHE

SEQ ID NO: 28189 - protein, 73 aa, Homo sapiens
VEGSGEDRAVLLSPRAGDTISHRESWPHWPCTSSSSSPSSSAWWPPRTGRLNAAKTPSRNACRILTMSSCSRW

SEQ ID NO: 28190 - protein, 26 aa, Homo sapiens
KEFSVAQLGNRGSPWRPHWWGRRSCL

SEQ ID NO: 28191 - protein, 43 aa, Homo sapiens
IEKCFNPRRRRLQFLRARSAGPADTLTPSSAARGPERPEQPGS

SEQ ID NO: 28192 - protein, 47 aa, Homo sapiens
VVQILGKTCSSALSGRQCHKLKALIPMMPPRISSIFHPWMMKEILKT

SEQ ID NO: 28193 - protein, 83 aa, Homo sapiens
LRPACSGETARAVSQVGRQPGRPARVRGAELGREELLRLEATGPMKGDVAPHGSRGSQLFLSLQNLILALDLRRESLTRDETQ

SEQ ID NO: 28194 - protein, 68 aa, Homo sapiens
RTAARPHCPRFRAQSFLLQGNMKTLCGYMTLLLKQQTMLGLLFHLLLRSPTLMVLERRCRNWEKVKGL

SEQ ID NO: 28195 - protein, 418 aa, Homo sapiens
TAELLEDLGPWVAGIMDRSKENCISGPVKATAPVGGPKRVLVTQQFPCQNPLPVNSGQAQRVLCPSNSSQRIPLQAQKLVSSHKPVQNQKQKQLQATSVPHPVSRPLNNTQKSKQPLPSAPENNPEEELASKQKNEESKKRQWALEDFEIGRPLGKGKFGNVYLAREKQSKFILALKVLFKAQLEKAGVEHQLRREVEIQSHLRHPNILRLYGYFHDATRVYLILEYAPLGTVYRELQKLSKFDEQRTATYITELANALSYCHSKRVIHRDIKPENLLLGSAGELKIADFGWSVHAPSSRRTTLCGTLDYLPPEMIEGRMHDEKVDLWSLGVLCYEFLVGKPPFEANTYQETYKRISRVEFTFPDFVTEGARDLISRLLKHNPSQRPMLREVLEHPWITANSSKPSNCQNKESASKQS

SEQ ID NO: 28196 - protein, 120 aa, Homo sapiens
ISQWRTRTAGTRGGWSEWRSVKSPVGSSVPECPWRCLVPAQRLCIRSWAPRRPVGYCLLLITARGSHSIAQARVRGYLIRNFSEGRARWLMPVIPAFSEAEAGVQWCDLSSLQPLLPGFK

SEQ ID NO: 28197 - protein, 23 aa, Homo sapiens
VETETFLGSPRPHGGPSFVREQL

SEQ ID NO: 28198 - protein, 87 aa, Homo sapiens
LGFFDFSFKKKKVFQAARASCARPSPGPAPPAASGRERIAEPRAARRASAGNQGDAPGTADNLSAFQEQPTRDLTCHLGSPTQWRWL

SEQ ID NO: 28199 - protein, 27 aa, Homo sapiens
KSHRSYSCQVTHEGSTVEKTVAPTECS

SEQ ID NO: 28200 - protein, 11 aa, Homo sapiens
LNCPVSDSDFS

SEQ ID NO: 28201 - protein, 73 aa, Homo sapiens
RQATEIPRGRRNSKCMGRVWDLPGVLKVEGFRATMAQRLVRVLQICAGHVPGVSALNLLSLLRSSEGPSLEDL

SEQ ID NO: 28202 - protein, 546 aa, Homo sapiens
TGGAQVARRGSGRQTRTRATQTRDRGADTGETRERGRDRSTWLRHRRREAADPGRVRHPRRPGAMAALMTPGTGAPPAPGDFSGEGSQGLPDPSPEPKQLPELIRMKRDGGRLSEADIRGFVAAVVNGSAQGAQIGAMLMAIRLRGMDLEETSVLTQALAQSGQQLEWPEAWRQQLVDKHSTGGVGDKVSLVLAPALAACGCKVPMISGRGLGHTGGTLDKLESIPGFNVIQSPEQMQVLLDQAGCCIVGQSEQLVPADGILYAARDVTATVDSLPLITASILSKKLVEGLSALVVDVKFGGAAVFPNQEQARELAKTLVGVGASLGLRVAAALTAMDKPLGRCVGHALEVEEALLCMDGAGPPDLRDLVTTLGGALLWLSGHAGTQAQGAARVAAALDDGSALGRFERMLAAQGVDPGLARALCSGSPAERRQLLPRAREQEELLAPADGTVELVRALPLALVLHELGAGRSRAGEPLRLGVGAELLVDVGQRLRRGTPWLRVHRDGPALSGPQSRALQEALVLSDRAPFAAPSPFAELVLPPQQ

SEQ ID NO: 28203 - protein, 208 aa, Homo sapiens
LRPLLTDFRLQFICAPASSLSLRRLRLRPQKEISILCPEQNRMAMSQESLTFKDVFVDFTLEEWQQLDSAQKNLYRDVMLENYSHLVSVGYLVAKPDVIFRLGPGEESWMADGGTPVRTCAEVWQVDEQIDHYKESQDKLPWQAAFIGKETLKDESGQESRTCRKSIYLSTEFDSVRQRLPKYYSWEKAFKTSFKLSWSKWKLCKKER

SEQ ID NO: 28204 - protein, 69 aa, Homo sapiens
LLLQPLRPPRPPREPETPVYAPPLTPLATCPPRLGGASCGTSRGGSSSRSQRGSVREQHNGVERGHFRA

SEQ ID NO: 28205 - protein, 354 aa, Homo sapiens
MEDAGEDPTTFAAHSLPSDPRLLATVTNAYLGTRVFHDTLHVSGVYNGAGGDTHRAMLPSPLNVRLEAPAGMGEQLTETFALDTNTGSFLHTLEGPRFRASQCIYAHRTLPHVLAFRVSIARLAPGSGPITLLLRSAFSPESPDLDLHQGPDFQGARYLYGHTLTPEQPGGPQQEVHMLWTPAPPDLTLGEGEEARTWDFLTAVGGSQAEAQACLTEALQLQARGALYTAHAQAWAQLWVECGLDVVGPLQLRQALRGSLYYLLSALPQPKAPGYICHGLSPGGLSNGSREECYWGHVFWDQVSTVHPAPATQQATHGGPRSLPSLGPGLWLGKHRDCGKREEAWKVCRSLVEE

SEQ ID NO: 28206 - protein, 120 aa, Homo sapiens
MATVWDEAEQDGIGEEVLKMSTEEIIQRTRLLDSEIKIMKSEVLRVTHELQAMKDKIKENSEKIKVNKTLPYLVSNVIELLDVDPNDQEEDGANIDLDSQRKGKCAVIKTSTRQVSVAQQ

SEQ ID NO: 28207 - protein, 353 aa, Homo sapiens
MEFLCNMDNKDLVWLEEIQEEAERMFTREFSKEPELMPKTPSQKNRRKKRRISYVQDENRDPIRRRLSRRKSRSSQLSSRRLRSKDSVEKLATVVGENGSVLRRVTRAAAAAAAATMALAAPSSPTPESPTMLTKKPEDNHTQCQLVPVVEIGISERQNAEQHVTQLMSTEPLPRTLSPTPASATAPTSQGIPTSDEESTPKKSKARILESITVSSLMATPQDPKGQGVGTGRSASKLRIAQVSPGPRDSPAFPDSPWRERVLAPILPDNFSTPTGSRTDSQSVRHSPIAPSSPSPQVLAQKYSLVAKQESVVRRASRRLAKKTAEEPAASGRIICHSYLERLLNVEVPQKVG

SEQ ID NO: 28208 - protein, 110 aa, Homo sapiens
MALAPQEHERILDMCCAPGGKTSYMAQLMKNTGVILANDANAERLKSVVGNLHRLGVTNTIISHYDGRQFPKVVGGFDRVLLDAPCSGTGVISKDPAVKTNKVRSQVVGP

SEQ ID NO: 28209 - protein, 166 aa, Homo sapiens
MNKAGQVMCVAQGSGHTHSVGTVCCSRLKESFLVTGSQDCTVKLWPLPKALLSKNTAPDNGPILLQAQTTQRCHDKDINSVAIAPNDKLLATGSQDRTAKLWALPQCQLLGVFSGHRRGLWCVQFSPMDQVLATASADGTIKLWALQDFSCLKVSGAPDPPHFPPW

SEQ ID NO: 28210 - protein, 323 aa, Homo sapiens [sequence omitted]

SEQ ID NO: 28211 - protein, 20 aa, Homo sapiens
MVYRRQLTFEEEIAALRSFL

SEQ ID NO: 28212 - protein, 257 aa, Homo sapiens [sequence omitted]

SEQ ID NO: 28213 - protein, 63 aa, Homo sapiens
MCGYCLGGCPWPSGMQPQPRCVSSLWTSSRPTSTSMRYTMRRRSGGPSRRHPRIRATRRRRRS

SEQ ID NO: 28214 - protein, 132 aa, Homo sapiens
MATKGGTVKAASGFNAMEDAQTLRKAMKGLGTDEDAIISVLAYRNTAQRQEIRTAYKSTIGRDLIDDLKSELSGNFEQVIVGMMTPTVLYDVQELRRAMKGAGTDEGCLIEILASRTPEEIRRISQTYQQRT

SEQ ID NO: 28215 - protein, 31 aa, Homo sapiens
MSALAARLLQPAHSCSLRLRPFHLAAVRNQQ

SEQ ID NO: 28216 - protein, 57 aa, Homo sapiens
MAETKGGQAERKRARKSDKSGRPSAPIPPHRRAPHSLSPGPERNEASCASRRHSLFT

SEQ ID NO: 28217 - protein, 225 aa, Homo sapiens
MCLSPDRKMEVEELSPLALGRFSLTPAEGDTEEDDGFVDILESDLKDDDAVPPGMESLISAPLVKTLEKEEEKDLVMYSKCQRLFRSPSMPCSVIRPILKRLERPQDRDTPVQNKRRRSVTPPEEQQEAEEPKARVLRSKSLCHDEIENLLDSDHRELIGDYSKVVPWVSDPRGASQLPWEPELNLKAKAGLPPTDSRRKAPRPQVHLTRNDGGPIDGQVQQHRG

SEQ ID NO: 28218 - protein, 174 aa, Homo sapiens [sequence omitted]

SEQ ID NO: 28219 - protein, 19 aa, Homo sapiens
MKRQLHRMRQLAQTGSLGR

SEQ ID NO: 28220 - protein, 343 aa, Homo sapiens
MTPGTGAPPAPGDFSGEGSQGLPDPSPEPKQLPELIRMKRDGGRLSEADIRGFVAAVVNGSAQGAQIGAMLMAIRLRGMDLEETSVLTQALAQSGQQLEWPEAWRQQLVDKHSTGGVGDKVSLVLAPALAACGCKVPMISGRGLGHTGGTLDKLESIPGFNVIQSPEQMQVLLDQAGCCIVGQSEQLVPADGILYAARDVTATVDSLPLITGWRGSQPRASGRGSADRHGQAPGSLRGPRPGGGGGAALHGRRRPARLKGPGHHARGRPALAQRTRGDSGPGRCPGGRGAGRRLGPWPLRADAGGAGRGSRSGPSPVLGKSRRTPAAAASRPGAGGAAGARRW

SEQ ID NO: 28221 - protein, 624 aa, Homo sapiens [sequence omitted]

SEQ ID NO: 28222 - protein, 262 aa, Homo sapiens [sequence omitted]

SEQ ID NO: 28223 - protein, 607 aa, Homo sapiens
MIARCLLAVRSLRRVGGSRILLRMTLGREVMSPLQAMSSYTVAGRNVLRWDLSPEQIKTRTEELIVQTKQVYDAVGMLGIEEVTYENCLQALADVEVKYIVERTMLDFPQHVSSDKEVRAASTEADKRLSRFDIEMSMRGDIFERIVHLQETCDLGKIKPEARRYLEKSIKMGKRNGLHLPEQVQNEIKSMKKRMSELCIDFNKNLNEDDTFLVFSKAELGALPDDFIDSLEKTDDDKYKITLKYPHYFPVMKKCCIPETRRRMEMAFNTRCKEENTIILQQLLPLRTKVAKLLGYSTHADFVLEMNTAKSTSRVTAFLDDLSQKLKPLGEAEREFILNLKKKECKDRGFEYDGKINAWDLYYYMTQTEELKYSIDQEFLKEYFPIEVVTEGLLNTYQELLGLSFEQMTDAHVWNKSVTLYTVKDKATGEVLGQFYLDLYPREGKYNHAACFGLQPGCLLPDGSRMMAVAALVVNFSQPVAGRPSLLRHDEVRTYFHEFGHVMHQICAQVSFFFPPVNLPISFFRKLLDCCQVSAPNRFFQKLNVFKNFIGLLQNQNFPYPVLFHNIFLLGGSSTSERCLLNNSLWKKNKTICKERLQILCFFLLIL

SEQ ID NO: 28224 - protein, 79 aa, Homo sapiens
MSRPAAAAAAAAAALSFVSRAVWARAGVPGTPPPPSFPQDSSLLALGPNGARLPGGRSAHRARLPLLLPDHLVSTRNEI

SEQ ID NO: 28225 - protein, 45 aa, Homo sapiens
MLKYRFPAGTMALSSVAQWSSSEDAKIHEKTSRTSGRIFNGKSLG

SEQ ID NO: 28226 - protein, 95 aa, Homo sapiens
MALKDYALEKEKVKKFLQEFYQDDELGKKQFKYGNQLVRLAHREQVALYVDLDDVAEDDPELVDSICENARRYAKLFADAVQELLPQYKEREVSG

SEQ ID NO: 28227 - protein, 855 aa, Homo sapiens
MIHGTIKNQLQGLQKSLMVYIAEIYFRAWKKASGKILEAIENDCIQDFMFHGIHLPRRSPVHSKVREVLSYFHHQKKVRQGVEEMLYRLYKPILWRGLKARNSEVRSNAALLFVEAFPIRDPNLHAIEMDSEIQKQFEELYSLLEDPYPMVRSTGILGVCKITSKYWEMMPPTILIDLLKKVTGELAFDTSSADVRCSVFKCLPMILDNKLSHPLLEQLLPALRYSLHDNSEKVRVAFVDMLLKIKAVRAAKFWKICPMEHILVRLETDSRPVSRRLVSLIFNSFLPVNQPEEVWCERCVTLVQMNHAAARRFYQYAHEHTACTNIAKLIHVIRHCLNACIQRAVREPPEDEEEEDGREKENVTVLDKTLSVNDVACMAGLLEIIVILWKSIDRSMENNKEAKLYTINKFASVLPEYLKVFKDDRCKIPLFMLMSFMPASAVPPFSCGVISTLRSREEGAVDKSYCTLLDCLCSWGQVGHILELVDNWLPTEHAQAKSNTASKGRVQIHDTRPVKPELALVYIEYLLTHPKNRECLLSAPRKKLNHLLKALETSKADLESLLQTPGGKPRGFSEAAAPRAFGLHCRLSIHLQHKFCSEGKVYLSMLEDTGFWLESKILSFIQDQEEDYLKLHRVIYQQIIQTYLTVCKDVVMVGLGDHQFQMQLLQRSLGIMQTVKGFFYVSLLLDILKEITGSSLIQKTDSDEEVAMLLDTVQKVFQKMLECIARSFRKQPEEGLRVSDVEELTPPEHLSDLPPFSRCLIGIIIKSSNVVRSFLDELKACVASNDIEGIVCLTAAVHIILVINAGKHKSSKVREVAATVHRKLKTFMEITLEEDSIERFLYESSSRTLGELLNS

SEQ ID NO: 28228 - protein, 67 aa, Homo sapiens
MLNSKTKTQYFHQEKWIYVHKGSTKERHGYCTLGEAFNRLDFSTAILDSRRFNYVVRALPLASEGNR

SEQ ID NO: 28229 - protein, 93 aa, Homo sapiens
LDIVHISIFYPRVSLTDTGRFGVGMAILSLLLKPLSCCFVYHMYRERGGELLVHTGFLGSSQDRSAYQTIDSAEAPADPFAVPEGRSQDARGY

SEQ ID NO: 28230 - protein, 630 aa, Homo sapiens
LPGACGRGCSLAVRGSARVAGPALSLTGGSEAGRRSKSKMKYILVTGGVISGIGKGIIASSVGTILKSCGLHVTSIKIDPYINIDAGTFSPYEHGEVFVLDDGGEVDLDLGNYERFLDIRLTKDNNLTTGKIYQYVINKERKGDYLGKTVQVVPHITDAIQEWVMRQALIPVDEDGLEPQVCVIELGGTVGDIESMPFIEAFRQFQFKVKRENFCNIHVSLVPQPSSTGEQKTKPTQNSVRELRGLGLSPDLVVCRCSNPLDTSVKEKISMFCHVEPEQVICVHDVSSIYRVPLLLEEQGVVDYFLRRLDLPIERQPRKMLMKWKEMADRYDRLLETCSIALVGKYTKFSDSYASVIKALEHSALAINHKLEIKYIDSADLEPITSQEEPVRYHEAWQKLCSAHGVLVPGGFGVRGTEGKIQAIAWARNQKKPFLGVCLGMQLAVVEFSRNVLGWQDANSTEFDPTTSHPVVVDMPEHNPGQMGGTMRLGKRRTLFQTKNSVMRKLYGDADYLEERHRHRFEVNPVWKKCLEEQGLKFVGQDVEGERMEIVELEDHPFFVGVQYHPEFLSRPIKPSPPYFGLLLASVGRLSHYLQKGCRLSPRDTYSDRSGSSSPDSEITELKFPSINHD

SEQ ID NO: 28231 - protein, 197 aa, Homo sapiens
VGIGKGDALPPPTLQPSPLFPPLEFRPVPLPSGEEGEYVLALKQELRGAMRQLPYFIRPAVPKRDVERYSDKYQMSGPIDNAIDWNPDWRRLPRELKIRVRKLQKERITILLPKRPPKTTEDKEETIQKLETLEKKEEEVTSEEDEEKEEEEEKEEEEEEEYDEEEHEEETDYIMSYFDNGEDFGGDSDDNMDEAIY

SEQ ID NO: 28232 - protein, 466 aa, Homo sapiens
RDAVIAHEQRLLIAKEFGDKAAERRAYSNLGNAYIFLGEFETASEYYKKTLLLARQLKDRAVEAQSCYSLGNTYTLLQDYEKAIDYHLKHLAIAQELNDRIGEGRACWSLGNAYTALGNHDQAMHFAEKHLEISREVGDKSGELTARLNLSDLQMVLGLSYSTNNSIMSENTEIDSSLNGVRPKLGRRHSMENMELMKLTPEKVQNWNSEILAKQKPLIAKPSAKLLFVNRLKGKKYKTNSSTKVLQDASNSIDHRIPNSQRKISADTIGDEGFFDLLSRFQSNRMDDQRCCLQEKNCHTASTTTSSTPPKMMLKTSSVPVVSPNTDEFLDLLASSQSRRLDDQRASFSNLPGLRLTQNSQSVLSHLMTNDNKEADEDFFDILVKCQGSRLDDQRCAPPPATTKGPTVPDEDFFSLILRSQGKRMDEQRVLLQRDQNRDTDFGLKDFLQNNALLEFKNSGKKSADH

SEQ ID NO: 28233 - protein, 167 aa, Homo sapiens
KKNDTTEIETLLLNTAPKIIDEQLVCRLSKTDIFIICRDNKIYLDKMITRNLKLRFYGHRQYLECEVFRVEGIKDNLDDIKRIIKAREHRNRLLADIRDYRPYADLVSEIRILLVGPVGSGKSSFFNSVKSIFHGHVTGQAVVGSDITSITERGNPNIQLNAKSNGK

SEQ ID NO: 28234 - protein, 29 aa, Homo sapiens
RKSNTRNNMIQTKPTGTQQSTNTAVTLTG

SEQ ID NO: 28235 - protein, 106 aa, Homo sapiens
RRTGAGGGRLATFSPPANAQGAHILTNSAARWIFFVFKEKKCPCVCRDDLQFSPAEADRMRLWAVPPPSMLPLFKMKRKPRKGKTTRTEMCLAMSIGSNQWKRSNT

SEQ ID NO: 28236 - protein, 212 aa, Homo sapiens
IMQSAMFLAVQHDCRPMDKSAGSGHKSEEKREKMKRTLLKDWKTRLSYFLQNSSTPGKPKTGKKSKQQAFIKPSPEEAQLWSEAFDELLASKYGLAAFRAFLKSEFCEENIEFWLACEDFKKTKSPQKLSSKARKIYTDFIEKEAPKEINIDFQTKTLIAQNIQEATSGCFTTAQKRVYSLMENNSYPRFLESEFYQDLCKKPQITTEPHAT

SEQ ID NO: 28237 - protein, 185 aa, Homo sapiens
LQQFMENKSRMLASGNQPDQDITHFFQQIQELNLEMEDQQENLDTLEHLVTELSSCGFALDLCQHQDRVQNLRKDFTELQKTVKEREKDASSCQEQLDEFRKLVRTFQKWLKETEGSIPPTETSMSAKELEKQIEHLKSLLDDWASKGTLVEEINCKGTSLENLIMEITAPDSQGKTGEYRLFKI

SEQ ID NO: 28238 - protein, 4177 aa, Homo sapiens
LEYRCDRRPDCRDMSDELNCEEPVLGISPTFSLLVETTSLPPRPETTIMRQPPVTHAPQPLLPGSVRPLPCGPQEAACRNGHCIPRDYLCDGQEDCEDGSDELDCGPPPPCEPNEFPCGNGHCALKLWRCDGDFDCEDRTDEANCPTKRPEEVCGPTQFRCVSTNMCIPASFHCDEESDCPDRSDEFGCMPPQVVTPPRESIQASRGQTVTFTCVAIGVPTPIINWRLNWGHIPSHPRVTVTSEGGRGTLIIRDVKESDQGAYTCEAMNARGMVFGIPDGVLELVPQRGPCPDGHFYLEHSAACLPCFCFGITSVCQSTRRFRDQIRLRFDQPDDFKGVNVTMPAQPGTPPLSSTQLQIDPSLHEFQLVDLSRRFLVHDSFWALPEQFLGNKVDSYGGSLRYNVRYELARGMLEPVQRPDVVLMGAGYRLLSRGHTPTQPGALNQRQVQFSEEHWVHESGRPVQRAELLQVLQSLEAVLIQTVYNTKMASVGLSDIAMDTTVTHATSHGRAHSVEECRCPIGYSGLSCESCDAHFTRVPGGPYLGTCSGCNCNGHASSCDPVYGHCLNCQHNTEGPQCNKCKAGFFGDAMKATATSCRPCPCPYIDASRRFSDTCFLDTDGQATCDACAPGYTGRRCESCAPGYEGNPIQPGGKCRPVNQEIVRCDERGSMGTSGEACRCKNNVVGRLCNECADGSFHLSTRNPDGCLKCFCMGVSRHCTSSSWSRAQLHGASEEPGHFSLTNAASTHTTNEGIFSPTPGELGFSSFHRLLSGPYFWSLPSRFLGDKVTSYGGELRFTVTQRSQPGSTPLHGQPLVVLQGNNIILEHHVAQEPSPGQPSTFIVPFREQAWQRPDGQPATREHLLMALAGIDTLLIRASYAQQPAESRVSGISMDVAVPEETGQDPALEVEQCSCPPGYRGPSCQDCDTGYTRTPSGLYLGTCERCSCHGHSEACEPETGACQGCQHHTEGPRCEQCQPGYYGDAQRGTPQDCQLCPCYGDPAAGQAAHTCFLDTDGHPTCDACSPGHSGRHCERCAPGYYGNPSQGQPCQRDSQVPGPIGCNCDPQGSVSSQCDAAGQCQCKAQVEGLTCSHCRPHHFHLSASNPDGCLPCFCMGITQQCASSAYTRHLISTHFAPGDFQGFALVNPQRNSRLTGEFTVEPVPEGAQLSFGNFAQLGHESFYWQLPETYQGDKVAAYGGKLRYTLSYTAGPQGSPLSDPDVQITGNNIMLVASQPALQGPERRSYEIMFREEFWRRPDGQPATREHLLMALADLDELLIRATFSSVPLAASISAVSLEVAQPGPSNRPRALEVEECRCPPGYIGLSCQDCAPGYTRTGSGLYLGHCELCECNGHSDLCHPETGACSQCQHNAAGEFCELCAPGYYGDATAGTPEDCQPCACPLTNPENMFSRTCESLGAGGYRCTACEPGYTGQYCEQCGPGYVGNPSVQGGQCLPETNQAPLVVEVHPARSIVPQGGSHSLRCQVSGSPPHYFYWSREDGRPVPSGTQQRHQGSELHFPSVQPSDAGVYICTCRNLHQSNTSRAELLVTEAPSKPITVTVEEQRSQSVRPGADVTFICTAKSKSPAYTLVWTRLHNGKLPTRAMDFNGILTIRNVQLSDAGTYVCTGSNMFAMDQGTATLHVQASGTLSAPVVSIHPPQLTVQPGQLAEFRCSATGSPTPTLEWTGGPGGQLPAKAQIHGGILRLPAVEPTDQAQYLCRAHSSAGQQVARAVLHVHGGGGPRVQVSPERTQVHAGRTVRLYCRAAGVPSATITWRKEGGSLPPQARSERTDIATLLIPAITTADAGFYLCVATSPAGTAQARIQVVVLSASDASPPPVKIESSSPSVTEGQTLDLNCVVAGSAHAQVTWYRRGGSLPPHTQVHGSRLRLPQVSPADSGEYVCRVENGSGPKEASITVSVLHGTHSGPSYTPVPGSTRPIRIEPSSSHVAEGQTLDLNCVVPGQAHAQVTWHKRGGSLPARHQTHGSLLRLHQVTPADSGEYVCHVVGTSGPLEASVLVTIEASVIPGPIPPVRIESSSSTVAEGQTLDLSCVVAGQAHAQVTWYKRGGSLPARHQVRGSRLYIFQASPADAGQYVCRASNGMEASITVTVTGTQGANLAYPAGSTQPIRIEPSSSQVAEGQTLDLNCVVPGQSHAQVTWHKRGGSLPVRHQTHGSLLRLYQASPADSGEYVCRVLGSSVPLEASVLVTIEPAGSVPALGVTPTVRIESSSSQVAEGQTLDLNCLVAGQAHAQVTWHKRGGSLPARHQVHGSRLRLLQVTPADSGEYVCRVVGSSGTQEASVLVTIQQRLSGSHSQGVAYPVRIESSSASLANGHTLDLNCLVASQAPHTITWYKRGGSLPSRHQIVGSRLRIPQVTPADSGEYVCHVSNGAGSRETSLIVTIQGSGSSHVPSVSPPIRIESSSPTVVEGQTLDLNCVVARQPQAIITWYKRGGSLPSRHQTHGSHLRLHQMSVADSGEYVCRANNNIDALEASIVISVSPSAGSPSAPGSSMPIRIESSSSHVAEGETLDLNCVVPGQAHAQVTWHKRGGSLPSHHQTRGSRLRLHHVSPADSGEYVCRVMGSSGPLEASVLVTIEASGSSAVHVPAPGGAPPIRIEPSSSRVAEGQTLDLKCVVPGQAHAQVTWHKRGGNLPARHQVHGPLLRLNQVSPADSGEYSCQVTGSSGTLEASVLVTIEPSSPGPIPAPGLAQPIYIEASSSHVTEGQTLDLNCVVPGQAHAQVTWYKRGGSLPARHQTHGSQLRLHLVSPADSGEYVCRAASGPGPEQEASFTVTVPPSEGSSYRLRSPVISIDPPSSTVQQGQDASFKCLIHDGAAPISLEWKTRNQELEDNVHISPNGSIITIVGTRPSNHGTYRCVASNAYGVAQSVVNLSVHGPPTVSVLPEGPVWVKVGKAVTLECVSAGEPRSSARWTRISSTPAKLEQRTYGLMDSHAVLQISSAKPSDAGTYVCLAQNALGTAQKQVEVIVDTGAMAPGAPQVQAEEAELTVEAGHTATLRCSATGSPAPTIHWSKLRSPLPWQHRLEGDTLIIPRVAQQDSGQYICNATSPAGHAEATIILHVESPPYATTVPEHASVQAGETVQLQCLAHGTPPLTFQWSRVGSSLPGRATARNELLHFERAAPEDSGRYRCRVTNKVGSAEAFAQLLVQGPPGSLPATSIPAGSTPTVQVTPQLETKSIGASVEFHCAVPSDRGTQLRWFKEGGQLPPGHSVQDGVLRIQNLDQSCQGTYICQAHGPWGKAQASAQLVIQALPSVLINIRTSVQTVVVGHAVEFECLALGDPKPQVTWSKVGGHLRPGIVQSGGVVRIAHVELADAGQYRCTATNAAGTTQSHVLLLVQALPQISMPQEVRVPAGSAAVFPCIASGYPTPDISWSKLDGSLPPDSRLENNMLMLPSVRPQDAGTYVCTATNRQGKVKAFAHLQVPERVVPYFTQTPYSFLPLPTIKDAYRKFEIKITFRPDSADGMLLYNGQKRVPGSPTNLANRQPDFISFGLVGGRPEFRFDAGSGMATIRHPTPLALGHFHTVTLLRSLTQGSLIVGDLAPVNGTSQGKFQGLDLNEELYLGGYPDYGAIPKAGLSSGFIGCVRELRIQGEEIVFHDLNLTAHGISHCPTCRDRPCQNGGQCHDSESSSYVCVCPAGFTGSRCEHSQALHCHPEACGPDATCVNRPDGRGYTCRCHLGRSGLRCEEGVTVTTPSLSGAGSYLALPALTNTHHELRLDVEFKPLAPDGVLLFSGGKSGPVEDFVSLAMVGGHLEFRYELGSGLAVLRSAEPLALGRWHRVSAERLNKDGSLRVNGGRPVLRSSPGKSQGLNLHTLLYLGGVEPSVPLSPATNMSAHFRGCVGEVSVNGKRLDLTYSFLGSQGIGQCYDSSPCERQPCQHGATCMPAGEYEFQCLCRDGFKGDLCEHEENPCQLREPCLHGGTCQGTRCLCLPGFSGPRCQQGSGHGIAESDWHLEGSGGNDAPGQYGAYFHDDGFLAFPGHVFSRSLPEVPETIELEVRTSTASGLLLWQGVEVGEAGQGKDFISLGLQDGHLVFRYQLGSGEARLVSEDPINDGEWHRVTALREGRRGSIQVDGEELVSGRSPGPNVAVNAKGSVYIGGAPDVATLTGGRFSSGITGCVKNLVLHSARPGAPPPQPLDLQHRAQAGANTRPCPS

SEQ ID NO: 28239 - protein, 61 aa, Homo sapiens
IDRAWTLEEAPGRWRGKVKVHSYRERKKREKAVQPNSEEKRGGKGLDFHIGTTFFPVLKDL

SEQ ID NO: 28240 - protein, 12 aa, Homo sapiens
ISLELERDRVSP

SEQ ID NO: 28241 - protein, 43 aa, Homo sapiens
VGSRASGVERRKDGALGASEMLPSAREGRARRRQPGSRHDALA

SEQ ID NO: 28242 - protein, 32 aa, Homo sapiens
TAAPWTPACPLSARPAAASMSASQPPPWPSTM

SEQ ID NO: 28243 - protein, 68 aa, Homo sapiens
KKKRQQHQEEEDILDVRDEKDGGAREAESRAHTGSSSRGKRKRQQHPKKERAGVSTVQKAKKKQKKRD

SEQ ID NO: 28244 - protein, 9 aa, Homo sapiens
VERNKSVIS

SEQ ID NO: 28245 - protein, 42 aa, Homo sapiens
IVQCSCSARTQSVNPEEKFNLETSMLPRLLQISSEHVWDPSP

SEQ ID NO: 28246 - protein, 34 aa, Homo sapiens
LEPSQPSKTDRQTDRQLARGSLGATAASADLMAE

SEQ ID NO: 28247 - protein, 6 aa, Homo sapiens
KNTLIP

SEQ ID NO: 28248 - protein, 125 aa, Homo sapiens
LRLSSPFSHLLLRQARRPPGRLPRTCGAQLADRPIHWEPRLLPEPTSPATSSSERRVAPWRRATRPTATLTALRRGLRPGPELRGPRRDAHGVARASCGAKRWCCSPCPGCWRARAWARRCAGSA

SEQ ID NO: 28249 - protein, 417 aa, Homo sapiens
ISQPLPPRRCSFVRPLPHTDTNMNGQLNGFHEAFIEEGTFLFTSESVGEGHPDKICDQISDAVLDAHLQQDPDAKVACETVAKTGMILLAGEITSRAAVDYQKVVREAVKHIGYDDSSKGFDYKTCNVLVALEQQSPDIAQGVHLDRNEEDIGAGDQGLMFGYATDETEECMPLTIVLAHKLNAKLAELRRNGTLPWLRPDSKTQVTVQYMQDRGAVLPIRVHTIVISVQHDEEVCLDEMRDALKEKVIKAVVPAKYLDEDTIYHLQPSGRFVIGGPQGDAGLTGRKIIVDTYGGWGAHGGGAFSGKDYTKVDRSAAYAARWVAKSLVKGGLCRRVLVQVSYAIGVSHPLSISIFHYGTSQKSERELLEIVKKNFDLRPGVIVRDLDLKKPIYQRTAAYGHFGRDSFPWEVPKKLKY

SEQ ID NO: 28250 - protein, 493 aa, Homo sapiens
KEFLRGSWRDSGSQTLHWDPSCFREQLVMEPSSLELPADTVQRIAAELKCHPTDERVALHLDEEDKLRHFRECFYIPKIQDLPPVDLSLVNKDENAIYFLGNSLGLQPKMVKTYLEEELDKWAKIAAYGHEVGKRPWITGDESIVGLMKDIVGANEKEIALMNALTVNLHLLMLSFFKPTPKRYKILLEAKAFPSDHYAIESQLQLHGLNIEESMRMIKPREGEETLRIEDILEVIEKEGDSIAVILFSGVHFYTGQHFNIPAITKAGQAKGCYVGFDLAHAVGNVELYLHDWGVDFACWCSYKYLNAGAGGIAGAFIHEKHAHTIKPALVGWFGHELSTRFKMDNKLQLIPGVCGFRISNPPILLVCSLHASLEIFKQATMKALRKKSVLLTGYLEYLIKHNYGKDKAATKKPVVNIITPSHVEERGCQLTITFSVPNKDVFQELEKRGVVCDKRNPNGIRVAPVPLYNSFHDVYKFTNLLTSILDSAETKN

SEQ ID NO: 28251 - protein, 101 aa, Homo sapiens
LRSSSSTVMSTTAGMSTTGTMRTALRGFLSGPASRLWQMSVKPCRRRPSPSGSIPTLPVCPAGSQTCTLTFEMDGCSSSCWRSSLERGCLNPPRDECASTA

SEQ ID NO: 28252 - protein, 1247 aa, Homo sapiens
LAKTTNKTSQIEPACCRSRAPSPCELPSDPLLSMKQPIMADGPRCKRRKQANPRRKNVVNYDNVVDTGSETDEEDKLHIAEDDGIANPLDQETSPASVPNHESSPHVSQALLPREEEEDEIREGGVEHPWHNNEILQASVDGPEEMKEDYDTMGPEATIQTAINNGTVKNANCTSDFEEYFAKRKLEERDGHAVSIEEYLQRSDTAIIYPEAPEELSRLGTPEANGQEENDLPPGTPDAFAQLLTCPYCDRGYKRLTSLKEHIKYRHEKNEENFSCPLCSYTFAYRTQLERHMVTHKPGTDQHQMLTQGAGNRKFKCTECGKAFKYKHHLKEHLRIHSGEKPYECPNCKKRFSHSGSYSSHISSKKCIGLISVNGRMRNNIKTGSSPNSVSSSPTNSAITQLRNKLENGKPLSMSEQTGLLKIKTEPLDFNDYKVLMATHGFSGTSPFMNGGLGATSPLGVHPSAQSPMQHLGVGMEAPLLGFPTMNSNLSEVQKVLQIVDNTVSRQKMDCKAEEISKLKGYHMKDPCSQPEEQGVTSPNIPPVGLPVVSHNGATKSIIDYTLEKVNEAKACLQSLTTDSRRQISNIKKEKLRTLIDLVTDDKMIENHNISTPFSCQFCKESFPGPIPLHQHERYLCKMNEEIKAVLQPHENIVPNKAGVFVDNKALLLSSVLSEKGMTSPINPYKDHMSVLKAYYAMNMEPNSDELLKISIAVGLPQEFVKEWFEQRKVYQYSNSRSPSLERSSKPLAPNSNPPTKDSLLPRSPVKPMDSITSPSIAELHNSVTNCDPPLRLTKPSHFTNIKPVEKLDHSRSNTPSPLNLSSTSSKNSHSSSYTPNSFSSEELQAEPLDLSLPKQMKEPKSIIATKNKTKASSISLDHNSVSSSSENSDEPLNLTFIKKEFSNSNNLDNKSTNPVFSMNPFSAKPLYTALPPQSAFPPATFMPPVQTSIPGLRPYPGLDQMSFLPHMAYTYPTGAATFADMQQRRKYQRKQGFQGELLDGAQDYMSGLDDMTDSDSCLSRKKIKKTESGMYACDLCDKTFQKSSSLLRHKYEHTGKRPHQCQICKKAFKHKHHLIEHSRLHSGEKPYQCDKCGKRFSHSGSYSQHMNHRYSYCKREAEEREAAEREAREKGHLEPTELLMNRAYLQSITPQGYSDSEERESMPRDGESEKEHEKEGEDGYGKLGRQDGDEEFEEEEEESENKSMDTDPETIRDEEETGDHSMDDSSEDGKMETKSDHEEDNMEDGM

SEQ ID NO: 28253 - protein, 42 aa, Homo sapiens
LADPRPSRGDPARSGEAAPPRPRLALPDPARRDVSVVRTSAA

SEQ ID NO: 28254 - protein, 73 aa, Homo sapiens
TSGQAQPQPQQQPPRRHGGARHKERGCLRGGVGGSLCRMTIRGPAPAPPHLRLPTSKPRKKQTPPRRRRVKSA

SEQ ID NO: 28255 - protein, 1393 aa, Homo sapiens
RGEGAMAPGCKTELRSVTNGQSNQPSNEGDAIKVFVRIRPPAERSGSADGEQNLCLSVLSSTSLRLHSNPEPKTFTFDHVADVDTTQESVFATVAKSIVESCMSGYNGTIFAYGQTGSGKTFTMMGPSESDNFSHNLRGVIPRSFEYLFSLIDREKEKAGAGKSFLCKCSFIEIYNEQIYDLLDSASAGLYLREHIKKGVFVVGAVEQVVTSAAEAYQVLSGGWRNRRVASTSMNRESSRSHAVFTITIESMEKSNEIVNIRTSLLNLVDLAGSERQKDTHAEGMRLKEAGNINRSLSCLGQVITALVDVGNGKQRHVCYRDSKLTFLLRDSLGGNAKTAIIANVHPGSRCFGETLSTLNFAQRAKLIKNKAVVNEDTQGNVSQLQAEVKRLKEQLAELASGQTPPESFLTRDKKKTNYMEYFQEAMLFFKKSEQEKKSLIEKVTQLEDLTLKKEKFIQSNKMIVKFREDQIIRLEKLHKESRGGFLPEEQDRLLSELRNEIQTLREQIEHHPRVAKYAMENHSLREENRRLRLLEPVKRAQEMDAQTIAKLEKAFSEISGMEKSDKNQQGFSPKAQKEPCLFANTEKLKAQLLQIQTELNNSKQEYEEFKELTRKRQLELESELQSLQKANLNLENLLEATKACKRQEVSQLNKIHAETLKIITTPTKAYQLHSRPVPKLSPEMGSFGSLYTQNSSILDNDILNEPVPPEMNEQAFEAISEELRTVQEQMSALQAKLDEEEHKNLKLQQHVDKLEHHSTQMQELFSSERIDWTKQQEELLSQLNVLEKQLQETQTKNDFLKSEVHDLRVVLHSADKELSSVKLEYSSFKTNQEKEFNKLSERHMHVQLQLDNLRLENEKLLESKACLQDSYDNLQEIMKFEIDQLSRNLQNFKKENETLKSDLNNLMELLEAEKERNNKLSLQFEEDKENSSKEILKVLEAVRQEKQKETAKCEQQMAKVQKLEESLLATEKVISSLEKSRDSDKKVVADLMNQIQELRTSVCEKTETIDTLKQELKDINCKYNSALVDREESRVLIKKQEVDILDLKETLRLRILSEDIERDMLCEDLAHATEQLNMLTEASKKHSGLLQSAQEELTKKEALIQELQHKLNQKKEEVEQKKNEYNFKMRQLEHVMDSAAEDPQSPKTPPHFQTHLAKLLETQEQEIEDGRASKTSLEHLVTKLNEDREVKNAEILRMKEQLREMENLRLESQQLIEKNWLLQGQLDDIKRQKENSDQNHPDNQQLKNEQEESIKERLAKSKIVEEMLKMKADLEEVQSALYNKEMECLRMTDEVERTQTLESKAFQEKEQLRSKLEEMYEERERTSQEMEMLRKQVECLAEENGKLVGHQNLHQKIQYVVRLKKENVRLAEETEKLRAENVFLKEKKRSES

SEQ ID NO: 28256 - protein, 77 aa, Homo sapiens
LPRAVCSGSFGPVGGCGAAGVACAVRPGILPVMEAAAAAAAGSRCAPSTAAREVGKFAARRPKARGAAPLCRELSPI

SEQ ID NO: 28257 - protein, 63 aa, Homo sapiens
IWRIHHRNHDSWRTDQVLITDSGFFRRKQVHWYLGLCKEAVPGVWDPRHLQRDCAYPYARCPS

SEQ ID NO: 28258 - protein, 19 aa, Homo sapiens
TAEGNIPGSREAVGVMATR

SEQ ID NO: 28259 - protein, 102 aa, Homo sapiens
LARKMPGLVDSNPAPPESQEKKPLKPCCACPETKKARDAWFRGRVSVDLSRSLVPGNDGERGERQASTTHSFLQIIIEKGEEHCGHLIEAHKECMRALGFKI

SEQ ID NO: 28260 - protein, 36 aa, Homo sapiens
LNHREELGHSNTRCYHAGHPPLQTPVTAPRKNPKCL

SEQ ID NO: 28261 - protein, 466 aa, Homo sapiens
IRPHCPDSRLDSVPSAPAGLRSSGARGAVVAAAPGMFHSPRRLCSALLQRDAPGLRRLPAPGLRRPLSPPAAVPRPASPRLLAAASAASGAARSCSRTVCSMGTGTSRLYSALAKTLNSSAASQHPEYLVSPDPEHLEPIDPKELLEECRAVLHTRPPRFQRDFVDLRTDCPSTHPPIRVMQWNILAQALGEGKDNFVQCPVEALKWEERKCLILEEILAYQPDILCLQEVDHYFDTFQPLLSRLGYQGTFFPKPWSPCLDVEHNNGPDGCALFFLQNRFKLVNSANIRLTAMTLKTNQVAIAQTLECKESGRQFCIAVTHLKARTGWERFRSAQGCDLLQNLQNITQGAKIPLIVCGDFNAEPTEEVYKHFASSSLNLNSAYKLLSADGQSEPPYTTWKIRTSGECRHTLDYIWYSKHALNVRSALDLLTEEQIGPNRLPSFNYPSDHLSLVCDFSFTEESDGLS

SEQ ID NO: 28262 - protein, 7 aa, Homo sapiens
RRSVVHS

SEQ ID NO: 28263 - protein, 48 aa, Homo sapiens
KDNRRLSKGCLDSLLSQDSKYSNSCPVLVIPVDCISVKNTILPFCNSI

SEQ ID NO: 28264 - protein, 2702 aa, Homo sapiens
RMAEEGAVAVCVRVRPLNSREESLGETAQVYWKTDNNVIYQVDGSKSFNFDRVFHGNETTKNVYEEIAAPIIDSAIQGYNGTIFAYGQTASGKTYTMMGSEDHLGVIPRAIHDIFQKIKKFPDREFLLRVSYMEIYNETITDLLCGTQKMKPLIIREDVNRNVYVADLTEEVVYTSEMALKWITKGEKSRHYGETKMNQRSSRSHTIFRMILESREKGEPSNCEGSVKVSHLNLVDLAGSERAAQTGAAGVRLKEGCNINRSLFILGQVIKKLSDGQVGGFINYRDSKLTRILQNSLGGNAKTRIICTITPVSFDETLTALQFASTAKYMKNTPYVNEVSTDEALLKRYRKEIMDLKKQLEEVSLETRAQAMEKDQLAQLLEEKDLLQKVQNEKIENLTRMLVTSSSLTLQQELKAKRKRRVTWCLGKINKMKNSNYADQFNIPTNITTKTHKLSINLLREIDESVCSESDVFSNTLDTLSEIEWNPATKLLNQENIESELNSLRADYDNLVLDYEQLRTEKEEMELKLKEKNDLDEFEALERKTKKDQEMQLIHEISNLKNLVKHAEVYNQDLENELSSKVELLREKEDQIKKLQEYIDSQKLENIKMDLSYSLESIEDPKQMKQTLFDAETVALDAKRESAFLRSENLELKEKMKELATTYKQMENDIQLYQSQLEAKKKMQVDLEKELQSAFNEITKLTSLIDGKVPKDLLCNLELEGKITDLQKELNKEVEENEALREEVILLSELKSLPSEVERLRKEIQDKSEELHIITSEKDKLFSEVVHKESRVQGLLEEIGKTKDDLATTQSNYKSTDQEFQNFKTLHMDFEQKYKMVLEENERMNQEIVNLSKEAQKFDSSLGALKTELSYKTQELQEKTREVQERLNEMEQLKEQLENRDSTLQTVEREKTLITEKLQQTLEEVKTLTQEKDDLKQLQESLQIERDQLKSDIHDTVNMNIDTQEQLRNALESLKQHQETINTLKSKISEEVSRNLHMEENTGETKDEFQQKMVGIDKKQDLEAKNTQTLTADVKDNEIIEQQRKIFSLIQEKNELQQMLESVIAEKEQLKTDLKENIEMTIENQEELRLLGDELKKQQEIVAQEKNHAIKKEGELSRTCDRLAEVEEKLKEKSQQLQEKQQQLLNVQEEMSEMQKKINEIENLKNELKNKELTLEHMETERLELAQKLNENYEEVKSITKERKVLKELQKSFETERDHLRGYIREIEATGLQTKEELKIAHIHLKEHQETIDELRRSVSEKTAQIINTQDLEKSHTKLQEEIPVLHEEQELLPNVKEVSETQETMNELELLTEQSTTKDSTTLARIEMERLRLNEKFQESQEEIKSLTKERDNLKTIKEALEVKHDQLKEHIRETLAKIQESQSKQEQSLNMKEKDNETTKIVSEMEQFKPKDSALLRIEIEMLGLSKRLQESHDEMKSVAKEKDDLQRLQEVLQSESDQLKENIKEIVAKHLETEEELKVAHCCLKEQEETINELRVNLSEKETEISTIQKQLEAINDKLQNKIQEIYEKEEQFNIKQISEVQEKVNELKQFKEHRKAKDSALQSIESKMLELTNRLQESQEEIQIMIKEKEEMKRVQEALQIERDQLKENTKEIVAKMKESQEKEYQFLKMTAVNETQEKMCEIEHLKEQFETQKLNLENIETENIRLTQILHENLEEMRSVTKERDDLRSVEETLKVERDQLKENLRETITRDLEKQEELKIVHMHLKEHQETIDKLRGIVSEKTNEISNMQKDLEHSNDALKAQDLKIQEELRIAHMHLKEQQETIDKLRGIVSEKTDKLSNMQKDLENSNAKLQEKIQELKANEHQLITLKKDVNETQKKVSEMEQLKKQIKDQSLTLSKLEIENLNLAQKLHENLEEMKSVMKERDNLRRVEETLKLERDQLKESLQETKARDLEIQQELKTARMLSKEHKETVDKLREKISEKTIQISDIQKDLDKSKDELQKKIQELQKKELQLLRVKEDVNMSHKKINEMEQLKKQFEAQNLSMQSVRMDNFQLTKKLHESLEEIRIVAKERDELRRIKESLKMERDQFIATLREMIARDRQNHQVKPEKRLLSDGQQHLTESLREKCSRIKELLKRYSEMDDHYECLNRLSLDLEKEIEFQKELSMRVKANLSLPYLQTKHIEKLFTANQRCSMEFHRIMKKLKYVLSYVTKIKEEQHESINKFEMDFIDEVEKQKELLIKIQHLQQDCDVPSRELRDLKLNQNMDLHIEEILKDFSESEFPSIKTEFQQVLSNRKEMTQFLEEWLNTRFDIEKLKNGIQKENDRICQVNNFFNNRIIAIMNESTEFEERSATISKEWEQDLKSLKEKNEKLFKNYQTLKTSLASGAQVNPTTQDNKNPHVTSRATQLTTEKIRELENSLHEAKESAMHKESKIIKMQKELEVTNDIIAKLQAKVHESNKCLEKTKETIQVLQDKVALGAKPYKEEIEDLKMKLVKIDLEKMKNAKEFEKEISATKATVEYQKEVIRLLRENLRRSQQAQDTSVISEHTDPQPSNKPLTCGGGSGIVQNTKALILKSEHIRLEKEISKLKQQNEQLIKQKNELLSNNQHLSNEVKTWKERTLKREAHKQVTCENSPKSPKVTGTASKKKQITPSQCKERNLQDPVPKESPKSCFFDSRSKSLPSPHPVRYFDNSSLGLCPEVQNAGAESVDSQPGPWHASSGKDVPECKTQ

SEQ ID NO: 28265 - protein, 260 aa, Homo sapiens
RRTPSTTTSSHYLGTLKVLDQKPSQKQSIEPDRADNIRAAVYQEWLEKKNVYLHEMHRIKRIESENLRIQNEQKKAAKREEALASFEAWKAMKEKEAKKIAAKKRLEEKNKKKTEEENAARKGEALQAFEKWKEKKMEYLKEKNRKEREYERAKKQKEEETVAEKKKDNLTAVEKWNEKKEAFFKQKEKEKINEKRKEELKRAEKKDKDKQAINEYEKWLENKEKQERIERKQKKRHSFLESEALPPWSPPSRTVFAKVF

SEQ ID NO: 28266 - protein, 457 aa, Homo sapiens
RSLAGRASGVLLLPAELLPGEEEAMALRVTRNSKINAENKAKINMAGAKRVPTAPAATSKPGLRPRTALGDIGNKVSEQLQAKMPMKKEAKPSATGKVIDKKLPKPLEKVPMLVPVPVSEPVPEPEPEPEPEPVKEEKLSPEPILVDTASPSPMETSGCAPAEEDLCQAFSDVILAVNDVDAEDGADPNLCSEYVKDIYAYLRQLEEEQAVRPKYLLGREVTGNMRAILIDWLVQVQMKFRLLQETMYMTVSIIDRFMQNNCVPKKMLQLVGVTAMFIASKYEEMYPPEIGDFAFVTDNTYTKHQIRQMEMKILRALNFGLGRPLPLHFLRRASKIGEVDVEQHTLAKYLMELTMLDYDMVHFPPSQIAAGAFCLALKILDNGEWTPTLQHYLSYTEESLLPVMQHLAKNVVMVNQGLTKHMTVKNKYATSKHAKISTLPQLNSALVQDLAKAVAKV

SEQ ID NO: 28267 - protein, 672 aa, Homo sapiens
LALALGPAATLAGPAKSPYQLVLQHSRLRGRQHGPNVCAVQKVIGTNRKYFTNCKQWYQRKICGKSTVISYECCPGYEKVPGEKGCPAALPLSNLYETLGVVGSTTTQLYTDRTEKLRPEMEGPGSFTIFAPSNEAWASLPAEVLDSLVSNVNIELLNALRYHMVGRRVLTDELKHGMTLTSMYQNSNIQIHHYPNGIVTVNCARLLKADHHATNGVVHLIDKVISTITNNIQQIIEIEDTFETLRAAVAASGLNTMLEGNGQYTLLAPTNEAFEKIPSETLNRILGDPEALRDLLNNHILKSAMCAEAIVAGLSVETLEGTTLEVGCSGDMLTINGKAIISNKDILATNGVIHYIDELLIPDSAKTLFELAAESDVSTAIDLFRQAGLGNHLSGSERLTLLAPLNSVFKDGTPPIDAHTRNLLRNHIIKDQLASKYLYHGQTLETLGGKKLRVFVYRNSLCIENSCIAAHDKRGRYGTLFTMDRVLTPPMGTVMDVLKGDNRFSMLVAAIQSAGLTETLNREGVYTVFAPTNEAFRALPPRERSRLLGDAKELANILKYHIGDEILVSGGIGALVRLKSLQGDKLEVSLKNNVVSVNKEPVAEPDIMATNGVVHVITNVLQPPANRPQERGDELADSALEIFKQASAFSRASQRSVRLAPVYQKLLERMKH

SEQ ID NO: 28268 - protein, 100 aa, Homo sapiens
TRTSRPRTMIPPGECTYAGRKRRRPLQKQRPAVGAEKSNPSKRHRDRLNAELDHLASLLPFPPDIISKLDKLSVLRLSVSYLRVKSFFQGVGSGRCRRCG

SEQ ID NO: 28269 - protein, 122 aa, Homo sapiens
KKEQEEFLRLEKEIREKAEKAEKRKNAADEISRFQERDLHKLELKILDRQAKEDEKSQKQRRLAKLKEKVENNVSRDPSRLYKPTKGWEERTKKIGPTGSGPLLHIPHRAIPTWRQGIQRRV

SEQ ID NO: 28270 - protein, 509 aa, Homo sapiens
RKQERERKGRKKYIISGTRERRKTGTMGRKKIQITRIMDERNRQVTFTKRKFGLMKKAYELSVLCDCEIALIIFNSTNKLFQYASTDMDKVLLKYTEYNEPHESRTNSDIVETLRKKGLNGCDSPDPDADDSALNKKENKGCESPDPDSSYALTPRTEEKYKKINEEFDNMIKSHKIPAVPPPNFEMPVSIPVSSHNSLVYSNPVSSLGNPNLLPLAHPSLQRNSMSPGVTHRPPSAGNTGGLMGGDLTSGAGTSAGNGYGNPRNSPGLLVSPGNLNKNMQAKSPPPMNLGMNNRKPDLRVLIPPGSKNTMPSVNQRINNSQSAQSLATPVVSVATPTLPGQGMGGYPSAISTTYGTEYSLSSADLSSLSGFNTASALHLGSVTGWQQQHLHNMPPSALSQLGACTSTHLSQSSNLSLPSTQSLNIKSEPVSPPRDRTTTPSRYPQHTRHEAGRSPVDSLSSCSSSYDGSDREDHRNEFHSPIGLTRPSPDERESPSVKRMRLSEGWAT

SEQ ID NO: 28271 - protein, 499 aa, Homo sapiens
RKQERERKGRKKYIISGTRERRKTGTMGRKKIQITRIMDERNRQVTFTKRKFGLMKKAYELSVLCDCEIALIIFNSTNKLFQYASTDMDKVLLKYTEYNEPHESRTNSDIVETLRKKGLNGCDSPDPDADDSVGHSPESEDKYRKINEDIDLMISRQRLCAVPPPNFEMPVSIPVSSHNSLVYSNPVSSLGNPNLLPLAHPSLQRNSMSPGVTHRPPSAGNTGGLMGGDLTSGAGTSAGNGYGNPRNSPGLLVSPGNLNKNMQAKSPPPMNLGMNNRKPDLRVLIPPGSKNTMPSVSEDVDLLLNQRINNSQSAQSLATPVVSVATPTLPGQGMGGYPSAISTTYGTEYSLSSADLSSLSGFNTASALHLGSVTGWQQQHLHNMPPSALSQLGACTSTHLSQSSNLSLPSTQSLNIKSEPVSPPRDRTTTPSRYPQHTRHEAGRSPVDSLSSCSSSYDGSDREDHRNEFHSPIGLTRPSPDERESPSVKRMRLSEGWAT

SEQ ID NO: 28272 - protein, 29 aa, Homo sapiens
LLVRWSARCPRPRAKPGGRSLVTVSTESV

SEQ ID NO: 28273 - protein, 402 aa, Homo sapiens
KTMSTELFSSTREEGSSGSGPSFRSNQRKMLNLLLERDTSFTVCPDVPRTPVGKFLGDSANLSILSGSPGFFRTSGSAFSWDDNGNLVDSEMKYLGSPITTVPKLDKNPNLGEDQAEEISDELMEFSLKDQEAKVSRSGLYRSPSMPENLNRPRLKQVEKFKDNTIPDKVKKKYFSGQGKLRKGLCLKKTVSLCDITITQMLEEDSNQGHLIGDFSKVCALPTVSGKHQDLKYVNPETVAALLSGKFQGLIEKFYVIDCRYPYEYLGGHIQGALNLYSQEELFNFFLKKPIVPLDTQKRIIIVFHCEFSSERGPRMCRCLREEDRSLNQYPALYYPELYILKGGYRDFFPEYMELCEPQSYCPMHHQDHKTELLRCRSQSKVQEGERQLREQIALLVKDMSP

SEQ ID NO: 28274 - protein, 69 aa, Homo sapiens
KARELYLQVIQYMRRMYQDARLVHADLSEFNMLYHGGGVYIIDVSQSVEHDHPHALEFLRKDCANVNGE

SEQ ID NO: 28275 - protein, 46 aa, Homo sapiens
LASSLGSTPNCMPSPGVMTGGSAWKTTAAKVLWSIMSDSQEVTGWN

SEQ ID NO: 28276 - protein, 107 aa, Homo sapiens
ITKRRKMADIGGHAIYKVEDTNMIYIPNDSVRVTHPDEARYLRIFQNVDLSSNFYFSYSYDLSHSLQYNLTVLRMPLEMLKSEMTQNRQESFDIFEDEGLITQGGSG

SEQ ID NO: 28277 - protein, 26 aa, Homo sapiens
LSVEAKTKLRSPVIWVMVYVKHQRNL

SEQ ID NO: 28278 - protein, 823 aa, Homo sapiens
LGLCERIAGPGEVTAAPPGEVTAAPPGEVLESTMAEQVLPQALYLSNMRKAVKIRERTPEDIFKPTNGIIHHFKTMHRYTLEMFRTCQFCPQFREIIHKALIDRNIQATLESQKKLNWCREVRKLVALKTNGDGNCLMHATSQYMWGVQDTDLVLRKALFSTLKETDTRNFKFRWQLESLKSQEFVETGLCYDTRNWNDEWDNLIKMASTDTPMARSGLQYNSLEEIHIFVLCNILRRPIIVISDKMLRSLESGSNFAPLKVGGIYLPLHWPAQECYRYPIVLGYDSHHFVPLVTLKDSGPEIRAVPLVNRDRGRFEDLKVHFLTDPENEMKEKLLKEYLMVIEIPVQGWDHGTTHLINAAKLDEANLPKEINLVDDYFELVQHEYKKWQENSEQGRREGHAQNPMEPSVPQLSLMDVKCETPNCPFFMSVNTQPLCHECSERRQKNQNKLPKLNSKPGPEGLPGMALGASRGEAYEPLAWNPEESTGGPHSAPPTAPSPFLFSETTAMKCRSPGCPFTLNVQHNGFCERCHNARQLHASHAPDHTRHLDPGKCQACLQDVTRTFNGICSTCFKRTTAEASSSLSTSLPPSCHQRSKSDPSRLVRSPSPHSCHRAGNDAPAGCLSQAARTPGDRTGTSKCRKAGCVYFGTPENKGFCTLCFIEYRENKHFAAASGKVSPTASRFQNTIPCLGRECGTLGSTMFEGYCQKCFIEAQNQRFHEAKRTEEQLRSSQRRDVPRTTQSTSRPKCARASCKNILACRSEELCMECQHPNQRMGPGAHRGEPAPEDPPKQRCRAPACDHFGNAKCNGYCNECFQFKQMYG

SEQ ID NO: 28279 - protein, 21 aa, Homo sapiens
RTGRSASAAARRAIQCMCTRC

SEQ ID NO: 28280 - protein, 21 aa, Homo sapiens
KMARSASAAARRVTLCTCTRC

SEQ ID NO: 28281 - protein, 17 aa, Homo sapiens
LGGWNNGAVFSGTVEQL

SEQ ID NO: 28282 - protein, 27 aa, Homo sapiens
KMEGPLSVFGDRSTGETIRSQNGCNHY

SEQ ID NO: 28283 - protein, 85 aa, Homo sapiens
LEAERRGQLVVGEFPRLRLLVFSRRHTELRLTFLFLNLNHRFHRLVVRRLGRWIRLRRNCWSEPVPGERIFREKWLRGPQQLQGL

SEQ ID NO: 28284 - protein, 440 aa, Homo sapiens
RSRGRVRDPPAARSEQAARKEAGLNTMIPLEKPGSGGSSPGATSGSGRAGRGLSGPCRPPPPPQARGLLTEIRAVVRTEPFQDGYSLCPGRELGRGKFAVVRKCIKKDSGKEFAAKFMRKRRKGQDCRMEIIHEIAVLELAQDNPWVINLHEVYETASEMILVLEYAAGGEIFDQCVADREEAFKEKDVQRLMRQILEGVHFLHTRDVVHLDLKPQNILLTSESPLGDIKIVDFGLSRILKNSEELREIMGTPEYVAPEILSYDPISMATDMWSIGVLTYVMLTGISPFLGNDKQETFLNISQMNLSYSEEEFDVLSESAVDFIRTLLVKKPEDRATAEECLKHPWLTQSSIQEPSFRMEKALEEANALQEGHSVPEINSDTDKSETKESIVTEELIVVTSYTLGQCRQSEKEKMEQKAISKRFKFEEPLLQEIPGEFIY

SEQ ID NO: 28285 - protein, 79 aa, Homo sapiens
IPCVAGLLGLDRQVREEGIASAKEVLESCVLAARDPAWVGRCFCVGVWPFHQSCGGPRDFLPVLLGFQVVAPSSEKPKD

SEQ ID NO: 28286 - protein, 152 aa, Homo sapiens
IQRPNSFLFRSSSQSGSGPSSPDSVLRPRRYPQVPDEKDLMTQLRQVLESRLQRPLPEDLAEALASGVILCQLANQLRPRSVPFIHVPSPAVPKLSALKARKNVESFLEACRKMGVPEESLCQPHHILEEEGAPGRGLPYIAAVVHALLDRP

SEQ ID NO: 28287 - protein, 28 aa, Homo sapiens
KKRKRSGGEAAGKMQPPSTPPPCHRASG

SEQ ID NO: 28288 - protein, 136 aa, Homo sapiens
LARQQADKKKEEHREDKVIPVTRSLRARNIVQSTEHLHEDNGDVEVRRSCRIRSRYSGVNQSMLFDKLITNTAEAVLQKMDDMKKMRRQRMRELEDLGVFNETEESNLNMYTRGKQKDIQRTDEETTDNQEGSVVI

SEQ ID NO: 28289 - protein, 15 aa, Homo sapiens
LTHTECSLSVRDKVS

SEQ ID NO: 28290 - protein, 31 aa, Homo sapiens
IWDRPPGLADQRGSSSNVCCGGCNSIPASSW

SEQ ID NO: 28291 - protein, 169 aa, Homo sapiens
TQRSEAEQGRGRVGAGAGAAWSSCGVSGPGRGMGVLAAAARCLVRGADRMSKWTSKRGPRSFRGRKGRGAKGIGFLTSGWRFVQIKEMVPEFVVPDLTGFKLKPYVSYLAPESEETPLTAAQLFSEAVAPAIEKDFKDGTFDPDNLEKYGFEPTQEGKLFQLYPRNFLR

SEQ ID NO: 28292 - protein, 649 aa, Homo sapiens
TMEVKGKKQFTGKSTKTAQEKNRFHKNSDSGSSKTFPTRKVAKEGGPKVTSRNFEKSITKLGKKGVKQFKNKQQGDKSPKNKFQPANKFNKKRKFQPDGRSDESAAKKPKWDDFKKKKKELKQSRQLSDKTNYDIVVRAKQMWEILRRKDCDKEKRVKLMSDLQKLIQGKIKTIAFAHDSTRVIQCYIQYGNEEQRKQAFEELRDDLVELSKAKYSRNIVKKFLMYGSKPQIAEIIRSFKGHVRKMLRHAEASAIVEYAYNDKAILEQRNMLTEELYGNTFQLYKSADHRTLDKVLEVQPEKLELIMDEMKQILTPMAQKEAVIKHSLVHKVFLDFFTYAPPKLRSEMIEAIREAVVYLAHTHDGARVAMHCLWHGTPKDRKVIVKTMKTYVEKVANGQYSHLVLLAAFDCIDDTKLVKQIIISEIISSLPSIVNDKYGRKVLLYLLSPRDPAHTVREIIEVLQKGDGNAHSKKDTEVRRRELLESISPALLSYLQEHAQEVVLDKSACVLVSDILGSATGDVQPTMNAIASLAATGLHPGGKDGELHIAEHPAGHLVLKWLIEQDKKMKENGREGCFAKTLVEHVGMKNLKSWASVNRGAIILSSLLQSCDLEVANKVKAALKSLIPTLEKTKSTSKGIEILLEKLST

SEQ ID NO: 28293 - protein, 51 aa, Homo sapiens
LVPEVAAAVGNAGARGAGHWGPFAEGFEHPHPCVRPDPICAESQGNCHQRA

SEQ ID NO: 28294 - protein, 872 aa, Homo sapiens
KKEPGGGAATEEGVNRIAVPKPPSIEEFSIVKPISRGAFGKVYLGQKGGKLYAVKVVKKADMINKNMTHQVQAERDALALSKSPFIVHLYYSLQSANNVYLVMEYLIGGDVKSLLHIYGYFDEEMAVKYISEVALALDYLHRHGIIHRDLKPDNMLISNEGHIKLTDFGLSKVTLNRDINMMDILTTPSMAKPRQDYSRTPGQVLSLISSLGFNTPIAEKNQDPANILSACLSETSQLSQGLVCPMSVDQKDTTPYSSKLLKSCLETVASNPGMPVKCLTSNLLQSRKRLATSSASSQSHTFISSVESECHSSPKWEKDCQESDEALGPTMMSWNAVEKLCAKSANAIETKGFNKKDLELALSPIHNSSALPTTGRSCVNLAKKCFSGEVSWEAVELDVNNINMDTDTSQLGFHQSNQWAVDSGGISEEHLGKRSLKRNFELVDSSPCKKIIQNKKTCVEYKHNEMTNCYTNQNTGLTVEVQDLKLSVHKSQQNDCANKENIVNSFTDKQQTPEKLPIPMIAKNLMCELDEDCEKNSKRDYLSSSFLCSDDDRASKNISMNSDSSFPGISIMESPLESQPLDSDRSIKESSFEESNIEDPLIVTPDCQEKTSPKGVENPAVQESNQKMLGPPLEVLKTLASKRNAVAFRSFNSHINASNNSEPSRMNMTSLDAMDISCAYSGSYPMAITPTQKRRSCMPHQQTPNQIKSGTPYRTPKSVRRGVAPVDDGRILGTPDYLAPELLLGRAHGPAVDWWALGVCLFEFLTGIPPFNDETPQQVFQNILKRDIPWPEGEEKLSDNAQSAVEILLTIDDTKRAGMKELKRHPLFSDVDWENLQHQTMPFIPQPDDETDTSYFEARNTAQHLTVSGFSL

SEQ ID NO: 28295 - protein, 78 aa, Homo sapiens
LANLISPVRNGAVRRFGQTIQSFTLRGDHRSPASAQKFSSRSTVPTPAKRRSSALWSEMLDITMKESLTTREIRRQEE

SEQ ID NO: 28296 - protein, 29 aa, Homo sapiens
LQPGRLPRRREGKHKAGYALRDNKSNPQT

SEQ ID NO: 28297 - protein, 136 aa, Homo sapiens
IDCVREKGGKVLVHCEAGISRSPTICMAYLMKTKQFRLKEAFDYIKQRRSMVSPNFGFMGQLLQYESEILPSTPNPQPPSCQGEAAGSSLIGHLQTLSPDMQGAYCTFPASVLAPVPTHSTVSELSRSPVATATSC

SEQ ID NO: 28298 - protein, 716 aa, Homo sapiens
VTRIAWRMADAGIRRVVPSDLYPLVLGFLRDNQLSEVANKFAKATGATQQDANASSLLDIYSFWLKSAKVPERKLQANGPVAKKAKKKASSSDSEDSSEEEEEVQGPPAKKAAVPAKRVGLPPGKAAAKASESSSSEESSDDDDEEDQKKQPVQKGVKPQAKAAKAPPKKAKSSDSDSDSSSEDEPPKNQKPKITPVTVKAQTKAPPKPARAAPKIANGKAASSSSSSSSSSSSDDSEEEKAAATPKKVWTITSVRAETVPKKQVVAKAPVKAATTPTRKSSSSEDSSSDEEEEQKKPMKNKPGPYSSVPPPSAPPPKKSLGTQPPKKAVEKQQPVESSEDSSDESDSSSEEEKKPPTKAVVSKATTKPPPAKKAAESSSDSSDSDSSEDDEAPSKPAGTTKNSSNKPAVTTKSPAVKPAAAPKQPVGGGQKLLTRKADSSSSEEESSSSEEEKTKKMVATTKPKATAKAALSLPAKQAPQGSRDSSSDSDSSSSEEEEEKTSKSAVKKKPQKVAGGAAPSKPASAKKGKAESSNSSSSDDSSEEEEEKLKGKGSPRPQAPKANGTSALTAQNGKAAKNSEEEEEEKKKAAVVVSKSGSLKKRKQNEAAKEAETPQAKKIKLQTPNTFPKRKKGEKRASSPFRRVREEEIEVDSRVADNSFDAKRGAAGDWGERANQVLKFTKGKSFRHEKTKKKRGSYRGGSISVQVNSIKFDSE

SEQ ID NO: 28299 - protein, 116 aa, Homo sapiens
MEKRRAVQNQWQLQQEKHLQHLAEVSAEVRERKTGTQQELDRVFQKLGNLKQQAEQERDKLQRVSCCSLRLRLRQRIFQMINPSSRLDPRSRVQETPWGETLVCPSRLLVYNLLEM

SEQ ID NO: 28300 - protein, 43 aa, Homo sapiens
TQTEYSGKGFLQLMDGCSLYLEYLTGYVSDLERNYPDPDRRMQ

SEQ ID NO: 28301 - protein, 9 aa, Homo sapiens
LDGQWESEA

SEQ ID NO: 28302 - protein, 33 aa, Homo sapiens
VGDSYGEASAGGSAVQGGREPALPGREVPRCCE

SEQ ID NO: 28303 - protein, 334 aa, Homo sapiens
TLRRGAEEREGARGSRSESRARTQPGPTALPSCPGRAPAMEHQLLCCEVETIRRAYPDANLLNDRVLRAMLKAEETCAPSVSYFKCVQKEVLPSMRKIVATWMLEVCEEQKCEEEVFPLAMNYLDRFLSLEPVKKSRLQLLGATCMFVASKMKETIPLTAEKLCIYTDNSIRPEELLQMELLLVNKLKWNLAAMTPHDFIEHFLSKMPEAEENKQIIRKHAQTFVALCATDVKFISNPPSMVAAGSVVAAVQGLNLRSPNNFLSYYRLTRFLSRVIKCDPDCLRACQEQIEALLESSLRQAQQNMDPKAAEEEEEEEEEVDLACTPTDVRDVDI

SEQ ID NO: 28304 - protein, 36 aa, Homo sapiens
KIFKEMTDGCLSTTDLFWTVKTKSLMYCSWETPWCS

SEQ ID NO: 28305 - protein, 94 aa, Homo sapiens
TGRHSRQAAWGREGTRARGPPSARCRCPPSAGRRFRSITCAPTGGWSLTARFTTSPNGPSSTRGASGSSGTTLEKMQRMPSAPSTLTWNSWASS

SEQ ID NO: 28306 - protein, 34 aa, Homo sapiens [sequence omitted]

SEQ ID NO: 28307 - protein, 61 aa, Homo sapiens
LFPTGPLPLSPSTIARGSGLTPESSAPAKSWKRSGTTSSQRWLHSIRISSHLQITNLQQHV

SEQ ID NO: 28308 - protein, 106 aa, Homo sapiens
LAAVKIVKLDPGDDISSLQQEITILRECRHPNVVAYIGSYLRNDRLWICMEFCGGGSLQEIYHATGPLEERQIAYVCREALKGLHHLHSQGKIHRDIKLTLGCQAS

SEQ ID NO: 28309 - protein, 42 aa, Homo sapiens
VASFVIGARPTPQQPCPRDLQLVLILAPPTLVWVFSSTEKSR

SEQ ID NO: 28310 - protein, 5909 aa, Homo sapiens
RKEGRAPGKAFAPERNPAKMEKEETTRELLLPNWQGSGSHGLTIAQRDDGVFVQEVTQNSPAARTGVVKEGDQIVGATIYFDNLQSGEVTQLLNTMGHHTVGLKLHRKGDRSPEPGQTWTREVFSSCSSEVVLSGDDEEYQRIYTTKIKPRLKSEDGVEGDLGETQSRTITVTRRVTAYTVDVTGREGAKDIDISSPEFKIKIPRHELTEISNVDVETQSGKTVIRLPSGSGAASPTGSAVDIRAGAISASGPELQGAGHSKLQVTMPGIKVGGSGVNVNAKGLDLGGRGGVQVPAVDISSSLGGRAVEVQGPSLESGDHGKIKFPTMKVPKFGVSTGREGQTPKAGLRVSAPEVSVGHKGGKPGLTIQAPQLEVSVPSANIEGLEGKLKGPQITGPSLEGDLGLKGAKPQGHIGVDASAPQIGGSITGPSVEVQAPDIDVQGPGSKLNVPKMKVPKFSVSGAKGEETGIDVTLPTGEVTVPGVSGDVSLPEIATGGLEGKMKGTKVKTPEMIIQKPKISMQDVDLSLGSPKLKGDIKVSAPGVQGDVKGPQVALKGSRVDIETPNLEGTLTGPRLGSPSGKTGTCRISMSEVDLNVAAPKVKGGVDVTLPRVEGKVKVPEVDVRGPKVDVSAPDVEAHGPEWNLKMPKMKMPTFSTPGAKGEGPDVHMTLPKGDISISGPKVNVEAPDVNLEGLGGKLKGPDVKLPDMSVKTPKISMPDVDLHVKGTKVKGEYDVTVPKLEGELKGPKVDIDAPDVDVHGPDWHLKMPKMKMPKFSVPGFKAEGPEVDVNLPKADVDISGPKIDVTAPDVSIEEPEGKLKGPKFKMPEMNIKVPKISMPDVDLHLKGPNVKGEYDVTMPKVESEIKVPDVELKSAKMDIDVPDVEVQGPDWHLKMPKMKMPKFSMPGFKAEGPEVDVNLPKADVDISGPKVGVEVPDVNIEGPEGKLKGPKFKMPEMNIKAPKISMPDVDLHMKGPKVKGEYDMTVPKLEGDLKGPKVDVSAPDVEMQGPDWNLKMPKIKMPKFSMPSLKGEGPEFDVNLSKANVDISAPKVDTNAPDLSLEGPEGKLKGPKFKMPEMHFRAPKMSLPDVDLDLKGPKMKGNVDISAPKIEGEMQVPDVDIRGPKVDIKAPDVEGQGLDWSLKIPKMKMPKFSMPSLKGEGPEVDVNLPKADVVVSGPKVDIEAPDVSLEGPEGKLKGPKFKMPEMHFKTPKISMPDVDLHLKGPKVKGDVDVSVPKVEGEMKVPDVEIKGPKMDIDAPDVEVQGPDWHLKMPKMKMPKFSMPGFKGEGREVDVNLPKADIDVSGPKVDVEVPDVSLEGPEGKLKGPKFKMPEMHFKAPKISMPDVDLNLKGPKLKGDVDVSLPEVEGEMKVPDVDIKGPKVDISAPDVDVHGPDWHLKMPKVKMPKFSMPGFKGEGPEVDVKLPKADVDVSGPKMDAEVPDVNIEGPDAKLKGPKFKMPEMSIKPQKISIPDVGLHLKGPKMKGDYDVTVPKVEGEIKAPDVDIKGPKVDINAPDVEVHGPDWHLKMPKVKMPKFSMPGFKGEGPEVDMNLPKADLGVSGPKVDIDVPDVNLEAPEGKLKGPKFKMPSMNIQTHKISMPDVGLNLKAPKLKTDVDVSLPKVEGDLKGPEIDVKAPKMDVNVGDIDIEGPEGKLKGPKFKMPEMHFKAPKISMPDVDLHLKGPKVKGDMDVSVPKVEGEMKVPDVDIKGPKVDIDAPDVEVHDPDWHLKMPKMKMPKFSMPGFKAEGPEVDVNLPKADIDVSGPSVDTDAPDLDIEGPEGKLKGSKFKMPKLNIKAPKVSMPDVDLNLKGPKLKGEIDASVPELEGDLRGPQVDVKGPFVEAEVPDVDLECPDAKLKGPKFKMPEMHFKAPKISMPDVDLHLKGPKVKGDADVSVPKLEGDLTGPSVGVEVPDVELECPDAKLKGPKFKMPDMHFKAPKISMPDVDLHLKGPKVKGDVDVSVPKLEGDLTGPSVGVEVPDVELECPDAKLKGPKFKMPEMHFKTPKISMPDVDLHLKGPKVKGDMDVSVPKVEGEMKVPDVDIKGPKMDIDAPDVDVHGPDWHLKMPKMKMPKFSMPGFKAEGPEVDVNLPKADVVVSGPKVDVEVPDVSLEGPEGKLKGPKLKMPEMHFKAPKISMPDVDLHLKGPKVKGDVDVSLPKLEGDLTGPSVDVEVPDVELECPDAKLKGPKFKMPEMHFKTPKISMPDVNLNLKGPKVKGDMDVSVPKVEGEMKVPDVDIRGPKVDIDAPDVDVHGPDWHLKMPKMKMPKFSMPGFKGEGPEVDVNLPKADVDVSGPKVDVEVPDVSLEGPEGKLKGPKFKMPEMHFKTPKISMPDVDFNLKGPKIKGDVDVSAPKLEGELKGPELDVKGPKLDADMPEVAVEGPNGKWKTPKFKMPDMHFKAPKISMPDLDLHLKSPKAKGEVDVDVPKLEGDLKGPHVDVSGPDIDIEGPEGKLKGPKFKMPDMHFKAPNISMPDVDLNLKGPKIKGDVDVSVPEVEGKLEVPDMNIRGPKVDVNAPDVQAPDWHLKMPKMKMPKFSMPGFKAEGPEVDVNLPKADVDISGPKVDIEGPDVNIEGPEGKLKGPKLKMPEMNIKAPKISMPDFDLHLKGPKVKGDVDVSLPKVEGDLKGPEVDIKGPKVDINAPDVGVQGPDWHLKMPKVKMPKFSMPGFKGEGPDGDVKLPKADIDVSGPKVDIEGPDVNIEGPEGKLKGPKFKMPEMNIKAPKISMPDIDLNLKGPKVKGDVDVSLPKVEGDLKGPEVDIKGPKVDIDAPDVDVHGPDWHLKMPKIKMPKISMPGFKGEGPDVDVNLPKADIDVSGPKVDVECPDVNIEGPEGKWKSPKFKMPEMHFKTPKISMPDIDLNLTGPKIKGDVDVTGPKVEGDLKGPEVDLKGPKVDIDVPDVNVQGPDWHLKMPKMKMPKFSMPGFKAEGPEVDVNLPKADVDVSGPKVDVEGPDVNIEGPEGKLKGPKFKMPEMNIKAPKIPMPDFDLHLKGPKVKGDVDISLPKVEGDLKGPEVDIRGPQVDIDVPDVGVQGPDWHLKMPKVKMPKFSMPGFKGEGPDVDVNLPKADLDVSGPKVDIDVPDVNIEGPEGKLKGPKFKMPEMNIKAPKISMPDIDLNLKGPKVKGDMDVSLPKVEGDMKVPDVDIKGPKVDINAPDVDVQGPDWHLKMPKIKMPKISMPGFKGEGPEVDVNLPKADLDVSGPKVDVDVPDVNIEGPDAKLKGPKFKMPEMNIKAPKISMPDLDLNLKGPKMKGEVDVSLANVEGDLKGPALDIKGPKIDVDAPDIDIHGPDAKLKGPKLKMPDMHVNMPKISMPEIDLNLKGSKLKGDVDVSGPKLEGDIKAPSLDIKGPEVDVSGPKLNIEGKSKKSRFKLPKFNFSGSKVQTPEVDVKGKKPDIDITGPKVDINAPDVEVQGKVKGSKFKMPFLSISSPKVSMPDVELNLKSPKVKGDLDIAGPNLEGDFKGPKVDIKAPEVNLNAPDVDVHGPDWNLKMPKMKMPKFSVSGLKAEGPDVAVDLPKGDINIEGPSMNIEGPDLNVEGPEGGLKGPKFKMPDMNIKAPKISMPDIDLNLKGPKVKGDVDISLPKLEGDLKGPEVDIKGPKVDINAPDVDVHGPDWHLKMPKVKMPKFSMPGFKGEGPEVDVTLPKADIDISGPNVDVDVPDVNIEGPDAKLKGPKFKMPEMNIKAPKISMPDFDLNLKGPKMKGDVVVSLPKVEGDLKGPEVDIKGPKVDIDTPDINIEGSEGKFKGPKFKIPEMHLKAPKISMPDIDLNLKGPKVKGDVDVSLPKMEGDLKGPEVDIKGPKVDINAPDVDVQGPDWHLKMPKVKMPKFSMPGFKGEGPDVDVNLPKADLDVSGPKVDIDVPDVNIEGPEGKLKGPKFKMPEMNIKAPKISMPDIDLNLKGPKVKGDMDVSLPKVEGDMQVPDLDIKGPKVDINAPDVDVRGPDWHLKMPKIKMPKISMPGFKGEGPEVDVNLPKADLDVSGPKVDVDVPDVNIEGPDAKLKGPKFKMPEMNIKAPKISMPDFDLHLKGPKVKGDVDVSLPKMEGDLKAPEVDIKGPKVDIDAPDVDVHGPDWHLKMPKVKMPKFSMPGFKGEGPEVDVNLPKADIDVSGPKVDIDTPDIDIHGPEGKLKGPKFKMPDLHLKAPKISMPEVDLNLKGPKMKGDVDVSLPKVEGDLKGPEVDIKGPKVDIDVPDVDVQGPDWHLKMPKVKMPKFSMPGFKGEGPDVDVNLPKADLDVSGPKVDIDVPDVNIEGPDAKLKGPKFKMPEMNIKAPKISMPDFDLHLKGPKVKGDVDVSLPKVEGDLKGPEVDIKGPKVDIDAPDVDVHGPDWHLKMPKVKMPKFSMPGFKGEGPDVDVTLPKADIEISGPKVDIDAPDVSIEGPDAKLKGPKFKMPEMNIKAPKISMPDIDFNLKGPKVKGDVDVSLPKVEGDLKGPEIDIKGPSLDIDTPDVNIEGPEGKLKGPKFKMPEMNIKAPKISMPDFDLHLKGPKVKGDVDVSLPKVESDLKGPEVDIEGPEGKLKGPKFKMPDVHFKSPQISMSDIDLNLKGPKIKGDMDISVPKLEGDLKGPKVDVKGPKVGIDTPDIDIHGPEGKLKGPKFKMPDLHLKAPKISMPEVDLNLKGPKVKGDMDISLPKVEGDLKGPEVDIRDPKVDIDVPDVDVQGPDWHLKMPKVKMPKFSMPGFKGEGPDVDVNLPKADIDVSGPKVDVDVPDVNIEGPDAKLKGPKFKMPEMSIKAPKISMPDIDLNLKGPKVKGDVDVTLPKVEGDLKGPEADIKGPKVDINTPDVDVHGPDWHLKMPKVKMPKFSMPGFKGEGPDVDVSLPKADIDVSGPKVDVDIPDVNIEGPDAKLKGPKFKMPEINIKAPKISIPDVDLDLKGPKVKGDFDVSVPKVEGTLKGPEVDLKGPRLDFEGPDAKLSGPSLKMPSLEISAPKVTAPDVDLHLKAPKIGFSGPKLEGGEVDLKGPKVEAPSLDVHMDSPDINIEGPDVKIPKFKKPKFGFGAKSPKADIKSPSLDVTVPEAELNLETPEISVGGKGKKSKFKMPKIHMSGPKIKAKKQGFDLNVPGGEIDASLKAPDVDVNIAGPDAALKVDVKSPKTKKTMFGKMYFPDVEFDIKSPKFKAEAPLPSPKLEGELQAPDLELSLPAIHVEGLDIKAKAPKVKMPDVDISVPKIEGDLKGPKVQANLGAPDINIEGLDAKVKTPSFGISAPQVSIPDVNVNLKGPKIKGDVPSVGLEGPDVDLQGPEAKIKFPKFSMPKIGIPGVKMEGGGAEVHAQLPSLEGDLRGPDVKLEGPDVSLKGPGVDLPSVNLSMPKVSGPDLDLNLKGPSLKGDLDASVPSMKVHAPGLNLSGVGGKMQVGGDGVKVPGIDATTKLNVGAPDVTLRGPSLQGDLAVSGDIKCPKVSVGAPDLSLEASEGSIKLPKMKLPQFGISTPGSDLHVNAKGPQVSGELKGPGVDVNLKGPRISAPNVDFNLEGPKVKGSLGATGEIKGPTVGGGLPGIGVQGLEGNLQMPGIKSSGCDVNLPGVNVKLPTGQISGPEIKGGLKGSEVGFHGAAPDISVKGPAFNMASPESDFGINLKGPKIKGGADVSGGVSAPDISLGEGHLSVKGSGGEWKGPQVSSALNLDTSKFAGGLHFSGPKVEGGVKGGQIGLQAPGLSVSGPQGHLESGSGKVTFPKMKIPKFTFSGRELVGREMGVDVHFPKAEASIQAGAGDGEWEESEVKLKKSKIKMPKFNFSKPKGKGGVTGSPEASISGSKGDLKSSKASLGSLEGEAEAEASSPKGKFSLFKSKKPRHRSNSFSDEREFSGPSTPTGTLEFEGGEVSLEGGKVKGKHGKLKFGTFGGLGSKSKGHYEVTGSDDETGKLQGSGVSLASKKSRLSSSSSNDSGNKVGIQLPEVELSVSTKKE

SEQ ID NO: 28311 - protein, 105 aa, Homo sapiens
KHKPWIEAEYQGIVMENDNTVLLNPPLFALDKDAPLRYAGEICGFRLHGSGVPFEAVILDKATGEGLIRAKEPVDCEAQKEHTFTIQAYDCGEGPDGANTKKSHK

SEQ ID NO: 28312 - protein, 173 aa, Homo sapiens
IMAVFNQKSVSDMIKEFRKNWRALCNSERTTLCGADSMLLALQLSMAENNKQHSGEFTVSLSDVLLTWKYLLHEKLNLPVENMDVTDHYEDVRKIYDDFLKNSNMLDLIDVYQKCRALTSNCENYNTVSPSQLLDFLSGKQYAVGDETDLSIPTSPTSKYNRDNEKALPVLKR

SEQ ID NO: 28313 - protein, 23 aa, Homo sapiens
LSVWQQCGRGPSLCSLVSSVTRP

SEQ ID NO: 28314 - protein, 130 aa, Homo sapiens
IPRSHVVRSPTGVCSGESHPSWRTCRGTWQGSTGCILELENIPPASTPQQWESGPQLTQHWYQAGLGCGQASVTGHKLSGWTKEDLELINKWAFQGERMIHGNPSGVDNAVSTWGGALRYHQGKISSLKR

SEQ ID NO: 28315 - protein, 99 aa, Homo sapiens
RTLEQFMEELPTIIADNAGYDSADLVAQLRAAHSEGNTTAGLDMREGTIGDMAILGITESFQVKRQVLLSAAEAAEVILRVDNIIKAAPRKRVPDHHPC

SEQ ID NO: 28316 - protein, 34 aa, Homo sapiens
KEFTKETENPVGNTHLLLTWMEHTNFVLVTGCPP

SEQ ID NO: 28317 - protein, 383 aa, Homo sapiens
RRLSESRGGGGMSEAGEATTTTTTTLPQAPTEAAAAAPQDPAPKSPVGSGAPQAAAPAPAAHVAGNPGGDAAPAATGTAAAASLATAAGSEDAEKKVLATKVLGTVKWFNVRNGYGFINRNDTKEDVFVHQTAIKKNNPRKYLRSVGDGETVEFDVVEGEKGAEAANVTGPDGVPVEGSRYAADRRRYRRGYYGRRRGPPRNYAGEEEEEGSGSSEGFDPPATDRQFSGARNQLRRPQYRPQYRQRRFPPYHVGQTFDRRSRVLPHPNRIQAGEIGEMKDGVPEGAQLQGPVHRNPTYRPRYRSRGPPRPRPAPAVGEAEDKENQQATSGPNQPSVRRGYRRPYNYRRRPRPPNAPSQDGKEAKAGEAPTENPAPPTQQSSAE

SEQ ID NO: 28318 - protein, 63 aa, Homo sapiens
MAAPIEETAAASPAPFCGRREICQHGKPLLRMHPSLETPLKGWSLGDHIKRKMPTTSTTSTRF

SEQ ID NO: 28319 - protein, 51 aa, Homo sapiens
LKLKLMWPASRKRLRKQRIRNWELLQLKKLHLRWRQMKRKRRKKSNIPKTP

SEQ ID NO: 28320 - protein, 80 aa, Homo sapiens
LESLCQREGDTVPSFLRLCIAAVDKRGLDVDGIYRVSGNLAVVQKLRFLVDRERAVTSDGRYVFPEQPGQGTYMEDPSDP

SEQ ID NO: 28321 - protein, 68 aa, Homo sapiens
LELNPIRSKIVRAFFDNRNLRKGPSGLADEINFEDFLTIMSYFRPIDTTMDEEQVELSRKEKLRCACH

SEQ ID NO: 28322 - protein, 46 aa, Homo sapiens
LDQKIEQSELQPKISKSLMQTIRCLTSKDFMAEHSMTPSFKRRRKT

SEQ ID NO: 28323 - protein, 46 aa, Homo sapiens
KQAPRLMAMVMAAVTRTTPVKLRSGRYIQKVPRRNFLLEKMKKQYL

SEQ ID NO: 28324 - protein, 32 aa, Homo sapiens
MQKKWKPKLKINFVGNRVQFKEHRAALPGCKS

SEQ ID NO: 28325 - protein, 44 aa, Homo sapiens
KNMDLYICTKKKFYFSKKRKKKKKFKGCTYIHTAHCLAQNVLLW

SEQ ID NO: 28326 - protein, 883 aa, Homo sapiens
VEARVVRVPASESAVVVQTECSLLFVWLRFHARRWLRMSSSHFASRHRKDISTEMIRTKIAHRKSLSQKENRHKEYERNRHFGLKDVNIPTLEGRILVELDETSQGLVPEKTNVKPRAMKTILGDQRKQMLQKYKEEKQLQKLKEQREKAKRGIFKVGRYRPDMPCFLLSNQNAVKAEPKKAIPSSVRITRSKAKDQMEQTKIDNESDVRAIRPGPRQTSEKKVSDKEKKVVQPVMPTSLRMTRSATQAAKQVPRTVSSTTARKPVTRAANENEPEGKVPSKGRPAKNVETKPDKGISCKVDSEENTLNSQTNATSGMNPDGVLSKMENLPEINTAKIKGKNSFAPKDFMFQPLDGLKTYQVTPMTPRSANAFLTPSYTWTPLKTEVDESQATKEILAQKCKTYSTKTIQQDSNKLPCPLGPLTVWHEEHVLNKNEATTKNLNGLPIKEVPSLERNEGRIAQPHHGVPYFRNILQSETEKLTSHCFEWDRKLELDIPDDAKDLIRTAVGQTRLLMKERFKQFEGLVDDCEYKRGIKETTCTDLDGFWDMVSFQIEDVIHKFNNLIKLEESGWQVNNNMNHNMNKNVFRKKVVSGIASKPKQDDAGRIAARNRLAAIKNAMRERIRQEECAETAVSVIPKEVDKIVFDAGFFRVESPVKLFSGLSVSSEGPSQRLGTPKSVNKAVSQSRNEMGIPQQTTSPENAGPQNTKSEHVKKTLFLSIPESRSSIEDAQCPGLPDLIEENHVVNKTDLKVDCLSSERMSLPLLAGGVADDINTNKKEGISDVVEGMELNSSITSQDVLMSSPEKNTASQNSILEEGETKISQSELFDNKSLTTECHLLDSPGLNCSNPFTQLERRHQEHARHISFGGNLITFSPLQPGEF

SEQ ID NO: 28327 - protein, 6 aa, Homo sapiens
LTSGRL

SEQ ID NO: 28328 - protein, 19 aa, Homo sapiens
MMMMIMTLMIFNRIKIEFF

SEQ ID NO: 28329 - protein, 51 aa, Homo sapiens
IWVVRRRLGQASREVERKPGALGAVRVGRVPRPRGEVGARGLLERGALRTE

SEQ ID NO: 28330 - protein, 357 aa, Homo sapiens
IWVVRRRLGQASREVELMAMQMQLEANADTSVEEESFGPQPISRLEQCGINANDVKKLEEAGFHTVEAVAYAPKKELINIKGISEAKADKILTESRSVARLECNSVILVYCTLRLSGSSDSPASASRVVGTTGGIETGSITEMFGEFRTGKTQICHTLAVTCQLPIDRGGGEGKAMYIDTEGTFRPERLLAVAERYGLSGSDVLDNVAYARAFNTDHQTQLLYQASAMMVESRYALLIVDSATALYRTDYSGRGELSARQMHLARFLRMLLRLADEFGVAVVITNQVVAQVDGAAMFAADPKKPIGGNIIAHASTTRLYLRKGRGETRICKIYDSPCLPEAEAMFAINADGVGDAKD

SEQ ID NO: 28331 - protein, 104 aa, Homo sapiens
IPLNSRIMKSRKARISELLQKFLLHQTSTKKLRMLFPQVTEIQRYLQKERNLSTQMSHPNLEKIKELQSLLQTLRSFMKLILRKWSPLINILREKRNILKNTIP

SEQ ID NO: 28332 - protein, 12 aa, Homo sapiens
ITSTSREIESIR

SEQ ID NO: 28333 - protein, 71 aa, Homo sapiens
TMGVSRTSSRRSLTSTIRPTSTRIRSGMSTGSLMTWWLRSSSLRVALCGPARTMTEMCSQTSWPRALAPLA

SEQ ID NO: 28334 - protein, 438 aa, Homo sapiens
KPQLSEEQAAVLRAVLKGQSIFFTGSAGTGKSYLLKRILGSLPPTGTVATASTGVAACHIGGTTLHAFAGIGSGQAPLAQCVALAQRPGVRQGWLNCQRLVIDEISMVEADLFDKLEAVARAVRQQNKPFGGIQLIICGDFLQLPPVTKGSQPPRFCFQSKSWKRCVPVTLELTKVWRQADQTFISLLQAVRLGRCSDEVTRQLQATASHKVGRDGIVATRLCTHQDDVALTNERRLQELPGKVHRFEAMDSNPELASTLDAQCPVSQLLQLKLGAQVMLVKNLSVSRGLVNGARGVVVGFEAEGRGLPQVRFLCGVTEVIHADRWTVQATGGQLLSRQQLPLQLAWAMSIHKSQGMTLDCVEISLGRVFASGQAYVALSRARSLQGLRVLDFDPMAVRCDPRVLHFYATLRRGRSLSLESPDDDEAASDQENMDPIL

SEQ ID NO: 28335 - protein, 20 aa, Homo sapiens
IYTGIWHFSKPREDRMAFCS

SEQ ID NO: 28336 - protein, 677 aa, Homo sapiens
RPESTTRPGPNRHEPGGRDPPQHFGGPPPLISPKPQLHAAPTALWNPVSLMDNTLETRRAESHSLHSHPAAFEPSRQAAVPLVKVERVFCPEKAEEGPRKREPAPLDKYQPPPPPPREGGSLEHQPFLPGPGPFLAELEKSTQTILGQQRASLPQAATFGELSGPLKPGSPYRPPVPRAPDPAYIYDEFLQQRRRLVSKLDLEERRRREAQEKGYYYDLDDSYDESDEEEVRAHLRCVAEQPPLKLDTSSEKLEFLQLFGLTTQQQKEELVAQKRRKRRRMLRERSPSPPTIQSKRQTPSPRLALSTRYSPDEMNNSPNFEEKKKFLTIFNLTHISAEKRKDKERLVEMLRAMKQKALSAAVADSLTNSPRDSPAVSLSEPATQQASLDVEKPVGVAASLSDIPKAAEPGKLEQVRPQELSRVQELAPASGEKARLSEAPGGKKSLSMLHYIRGAAPKDIPVPLSHSTNGKSKPWEPFVAEEFAHQFHESVLQSTQKALQKHKGSVAVLSAEQNHKVDTSVHYNIPELQSSSRAPPPQHNGQQEPPTARKGPPTQELDRDSEEEEEEDDEDGEDEEEVPKRKWQGIEAVFEAYQEHIEEQNLERQVLQTQCRRLEARHYSLSLTAEQLSHSVAELRSQKQKMVSERERLQAELDHLRKCLALPAMHWPRGYLKGYPR

SEQ ID NO: 28337 - protein, 132 aa, Homo sapiens
LSSQHTSPDSCKSPWTLKAVRAARQAADFTLKVEVECSSLQEAVQAAEAGADLVLLDNFKPEELHPTATVLKAQFPSVAVEASGGITLDNLPQFCGPHIDVISMGMLTQAAPALDFSLKLFAKEVAPVPKIH

SEQ ID NO: 28338 - protein, 57 aa, Homo sapiens
LPSSGPLRPRLVLLRPPPPPAPSSSGPLRLRLRPPLAPSAPGPGPTAGCGTTPAPSA

SEQ ID NO: 28339 - protein, 152 aa, Homo sapiens
IAGSAMSSEPPPPPQPPTHQASVGLLDTPRSRERSPSPLRGNVVPSPLPTRRTRTFSATVRASQGPVYKGVCKCFCRSKGHGFITPADGGPDIFLHISDVEGEYVPVEGDEVTYKMCSIPPKNEKLQAVEVVITHLAPGTKHETWSGHVISS

SEQ ID NO: 28340 - protein, 238 aa, Homo sapiens
RVNEKEIVRLRTIGELLAPAAPFDKKCGRENWTVAFAPDGSYFAWSQGHRTVKLVPWSQCLQNFLLHGTKNVTNSSSLRLPRQNSDGGQKNKPREHIIDCGDIVWSLAFGSSVPEKQSRCVNIEWHRFRFGQDQLLLATGLNNGRIKIWDVYTGKLLLNLVDHTEVVRDLTFAPDGSLILVSASRDKTLRVWDLKDDGNMMKVLRGHQNWVYSCAFSPDSSMLCSVGASKAVVAAILV

SEQ ID NO: 28341 - protein, 212 aa, Homo sapiens
RQRLGSRRADGVESVRSRELESKPLKMADDLDFETGDAGASATFPMQCSALRKNGFVVLKGRPCKIVEMSTSKTGKHGHAKVHLVGIDIFTGKKYEDICPSTHNMDVPNIKRNDFQLIGIQDGYLSLLQDSGEVREDLRLPEGDLGKEIEQKYDCGEEILVWCLPPCFCAQLCSVRFFLSSDISWLSLLLLQITVLSAMTEEAAVAIKAMAK

SEQ ID NO: 28342 - protein, 41 aa, Homo sapiens
MVQSASVSKAGKGSSSSHGVAAALNQDLDPDPKCHVFNVSK

SEQ ID NO: 28343 - protein, 28 aa, Homo sapiens
ISMLESRVNGQGKLWGLLPAGPSLQPSP

SEQ ID NO: 28344 - protein, 193 aa, Homo sapiens
RATSRGPQGMDLQAAGAQAQGAAEPSRGPPLPSARGAPPSPEAGFATADHSSQERETEKAMDRLARGTQSIPNDSPARGEGTHSEEEGFAMDEEDSDGELNTWELSEGTNCPPKEQPGDLFNEDWDSELKADQGNPYDADDIQESISQELKPWVCCAPQGDMIYDPSWHHPPPLIPYYSKMVFETGQFDDAED

SEQ ID NO: 28345 - protein, 113 aa, Homo sapiens
LGGQQREGLALMMQLARELKTLARDLGMAVVVTNHITRDRDSGRLKPALGRSWSFVPSTRILLDTIEGAGASGGRRMACLAKSSRQPTGFQEMVDIGTWGTSEQSATLQGDQT

SEQ ID NO: 28346 - protein, 13 aa, Homo sapiens
KAFPSVPTRKATA

SEQ ID NO: 28347 - protein, 60 aa, Homo sapiens
TPEVVVVRVRLRGTRHRLRPPERLREPRPEGVGVAAAETQPPLFPLFAERRRVASIRQLP

SEQ ID NO: 28348 - protein, 572 aa, Homo sapiens
KPEEDDFQDFQDASKSGSLDDSFSDFQELPASSKTSNSQHGNSAPSLLMPLPGTKALPSMDKYAVFKGIAADKSSENTVPPGDPGDKYSAFRELEQTAENKPLGESFAEFRSAGTDDGFTDFKTADSVSPLEPPTKDKTFPPSFPSGTIQQKQQTQVKNPLNLADLDMFSSVNCSSEKPLSFSAVFSTSKSVSTPQSTGSAATMTALAATKTSSLADDFGEFSLFGEYSGLAPVGEQDDFADFMAFSNSSISSEQKPDDKYDALKEEASPVPLTSNVGSTVKGGQNSTAASTKYDVFRQLSLEGSGLGVEDLKDNTPSGKSDDDFADFHSSKFSSINSDKSLGEKAVAFRHTKEDSASVKSLDLPSIGGSSVGKEDSEDALSVQFDMKLADVGGDLKHVMSDSSLDLPTVSGQHPPAAGSGSPSATSILQKKETSFGSSENITMTSLSKVTTFVSEDALPETTFPALASFKDTIPQTSEQKEYENRDYKDFTKQDLPTAERSQEATCPSPASSGASQETPNECSDDFGEFQSEKPKISKFDFLVATSQSKMKSSEEMIKSELATFDLSVQGE

SEQ ID NO: 28349 - protein, 64 aa, Homo sapiens [sequence omitted]

SEQ ID NO: 28350 - protein, 33 aa, Homo sapiens
LVRPVWLLLWKQCCSYWKIKGKASPWWGKVWLR

SEQ ID NO: 28351 - protein, 82 aa, Homo sapiens
LEENVPGIEFFLEAKYSEVDGRGLRSSTFALVPVFAHLSILQSLVPAAGAASPVAISAQHLCYSHVTPGDPGAGAGQGPAPS

SEQ ID NO: 28352 - protein, 493 aa, Homo sapiens
KEPPYKVEESGYAGFIMPIEVHFKNKEEPRKVCFTYDLFLNLEGNPPVNHLRCEKLTFNNPTTEFRYKLLRAGGVMVMPEGADTVSRPSPDYPMLPTIPLSAFSDPKKTKPSHGSKDANKESSKTSKPHKVTKEHRERPRKDSESKSSSKELEREQAKSSKDTSRKLGEGRLPKEEKAPPPKAAFKEPKMALKETKLESTSPKGGPPPPPPPPPRASSKRPATADSPKPSAKKQKKSSSKGSRSAPGTSPRTSSSSSFSDKKPAKDKSSTRGEKVKAESEPREAKKALEVEESNSEDEASFKSESAQSSPSNSSSSSDSSSDSDFEPSQNHSQGPLRSMVEDLQSEESDEDDSSSGEEAAGKTNPGRDSRLSFSDSESDNSADSSLPSREPPPPQKPPPPNSKVSGRRSPESCSKPEKILKKGTYDKAYTDELVELHRRLMALRERNVLQQIVNLIEETGHFNVTNTTFDFDLFSLDETTVRKLQSCLEAVAT

SEQ ID NO: 28353 - protein, 78 aa, Homo sapiens
TAELLEDLGPWVAGSHSIAQARVRGYLIRNFSEGRARWLMPVIPAFSEAEASWTDLKKTAFQDLLRLQLQLEVQNVFS

SEQ ID NO: 28354 - protein, 336 aa, Homo sapiens
LRSLLPSAGPLRRSPQFPARTRSGPPNLRPKSGGGSGGKKMKNEIAAVVFFFTRLVRKHDKLKKEAVERFAEKLTLILQEKYKNHWYPEKPSKGQAYRCIRVNKFQRVDPDVLKACENSCILYSDLGLPKELTLWVDPCEVCCRRDGVSPCWPDCSQTPDLVIRPPWPPKALDYRREPLRPASSFLIMYGEKNNAFIVASFENKDENKDEISRKVTRALDKVTSDYHSGSSSSDEETSKEMEVKPSSVTAAASPVYQISELIFPPLPMWHPLPRKKPGMYRGNGHQNHYPPPVPFGYPNQGRKNKPYRPIPVTWVPPPGMHCDRNHWINPHMLAPH

SEQ ID NO: 28355 - protein, 66 aa, Homo sapiens
LFQEKKVDLSKPLVATCGSGVTACHVALGAYLCGKPDVPIYDGSWVEWYMRARPEDVISEGRGKTH

SEQ ID NO: 28356 - protein, 24 aa, Homo sapiens
RRSRSSWRTRTASWPRKRNCWKTE

SEQ ID NO: 28357 - protein, 226 aa, Homo sapiens
RFQALGGEGQSADLRPLLTDFRLQFICAPASSLSLRRLRLRPQKEISILCPEQNRMAMSQESLTFKDVFVDFTLEEWQQLDSAQKNLYRDVMLENYSHLVSVGYLVAKPDVIFRLGPGEESWMADGGTPVRTCAGEDRPEVWQVDEQIDHYKESQDKLPWQAAFIGKETLKDESGQESRTCRKSIYLSTEFDSVRQRLPKYYSWEKAFKTSFKLSWSKWKLCKKER

SEQ ID NO: 28358 - protein, 672 aa, Homo sapiens
RTEHTGELQKEEAMAAVILESIFLKRSQQKKKTSPLNFKKRLFLLTVHKLSYYEYDFERGRRGSKKGSIDVEKITCVETVVPEKNPPPERQIPRRGEESSEMEQISIIERFPYPFQVVYDEGPLYVFSPTEELRKRWIHQLKNVIRYNSDLVQKYHPCFWIDGQYLCCSQTAKNAMGCQILENRNGSLKPGSSHRKTKKPLPPTPEEDQILKKPLPPEPAAAPVSTSELKKVVALYDYMPMNANDLQLRKGDEYFILEESNLPWWRARDKNGQEGYIPSNYVTEAEDSIEMYEWYSKHMTRSQAEQLLKQEGKEGGFIVRDSSKAGKYTVSVFAKSTGDPQGVIRHYVVCSTPQSQYYLAEKHLFSTIPELINYHQHNSAGLISRLKYPVSQQNKNAPSTAGLGYGSWEIDPKDLTFLKELGTGQFGVVKYGKWRGQYDVAIKMIKEGSMSEDEFIEEAKVMMNLSHEKLVQLYGVCTKQRPIFIITEYMANGCLLNYLREMRHRFQTQQLLEMCKDVCEAMEYLESKQFLHRDLAARNCLVNDQGVVKVSDFGLSRYVLDDEYTSSVGSKFPVRWSPPEVLMYSKFSSKSDIWAFGVLMWEIYSLGKMPYERFTNSETAEHIAQGLRLYRPHLASEKVYTIMYSCWHEKADERPTFKILLSNILDVMDEES

SEQ ID NO: 28359 - protein, 20 aa, Homo sapiens
LPWLEPCRFITRELQEPGRS

SEQ ID NO: 28360 - protein, 81 aa, Homo sapiens
KLWTASICHWPPVSGSKRQLPYSPDTSRVLSLLTAAHVSSLAPVASLGREEAEDCTLRPKARVGPERPRLSGSRGRETGRG

SEQ ID NO: 28361 - protein, 44 aa, Homo sapiens
LCPTLPSFVPGVLSPSPSAGPREEGAVTEELPLAAPGRGTGFIQ

SEQ ID NO: 28362 - protein, 17 aa, Homo sapiens
MCLAMSIGSNQWKRSNT

SEQ ID NO: 28363 - protein, 31 aa, Homo sapiens
LQDMSVRPDAWPLAAWEVAGAAFAFARDSSN

SEQ ID NO: 28364 - protein, 10 aa, Homo sapiens
KERLTSLRRE

SEQ ID NO: 28365 - protein, 41 aa, Homo sapiens
IGEGEGMRSCCGPRVTVKDPAAALGPPRPLRLRGAAGARRA

SEQ ID NO: 28366 - protein, 15 aa, Homo sapiens
REGLDMALRGRPAGR

SEQ ID NO: 28367 - protein, 70 aa, Homo sapiens
IVHAQLIPQARRNCKLVPLTQLPHHLQPVLPELPCGCLQVGPHCFPCRYLADWPKHPHQPLPSMLPPTCC

SEQ ID NO: 28368 - protein, 17 aa, Homo sapiens
VLWCRASSSPAQPRRLN

SEQ ID NO: 28369 - protein, 50 aa, Homo sapiens
VHAFRKEFVTRGLRDRGSVFELLVRWSARCPRPRAKPGGRSLVTVSTESV

SEQ ID NO: 28370 - protein, 30 aa, Homo sapiens
LFSPILREPIQIPLPFFPCRPSYGRERCGQ

SEQ ID NO: 28371 - protein, 43 aa, Homo sapiens
VWPCFLSRLPRGPTLYCPHHQPTMPPLPGCQWQPTPTPHNPSG

SEQ ID NO: 28372 - protein, 12 aa, Homo sapiens
LVRKPSGAAAAI

SEQ ID NO: 28373 - protein, 294 aa, Homo sapiens
IMRESALERGPVPEAPAGGPVHAVTVVTLLEKLASMLETLRERQGGLARRQGGLAGSVRRIQSGLGALSRSHDTTSNTLAQLLAKAERVSSHANAAQERAVRRAAQVQRLEANHGLLVARGKLHVLLFKASPTLQRFAVRTQLSLPLPSHACLSPQTLAAEEEGEVPASAFQKAPEPLGPADQSELGPEQLEAEVGESSDEEPVESRAQRLRRTGLQKVQSLRRALSGRKGPAAPPPTPVKPPRLGPGRSAEAQPEAQPALEPTLEPEPPQDTEEDPGRPGAAEEALLQMESVA

SEQ ID NO: 28374 - protein, 1522 aa, Homo sapiens
LASRRTPIHTTTLTWSWRPAPAWREDPPIRVRLPHPRRREAPGSPPLSPRGHCPPAPAKPMHPENKLTNHGKTGNGGAQSQHQNVNQGPTCNVGSKGVGAGNHGAKANQISPSNSSLKNPQAGVPPFSSLKGKVKRDRSVSVDSGEQREAGTPSLDSEAKEVAPRSKRRCVLERKQPYSGDEWCSGPDSEEDDKPIGATHNCNVADPAMAAPQLGPGQTTQLPLSESSVPGAPHGPPPGLRPDAPGGGGGGGGVPGKPPSQFVYVFTTHLANTAAEAVLQGRADSILAYHQQNVPRAKLDQAPKVPPTPEPLPLSTPSAGTPQSQPPPLPPPPPPAPGSAPPALPPEGPPEDSSQDLAPNSVGAASTGGGTGGTHPNTPTATTANNPLPPGGDPSSAPGPALLGEAAAPGNGQRSLVGSEGLSKEQLEHRERSLQTLRDIERLLLRSGETEPFLKGPPGGAGEGGPPAQAPPPPQQPPTAPPSGLKKYEEPLQSMISQTQSLGGPPLEHEVPGHPPGGDMGQQMNMMIQRLGQDSLTPEQVAWRKLQEEYYEEKRRKEEQIGLHGSRPLQDMMGMGGMMVRGPPPPYHSKPGDQWPPGMGAQLRGPMDVQDPMQLRGGPPFPGPRFPGNQIQRVPGFGGMQSMPMEVPMNAMQRPVRPGMGWTEDLPPMGGPSNFAQNTMPYPGGQGEAERFMTPRVREELLRHQLLEKRSMGMQRPLGMAGSGMGQSMEMERMMQAHRQMDPAMFPGQMAGGEGLAGTPMGMEFGGGRGLLSPPMGQSGLREVDPPMGPGNLNMNMNVNMNMNMNLNVQMTPQQQMLMSQKMRGPGDLMGPQGLSPEEMARVRAQNSSGVMGGPQKMLMPSQFPNQGQQGFSGGQGPYQAMSQDMGNTQDMFSPDQSSMPMSNVGTTRLSHMPLPPASNPPGTVHSAPNRGLGRRPSDLTISINQMGSPGMGHLKSPTLSQVHSPLVTSPSANLKSPQTPSQMVPLPSANPPGPLKSPQVLGSSLSVRSPTGSPSRLKSPSMAVPSPGWVASPKTAMPSPGVSQNKQPPLNMNSSTTLSNMEQGTLPPSGPRSSSSAPPANPPSGLMNPSLPFTSSPDPTPSQNPLSLMMTQMSKYAMPSSTPLYHNAIKTIATSDDELLPDRPLLPPPPPPQGSGPGISNSQPSQMHLNSAAAQSPMGMNLPGQQPLSHEPPPAMLPSPTPLGSNIPLHPNAQGTGGPPQNSMMMAPGGPDSLNAPCGPVPSSSQMMPFPPRLQQPHGAMAPTGGGGGGPGLQQHYPSGMALPPEDLPNQPPGPMPPQQHLMGKAMAGRMGDAYPPGVLPGVASVLNDPELSEVIRPTPTGIPEFDLSRIIPSEKPSSTLQYFPKSENQPPKAQPPNLHLMNLQNMMAEQTPSRPPNLPGQQGVQRGLNMSMCHPGQMSLLGRTGVPPQQGMVPHGLHQGVMSPPQGLMTQQNFMLMKQRGVGGEVYSQPPHMLSPQGSLMGPPPQQNLMVSHPLRQRSVSLDSQMGYLPAPGGMANLPF

SEQ ID NO: 28375 - protein, 416 aa, Homo sapiens
LGRETEAAAAQGKRGCSGGSRKMSGEDEQQEQTIAEDLVVTKYKMGGDIANRVLRSLVEASSSGVSVLSLCEKGDAMIMEETGKIFKKEKEMKKGIAFPTSISVNNCVCHFSPLKSDQDYILKEGDLVKIDLGVHVDGFIANVAHTFVVDVAQGTQVTGRKADVIKAAHLCAEAALRLVKPGNQNTQVTEAWNKVAHSFNCTPIEGMLSHQLKQHVIDGEKTIIQNPTDQQKKDHEKAEFEVHEVYAVDVLVSSGEGKAKDAGQRTTIYKRDPSKQYGLKMKTSRAFFSEVERRFDAMPFTLRAFEDEKKARMGVVECAKHELLQPFNVLYEKEGEFVAQFKFTVLLMPNGPMRITSGPFEPDLYKSEMEVQDAELKALLQSSASRKTQKKKKKKASKTAENATSGETLEENEAGD

SEQ ID NO: 28376 - protein, 28 aa, Homo sapiens
KEGLMSSSFSNSCLSGGQTSKATKNERP

SEQ ID NO: 28377 - protein, 30 aa, Homo sapiens
RPPRKWQSPTLASFQLGSRLLTTPPCPTRK

SEQ ID NO: 28378 - protein, 27 aa, Homo sapiens
RTVFQLLNFQQVDLLKVMIFFGKVFLV

SEQ ID NO: 28379 - protein, 14 aa, Homo sapiens
VQEKLRTMRLIGTI

SEQ ID NO: 28380 - protein, 48 aa, Homo sapiens
LHPLVMRLRYRSATRKKLRDSHLAMSPKQGEGARLSVWTLTHSRIIQR

SEQ ID NO: 28381 - protein, 29 aa, Homo sapiens
LLVDLLWWSWMRPHERGAPGGLQQQRLRG

SEQ ID NO: 28382 - protein, 19 aa, Homo sapiens
LMHLLVNRFHIFMMMWTQS

SEQ ID NO: 28383 - protein, 13 aa, Homo sapiens
LLLPAPCPTNIQH

SEQ ID NO: 28384 - protein, 67 aa, Homo sapiens
LSLLRNETGNSSISLGISSWPWLGKWGSWQNSFSGKPMGNLAPKAGPPGNGQPFKRSLVTSSSTWWH

SEQ ID NO: 28385 - protein, 14 aa, Homo sapiens
RPQPGLHRLPRLLD

SEQ ID NO: 28386 - protein, 235 aa, Homo sapiens
LSKGLKRKREEEEEKEPLAVDSWWLDPGHTAVAQAPPAVASSSLFDLSVLKLHHSLQQSEPDLRHLVLVVNTLRRIQASMAPAAALPPVPSPPAAPSVADNLLASSDAALSASMASLLEDLSHIEGLSQAPQPLADEGPPGRSIGGAAPSLGALDLLGPATGCLLDDGLEGLFEDIDTSMYDNELWAPASEGLKPGPEDGPGKEEAPELDEAELDYLMDVLVGTQALERPPGPGR

SEQ ID NO: 28387 - protein, 28 aa, Homo sapiens
TGQSREASAPSLGNLNTPASKSQGTSVL

SEQ ID NO: 28388 - protein, 51 aa, Homo sapiens
LASEAVAVLGRRLGGAGCEQGLRATLLLATGFCCEVRPGNGGKKELREAVG

SEQ ID NO: 28389 - protein, 42 aa, Homo sapiens
LEDLGPWVAGGSRRASWTDLKKTAFQDLLRLQLQLEVQNVFS

SEQ ID NO: 28390 - protein, 326 aa, Homo sapiens
LRRSPQFPARTRSGPPNLRPKSGGGSGGKKMKNEIAAVVFFFTRLVRKHDKLKKEAVERFAEKLTLILQEKYKNHWYPEKPSKGQAYRCIRVNKFQRVDPDVLKACENSCILYSDLGLPKELTLWVDPCEVCCRRDGVSPCWPDCSQTPDLVIRPPWPPKALDYRREPLRPASSFLIMYGEKNNAFIVASFENKDENKDEISRKVTRALDKVTSDYHSGSSSSDEETSKEMEVKPSSVTAAASPVYQISELIFPPLPMWHPLPRKKPGMYRGNGHQNHYPPPVPFGYPNQGRKNKPYRPIPVTWVPPPGMHCDRNHWINPHMLAPH

SEQ ID NO: 28391 - protein, 30 aa, Homo sapiens
TLIPATMICTQEIQSRTLLMNVSMNSKPIR

SEQ ID NO: 28392 - protein, 171 aa, Homo sapiens
ITSSSTSKQVCVFDPSKEGTIEQRTRRTQVVTNCWENKSKMNYARCFHKMISYNGKLYVFGGVCVILRASFESQGCPSTEVYNPETDQWTILASMPIGRSGHGVTVLDKQIMVLGGLCYNGHYSDSILTFDPDENKWKEDEYPRMPCKLDGLQVCNLHFPDYVLDEVRRCN

SEQ ID NO: 28393 - protein, 16 aa, Homo sapiens
VGEMGPWVTCQIFVRN

SEQ ID NO: 28394 - protein, 8 aa, Homo sapiens
MLREIKQR

SEQ ID NO: 28395 - protein, 71 aa, Homo sapiens
MRAQRRTAAASAVLDPEEEWEAMLPELKSTLQQLLQLPQGEEEIPEQIANTETTEDVKGRIYQLLAKASYK

SEQ ID NO: 28396 - protein, 92 aa, Homo sapiens
MRSKAWEKDEWKSWVDPILLTPYPLPCPLLSFSPLPPACRALVDELEWEIAQVDPKKTIQMGSFRINPDGSQSVVEVTVTVPPNKVAHSGFG

SEQ ID NO: 28397 - protein, 57 aa, Homo sapiens
MSTPAVPQDLQLPPSQRAQSAFKEQRRQKLKEHLLRRKTLFAYKQENEMLSRLIKKT

SEQ ID NO: 28398 - protein, 62 aa, Homo sapiens
MQRRRRSRVPIWRREKELAKVTIKKEDLELIMTEMEISRAAAERSLREHMGNVVEALIALTN

SEQ ID NO: 28399 - protein, 70 aa, Homo sapiens
MRAWGMPQESRLLQETHQAWRPSTGPSPDTAVLASASWRCRGAQFPQLLGEGQEGWSQSALPLLLTAEIK

SEQ ID NO: 28400 - protein, 83 aa, Homo sapiens
MPVTAQEHQRELSNCQRCCPFSTTGKWLIHTKNQPQTEQACRRSPTASPSNVHFTPPRRQHQAGCKTGKYLPESNTLYGSGFN

SEQ ID NO: 28401 - protein, 76 aa, Homo sapiens
MDVIRNFLREHICGKKAGSLYLSGAPGTGKTACLSRILQDLKVSRDQVLDNAAVQFCARKVSAVSGDVRKALDVCR

SEQ ID NO: 28402 - protein, 139 aa, Homo sapiens
MTGTPGAVATRDGEAPERSPPCSPSYDLTGKNKVVTVDGVRVKLQIWDTAGQERFRSVTHAYYRDAQALLLLYDITNKSSFDNIRAWLTEIHEYAQRDVVIMLLGNKVSGSGAGSAQPCTSSALAGPITTQEQLSRHPS

SEQ ID NO: 28403 - protein, 135 aa, Homo sapiens
MMPKDANMQIFVKTLTGKTITLEVEPSDTIENVKAKIQDKEGIPPDQQRLIFAGKQLEDGRTLSDYNIQKESTLHLVLRLRGGIIEPSLRQLAQKYNCDKMICRKCYARLHPRAVNCRKKKCGHTNNLRPKKKVK

SEQ ID NO: 28404 - protein, 167 aa, Homo sapiens
METSSSSDDSCDSFASDNFANTRLQSVREGCRTRSQCRHSGPLRVAMKFPARSTRGATNKKAESRQPSENSVTDSNSDSEDESGMNFLEKRALNIKQNKAMLAKLMSELESFPGSFRGRHPLPGSDSVSTSSCLYTVVFWAHLRSICVVFKNLISLFVWPSRQTKGT

SEQ ID NO: 28405 - protein, 163 aa, Homo sapiens [sequence omitted]

SEQ ID NO: 28406 - protein, 29 aa, Homo sapiens
MRWGAQPRAAQRPSWPAPDRAEDPWPWAW

SEQ ID NO: 28407 - protein, 154 aa, Homo sapiens [sequence omitted]

SEQ ID NO: 28408 - protein, 130 aa, Homo sapiens [sequence omitted]

SEQ ID NO: 28409 - protein, 774 aa, Homo sapiens
MVSLASPDSDEEDEERPARKRRQVERATEDGEEDEEMIESIENLEDLKGHSVREWVSMAGPRLEIHHRFKNFLRTHVDSHGHNVFKERISDMCKENRESLVVNYEDLAAREHVLAYFLPEAPAELLQIFDEAALEVVLAMYPKYDRITNHIHVRISHLPLVEELRSLRQLHLNQLIRTSGVVTSCTGVLPQLSMVKYNCNKCNFVLGPFCQSQNQEVKPGSCPECQSAGPFEVNMEETIYQNYQRIRIQESPGKVAAGRLPRSKDAILLADLVDSCKPGDEIELTGIYHNNYDGSLNTANGFPVFATVILANHVAKKDNKVAVGELTDEDVKMITSLSKDQQIGEKIFASIAPSIYGHEDIKRGLALALFGGEPKNPGGKHKVRGDINVLLCGDPGTAKSQFLKYIEKVSSRAIFTTGQGASAVGLTAYVQRHPVSREWTLEAGALVLADRGVCLIDEFDKMNDQDRTSIHEAMEQQSISISKAGIVTSLQARCTVIAAANPIGGRYDPSLTFSENVDLTEPIISRFDILCVVRDTVDPVQDEMLARFVVGSHVRHHPSNKEEEGLANGSAAEPAMPNTYGVEPLPQEVLKKYIIYAKERVHPKLNQMDQDKVAKMYSDLRKESMATGSIPITVRHIESMIRMAEAHARIHLRDYVIEDDVNMAIRVMLESFIDTQKFSVMRSMRKTFARYLSFRRDNNELLLFILKQLVAEQVTYQRNRFGAQQDTIEVPEKDLVDKARQINIHNLSAFYDSELFRMNKFSHDLKRKMILQQF

SEQ ID NO: 28410 - protein, 604 aa, Homo sapiens
MPHLVNGDAAQQVILVQVNPGETFTIRAEDGTLQCIQGPAEVPMMSPNGSIPPIHVPPGYISQVIEDSTGVRRVVVTPQSPECYPPSYPSAMSPTHHLPPYLTHHPHFIHNSHTAYYPPVTGPGDMPPQFFPQHHLPHTIYGEQEIIPFYGMSTYITREDQYSKPPHKKLKDRQIDRQNRLNSPPSSIYKSSCTTVYNGYGKGHSGGSGGGGSGSGPGIKKTERRARSSPKSNDSDLQEYELEVKRVQDILSGIEKPQVSNIQARAVVLSWAPPVGLSCGPHSGLSFPYSYEVALSDKGRDGKYKIIYSGEELECNLKDLRPATDYHVRVYAMYNSVKGSCSEPVSFTTHSCAPECPFPPKLAHRSKSSLTLQWKAPIDNGSKITNYLLEWDEGKRNSGFRQCFFGSQKHCKLTKLCPAMGYTFRLAARNDIGTSGYSQEVVCYTLGNIPQMPSAPRLVRAGITWVTLQWSKPEGCSPEEVITYTLEIQEDENDNLFHPKYTGEDLTCTVKNLKRSTQYKFRLTASNTEGKSCPSEVLVCTTSPDRPGPPTRPLVKGPVTSHGFSVKWDPPKDNGGSEILKYLLEITDGNSEGEVFGNCFIQIQ

SEQ ID NO: 28411 - protein, 522 aa, Homo sapiens
MGVVSSLTSHPLQNIAESGRPQLEAHLETRGGGHVGRRFCFSPGENSKTMSTELFSSTREEGSSGSGPSFRSNQRKMLNLLLERDTSFTVCPDVPRTPVGKFLGDSANLSILSGGTPKRCLDLSNLSSGEITATQLTTSADLDETGHLDSSGLQEVHLAGMNHDQHLMKCSPAQLLCSTPNGLDRGHRKRDAMCSSSANKENDNGNLVDSEMKYLGSPITTVPKLDKNPNLGEDQAEEISDELMEFSLKDQEAKVSRSGLYRSPSMPENLNRPRLKQVEKFKDNTIPDKVKKKYFSGQGKLRKGLCLKKTVSLCDITITQMLEEDSNQGHLIGDFSKVCALPTVSGKHQDLKYVNPETVAALLSGKFQGLIEKFYVIDCRYPYEYLGGHIQGALNLYSQEELFNFFLKKPIVPLDTQKRIIIVFHCEFSSERGPRMCRCLREEDRSLNQYPALYYPELYILKGGYRDFFPEYMELCEPQSYCPMHHQDHKTELLRCRSQSKVQEGERQLREQIALLVKDMSP

SEQ ID NO: 28412 - protein, 173 aa, Homo sapiens
MLGKEYVGKTSLVERYVHDRFLVGPYQNTIGAAFVAKVMSVGDRTVTLGIWDTAGSERYEAMSRIYYRGAKAAIVCYDLTDSSSFERAKFWVKELRSLEEGCQIYLCGTKSDLLEEDRRRRRVDFHDVQDYADSSCSSALWGVGVCGCLGGSKKIGTALAARARCSRRSSWPP

SEQ ID NO: 28413 - protein, 14 aa, Homo sapiens
IQISSQSAHCDSGR

SEQ ID NO: 28414 - protein, 5224 aa, Homo sapiens
VTAGYTGIKCTNFSSCWSDGKMFNALIHRYRPDLVDMERVQIQSNRENLEQAFEVAERLGVTRLLDAEDVDVPSPDEKSVITYVSSIYDAFPKVPEGGEGISATEVDSRWQEYQSRVDSLIPWIKQHTILMSDKTFPQNPVELKALYNQYIHFKETEILAKEREKGRIEELYKLLEVWIEFGRIKLPQGYHPNDVEEEWGKLIIEMLEREKSLRPAVERLELLLQIANKIQNGALNCEEKLTLAKNTLQADAAHLESGQPVQCESDVIMYIQECEGLIRQLQVDLQILRDENYYQLEELAFRVMRLQDELVTLRLECTNLYRKGHFTSLELVPPSTLTTTHLKAEPLTKATHSSSTSWFRKPMTRAELVAISSSEDEGNLRFVYELLSWVEEMQMKLERAEWGNDLPSVELQLETQQHIHTSVEELGSSVKEARLYEGKMSQNFHTSYAETLGKLETQYCKLKETSSFRMRHLQSLHKFVSRATAELIWLNEKEEEELAYDWSDNNSNISAKRNYFSELTMELEEKQDVFRSLQDTAELLSLENHPAKQTVEAYSAAVQSQLQWMKQLCLCVEQHVKENTAYFQFFSDARELESFLRNLQDSIKRKYSCDHNTSLSRLEDLLQDSMDEKEQLIQSKSSVASLVGRSKTIVQLKPRSPDHVLKNTISVKAVCDYRQIEITICKNDECVLEDNSQRTKWKVISPTGNEAMVPSVCFLIPPPNKDAIEMASRVEQSYQKVMALWHQLHVNTKSLISWNYLRKDLDLVQTWNLEKLRSSAPGECHQIMKNLQAHYEDFLQDSRDSVLFSVADRLRLEEEVEACKARFQHLMKSMENEDKEETVAKMYISELKNIRLRLEEYEQRVVKRIQSLASSRTDRDAWQDNALRIAEQEHTQEDLQQLRSDLDAVSMKCDSFLHQSPSSSSVPTLRSELNLLVEKMDHVYGLSTVYLNKLKTVDVIVRSIQDAELLVKGYEIKLSQEEVVLADLSALEAHWSTLRHWLSDVKDKNSVFSVLDEEIAKAKVVAEQMSRLTPERNLDLERYQEKGSQLQERWHRVIAQLEIRQSELESIQEVLGDYRACHGTLIKWIEETTAQQEMMKPGQAEDSRVLSEQLSQQTALFAEIERNQTKLDQCQKFSQQYSTIVKDYELQLMTYKAFVESQQKSPGKRRRMLSSSDAITQEFMDLRTRYTALVTLTTQHVKYISDALRRLEEEEKVVEEEKQEHVEKVKELLGWVSTLARNTQGKATSSETKESTDIEKAILEQQVLSEELTTKKEQVSEAIKTSQIFLAKHGHKLSEKEKKQISEQLNALNKAYHDLCDGSANQLQQLQSQLAHQTEQKTLQKQQNTCHQQLEDLCSWVGQAERALAGHQGRTTQQDLSALQKNQSDLKDLQDDIQNRATSFATVVKDIEGFMEENQTKLSPRELTALREKLHQAKEQYEALQEETRVAQKELEEAVTSALQQETEKSKAAKELAENKKKIDALLDWVTSVGSSGGQLLTNLPGMEQLSGASLEKGALDTTDGYMGVNQAPEKLDKQCEMMKARHQELLSQQQNFILATQSAQAFLDQHGHNLTPEEQQMLQQKLGELKEQYSTSLAQSEAELKQVQTLQDELQKFLQDHKEFESWLERSEKELENMHKGGSSPETLPSLLKRQGSFSEDVISHKGDLRFVTISGQKVLDMENSFKEGKEPSEIGNLVKDKLKDATERYTALHSKCTRLGSHLNMLLGQYHQFQNSADSLQAWMQACEANVEKLLSDTVASDPGVLQEQLATTKQLQEELAEHQVPVEKLQKVARDIMEIEGEPAPDHRHVQETTDSILSHFQSLSYSLAERSSLLQKAIAQSQSVQESLESLLQSIGEVEQNLEGKQVSSLSSGVIQEALATNMKLKQDIARQKSSLEATREMVTRFMETADSTTAAVLQGKLAEVSQRFEQLCLQQQEKESSLKKLLPQAEMFEHLSGKLQQFMENKSRMLASGNQPDQDITHFFQQIQELNLEMEDQQENLDTLEHLVTELSSCGFALDLCQHQDRVQNLRKDFTELQKTVKEREKDASSCQEQLDEFRKLVRTFQKWLKETEGSIPPTETSMSAKELEKQIEHLKSLLDDWASKGTLVEEINCKGTSLENLIMEITAPDSQGKTGSILPSVGSSVGSVNGYHTCKDLTEIQCDMSDVNLKYEKLGGVLHERQESLQAILNRMEEVHKEANSVLQWLESKEEVLKSMDAMSSPTKTETVKAQAESNKAFLAELEQNSPKIQKVKEALAGLLVTYPNSQEAENWKKIQEELNSRWERATEVTVARQRQLEESASHLACFQAAESQLRPWLMEKELMMGVLGPLSIDPNMLNAQKQQVQFMLKEFEARRQQHEQLNEAAQGILTGPGDVSLSTSQVQKELQSINQKWVELTDKLNSRSSQIDQAIVKSTQYQELLQDLSEKVRAVGQRLSVQSAISTQPEAVKQQLEETSEIRSDLEQLDHEVKEAQTLCDELSVLIGEQYLKDELKKRLETVALPLQGLEDLAADRINRLQAALASTQQFQQMFDELRTWLDDKQSQQAKNCPISAKLERLQSQLQENEEFQKSLNQHSGSYEVIVAEGESLLLSVPPGEEKRTLQNQLVELKNHWEELSKKTADRQSRLKDCMQKAQKYQWHVEDLVPWIEDCKAKMSELRVTLDPVQLESSLLRSKAMLNEVEKRRSLLEILNSAADILINSSEADEDGIRDEKAGINQNMDAVTEELQAKTGSLEEMTQRLREFQESFKNIEKKVEGAKHQLEIFDALGSQACSNKNLEKLRAQQEVLQALEPQVDYLRNFTQGLVEDAPDGSDASQLLHQAEVAQQEFLEVKQRVNSGCVMMENKLEGIGQFHCRVREMFSQLADLDDELDGMGAIGRDTDSLQSQIEDVRLFLNKIHVLKLDIEASEAECRHMLEEEGTLDLLGLKRELEALNKQCGKLTERGKARQEQLELTLGRVEDFYRKLKGLNDATTAAEEAEALQWVVGTEVEIINQQLADFKMFQKEQVDPLQMKLQQVNGLGQGLIQSAGKDCDVQGLEHDMEEINARWNTLNKKVAQRIAQLQEALLHCGKFQDALEPLLSWLADTEELIANQKPPSAEYKVVKAQIQEQKLLQRLLDDRKATVDMLQAEGGRIAQSAELADREKITGQLESLESRWTELLSKAAARQKQLEDILVLAKQFHETAEPISDFLSVTEKKLANSEPVGTQTAKIQQQIIRHKALEEDIENHATDVHQAVKIGQSLSSLTSPAEQGVLSEKIDSLQARYSEIQDRCCRKAALLDQALSNARLFGEDEVEVLNWLAEVEDKLSSVFVKDFKQDVLHRQHADHLALNEEIVNRKKNVDQAIKNGQALLKQTTGEEVLLIQEKLDGIKTRYADITVTSSKALRTLEQARQLATKFQSTYEELTGWLREVEEELATSGGQSPTGEQIPQFQQRQKELKKEVMEHRLVLDTVNEVSRALLELVPWRAREGLDKLVSDANEQYKLVSDTIGQRVDEIDAAIQRSQQYEQAADAELAWVAETKRKLMALGPIRLEQDQTTAQLQVQKAFSIDIIRHKDSMDELFSHRSEIFGTCGEEQKTVLQEKTESLIQQYEAISLLNSERYARLERAQVLVNQFWETYEELSPWIEETRALIAQLPSPAIDHEQLRQQQEEMRQLRESIAEHKPHIDKLLKIGPQLKELNPEEGEMVEEKYQKAENMYAQIKEEVRQRALALDEAVSQSTQITEFHDKIEPMLETLENLSSRLRMPPLIPAEVDKIRECISDNKSATVELEKLQPSFEALKRRGEELIGRSQGADKDLAAKEIQDKLDQMVFFWEDIKARAEEREIKFLDVLELAEKFWYDMAALLTTIKDTQDIVHDLESPGIDPSIIKQQVEAAETIKEETDGLHEELEFIRILGADLIFACGETEKPEVRKSIDEMNNAWENLNKTWKERLEKLEDAMQAAVQYQDTLQAMFDWLDNTVIKLCTMPPVGTDLNTVKDQLNEMKEFKVEVYQQQIEMEKLNHQGELMLKKATDETDRDIIREPLTELKHLWENLGEKIAHRQHKLEGALLALGQFQHALEELMSWLTHTEELLDAQRPISGDPKVIEVELAKHHVLKNDVLAHQATVETVNKAGNELLESSAGDDASSLRSRLEAMNQCWESVLQKTEEREQQLQSTLQQAQGFHSEIEDFLLELTRMESQLSASKPTGGLPETAREQLDTHMELYSQLKAKEETYNQLLDKGRLMLLSRDDSGSGSKTEQSVALLEQKWHVVSSKMEERKSKLEEALNLATEFQNSLQEFINWLTLAEQSLNIASPPSLILNTVLSQIEEHKVFANEVNAHRDQIIELDQTGNQLKFLSQKQDVVLIKNLLVSVQSRWEKVVQRSIERGRSLDDARKRAKQFHEAWKKLIDWLEDAESHLDSELEISNDPDKIKLQLSKHKEFQKTLGGKQPVYDTTIRTGRALKEKTLLPEDSQKLDNFLGEVRDKWDTVCGKSVERQHKLEEALLFSGQFMDALQALVDWLYKVEPQLAEDQPVHGDLDLVMNLMDAHKVFQKELGKRTGTVQVLKRSGRELIENSRDDTTWVKGQLQELSTRWDTVCKLSVSKQSRLEQALKQAEVFRDTVHMLLEWLSEAEQTLRFRGALPDDTEALQSLIDTHKEFMKKVEEKRVDVNSAVAMGEVILAVCHPDCITTIKHWITIIRARFEEVLTWAKQHQQRLETALSELVANAELLEELLAWIQWAETTLIQRDQEPIPQNIDRVKALIAEHQTFMEEMTRKQPDVDRVTKTYKRKNIEPTHAPFIEKSRSGGRKSLSQPTPPPMPILSQSEAKNPRINQLSARWQQVWLLALERQRKLNDALDRLEELKEFANFDFDVWRKKYMRWMNHKKSRVMDFFRRIDKDQDGKITRQEFIDGILASKFPTTKLEMTAVADIFDRDGDGYIDYYEFVAALHPNKDAYRPTTDADKIEDEVTRQVAQCKCAKRFQVEQIGENKYRFGDSQQLRLVRILRSTVMVRVGGGWMALDEFLVKNDPCRARGRTNIELREKFILPEGASQGMTPFRSRGRRSKPSSRAASPTRSSSSASQSNHSCTSMPSSPATPASGTKVIPSSGSKLKRPTPTFHSSRTSLAGDTSNSSSPASTGAKTNRADPKKSASRPGSRAGSRAGSRASSRRGSDASDFDLLETQSACSDTSESSAAGGQGNSRRGLNKPSKIPTMSKKTTTASPRTPGPKR

SEQ ID NO: 28415 - protein, 16 aa, Homo sapiens
LEEDSRERERDQRSQG

SEQ ID NO: 28416 - protein, 431 aa, Homo sapiens
LWPTCTKDRKMSPKRIAKRRSPPADAIPKSKKVKVSHRSHSTEPGLVLTLGQGDVGQLGLGENVMERKKPALVSIPEDVVQAEAGGMHTVCLSKSGQVYSFGCNDEGALGRDTSVEGSEMVPGKVELQEKVVQVSAGDSHTAALTDDGRVFLWGSFRDNNGVIGLLEPMKKSMVPVQVQLDVPVVKVASGNDHLVMLTADGDLYTLGCGEQGQLGRVPELFANRGGRQGLERLLVPKCVMLKSRGSRGHVRFQDAFCGAYFTFAISHEGHVYGFGLSNYHQLGTPGTESCFIPQNLTSFKNSTKSWVGFSGGQHHTVCMDSEGKAYSLGRAEYGRLGLGEGAEEKSIPTLISRLPAVSSVACGASVGYAVTKDGRVFAWGMGTNYQLGTGQDEDAWSPVEMMGKQLENRVVLSVSSGGQHTVLLVKDKEQS

SEQ ID NO: 28417 - protein, 18 aa, Homo sapiens
ITKVVFSGRGLSVMFRVY

SEQ ID NO: 28418 - protein, 30 aa, Homo sapiens
KRKPRKGKTTRTEMCLAMSIGSNQWKRSNT

SEQ ID NO: 28419 - protein, 538 aa, Homo sapiens
RPTPAMAFANLRKVLISDSLDPCCRKILQDGGLQVVEKQNLSKEELIAELQDCEGLIVRSATKVTADVINAAEKLQVVGRAGTGVDNVDLEAATRKGILVMNTPNGNSLSAAELTCGMIMCLARQIPQATASMKDGKWERKKFMGTELNGKTLGILGLGRIGREVATRMQSFGMKTIGYDPIISPEVSASFGVQQLPLEEIWPLCDFITVHTPLLPSTTGLLNDNTFAQCKKGVRVVNCARGGIVDEGALLRALQSGQCAGAALDVFTEEPPRDRALVDHENVISCPHLGASTKEAQSRCGEEIAVQFVDMVKGKSLTGVVNAQALTSAFSPHTKPWIGLAEALGTLMRAWAGSPKGTIQVITQGTSLKNAGNCLSPAVIVGLLKEASKQADVNLVNAKLLVKEAGLNVTTSHSPAAPGEQGFGECLLAVALAGAPYQAVGLVQGTTPVLQGLNGAVFRPEVPLRRDLPLLLFRTQTSDPAMLPTMIGLLAEAGVRLLSYQTSLVSDGETWHVMGISSLLPSLEAWKQHVTEAFQFHF

SEQ ID NO: 28420 - protein, 36 aa, Homo sapiens
MRKKTPRLRKKMKKLEEVQKVDRVKERDFFLKNCDV

SEQ ID NO: 28421 - protein, 36 aa, Homo sapiens
VERRKDGALGASEMLPSAREGRARRRQPGSRHDALA

SEQ ID NO: 28422 - protein, 80 aa, Homo sapiens
LVSVLIGRCLQEMLKLGTLPPTSKPQLLCQMVSLKISACLTTKENMLCSSFTLLTSPLCAPRRSLLSVIGQKNLRNSTAK

SEQ ID NO: 28423 - protein, 17 aa, Homo sapiens
VAFQMIVKWWKWIQNNK

SEQ ID NO: 28424 - protein, 23 aa, Homo sapiens
RRDTLVTKVVFPERVLSIALRIC

SEQ ID NO: 28425 - protein, 34 aa, Homo sapiens
ISCVASSLVLVPPGSGSQDRLSSDPSAATVAAAV

SEQ ID NO: 28426 - protein, 25 aa, Homo sapiens
LCDYSPGAVRVTAGTWRRLIIENAK

SEQ ID NO: 28427 - protein, 33 aa, Homo sapiens
LTPTVQGFQWILRGPDVETSPLGAPRAASHGVG

SEQ ID NO: 28428 - protein, 71 aa, Homo sapiens
TFTSVSAAPSASSPRRRDPVARSSPCLFSRSMPGRSLTLAGIPLLRLISSPQKVSSELLCPVVLQLVSMRP

SEQ ID NO: 28429 - protein, 28 aa, Homo sapiens
KQERKRDLPCSVTPLEKKKKSRSILLSP

SEQ ID NO: 28430 - protein, 272 aa, Homo sapiens
RAEPSGSLGAVQRKGGSARLAVAEPRWPVSAPDQSRTLDSRGPGTTELMASSTPSSSATSSNAGADPNTTNLRPTTYDTWCGVAHGCTRKLGLKICGFLQRTNSLEEKSRLVSAFKERQSSKNLLSCENSDRDARFRRTETDFSNLFARDLLPAKNGEEQTVQFLLEVVDILLNYVRKTFDRSTKVLDFHHPHQLLEGMEGFNLELSDHPESLEQILVDCRDTLKYGVRTGHPRFFNQLSTGLDIIGLAGEWLTSTANTNMPSDMRECWLLR

SEQ ID NO: 28431 - protein, 45 aa, Homo sapiens
LLLLPLSSRHHRGKTRVHIAASGSRPSSGEKEKIKYTWGSCTCQN

SEQ ID NO: 28432 - protein, 55 aa, Homo sapiens
LVPVIFGSRGALGYSRHHGFRRPEKPCRPPGAQRLPGGQELHRGVCAITSRCGSI

SEQ ID NO: 28433 - protein, 19 aa, Homo sapiens
LAGCGCRRTGVDKARWQGS

SEQ ID NO: 28434 - protein, 41 aa, Homo sapiens
RLRWQRQESPAATGRTPPLERILKEMKSALRNEVDCLLAFC

SEQ ID NO: 28435 - protein, 42 aa, Homo sapiens
LVPAEIQWEEPAAARATPPLERILKEMKSALRNEVDCLLAFC

SEQ ID NO: 28436 - protein, 129 aa, Homo sapiens
VARPQLNAQLEGWLSQVQSTKRPARAIIAPHAGYTYCGSCAAHAYKQVDPSITRRIFILGPSHHVPLSRCALSSVDIYRTPLYDLRIDQKIYGELWKTGMFERMSLQTDEDEHSIEMHLPYTAKAMERV

SEQ ID NO: 28437 - protein, 29 aa, Homo sapiens
IGSGCNLDSARFRYLMGEGLGVHPLSCHG

SEQ ID NO: 28438 - protein, 30 aa, Homo sapiens
VRHAAGLKRRRRWGLHVARRSAWLSWCSVW

SEQ ID NO: 28439 - protein, 8 aa, Homo sapiens
VWSRLGNR

SEQ ID NO: 28440 - protein, 32 aa, Homo sapiens
LRDPETCRPHFCPPSTMSTSCARQRNPWPTST

SEQ ID NO: 28441 - protein, 47 aa, Homo sapiens
LPLCSLKRQELRVVGLLTRTFPWASRVYSSPWLSSKHASTLITRNMP

SEQ ID NO: 28442 - protein, 60 aa, Homo sapiens
REGEAPLACLTEACEGGWCPLPSSVSRCPAPAPAARVRRSRGRSWTRRKIMLKRDMEYLQ

SEQ ID NO: 28443 - protein, 6 aa, Homo sapiens
MTGVSL

SEQ ID NO: 28444 - protein, 7 aa, Homo sapiens
TAGWAAP

SEQ ID NO: 28445 - protein, 51 aa, Homo sapiens
RATSWVIPGPGAGLGLTRGLPRGRLGACVTSPPAGCGDYVGPLWPVRSASL

SEQ ID NO: 28446 - protein, 63 aa, Homo sapiens
LLAISGVSGTKGSTQLFLKLKVFTPEMKQNSIWARDALMYIKQRTTQSLLAANQTKPESSGEK

SEQ ID NO: 28447 - protein, 11 aa, Homo sapiens
MFCLSGLVKGG

SEQ ID NO: 28448 - protein, 26 aa, Homo sapiens
TQAPRVWKDIHLGCLTDSPVGAMLCA

SEQ ID NO: 28449 - protein, 19 aa, Homo sapiens
VALATDREAVAEDTCHGRL

SEQ ID NO: 28450 - protein, 23 aa, Homo sapiens
VLWSELEGEAGGAGGWASECQNG

SEQ ID NO: 28451 - protein, 41 aa, Homo sapiens
LQASGLDEPPFPVLGPFKYAGDRLENKTSVSVASWSECQNG

SEQ ID NO: 28452 - protein, 23 aa, Homo sapiens
TRHYVAGFGRATRAGQEPNPSRP

SEQ ID NO: 28453 - protein, 45 aa, Homo sapiens
VPWIQSAAPGERDPSLVEAQSSGRVHPACVWREAGKPVPGSWPQR

SEQ ID NO: 28454 - protein, 22 aa, Homo sapiens
MSAGPMVVPCVLNVFVTGKLNA

SEQ ID NO: 28455 - protein, 25 aa, Homo sapiens
VAALGPRNPARCPRFASEEPRKIVQ

SEQ ID NO: 28456 - protein, 38 aa, Homo sapiens
RRCPGRATRRHPRPGGGGGSRYSRLKQLRNGSGGGRTN

SEQ ID NO: 28457 - protein, 28 aa, Homo sapiens
VSYQNIRIPRQKLGEVSWAMPVLKWESC

SEQ ID NO: 28458 - protein, 120 aa, Homo sapiens
LHSTSAPSDSLPSASTPPAPVRIVSQLLATRPVPGCFSISRPPLLEYFTPCIWGQGLEKGRVERPVEKKEARPAGGGGSADCGEETPRHPFWSSPLPPRPCAHSLAGELLSDQESKSGPG

SEQ ID NO: 28459 - protein, 66 aa, Homo sapiens
LPAPFATSSALRGLELGERAGGLVGWPGLRPAATTILWPGRCEWSAGQSARCLAPQADPAVHSREQ

SEQ ID NO: 28460 - protein, 22 aa, Homo sapiens
LRLSQPPRPCVVSSWVSERAGW

SEQ ID NO: 28461 - protein, 8 aa, Homo sapiens
VGSHRGSD

SEQ ID NO: 28462 - protein, 30 aa, Homo sapiens
ILSRVKIHNSKSSGRLSIWYLREMKMFVIS

SEQ ID NO: 28463 - protein, 455 aa, Homo sapiens [sequence omitted]

SEQ ID NO: 28464 - protein, 643 aa, Homo sapiens
LGLEMPQPSVSGMDPPFGDAFRSHTFSEQTLMSTDLLANSSDPDFMYELDREMNYQQNPRDNFLSLEDCKDIENLESFTDVLDNEGALTSNWEQWDTYCEDLTKYTKLTSCDIWGTKEVDYLGLDDFSSPYQDEEVISKTPTLAQLNSEDSQSVSDSLYYPDSLFSVKQNPLPSSFPGKKITSRAAAPVCSSKTLQAEVPLSDCVQKASKPTSSTQIMVKTNMYHNEKVNFHVECKDYVKKAKVKINPVQQSRPLLSQIHTDAAKENTCYCGAVAKRQEKKGMEPLQGHATPALPFKETQELLLSPLPQEGPGSLAAGESSSLSASTSVSDSSQKKEEHNYSLFVSDNLGEQPTKCSPEEDEEDEEDVDDEDHDEGFGSEHELSENEEEEEEEEDYEDDKDDDISDTFSEPGYENDSVEDLKEVTSISSRKRGKRRYFWEYSEQLTPSQQERMLRPSEWNRDTLPSNMYQKNGLHHGKYAVKKSRRTDVEDLTPNPKKLLQIGNELRKLNKVISDLTPVSELPLTARPRSRKEKNKLASRACRLKKKAQYEANKVKLWGLNTEYDNLLFVINSIKQEIVNRVQNPRDERGPNMGQKLEILIKDTLGLPVAGQTSEFVNQVLEKTAEGNPTGGLVGLRIPTSKV

SEQ ID NO: 28465 - protein, 47 aa, Homo sapiens
LPPLRCIRGARTDLMAWATGVVPGTSRALAAPSLQGPSAPGRTWATG

SEQ ID NO: 28466 - protein, 12 aa, Homo sapiens
MIQLFILTLVRR

SEQ ID NO: 28467 - protein, 10 aa, Homo sapiens
MCSFQMPSPE

SEQ ID NO: 28468 - protein, 324 aa, Homo sapiens
LEKIASRSQNIIEINISDCRSMSDNGVCVLAFKCPGLLRYTAYRCKQLSDTSIIAVASHCPLLQKVHVGNQDKLTDEGLKQLGSKCRELKDIHFGQCYKISDEGMIVIAKGCLKLQRIYMQENKLVTDQSVKAFAEHCPELQYVGFMGCSVTSKGVIHLTKLRNLSSLDLRHITELDNETVMEIVKRCKNLSSLNLCLNWIINDRCVEVIAKEGQNLKELYLVSCKITDYALIAIGRYSMTIETVDVGWCKEITDQGATLIAQSSKSLRYLGLMRCDKVNEVTVEQLVQQYPHITFSTVLQDCKRTLERAYQMGWTPNMSAASS

SEQ ID NO: 28469 - protein, 88 aa, Homo sapiens
TRGWPTWILANSGLSSFLVSEGPFCFQGGACEKWHLERGRKRRKNRSSASDLRWLKERMYLVSAISLHPSMTLLSMSLIFLARKPSAV

SEQ ID NO: 28470 - protein, 547 aa, Homo sapiens
TPGAASVQTLPSVTMKLWVSALLMAWFGVLSCVQAEFFTSIGHMTDLIYAEKELVQSLKEYILVEEAKLSKIKSWANKMEALTSKSAADAEGYLAHPVNAYKLVKRLNTDWPALEDLVLQDSAAGFIANLSVQRQFFPTDEDEIGAAKALMRLQDTYRLDPGTISRGELPGTKYQAMLSVDDCFGMGRSAYNEGDYYHTVLWMEQVLKQLDAGEEATTTKSQVLDYLSYAVFQLGDLHRALELTRRLLSLDPSHERAGGNLRYFEQLLEEEREKTLTNQTEAELATPEGIYERPVDYLPERDVYESLCRGEGVKLTPRRQKRLFCRYHHGNRAPQLLIAPFKEEDEWDSPHIVRYYDVMSDEEIERIKEIAKPKLARATVRDPKTGVLTVASYRVSKSSWLEEDDDPVVARVNRRMQHITGLTVKTAELLQVANYGVGGQYEPHFDFSRRPFDSGLKTEGNRLATFLNYMSDVEAGGATVFPDLGAAIWPKKGTAVFWYNLLRSGEGDYRTRHAACPVLVGCKWVSNKWFHERGQEFLRPCGSTEVD

SEQ ID NO: 28471 - protein, 480 aa, Homo sapiens
IPTRLPGARRRAAPWPGQAGAGIMDSFKVVLEGPAPWGFRLQGGKDFNVPLSISRLTPGGKAAQAGVAVGDWVLSIDGENAGSLTHIEAQNKIRACGERLSLGLSRAQPVQSKPQKASAPAADPPRYTFAPSVSLNKTARPFGAPPPADSAPQQNGQPLRPLVPDASKQRLMENTEDWRPRPGTGQSRSFRILAHLTGTEFMQDPDEEHLKKSSQVPRTEAPAPASSTPQEPWPGPTAPSPTSRPPWAVDPAFAERYAPDKTSTVLTRHSQPATPTPLQSRTSIVQAAAGGVPGGGSNNGKTPVCHQCHKVIRGRYLVALGHAYHPEEFVCSQCGKVLEEGGFFEEKGAIFCPPCYDVRYAPSCAKCKKKITGEIMHALKMTWHVHCFTCAACKTPIRNRAFYMEEGVPYCERDYEKMFGTKCHGCDFKIDAGDRFLEALGFSWHDTCFVCAICQINLEGKTFYSKKDRPLCKSHAFSHV

SEQ ID NO: 28472 - protein, 475 aa, Homo sapiens
KTMSTELFSSTREEGSSGSGPSFRSNQRKMLNLLLERDTSFTVCPDVPRTPVGKFLGDSANLSILSGGTPKRCLDLSNLSSGEITATQLTTSADLDETGHLDSSGLQEVHLAGMNHDQHLMKCSPAQLLCSTPNGLDRGHRKRDAMCSSSANKENDNGNLVDSEMKYLGSPITTVPKLDKNPNLGEDQAEEISDELMEFSLKDQEAKVSRSGLYRSPSMPENLNRPRLKQVEKFKDNTIPDKVKKKYFSGQGKLRKGLCLKKTVSLCDITITQMLEEDSNQGHLIGDFSKVCALPTVSGKHQDLKYVNPETVAALLSGKFQGLIEKFYVIDCRYPYEYLGGHIQGALNLYSQEELFNFFLKKPIVPLDTQKRIIIVFHCEFSSERGPRMCRCLREEDRSLNQYPALYYPELYILKGGYRDFFPEYMELCEPQSYCPMHHQDHKTELLRCRSQSKVQEGERQLREQIALLVKDMSP

SEQ ID NO: 28473 - protein, 267 aa, Homo sapiens
LGSALVGRLLDSLKRDYAGKPQPPIKSERRNPPSYAMAGKKVLIVYAHQEPKSFNGSLKNVAVDELSRQGCTVTVSDLYAMNLEPRATDKDITGTLSNPEVFNYGVETHEAYKQRSLASDITDEQKKVREADLVIFQFPLYWFSVPAILKGWMDRVLCQGFAFDIPGFYDSGLLQGKLALLSVTTGGTAEMYTKTGVNGDSRYFLWPLQHGTLHFCGFKVLAPQISFAPEIASEEERKGMVAAWSQRLQTIWKEEPIPCTAHWHFGQ

SEQ ID NO: 28474 - protein, 47 aa, Homo sapiens
RGPGIRRTGWHCLKRRLLGDCAARIGGSPNILRSEDPAQVRCHRTCS

SEQ ID NO: 28475 - protein, 177 aa, Homo sapiens
VCAAFTGVSAAGAMSEPAGDVRQNPCGSKACRRLFGPVDSEQLSRDCDALMAGCIQEARERWNFDFVTETPLEGDFAWERVRGLGLPKLYLPTGPRRGRDELGGGRRPGTSPALLQGTAEEDHVDLSLSCTLVPRSGEQAEGSPGGPGDSQGRKRRQTSMTDFYHSKRRLIFSKRKP

SEQ ID NO: 28476 - protein, 18 aa, Homo sapiens
VFFSKYGKGSGEQCSGAG

SEQ ID NO: 28477 - protein, 68 aa, Homo sapiens
LFSLAQCPRSLCAIQRAPRKLRQLVLDREDGAVDHSLPEEADKAEGSPWLSKASLQAKEASTSSGEKW

SEQ ID NO: 28478 - protein, 15 aa, Homo sapiens
LRRTLKQTCVSRAPL

SEQ ID NO: 28479 - protein, 12 aa, Homo sapiens
LVHFLGSHVWTW

SEQ ID NO: 28480 - protein, 38 aa, Homo sapiens
IHTLRRAKKLNFNHEGNRAHPGWSVWQPDRCQVLGGDQ

SEQ ID NO: 28481 - protein, 39 aa, Homo sapiens
LLQSLKKAPRRPLTRLRRRMERSANAAARRATLCMCTRC

SEQ ID NO: 28482 - protein, 999 aa, Homo sapiens
TRPAALGSRSSVSPENQPSRAMGTRLPLVLRQLRRPPQPPGPPRRLRVPCRASSGGGGGGGGGREGLLGQRRPQDGQARSSCSPGGRTPAARDSIVREVIQNSKEVLSLLQEKNPAFKPVLAIIQAGDDNLMQEINQNLAEEAGLNITHICLPPDSSEAEIIDEILKINEDTRVHGLALQISENLFSNKVLNALKPEKDVDGVTDINLGKLVRGDAHECFVSPVAKAVIELLEKSGVNLDGKKILVVGAHGSLEAALQCLFQRKGSMTMSIQWKTRQLQSKLHEADIVVLGSPKPEEIPLTWIQPGTTVLNCSHDFLSGKVGCGSPRIHFGGLIEEDDVILLAAALRIQNMVSSGRRWLREQQHRRWRLHCLKLQPLSPVPSDIEISRGQTPKAVDVLAKEIGLLADEIEIYGKSKAKVRLSVLERLKDQADGKYVLVAGITPTPLGEGKSTVTIGLVQALTAHLNVNSFACLRQPSQGPTFGVKGGAAGGGYAQVIPMEEFNLHLTGDIHAITAANNLLAAAIDTRILHENTQTDKALYNRLVPLVNGVREFSEIQLARLKKLGINKTDPSTLTEEEVSKFARLDIDPSTITWQRVLDTNDRFLRKITIGQGNTEKGHYRQAQFDIAVASEIMAVLALTDSLADMKARLGRMVVASDKSGQPVTADDLGVTGALTVLMKDAIKPNLMQTLEGTPVFVHAGPFANIAHGNSSVLADKIALKLVGEEGFVVTEAGFGADIGMEKFFNIKCRASGLVPNVVVLVATVRALKMHGGGPSVTAGVPLKKEYTEENIQLVADGCCNLQKQIQITQLFGVPVVVALNVFKTDTRAEIDLVCELAKRAGAFDAVPCYHWSVGGKGSVDLARAVREAASKRSRFQFLYDVQVPIVDKIRTIAQAVYGAKDIELSPEAQAKIDRYTQQGFGNLPICMAKTHLSLSHQPDKKGVPRDFILPISDVRASIGAGFIYPLVGTMSTMPGLPTRPCFYDIDLDTETEQVKGLF

SEQ ID NO: 28483 - protein, 48 aa, Homo sapiens
MVNSGKLGTTVKPKSLVTSSSGALKKQHKKPFDAMNNIVANLLLNLTR

SEQ ID NO: 28484 - protein, 37 aa, Homo sapiens
LLRNVEDETPQDLTEESLVLLPFDDLKISGKLLLCTD

SEQ ID NO: 28485 - protein, 53 aa, Homo sapiens
IDTDFIDEEVLMSLVIEMGLDRIKELPELWLGQNEFDFMTDFVCKQQPSRVSC

SEQ ID NO: 28486 - protein, 65 aa, Homo sapiens
TFPSALFSPGRAAAAAAAAAAAGGGARWRRWPGSPWRTVKEAAKKKSATTTTVILEIIIMDRVIP

SEQ ID NO: 28487 - protein, 48 aa, Homo sapiens
ILTRNRKCRNQSMSELPPWMQSWSLQSSQIQLENSFLIRDRVSPCLPG

SEQ ID NO: 28488 - protein, 35 aa, Homo sapiens
KLRKRMREGRPWPWGRRELLCLHRSPCAALMCCAR

SEQ ID NO: 28489 - protein, 62 aa, Homo sapiens
RRHTELRLTFLFLNLNHRFHRLVVRRLGRWIRLRRNCWSEPVPGERIFREKWLRGPQQLQGL

SEQ ID NO: 28490 - protein, 20 aa, Homo sapiens
RDFPGMRAGLLPSFWMHIPL

SEQ ID NO: 28491 - protein, 36 aa, Homo sapiens
LSWKNVRRLYKPCLRSWLESFCNLFNLIKRPLILSA

SEQ ID NO: 28492 - protein, 35 aa, Homo sapiens
LFLEQRQFSLQRQDESGSCSSAEISLISLGCGKSG

SEQ ID NO: 28493 - protein, 511 aa, Homo sapiens
VPGLSSQFAELLSQSARIVSCLGSFVETPKCQHRWRDTWRPVSGTFATSIKDFRSAKMLKQILSEMYIDPDLLAELSEEQKQILFFKMREEQIRRWKEREAAMERKESLPVKPRPKKENGKSVHWKLGADKEVWVWVMGEHHLDKPYDVLCNEIIAERARLKAEQEAEEPRKTHSEEFTNSLKTKSQYHDLQAPDNQQTKDIWKKVAEKEELEQGSRPAPTLEEEKIRSLSSSSRNIQQMLADSINRMKAYAFHQKKESMKKKQDEEINQIEEERTKQICKSWKEDSEWQASLRKSKAADEKRRSLAKQAREDYKRLSLGAQKGRGGERLQSPLRVPQKPERPPLPPKPQFLNSGAYPQKPLRNQGVVRTLSSSAQEDIIRWFKEEQLPLRAGYQKTSDTIAPWFHGILTLKKANELLLSTGMPGSFLIRVSERIKGYALSYLSEDGCKHFLIDASADAYSFLGVDQLQHATLADLVEYHKEEPITSLGKELLLYPCGQQDQLPDYLELFE

SEQ ID NO: 28494 - protein, 530 aa, Homo sapiens
VMEQEKKLLVSDSNSFMERESLKSPFTGDTSMNNLETVHHNNSKADKLKEKPSEWSKRHRPQHYKHEDAKEMPLTWVQDEIWCHDSYESDGKSENWGNFIAKEEEKPNHQEWDSGEHTNACVQQNSSFVDRPYKCSECWKSFSNSSHLRTHQRTHSGEKPYKCSECAKCFCNSSHLIQHLRMHTGEKPYQCGECGKSFSNTSHLIIHERTHTGEKPYKCPECGKRFSSSSHLIQHHRSHTGEKPYECSVCGKGFSHSYVLIEHQRTHTGEKPYKCPDCGKSFSQSSSLIRHQRTHTGEKPYKCLECEKSFGCNSTLIKHQRIHTGEKPYQCPECGKNFSRSSNLITHQKMHTGEKSYESSEYEESLGQNCNVIEECRIQLGEKPYRCCECGKSFGLSSHLIRHQRTHTGEKPYRCSECWKTFSQSSTLVIHQRTHTGEKPYKCPDCGESFSQSFNLIRHRRTHIGEKPYKCTSCEKCFSRSAYLSQHRKIHVEKPFESPDVGDFPHEWTWKNCSGEMPFISSFSVSNSSS

SEQ ID NO: 28495 - protein, 23 aa, Homo sapiens
LKRYLATTYFHLRPFLPGGETLD

SEQ ID NO: 28496 - protein, 15 aa, Homo sapiens
IHGRPSPKRVRGPLS

SEQ ID NO: 28497 - protein, 407 aa, Homo sapiens
KKRMSRRSSRLQAKQQPQPSQTESPQEAQIIQAKKRKTTQDVKKRREEVTKKHQYEIRNCWPPVLSGGISPCIIIETPHKEIGTSDFSRFTNYRFKNLFINPSPLPDLSWGCSKEVWLNMLKKESRYVHDKHFEVLHSDLEPQMRSILLDWLLEVCEVYTLHRETFYLAQDFFDRFMLTQKDINKNMLQLIGITSLFIASKLEEIYAPKLQEFAYVTDGACSEEDILRMELIILKALKWELCPVTIISWLNLFLQVDALKDAPKVLLPQYSQETFIQIAQLLDLCILAIDSLEFQYRILTAAALCHFTSIEVVKKASGLEWDSISECVDWMVPFVNVVKSTSPVKLKTFKKIPMEDRHNIQTHTNYLAMLEEVNYINTFRKGGQLSPVCNGGIMTPPKSTEKPPGKH

SEQ ID NO: 28498 - protein, 48 aa, Homo sapiens
TPISRIQHRPAPCLRRSNPHTSSILLQWWGACSGISNTIWTSGGKTCT

SEQ ID NO: 28499 - protein, 14 aa, Homo sapiens
IASQNNVLRTFCSQ

SEQ ID NO: 28500 - protein, 13 aa, Homo sapiens
LVIGGNPVSAERL

SEQ ID NO: 28501 - protein, 112 aa, Homo sapiens
VQPSGPINMEETRPEGSYFSKYSEAAELRSTASLLATQESDVMVGPFKLRSRKQRTLSMIEEEIRAAQEREEELKRQRQVLQSTQSPRTKNAPSLPSRTCYKTAPGPRGHTG

SEQ ID NO: 28502 - protein, 11 aa, Homo sapiens
KLAHVKHKEQI

SEQ ID NO: 28503 - protein, 267 aa, Homo sapiens
KDASTLIRQVLDAVYYLHRMGIVHRDLKPENLLYYSQDEESKIMISDFGLSKMEGKGDVMSTACGTPGYVAPEVLAQKPYSKAVDCWSIGVIAYILLCGYPPFYDENDSKLFEQILKAEYEFDSPYWDDISDSAKDFIRNLMEKDPNKRYTCEQAARHPWIAGDTALNKNIHESVSAQIRKNFAKSKWRQAFNATAVVRHMRKLHLGSSLDSSNASVSSSLSLASQKDCLAPSTLCSFISSSSGVSGVGAERRPRPTTVTAVHSGSK

SEQ ID NO: 28504 - protein, 9 aa, Homo sapiens
IERRATRLL

SEQ ID NO: 28505 - protein, 27 aa, Homo sapiens
LGIRAETRLVIWRLRLARDKRHGQSTG

SEQ ID NO: 28506 - protein, 516 aa, Homo sapiens
RSVGRSRPRDSISARSDNSPFPWRSLRAWHPAGRLKTVVSSIASLDLATISEMSSRSTKDLIKSKWGSKPSNSKSETTLEKLKGEIAHLKTSVDEITSGKGKLTDKERHRLLEKIRVLEAEKEKNAYQLTEKDKEIQRLRDQLKARYSTTTLLEQLEETTREGERREQVLKALSEEKDVLKQQLSAATSRIAELESKTNTLRLSQTVAPNCFNSSINNIHEMEIQLKDALEKNQQWLVYDQQREVYVKGLLAKIFELEKKTETAAHSLPQQTKKPESEGYLQEEKQKCYNDLLASAKKDLEVERQTITQLSFELSEFRRKYEETQKEVHNLNQLLYSQRRADVQHLEDDRHKTEKIQKLREENDIARGKLEEEKKRSEELLSQVQFLYTSLLKQQEEQTRVALLEQQMQACTLDFENEKLDRQHVQHQLHVILKELRKARNQITQLESLKQLHEFAITEPLVTFQGETENREKVAASPKSPTAALNESLVECPKCNIQYPATEHRDLLVHVEYCSK

SEQ ID NO: 28507 - protein, 732 aa, Homo sapiens
IRAARAPPVSSASPPLCSLYLTSCCCWCFFFFYPPFLFIIFLHIDRILGNERKKKPKLTRAEDLPPLPLPSSLFSPPQEKKTPKQKKVHLGLVFFLQYFLGGQNFLGVIFFGFSSSFIFLPKLLLVGEKKMPQLNGGGGDDLGANDELISFKDEGEQEEKSSENSSAERDLADVKSSLVNESETNQNSSSDSEAERRPPPRSESFRDKSRESLEEAAKRQDGGLFKGPPYPGYPFIMIPDLTSPYLPNGSLSPTARTLHFQSGSTHYSAYKTIEHQIAVQYLQMKWPLLDVQAGSLQSRQALKDARSPSPAHIVSNKVPVVQHPHHVHPLTPLITYSNEHFTPGNPPPHLPADVDPKTGIPRPPHPPDISPYYPLSPGTVGQIPHPLGWLVPQQGQPVYPITTGGFRHPYPTALTVNASMSRFPPHMVPPHHTLHTTGIPHPAIVTPTVKQESSQSDVGSLHSSKHQDSKKEEEKKKPHIKKPLNAFMLYMKEMRAKVVAECTLKESAAINQILGRRWHALSREEQAKYYELARKERQLHMQLYPGWSARDNYGKKKKRKRDKQPGETNDANTPKKCRALFGLDRQTLWCKPCRRKKKCVRYIQGEGSCLSPPSSDGSLLDSPPPSPNLLGSPPRDAKSQTEQTQPLSLSLKPDPLAHLSMMPPPPALLLAEATHKASALCPNGALDLPPAALQPAAPSSSIAQPSTSSLHSHSSLAGTQPQPLSLVTKSLE

SEQ ID NO: 28508 - protein, 680 aa, Homo sapiens
ILGNERKKKPKLTRAEDLPPLPLPSSLFSPPQEKKTPKQKKVHLGLVFFLQYFLGGQNFLGVIFFGFSSSFIFLPKLLLVGEKKMPQLNGGGGDDLGANDELISFKDEGEQEEKSSENSSAERDLADVKSSLVNESETNQNSSSDSEAERRPPPRSESFRDKSRESLEEAAKRQDGGLFKGPPYPGYPFIMIPDLTSPYLPNGSLSPTARTYLQMKWPLLDVQAGSLQSRQALKDARSPSPAHIVSNKVPVVQHPHHVHPLTPLITYSNEHFTPGNPPPHLPADVDPKTGIPRPPHPPDISPYYPLSPGTVGQIPHPLGWLVPQQGQPVYPITTGGFRHPYPTALTVNASMSRFPPHMVPPHHTLHTTGIPHPAIVTPTVKQESSQSDVGSLHSSKHQDSKKEEEKKKPHIKKPLNAFMLYMKEMRAKVVAECTLKESAAINQILGRRWHALSREEQAKYYELARKERQLHMQLYPGWSARDNYGKKKKRKRDKQPGETNEHSECFLNPCLSLPPITDLSAPKKCRARFGLDQQNNWCGPCRRKKKCVRYIQGEGSCLSPPSSDGSLLDSPPPSPNLLGSPPRDAKSQTEQTQPLSLSLKPDPLAHLSMMPPPPALLLAEATHKASALCPNGALDLPPAALQPAAPSSSIAQPSTSSLHSHSSLAGTQPQPLSLVTKSLE

SEQ ID NO: 28509 - protein, 21 aa, Homo sapiens
RREGKHKAGYALRDNKSNPQT

SEQ ID NO: 28510 - protein, 26 aa, Homo sapiens
VFRDLTEPTSKTSENRKKEEDTGINS

SEQ ID NO: 28511 - protein, 39 aa, Homo sapiens
IELLVSSYSTPKISFCYSKDQMLRLPFQVVLRIRVVVIH

SEQ ID NO: 28512 - protein, 317 aa, Homo sapiens
VETGFAKKTFISYSVTFKDNFRQGLVVGIDLKNQMVLLQGGEALPFSHLILATGSTGPFPGKFNEVSSQQAAIQAYEDMVRQVQRSRFIVVVGGGSAGVEMAAEIKTEYPEKEVTLIHSQVALADKELLPSVRQEVKEILLRKGVQLLLSERVSNLEELPLNEYREYIKVQTDKGTEVATNLVILCTGIKINSSAYRKAFESRLASSGALRVNEHLQVEGHSNVYAIGDCADVRTPKMAYLAGLHANIAVANIVNSVKQRPLQAYKPGALTFLLSMGRNDGVGQISGFYVGRLMVRLTKSRDLFVSTSWKTMRQSPP

SEQ ID NO: 28513 - protein, 541 aa, Homo sapiens
LAPAGVGFHVGGTSYIQGCLCGLHRGGVRSPGLCSQEAVRSCDAGQLQKLGLGDLNENSVENLQQKTLQDLLHELSSWLVLEGMASTITGSQDCIVNHRGEVDGEPELDISPCQQWGEASSPISRNRDSVMTLQSGCFENIESETYLPLKVSSQIDTQDSSVKFCKNEPQDHQESRRLFVMEESTERKVIKGESCSENLQVKLVSDGQELASPLLNGEATCQNGQLKESLDPIDCNCKDIHGWKSQVVSCSQQRAHTEEKPCDHNNCGKILNTSPDGHPYEKIHTAEKQYECSQCGKNFSQSSELLLHQRDHTEEKPYKCEQCGKGFTRSSSLLIHQAVHTDEKPYKCDKCGKGFTRSSSLLIHHAVHTGEKPYKCDKCGKGFSQSSKLHIHQRVHTGEKPYECEECGMSFSQRSNLHIHQRVHTGERPYKCGECGKGFSQSSNLHIHRCIHTGEKPYQCYECGKGFSQSSDLRIHLRVHTGEKPYHCGKCGKGFSQSSKLLIHQRVHTGEKPYECSKCGKGFSQSSNLHIHQRVHKKDPR

SEQ ID NO: 28514 - protein, 31 aa, Homo sapiens
LMDGCSLYLEYLTGYVSDLERNYPDPDRRMQ

SEQ ID NO: 28515 - protein, 74 aa, Homo sapiens
VVTFVEGHQLRNLRLWQLFVPTELCFRKLASRASFRCAAAFFKASECGPAPTVRQARCKRVRFQSIDDQWEGLS

SEQ ID NO: 28516 - protein, 32 aa, Homo sapiens
LNFQEKYVNRSQHVVSQDLASLLTLMRVREYL

SEQ ID NO: 28517 - protein, 29 aa, Homo sapiens
KVRGLERQVEELRWRQRRAAKGARSVEEE

SEQ ID NO: 28518 - protein, 61 aa, Homo sapiens
IYSSVGPAVSLRQRQQDGTVKESGRLAGSAVSAEPLQPWPQSRWEMPSQQWRCLKGSQGTR

SEQ ID NO: 28519 - protein, 57 aa, Homo sapiens
RPLVLFSRTESPSPLQRPLVPVAAMIPFRIHGALFHIWIKRVQQKSWVKNLAYKLRS

SEQ ID NO: 28520 - protein, 42 aa, Homo sapiens
VEEPSRVSAWGRVRAGPAGRWRSGGRWWMAQPWKAEVKVTSP

SEQ ID NO: 28521 - protein, 264 aa, Homo sapiens
LLWYQDAYGEVEINDGKLYDAYVSYSDCPEDRKFVNFILKPQLERRRGYKLFLDDRDLLPRAEPSADLLVNLSRCRRLIVVLSDAFLSRAWCSHSFREGLCRLLELTRRPIFITFEGQRRDPAHPALRLLRQHRHLVTLLLWRPGSVTPSSDFWKEVQLALPRKVQYRPVEGDPQTQLQDDKDPMLILRGRVPEGRALDSEVDPDPEGDLGVRGPVFGEPSAPPHTSGVSLGESRSSEVDVSDLGSRNYSARTDFYCLVSKDDM

SEQ ID NO: 28522 - protein, 40 aa, Homo sapiens
MGLWARRACSSATQLTLSPKSTSPPCSTITARRAQLTGAQ

SEQ ID NO: 28523 - protein, 96 aa, Homo sapiens
VTGGAAALSALSPPGENEPQCPPARSQPCPGQRKTTRIPGSGRRPGWAAPVRAGDSAPPLAAVSGNWVPALRGFQRTGTPFPGSPAHPAGEGGRCR

SEQ ID NO: 28524 - protein, 89 aa, Homo sapiens
LSALSPPGENEPQCPPARSQPCPGQRKTTRIPGSGRRPGWAAPVRAGDSAPPLAAVSGNWVPALRGFQRTGTPFPGSPAHPAGEGGRCR

SEQ ID NO: 28525 - protein, 34 aa, Homo sapiens
ISMTMMSLFGAPRAGFIKLNMQWKLLNKVQPQLV

SEQ ID NO: 28526 - protein, 8 aa, Homo sapiens
KLGSPWAL

SEQ ID NO: 28527 - protein, 34 aa, Homo sapiens
RPTPQQPCPRDLQLVLILAPPTLVWVFSSTEKSR

SEQ ID NO: 28528 - protein, 23 aa, Homo sapiens
RHMKRSIQVFIQIGIKIINNVCH

SEQ ID NO: 28529 - protein, 28 aa, Homo sapiens
LACRDCCPCHWTMAPIRLSDQEHLRARN

SEQ ID NO: 28530 - protein, 19 aa, Homo sapiens
RWKRSERARTELCTKPETS

SEQ ID NO: 28531 - protein, 11 aa, Homo sapiens
MESRGLSPGSS

SEQ ID NO: 28532 - protein, 49 aa, Homo sapiens
LAVSSERKENQLRRCARRVVHVSTSQKGIVLRELSLWLDPLMPSSKPLL

SEQ ID NO: 28533 - protein, 42 aa, Homo sapiens
KENQLRRCARRVVHVSTSQKGIVLRELSLWLDPLMPSSKPLL

SEQ ID NO: 28534 - protein, 19 aa, Homo sapiens
LGECFLVPALGFRVQSIDI

SEQ ID NO: 28535 - protein, 11 aa, Homo sapiens
MARSCTASVGM

SEQ ID NO: 28536 - protein, 24 aa, Homo sapiens
LDCDRKQSVRVKDGYYDAECAESV

SEQ ID NO: 28537 - protein, 95 aa, Homo sapiens
KRTAEARQLGAPGPCGASGRGCPSAGTQSRRRRSASCVLASSARSGQAAVGAAGARTARGCCCCPRPARLETERPSQAAAPLMLGGCWRVAAAKR

SEQ ID NO: 28538 - protein, 376 aa, Homo sapiens
LRSSGRLAPHTSRRKEQSELDQDLDDVEEVEEEETGEETKLKARQLTVQMMQNPQILAALQERLDGLVETPTGYIESLPRVVKRRVNALKNLQVKCAQIEAKFYEEVHDLERKYAVLYQPLFDKRFEIINAIYEPTEEECEWKPDEEDEISEELKEKAKIEDEKKDEEKEDPKGIPEFWLTVFKNVDLLSDMVQEHDEPILKHLKDIKVKFSDAGQPMSFVLEFHFEPNEYFTNEVLTKTYRMRSEPDDSDPFSFDGPEIMGCTGCQIDWKKGKNVTLKTIKKKQKHKGRGTVRTVTKTVSNDSFFNFFAPPEVPESGDLDDDAEAILAADFEIGHFLRERIIPRSVLYFTGEAIEDDDDDYDEEGEEADEVMFTK

SEQ ID NO: 28539 - protein, 39 aa, Homo sapiens
KHLTTKCYPCENSYSTRGSASVLYQHFCLQHCTSSATSS

SEQ ID NO: 28540 - protein, 917 aa, Homo sapiens
RRLLTGRGCLCVLLSVRGTARPRGPEQNAARAESGGRRSRQGAGGRRPRPEAEADREPAMSVVGLDVGSQSCYIAVARAGGIETIANEFSDRCTPSVISFGSKNRTIGVAAKNQQITHANNTVSNFKRFHGRAFNDPFIQKEKENLSYDLVPLKNGGVGIKVMYMGEEHLFSVEQITAMLLTKLKETAENSLKKPVTDCVISVPSFFTDAERRSVLDAAQIVGLNCLRLMNDMTAVALNYGIYKQDLPSLDEKPRIVVFVDMGHSAFQVSACAFNKGKLKVLGTAFDPFLGGKNFDEKLVEHFCAEFKTKYKLDAKSKIRALLRLYQECEKLKKLMSSNSTDLPLNIECFMNDKDVSGKMNRSQFEELCAELLQKIEVPLYSLLEQTHLKVEDVSAVEIVGGATRIPAVKERIAKFFGKDISTTLNADEAVARGCALQCAILSPAFKVREFSVTDAVPFPISLIWNHDSEDTEGVHEVFSRNHAAPFSKVLTFLRRGPFELEAFYSDPQGVPYPEAKIGRFVVQNVSAQKDGEKSRVKVKVRVNTHGIFTISTASMVEKVPTEENEMSSEADMECLNQRPPENPDTDKNVQQDNSEAGTQPQVQTDAQQTSQSPPSPELTSEENKIPDADKANEKKVDQPPEAKKPKIKVVNVELPIEANLVWQLGKDLLNMYIETEGKMIMQDKLEKERNDAKNAVEEYVYEFRDKLCGPYEKFICEQDHQNFLRLLTETEDWLYEEGEDQAKQAYVDKLEELMKIGTPVKVRFQEAEERPKMFEELGQRLQHYAKIAADFRNKDEKYNHIDESEMKKVEKSVNEVMEWMNNVMNAQAKKSLDQDPVVRAQEIKTKIKELNNTCEPVVTQPKPKIESPKLERTPNGPNIDKKEEDLEDKNNFGAEPPHQNGECYPNEKNSVNMDLD

SEQ ID NO: 28541 - protein, 19 aa, Homo sapiens
IFVTSELFSVSRFMCSSRL

SEQ ID NO: 28542 - protein, 9 aa, Homo sapiens
RPRRSVLAV

SEQ ID NO: 28543 - protein, 57 aa, Homo sapiens
LGKLSQKFEERMRGPASSFYLVALLRARWVTSSCTGATRENSARVLALVVSVQTGTV

SEQ ID NO: 28544 - protein, 18 aa, Homo sapiens
KRKEMNFTDLTFLHLPFF

SEQ ID NO: 28545 - protein, 9 aa, Homo sapiens
TSREIESIR

SEQ ID NO: 28546 - protein, 354 aa, Homo sapiens
KMATEGLHENETLASLKSEAESLKGKLEEERAKLHDVELHQVAERVEALGQFVMKTRRTLKGHGNKVLCMDWCKDKRRIVSSSQDGKVIVWDSFTTNKEHAVTMPCTWVMACAYAPSGCAIACGGLDNKCSVYPLTFDKNENMAAKKKSVAMHTNYLSACSFTNSDMQILTASGDGTCALWDVESGQLLQSFHGHGADVLCLDLAPSETGNTFVSGGCDKKAMVWDMRSGQCVQAFETHESDINSVRYYPSGDAFASGSDDATCRLYDLRADREVAIYSKESIIFGASSVDFSLSGRLLFAGYNDYTINVWDVLKGSRVSILFGHENRVSTLRVSPDGTAFCSGSWDHTLRVWA

SEQ ID NO: 28547 - protein, 9 aa, Homo sapiens
TRGRGFGVY

SEQ ID NO: 28548 - protein, 655 aa, Homo sapiens
VARFEILRGSTARGAATRSDIAGVCGWLLLSGPCGVGLDLDSRLLGASAMRRSEVLAEESIVCLQKALNHLREIWELIGIPEDQRLQRTEVVKKHIKELLDMMIAEEESLKERLIKSISVCQKELNTLCSELHVEPFQEEGETTILQLEKDLRTQVELMRKQKKERKQELKLLQEQDQELCEILCMPHYDIDSASVPSLEELNQFRQHVTTLRETKASRREEFVSIKRQIILCMEALDHTPDTSFERDVVCEDEDAFCLSLENIATLQKLLRQLEMQKSQNEAVCEGLRTQIRELWDRLQIPEEEREAVATIMSGSKAKVRKALQLEVDRLEELKMQNMKKVIEAIRVELVQYWDQCFYSQEQRQAFAPFCAEDYTESLLQLHDAEIVRLKNYYEVHKELFEGVQKWEETWRLFLEFERKASDPNRFTNRGGNLLKEEKQRAKLQKMLPKLEEELKARIELWEQEHSKAFMVNGQKFMEYVAEQWEMHRLEKERAKQERQLKNKKQTETEMLYGSAPRTPSKRRGLAPNTPGKARKLNTTTMSNATANSSIRPIFGGTVYHSPVSRLPPSGSKPVAASTCSGKKTPRTGRHGANKENLELNGSILSGGYPGSAPLQRNFSINSVASTYSEFARELSKASKSDATSGILNSTNIQS

SEQ ID NO: 28549 - protein, 556 aa, Homo sapiens
TRRGSGSLRLCSVARVGQRRRTSAAMSKPHSEAGTAFIQTQQLHAAMADTFLEHMCRLDIDSPPITARNTGIICTIGPASRSVETLKEMIKSGMNVARLNFSHGTHEYHAETIKNVRTATESFASDPILYRPVAVALDTKGPEIRTGLIKGSGTAEVELKKGATLKITLDNAYMEKCDENILWLDYKNICKVVEVGSKIYVDDGLISLQVKQKGADFLVTEVENGGSLGSKKGVNLPGAAVDLPAVSEKDIQDLKFGVEQDVDMVFASFIRKASDVHEVRKVLGEKGKNIKIISKIENHEGVRRFDEILEASDGIMVARGDLGIEIPAEKVFLAQKMMIGRCNRAGKPVICATQMLESMIKKPRPTRAEGSDVANAVLDGADCIMLSGETAKGDYPLEAVRMQHLIAREAEAAIYHLQLFEELRRLAPITSDPTEATAVGAVEASFKCCSGAIIVLTKSGRSAHQVARYRPRAPIIAVTRNPQTARQAHLYRGIFPVLCKDPVQEAWAEDVDLRVNFAMNVGKARGFFKKGDVVIVLTGWRPGSGFTNTMRVVPVP

SEQ ID NO: 28550 - protein, 31 aa, Homo sapiens
LCLSLCCSSRTRGRRCPWKYPFTAASPTSTS

SEQ ID NO: 28551 - protein, 19 aa, Homo sapiens
RARRRGILSAWMCGNSLPT

SEQ ID NO: 28552 - protein, 33 aa, Homo sapiens
LPPGCCSCCPVGCAKCAQGCICKGASDKCSCCA

SEQ ID NO: 28553 - protein, 39 aa, Homo sapiens
LLLLLPCGLCQVCPGLHLQRGVGQVQLLRLMLGQPRSQM

SEQ ID NO: 28554 - protein, 10 aa, Homo sapiens
LFSCAGAAGP

SEQ ID NO: 28555 - protein, 38 aa, Homo sapiens
LLCSPGLPHTHGVKSAAALPGRNLPSTGKGGQQMCRAW

SEQ ID NO: 28556 - protein, 129 aa, Homo sapiens
LLFKDRKLMVQIVISSARAGGLAEWVLMELQGEIEARYSTGLAGNLLGDLHYTTEGIPVLIVGHHILYGKIIHLEKPFAVLVKHTPGDQDCDELGRETGTRYLVTALIKDKILFKTRPKPIITSVPKKV

SEQ ID NO: 28557 - protein, 57 aa, Homo sapiens
LGVAVGMAGSGRLVLRPWIRELILGSETPSSPRAGQLLEVSPHSGPGDRGGGPGWWD

SEQ ID NO: 28558 - protein, 238 aa, Homo sapiens
LYGGFVEWQMGEQADGKDSIARQVAPESHWPELRVLILVVSAEKKLTGSTVGMRASVETSPLLRFRAESVVPARMAEMARCIRERDFPSFAQLTMKDSNQFHATCLDTFPPISYLNAISWRIIHLVHRFNAHHGDTKVAYTFDAGPNAVIFTLDDTVAEFVAAVWHGFPPGSNGDTFLKGLQVRPAPLSAELQAALAMEPTPGGVKYIIVTQVGPGPQILDDPCAHLLGPDGLPKPAA

SEQ ID NO: 28559 - protein, 12 aa, Homo sapiens
IISAPSADAPCS

SEQ ID NO: 28560 - protein, 17 aa, Homo sapiens
LLLSSLGQTSEDFSDGS

SEQ ID NO: 28561 - protein, 74 aa, Homo sapiens
LAPTSERMGDVCKKAPCKTRQEDAGGRLLGGTLSFTPVCCHGCRALVLMAPGGTYRMPRAERKWEWRRCDIPRC

SEQ ID NO: 28562 - protein, 73 aa, Homo sapiens
VLFGCFVITGFSYAFPKAVSVFFKELIQEFGIGYSDTAWISSILLAMLYGTGEGGLTPGPLSGALLADPAGRV

SEQ ID NO: 28563 - protein, 30 aa, Homo sapiens
VEAEAEAEPEAARRGARRRGTRPRSVGILN

SEQ ID NO: 28564 - protein, 133 aa, Homo sapiens
IAVTQRGVPAMSPDALNQFPAAPIPTLSGFSMTLPTPVSQPTVIPSGPAGSMPLSLGQPVMGINLVGPVGGAAAQASSGFIPTYPANQVVKPEEDDFQDFQDASKSGSLDDSFSDFQELPASSKTSNSQHGNR

SEQ ID NO: 28565 - protein, 67 aa, Homo sapiens
RSQWKKRSPRWSLTMAPACAKLVLLGTTLPEPCFLPSSGAPDTRASWWAWARRTPTWATRPRASVAS

SEQ ID NO: 28566 - protein, 42 aa, Homo sapiens
RATKSSLEAVASYAGGRGGGPDFGSRGQSASEVICENGSLFT

SEQ ID NO: 28567 - protein, 21 aa, Homo sapiens
RTPRRWPRWTATRRRCLSPGI

SEQ ID NO: 28568 - protein, 36 aa, Homo sapiens
TRHYRKHTGHRPFQCHLCDRAFSRSDHLALHMKRHM

SEQ ID NO: 28569 - protein, 74 aa, Homo sapiens
MRLGPRRRAACGRVAFGSSTFALVPVFAHLSILQSLVPAAGAASPVAISAQHLCYSHVTPGDPGAGAGQGPAPS

SEQ ID NO: 28570 - protein, 15 aa, Homo sapiens
RKAIAPERATGAREA

SEQ ID NO: 28571 - protein, 147 aa, Homo sapiens
VPSPPAAPSVADNLLASSDAALSASMASLLEDLSHIEGLSQAPQPLADEGPPGRSIGGAAPSLGALDLLGPATGCLLDDGLEGLFEDIDTSMYDNELWAPASEGLKPGPEDGPGKEEAPELDEAELDYLMDVLVGTQALERPPGPGR

SEQ ID NO: 28572 - protein, 32 aa, Homo sapiens
LIWTPPRPDCMISRDPLELHVSAPRTSNPRRS

SEQ ID NO: 28573 - protein, 18 aa, Homo sapiens
LPTFCPDLWLLISPVSAD

SEQ ID NO: 28574 - protein, 205 aa, Homo sapiens
RPREWEASAMFCEKAMELIRELHRAPEGQLPAFNEDGLRQVLEEMKALYEQNQSDVNEAKSGGRSDLIPTIKFRHCSLLRNRRCTVAYLYDRLLRIRALRWEYGSVLPNALRFHMAAEEMEWFNNYKRSLATYMRSLGGDEGLDITQDMKPPKSLYIEVRCLKDYGEFEVDDGTSVLLKKNSQHFLPRWKCEQLIRQGVLEHILS

SEQ ID NO: 28575 - protein, 18 aa, Homo sapiens
RVRAGASGHASLGDRILL

SEQ ID NO: 28576 - protein, 45 aa, Homo sapiens
LKRNTKRRRRPNTKMEAQKSIKTNIKTETRKNEKRKRFEPLGMQK

SEQ ID NO: 28577 - protein, 47 aa, Homo sapiens
LRLEATGPMKGDVAPHGSRGSQLFLSLQNLILALDLRRESLTRDETQ

SEQ ID NO: 28578 - protein, 37 aa, Homo sapiens
VMWKRTGLRPQKGLNRRWRPPVPSMATHPGTWQTAPR

SEQ ID NO: 28579 - protein, 39 aa, Homo sapiens
VRETKSNLQCTQRFHLLLRSPTLMVLERRCRNWEKVKGL

SEQ ID NO: 28580 - protein, 432 aa, Homo sapiens
VPAQRLCIRSWAPRRPVGYCLLLITARGIMDRSKENCISGPVKATAPVGGPKRVLVTQQFPCQNPLPVNSGQAQRVLCPSNSSQRIPLQAQKLVSSHKPVQNQKQKQLQATSVPHPVSRPLNNTQKSKQPLPSAPENNPEEELASKQKNEESKKRQWALEDFEIGRPLGKGKFGNVYLAREKQSKFILALKVLFKAQLEKAGVEHQLRREVEIQSHLRHPNILRLYGYFHDATRVYLILEYAPLGTVYRELQKLSKFDEQRTATYITELANALSYCHSKRVIHRDIKPENLLLGSAGELKIADFGWSVHAPSSRRTTLCGTLDYLPPEMIEGRMHDEKVDLWSLGVLCYEFLVGKPPFEANTYQETYKRISRVEFTFPDFVTEGARDLISRLLKHNPSQRPMLREVLEHPWITANSSKPSNCQNKESASKQS

SEQ ID NO: 28581 - protein, 61 aa, Homo sapiens
IAQARVRGYLIRNFSEGRARWLMPVIPAFSEAEASWTDLKKTAFQDLLRLQLQLEVQNVFS

SEQ ID NO: 28582 - protein, 39 aa, Homo sapiens
VSVRAAVGTFRQTMWGSTWMSTTPRTRGRMKSTSAAMEL

SEQ ID NO: 28583 - protein, 268 aa, Homo sapiens
LSMLLDVAVSPDDRFILTADRDEKIRVSWAAAPHSIESFCLGHTEFVSRISVVPTQPGLLLSSSGDGTLRLWEYRSGRQLHCCHLASLQELVDPQAPQKFAASRIAFWCQENCVALLCDGTPVVYIFQLDARRQQLVYRQQLAFQHQVWDVAFEETQGLWVLQDCQEAPLVLYRPVGDQWQSVPESTVLKKVSGVLRGNWAMLEGSAGADASFSSLYKATFDNVTSYLKKKEERLQQQLEKKQRRRSPPPGPDGHAKKMRPGEATLSC

SEQ ID NO: 28584 - protein, 682 aa, Homo sapiens
VLADVSYLMAMEKSKATPAARASKRIVLPEPSIRSVMQKYLAERNEITFDKIFNQKIGFLLFKDFCLNEINEAVPQVKFYEEIKEYEKLDNEEDRLCRSRQIYDAYIMKELLSCSHPFSKQAVEHVQSHLSKKQVTSTLFQPYIEEICESLRGDIFQKFMESDKFTRFCQWKNVELNIHLTMNEFSVHRIIGRGGFGEVYGCRKADTGKMYAMKCLDKKRIKMKQGETLALNERIMLSLVSTGDCPFIVCMTYAFHTPDKLCFILDLMNGGDLHYHLSQHGVFSEKEMRFYATEIILGLEHMHNRFVVYRDLKPANILLDEHGHARISDLGLACDFSKKKPHASVGTHGYMAPEVLQKGTAYDSSADWFSLGCMLFKLLRGHSPFRQHKTKDKHEIDRMTLTVNVELPDTFSPELKSLLEGLLQRDVSKRLGCHGGGSQEVKEHSFFKGVDWQHVYLQKYPPPLIPPRGEVNAADAFDIGSFDEEDTKGIKLLDCDQELYKNFPLVISERWQQEVTETVYEAVNADTDKIEARKRAKNKQLGHEEDYALGKDCIMHGYMLKLGNPFLTQWQRRYFYLFPNRLEWRGEGESRQNLLTMEQILSVEETQIKDKKCILFRIKGGKQFVLQCESDPEFVQWKKELNETFKEAQRLLRRAPKFLNKPRSGTVELPKPSLCHRNSNGL

SEQ ID NO: 28585 - protein, 34 aa, Homo sapiens
MPLTKARRLERSVDFLLDSSLRKLYPTVGKPSSS

SEQ ID NO: 28586 - protein, 7 aa, Homo sapiens
VQQLQGG

SEQ ID NO: 28587 - protein, 414 aa, Homo sapiens
LKRTDKYRTYSKKHFRIFREVGPKNSYIAYIEDHSGNGTFVNTELVGKGKRRPLNNNSEIALSLSRNKVFVFFDLTVDDQSVYPKALRDEYIMSKTLGSGACGEVKLAFERKTCKKVAIKIISKRKFAIGSAREADPALNVETEIEILKKLNHPCIIKIKNFFDAEDYYIVLELMEGGELFDKVVGNKRLKEATCKLYFYQMLLAVQYLHENGIIHRDLKPENVLLSSQEEDCLIKITDFGHSKILGETSLMRTLCGTPTYLAPEVLVSVGTAGYNRAVDCWSLGVILFICLSGYPPFSEHRTQVSLKDQITSGKYNFIPEVWAEVSEKALDLVKKLLVVDPKARFTTEEALRHPWLQDEDMKRKFQDLLSEENESTALPQVLAQPSTSRKRPREGEAEGAETTKRPAVCAAVL

SEQ ID NO: 28588 - protein, 8 aa, Homo sapiens
LVSQECCC

SEQ ID NO: 28589 - protein, 51 aa, Homo sapiens
VRDTSGGTWRGCGAWSGVAWSGVAWRGLAARARTRSCGRRVPPSGLSFLML

SEQ ID NO: 28590 - protein, 34 aa, Homo sapiens
LRWRCCSSACWVFWSPPRMVVSIYPMPFLGMTLT

SEQ ID NO: 28591 - protein, 798 aa, Homo sapiens
RVRSSVAWRRWLPRFPPAATPCFVSPVPRRLVSSRVPLPMESVRIEQMLSLPAEVSSDNLESAERGASAAQVDMGPHPKVAAEGPAPLPTREPEQEQSPGTSTPESKVLLTQADALASRGRIREALEVYRQLSERQQLVAEQLEQLVRCLAEKVPQGEALAPAPPDEGSTASGTVAAEETGAAAAAAATEVWDGFKCRKCHGFLSDPVSLSCGHTFCKLCLERGRAADRRCALCGVKLSALMVATGRARGARRAGQQPPPPLRVNVVLSGLLGKLFPGPARASQLRHEGNRLYRERQVEAALLKYNEAVKLAPNDHLLYSNRSQIYFTLESHENALHDAEIACKLRPMGFKAHFRKAQALATLGKVEEALREFLYCVSLDGKNKRARCEAQRDNLELPHCSSQEEAAARGDGSSLMDPAKVKGDGQQHHMKDQEEEEEKWDATSPKAASSKTGKCQEKKRKHCQIESQEETGMPNKASKQDPPTDQGDKPALSLPLASFDASDLECALCMRLFYEPVTTPCGHTFCLKCLERCLDHNAKCPLCKDGLSQCLASRKYSKNVIMEELIAKFLPEELKERRKLYEEEMEELSNLNKNVPIFVCTMAYPTVPCPLHIFEPCYRLMIRRCIETGTRQFGMCLGDPVKGFAEYGCILEIRNVQFFADGRSVVDSIGKRRFRVLHQSQRDGYNTADIEYIEDQKVQGEDCAELMGLHNCVYQQASLWFHSLKLSLKNRILNHFGPMPEKDADPQMNPNGPAWCWWMLAVLPLESRAQLPFLAMRSLKDRLNGIRRVLAFISRNQN

SEQ ID NO: 28592 - protein, 61 aa, Homo sapiens
LLLQPLRPPRPPREPETPVYAPPLTPLATCPPRLGGASCGTSRGCRRILQPESAGLRPRTT

SEQ ID NO: 28593 - protein, 28 aa, Homo sapiens
RAEPATPSIHSPRPFSGCPPVPLPALPP

SEQ ID NO: 28594 - protein, 112 aa, Homo sapiens
LPFPLPVGFNAEEAHNIVKECVDGVLGGEDYNHNNINQWTASIVEQSLTHLVKLGKAYKYIVTCAVVQKSAYGFHTASSCFWDTTSDGTCTVRWENRTMNCIVNVFAIAIVL

SEQ ID NO: 28595 - protein, 18 aa, Homo sapiens
LLSEEAGVAEIAKMLWSF

SEQ ID NO: 28596 - protein, 494 aa, Homo sapiens
IEVIPGGELPFLCRPPPRAEPDCISDDLLINVIQDRSTPDGPADPPLLPIPPPPALPPPASKEPPPQPPLAPLERPEIEPFSGDPVYLAEFLMQLETFIADHEVHFPGGAERVAFLISFFTGEAKDWAISVTQEGSPLHANFPRFLDEIRKEFCGPIPPRVAKKAIRKLKQGHCTLGSYADAFQFLAQFLSWDDCRLQNQFLKGLSEFFRKELLWSTEMADLDELILECVEIERKVRVPKPIPLPGVRNIIFPFAPSPNEEESEDEEYYSEDEDQEARRHRLHSKDQRKRMRAFQQEMKEKEEEEMKKEEEMKKKEEKEEEEEEEMKQKEEEEEIRNKNEEEGESKDEEDEDEDGGQKPEGEPQQDPGTEETYGEVEEEPLDEAQDDDLDELMEMEPTFVHASSQTSGPTSGYHAENFLGASPPIIQPSRRRNQNRVPLLEGLPGTNSPFYSSPQLIRRTGRLGQRQVRRRPPVLFRLTPRQGGHRAARGRIRV

SEQ ID NO: 28597 - protein, 225 aa, Homo sapiens
MELAKVVKSHPSAKMVLCIATDDSHSLSCLSLKFGVSLKSCRHLLENAKKHHVEVVGVSFHIGSGCPDPQAYAQSIADARLVFEMGTELGHKMHVLDLGGGFPGTEGAKVRFEEIASVINSALDLYFPEGCGVDIFAELGRYYVTSAFTVAVSIIAKKEVLLDQPGREEENGSTSKTIVYHLDEGVYGIFNSVLFDNICPTPILQKSKNHSPCYMSLESIHFIAV

SEQ ID NO: 28598 - protein, 283 aa, Homo sapiens
MGEQLTETFALDTNTGSFLHTLEGPRFRASQCIYAHRTLPHVLAFRVSIARLAPGSGPITLLLRSAFSPESPDLDLHQGPDFQGARYLYGHTLTPEQPGGPQQEVHMLWTPAPPDLTLGEGEEARTWDFLTAVGGSQAEAQACLTEALQLQARGALYTAHAQAWAQLWVECGLDVVGPLQLRQALRGSLYYLLSALPQPKAPGYICHGLSPGGLSNGSREECYWGHVFWDQVSTVHPAPATQQATHGGPRSLPSLGPGLWLGKHRDCGKREEAWKVCRSLVEE

SEQ ID NO: 28599 - protein, 1096 aa, Homo sapiens
MPKSQKLRDVFNMDFPDNSFLLKTLTVVSGPDMVDLTFHNFVSYKENVGKAWAEDVLALVKHPLTANASRSTFLDKILVKLKMQLNSEGKIPVKNFFQMFPADRKRVEAALSACHLPKGKNDAINPEDFPEPVYKSFLMSLCPRPEIDEIFTSYHAKAKPYMTKEHLTKFINQKQRDSRLNSLLFPPARPDQVQGLIDKYEPSGINAQRGQLSPEGMVWFLCGPENSVLAQDKLLLHHDMTQPLNHYFINSSHNTYLTAGQFSGLSSAEMYRQVLLSGCRCVELDCWKGKPPDEEPIITHGFTMTTDIFFKEAIEAIAESAFKTSPYPIILSFENHVDSPRQQAKMAEYCRTIFGDMLLTEPLEKFPLKPGVPLPSPEDLRGKILIKNKKNQFSGPTSSSKDTGGEAEGSSPPSAPAGEGTVWAGEEGTELEEEEVEEEEEEESGNLDEEEIKKMQSDEGTAGLEVTAYEEMSSLVNYIQPTKFVSFEFSAQKNRSYVISSFTELKAYDLLSKASVQFVDYNKRQMSRIYPKGTRMDSSNYMPQMFWNAGCQMVALNFQTMDLPMQQNMAVFEFNGQSGYLLKHEFMRRPDKQFNPFSVDRIDVVVATTLSITVISGQFLSERSVRTYVEVELFGLPGDPKRRYRTKLSPSTNSINPVWKEEPFVFEKILMPELASLRVAVMEEGNKFLGHRIIPINALNSGYHHLCLHSESNMPLTMPALFIFLEMKDYIPGAWADLTVALANPIKFFSAHDTKSVKLKEAMGGLPEKPFPLASPVASQVNGALAPTSNGSPEPRTASLEELRELKGVVKLQRRHEKELRELERRGARRWEELLQRGAAQLAELGPPGVGGVGACKLGPGKGSRKKRSLPREESAGAAPGEGPEGVDGRVRELKDRLELELLRQGEEQYECVLKRKEQHVAEQISKMMELAREKQAAELKALKETSENDTKEMKKKLETKRLERIQGMTKVTTDKMAQERLKREINNSHIQEVVQVIKQMTENLERHQEKLEEKQAACLEQIREMEKQFQKEALAEYEARMKGLEAEVKESVRACLRTCFPSEAKDKPERACECPPELCEQDPLIAKADAQESRL

SEQ ID NO: 28600 - protein, 87 aa, Homo sapiens
MRGEQGAAGARVLQFTNCRILRGGKLLREDLWVRGGRILDPEKLFFEERRVADERRDCGGRILAPGFIDVQINGAARGRQGNPGEEL

SEQ ID NO: 28601 - protein, 108 aa, Homo sapiens
MRKLRPRFGISRARDFPATPDNHIPPAILTRPGSGTLPGSRRRGPAGTPGGPRRRGSPHARRRPPGTAAAVAHLQGSRRLRARQGGSKRGWEGCWRGLARCVWSIAGS

SEQ ID NO: 28602 - protein, 90 aa, Homo sapiens
MAFLQKIEALVKDMQNPETGVRMQNQRVLVTSVPHAMTGSDVLQWIVQRLWISSLGESSSGTQLSGTALCTAPWEKLNRDLACVSEKFTF

SEQ ID NO: 28603 - protein, 292 aa, Homo sapiens
MTPDYYYYLNQSDTYQVDGTDDRSDFGETLSAMQVIGIPPSIQQLVLQLVAGILHLGNISFCEDGNYARVESVDLLAFPAYLLGIDSGRLQEKLTSRKMDSRWGGRSESINVTLNVEQAAYTRDALAKGLYARLFDFLVEAINRAMQKPQEEYSIGVLDIYGFEIFQKNGFEQFCINFVNEKLQQIFIELTLKAEQEEYVQEGIRWTPIQYFNNKVVCDLIENKLVRAGSTLAGASHWSPELSLEDEGEGQGCYGILRPFSTLHSGLPATDNNQNVPSAPHPFIPPTCPPFT

SEQ ID NO: 28604 - protein, 9 aa, Homo sapiens
MVTSMKGGF

SEQ ID NO: 28605 - protein, 414 aa, Homo sapiens
MAAVGSGGYARNDAGEKLPSVMAGVPARRGQSSPPPAPPICLRRRTRLSTASEETVQNRVSLEKVLGITAQNSSGLTCDPGTGHVAYLAGCVVVILDPKENKQQHIFNTARKSLSALAFSPDGKYIVTGENGHRPAVRIWDVEEKNQVAEMLGHKYGVACVAFSPNMKHIVSMGYQHDMVLNVWDWKKDIVVASNKVSCRVIALSFSEDSSYFVTVGNRHVRFWFLEVSTETKVTSTVPLVGRSGILGELHNNIFCGVACGRGRMAGSTFCVSYSGLLCQFNEKRVLEKWINLKVSLSSCLCVSQELIFCGCTDGIVRIFQAHSLHYLANLPKPHYLGVDVAQGLEPSFLFHRKAEAVYPDTVALTFDPIHQWLSCVYKDHSIYIWDVKDINRVGKVWSELFHSSYVWNVEALS

SEQ ID NO: 28606 - protein, 222 aa, Homo sapiens
MTKAMWEAWGNPSSPYSAGRKAKDIINAARESLAKMIGGKPQDIIFTSGGTESNNLVIHSVVKHFHANQTSKGHTGGHHSPVKGAKPHFITSSVEHDSIRLPLEHLVEEQVAAVTFVPVSKVSGQAEVDDILAAVRPTTRLVTIMLANNETGIVMPVPEISQRIKALNQERVAAGLPPILVHTDAAQALGKQRVDVEDLGVDFLTIVGHKLTRARDIFSTQF

SEQ ID NO: 28607 - protein, 525 aa, Homo sapiens
MNGLKGEKGEPGDASLGFGMRGMPGPPGPPGPPGPPGTPVYDSNVFAESSRPGPPGLPGNQGPPGPKGAKGEVGPPGPPGQFPFDFLQLEAEMKGEKGDRGDAGQKGERGEPGGGGFFGSSLPGPPGPPGPPGPRGYPGIPGPKGESIRGQPGPPGPQGPPGIGYEGRQGPPGPPGPPGPPSFPGPHRQTISVPGPPGPPGPPGPPGTMGASSGQVRLWATRQAMLGQVHEVPEGWLIFVAEQEELYVRVQNGFRKVQLEARTPLPRGTDNEVAALQPPVVQLHDSNPYPRREHPHPTARPWRADDILASPPRLPEPQPYPGAPHHSSYVHLRPARPTSPPAHSHRDFQPVLHLVALNSPLSGGMRGIRGADFQCFQQARAVGLAGTFRAFLSSRLQDLYSIVRRADRAAVPIVNLKDELLFPSWEALFSGSEGPLKPGARIFSFDGKDVLRHPTWPQKSVWHGSDPNGRRLTESYCETWRTEAPSATGQASSLLGGRLLGQSAASCHHAYIVLCIENSFMTASK

SEQ ID NO: 28608 - protein, 247 aa, Homo sapiens
MDVTDYKGETVFHYAVQGDNSQVLQLLGRNAVAGLNQVNNQGLTPLHLACQLGKQEMVRVLLLCNARCNIMGPNGYPIHSAMKFSQKGCAEMIISMDSSQIHSKDPRYGASPLHWAKNAEMARMLLKRGCNVNSTSSAGNTALHVAVMRNRFDCAIVLLTHGANADARGEHGNTPLHLAMSKDNVEMIKALIVFGAEVDTPNDFGETPTFLASKIGRQLQDLMHISRARKPAFILGSMRDEKRTCRT

SEQ ID NO: 28609 - protein, 246 aa, Homo sapiens
MTSKGPEEEHPSVTLFRQYLRIRTVQPKPDYGAAVAFFEETARQLGLGCQKVEVAPGYVVTVLTWPGTNPTLSSILLNSHTDVVPVFKEHWSHDPFEAFKDSEGYIYARGAQDMKCVSIQYLEAVRRLKVEGHRFPRTIHMTFVPDEEVGGHQGMELFVQRPEFHALRAGFALDEGIANPTDAFTVFYSERSPWCKYELGGRAHSTGGRLGQKGHGPMQGCTAKLRPEKALNPGPLPPSSFLSELL

SEQ ID NO: 28610 - protein, 194 aa, Homo sapiens
MVAPGYVVTVLTWPGTNPTLSSILLNSHTDVVPVFKEHWSHDPFEAFKDSEGYIYARGAQDMKCVSIQYLEAVRRLKVEGHRFPRTIHMTFVPDEEVGGHQGMELFVQRPEFHALRAGFALDEGIANPTDAFTVFYSERSPWCKYELGGRAHSTGGRLGQKGHGPMQGCTAKLRPEKALNPGPLPPSSFLSELL

SEQ ID NO: 28611 - protein, 83 aa, Homo sapiens [sequence omitted]

SEQ ID NO: 28612 - protein, 217 aa, Homo sapiens [sequence omitted]

SEQ ID NO: 28613 - protein, 83 aa, Homo sapiens
MEAAGFTAQVIILNKPDQITGGYVPVLDCHTAHIVCTSAELKEKIEYYSGNKLEDGPKFLKSDDAAIVDMVPDKPMCVDSLSD

SEQ ID NO: 28614 - protein, 13 aa, Homo sapiens
MCPGCCAGRKNGG

SEQ ID NO: 28615 - protein, 8 aa, Homo sapiens
MPPHSGLG

SEQ ID NO: 28616 - protein, 171 aa, Homo sapiens
MLAKACCQLHSLDLQHSMVESTAVVSFLEEAGSRMRKLWLTYSSQTTAILGALLGSCCPQLQVLEVSTGINRNSIPLQLPVEALQKGCPQLQVLRLLNLMWLPKPPGRGVAPGPGFPSLEELCLASSTCNFVSNEVLGRLLHGSPNLRLLDLRGCARITPAGLQDLPCRAL

SEQ ID NO: 28617 - protein, 31 aa, Homo sapiens
VTDVYEMEGGLLNLLNDFHSGRLQAFAGRPQ

SEQ ID NO: 28618 - protein, 11 aa, Homo sapiens
LSEVFIWWDVF

SEQ ID NO: 28619 - protein, 25 aa, Homo sapiens
LSSSGRRSLFRRMRVKLIIMLGNAW

SEQ ID NO: 28620 - protein, 6 aa, Homo sapiens
MLGNAW

SEQ ID NO: 28621 - protein, 16 aa, Homo sapiens
KVVFSGRGLSVMFRVY

SEQ ID NO: 28622 - protein, 29 aa, Homo sapiens
RKPRKGKTTRTEMCLAMSIGSNQWKRSNT

SEQ ID NO: 28623 - protein, 49 aa, Homo sapiens
MTRKQPDVDRVTKTYKRKNIEPTHAPFIEKSRSGGSMFPAPCVRMLHSC

SEQ ID NO: 28624 - protein, 132 aa, Homo sapiens
MRWMNHKKSRVMDFFRRIDKDQDGKITRQEFIDGILASKFPTTKLEMTAVADIFDRDGDGYIDYYEFVAALHPNKDAYRPTTDADKIEDEVTRQVAQCKCAKRFQVEQIGENKYRVRKRKSSPLLWWFLICG

SEQ ID NO: 28625 - protein, 9 aa, Homo sapiens
TTASGCVRS

SEQ ID NO: 28626 - protein, 32 aa, Homo sapiens
LSREKRPGKLSFLRSTVGIAAAEQGFWKALRT

SEQ ID NO: 28627 - protein, 119 aa, Homo sapiens
VLKEGVLEKRSGGLLQLWKRKRCVLTERGLQLFEAKGTGGRPKELSFARIKAVECVESTGRHIYFTLVTEGGGEIDFRCPLEDPGWNAQITLGLVKFKNQQAIQTVRARQSLGTGTLVS

SEQ ID NO: 28628 - protein, 59 aa, Homo sapiens
LPESPELAQRILQMFTAQSMCSPLCTPSQPDPDCCHGVPSGEGPGCDGVHLPQVLGQRG

SEQ ID NO: 28629 - protein, 34 aa, Homo sapiens
RKALQDMSVRPDAWPLAAWEVAGAAFAFARDSSN

SEQ ID NO: 28630 - protein, 14 aa, Homo sapiens
VELFRDLAVSSFPE

SEQ ID NO: 28631 - protein, 29 aa, Homo sapiens
IAEPDARFSGFYSMQKQNHLQADNFYQTV

SEQ ID NO: 28632 - protein, 14 aa, Homo sapiens
MRRRCCSFCAGMLL

SEQ ID NO: 28633 - protein, 1272 aa, Homo sapiens
LAKTTNKTSQIEPACCRSRAPSPCELPSDPLLSMKQPIMADGPRCKRRKQANPRRKNVVNYDNVVDTGSETDEEDKLHIAEDDGIANPLDQETSPASVPNHESSPHVSQALLPREEEEDEIREGGVEHPWHNNEILQASVDGPEEMKEDYDTMGPEATIQTAINNGTVKNANCTSDFEEYFAKRKLEERDGHAVSIEEYLQRSDTAIIYPEAPEELSRLGTPEANGQEENDLPPGTPDAFAQLLTCPYCDRGYKRLTSLKEHIKYRHEKNEENFSCPLCSYTFAYRTQLERHMVTHKPGTDQHQMLTQGAGNRKFKCTECGKAFKYKHHLKEHLRIHSDSSLGRQLQLLSNQGNVTVILIIILGEKPYECPNCKKRFSHSGSYSSHISSKKCIGLISVNGRMRNNIKTGSSPNSVSSSPTNSAITQLRNKLENGKPLSMSEQTGLLKIKTEPLDFNDYKVLMATHGFSGTSPFMNGGLGATSPLGVHPSAQSPMQHLGVGMEAPLLGFPTMNSNLSEVQKVLQIVDNTVSRQKMDCKAEEISKLKGYHMKDPCSQPEEQGVTSPNIPPVGLPVVSHNGATKSIIDYTLEKVNEAKACLQSLTTDSRRQISNIKKEKLRTLIDLVTDDKMIENHNISTPFSCQFCKESFPGPIPLHQHERYLCKMNEEIKAVLQPHENIVPNKAGVFVDNKALLLSSVLSEKGMTSPINPYKDHMSVLKAYYAMNMEPNSDELLKISIAVGLPQEFVKEWFEQRKVYQYSNSRSPSLERSSKPLAPNSNPPTKDSLLPRSPVKPMDSITSPSIAELHNSVTNCDPPLRLTKPSHFTNIKPVEKLDHSRSNTPSPLNLSSTSSKNSHSSSYTPNSFSSEELQAEPLDLSLPKQMKEPKSIIATKNKTKASSISLDHNSVSSSSENSDEPLNLTFIKKEFSNSNNLDNKSTNPVFSMNPFSAKPLYTALPPQSAFPPATFMPPVQTSIPGLRPYPGLDQMSFLPHMAYTYPTGAATFADMQQRRKYQRKQGFQGELLDGAQDYMSGLDDMTDSDSCLSRKKIKKTESGMYACDLCDKTFQKSSSLLRHKYEHTGKRPHQCQICKKAFKHKHHLIEHSRLHSGEKPYQCDKCGKRFSHSGSYSQHMNHRYSYCKREAEEREAAEREAREKGHLEPTELLMNRAYLQSITPQGYSDSEERESMPRDGESEKEHEKEGEDGYGKLGRQDGDEEFEEEEEESENKSMDTDPETIRDEEETGDHSMDDSSEDGKMETKSDHEEDNMEDGM

SEQ ID NO: 28634 - protein, 49 aa, Homo sapiens
RGCLRGGVGGSLCRMTIRGPAPAPPHLRLPTSKPRKKQTPPRRRRVKSA

SEQ ID NO: 28635 - protein, 23 aa, Homo sapiens
VTSPPAGCGDYVGPLWPVRSASL

SEQ ID NO: 28636 - protein, 7 aa, Homo sapiens
LASERHL

SEQ ID NO: 28637 - protein, 29 aa, Homo sapiens
VEAQSSGRVHPACVWREAGKPVPGSWPQR

SEQ ID NO: 28638 - protein, 17 aa, Homo sapiens
LSQMEAELNTLRWMMET

SEQ ID NO: 28639 - protein, 18 aa, Homo sapiens
RCQGELSVVSASSPGAAV

SEQ ID NO: 28640 - protein, 26 aa, Homo sapiens
LFAETVNAFLALTAVKISGAMTIKTT

SEQ ID NO: 28641 - protein, 296 aa, Homo sapiens
LAAMSSASGLRRGHPAGGEENMTETDAFYKREMFDPAEKYKMDHRRRGIALIFNHERFFWHLTLPERRGTCADRDNLTRRFSDLGFEVKCFNDLKAEELLLKIHEVSTVSHADADCFVCVFLSHGEGNHIYAYDAKIEIQTLTGLFKGDKCHSLVGKPKIFIIQACRGNQHDVPVIPLDVVDNQTEKLDTNITEVDAASVYTLPAGADFLMCYSVAEGYYSHRETVNGSWYIQDLCEMLGKYGSSLEFTELLTLVNRKVSQRRVDFCKDPSAIGKKQVPCFASMLTKKLHFFPKSN

SEQ ID NO: 28642 - protein, 76 aa, Homo sapiens
RVGLSGSSTAGPRNSRFGAAPSRLGHTGARCRSPVLRHLVWNFRLAVSSRSGALCGVVWWKNGPCVGLTPSVCVSE

SEQ ID NO: 28643 - protein, 452 aa, Homo sapiens
LGVRWRRPRPGWVPTALGGAMDEAVGDLKQALPCVAESPTVHVEVHQRGSSTAKKEDINLSVRKLLNRHNIVFGDYTWTEFDEPFLTRNVQSVSIIDTELKVKDSQPIDLSACTVALHIFQLNEDGPSSENLEEETENIIAANHWVLPAAEFHGLWDSLVYDVEVKSHLLDYVMTTLLFSDKNVNSNLITWNRVVLLHGPPGTGKTSLCKALAQKLTIRLSSRYRYGQLIEINSHSLFSKWFSESGKLVTKMFQKIQDLIDDKDALVFVLIDEVESLTAARNACRAGTEPSDAIRVVNAVLTQIDQIKRHSNVVILTTSNITEKIDVAFVDRADIKQYIGPPSAAAIFKIYLSCLEELMKCQIIYPRQQLLTLRELEMIGFIENNVSKLSLLLNDISRKSEGLSGRVLRKLPFLAHALYVQAPTVTIEGFLQALSLAVDKQFEERKKLAAYI

SEQ ID NO: 28644 - protein, 703 aa, Homo sapiens
IARCLLAVRSLRRVGGSRILLRMTLGREVMSPLQAMSSYTVAGRNVLRWDLSPEQIKTRTEELIVQTKQVYDAVGMLGIEEVTYENCLQALADVEVKYIVERTMLDFPQHVSSDKEVRAASTEADKRLSRFDIEMSMRGDIFERIVHLQETCDLGKIKPEARRYLEKSIKMGKRNGLHLPEQVQNEIKSMKKRMSELCIDFNKNLNEDDTFLVFSKAELGALPDDFIDSLEKTDDDKYKITLKYPHYFPVMKKCCIPETRRRMEMAFNTRCKEENTIILQQLLPLRTKVAKLLGYSTHADFVLEMNTAKSTSRVTAFLDDLSQKLKPLGEAEREFILNLKKKECKDRGFEYDGKINAWDLYYYMTQTEELKYSIDQEFLKEYFPIEVVTEGLLNTYQELLGLSFEQMTDAHVWNKSVTLYTVKDKATGEVLGQFYLDLYPREGKYNHAACFGLQPGCLLPDGSRMMAVAALVVNFSQPVAGRPSLLRHDEVRTYFHEFGHVMHQICAQTDFARFSGTNVETDFVEVPSQMLENWVWDVDSLRRLSKHYKDGSPIADDLLEKLVASRLVNTGLLTLRQIVLSKVDQSLHTNTSLDAASEYAKYCSEILGVAATPGTNMPATFGHLAGGYDGQYYGYLWSEVFSMDMFYSCFKKEGIMNPEVGMKYRNLILKPGGSLDGMDMLHNFLKREPNQKAFLMSRGLHAP

SEQ ID NO: 28645 - protein, 16 aa, Homo sapiens
VCVFLQRVFRDRSIDS

SEQ ID NO: 28646 - protein, 25 aa, Homo sapiens
TARASDVVAIRITTSHTEAAAGATN

SEQ ID NO: 28647 - protein, 568 aa, Homo sapiens
LCPLQLQPRAAPPRPDTSSPACSSRMAAAKAEMQLMSPLQISDPFGSFPHSPTMDNYPKLEEMMLLSNGAPQFLGAAGAPEGSGSNSSSSSSGGGGGGGGGSNSSSSSSTFNPQADTGEQPYEHLTAESFPDISLNNEKVLVETSYPSQTTRLPPITYTGRFSLEPAPNSGNTLWPEPLFSLVSGLVSMTNPPASSSSAPSPAASSASASQSPPLSCAVPSNDSSPIYSAAPTFPTPNTDIFPEPQSQAFPGSAGTALQYPPPAYPAAKGGFQVPMIPDYLFPQQQGDLGLGTPDQKPFQGLESRTQQPSLTPLSTIKAFATQSGSQDLKALNTSYQSQLIKPSRMRKYPNRPSKTPPHERPYACPVESCDRRFSRSDELTRHIRIHTGQKPFQCRICMRNFSRSDHLTTHIRTHTGEKPFACDICGRKFARSDERKRHTKIHLRQKDKKADKSVVASSATSSLSSYPSPVATSYPSPVTTSYPSPATTSYPSPVPTSFSSPGSSTYPSPVHSGFPSPSVATTYSSVPPAFPAQVSSFPSSAVTNSFSASTGLSDMTATFSPRTIEIC

SEQ ID NO: 28648 - protein, 30 aa, Homo sapiens
VANVATLPSARESITGVPRLKDEIPPELVE

SEQ ID NO: 28649 - protein, 90 aa, Homo sapiens
TRGWPTWILANSGLSSFLVSEGPFCFQGGACEVRKWHLERGRKRRKNRSSASDLRWLKERMYLVSAISLHPSMTLLSMSLIFLARKPSAV

SEQ ID NO: 28650 - protein, 31 aa, Homo sapiens
TFISMFLEVGKCIGLLVKHVLGIIFSSLGND

SEQ ID NO: 28651 - protein, 263 aa, Homo sapiens
LVGRLLDSLKRDYAGKPQPPIKSERRNPPSYAMAGKKVLIVYAHQEPKSFNGSLKNVAVDELSRQGCTVTVSDLYAMNLEPRATDKDITGTLSNPEVFNYGVETHEAYKQRSLASDITDEQKKVREADLVIFQFPLYWFSVPAILKGWMDRVLCQGFAFDIPGFYDSGLLQGKLALLSVTTGGTAEMYTKTGVNGDSRYFLWPLQHGTLHFCGFKVLAPQISFAPEIASEEERKGMVAAWSQRLQTIWKEEPIPCTAHWHFGQ

SEQ ID NO: 28652 - protein, 91 aa, Homo sapiens
MSFIGKDDMPAPLLKNVQLSESKARELYLQVIQYMRRMYQDARLVHADLSEFNMLYHGGGVYIIDVSQSVEHDHPHALEFLRKDCANVNGE

SEQ ID NO: 28653 - protein, 63 aa, Homo sapiens
LSASALSRFQIRICYQRRPRRSQAGPQRPAPPLPATRSAHRRPAAELAHPSHHSSTCSLEKGR

SEQ ID NO: 28654 - protein, 26 aa, Homo sapiens
LGGQPPTIPTAMGPTSHSHLPSIGRG

SEQ ID NO: 28655 - protein, 25 aa, Homo sapiens
IRRTPSVSEHEVNNGELFCCIDVPD

SEQ ID NO: 28656 - protein, 48 aa, Homo sapiens
LVARGVSRIRRVSLPSRWRGLCPCSVTAALGKRSAPKTLWLQLRLPIL

SEQ ID NO: 28657 - protein, 20 aa, Homo sapiens
VLCQSQRSLLPPRKRAPRRR

SEQ ID NO: 28658 - protein, 23 aa, Homo sapiens
LLYSKGMKETTSMSLIKGKWMCT

SEQ ID NO: 28659 - protein, 695 aa, Homo sapiens
LRPNQSAGHLAAQLTPRPRSQAPGFLKCFLGALKMEMTEMTGVSLKRGALVVEDNDSGVPVEETKKQKLSECSLTKGQDGLQNDFLSISEDVPRPPDTVSTGKGGKNSEAQLEDEEEEEEDGLSEECEEEESESFADMMKHGLTEADVGITKFVSSHQGFSGILKERYSDFVVHEIGKDGRISHLNDLSIPVDEEDPSEDIFTVLTAEEKQRLEELQLFKNKETSVAIEVIEDTKEKRTIIHQAIKSLFPGLETKTEDREGKKYIVAYHAAGKKALANPRKHSWPKSRGSYCHFVLYKENKDTMDAINVLSKYLRVKPNIFSYMGTKDKRAITVQEIAVLKITAQRLAHLNKCLMNFKLGNFSYQKNPLKLGELQGNHFTVVLRNITGTDDQVQQAMNSLKEIGFINYYGMQRFGTTAVPTYQVGRAILQNSWTEVMDLILKPRSGAEKGYLVKCREEWAKTKDPTAALRKLPVKRCVEGQLLRGLSKYGMKNIVSAFGIIPRNNRLMYIHSYQSYVWNNMVSKRIEDYGLKPVPGDLVLKGATATYIEEDDVNNYSIHDVVMPLPGFDVIYPKHKIQEAYREMLTADNLDIDNMRHKIRDYSLSGAYRKIIIRPQNVSWEVVAYDDPKIPLFNTDVDNLEGKTPPVFASEGKYRALKMDFSLPPSTYATMAIREVLKMDTSIKNQTQLNTTWLR

SEQ ID NO: 28660 - protein, 494 aa, Homo sapiens
IVSCLGSFVETPKCQHRWRDTWRPVSGTFATSIKDFRSAKMLKQILSEMYIDPDLLAELSEEQKQILFFKMREEQIRRWKEREAAMERKESLPVKPRPKKENGKSVHWKLGADKEVWVWVMGEHHLDKPYDVLCNEIIAERARLKAEQEAEEPRKTHSEEFTNSLKTKSQYHDLQAPDNQQTKDIWKKVAEKEELEQGSRPAPTLEEEKIRSLSSSSRNIQQMLADSINRMKAYAFHQKKESMKKKQDEEINQIEEERTKQICKSWKEDSEWQASLRKSKAADEKRRSLAKQAREDYKRLSLGAQKGRGGERLQSPLRVPQKPERPPLPPKPQFLNSGAYPQKPLRNQGVVRTLSSSAQEDIIRWFKEEQLPLRAGYQKTSDTIAPWFHGILTLKKANELLLSTGMPGSFLIRVSERIKGYALSYLSEDGCKHFLIDASADAYSFLGVDQLQHATLADLVEYHKEEPITSLGKELLLYPCGQQDQLPDYLELFE

SEQ ID NO: 28661 - protein, 44 aa, Homo sapiens
RSRGLEGAADATLACHGALGVSLSAWRAFRCGVRDGCQFKRQAP

SEQ ID NO: 28662 - protein, 14 aa, Homo sapiens
LQRAVRMPPHSGLG

SEQ ID NO: 28663 - protein, 33 aa, Homo sapiens
IQRFLERTSNSSISSVMLSMSPLLKSQAASRSQ

SEQ ID NO: 28664 - protein, 418 aa, Homo sapiens
LPEPDAMSSKGSVVLAYSGGLDTSCILVWLKEQGYDVIAYLANIGQKEDFEEARKKALKLGAKKVFIEDVSREFVEEFIWPAIQSSALYEDRYLLGTSLARPCIARKQVEIAQREGAKYVSHGATGKGNDQVRFELSCYSLAPQIKVIAPWRMPEFYNRFKGRNDLMEYAKQHGIPIPVTPKNPWSMDENLMHISYEAGILENPKNQAPPGLYTKTQDPAKAPNTPDILEIEFKKGVPVKVTNVKDGTTHQTSLELFMYLNEVAGKHGVGRIDIVENRFIGMKSRGIYETPAGTILYHAHLDIEAFTMDREVRKIKQGLGLKFAELVYTGFWHSPECEFVRHCIAKSQERVEGKVQVSVLKGQVYILGRESPLSLYNEELVSMNVQGDYEPTDATGFININSLRLKEYHRLQSKVTAK

SEQ ID NO: 28665 - protein, 12 aa, Homo sapiens
LSAAEDITPRFR

SEQ ID NO: 28666 - protein, 85 aa, Homo sapiens
VARLQVGPADTQPRVSGEADGESSSGSRDSGLLWCHQPPPQQGGPGEGQEQLQRLDVQTDGGPVCAVPVDRWPVLPREDQEGQQL

SEQ ID NO: 28667 - protein, 705 aa, Homo sapiens
LEIKTRSVEQTLLPLVSQITTLINHKDNTKKSDKTLQAIQRVGQAVNLAVGRFVKVGEAIANENWDLKEEINIACIEAKQAGETIAALTDITNLNHLESDGQITIFTDKTGVIKAARLLLSSVTKVLLLADRVVIKQIITSRNKVLATMERLEKVNSFQEFVQIFSQFGNEMVEFAHLSGDRQNDLKDEKKKAKMAAARAVLEKCTMMLLTASKTCLRHPNCESAHKNKEGVFDRMKVALDKVIEIVTDCKPNGETDISSISIFTGIKEFKMNIEALRENLYFQSKENLSVTLEVILERMEDFTDSAYTSHEHRERILELSTQARMELQQLISVWIQAQSKKTKSIAEELELSILKISHSLNELKKELHSTATQLAADLLKYHADHVVLKALKLTGVEGNLEALAEYACKLSEQKEQLVETCRLLRHISGTEPLEITCIHAEETFQVTGQQIISAAETLTLHPSSKIAKENLDVFCEAWESQISDMSTLLREINDVFEGRRGEKYGYLSLPKPMKNNANLKSLKPDKPDSEEQAKIAKLGLKLGLLTSDADCEIEKWEDQENEIVQYGRNMSSMAYSLYLFTRGEGPLKTSQDLIHQLEVFAAEGLKLTSSVQAFSKQLKDDDKLMLLLEINKLIPLCHQLQTVTKTSLQNKVFLKVDKCITKTRSMMALLVQLLSLCYKLLKKLQMENNGWVSVTNKDTMDSKT

SEQ ID NO: 28668 - protein, 395 aa, Homo sapiens
ICGFLDIEENENSGKFLRRYFILDTREDSFVWYMDNPQNLPSGSSRVGAIKLTYISKVSDATKLRPKAEFCFVMNAGMRKYFLQANDQQDLVEWVNVLNKAIKITVPKQSDSQPNSDNLSRHGECGKKQVSYRTDIVGGVPIITPTQKEEVNECGESIDRNNLKRSQSHLPYFTPKPPQDSAVIKAGYCVKQGAVMKNWKRRYFQLDENTIGYFKSELEKEPLRVIPLKEVHKVQECKQSDIMMRDNLFEIVTTSRTFYVQADSPEEMHSWIKAVSGAIVAQRGPGRSASSEHPPGPSESKHAFRPTNAATATSHSTASRSNSLVSTFTMEKRGFYESLAKVKPGNFKVQTVSPREPASKVTEQALLRPQSKNGPQEKDCDLVDLDDASLPVSDV

SEQ ID NO: 28669 - protein, 1061 aa, Homo sapiens
LAGTVMASQPNSSAKKKEEKGKNIQVVVRCRPFNLAERKASAHSIVECDPVRKEVSVRTGGLADKSSRKTYTFDMVFGASTKQIDVYRSVVCPILDEVIMGYNCTIFAYGQTGTGKTFTMEGERSPNEEYTWEEDPLAGIIPRTLHQIFEKLTDNGTEFSVKVSLLEIYNEELFDLLNPSSDVSERLQMFDDPRNKRGVIIKGLEEITVHNKDEVYQILEKGAAKRTTAATLMNAYSSRSHSVFSVTIHMKETTIDGEELVKIGKLNLVDLAGSENIGRSGAVDKRAREAGNINQSLLTLGRVITALVERTPHVPYRESKLTRILQDSLGGRTRTSIIATISPASLNLEETLSTLEYAHRAKNILNKPEVNQKLTKKALIKEYTEEIERLKRDLAAAREKNGVYISEENFRVMSGKLTVQEEQIVELIEKIGAVEEELNRVTELFMDNKNELDQCKSDLQNKTQELETTQKHLQETKLQLVKEEYITSALESTEEKLHDAASKLLNTVEETTKDVSGLHSKLDRKKAVDQHNAEAQDIFGKNLNSLFNNMEELIKDGSSKQKAMLEVHKTLFGNLLSSSVSALDTITTVALGSLTSIPENVSTHVSQIFNMILKEQSLAAESKTVLQELINVLKTDLLSSLEMILSPTVVSILKINSQLKHIFKTSLTVADKIEDQKKELDGFLSILCNNLHELQENTICSLVESQKQCGNLTEDLKTIKQTHSQELCKLMNLWTERFCALEEKCENIQKPLSSVQENIQQKSKDIVNKMTFHSQKFCADSDGFSQELRNFNQEGTKLVEESVKHSDKLNGNLEKISQETEQRCESLNTRTVYFSEQWVSSLNEREQELHNLLEVVSQCCEASSSDITEKSDGRKAAHEKQHNIFLDQMTIDEDKLIAQNLELNETIKIGLTKLNCFLEQDLKLDIPTGTTPQRKSYLYPSTLVRTEPREHLLDQLKRKQPELLMMLNCSENNKEETIPDVDVEEAVLGQYTEEPLSQEPSVDAGVDCSSIGGVPFFQHKKSHGKDKENRGINTLERSKVEETTEHLVTKSRLPLRAQINL

SEQ ID NO: 28670 - protein, 475 aa, Homo sapiens
IASLDLATISEMSSRSTKDLIKSKWGSKPSNSKSETTLEKLKGEIAHLKTSVDEITSGKGKLTDKERHRLLEKIRVLEAEKEKNAYQLTEKDKEIQRLRDQLKARYSTTTLLEQLEETTREGERREQVLKALSEEKDVLKQQLSAATSRIAELESKTNTLRLSQTVAPNCFNSSINNIHEMEIQLKDALEKNQQWLVYDQQREVYVKGLLAKIFELEKKTETAAHSLPQQTKKPESEGYLQEEKQKCYNDLLASAKKDLEVERQTITQLSFELSEFRRKYEETQKEVHNLNQLLYSQRRADVQHLEDDRHKTEKIQKLREENDIARGKLEEEKKRSEELLSQVQFLYTSLLKQQEEQTRVALLEQQMQACTLDFENEKLDRQHVQHQLHVILKELRKARNQITQLESLKQLHEFAITEPLVTFQGETENREKVAASPKSPTAALNESLVECPKCNIQYPATEHRDLLVHVEYCSK

SEQ ID NO: 28671 - protein, 489 aa, Homo sapiens
IFLPKLLLVGEKKMPQLNGGGGDDLGANDELISFKDEGEQEEKSSENSSAERDLADVKSSLVNESETNQNSSSDSEAERRPPPRSESFRDKSRESLEEAAKRQDGGLFKGPPYPGYPFIMIPDLTSPYLPNGSLSPTARTYLQMKWPLLDVQAGSLQSRQALKDARSPSPAHIVSNKVPVVQHPHHVHPLTPLITYSNEHFTPGNPPPHLPADVDPKTGIPRPPHPPDISPYYPLSPGTVGQIPHPLGWLVPQQGQPVYPITTGGFRHPYPTALTVNASMSSFLSSRFPPHMVPPHHTLHTTGIPHPAIVTPTVKQESSQSDVGSLHSSKHQDSKKEEEKKKPHIKKPLNAFMLYMKEMRAKVVAECTLKESAAINQILGRRWHALSREEQAKYYELARKERQLHMQLYPGWSARDNYGKKKKRKRDKQPGETNEHSECFLNPCLSLPPITDLSAPKKCRARFGLDQQNNWCGPCRCKYSKEVSGTVRA

SEQ ID NO: 28672 - protein, 615 aa, Homo sapiens
IFLPKLLLVGEKKMPQLNGGGGDDLGANDELISFKDEGEQEEKSSENSSAERDLADVKSSLVNESETNQNSSSDSEAERRPPPRSESFRDKSRESLEEAAKRQDGGLFKGPPYPGYPFIMIPDLTSPYLPNGSLSPTARTLHFQSGSTHYSAYKTIEHQIAVQYLQMKWPLLDVQAGSLQSRQALKDARSPSPAHIVSNKVPVVQHPHHVHPLTPLITYSNEHFTPGNPPPHLPADVDPKTGIPRPPHPPDISPYYPLSPGTVGQIPHPLGWLVPQQGQPVYPITTGGFRHPYPTALTVNASMSRFPPHMVPPHHTLHTTGIPHPAIVTPTVKQESSQSDVGSLHSSKHQDSKKEEEKKKPHIKKPLNAFMLYMKEMRAKVVAECTLKESAAINQILGRRWHALSREEQAKYYELARKERQLHMQLYPGWSARDNYGKKKKRKRDKQPGETNDANTPKKCRALFGLDRQTLWCKPCRRKKKCVRYIQGEGSCLSPPSSDGSLLDSPPPSPNLLGSPPRDAKSQTEQTQPLSLSLKPDPLAHLSMMPPPPALLLAEATHKASALCPNGALDLPPAALQPAAPSSSIAQPSTSSLHSHSSLAGTQPQPLSLVTKSLE

SEQ ID NO: 28673 - protein, 592 aa, Homo sapiens
IFLPKLLLVGEKKMPQLNGGGGDDLGANDELISFKDEGEQEEKSSENSSAERDLADVKSSLVNESETNQNSSSDSEAERRPPPRSESFRDKSRESLEEAAKRQDGGLFKGPPYPGYPFIMIPDLTSPYLPNGSLSPTARTYLQMKWPLLDVQAGSLQSRQALKDARSPSPAHIVSNKVPVVQHPHHVHPLTPLITYSNEHFTPGNPPPHLPADVDPKTGIPRPPHPPDISPYYPLSPGTVGQIPHPLGWLVPQQGQPVYPITTGGFRHPYPTALTVNASMSRFPPHMVPPHHTLHTTGIPHPAIVTPTVKQESSQSDVGSLHSSKHQDSKKEEEKKKPHIKKPLNAFMLYMKEMRAKVVAECTLKESAAINQILGRRWHALSREEQAKYYELARKERQLHMQLYPGWSARDNYGKKKKRKRDKQPGETNDLSAPKKCRARFGLDQQNNWCGPCRRKKKCVRYIQGEGSCLSPPSSDGSLLDSPPPSPNLLGSPPRDAKSQTEQTQPLSLSLKPDPLAHLSMMPPPPALLLAEATHKASALCPNGALDLPPAALQPAAPSSSIAQPSTSSLHSHSSLAGTQPQPLSLVTKSLE

SEQ ID NO: 28674 - protein, 262 aa, Homo sapiens
VRAADCAQSGRHPGPAVVCGRRLISVLEQIRHFVMMPEINTNHLDKQQVQLLAEMCILIDENDNKIGAETKKNCHLNENIEKGLLHRAFSVFLFNTENKLLLQQRSDAKITFPGCFTNTCCSHPLSNPAELEESDALGVRRAAQRRLKAELGIPLEEVPPEEINYLTRIHYKAQSDGIWGEHEIDYILLVRKNVTLNPDPNEIKSYCYVSKEELKELLKKAASGEIKITPWFKIIAATFLFKWWDNLNHLNQFVDHEKIYRM

SEQ ID NO: 28675 - protein, 16 aa, Homo sapiens
RCCLPSSAQHAPHRAG

SEQ ID NO: 28676 - protein, 112 aa, Homo sapiens
MKVFRMEGSQLNFQEKYVNRSQHVVSQDLASLLTLMRKLKIPRPIQKSLKEKFQEILRYISRMSKKTVPQMTQKTVLLREQLMFIPQNMLDVMAEMQLIPFLGILKKFPALN

SEQ ID NO: 28677 - protein, 612 aa, Homo sapiens
IMSCKKQRSRKHSVNEKCNMKIEHYFSPVSKEQQNNCSTSLMRMESRGDPRATTNTQAQRFHSPKKNPEDQTMPQNRTIYVTLKVNHRRNQDMKLKLTHSENSSLYMALNTLQAVRKEIETHQGQEMLVRGTEGIKEYINLGMPLSCFPEGGQVVITFSQSKSKQKEDNHIFGRQDKASTECVKFYIHAIGIGKCKRRIVKCGKLHKKGRKLCVYAFKGETIKDALCKDGRFLSFLENDDWKLIENNDTILESTQPVDELEGRYFQVEVEKRMVPSAAASQNPESEKRNTCVLREQIVAQYPSLKRESEKIIENFKKKMKVKNGETLFELHRTTFGKVTKNSSSIKVVKLLVRLSDSVGYLFWDSATTGYATCFVFKGLFILTCRHVIDSIVGDGIEPSKWATIIGQCVRVTFGYEELKDKETNYFFVEPWFEIHNEELDYAVLKLKENGQQVPMELYNGITPVPLSGLIHIIGHPYGEKKQIDACAVIPQGQRAKKCQERVQSKKAESPEYVHMYTQRSFQKIVHNPDVITYDTEFFFGASGSPVFDSKGSLVAMHAAGFAYTYQNETRSIIEFGSTMESILLDIKQRHKPWYEEVFVNQQDVEMMSDEDL

SEQ ID NO: 28678 - protein, 17 aa, Homo sapiens
RMPSAPSTLTWNSWASS

SEQ ID NO: 28679 - protein, 24 aa, Homo sapiens
THIDGAYVQAPVHRKEQNRHSSWS

SEQ ID NO: 28680 - protein, 28 aa, Homo sapiens
IRAPTCPQSLERDSNPASMSRSLQPPSS

SEQ ID NO: 28681 - protein, 25 aa, Homo sapiens
ICCGTCSQGWCGTNASRHHGRVWTK

SEQ ID NO: 28682 - protein, 34 aa, Homo sapiens
VHVCVRGEIQASRCRLVPSYLGSRALSWDLGSCA

SEQ ID NO: 28683 - protein, 30 aa, Homo sapiens
LPCVSPTLDPMTPNTVFLSSVLYIFFSLKV

SEQ ID NO: 28684 - protein, 31 aa, Homo sapiens
VGTEEMPEDGEPDAAELRRRRLQKLESPVAH

SEQ ID NO: 28685 - protein, 56 aa, Homo sapiens
VRTNRSVHRRGASPVPVRERRRGYLGAGGGRAGPRRCGLATLLLRLLLSLGTGCQR

SEQ ID NO: 28686 - protein, 199 aa, Homo sapiens
KMSNVRVSNGSPSLERMDARQAEHPKPSACRNLFGPVDHEELTRDLEKHCRDMEEASQRKWNFDFQNHKPLEGKYEWQEVEKGSLPEFYYRPPRPPKGACKVPAQESQDVSGSRPAAPLIGAPANSEDTHLVDPKTDPSDSQTGLAEQCAGIRKRPATDDSSTQNKRANRTEENVSDGSPNAGSVEQTPKKPGLRRRQT

SEQ ID NO: 28687 - protein, 17 aa, Homo sapiens
IEKLWKRTSRHPTSWIT

SEQ ID NO: 28688 - protein, 418 aa, Homo sapiens
LWLGRETEAAAAQGKRGCSGGSRKMSGEDEQQEQTIAEDLVVTKYKMGGDIANRVLRSLVEASSSGVSVLSLCEKGDAMIMEETGKIFKKEKEMKKGIAFPTSISVNNCVCHFSPLKSDQDYILKEGDLVKIDLGVHVDGFIANVAHTFVVDVAQGTQVTGRKADVIKAAHLCAEAALRLVKPGNQNTQVTEAWNKVAHSFNCTPIEGMLSHQLKQHVIDGEKTIIQNPTDQQKKDHEKAEFEVHEVYAVDVLVSSGEGKAKDAGQRTTIYKRDPSKQYGLKMKTSRAFFSEVERRFDAMPFTLRAFEDEKKARMGVVECAKHELLQPFNVLYEKEGEFVAQFKFTVLLMPNGPMRITSGPFEPDLYKSEMEVQDAELKALLQSSASRKTQKKKKKKASKTAENATSGETLEENEAGD

SEQ ID NO: 28689 - protein, 233 aa, Homo sapiens
LLHEKLNLPVENMDVTDHYEDVRKIYDDFLKNSNMLDLIDVYQKCRALTSNCENYNTVSPSQLLDFLSGKQYAVGDETDLSIPTSPTSKYNRDNEKVQLLARKIIFSYLNLLVNSKNDLAVAYILNIPDRGLGREAFTDLKHAAREKQMSIFLVATSFIRTIELGGKGYAPPPSDPLRTHVKGLSNFINFIDKLDEILGEIPNPRSPTQVNNSIKPLRERICVSMQEKKIKRV

SEQ ID NO: 28690 - protein, 390 aa, Homo sapiens
ILVADIWSSYNMADIDNKEQSELDQDLDDVEEVEEEETGEETKLKARQLTVQMMQNPQILAALQERLDGLVETPTGYIESLPRVVKRRVNALKNLQVKCAQIEAKFYEEVHDLERKYAVLYQPLFDKRFEIINAIYEPTEEECEWKPDEEDEISIPASCLGEFSTEELKEKAKIEDEKKDEEKEDPKGIPEFWLTVFKNVDLLSDMVQEHDEPILKHLKDIKVKFSDAGQPMSFVLEFHFEPNEYFTNEVLTKTYRMRSEPDDSDPFSFDGPEIMGCTGCQIDWKKGKNVTLKTIKKKQKHKGRGTVRTVTKTVSNDSFFNFFAPPEVPESGDLDDDAEAILAADFEIGHFLRERIIPRSVLYFTGEAIEDDDDDYDEEGEEADEVMFTK

SEQ ID NO: 28691 - protein, 41 aa, Homo sapiens
KPPRGLRVKESWRLYWATGFLLAPGPPDKMGSAVGVLAKAG

SEQ ID NO: 28692 - protein, 62 aa, Homo sapiens
LYAPFSLCAMGDVKESKMQITPETPGRIPVLNPFESPSDYSNLHEQTLASPSVFKSTKLPNR

SEQ ID NO: 28693 - protein, 8 aa, Homo sapiens
ISSSTKIK

SEQ ID NO: 28694 - protein, 41 aa, Homo sapiens
RAQSAFKEQRRQKLKEHLLRRKTLFAYKQENEMLSRLIKKT

SEQ ID NO: 28695 - protein, 40 aa, Homo sapiens
LVTHRTLLVFSVENMMTVLINTEKRKLRRNGISLYITTVC

SEQ ID NO: 28696 - protein, 43 aa, Homo sapiens
LNGKLEQRGKNIASVGDAVQLPKGVRNGNAEAWEKGSGGGRRG

SEQ ID NO: 28697 - protein, 38 aa, Homo sapiens
RQRGKNIASVGDAVQLPKGVRNGNAEAWEKGSGGGRRG

SEQ ID NO: 28698 - protein, 141 aa, Homo sapiens
TWLWPLGEMKLHCEVEVISRHLPALGLRNRGKGVRAVLSLCQQTSRSQPPVRAFLLISTLKDKRGTRYELRENIEQFFTKFVDEGKATVRLKEPPVDICLSKMESHSVTQVGVQWEELGSLQPTGHFQQFKRFPFSYETGS

SEQ ID NO: 28699 - protein, 8 aa, Homo sapiens
KTPSGRKY

SEQ ID NO: 28700 - protein, 250 aa, Homo sapiens
LGIPDLDSAGEMPLGHIMRLDLEKIALEYIVPCLHEVGFCYLDNFLGEVVGDCVLERVKQLHCTGALRDGQLAGPRAGVSKRHLRGDQITWIGGNEEGCEAISFLLSLIDRLVLYCGSRLGKYYVKERSKAMVACYPGNGTGYVRHVDNPNGDGRCITCIYYLNKNWDAKLHGGILRIFPEGKSFIADVEPIFDRLLFFWSDRRNPHEVQPSYATRYAMTVWYFDAEERAEAKKKFRNLTRKTESALTED

SEQ ID NO: 28701 - protein, 1084 aa, Homo sapiens
VSEDQGKAVEVAGGRGRRSARRGRKAAERSSNLRAFGNWKTWWRTRVRTCILPQRVIDVSGMWDQRLVRLALLQHLRAFYGIKVKGVRGQCDRRRHETAATEIGGKIFGVPFNALPHSAVPEYGHIPSFLVDACTSLEDHIHTEGLFRKSGSVIRLKALKNKVDHGEGCLSSAPPCDIAGLLKQFFRELPEPILPADLHEALLKAQQLGTEEKNKATLLLSCLLADHTVHVLRYFFNFLRNVSLRSSENKMDSSNLAVIFAPNLLQTSEGHEKMSSNTEKKLRLQAAVVQTLIDYASDIGRVPDFILEKIPAMLGIDGLCATPSLEGFEEGEYETPGEYKRKRRQSVGDFVSGALNKFKPNRTPSITPQEERIAQLSESPVILTPNAKRTLPVDSSHGFSSKKRKSIKHNFNFELLPSNLFNSSSTPVSVHIDTSSEGSSQSSLSPVLIGGNHLITAGVPRRSKRIAGKKVCRVESGKAGCFSPKISHKEKVRRSLRLKFNLGKNGREVNGCSGVNRYESVGWRLANQQSLKNRIESVKTGLLFSPDVDEKLPKKGSEKISKSEETLLTPERLVGTNYRMSWTGPNNSSFQEVDANEASSMVENLEVENSLEPDIMVEKSPATSCELTPSNLNNKHNSNITSSPLSGDENNMTKETLVKVQKAFSESGSNLHALMNQRQSSVTNVGKVKLTEPSYLEDSPEENLFETNDLTIVESKEKYEHHTGKGEKCFSERDFSPLQTQTFNRETTIKCYSTQMKMEHEKDIHSNMPKDYLSKQEFSSDEEIKKQQSPKDKLNNKLKENENMMEGNLPKCAAHSKDEARSSFSQQSTCVVTNLSKPRPMRIAKQQSLETCEKTVSESSQMTEHRKVSDHIQWFNKLSLNEPNRIKVKSPLKFQRTPVRQSVRRINSLLEYSRQPTGHKLASLGDTASPLVKSVSCDGALSSCIESASKDSSVSCIKSGPKEQKSMSCEESNIGAISKSSMELPSKSFLKMRKHPDSVNASLRSTTVYKQKILSDGQVKVPLDDLTNHDIVKPVVNNNMGISSGINNRVLRRPSERGRAWYKGSPKHPIGKTQLLPTSKPVDL

SEQ ID NO: 28702 - protein, 48 aa, Homo sapiens
VRRRLGQASREVERKPGALGAVRVGRVPRPRGEVGARGLLERGALRTE

SEQ ID NO: 28703 - protein, 11 aa, Homo sapiens
IPYSQRRRPNT

SEQ ID NO: 28704 - protein, 12 aa, Homo sapiens
KSCHEILRCEIG

SEQ ID NO: 28705 - protein, 32 aa, Homo sapiens
MQNSVILIPPRKEQAQLTLRTRKVPPTTPALR

SEQ ID NO: 28706 - protein, 31 aa, Homo sapiens
VCAAGAGGSRTERSWLSLQSPKTRGRGFGVY

SEQ ID NO: 28707 - protein, 547 aa, Homo sapiens
LLLSGPCGVGLDLDSRLLGASAMRRSEVLAEESIVCLQKALNHLREIWELIGIPEDQRLQRTEVVKKHIKEEGETTILQLEKDLRTQVELMRKQKKERKQELKLLQEQDQELCEILCMPHYDIDSASVPSLEELNQFRQHVTTLRETKASRREEFVSIKRQIILCMEALDHTPDTSFERDVVCEDEDAFCLSLENIATLQKLLRQLEMQKSQNEAVCEGLRTQIRELWDRLQIPEEEREAVATIMSGSKAKVRKALQLEVDRLEELKMQNMKKVIEAIRVELVQYWDQCFYSQEQRQAFAPFCAEDYTESLLQLHDAEIVRLKNYYEVHKELFEGVQKWEETWRLFLEFERKASDPNRFTNRGGNLLKEEKQRAKLQKMLPKLEEELKARIELWEQEHSKAFMVNGQKFMEYVAEQWEMHRLEKERAKQERQLKNKKQTETEMLYGSAPRTPSKRRGLAPNTPGKARKLNTTTMSNATANSSIRPIFGGTVYHSPVSRLPPSGSKPVAASTCSGKKTPRTGRHGANKENLELNGSILSARTFKGFQI

SEQ ID NO: 28708 - protein, 42 aa, Homo sapiens
LRLRQWLLAQQLHAPWLRISSSLQRSPSRSAPEDLSSHVEAP

SEQ ID NO: 28709 - protein, 28 aa, Homo sapiens
TVQPSWEACHLCYSDAGEHDQEAPPHSG

SEQ ID NO: 28710 - protein, 18 aa, Homo sapiens
MHLLVNRFHIFMMMWTQS

SEQ ID NO: 28711 - protein, 21 aa, Homo sapiens
LTTKGLRLDFQGRISSEAPAR

SEQ ID NO: 28712 - protein, 113 aa, Homo sapiens
LRDILHKTVKHPVCVKHPPSVKYARCFLSELIKKHEAVHTEPLDELYEALAETLMAKESTQGHRSYLLPSGGSVTLSESTAIISYGTTGLVTWDAALYLAEWAIENPAVFTNR

SEQ ID NO: 28713 - protein, 10 aa, Homo sapiens
MPVPRRDWTG

SEQ ID NO: 28714 - protein, 18 aa, Homo sapiens
VSSLKPSNTVMFQPSPEP

SEQ ID NO: 28715 - protein, 35 aa, Homo sapiens
LQGSRRLRARQGGSKRGWEGCWRGLARCVWSIAGS

SEQ ID NO: 28716 - protein, 24 aa, Homo sapiens
VQVLRTTWVPGAFRVLAAAAGVQT

SEQ ID NO: 28717 - protein, 24 aa, Homo sapiens
MGSSGVLWERLSSVLSRKDSALLV

SEQ ID NO: 28718 - protein, 16 aa, Homo sapiens
VVGPLVRNSGFPWVFR

SEQ ID NO: 28719 - protein, 151 aa, Homo sapiens
IESMASVVLALRTRTAVTSLLSPTPATALAVRYASKKSGGSSKNLGGKSSGRRQGIKKMEGHYVHAGNIIATQRHFRWHPGAHVGVGKNKCLYALEEGIVRYTKEVYVPHPRNTEAVDLITRLPKGAVLYKTFVHVVPAKPEGTFKLVAML

SEQ ID NO: 28720 - protein, 177 aa, Homo sapiens
RKRRDSFGMFDGYDSCSEDTSSSSSSEESEEEVAPLPSNLPIIKNNGQVYTYPDGKSGMATCEMCGMVGVRDAFYSKTKRFCSVSCSRSYSSNSKKASILARLQGKPPTKKAKVLQKQPLVAKLAAYAQYQATLQNQAKTKAAVSMEGFSWGNYINSNSFIAAPVTCFKHGRRVAPR

SEQ ID NO: 28721 - protein, 495 aa, Homo sapiens
LLPAMASRCWRWWGWSAWPRTRLPPAGSTPSFCHHFSTQEKTPQICVVGSGPAGFYTAQHLLKHPQAHVDIYEKQPVPFGLVRFGVAPDHPEVKNVINTFTQTAHSGRCAFWGNVEVGRDVTVPELQEAYHAVVLSYGAEDHRALEIPGEELPGVCSARAFVGWYNGLPENQELEPDLSCDTAVILGQGNVALDVARILLTPPEHLERTDITKAALGVLRQSRVKTVWLVGRRGPLQVAFTIKELREMIQLPGARPILDPVDFLGLQDKIKEVPRPRKRLTELLLRTATEKPGPAEAARQASASRAWGLRFFRSPQQVLPSPDGRRAAGVRLAVTRLEGVDEATRAVPTGDMEDLPCGLVLSSIGYKSRPVDPSVPFDSKLGVIPNVEGRVMDVPGLYCSGWVKRGPTGVIATTMTDSFLTGQMLLQDLKAGLLPSGPRPGYAAIQALLSSRGVRPVSFSDWEKLDAEEVARGQGTGKPREKLVDPQEMLRLLGH

SEQ ID NO: 28722 - protein, 53 aa, Homo sapiens
MAPACAKLVLLGTTLPEPCFLPSSGAPDTRASWWAWARRTPTWATRPRASVAS

SEQ ID NO: 28723 - protein, 27 aa, Homo sapiens
LEQLCSHVNEKIGNIKKTLSLRNCGTL

SEQ ID NO: 28724 - protein, 40 aa, Homo sapiens
VRDGPRPEMFSSPAPAALQAAAAATKTTTATATPKHSFRG

SEQ ID NO: 28725 - protein, 580 aa, Homo sapiens
LDLLDRYVKFVKERTEVEQAYAKQLRSLVKKYLPKRPAKDDPESKFSQQQSFVQILQEVNDFAGQRELVAENLSVRVCLELTKYSQEMKQERKMHFQEGRRAQQQLENGFKQLENSKRKFERDCREAEKAAQTAERLDQDINATKADVEKAKQQAHLRSHMAEESKNEYAAQLQRFNRDQAHFYFSQMPQIFDKLQDMDERRATRLGAGYGLLSEAELEVVPIIAKCLEGMKVAANAVDPKNDSHVLIELHKSGFARPGDVEFEDFSQPMNRAPSDSSLGTPSDGRPELRGPGRSRTKRWPFGKKNKPRPPPLSPLGGPVPSALPNGPPSPRSGRDPLAILSEISKSVKPRLASFRSLRGSRGTVVTEDFSHLPPEQQRKRLQQQLEERSRELQKEVDQREALKKMKDVYEKTPQMGDPASLEPQIAETLSNIERLKLEVQKYEAWLAEAESRVLSNRGDSLSRHARPPDPPASAPPDSSSNSASQDTKESSEEPPSEESQDTPIYTEFDEDFEEEPTSPIGHCVAIYHFEGSSEGTISMAEGEDLSLMEEDKGDGWTRVRRKEGGEGYVPTSYLRVTLN

SEQ ID NO: 28726 - protein, 12 aa, Homo sapiens
LERGGTWREAAP

SEQ ID NO: 28727 - protein, 25 aa, Homo sapiens
KNSPSTSRVALQKKLRPSSLSVAFS

SEQ ID NO: 28728 - protein, 43 aa, Homo sapiens
ILTPTCSEVSCHFSTPRKRVKQRSLRRRHPIAAERRSPLQRRH

SEQ ID NO: 28729 - protein, 363 aa, Homo sapiens
LNMGGAVSAGEDNDELIDNLKEAQYIRTELVEQAFRAIDRADYYLEEFKENAYKDLAWKHGNIHLSAPCIYSEVMEALDLQPGLSFLNLGSGTGYLSSMVGLILGPFGVNHGVELHSDVIEYAKQKLDFFIRTSDSFDKFDFCEPSFVTGNCLEISPDCSQYDRVYCGAGVQKEHEEYMKNLLKVGGILVMPLEEKLTKITRTGPSAWETKKILAVSFAPLIQPCHSESGKSRLVQLPPVAVRSLQDLARIAIRGTIKKIIHQETVSKNGNGLKNTPRFKRRRVRRRRMETIVFLDKEVFASRISNPSDDNSCEDLEEERREEEEKTPPETKPDPPVNFLRQKVLSLPLPDPLKYYLLYYREK

SEQ ID NO: 28730 - protein, 83 aa, Homo sapiens
LTYLMRSVRETKSNLQCTQRPHCPRFRAQSFLLQGNMKTLCGYMTLLLKQQTMLGLLFHLLLRSPTLMVLERRCRNWEKVKGL

SEQ ID NO: 28731 - protein, 550 aa, Homo sapiens
LPGPRGPQGALGEPGKQGSRGDPGDAGPRGDSGQPGPKGDPGRPGFSYPGPRGAPGEKGEPGPRGPEGGRGDFGLKGEPGRKGEKGEPADPGPPGEPGPRGPRGVPGPEGEPGPPGDPGLTECDVMTYVRETCGCCDCEKRCGALDVVFVIDSSESIGYTNFTLEKNFVINVVNRLGAIAKDPKSETGTRVGVVQYSHEGTFEAIQLDDERIDSLSSFKEAVKNLEWIAGGTWTPSALKFAYDRLIKESRRQKTRVFAVVITDGRHDPRDDDLNLRALCDRDVTVTAIGIGDMFHEKHESENLYSIACDKPQQVRNMTLFSDLVAEKFIDDMEDVLCPDPQIVCPDLPCQTELSVAQCTQRPVDIVFLLDGSERLGEQNFHKARRFVEQVARRLTLARRDDDPLNARVALLQFGGPGEQQVAFPLSHNLTAIHEALETTQYLNSFSHVGAGVVHAINAIVRSPRGGARRHAELSFVFLTDGVTGNDSLHESAHSMRKQNVVPTVLALGSDVDMDVLTTLSLGDRAAVFHEKDYDSLAQPGFFDRFIRWIC

SEQ ID NO: 28732 - protein, 272 aa, Homo sapiens
VNKAPEGRSPLSAEELMTIEDEGVLDKMLDQSTDFEERKLIRAALRELRQRKRDGSGSTMMQTKTFSSSSSSKKMGSIFDREDQASPRAGSLAALEKRQAEKKKELMKAQSLPKTSASQARKAMIEKLEKEGAAGSPGGPRAAVQRSTSFGVPNANSIKQMLLDWCRAKTRGYEHVDIQNFSSSWSDGMAFCALVHNFFPEAFDYGQLSPQNRRQNFEVAFSSAETHADCPQLLDTEDMVRLREPDWKCVYTYIQEFYRCLVQKGLVKTKKS

SEQ ID NO: 28733 - protein, 34 aa, Homo sapiens
LDSIMACGLVASNLNLKPGECLRVRGEVAPDAKR

SEQ ID NO: 28734 - protein, 6 aa, Homo sapiens
MNKSRR

SEQ ID NO: 28735 - protein, 30 aa, Homo sapiens
MPKRKARRMSRSSPLGSDRRPTRSESPHHT

SEQ ID NO: 28736 - protein, 17 aa, Homo sapiens
VEEQPCHQNRAKNGSPK

SEQ ID NO: 28737 - protein, 22 aa, Homo sapiens
LGNIKKLSNRLAQICSSIRTHK

SEQ ID NO: 28738 - protein, 39 aa, Homo sapiens
LQHSFLTEVTDVYEMEGGLLNLLNDFHSGRLQAFAGRPQ

SEQ ID NO: 28739 - protein, 13 aa, Homo sapiens
ITIRFYLFWLNTP

SEQ ID NO: 28740 - protein, 18 aa, Homo sapiens
LDWCLEGDSIKVKSEESL

SEQ ID NO: 28741 - protein, 31 aa, Homo sapiens
MKALFSWSRLIHCVPDVLTSAISPNVGNSTA

SEQ ID NO: 28742 - protein, 15 aa, Homo sapiens
KFIYKCWSNKEGRTK

SEQ ID NO: 28743 - protein, 6 aa, Homo sapiens
VEMDPK

SEQ ID NO: 28744 - protein, 35 aa, Homo sapiens
VTGGANPQRLPRGAAPWSPPCRWPCARCSSCCGCA

SEQ ID NO: 28745 - protein, 21 aa, Homo sapiens
MKNEIQDLQTKMRRRKACTIS

SEQ ID NO: 28746 - protein, 16 aa, Homo sapiens
VCARASVWTRRWGQLS

SEQ ID NO: 28747 - protein, 71 aa, Homo sapiens
KGNFHAVYRDDLKKLLETECPQYIRKKGADVWFKELDINTDGAVNFQEFLILVIKMGVAAHKKSHEESHKE

SEQ ID NO: 28748 - protein, 107 aa, Homo sapiens; identical to SEQ ID NO: 23334

SEQ ID NO: 28749 - protein, 22 aa, Homo sapiens
IWSFFFLPPSFLTLKTNSVPSW

SEQ ID NO: 28750 - protein, 55 aa, Homo sapiens
LDVRDEKDGGAREAESRAHTGSSSRGKRKRQQHPKKERAGVSTVQKAKKKQKKRD

SEQ ID NO: 28751 - protein, 37 aa, Homo sapiens
IVSRLKPDWVLRRDNMEEITNPLQAIQMVMDTLGIPY

SEQ ID NO: 28752 - protein, 59 aa, Homo sapiens
IGRLLITHSFRNLMMQMKIMEEIRALPLRKFDHLPEKLKIRGDLERIHRKIVRTQKTKM

SEQ ID NO: 28753 - protein, 63 aa, Homo sapiens
IFPCHLMGFGLFDSTVCVPQCQGNNPTLSQLNRSQDLTANKRPSLLNSMEETSFVAATWEDGC

SEQ ID NO: 28754 - protein, 23 aa, Homo sapiens
RRRTWQPLDSTLSMVEDFYYLPS

SEQ ID NO: 28755 - protein, 32 aa, Homo sapiens
MLMKNTIIAAKKVLRLEEREVLKSKELGVATN

SEQ ID NO: 28756 - protein, 528 aa, Homo sapiens
TTRKFEYHSSMECDLMETDILESLEDLGYKGPLLEDGALSQAVSAGASSPEFTKLCAWLVSELRVLCKLEENVQATNSPSEAEEFQLEVSGLLGEMNCPYLSLTSGDVTKRLLIQKNCLLLLTYLISELEAARMLCVNAPPKKAQEGGGSEVFQELKGICIALGMSKPPANITMFQFFSGIEKKLKETLAKVPPNHVGKPLLKKPMGPAHWEKIEAINQAIANEYEVRRKLLIKRLDVTVQSFGWSDRAKSQTEKLAKVYQPKRSVLSPKTTISVAHLLAARQDLSKILRTSSGSIREKTACAINKVLMGRVPDRGGRPNEIEPPPPEMPPWQKRQDGPQQQTGGRGGGRGGYEHSSYGGRGGHEQGGGRGGRGGYDHGGRGGGRGNKHQGGWTDGGSGGGGGYQDGGYRDSGFQPGGYHGGHSSGGYQGGGYGGFQTSSSYTGSGYQGGGYQQDNRYQDGGHHGDRGGGRGGRGGRGGRGGRAGQGGGWGGRGSQNYHQGGQFEQHFQHGGYQYNHSGFGQGRHYTS

SEQ ID NO: 28757 - protein, 52 aa, Homo sapiens
KPLLKPLEKNDVTVPIKKDSETYTICEESGPFSRLQNRHSQIPKCQPRPQFT

SEQ ID NO: 28758 - protein, 27 aa, Homo sapiens
MDCVCHGCDEPPCMPCGELVLQRVLPS

SEQ ID NO: 28759 - protein, 54 aa, Homo sapiens
MFSLHLNEARDYEVSDSAPHLEGLAEFQENVRKTNNFSAFLANVRKAFTATVYN

SEQ ID NO: 28760 - protein, 16 aa, Homo sapiens
MKEKLLFVSLLIAPDD

SEQ ID NO: 28761 - protein, 37 aa, Homo sapiens
VPVFKEHWSHDPFEAFKDSEGYIYARGAQDMKCVSIQ

SEQ ID NO: 28762 - protein, 181 aa, Homo sapiens
REAELRKQRLEELKQQQKLDRQKELEKKRKLETNPDIKPSNVEPMEKEFGLCKTENKAKSGKQNSKKLYCQELKKVIEASDVVLEVLDARDPLGCRCPQVEEAIVQSGQKKLVLILNKSDLVPKENLESWLNYLKKELPTVVFRASTKPKDKGKITKVSFISGKKCDSFRFWLKYDECTKS

SEQ ID NO: 28763 - protein, 18 aa, Homo sapiens
RWSSPGTALIRVTSSCWT

SEQ ID NO: 28764 - protein, 46 aa, Homo sapiens
LKREWLKKKKMKKGMKNQPSLMGQGSQMHFPSSKQKIVITCFPRWT

SEQ ID NO: 28765 - protein, 287 aa, Homo sapiens
IGSLKEVMTHINEDKRKTEAQKQIFDVVYEVDGCPANLLSSHRSLVQRVETISLGEHPCDRGEQVTLFLFNDCLEIARKRHKVIGTFRSPHGQTRPPASLKHIHLMPLSQIKKVLDIRETEDCHNAFALLVRPPTEQANVLLSFQMTSDELPKENWLKMLCRHVANTICKADAENLIYTADPESFEVNTKDMDSTLSRASRAIKKTSKKVTRAFSFSKTPKRALRRALMTSHGSVEGRSPSSNDKHVMSRLSSTSSLAGIPSPSLVSLPSFFERRSHTLSRSTTHLI

SEQ ID NO: 28766 - protein, 58 aa, Homo sapiens
MPWFKGWKVTRKDGNASGTTLLEALDCILPPTRPTDKPLCLPLQDVYKIGGIGTVPVG

SEQ ID NO: 28767 - protein, 160 aa, Homo sapiens
KALRLNLVGEKLQWFQNHLDPQKKRYSKKDACELIERYLNRFSSELEQIELHNSIRDRQGRRHCSRETVIKQTMERERQQFEGYGLEIPDILNASNLKTFREWDFDLKKLPNIKMRKICANDAIPKTCKRKTIITVDQDLGELELNDESSDSDEEMTAVA

SEQ ID NO: 28768 - protein, 28 aa, Homo sapiens
RGSFSPEELDILSPSYGRQVNENCYCQP

SEQ ID NO: 28769 - protein, 440 aa, Homo sapiens
LPGEEEAMALRVTRNSKINAENKAKINMAGAKRVPTAPAATSKPGLRPRTALGDIGNKVSEQLQAKMPMKKEAKPSATGKVIDKKLPKPLEKVPMLVPVPVSEPVPEPEPEPEPEPVKEEKLSPEPILVDTASPSPMETSGCAPAEEDLCQAFSDVILAVNDVDAEDGADPNLCSEYVKDIYAYLRQLEEEQAVRPKYLLGREVTGNMRAILIDWLVQVQMKFRLLQETMYMTVSIIDRFMQNNCVPKKMLQLVGVTAMFIASKYEEMYPPEIGDFAFVTDNTYTKHQIRQMEMKILRALNFGLGRPLPLHFLRRASKIGEVDVEQHTLAKYLMELTMLDYDMVHFPPSQIAAGAFCLALKILDNGEWTPTLQHYLSYTEESLLPVMQHLAKNVVMVNQGLTKHMTVKNKYATSKHAKISTLPQLNSALVQDLAKAVAKV

SEQ ID NO: 28770 - protein, 51 aa, Homo sapiens
LDPSFPRMNLLTRTTEGKKRQLYMVSKELRNVLLNNSEKMKVPAAQTLSAV

SEQ ID NO: 28771 - protein, 39 aa, Homo sapiens
RPTTFRSRPVANVATLPSARESITGVPRLKDEIPPELVE

SEQ ID NO: 28772 - protein, 91 aa, Homo sapiens
KFAELKEKIDRGSGKKLEDGPKFLKSGDAAIVDMVPGKPIVESFSDYPPLGHFAVRDMRQTVAVGVIKAVDKKAAGGGKVTKSAQTAQKAK

SEQ ID NO: 28773 - protein, 8 aa, Homo sapiens
LARKPSAV

SEQ ID NO: 28774 - protein, 41 aa, Homo sapiens
LRNWLSGASWTSQTRTKCTGLFLREPKKEPSSSPWRTRRCP

SEQ ID NO: 28775 - protein, 114 aa, Homo sapiens
LLLREGKMSESSSKSSQPLASKQEKDGTEKRGRGRPRKQPPVSPGTALVGSQKEPSEVPTPKRPRGRPKGSKNKGAAKTRKTTTTPGRKPRGRPKKLEKEEEEGISQESSEEEQ

SEQ ID NO: 28776 - protein, 79 aa, Homo sapiens
VEEEEERVKQMHQINSSGVLSLPELSQKTLKAPTLQKEILALIPNQNALLKDLDILHNSSQMKSMSTFIEEAYKKLDAS

SEQ ID NO: 28777 - protein, 131 aa, Homo sapiens
KCLFIMPEPAKSAPAPKKGSKKAVTKAQKKDGKKRKRSRKESYSVYVYKVLKQVHPDTGISSKAMGIMNSFVNDIFERIAGEASRLAHYNKRSTITSREIQTAVRLLLPGELAKHAVSEGTKAVTKYTSSK

SEQ ID NO: 28778 - protein, 34 aa, Homo sapiens
LRSVVDSAGLRQMQAWGSLLSGLRREEWRSPSSH

SEQ ID NO: 28779 - protein, 11 aa, Homo sapiens
RRATPCMCTRC

SEQ ID NO: 28780 - protein, 13 aa, Homo sapiens
LSREMAAVWLQRR

SEQ ID NO: 28781 - protein, 229 aa, Homo sapiens
LQAANERNVSTRQGMDLSANQDEETDQETFQLEIDRDTKKCAFRTHTGKYWTLTATGGVQSTASSKNASCYFDIEWRDRRITLRASNGKFVTSKKNGQLAASVETAGDSELFLMKLINRPIIVFRGEHGFIGCRKVTGTLDANRSSYDVFQLEFNDGAYNIKDSTGKYWTVGSDSAVTSSGDTPVDFFFEFCDYNKVAIKVGGRYLKGDHAGVLKASAETVDPASLWEY

SEQ ID NO: 28782 - protein, 13 aa, Homo sapiens
IVAEHPRPAEVPP

SEQ ID NO: 28783 - protein, 21 aa, Homo sapiens
KRLSPRWREKRNSSVSSLLVA

SEQ ID NO: 28784 - protein, 26 aa, Homo sapiens
LKRRLQEGQHMPEKDEFQLDRPEARQ

SEQ ID NO: 28785 - protein, 82 aa, Homo sapiens
KKFLQEFYQDDELGKKQFKYGNQLVRLAHREQVALYVDLDDVAEDDPELVDSICENARRYAKLFADAVQELLPQYKEREVSG

SEQ ID NO: 28786 - protein, 191 aa, Homo sapiens
RERGGGDTMSSPSPGKRRMDTDVVKLIESKHEVTILGGLNEFVVKFYGPQGTPYEGGVWKVRVDLPDKYPFKSPSIGFMNKIFHPNIDEASGTVCLDVINQTWTALYDLTNIFESFLPQLLAYPNPIDPLNGDAAAMYLHRPEEYKQKIKEYIQKYATEEALKEQEEGTGDSSSESSMSDFSEDEAQDMEL

SEQ ID NO: 28787 - protein, 97 aa, Homo sapiens
LQGLASGRGRQAVEPPAPVPLPLPLPLPLPLLLLDVSHRRVCCLPAGLAQQQPENLLQVSQSDQSQFRSCYPGAGWGNAQRSVHILSGSPSSGHTGR

SEQ ID NO: 28788 - protein, 661 aa, Homo sapiens
IGEPFLNVNCEHIKSFDKNLYRQLISYPQEVIPTFDMAVNEIFFDRYPDSILEHQIQVRPFNALKTKNMRNLNPEDIDQLITISGMVIRTSQLIPEMQEAFFQCQVCAHTTRVEMDRGRIAEPSVCGRCHTTHSMALIHNRSLFSDKQMIKLQESPEDMPAGQTPHTVILFAHNDLVDKVQPGDRVNVTGIYRAVPIRVNPRVSNVKSVYKTHIDVIHYRKTDAKRLHGLDEEAEQKLFSEKRVELLKELSRKPDIYERLASALAPSIYEHEDIKKGILLQLFGGTRKDFSHTGRGKFRAEINILLCGDPGTSKSQLLQYVYNLVPRGQYTSGKGSSAVGLTAYVMKDPETRQLVLQTGALVLSDNGICCIDEFDKMNESTRSVLHEVMEQQTLSIAKAGIICQLNARTSVLAAANPIESQWNPKKTTIENIQLPHTLLSRFDLIFLLLDPQDEAYDRRLAHHLVALYYQSEEQAEEELLDMAVLKDYIAYAHSTIMPRLSEEASQALIEAYVDMRKIGSSRGMVSAYPRQLESLIRLAEAHAKVRLSNKVEAIDVEEAKRLHREALKQSATDPRTGIVDISILTTGMSATSRKRKEELAEALKKLILSKGKTPALKYQQLFEDIRGQSDIAITKDMFEEALRALADDDFLTVTGKTVRLL

SEQ ID NO: 28789 - protein, 59 aa, Homo sapiens
IANGHMVCEEGDKLTYSKYGRFCHEVKINYSPYVNYFTRVYWNRSYFVYKINTVISFQS

SEQ ID NO: 28790 - protein, 244 aa, Homo sapiens
MKEQDLLETKLRSYEREKTSFGPALEETQWEVCQKSGEISLLKQQLKESQTEVNAKASEILGLKAQLKDTRGKLEGLELRTQDLEGALRTKGLELEVCENELQRKKNEAELLREKVNLLEQELQELRAQAALARDMGPPTFPEDVPALQRELERLRAELREERQGHDQMSSGFQHERLVWKEEKEKVIQYQKQLQQSYVAMYQRNQRLEKALQQLARGDSAGEPLEVDLEGADIPYEDIIATEI

SEQ ID NO: 28791 - protein, 25 aa, Homo sapiens
VATGAARPAKIHGRPSPKRVRGPLS

SEQ ID NO: 28792 - protein, 296 aa, Homo sapiens
LSRPHGDTAKKPIIGILMQKCRNKVMKNYGRYYIAASYVKYLESAGARVVPVRLDLTEKDYEILFKSINGILFPGGSVDLRRSDYAKVAKIFYNLSIQSFDDGDYFPVWGTCLGFEELSLLISGECLLTATDTVDVAMPLNFTGGQLHSRMFQNFPTELLLSLAVEPLTANFHKWSLSVKNFTMNEKLKKFFNVLTTNTDGKIEFISTMEGYKYPVYGVQWHPEKAPYEWKNLDGISHAPNAVKTAFYLAEFFVNEARKNNHHFKSESEEEKALIYQFSPIYTGNISSFQQCYIFD

SEQ ID NO: 28793 - protein, 443 aa, Homo sapiens
LFVGLLLTWESGQVLGDQTVSDNELQEMSNQGSKYVNKEIQNAVNGVKQIKTLIEKTNEERKTLLSNLEEAKKKKEDALNETRESETKLKELPGVCNETMMALWEECKPCLKQTCMKFYARVCRSGSGLVGRQLEEFLNQSSPFYFWMNGDRIDSLLENDRQQTHMLDVMQDHFSRASSIIDELFQDRFFTREPQDTYHYLPFSLPHRRPHFFFPKSRIVRSLMPFSPYEPLNFHAMFQPFLEMIHEAQQAMDIHFHSPAFQHPPTEFIREGDDDRTVCREIRHNSTGCLRMKDQCDKCREILSVDCSTNNPSQAKLRRELDESLQVAERLTRKYNELLKSYQWKMLNTSSLLEQLNEQFNWVSRLANLTQGEDQYYLRVTTVASHTSDSDVPSGVTEVVVKLFDSDPITVTVPVEVSRKNPKFMETVAEKALQEYRKKHREE

SEQ ID NO: 28794 - protein, 22 aa, Homo sapiens
LARGEERGRVWARGTTGCPRAR

SEQ ID NO: 28795 - protein, 74 aa, Homo sapiens
IPEEHRQAIPESEAEDQEREPPSATVSPGQIPESDPADLSPRDTPQGEDMLNAIRRGVKLKKTTTNDRSAPRFS

SEQ ID NO: 28796 - protein, 6 aa, Homo sapiens
IYRHQL

SEQ ID NO: 28797 - protein, 25 aa, Homo sapiens
KLPNWQMEVSKLNDIALPPTPAPTQ

SEQ ID NO: 28798 - protein, 22 aa, Homo sapiens
VRVVPLLPGLVIGGNPVSAERL

SEQ ID NO: 28799 - protein, 21 aa, Homo sapiens
TPPGRWSTLGLVPPSCRTQCC

SEQ ID NO: 28800 - protein, 605 aa, Homo sapiens
RRSEPGDSRSAMAPIGLKAVVGEKIMHDVIKKVKKKGEWKVLVVDQLSMRMLSSCCKMTDIMTEGITIVEDINKRREPLPSLEAVYLITPSEKSVHSLISDFKDPPTAKYRAAHVFFTDSCPDALFNELVKSRAAKVIKTLTEINIAFLPYESQVYSLDSADSFQSFYSPHKAQMKNPILERLAEQIATLCATLKEYPAVRYRGEYKDNALLAQLIQDKLDAYKADDPTMGEGPDKARSQLLILDRGFDPSSPVLHELTFQAMSYDLLPIENDVYKYETSGIGEARVKEVLLDEDDDLWIALRHKHIAEVSQEVTRSLKDFSSSKRMNTGEKTTMRDLSQMLKKMPQYQKELSKYSTHLHLAEDCMKHYQGTVDKLCRVEQDLAMGTDAEGEKIKDPMRAIVPILLDANVSTYDKIRIILLYIFLKNGITEENLNKLIQHAQIPPEDSEIITNMAHLGVPIVTDSTLRRRSKPERKERISEQTYQLSRWTPIIKDIMEDTIEDKLDTKHYPYISTRSSASFSTTAVSARYGHWHKNKAPGEYRSGPRLIIFILGGVSLNEMRCAYEVTQANGKWEVLIGSTHILTPQKLLDTLKKLNKTDEEISS

SEQ ID NO: 28801 - protein, 137 aa, Homo sapiens
VLIRLSPRHIPRHRQAVDSPAASFCRGLLSQPGPSSLMPVLGYDPPQLYLTQLREAFGDLALFFYDQHGGEVIGVLWKPTSFQPQPFKASSTKGRMVMSRGGELVMVPNVEAILEDFAVLGEGLVQTVEARSERWTV

SEQ ID NO: 28802 - protein, 29 aa, Homo sapiens
KPILQRGDTSFQRSGKLARPSLGWSIRMA

SEQ ID NO: 28803 - protein, 22 aa, Homo sapiens
LPRVAELWEEKPVCLCIASLQR

SEQ ID NO: 28804 - protein, 6 aa, Homo sapiens
KLALGN

SEQ ID NO: 28805 - protein, 14 aa, Homo sapiens
LMGSMSITWELAAL

SEQ ID NO: 28806 - protein, 20 aa, Homo sapiens
MTIEMRTTRRCCGGAVEVRR

SEQ ID NO: 28807 - protein, 157 aa, Homo sapiens
VRLLQDSVDFSLADAINTEFKNTRTNEKVELQELNDRFANYIDKVRFLEQQNKILLAELEQLKGQGKSRLGDLYEEEMRELRRQVDQLTNDKARVEVERDNLAEDIMRLREKLQEEMLQREEAENTLQSFRQVCRLSSHSQPPDPTQHNPRAILKVA

SEQ ID NO: 28808 - protein, 15 aa, Homo sapiens
LVCPSRLLVYNLLEM

SEQ ID NO: 28809 - protein, 41 aa, Homo sapiens
KLLMLKMYHLSFQHLTTTSSVSTGISSSLYLSYRPKCHLSL

SEQ ID NO: 28810 - protein, 24 aa, Homo sapiens
KTHLFTILVLCKSSYLSGSQLSHL

SEQ ID NO: 28811 - protein, 21 aa, Homo sapiens
IPDLIATRPRRPPDVHSRWAP

SEQ ID NO: 28812 - protein, 961 aa, Homo sapiens
RSNCPKCGSTGESGNANYRYKLSLKVAESNKLFVITVFGSCLDTFFGLTATGLHRYIQDPNKIPETLDNDTTQNLLTKAVETCFVGQSFIFGVTNFENQPGQGSDASNFLQQCSDHKRKAKALVACQIVLPDPGIAGFTVIDYFHQLLQTFNFRKLQCDSQAPNNHLLALDHSNSDLSSIYTSDSTSDFFKSCSKDTFSKFWQPSLEFTCIVSQLTDNDDFSASEQSKAFGTLQQNRKSISIAEATGSSSCHDPIQDSWSLVSYMDKKSTAEKLGKELGLQAKELSAVHSSHHEIGVNDSNLFSLEMREPLESSNTKSFHSAVEIKNRSQHELPCFQHHGIDTPTSLQKRSACCPPSLLRLEETASSSQDGDPQIWDDLPFSESLNKFLAVLESEIAVTQADVSSRKHHVDNDIDKFHADHSRLSVTPQRTTGALHTPPIALRSSQVIVKANCSKDDFLFNCKGNLSPSVEKESQPDNKVEAVSVNHNGRDMSEYFLPNPYLSALSSSSKDLETIVTLKKTIRISPHRESDHSSLNNKYLNGCGEISVSEMNEKLTTLCYRKYNDVSDLCKLENKQYCRWSKNQDDSFTICRKLTYPLETLCNSPNRSTNTLKEMPWGHINNNVTQSYSIGYEGSYDASADLFDDIAKEMDIATEITKKSQDILLKWGTSLAESHPSESDFSLRSLSEDFIQPSQKLSLQSLSDSRHSRTCSPTPHFQSDSEYNFENSQDFVPCSQSTPISGFHQTRIHGINRAFKKPVFYSDLDGNYEKIRIFPENDKQQASPSCPKNIKTPSQKIRSPIVSGVSQPDVFNHYPFAECHETDSDEWVPPTTQKIFPSDMLGFQGIGLGKCLAAYHFPDQQELPRKKLKHIRQGTNKGLIKKKLKNMLAAVVTKKKTHKYNCKSSGWISKCPDIQVLAAPQLHPILGPDSCSEVKCCLPFSEKGPPSVCETRSAWSPELFS

SEQ ID NO: 28813 - protein, 31 aa, Homo sapiens
MTDGCLSTTDLFWTVKTKSLMYCSWETPWCS

SEQ ID NO: 28814 - protein, 28 aa, Homo sapiens
LTQLSKGIFREQNDKTYCQPCFNKLFPL

SEQ ID NO: 28815 - protein, 20 aa, Homo sapiens
KRSIQVFIQIGIKIINNVCH

SEQ ID NO: 28816 - protein, 446 aa, Homo sapiens
LLAPTRFALEMFNRGRAAGTRAVLGLVRGRVRRAGQGSLYSLEATLEEPPCNDPMVCRLPVSKKTLLCSFQVLDELGRHVLLRKDCGPVDTKVPGAGEPKSAFTQGSAMISSLSQNHPDNRNETFSSVISLLNEDPLSQDLPVKMASIFKNFVITYNRTYESKEEARWRLSVFVNNMVRAQKIQALDRGTAQYGVTKFSDLTEEEFRTIYLNTLLRKEPGNKMKQAKSVGDLAPPEWDWRSKGAVTKVKDQGMCGSCWAFSVTGNVEGQWFLNQGTLLSLSEQELLDCDKMDKACMGGLPSNAYSAIKNLGGLETEDDYSYQGHMQSCNFSAEKAKVYINDSVELSQNEQKLAAWLAKRGPISVAINAFGMQFYRHGISRPLRPLCSPWLIDHAVLLVGYGNRSDVPFWAIKNSWGTDWGEKGYYYLHRGSGACGVNTMASSAVVD

SEQ ID NO: 28817 - protein, 6 aa, Homo sapiens
VPGLQA

SEQ ID NO: 28818 - protein, 12 aa, Homo sapiens
VFEPSCFTGLPR

SEQ ID NO: 28819 - protein, 25 aa, Homo sapiens
RLCVLAGRACSFLPWQPRAMAIIAL

SEQ ID NO: 28820 - protein, 25 aa, Homo sapiens
LQTDLSVLHEHTCGRQMTVLYPVLL

SEQ ID NO: 28821 - protein, 42 aa, Homo sapiens
KTYELLNCDKHKSILLKNGRDPGEARPDITHQVTPGTVLTTL

SEQ ID NO: 28822 - protein, 33 aa, Homo sapiens
RRVVHVSTSQKGIVLRELSLWLDPLMPSSKPLL

SEQ ID NO: 28823 - protein, 6 aa, Homo sapiens
LSSQDV

SEQ ID NO: 28824 - protein, 6 aa, Homo sapiens
TALPTR

SEQ ID NO: 28825 - protein, 26 aa, Homo sapiens
LQRTGKRNRPDGPLSPNRALCGAPWS

SEQ ID NO: 28826 - protein, 21 aa, Homo sapiens
IPRRVFTGDSELWLLQFPTTL

SEQ ID NO: 28827 - protein, 33 aa, Homo sapiens
MFACSKFVSTPSLTLLKGRMIQNSNVHVKMERP

SEQ ID NO: 28828 - protein, 69 aa, Homo sapiens
MNLHFLCQRASLNLNFIMAQRRTVQLQANSQKKNLLRYKRKITEKKRKEPQRSCSVQSQILLLLLWLIG

SEQ ID NO: 28829 - protein, 10 aa, Homo sapiens
RFIRGAIIAN

SEQ ID NO: 28830 - protein, 89 aa, Homo sapiens
LHKMPGEATETVPATEQELPQPQAETGSGTESDSDESVPELEEQDSTQATTQQAQLAAAAEIDEEPVSKAKQSRSEKKMSTRALLQILT

SEQ ID NO: 28831 - protein, 25 aa, Homo sapiens
IKAVDKKAAGAGKVTRFAQKSQKAK

SEQ ID NO: 28832 - protein, 13 aa, Homo sapiens
LRHLCCKIEAVLW

SEQ ID NO: 28833 - protein, 28 aa, Homo sapiens
RPGCRCKNSNTVCCKVPTVPPRNFEKPT

SEQ ID NO: 28834 - protein, 42 aa, Homo sapiens
IEQSELQPKISKSLMQTIRCLTSKDFMAEHSMTPSFKRRRKT

SEQ ID NO: 28835 - protein, 50 aa, Homo sapiens
KRGFAGSLNGKLEQRGKNIASVGDAVQLPKGVRNGNAEAWEKGSGGGRRG

SEQ ID NO: 28836 - protein, 13 aa, Homo sapiens
LLFLPSLAPWLIS

SEQ ID NO: 28837 - protein, 25 aa, Homo sapiens
TRRISVSLSWTKCSSFRGLSGASTQ

SEQ ID NO: 28838 - protein, 27 aa, Homo sapiens
KRRTLVGLLWSTLWTEKHRGYRTQLLP

SEQ ID NO: 28839 - protein, 14 aa, Homo sapiens
RGRNGGRLEPLPSP

SEQ ID NO: 28840 - protein, 84 aa, Homo sapiens
KGDIYKTRGGGQSVQFTDIETLKQESPNGSRKRRSSTVAPAQPDGAESEWTDVETRCSVAVEMRAGSQLGPGYQHHAQPKRKKP

SEQ ID NO: 28841 - protein, 40 aa, Homo sapiens
LQEFLQTLREGDLTNLLQNQAVKGKVAGALLRAIFKGNNN

SEQ ID NO: 28842 - protein, 66 aa, Homo sapiens
KFGLMKKAYELSVLCDCEIALIIFNSSNKLFQYASTDMDKVLLKYTEYNEPHESRTNSDIVEVTHI

SEQ ID NO: 28843 - protein, 51 aa, Homo sapiens
MGPVAAKQKVRSRTHVHWMSESGIIDVFLLTGPTPSDVFKQYSHLTDIGEK

SEQ ID NO: 28844 - protein, 23 aa, Homo sapiens
VWSVTFQNQLFLELYLLQQCLGD

SEQ ID NO: 28845 - protein, 61 aa, Homo sapiens
TPDQTKVFSASYDRSLRVWSMDNMICTQTLLRHQGSVTALAVSRGRLFSGAVDSTVKVWTC

SEQ ID NO: 28846 - protein, 12 aa, Homo sapiens
MRLLLSSSRGPS

SEQ ID NO: 28847 - protein, 38 aa, Homo sapiens
MQTWVSEGYFPDGVYCRKLDPPGGQFYNSKRIDFDLYT

SEQ ID NO: 28848 - protein, 38 aa, Homo sapiens
TAPPSSPASRERSTSTSSSSAQMTSGCLPSCASPPGMP

SEQ ID NO: 28849 - protein, 190 aa, Homo sapiens
KPLKMADDLDFETGDAGASATFPMQCSALRKNGFVVLKGRPCKIVEMSTSKTGKHGHAKVHLVGIDIFTGKKYEDICPSTHNMDVPNIKRNDFQLIGIQDGYLSLLQDSGEVREDLRLPEGDLGKEIEQKYDCGEEILVWCLPPCFCAQLCSVRFFLSSDISWLSLLLLQITVLSAMTEEAAVAIKAMAK

SEQ ID NO: 28850 - protein, 12 aa, Homo sapiens
LGQTSEDFSDGS

SEQ ID NO: 28851 - protein, 18 aa, Homo sapiens
LAVFAFGRGQSLLFQVPA

SEQ ID NO: 28852 - protein, 32 aa, Homo sapiens
IAMRSLGFIFKGMKQLRLFWKTFWQLVKLEYN

SEQ ID NO: 28853 - protein, 25 aa, Homo sapiens
LSFNLPPSMLLSVQKCCMPSSLKTC

SEQ ID NO: 28854 - protein, 38 aa, Homo sapiens
VGPNEALVVSGGCCGSDYKQYVFGGWAWAWWCISDTQR

SEQ ID NO: 28855 - protein, 40 aa, Homo sapiens
LPLWMIERIWCTRRSWPSRLSDTTCSGTEPAVSSKKWWSQ

SEQ ID NO: 28856 - protein, 214 aa, Homo sapiens
LKELGGLSEGKKVLVTAAAGGTGQFAMQLSKKAKCHVIGTCSSDEKSAFLKSLGCDRPINYKTEPVGTVLKQEYPEGVDVVYESVGGAMFDLAVDALATKGRLIVIGFISGYQTPTGLSPVKAGTLPAKLLKKSASVQGFFLNHYLSKYQAAMSHLLEMCVSGDLVCEVDLGDLSPEGRFTGLESIFRAVNYMYMGKNTGKIVVELPHSVNSKL

SEQ ID NO: 28857 - protein, 17 aa, Homo sapiens
TPTRVEVLITPRNSITI

SEQ ID NO: 28858 - protein, 40 aa, Homo sapiens
RPPDVQVPPLPTPGPSLGQRRRRKRWTSRTRPRGSSAAAS

SEQ ID NO: 28859 - protein, 145 aa, Homo sapiens
RPHVTVKDVNQQEFVRALAAFLKKSGKLKVPEWVDTVKLAKHKELAPYDENWFYTRAASTARHLYLRGGAGVGSMTKIYGGRQRNGVMPSHFSRGSKSVARRVLQALEGLKMVEKDQDGGRKLTPQGQRDLDRIAGQVAAANKKH

SEQ ID NO: 28860 - protein, 37 aa, Homo sapiens
VEARTRGGAGTAAAAAAAGGTLIPVLRTPRASPWLTS

SEQ ID NO: 28861 - protein, 10 aa, Homo sapiens
RGGTWREAAP

SEQ ID NO: 28862 - protein, 190 aa, Homo sapiens
LPAPFLWLAPSCQPTMSSQIRQNYSTDVEAAVNSLVNLYLQASYTYLSLGFYFDRDDVALEGVSHFFRELAEEKREGYERLLKMQNQRGGRALFQDIKKPAEDEWGKTPDAMKAAMALEKKLNQALLDLHALGSARTDPHLCDFLETHFLDEEVKLIKKMGDHLTNLHRLGGPEAGLGEYLFERLTLKHD

SEQ ID NO: 28863 - protein, 44 aa, Homo sapiens
RAARGLRRVTETLRLCSQDDRVGDSSTSGGRDPRHQALWEVEHR

SEQ ID NO: 28864 - protein, 20 aa, Homo sapiens
LEQLESEETLKRIEQIAQQL

SEQ ID NO: 28865 - protein, 20 aa, Homo sapiens
LCGESDIHVDANGIDNVENA

SEQ ID NO: 28866 - protein, 107 aa, Homo sapiens
TPAARRPGRGETRKRMSELEKAMVALIDVFHQYSGREGDKHKLKKSELKELINNELSHFLEEIKEQEVVDKVMETLDNDGDGECDFQEFMAFVAMVTTACHEFFEHE

SEQ ID NO: 28867 - protein, 199 aa, Homo sapiens
ISEDTHEDHDTSTENTDESNHDPQFEPIVSLPEQEIKTLEEDEEELFKMRAKLFRFASENDLPEWKERGTGDVKLLKHKEKGAIRLLMRRDKTLKICANHYITPMMELKPNAGSDRAWVWNTHADFADECPKPELLAIRFLNAENAQKFKTKFEECRKEIEEREKKAGSGKNDHAEKVAEKLEALSVKEETKEDAEEKQ

SEQ ID NO: 28868 - protein, 66 aa, Homo sapiens
KDLKEQHDQKVCEREMQRITLPLSAFTNPTCEIVDEKTVVVHTSQTPVDPQEGTTPLMGQAGTPGA

SEQ ID NO: 28869 - protein, 37 aa, Homo sapiens
IQKTIRKMVFYGKYLSVGLNVKERGRERNPFIMFSLP

SEQ ID NO: 28870 - protein, 45 aa, Homo sapiens
LEWNQKGREKISEKQGQIKPWHFSLLIPPASSEKGTMPPEPAWWP

SEQ ID NO: 28871 - protein, 235 aa, Homo sapiens
MFHATVATQTQFFHVKVLNINLKRKFIKKRIIIISNYSKRNSLLEVNEASSVSEAGPDQTFEVPKDIIRRAKKIPKINILHKQTSGYIVYGLFMLHTKIVNRKTTIYEIQDKTGSMAVVGKGECHNIPCEKGDKLRLFCFRLRKRENMSKLMSEMHSFIQIQKNTNQRSHDSRSMALPQEQSQHPKPSEASTTLPESHLKTPQMPPTTPSSSSFTKVQYPGSHDSYLPNINYKDH

SEQ ID NO: 28872 - protein, 57 aa, Homo sapiens
MGFGLFDSTVCVPQCQGNNPTLSQLNRSQDLTANKRPSLLNSMEETSFVAATWEDGC

SEQ ID NO: 28873 - protein, 551 aa, Homo sapiens
MLFQNFPHHVNPVFGGTFSPQIGLAQTQHHQQPPPPAPAPQPAQPAQPPQAQPPQQRRSPASPSQAPYAQRSAAAAYGHQPIMTSKPSSSSAVAAAAAAAAASSASSSWNTHQSVNAAWSAPSNPWGGLQAGRDPRRAVGVGVGVGVGVPSPLNPISPLKKPFSSNVIAPPKFPRAAPLTSKSWMEDNAFRTDNGNNLLPFQDRSRPYDTFNLHSLENSLMDMIRTDHEPLKGRMGINFHHPGTDNIMALNSRSSLFPFEDAFLDDSHGDQALSSGLSSPTRCQNGERVERYSRKVFVGGLPPDIDEDEITASFRRFGPLVVDWPHKAESKSYFPPKGYAFLLFQEESSVQALIDACLEEDGKLYLCVSSPTIKDKPVQIRPWNLSDSDFVMDGSQPLDPRKTIFVGGVPRPLRAVELAMIMDRLYGGVCYAGIDTDPELKYPKGAGRVAFSNQQSYIAAISARFVQLQHNDIDKRVEVKPYVLDDQMCDECQGTRCGGKFAPFFCANVTCLQYYCEYCWASIHSRAGREFHKPLVKEGGDRPRHVPFRWS

SEQ ID NO: 28874 - protein, 21 aa, Homo sapiens
MSVTWLARPGAQPHVESSPLL

SEQ ID NO: 28875 - protein, 227 aa, Homo sapiens
MPVNGAHKDADLWSSHDKMLAQPLKDSDVEVYNIIKKESNRQRVGLELIASENFASRAVLEALGSCLNNKYSEGYPGQRYYGGTEFIDELETLCQKRALQAYKLDPQCWGVNVQPYSGSPANFAVYTALVEPHGRIMGLDLPDGGHLTHGFMTDKKKISATSIFFESMPYKVNPDTGYINYDQLEENARLFHPKLIIAGDARGGKSPCSPVAWCLLQNEDGKMFAPC

SEQ ID NO: 28876 - protein, 368 aa, Homo sapiens
MQFRFAHPTPRPSEKCSKWILLEDYRKRVQNVTEFDDSLLRNFTLVTQHPEVIYTNQNVVWSKFETIFFTISGLIHYAPVFRDYVFRSMQEFYEDNVLYMEIRARLLPVYELSGEHHDEEWSVKTYQEVAQKFVETHPEFIGIKIIYSDHRSKDVAVIAESIRMAMGLRIKFPTVVAGFDLVGHEDTGHSLHDYKEALMIPAKDGVKLPYFFHAGETDWQGTSIDRNILDALMLNTTRIGHGFALSKHPAVRTYSWKKDIPIEVCPISNQVLKLVSDLRNHPVATLMATGHPMVISSDDPAMFGAKGLSYDFYEVFMGIGGMKADLRTLKQLAMNSIKYSTLLESEKNTFMEIWKKRWDKFIADVATK

SEQ ID NO: 28877 - protein, 12 aa, Homo sapiens
MRQLAQTGSLGR

SEQ ID NO: 28878 - protein, 49 aa, Homo sapiens [sequence omitted]

SEQ ID NO: 28879 - protein, 9 aa, Homo sapiens
MLTLPPCQQ

SEQ ID NO: 28880 - protein, 375 aa, Homo sapiens [sequence omitted]

SEQ ID NO: 28881 - protein, 9 aa, Homo sapiens
LCDLIAALS

SEQ ID NO: 28882 - protein, 178 aa, Homo sapiens
TPRSLPGRPAVCNMTLEEFSAGEQKTERMDKVGDALEEVLSKALSQRTITVGVYEAAKLLNVDPDNVVLCLLAADEDDDRDVALQIHFTLIQAFCCENDINILRVSNPGRLAELLLLETDAGPAASEGAEQPPDLHCVLVTNPHSSQWKDPALSQLICFCRESRYMDQWVPVINLPER

SEQ ID NO: 28883 - protein, 102 aa, Homo sapiens
LAQPAQAPGTLRRVPVPTSHSGSLALGLPHLPSPKQRAKFKRVGKEKCRPVLAGGGSGSAGTPLQHSFLTEVTDVYEMEGGLLNLLNDFHSGRLQAFAGRPQ

SEQ ID NO: 28884 - protein, 60 aa, Homo sapiens
KDSGKMKGHERRLGKVIPVLQTKTRTNVPTFSQSNLEQQKQLYLRSVIAHIEDPEDTNQG

SEQ ID NO: 28885 - protein, 36 aa, Homo sapiens
KGFSPALQYYTDPLVSLENVLLTALPNHSSSPETTA

SEQ ID NO: 28886 - protein, 45 aa, Homo sapiens
LPAPYWAPRERWLGSLRRPSLVHGYPVLAWHSARCWCQAWTEEPR

SEQ ID NO: 28887 - protein, 20 aa, Homo sapiens
LIFFFNREGLTIFGRLGAKD

SEQ ID NO: 28888 - protein, 35 aa, Homo sapiens
LTPDVDDGMLYEFFVKVYPSCRGGKVVLDQTGVSK

SEQ ID NO: 28889 - protein, 381 aa, Homo sapiens
RMKLLARALRLCEFGRQASSRRLVAGQGCVGPRRGCCAPVQVVGPRADLPPCGACITGRIMRPDDANVAGNVHGGTILKMIEEAGAIISTRHCNSQNGERCVAALARVERTDFLSPMCIGEVAHVSAEITYTSKHSVEVQVNVMSENILTGAKKLTNKATLWYVPLSLKNVDKVLEVPPVVYSRQEQEEEGRKRYEAQKLERMETKWRNGDIVQPVLNPEPNTVSYSQSSLIHLVGPSDCTLHGFVHGGVTMKLMDEVAGIVAARHCKTNIVTASVDAINFHDKIRKGCVITISGRMTFTSNKSMEIEVLVDADPVVDSSQKRYRAASAFFTYVSLSQEGRSLPVPQLVPETEDEKKRFEEGKGRYLQMKAKRQGHAEPQP

SEQ ID NO: 28890 - protein, 21 aa, Homo sapiens
LSQARGLSGSSCCAGGSWPPL

SEQ ID NO: 28891 - protein, 69 aa, Homo sapiens
MGIMNSFVNDIFERIAGEASRLAHYNKRSTITSREIQTAVRLLLPGKLAKHAVSEGTKAVTKYTSSNIF

SEQ ID NO: 28892 - protein, 8 aa, Homo sapiens
RVPSLRKT

SEQ ID NO: 28893 - protein, 52 aa, Homo sapiens
RDEKDGGAREAESRAHTGSSSRGKRKRQQHPKKERAGVSTVQKAKKKQKKRD

SEQ ID NO: 28894 - protein, 174 aa, Homo sapiens
VGARSSQGAGGQRARPASPGRQNPALRGREGRRARRSLELSANLGAPMTAAATATVLKEGVLEKRSGGLLQLWKRKRCVLTERGLQLFEAKGTGGRPKELSFARIKAVECVESTGRHIYFTLVTEGGGEIDFRCPLEDPGWNAQITLGLVKFKNQQAIQTVRARQSLGTGTLVS

SEQ ID NO: 28895 - protein, 6 aa, Homo sapiens
LPMVKW

SEQ ID NO: 28896 - protein, 315 aa, Homo sapiens
LMLVSGRRRLLTVLLQAQKWPFQPSRDMRLVQFRAPHLVGPHLGLETGNGGGVINLNAFDPTLPKTMTQFLEQGEATLSVARRALAAQLPVLPRSEVTFLAPVTRPDKVVCVGMNYVDHCKEQNVPVPKEPIIFSKFASSIVGPYDEVVLPPQSQEVDWEVELAVVIGKKGKHIKATDAMAHVAGFTVAHDVSARDWQMRRNGKQWLLGKTFDTFCPLGPALVTKDSVADPHNLKICCRVNGEVVQSGNTNQMVFKTEDLIAWVSQFVTFYPGDVILTGTPPGVGVFRKPPVFLKKGDEVQCEIEELGVIINKVV

SEQ ID NO: 28897 - protein, 57 aa, Homo sapiens
LSTLVREESSSSDEDDRGEMADFGAMGCVDIMPLDVALENLNLKESNKGNEPPPPPL

SEQ ID NO: 28898 - protein, 1209 aa, Homo sapiens
LGAHGSLNRGAWRQYQSARRAVGRQPRDSLGRTAAAGAPQPRAGPASRSATGERGRRGGGVAPGEVAPGELETMAKMEVKTSLLDNMIGVGDMVLLEPLNEETFINNLKKRFDHSEIYTYIGSVVISVNPYRSLPIYSPEKVEEYRNRNFYELSPHIFALSDEAYRSLRDQDKDQCILITGESGAGKTEASKLVMSYVAAVCGKGAEVNQVKEQLLQSNPVLEAFGNAKTVRNDNSSRFGKYMDIEFDFKGDPLGGVISNYLLEKSRVVKQPRGERNFHVFYQLLSGASEELLNKLKLERDFSRYNYLSLDSAKVNGVDDAANFRTVRNAMQIVGFMDHEAESVLAVVAAVLKLGNIEFKPESRVNGLDESKIKDKNELKEICELTGIDQSVLERAFSFRTVEAKQEKVSTTLNVAQAYYARDALAKNLYSRLFSWLVNRINESIKAQTKVRKKVMGVLDIYGFEIFEDNSFEQFIINYCNEKLQQIFIELTLKEEQEEYIREDIEWTHIDYFNNAIICDLIENNTNGILAMLDEECLRPGTVTDETFLEKLNQVCATHQHFESRMSKCSRFLNDTSLPHSCFRIQHYAGKVLYQVEGFVDKNNDLLYRDLSQAMWKASHALIKSLFPEGNPAKINLKRPPTAGSQFKASVATLMKNLQTKNPNYIRCIKPNDKKAAHIFNEALVCHQIRYLGLLENVRVRRAGYAFRQAYEPCLERYKMLCKQTWPHWKGPARSGVEVLFNELEIPVEEYSFGRSKIFIRNPRTLFKLEDLRKQRLEDLATLIQKIYRGWKCRTHFLLMKKSQIVIAAWYRRYAQQKRYQQTKSSALVIQSYIRGWKARKILRELKHQKRCKEAVTTIAAYWHGTQARRELRRLKEEARNKHAIAVIWAYWLGSKARRELKRLKEEARRKHAVAVIWAYWLGLKVRREYRKFFRANAGKKIYEFTLQRIVQKYFLEMKNKMPSLSPIDKNWPSRPYLFLDSTHKELKRIFHLWRCKKYRDQFTDQQKLIYEEKLEASELFKDKKALYPSSVGQPFQGAYLEINKNPKYKKLKDAIEEKIIIAEVVNKINRANGKSTSRIFLLTNNNLLLADQKSGQIKSEVPLVDVTKVSMSSQNDGFFAVHLKEGSEAASKGDFLFSSDHLIEMATKLYRTTLSQTKQKLNIEISDEFLVQFRQDKVCVKFIQGNQKNGSVPTCKRKNNRLLEVAVP

SEQ ID NO: 28899 - protein, 55 aa, Homo sapiens
TPLTDPQSQSQRCEETSTLPGPQGQRGSASEAPFSVPIPIQALLALTTPRDSSGS

SEQ ID NO: 28900 - protein, 361 aa, Homo sapiens
KEDEPTKQRSEDSMYTAIPQSGSPFPGSVQDPGLHVWRVEKLKPVPVAQENQGVFFSGDSYLVLHNGPEEVSHLHLWIGQQSSRDEQGACAVLAVHLNTLLGERPVQHREVQGNESDLFMSYFPRGLKYQEGGVESAFHKTSTGAPAAIKKLYQVKGKKNIRATERALNWDSFNTGDCFILDLGQNIFAWCGGKSNILERNKARDLALAIRDSERQGKAQVEIVTDGEEPAEMIQVLGPKPALKEGNPEEDLTADKANAQAAALYKVSDATGQMNLTKVADSSPFALELLISDDCFVLDNGLCGKIYIWKGRKANEKERQAALQVAEGFISRMQYAPNTQVEILPQGHESPIFKQFFKDWK

SEQ ID NO: 28901 - protein, 1266 aa, Homo sapiens
KTSQIEPACCRSRAPSPCELPSDPLLSMKQPIMADGPRCKRRKQANPRRKNVVNYDNVVDTGSETDEEDKLHIAEDDGIANPLDQETSPASVPNHESSPHVSQALLPREEEEDEIREGGVEHPWHNNEILQASVDGPEEMKEDYDTMGPEATIQTAINNGTVKNANCTSDFEEYFAKRKLEERDGHAVSIEEYLQRSDTAIIYPEAPEELSRLGTPEANGQEENDLPPGTPDAFAQLLTCPYCDRGYKRLTSLKEHIKYRHEKNEENFSCPLCSYTFAYRTQLERHMVTHKPGTDQHQMLTQGAGNRKFKCTECGKAFKYKHHLKEHLRIHSDSSLGRQLQLLSNQGNVTVILIIILGEKPYECPNCKKRFSHSGSYSSHISSKKCIGLISVNGRMRNNIKTGSSPNSVSSSPTNSAITQLRNKLENGKPLSMSEQTGLLKIKTEPLDFNDYKVLMATHGFSGTSPFMNGGLGATSPLGVHPSAQSPMQHLGVGMEAPLLGFPTMNSNLSEVQKVLQIVDNTVSRQKMDCKAEEISKLKGYHMKDPCSQPEEQGVTSPNIPPVGLPVVSHNGATKSIIDYTLEKVNEAKACLQSLTTDSRRQISNIKKEKLRTLIDLVTDDKMIENHNISTPFSCQFCKESFPGPIPLHQHERYLCKMNEEIKAVLQPHENIVPNKAGVFVDNKALLLSSVLSEKGMTSPINPYKDHMSVLKAYYAMNMEPNSDELLKISIAVGLPQEFVKEWFEQRKVYQYSNSRSPSLERSSKPLAPNSNPPTKDSLLPRSPVKPMDSITSPSIAELHNSVTNCDPPLRLTKPSHFTNIKPVEKLDHSRSNTPSPLNLSSTSSKNSHSSSYTPNSFSSEELQAEPLDLSLPKQMKEPKSIIATKNKTKASSISLDHNSVSSSSENSDEPLNLTFIKKEFSNSNNLDNKSTNPVFSMNPFSAKPLYTALPPQSAFPPATFMPPVQTSIPGLRPYPGLDQMSFLPHMAYTYPTGAATFADMQQRRKYQRKQGFQGELLDGAQDYMSGLDDMTDSDSCLSRKKIKKTESGMYACDLCDKTFQKSSSLLRHKYEHTGKRPHQCQICKKAFKHKHHLIEHSRLHSGEKPYQCDKCGKRFSHSGSYSQHMNHRYSYCKREAEEREAAEREAREKGHLEPTELLMNRAYLQSITPQGYSDSEERESMPRDGESEKEHEKEGEDGYGKLGRQDGDEEFEEEEEESENKSMDTDPETIRDEEETGDHSMDDSSEDGKMETKSDHEEDNMEDGM

SEQ ID NO: 28902 - protein, 56 aa, Homo sapiens
VPLLLRATSWVIPGPGAGLGLTRGLPRGRLGACVTSPPAGCGDYVGPLWPVRSASL

SEQ ID NO: 28903 - protein, 46 aa, Homo sapiens
VRLRGARPRGLKETEGPRMPRTCRPHRGLVLNRGGAGGTLMWHQMK

SEQ ID NO: 28904 - protein, 16 aa, Homo sapiens
VAPSRWRASCLRIFSM

SEQ ID NO: 28905 - protein, 35 aa, Homo sapiens
KAEAATERQRRRSDKLTDRAGWWREQREQPERCRP

SEQ ID NO: 28906 - protein, 608 aa, Homo sapiens
LPSPPYHGPARGLAAPLSPPPAMATATPVPPRMGSRAGGPTTPLSPTRLSRLQEKEELRELNDRLAVYIDKVRSLETENSALQLQVTEREEVRGRELTGLKALYETELADARRALDDTARERAKLQIELGKCKAEHDQLLLNYAKKESDLNGAQIKLREYEAALNSKDAALATALGDKKSLEGDLEDLKDQIAQLEASLAAAKKQLADETLLKVDLENRCQSLTEDLEFRKSMYEEEINETRRKHETRLVEVDSGRQIEYEYKLAQALHEMREQHDAQVRLYKEELEQTYHAKLENARLSSEMNTSTVNSAREELMESRMRIESLSSQLSNLQKESRACLERIQELEDLLAKEKDNSRRMLTDKEREMAEIRDQMQQQLNDYEQLLDVKLALDMEISAYRKLLEGEEERLKLSPSPSSRVTVSRASSSRSVRTTRGKRKRVDVEESEASSSVSISHSASATGNVCIEEIDVDGKFIRLKNTSEQDQPMGGWEMIRKIGDTSVSYKYTSRYVLKAGQTVTIWAANAGVTASPPTDLIWKNQNSWGTGEDVKVILKNSQGEEVAQRSTVFKTTIPEEEEEEEEAAGVVVEEELFHQQGTPRASNRSCAIM

SEQ ID NO: 28907 - protein, 39 aa, Homo sapiens
TRYSSQKCTKVKSEWKRLKTIINTKIKRTRILQETGKNS

SEQ ID NO: 28908 - protein, 7 aa, Homo sapiens
INICLSA

SEQ ID NO: 28909 - protein, 10 aa, Homo sapiens
LQRHTLSPPP

SEQ ID NO: 28910 - protein, 140 aa, Homo sapiens
LGTITPLREAENSFPKSFGDFSLFTHLRPCEELRGQFGRRARLPVRRVLGPGNREGPAIARRPPRGCERAWAPAEPRPWCSKPTMPRTRKRCWPARARTRAPASSWESPPPPRPAPPPPRAARPTTRAGARPRVGTSSDP

SEQ ID NO: 28911 - protein, 332 aa, Homo sapiens
KLPSAMTVVSVPQREPLVLGGRLAPLGFSSRGYFGALPMVTTAPPPLPRIPDPRALPPTLFLPHFLGGDGPCLTPQPRAPAALPNRSLAVAGGTPRAAPKKRRKKKVRASPAGQLPSRFHQYQQHRPSLEGGRSPATGPSGAQEVPGPAAALAPSPAAAAGTEGASPDLAPLRPAAPGQTPLRKEVLKSKMGKSEKIALPHGQLVHGIHLYEQPKINRQKSKYNLPLTKITSAKRNENNFWQDSVSSDRIQKQEKKPFKNTENIKNSHLKKSAFLTEVSQKENYAGAKFSDPPSPSVLPKPPSHWMGSTVENSNQNRELMAVHLKTLLKVQT

SEQ ID NO: 28912 - protein, 253 aa, Homo sapiens
LQKLINDSVFFLAAYDLRQGQEALARLQAALAERRRGLQPKKRFAFKTRGKDAASSTKVDAAPGIPPAVESIQDSPLPKKAEGDLGPSWVCGFSNLESQVLEKRASELHQRDVLLTELSNCTVRLYGNPNTLRLTKAHSCKLLCGPVSTSVFLEDCSDCVLAVACQQLRIHSTKDTRIFLQVTSRAIVEDCSGIQFAPYTWSYPEIDKDFESSGLDRSKNNWNDVDDFNWLARDMASPNWSILPEEERNIQWD

SEQ ID NO: 28913 - protein, 13 aa, Homo sapiens
KNINHVLHSRSWW

SEQ ID NO: 28914 - protein, 47 aa, Homo sapiens
VAAADPRLRREGRPRCARPEVTRPGPSSLPSTIPLRLRAPASSCESL

SEQ ID NO: 28915 - protein, 10 aa, Homo sapiens
VCDDCSGIFW

SEQ ID NO: 28916 - protein, 29 aa, Homo sapiens
RLGCRLSAAALGWCAVVRPRLTAASATQM

SEQ ID NO: 28917 - protein, 7 aa, Homo sapiens
LRAAVPR

SEQ ID NO: 28918 - protein, 12 aa, Homo sapiens
LEPGEIKLGMLS

SEQ ID NO: 28919 - protein, 29 aa, Homo sapiens
LEDLPYPLTNYGRLYQNRENWRRYLWSCV

SEQ ID NO: 28920 - protein, 53 aa, Homo sapiens
RLLDRRGVTAAEEEVLRDTRGWTRQGNTRPTTAGDKIAQPHPAVQRLPACAPS

SEQ ID NO: 28921 - protein, 13 aa, Homo sapiens
KSSYLSGSQLSHL

SEQ ID NO: 28922 - protein, 14 aa, Homo sapiens
TLRFLLVPSPIWQL

SEQ ID NO: 28923 - protein, 33 aa, Homo sapiens
KEMTDGCLSTTDLFWTVKTKSLMYCSWETPWCS

SEQ ID NO: 28924 - protein, 39 aa, Homo sapiens
TPMRRHSKRAWPALPAGGLRCTCCASMAIERTQISRRTL

SEQ ID NO: 28925 - protein, 11 aa, Homo sapiens
LLLSLGTGCQR

SEQ ID NO: 28926 - protein, 58 aa, Homo sapiens
ISSYCRSQPPARLISGEEHFSSKKCLAWFYEYAGPDEVVGPEGMEKFCEDIGVEPENV

SEQ ID NO: 28927 - protein, 6 aa, Homo sapiens
LALRLE

SEQ ID NO: 28928 - protein, 25 aa, Homo sapiens
LAGAAPPPWPPAPRGGRPRATGPAA

SEQ ID NO: 28929 - protein, 15 aa, Homo sapiens
LRRQPSHIAQTPWGR

SEQ ID NO: 28930 - protein, 39 aa, Homo sapiens
LPNRSLIKQRPPRKWQSPTLASFQLGSRLLTTPPCPTRK

SEQ ID NO: 28931 - protein, 83 aa, Homo sapiens
RVLKEGRKIFLKIKMNLHFLCQRASLNLNFIMAQRRTVQLQANSQKKNLLRYKRKITEKKRKEPQRSCSVQSQILLLLLWLIG

SEQ ID NO: 28932 - protein, 37 aa, Homo sapiens
LAAWKKNPKYLLAEYCEWLPQAMHPDIEKAWPPTTVH

SEQ ID NO: 28933 - protein, 35 aa, Homo sapiens
TKCYPCENSYSTRGSASVLYQHFCLQHCTSSATSS

SEQ ID NO: 28934 - protein, 34 aa, Homo sapiens
RTQGSEVATGQAEEAPVGGGGLVAQEKSGREPSW

SEQ ID NO: 28935 - protein, 78 aa, Homo sapiens
IGIFWLNASETLVEINTEPAVEYTLTQMGPVAAKQKVRSRTHVHWMSESGIIDVFLLTGPTPSDVFKQYSHLTDIGEK

SEQ ID NO: 28936 - protein, 159 aa, Homo sapiens
KCYFCSGPIYPGHGMMFVRNDCKVFRFCKSKCHKNFKKKRNPRKVRWTKAFRKAAGKELTVDNSFEFEKRRNEPIKYQRELWNKTIDAMKRVEEIKQKRQAKFIMNRLKKNKELQKVQDIKEVKQNIHLIRAPLAGKGKQLEEKMVQQLQEDVDMEDAP

SEQ ID NO: 28937 - protein, 56 aa, Homo sapiens
RPRVGPRRKRKMRTKKRRCRTPRPWTCSRRVWLWWCRTRCSAICRSRLLWKKSTPK

SEQ ID NO: 28938 - protein, 17 aa, Homo sapiens
VPKRWMRLLLSSSRGPS

SEQ ID NO: 28939 - protein, 40 aa, Homo sapiens
RRNFSQVMSLGLQKLCAGQKDSDSLVLGSMARLWSMIYRR

SEQ ID NO: 28940 - protein, 13 aa, Homo sapiens
ILSAWMCGNSLPT

SEQ ID NO: 28941 - protein, 11 aa, Homo sapiens
ISAPSADAPCS

SEQ ID NO: 28942 - protein, 394 aa, Homo sapiens
LAPLLQPIWRSGGGGGGGGRRMASELAMSNSDLPTSPLAMEYVNDFDLMKFEVKKEPVETDRIISQCGRLIAGGSLSSTPMSTPCSSVPPSPSFSAPSPGSGSEQKAHLEDYYWMTGYPQQLNPEALGFSPEDAVEALISNSHQLQGGFDGYARGAQQLAAAAGAGAGASLGGSGEEMGPAAAVVSAVIAAAAAQSGAGPHYHHHHHHAAGHHHHPTAGAPGAAGSAAASAGGAGGAGGGGPASAGGGGGGGGGGGGGGAAGAGGALHPHHAAGGLHFDDRFSDEQLVTMSVRELNRQLRGVSKEEVIRLKQKRRTLKNRGYAQSCRFKRVQQRHVLESEKNQLLQQVDHLKQEISRLVRERDAYKEKYEKLVSSGFRENGSSSDNPSSPEFFM

SEQ ID NO: 28943 - protein, 43 aa, Homo sapiens
IPVVMEGHICQSLESAKAGTRFPGPQWGCANPRELDCVPTAEC

SEQ ID NO: 28944 - protein, 9 aa, Homo sapiens
LSIGARSLP

SEQ ID NO: 28945 - protein, 7 aa, Homo sapiens
RPTFYQS

SEQ ID NO: 28946 - protein, 15 aa, Homo sapiens
LWVDVVGDWQDPGIR

SEQ ID NO: 28947 - protein, 22 aa, Homo sapiens
VSPVFSLAGAWAGGNSRPKEAP

SEQ ID NO: 28948 - protein, 21 aa, Homo sapiens
MGPIFRGRAGKRGSLPAPAPC

SEQ ID NO: 28949 - protein, 561 aa, Homo sapiens
LNAVALQPLIPPASPPVEAQARFAAFSLCLITMSTNENANTPAARLHRFKNKGKDSTEMRRRRIEVNVELRKAKKDDQMLKRRNVSSFPDDATSPLQENRNNQGTVNWSVDDIVKGINSSNVENQLQATQAARKLLSREKQPPIDNIIRAGLIPKFVSFLGRTDCSPIQFESAWALTNIASGTSEQTKAVVDGGAIPAFISLLASPHAHISEQAVWALGNIAGDGSVFRDLVIKYGAVDPLLALLAVPDMSSLACGYLRNLTWTLSNLCRNKNPAPPIDAVEQILPTLVRLLHHDDPEVLADTCWAISYLTDGPNERIGMVVKTGVVPQLVKLLGASELPIVTPALRAIGNIVTGTDEQTQVVIDAGALAVFPSLLTNPKTNIQKEATWTMSNITAGRQDQIQQVVNHGLVPFLVSVLSKADFKTQKEAVWAVTNYTSGGTVEQIVYLVHCGIIEPLMNLLTAKDTKIILVILDAISNIFQAAEKLGETEKLSIMIEECGGLDKIEALQNHENESVYKASLSLIEKYFSVEEEEDQNVVPETTSEGYTFQVQDGAPGTFNF

SEQ ID NO: 28950 - protein, 75 aa, Homo sapiens
LPHKHERKDKRSTPEEEGRSAPEKIIQSLKLCPGGHRPASLSSGCPAGCRLSFNLPPSMLLSVQKCCMPSSLKTC

SEQ ID NO: 28951 - protein, 19 aa, Homo sapiens
LPVRLCASAPWPASTPWRR

SEQ ID NO: 28952 - protein, 45 aa, Homo sapiens
LSILQSLVPAAGAASPVAISAQHLCYSHVTPGDPGAGAGQGPAPS

SEQ ID NO: 28953 - protein, 447 aa, Homo sapiens
LGRPVDRASAAETMSADGAEADGSTQVTVEEPVQQPSVVDRVASMPLISSTCDMVSAAYASTKESYPHIKTVCDAAEKGVRTLTAAAVSGAQPILSKLEPQIASASEYAHRGLDKLEENLPILQQPTEKVLADTKELVSSKVSGAQEMVSSAKDTVATQLSEAVDATRGAVQSGVDKTKSVVTGGVQSVMGSRLGQMVLSGVDTVLGKSEEWADNHLPLTDAELARIATSLDGFDVASVQQQRQEQSYFVRLGSLSERLRQHAYEHSLGKLRATKQRAQEALLQLSQVLSLMETVKQGVDQKLVEGQEKLHQMWLSWNQKQLQGPEKEPPKPEQVESRALTMFRDIAQQLQATCTSLGSSIQGLPTNVKDQVQQARRQVEDLQATFSSIHSFQDLSSSILAQSRERVASAREALDHMVEYVAQNTPVTWLVGPFAPGITEKAPEEKK

SEQ ID NO: 28954 - protein, 43 aa, Homo sapiens
LGKTCSSALSGRQCHKLKALIPMMPPRISSIFHPWMMKEILKT

SEQ ID NO: 28955 - protein, 44 aa, Homo sapiens
RREARPSRERHGGPGAAAAAGAAGRAGGALRRHGLRYEGGDRAE

SEQ ID NO: 28956 - protein, 36 aa, Homo sapiens
REGATSSRREAAEPATTDPAEPPPPPRPHGGRQGHS

SEQ ID NO: 28957 - protein, 8 aa, Homo sapiens
LPRMMACD

SEQ ID NO: 28958 - protein, 186 aa, Homo sapiens
KPLPGARGPSWPPSPRVPMEPPNLYPVKLYVYDLSKGLARRLSPIMLGKQLEGIWHTSIVVHKDEFFFGSGGISSCPPGGTLLGPPDSVVDVGSTEVTEEIFLEYLSSLGESLFRGEAYNLFEHNCNTFSNEVAQFLTGRKIPSYITDLPSEVLSTPFGQALRPLLDSIQIQPPGGSSVGRPNGQS

SEQ ID NO: 28959 - protein, 617 aa, Homo sapiens
LNEQSKLLKLKESTERTVSKLNQEIRMMKNQRVQLMRQMKEDAEKFRQWKQKKDKEVIQLKERDRKRQYELLKLERNFQKQSNVLRRKTEEAAAANKRLKDALQKQREVADKRKETQSRGMEGTAARVKNWLGNEIEVMVSTEEAKRHLNDLLEDRKILAQDVAQLKEKKESGENPPPKLRRRTFSLTEVRGQVSESEDSITKQIESLETEMEFRSAQIADLQQKLLDAESEDRPKQRWENIATILEAKCALKYLIGELVSSKIQVSKLESSLKQSKTSCADMQKMLFEERNHFAEIETELQAELVRMEQQHQEKVLYLLSQLQQSQMAEKQLEESVSEKEQQLLSTLKCQDEELEKMREVCEQNQQLLRENEIIKQKLTLLQVASRQKHLPKDTLLSPDSSFEYVPPKPKPSRVKEKFLEQSMDIEDLKYCSEHSVNEHEDGDGDDDEGDDEEWKPTKLVKVSRKNIQGCSCKGWCGNKQCGCRKQKSDCGVDCCCDPTKCRNRQQGKDSLGTVERTQDSEGSFKLEDPTEVTPGLSFFNPVCATPNSKILKEMCDVEQVLSKKTPPAPSPFDLPELKHVATEYQENKAPGKKKKRALASNTSFFSGCSPIEEEAH

SEQ ID NO: 28960 - protein, 22 aa, Homo sapiens
IIVHLVKTMKIIYNATLLFLVS

SEQ ID NO: 28961 - protein, 7 aa, Homo sapiens
MPITVEL

SEQ ID NO: 28962 - protein, 36 aa, Homo sapiens
RRRPAAKTRWAAPPIEITEDIRVLLKRKRGHFSFLS

SEQ ID NO: 28963 - protein, 155 aa, Homo sapiens
LTVKALQGRECSLQVPEDELVSTLKQLVSEKLNVPVRQQRLLFKGKALADGKRLSDYSIGPNSKLNLVVKPLEKVLLEEGEAQRLADSPPPQVWQLISKVLARHFSAADASRVLEQLQRDYERSLSRLTLDDIERLASRFLHPEVTETMEKGFSK

SEQ ID NO: 28964 - protein, 167 aa, Homo sapiens [sequence omitted]

SEQ ID NO: 28965 - protein, 207 aa, Homo sapiens
MSALGLPGYHLHAAYAGDWQLSPTETQQAKFLTWQFDGEYRGDDYTATLTLGNPDLIGESVIMVAHFLQSLTHRLVLGGELVYHRRPGEEGAILTLAGKYSAVHWVATLNVGSGGAHASYYHRANEQVQVGVEFEANTRLQDTTFSFGYHLTLPQANMVFRGLVDSNWCVGAVLEKKMPPLPVTLALGAFLNHWRNRFHCGFSITVG

SEQ ID NO: 28966 - protein, 43 aa, Homo sapiens
MCSQSPHHFPCPISTPIPIYLCPEHGSAPRSSCTPWQPPVVDR

SEQ ID NO: 28967 - protein, 1314 aa, Homo sapiens [sequence omitted]

SEQ ID NO: 28968 - protein, 372 aa, Homo sapiens
MRILYDLHSEVQTLKDDVNILLDKARLENQEGIDFIKATKVLMEKNSMDIMKIREYFQKYGYSPRVKKNSVHEQEAINSDPELSNCENFQKTDVKDDLSDPPVASSCISEKSPRSPQLSDFGLERYIVSQVLPNPPQAVNNYKEEPVIVTPPTKQSLVKVLKTPKCALKMDDFECVTPKLEHFGISEYTMCLNEDYTMGLKNARNNKSEEAIDTESRLNDNVFATPSPIIQQLEKSDAEYTNSPLVPTFCTPGLKIPSTKNSIALVSTNYPLSKTNSSSNDLEVEDRTSLVLNSDTCFENLTDPSSPTISSYENLLRTPTPPEVTKIPEDILQLLSKYNSNLATPIAIKAVPPSKRFLKHGQNIRDVSNKEN

SEQ ID NO: 28969 - protein, 203 aa, Homo sapiens
MGLRIKFPTVVAGFDLVGHEDTGHSLHDYKEALMIPAKDGVKLPYFFHAGETDWQGTSIDRNILDALMLNTTRIGHGFALSKHPAVRTYSWKKDIPIEVCPISNQVLKLVSDLRNHPVATLMATGHPMVISSDDPAMFGAKGLSYDFYEVFMGIGGMKADLRTLKQLAMNSIKYSTLLESEKNTFMEIWKKRWDKFIADVATK

SEQ ID NO: 28970 - protein, 176 aa, Homo sapiens
MVSIAVGCATRNRTVPFCSTFAAFFTRAFDQIRMAAISESNINLCGSHCGVSIGEDGPSQMALEDLAMFRSVPTSTVFYPSDGVATEKAVELAANTKGICFIRTSRPENAIIYNNNEDFQVGQAKKRSTSACWTPSPSSPWTENSFSTALVPPRAGSSPWRTIIMKVALVRLCPVQ

SEQ ID NO: 28971 - protein, 1111 aa, Homo sapiens
MSQSIIVSGESGAGKTENTKFVLRYLTESYGTGQDIDDRIVEANPLLEAFGNAKTVRNNNSSRFGKFVEIHFNEKSSVVGGFVSHYLLEKSRICVQGKEERNYHIFYRLCAGASEDIREKLHLSSPDNFRYLNRGCTRYFANKETDKQILQNRKSPEYLKAGSMKDPLLDDHGDFIRMCTAMKKIGLDDEEKLDLFRVVAGVLHLGNIDFEEAGSTSGGCNLKNKSAQSLEYCAELLGLDQDDLRVSLTTRVMLTTAGGTKGTVIKVPLKVEQANNARDALAKTVYSHLFDHVVNRVNQCFPFETSSYFIGVLDIAGFEYFEHNSFEQFCINYCNEKLQQFFNERILKEEQELYQKEGLGVNEVHYVDNQDCIDLIEAKLVGILDILDEENRLPQPSDQHFTSAVHQKHKDHFRLTIPRKSKLAVHRNIRDDEGFIIRHFAGAVCYETTQFVEKNNDALHMSLESLICESRDKFIRELFESSTNNNKDTKQKAGKLSFISVGNKFKTQLNLLLDKLRSTGASFIRCIKPNLKMTSHHFEGAQILSQLQCSGMVSVLDLMQGGYPSRASFHELYNMYKKYMPDKLARLDPRLFCKALFKALGLNENDYKFGLTKVFFRPGKFAEFDQIMKSDPDHLAELVKRVNHWLTCSRWKKVQWCSLSVIKLKNKIKYRAEACIKMQKTIRMWLCKRRHKPRIDGLVKVGTLKKRLDKFNEVVSVLKDGKPEMNKQIKNLEISIDTLMAKIKSTMMTQEQIQKEYDALVKSSEELLSALQKKKQQEEEAERLRRIQEEMEKERKRREEDEKRRRKEEEERRMKLEMEAKRKQEEEERKKREDDEKRIQAEVEAQLARQKEEESQQQAVLEQERRDRELALRIAQSEAELISDEAQADLALRRGPAVLATKAAAGTKKYDLSKWKYAELRDTINTSCDIELLAACREEFHRRLKVYHAWKSKNKKRNTETEQRAPKSVTDYAQQNPAAQIPARQREIEMNRQQRFFRIPFIRPADQYKDPQSKKKGWWYAHFDGPWIARQMELHPDKPPILLVAGKDDMEMCELNLEETGLTRKRGAEILPRQFEEIWERCGGIQYLQNAIESRQARPTYATAMLQSLLK

SEQ ID NO: 28972 - protein, 489 aa, Homo sapiens
MLLVLSEPGPARPRAQRRASRRTPRQPPRGPSAAAKPKAGLRSEAAAAPAPAPAPTPTPEEGPDAGWGDRIPLEILVQIFGLLVAADGPMPFLGRAARVCRRWQEAASQPALWHTVTLSSPLVGRPAKGGVKAEKKLLASLEWLMPNRFSQLQRLTLIHWKSQLVGECCPRLTFLKLSGCHGVTADALVMLAKACCQLHSLDLQHSMVESTAVVSFLEEAGSRMRKLWLTYSSQTTAILGALLGSCCPQLQVLEVSTGINRNSIPLQLPVEALQKGCPQLQVLRLLNLMWLPKPPGRGVAPGPGFPSLEELCLASSTCNFVSNEVLGRLLHGSPNLRLLDLRGCARITPAGLQDLPCRELEQLHLGLYGTSDRLTLAKEGSPFLTQKWCHTLRELDLSGQGFSEKDLEQALAAFLSTPGGSHPALCSLNLRGTRVTPSTVSSVISGCPGLLYLNLESCRCLPRGLKRAYRGLEEVQWCLEQLLTSPSPS

SEQ ID NO: 28973 - protein, 44 aa, Homo sapiens
VLDLDLFRVDKGGDPALIRETQEKRFKDPGLVDQLVKADSEWRR

SEQ ID NO: 28974 - protein, 16 aa, Homo sapiens
LVLVVVKGGKVIVKLA

SEQ ID NO: 28975 - protein, 23 aa, Homo sapiens
RPHRGLVLNRGGAGGTLMWHQMK

SEQ ID NO: 28976 - protein, 33 aa, Homo sapiens
TTILWPGRCEWSAGQSARCLAPQADPAVHSREQ

SEQ ID NO: 28977 - protein, 6 aa, Homo sapiens
VTAKER

SEQ ID NO: 28978 - protein, 541 aa, Homo sapiens
KEETVTDLETAVLYPSHSSFTMPGSLPLNAEACWPKDVGIVALEIYFPSQYVDQAELEKYDGVDAGKYTIGLGQAKMGFCTDREDINSLCMTVVQNLMERNNLSYDCIGRLEVGTETIIDKSKSVKTNLMQLFEESGNTDIEGIDTTNACYGGTAAVFNAVNWIESSSWDGRYALVVAGDIAVYATGNARPTGGVGAVALLIGPNAPLIFERGLRGTHMQHAYDFYKPDMLSEYPIVDGKLSIQCYLSALDRCYSVYCKKIHAQWQKEGNDKDFTLNDFGFMIFHSPYCKLVQKSLARMLLNDFLNDQNRDKNSIYSGLEAFGDVKLEDTYFDRDVEKAFMKASSELFSQKTKASLLVSNQNGNMYTSSVYGSLASVLAQYSPQQLAGKRIGVFSYGSGLAATLYSLKVTQDATPGSALDKITASLCDLKSRLDSRTGVAPDVFAENMKLREDTHHLVNYIPQGSIDSLFEGTWYLVRVDEKHRRTYARRPTPNDDTLDEGVGLVHSNIATEHIPSPAKKVPRLPATAAEPEAAVISNGEH

SEQ ID NO: 28979 - protein, 10 aa, Homo sapiens
ILRVRLEHLC

SEQ ID NO: 28980 - protein, 8 aa, Homo sapiens
LGSHVWTW

SEQ ID NO: 28981 - protein, 161 aa, Homo sapiens
KKALAAGGYDVEKNNSRIKLGLKSLVSKGTLVQTKGTGASGSFKLNKKAASGEAKPKAKKAGAAKAKKPAGATPKKAKKAAGAKKAVKKTPKKAKKPAAAGVKKVAKSPKKAKAAAKPKKATKSPAKPKAVKPKAAKPKAAKPKAAKPKAAKAKKAAAKKK

SEQ ID NO: 28982 - protein, 41 aa, Homo sapiens
VDDETKLTLHGLQQYYVKLKDNEKNRKLFDLLDVLEFNQVS

SEQ ID NO: 28983 - protein, 54 aa, Homo sapiens
KAFLHWYTGEGMDEMEFTEAESNMNDLVSEYQQYQDATAEEEGEFEEEAEEEVA

SEQ ID NO: 28984 - protein, 634 aa, Homo sapiens [sequence omitted]

SEQ ID NO: 28985 - protein, 23 aa, Homo sapiens
TRPRRPPDVHSRFLLVPSPIWQL

SEQ ID NO: 28986 - protein, 19 aa, Homo sapiens
VTWLARPGAQPHVESSPLL

SEQ ID NO: 28987 - protein, 17 aa, Homo sapiens
LAPPTLVWVFSSTEKSR

SEQ ID NO: 28988 - protein, 32 aa, Homo sapiens
LTRLAGASWRTSKRWKRSERARTELCTKPETS

SEQ ID NO: 28989 - protein, 22 aa, Homo sapiens
RPSQAAAPLMLGGCWRVAAAKR

SEQ ID NO: 28990 - protein, 466 aa, Homo sapiens
KFRHVFGQAVKNDQCYDDIRVSRVTWDSSFCAVNPRFVAIIIEASGGGAFLVLPLHKTGRIDKSYPTVCGHTGPVLDIDWCPHNDQVIASGSEDCTVMVWQIPENGLTLSLTEPVVILEGHSKRVGIVAWHPTARNVLLSAGCDNAIIIWNVGTGEALINLDDMHSDMIYNVSWNRNGSLICTASKDKKVRVIDPRKQEIVAEKEKAHEGARPMRAIFLADGNVFTTGFSRMSERQLALWNPKNMQEPIALHEMDTSNGVLLPFYDPDTSIIYLCGKGDSSIRYFEITDESPYVHYLNTFSSKEPQRGMGYMPKRGLDVNKCEIARFFKLHERKCEPIIMTVPRKSDLFQDDLYPDTAGPEAALEAEEWFEGKNADPILISLKHGYIPGKNRDLKVVKKNILDSKPTANKKCDLISIPKKTTDTASVQNEAKLDEILKEIKSIKDTICNQDERISKLEQQMAKIAA

SEQ ID NO: 28991 - protein, 7 aa, Homo sapiens
KVWILAP

SEQ ID NO: 28992 - protein, 17 aa, Homo sapiens
KSELKKAGGANYDAQTE

SEQ ID NO: 28993 - protein, 192 aa, Homo sapiens
LLMEKVPGEMEIERRERSEELSEAERKAVQAMWARLYANCEDVGVAILVRFFVNFPSAKQYFSQFKHMEDPLEMERSPQLRKHACRVMGALNTVVENLHDPDKVSSVLALVGKAHALKHKVEPVYFKILSGVILEVVAEEFASDFPPETQRAWAKLRGLIYSHVTAAYKEVGWVQQVPNATTPPATLPSSGP

SEQ ID NO: 28994 - protein, 67 aa, Homo sapiens
TSLRYAIQLITAASLVCRKRKGTEVQVDDIKRVYSLFLDESRSTQYMKEYQDAFLFNELKGETMDTS

SEQ ID NO: 28995 - protein, 23 aa, Homo sapiens
IQIDLETGKITDFIKIDTGTCVW

SEQ ID NO: 28996 - protein, 11 aa, Homo sapiens
RNPLGSRPLHC

SEQ ID NO: 28997 - protein, 46 aa, Homo sapiens
INKKIYKIGQGYLIKDGKLIKNNASTDYDLSDKSINPLVSNGCSAL

SEQ ID NO: 28998 - protein, 127 aa, Homo sapiens [sequence omitted]

SEQ ID NO: 28999 - protein, 33 aa, Homo sapiens
MGRQLQQLEKELETFPPPEDLHDKFVTKMSISF

SEQ ID NO: 29000 - protein, 217 aa, Homo sapiens
MRWRRTRLIPIIWRSWKTTTTPVTAQKAASGAIVPTAALQVPTQPSCCRLLPHLLCPPPLLTRVLCILLRSPPNPASPPNRGEMRGHIKWQKTRFTRGKRRIVKNGDCIVAVCRLHSLALSLPPNLLFFLFKICASAVSPPGRIETLANTYPLHSFLSPCFGLVFWNERSLLFYKPLCISNVVSFRFLLDMLLKRELRVWTDCGTQTHTKTCLFSHP

SEQ ID NO: 29001 - protein, 95 aa, Homo sapiens
MGIPTVKREVKSYLIETLHSLIDNLYPEEKLDCVIVVFIGETDIDYVHGVVANLEKEFSKEISSGLVEVISPPESYYPDLTNLKETFGDSKERVR

SEQ ID NO: 29002 - protein, 1234 aa, Homo sapiens
MADGPRCKRRKQANPRRKNVVNYDNVVDTGSETDEEDKLHIAEDDGIANPLDQETSPASVPNHESSPHVSQALLPREEEEDEIREGGVEHPWHNNEILQASVDGPEEMKEDYDTMGPEATIQTAINNGTVKNANCTSDFEEYFAKRKLEERDGHAVSIEEYLQRSDTAIIYPEAPEELSRLGTPEANGQEENDLPPGTPDAFAQLLTCPYCDRGYKRLTSLKEHIKYRHEKNEENFSCPLCSYTFAYRTQLERHMVTHKPGTDQHQMLTQGAGNRKFKCTECGKAFKYKHHLKEHLRIHSDSSLGRQLQLLSNQGNVTVILIIILGEKPYECPNCKKRFSHSGSYSSHISSKKCIGLISVNGRMRNNIKTGSSPNSVSSSPTNSAITQLRNKLENGKPLSMSEQTGLLKIKTEPLDFNDYKVLMATHGFSGTSPFMNGGLGATSPLGVHPSAQSPMQHLGVGMEAPLLGFPTMNSNLSEVQKVLQIVDNTVSRQKMDCKAEEISKLKGYHMKDPCSQPEEQGVTSPNIPPVGLPVVSHNGATKSIIDYTLEKVNEAKACLQSLTTDSRRQISNIKKEKLRTLIDLVTDDKMIENHNISTPFSCQFCKESFPGPIPLHQHERYLCKMNEEIKAVLQPHENIVPNKAGVFVDNKALLLSSVLSEKGMTSPINPYKDHMSVLKAYYAMNMEPNSDELLKISIAVGLPQEFVKEWFEQRKVYQYSNSRSPSLERSSKPLAPNSNPPTKDSLLPRSPVKPMDSITSPSIAELHNSVTNCDPPLRLTKPSHFTNIKPVEKLDHSRSNTPSPLNLSSTSSKNSHSSSYTPNSFSSEELQAEPLDLSLPKQMKEPKSIIATKNKTKASSISLDHNSVSSSSENSDEPLNLTFIKKEFSNSNNLDNKSTNPVFSMNPFSAKPLYTALPPQSAFPPATFMPPVQTSIPGLRPYPGLDQMSFLPHMAYTYPTGAATFADMQQRRKYQRKQGFQGELLDGAQDYMSGLDDMTDSDSCLSRKKIKKTESGMYACDLCDKTFQKSSSLLRHKYEHTGKRPHQCQICKKAFKHKHHLIEHSRLHSGEKPYQCDKCGKRFSHSGSYSQHMNHRYSYCKREAEEREAAEREAREKGHLEPTELLMNRAYLQSITPQGYSDSEERESMPRDGESEKEHEKEGEDGYGKLGRQDGDEEFEEEEEESENKSMDTDPETIRDEEETGDHSMDDSSEDGKMETKSDHEEDNMEDGM

SEQ ID NO: 29003 - protein, 28 aa, Homo sapiens
MYQRRKLVSTPGLAGLYLETRSEFFRAV

SEQ ID NO: 29004 - protein, 190 aa, Homo sapiens
ILSQSEAKNPRINQLSARWQQVWLLALERQRKLNDALDRLEELKEFANFDFDVWRKKYMRWMNHKKSRVMDFFRRIDKDQDGKITRQEFIDGILASKFPTTKLEMTAVADIFDRDGDGYIDYYEFVAALHPNKDAYRPTTDADKIEDEVTRQVAQCKCAKRFQVEQIGENKYRVRKRKSSPLLWWFLICG

SEQ ID NO: 29005 - protein, 57 aa, Homo sapiens
LQFSPAEADRMRLWAVPPPSMLPLFKMKRKPRKGKTTRTEMCLAMSIGSNQWKRSNT

SEQ ID NO: 29006 - protein, 381 aa, Homo sapiens
MSKEDNYKRLRDYISSLKMTPCIPYLGIYLSDLTYIDSAYPSTGSILENEQRSNLMNNILRIISDLQQSCEYDIPMLPHVQKYLNSVQYIEELQKFVEDDNYKLSLKIEPGTSTPRSAASREDLVGPEVGASPQSGRKSVAAEGALLPQTPPSPRNLIPHGHRKCHSLGYNFIHKMNTAEFKSATFPNAGPRHLLDDSVMEPHAPSRGQAESSTLSSGISIGSSDGSELSEETSWPAFESSAESEDLAVHLYPGAVTIQGVLRRKTLLKEGKKPTVASWTKYWAALCGTQLFYYAAKSLKATERKHFKSTSNKNVSVIGWMVMMADDPEHPDLFLLTDSEKGNSYKFQAGNRMNAMLWFKHLSAACQSNKQQVPTNLMTFE

SEQ ID NO: 29007 - protein, 233 aa, Homo sapiens
LEGGSGADLGEHSCRPASQPRFPRPAEARSHPATRRPASGPAMGKTNSKLAPEVLEDLVQNTEFSEQELKQWYKGFLKDCPSGILNLEEFQQLYIKFFPYGDASKFAQHAFRTFDKNGDGTIDFREFICALSVTSRGSFEQKLNWAFEMYDLDGDGRITRLEMLEIIEAIYKMVGTVIMMRMNQDGLTPQQRVDKIFKKMDQDKDDQITLEEFKEAAKSDPSIVLLLQCDMQK

SEQ ID NO: 29008 - protein, 52 aa, Homo sapiens
LDEVEKRHQISMAVIYPFMQGLREAAFPAPGKTVTLKSFIPDSGTEVKVQRN

SEQ ID NO: 29009 - protein, 87 aa, Homo sapiens
ISWTALLELSSKSTVGWVGGSADFSLDFHIWDELAVISSRKGVAVLHWLFSSHSSSRYCNKELEKYSQMGSSPCCQGACHLMGETGK

SEQ ID NO: 29010 - protein, 33 aa, Homo sapiens
KTPRLRKKMKKLEEVQKVDRVKERDFFLKNCDV

SEQ ID NO: 29011 - protein, 1902 aa, Homo sapiens
RRSRRGLESAMANRRVGRGCWEVSPTERRPPAGLRGPAAEEEASSPPVLSLSHFCRSPFLCFGDVLLGASRTLSLALDNPNEEVAEVKISHFPAADLGFSVSQRCFVLQPKEKIVISVNWTPLKEGRVREIMTFLVNDVLKHQAILLGNAEEQKKKKRSLWDTIKKKKISASTSHNRRVSNIQNVNKTFSVSQKVDRVRSPLQACENLAMNEGGPPTENNSLILEENKIPISPISPAFNECHGATCLPLSVRRSTTYSSLHASENRELLNVHSANVSKVSFNEKAVTETSFNSVNVNGQRGENSKLSLTPNCSSTLNITQSQIHFLSPDSFVNNSHGANNELELVTCLSSDMFMKDNSQPVHLESTIAHEIYQKILSPDSFIKDNYGLNQDLESESVNPILSPNQFLKDNMAYMCTSQQTCKVPLSNENSQVPQSPEDWRKSEVSPRIPECQGSKSPKAIFEELVEMKSNYYSFIKQNNPKFSAVQDISSHSHNKQPKRRPILSATVTKRKATCTRENQTEINKPKAKRCLNSAVGEHEKVINNQKEKEDFHSYLPIIDPILSKSKSYKNEVTPSSTTASVARKRKSDGSMEDANVRVAITEHTEVREIKRIHFSPSEPKTSAVKKTKNVTTPISKRISNREKLNLKKKTDLSIFRTPISKTNKRTKPIIAVAQSSLTFIKPLKTDIPRHPMPFAAKNMFYDERWKEKQEQGFTWWLNFILTPDDFTVKTNISEVNAATLLLGIENQHKISVPRAPTKEEMSLRAYTARCRLNRLRRAACRLFTSEKMVKAIKKLEIEIEARRLIVRKDRHLWKDVGERQKVLNWLLSYNPLWLRIGLETTYGELISLEDNSDVTGLAMFILNRLLWNPDIAAEYRHPTVPHLYRDGHEEALSKFTLKKLLLLVCFLDYAKISRLIDHDPCLFCKDAEFKASKEILLAFSRDFLSGEGDLSRHLGLLGLPVNHVQTPFDEFDFAVTNLAVDLQCGVRLVRTMELLTQNWDLSKKLRIPAISRLQKMHNVDIVLQVLKSRGIELSDEHGNTILSKDIVDRHREKTLRLLWKIAFAFQVDISLNLDQLKEEIAFLKHTKSIKKTISLLSCHSDDLINKKKGKRDSGSFEQYSENIKLLMDWVNAVCAFYNKKVENFTVSFSDGRVLCYLIHHYHPCYVPFDAICQRTTQTVECTQTGSVVLNSSSESDDSSLDMSLKAFDHENTSELYKELLENEKKNFHLVRSAVRDLGGIPAMINHSDMSNTIPDEKVVITYLSFLCARLLDLRKEIRAARLIQTTWRKYKLKTDLKRHQEREKAARIIQLAVINFLAKQRLRKRVNAALVIQKYWRRVLAQRKLLMLKKEKLEKVQNKAASLIQAMWRRYRAKKYLCKVKAACKIQAWYRCWRAHKEYLAILKAVKIIQGCFYTKLERTRFLNVRASAIIIQRKWRAILPAKIAHEHFLMIKRHRAACLIQAHYRGYKGRQVFLRQKSAALIIQKYIRAREAGKHERIKYIEFKKSTVILQALVRGWLVRKRFLEQRAKIRLLHFTAAAYYHLNAVRIQRAYKLYLAVKNANKQVNSVICIQRWFRARLQEKRFIQKYHSIKKIEHEGQECLSQRNRAASVIQKAVRHFLLRKKQEKFTSGIIKIQALWRGYSWRKKNDCTKIKAIRLSLQVVNREIREENKLYKRTALALHYLLTYKHLSAILEALKHLEVVTRLSPLCCENMAQSGAISKIFVLIRSCNRSIPCMEVIRYAVQVLLNVSKYEKTTSAVYDVENCIDILLELLQIYREKPGNKVADKGGSIFTKTCCLLAILLKTTNRASDVRSRSKVVDRIYSLYKLTAHKHKMNTERILYKQKKNSSISIPFIPETPVRTRIVSRLKPDWVLRRDNMEEITNPLQAIQMVMDTLGIPY

SEQ ID NO: 29012 - protein, 12 aa, Homo sapiens
ISIFLAVATGTS

SEQ ID NO: 29013 - protein, 16 aa, Homo sapiens
LEFLVPGAPHLAAQPA

SEQ ID NO: 29014 - protein, 83 aa, Homo sapiens
RGMNREGAPGKSPEEMYIQQKVRVLLMLRKMGSNLTASEEEFLRTYAGVVNSQLSQLPPHSIDQGAEDVVMAFSRSETEDRRQ

SEQ ID NO: 29015 - protein, 36 aa, Homo sapiens
KPSLHCSSSASLLAAAASAARLLRRRGLRQLYRQSP

SEQ ID NO: 29016 - protein, 23 aa, Homo sapiens
KTAKTIPSTVVNSIAARLLLQII

SEQ ID NO: 29017 - protein, 51 aa, Homo sapiens
LAPLPHDRLDPPACQPVSVLHHWHMDCVCHGCDEPPCMPCGELVLQRVLPS

SEQ ID NO: 29018 - protein, 49 aa, Homo sapiens
VKTDNNENKICGCLSGTNFSSLTQNSWSRFTSFMMTVFPWKSDSTWHSG

SEQ ID NO: 29019 - protein, 33 aa, Homo sapiens
TNFSSLTQNSWSRFTSFMMTVFPWKSDSTWHSG

SEQ ID NO: 29020 - protein, 22 aa, Homo sapiens
LPAEISMTTLKMNFLYSPDILI

SEQ ID NO: 29021 - protein, 28 aa, Homo sapiens
ILCCYPFGVPHGDSRRNLKGNFHNVRSP

SEQ ID NO: 29022 - protein, 8 aa, Homo sapiens
MQQSFHCS

SEQ ID NO: 29023 - protein, 37 aa, Homo sapiens
RPPSGRGVLMTSLVDHVRDLFCLRGTGKGWTAPLSLY

SEQ ID NO: 29024 - protein, 21 aa, Homo sapiens
LVEKVEYGELLAKDSQATLCL

SEQ ID NO: 29025 - protein, 11 aa, Homo sapiens
LAATWLCCVCA

SEQ ID NO: 29026 - protein, 94 aa, Homo sapiens
IMAALRPLVKPKIVKKRTKKFIRHQSDRYVKIKRNWRKPRGIDNRVRRRFKGQILMPNIGYGSNKKTKHMLPSGFRKFLVHNVKELEVLLMCNK

SEQ ID NO: 29027 - protein, 29 aa, Homo sapiens
LFESCPPDPTGGTFEKKRAMLLLRVGTLS

SEQ ID NO: 29028 - protein, 618 aa, Homo sapiens
RPCNRWATVPATEMVEGPGCTLNGEKIRARVLPGQAVTGVRGSALRSLQGRALRLAASTVVVSPQAAALNNDSSQNVLSLFNGYVYSGVETLGKELFMYFGPKALRIHFGMKGFIMINPLEYKYKNGASPVLEVQLTKDLICFFDSSVELRNSMESQQRIRMMKELDVCSPEFSFLRAESEVKKQKGRMLGDVLMDQNVLPGVGNIIKNEALFDSGLHPAVKVCQLTDEQIHHLMKMIRDFSILFYRCRKAGLALSKHYKVYKRPNCGQCHCRITVCRFGDNNRMTYFCPHCQKENPQHVDICKLPTRNTIISWTSSRVDHVMDSVARKSEEHWTCVVCTLINKPSSKACDACLTSRPIDSVLKSEENSTVFSHLMKYPCNTFGKPHTEVKINRKTAFGTTTLVLTDFSNKSSTLERKTKQNQILDEEFQNSPPASVCLNDIQHPSKKTTNDITQPSSKVNISPTISSESKLFSPAHKKPKTAQYSSPELKSCNPGYSNSELQINMTDGPRTLNPDSPRCSKHNRLCILRVVGKDGENKGRQFYACPLPREAQCGFFEWADLSFPFCNHGKRSTMKTVLKIGPNNGKNFFVCPLGKEKQCNFFQWAENGPGIKIIPGC

SEQ ID NO: 29029 - protein, 8 aa, Homo sapiens
IIRLSAEI

SEQ ID NO: 29030 - protein, 928 aa, Homo sapiens
LYRDVMLENYRNLVSLAMCSHFTQDFLPVQGIEDSFHKLILRRYEKCGHDNLQLRKGCKSMNVCKVQKGVYNGINKCLSNTQSKIFQCNARVKVFSKFANSNKDKTRHTGEKHFKCNECGKSFQKFSDLTQHKGIHAGEKPYTCEERGKDFGWYTDLNQHKKIHTGEKPYKCEECGKAFNRSTNLTAHKRIHNREKAYTGEDRDRAFGWSTNLNEYKKIHTGDKPYKCKECGKAFMHSSHLNKHEKIHTGEKPYKCKECGKVISSSSSFAKHKRIHTGEKPFKCLECGKAFNISTTLTKHRRIHTGEKPYTCEVCGKAFRQSANLYVHRRIHTGEKPYTCGECGKTFRQSANLYVHRRIHTGEKPYKCEDCGKAFGRYTALNQHKKIHTGEKPYKCEECGKAFNSSTNLTAHKRIHTREKPYTCEDRGRAFGLSTNLNEYKKIHTGDKPYKCKECGKAFIHSLHLNKHEKIHTGKKPYKCKQCGKVITSSSSFAKHKRIHTGEKPFECLECGKAFTSSTTLTKHRRIHTGEKPYTCEVCGKAFRQSAILYVHRRIHTGEKPYTCEECGKTFRQSANLYVHRRIHTGEKPYKCEECGKAFGRYTDLNQHKKIHTGEKLYKCEECGKDFVWYTDLNQQKKIYTGEKPYKCEECGKAFAPSTDLNQHTKILTGEQSYKCEECGKAFGWSIALNQHKKIHTGEKPYKCEECGKAFSRSRNLTTHRRVHTREKPYKCEDRGRSFGWSTNLNEYKKIHTGDKLYKCKECGKVFKQSSHLNRHEKIHTGKKPYKCKECGKVITSSSSFAKHKRIHTGEKPFKCLECGKAFTSSTTLTKHRRIHTGEKPYTCEECGKAFRQSAILYVHRRIHTGEKPYTCGECGKTFRQSANLYAHKKIHTGEKPYTCGDCGKTFRQSANLYAHKKIHTGDKTIQV

SEQ ID NO: 29031 - protein, 64 aa, Homo sapiens
LIPQFGLFSKYRTPNCSQYRLPGCPRHFNPVCGSDMSTYANECTLCMKIREGGHNIKIIRNGPC

SEQ ID NO: 29032 - protein, 210 aa, Homo sapiens
LVLKMEVDINGESRSTLTTLPFPGAEANSPGKAEAEKPRCSSTPCSPMRRTVSGYQILHMDSNYLVGFTTGEELLKLAQKCTGGEESKAEAMPSLRSKQLDAGLARSSRLYKTRSRYYQPYEIPAVNGRRRRRMPSSGDKCTKSLPYEPYKALHGPLPLCLLKGKRAHSKSLDYLNLDKMIKEPADTEVLQYQLQHLTLRGDRVFARNNT

SEQ ID NO: 29033 - protein, 34 aa, Homo sapiens
LRPRVCAPNLRWSTRDPLSTNPSPPRGPLFAPTR

SEQ ID NO: 29034 - protein, 37 aa, Homo sapiens
LSTNPSPPRGPLFAPTRYKKALDGGVVGGRERGREVP

SEQ ID NO: 29035 - protein, 18 aa, Homo sapiens
LRMASRETRKWTPWLLES

SEQ ID NO: 29036 - protein, 100 aa, Homo sapiens
VGTELGAGQETRGWPTWILANSGLSSFLVSEGPFCFQGGACEVRKWHLERGRKRRKNRSSASDLRWLKERMYLVSAISLHPSMTLLSMSLIFLARKPSAV

SEQ ID NO: 29037 - protein, 132 aa, Homo sapiens
IRPWPVMRRITIKIPQNRFGVRSTSINAFTQQSGKTSSILCRRGRWRWSDWFTSQLPQAEASPGPVKLEPGCKARRCCVAPEELARSHGIRRLHTHVHTPRSGEGTVLRGSNLYSSGGSRKSQNLLFSGWVM

SEQ ID NO: 29038 - protein, 90 aa, Homo sapiens
TMPKRKKQNHHQPPTQQQPPLPEREETGDEEDGSPIGPPSLLGPPPMANGKPGDPKSAPNWIPPTCPSSVEWINKLLCMHAMGLHCNENE

SEQ ID NO: 29039 - protein, 187 aa, Homo sapiens
LRVREDACSRVCAAFTGVSAAGAMSEPAGDVRQNPCGSKACRRLFGPVDSEQLSRDCDALMAGCIQEARERWNFDFVTETPLEGDFAWERVRGLGLPKLYLPTGPRRGRDELGGGRRPGTSPALLQGTAEEDHVDLSLSCTLVPRSGEQAEGSPGGPGDSQGRKRRQTSMTDFYHSKRRLIFSKRKP

SEQ ID NO: 29040 - protein, 32 aa, Homo sapiens
TIKLKWKRSIPEGSFTTSLTALMKRKATGCAM

SEQ ID NO: 29041 - protein, 675 aa, Homo sapiens
VRSAAAQPGRDAGRRRAAGGGSPVRSPRLSAEPRARRAMARRPRHSIYSSDEDDEDFEMCDHDYDGLLPKSGKRHLGKTRWTREEDEKLKKLVEQNGTDDWKVIANYLPNRTDVQCQHRWQKVLNPELIKGPWTKEEDQRVIELVQKYGPKRWSVIAKHLKGRIGKQCRERWHNHLNPEVKKTSWTEEEDRIIYQAHKRLGNRWAEIAKLLPGRTDNAIKNHWNSTMRRKVEQEGYLQESSKASQPAVATSFQKNSHLMGFAQAPPTAQLPATGQPTVNNDYSYYHISEAQNVSSHVPYPVALHVNIVNVPQPAAAAIQRHYNDEDPEKEKRIKELELLLMSTENELKGQQTQNHTCSYPGWHSTTIADHTRPHGDSAPVSCLGEHHSTPSLPADPGSLPEESASPARCMIVHQGTILDNVKNLLEFAETLQFIDSFLNTSSNHENSDLEMPSLTSTPLIGHKLTVTTPFHRDQTVKTQKENTVFRTPAIKRSILESSPRTPTPFKHALAAQEIKYGPLKMLPQTPSHLVEDLQDVIKQESDESGIVAEFQENGPPLLKKIKQEVESPTDKSGNFFCSHHWEGDSLNTQLFTQTSPVADAPNILTSSVLMAPASEDEDNVLKAFTVPKNRSLASPLQPCSSTWEPASCGKMEEQMTSSSQARKYVNAFSARTLVM

SEQ ID NO: 29042 - protein, 42 aa, Homo sapiens
LGSTPNCMPSPGVMTGGSAWKTTAAKVLWSIMSDSQEVTGWN

SEQ ID NO: 29043 - protein, 85 aa, Homo sapiens
IRRYQKSTELLIRKLPFQRLVREIAQDFKTDLRFQSSAVMALQEACEAYLVGLFEDTNLCAIHAKRVTIMPKDIQLARRIRGERA

SEQ ID NO: 29044 - protein, 1678 aa, Homo sapiens
ITVGQRDSEDVSKRDSDKEMATKSAVVHDITDDGQEETPEIIEQIPSSESNLEELTQPTESQANDIGFKKVFKFVGFKFTVKKDKTEKPDTVQLLTVKKDEGEGAAGAGDHKDPSLGAGEAASKESEPKQSTEKPEETLKREQSHAEISPPAESGQAVEECKEEGEEKQEKEPSKSAESPTSPVTSETGSTFKKFFTQGWAGWRKKTSFRKPKEDEVEASEKKKEQEPEKVDTEEDGKAEVASEKLTASEQAHPQEPAESAHEPRLSAEYEKVELPSEEQVSGSQGPSEEKPAPLATEVFDEKIEVHQEEVVAEVHVSTVEERTEEQKTEVEETAGSVPAEELVEMDAEPQEAEPAKELVKLKETCVSGEDPTQGADLSPDEKVLSKPPEGVVSEVEMLSSQERMKVQGSPLKKLFTSTGLKKLSGKKQKGKRGGGDEESGEHTQVPADSPDSQEEQKGESSASSPEEPEEITCLEKGLAEVQQDGEAEEGATSDGEKKREGVTPWASFKKMVTPKKRVRRPSESDKEDELDKVKSATLSSTESTASEMQEEMKGSVEEPKPEEPKRKVDTSVSWEALICVGSSKKRARRGSSSDEEGGPKAMGGDHQKADEAGKDKETGTDGILAGSQEHDPGQGSSSPEQAGSPTEGEGVSTWESFKRLVTPRKKSKSKLEEKSEDSIAGSGVEHSTPDTEPGKEESWVSIKKFIPGRRKKRPDGKQEQAPVEDAGPTGANEDDSDVPAVVPLSEYDAVEREKMEAQQAQKSAEQPEQKAATEVSKELSESQVHMMAAAVADGTRAATIIEERSPSWISASVTEPLEQVEAEAALLTEEVLEREVIAEEEPPTVTEPLPENREARGDTVVSEAELTPEAVTAAETAGPLGAEEGTEASAAEETTEMVSAVSQLTDSPDTTEEATPVQEVEGGVPDIEEQERRTQEVLQAVAEKVKEESQLPGTGGPEDVLQPVQRAEAERPEEQAEASGLKKETDVVLKVDAQEAKTEPFTQGKVVGQTTPESFEKAPQVTESIESSELVTTCQAETLAGVKSQEMVMEQAIPPDSVETPTDSETDGSTPVADFDAPGTTQKDEIVEIHEENEVASGTQSGGTEAEAVPAQKERPPAPSSFVFQEETKEQSKMEDTLEHTDKEVSVETVSILSKTEGTQEADQYADEKTKDVPFFEGLEGSIDTGITVSREKVTEVALKGEGTEEAECKKDDALELQSHAKSPPSPVEREMVVQVEREKTEAEPTHVNEEKLEHETAVTVSEEVSKQLLQTVNVPIIDGAKEVSSLEGSPPPCLGQEEAVCTKIQVQSSEASFTLTAAAEEEKVLGETANILETGETLEPAGAHLVLEEKSSEKNEDFAAHPGEDAVPTGPDCQAKSTPVIVSATTKKGLSSDLEGEKTTSLKWKSDEVDEQVACQEVKVSVAIEDLEPENGILELETKSSKLVQNIIQTAVDQFVRTEETATEMLTSELQTQAHVIKADSQDAGQETEKEGEEPQASAQDETPITSAKEESESTAVGQAHSDISKDMSEASEKTMTVEVEGSTVNDQQLEEVVLPSEEEGGGAGTKSVPEDDGHALLAERIEKSLVEPKEDEKGDDVDDPENQNSALADTDASGGLTKESPDTNGPKQKEKEDAQEVELQEGKVHSESDKAITPQAQEELQKQERESAKSELTES

SEQ ID NO: 29045 - protein, 438 aa, Homo sapiens
MQTEAARDYRDEESSSPARHGEQMPSFYPAENLDNGLIDQRVLKQRRNVKQILARSKALQWTKSYVLPEFPYDVKCMLAEQKCPDHSMRIRIIEFLQADMTKYLEGSLYPSTQQYNDVVNALLQAHPFLDEDGCGFFLWKRALKDRFKYVRRPIEDDEQVIRNKCKFGHRRGQTRKSLADIRFDEIKLVQIKEEAVCFDSELDEHIKWFQQEYVKTEKDWREIDKRMSQTLEIRRKMIGSRTPLKDILKLFPFLKCPYQMFREFQLLTRTDIYKKTRHILESYSENILTSFSVVDNPINIVLQEKMKHYTDEDMLKYMKMTATCLLLPDVFGDDPSLFVIMNEQVQVSTPVLEVKNPFNMEVCEFSLYLERERLTKVDDCVTALAALVAAFHVFRIECPRRLSQTFNFLETLIFDMHSPYFPSLKEKENEVGFQHPLT

SEQ ID NO: 29046 - protein, 8 aa, Homo sapiens
VGLSEFPV

SEQ ID NO: 29047 - protein, 10 aa, Homo sapiens
TRSLINSWGV

SEQ ID NO: 29048 - protein, 169 aa, Homo sapiens
LKVTSLEPGTVVITEQAVDTCFKAEFEQIVLGKRVIRKTDLNKKLVQELLLCSAELSEFTTVVGNTMCTLDFYEGQGRLDGALCSYTEKDKQAYLEAAYAAGVRNIEMESSVFAAMCSACGLQAAVVCVTLLNRLEGDQISSPRNVLSEYQQRPQRLVSYFIKKKLSKA

SEQ ID NO: 29049 - protein, 216 aa, Homo sapiens
LFFAKSEPERQAAAAAEGSATVSAGARTARAREEPPRARALRATPATSSRELCPGDRARVMTTNPKPNKALKVKKEAGENAPVLSDDELVSMSVRELNQHLRGLTKEEVTRLKQRRRTLKNRGYAASCRIKRVTQKEELERQRVELQQEVEKLARENSSMRLELDALRSKYEALQTFARTVARGPVAPSKVATTSVITIVKSTELSSTSVPFSAAS

SEQ ID NO: 29050 - protein, 32 aa, Homo sapiens
LPSAPTTMRCISMKRAVPNGPRCTSSRSTTGR

SEQ ID NO: 29051 - protein, 20 aa, Homo sapiens
MKRAVPNGPRCTSSRSTTGR

SEQ ID NO: 29052 - protein, 35 aa, Homo sapiens
LRFPEVPGLAGGIVDASLTSLCMCPGCCAGRKNGG

SEQ ID NO: 29053 - protein, 28 aa, Homo sapiens
LLVPASARRAGQAALVCDLQAGRPSSPE

SEQ ID NO: 29054 - protein, 300 aa, Homo sapiens
ILACGRGDSFFIRSHFECEKETPQSLAFTRGEVFRVVDTLYDGKLGNWLAVRIGNELEKGLIPNKSRAEQMASVQNAQRDNAGDRADFWRMRGQRSGVKKNLRKSREDLTAVVSVSTKFPAYERVLLREAGFKRPVVLFGPIADIAMEKLANELPDWFQTAKTEPKDAGSEKSTGVVRLNTVRQIIEQDKHALLDVTPKAVDLLNYTQWFPIVIFFNPDSRQGVKTMRQRLNPTSNKSSRKLFDQANKLKKTCAHLFTATINLNSANDSWFGSLKDTIQHQQGEAVWVSEGKVCGIDMLL

SEQ ID NO: 29055 - protein, 416 aa, Homo sapiens
IPDAMSSKGSVVLAYSGGLDTSCILVWLKEQGYDVIAYLANIGQKEDFEEARKKALKLGAKKVFIEDVSREFVEEFIWPAIQSSALYEDRYLLGTSLARPCIARKQVEIAQREGAKYVSHGATGKGNDQVRFELSCYSLAPQIKVIAPWRMPEFYNRFKGRNDLMEYAKQHGIPIPVTPKNPWSMDENLMHISYEAGILENPKNQAPPGLYTKTQDPAKAPNTPDILEIEFKKGVPVKVTNVKDGTTHQTSLELFMYLNEVAGKHGVGRIDIVENRFIGMKSRGIYETPAGTILYHAHLDIEAFTMDREVRKIKQGLGLKFAELVYTGFWHSPECEFVRHCIAKSQERVEGKVQVSVLKGQVYILGRESPLSLYNEELVSMNVQGDYEPTDATGFININSLRLKEYHRLQSKVTAK

SEQ ID NO: 29056 - protein, 27 aa, Homo sapiens
RKITEVKHHFITSCQGFLVNFWMKPLN

SEQ ID NO: 29057 - protein, 42 aa, Homo sapiens
LLGLPPPPPDALSRLESWSFCRGLSRRKRRRPVGVGPMLQGV

SEQ ID NO: 29058 - protein, 108 aa, Homo sapiens
IRVLDVNNQSFREQEEPSNKRVRPLARVTSLANLISPVRNGAVRRFGQTIQSFTLRGDHRSPASAQKFSSRSTVPTPAKRRSSALWSEMLDITMKESLTTREIRRQEE

SEQ ID NO: 29059 - protein, 612 aa, Homo sapiens
IRAARAPPVSSASPPLCSLYLTSCCCWCFFFFYPPFLFIIFLHIDRILGNERKKKPKLTRAEDLPPLPLPSSLFSPPQEKKTPKQKKVHLGLVFFLQYFLGGQNFLGVIFFGFSSSFIFLPKLLLVGEKKMPQLNGGGGDDLGANDELISFKDEGEQEEKSSENSSAERDLADVKSSLVNESETNQNSSSDSEAERRPPPRSESFRDKSRESLEEAAKRQDGGLFKGPPYPGYPFIMIPDLTSPYLPNGSLSPTARTLHFQSGSTHYSAYKTIEHQIAVQYLQMKWPLLDVQAGSLQSRQALKDARSPSPAHIVSNKVPVVQHPHHVHPLTPLITYSNEHFTPGNPPPHLPADVDPKTGIPRPPHPPDISPYYPLSPGTVGQIPHPLGWLVPQQGQPVYPITTGGFRHPYPTALTVNASMSRFPPHMVPPHHTLHTTGIPHPAIVTPTVKQESSQSDVGSLHSSKHQDSKKEEEKKKPHIKKPLNAFMLYMKEMRAKVVAECTLKESAAINQILGRRWHALSREEQAKYYELARKERQLHMQLYPGWSARDNYGKKKKRKRDKQPGETNEHSECFLNPCLSLPPITGEKKSAFATYKVKAAASAHPLQMEAY

SEQ ID NO: 29060 - protein, 43 aa, Homo sapiens
KDYCIELLVSSYSTPKISFCYSKDQMLRLPFQVVLRIRVVVIH

SEQ ID NO: 29061 - protein, 28 aa, Homo sapiens
IYPLFTDEESEAQRTVMKCDQTLRSPKR

SEQ ID NO: 29062 - protein, 27 aa, Homo sapiens
IFRGANSQKNTFRKNPSDPRVAGELVL

SEQ ID NO: 29063 - protein, 1200 aa, Homo sapiens
LARERFKVVFAPVICKRTCLKGQCRDSCQQGSNMTLIGENGHSTDTLTGSGFRVVVCPLPCMNGGQCSSRNQCLCPPDFTGRFCQVPAGGAGGGTGGSGPGLSRTGALSTGALPPLAPEGDSVASKHAIYAVQVIADPPGPGEGPPAQHAAFLVPLGPGQISAEVQAPPPVVNVRVHHPPEASVQVHRIESSNAESAAPSQHLLPHPKPSHPRPPTQKPLGRCFQDTLPKQPCGSNPLPGLTKQEDCCGSIGTAWGQSKCHKCPQLQYTGVQKPGPVRGEVGADCPQGYKRLNSTHCQDINECAMPGVCRHGDCLNNPGSYRCVCPPGHSLGPSRTQCIADKPEEKSLCFRLVSPEHQCQHPLTTRLTRQLCCCSVGKAWGARCQRCPTDGTAAFKEICPAGKGYHILTSHQTLTIQGESDFSLFLHPDGPPKPQQLPESPSQAPPPEDTEEERGVTTDSPVSEERSVQQSHPTATTTPARPYPELISRPSPPTMRWFLPDLPPSRSAVEIAPTQVTETDECRLNQNICGHGECVPGPPDYSCHCNPGYRSHPQHRYCVDVNECEAEPCGPGRGICMNTGGSYNCHCNRGYRLHVGAGGRSCVDLNECAKPHLCGDGGFCINFPGHYKCNCYPGYRLKASRPPVCEDIDECRDPSSCPDGKCENKPGSFKCIACQPGYRSQGGGACRDVNECAEGSPCSPGWCENLPGSFRCTCAQGYAPAPDGRSCLDVDECEAGDVCDNGICSNTPGSFQCQCLSGYHLSRDRSHCEDIDECDFPAACIGGDCINTNGSYRCLCPQGHRLVGGRKCQDIDECSQDPSLCLPHGACKNLQGSYVCVCDEGFTPTQDQHGCEEVEQPHHKKECYLNFDDTVFCDSVLATNVTQQECCCSLGAGWGDHCEIYPCPVYSSAEFHSLCPDGKGYTQDNNIVNYGIPAHRDIDECMLFGSEICKEGKCVNTQPGYECYCKQGFYYDGNLLECVDVDECLDESNCRNGVCENTRGGYRCACTPPAEYSPAQRQCLSPEEMERAPERRDVCWSQRGEDGMCAGPLAGPALTFDDCCCRQGRGWGAQCRPCPPRGAGSHCPTSQSESNSFWDTSPLLLGKPPRDEDSSEEDSDECRCVSGRCVPRPGGAVCECPGGFQLDASRARCVDIDECRELNQRGLLCKSERCVNTSGSFRCVCKAGFARSRPHGACVPQRRR

SEQ ID NO: 29064 - protein, 26 aa, Homo sapiens
VSERHMKRSIQVFIQIGIKIINNVCH

SEQ ID NO: 29065 - protein, 29 aa, Homo sapiens
LQRIFYLKLEDLVPPPPIIDKIFMDTLPF

SEQ ID NO: 29066 - protein, 39 aa, Homo sapiens
LFPESGLEISELPILRPSSGERVPGSQESWALPLTSWRP

SEQ ID NO: 29067 - protein, 200 aa, Homo sapiens
VIYNEQMASKKRELFSNLQEFAGPSGKLSLLEVGCGTGANFKFYPPGCRVTCIDPNPNFEKFLIKSIAENRHLQFERFVVAAGENMHQVADGSVDVVVCTLVLCSVKNQERILREVCRVLRPGGAFYFMEHVAAECSTWNYFWQQVLDPAWHLLFDGCNLTRESWKALERASFSKLKLQHIQAPLSWELVRPHIYGYAVK

SEQ ID NO: 29068 - protein, 21 aa, Homo sapiens
RRPESDMSPAAQAERPVALFF

SEQ ID NO: 29069 - protein, 27 aa, Homo sapiens
TAAATAVWRVHTCDSQWRVKTQIHNEN

SEQ ID NO: 29070 - protein, 378 aa, Homo sapiens
LWLFIREQRTQQQRSGPQGIAPVPPPRDLSWEAGHGGNVALPLKETSVENFLGATTPALAKLQVPREQLSEVLEQICSGSCGPIFRANMNTGDPSKPKSVILKALKEPAGLHEVQDFLGRIQFHQYLGKHKNLVQLEGCCTEKLPLYMVLEDVAQGDLLSFLWTCRRDVMTMDGLLYDLTEKQVYHIGKQVLLALEFLQEKHLFHGDVAARNILMQSDLTAKLCGLGLAYEVYTRGAISSTQTIPLKWLAPERLLLRPASIRADVWSFGILLYEMVTLGAPPYPEVPPTSILEHLQRRKIMKRPSSCTHTMYSIMKSCWRWREADRPSPRELRLRLEAAIKTADDEAVLQVPELVVPELYAAVAGIRVESLFYNYSML

SEQ ID NO: 29071 - protein, 23 aa, Homo sapiens
IPTSRTVRILKTTQQKVKKWKIV

SEQ ID NO: 29072 - protein, 93 aa, Homo sapiens
LEELGFDTDGLSSAVWPGGETEALTRLERHLERKAWVANFERPRMNANSLLASPTGLSPYLRFGCLSCRLFYFKLTDLYKKVFSKIRAYCLIL

SEQ ID NO: 29073 - protein, 289 aa, Homo sapiens
RMAGEKVEKPDTKEKKPEAKKVDAGGKVKKGNLKAKKPKKGKPHCSRNPVLVRGIGRYSRSAMYSRKAMYKRKYSAAKSKVEKKKKEKVLATVTKPVGGDKNGGTRVVKLRKMPRYYPTEDVPRKLLSHGKKPFSQHVRKLRASITPGTILIILTGRHRGKRVVFLKQLASGLLLVTGPLVLNRVPLRRTHQKFVIATSTKIDISNVKIPKHLTDAYFKKKKLRKPRHQEGEIFDTEKEKYEITEQRKIDQKAVDSQILPKIKAIPQLQGYLRSVFALTNGIYPHKLVF

SEQ ID NO: 29074 - protein, 32 aa, Homo sapiens
RTKRHQKFTHFLPRPVDPDKVPELYKDILSQS

SEQ ID NO: 29075 - protein, 22 aa, Homo sapiens
KPAIFVTSELFSVSRFMCSSRL

SEQ ID NO: 29076 - protein, 21 aa, Homo sapiens
MAIFVTSELFSVSRFMCSSRL

SEQ ID NO: 29077 - protein, 22 aa, Homo sapiens
KKSALGSSAGITHIPQNAGSKL

SEQ ID NO: 29078 - protein, 355 aa, Homo sapiens
IMSLRGSLSRLLQTRVHSILKKSVHSVAVIGAPFSQGQKRKGVEHGPAAIREAGLMKRLSSLGCHLKDFGDLSFTPVPKDDLYNNLIVNPRSVGLANQELAEVVSRAVSDGYSCVTLGGDHSLAIGTISGHARHCPDLCVVWVDAHADINTPLTTSSGNLHGQPVSFLLRELQDKVPQLPGFSWIKPCISSASIVYIGLRDVDPPEHFILKNYDIQYFSMRDIDRLGIQKVMERTFDLLIGKRQRPIHLSFDIDAFDPTLAPATGTPVVGGLTYREGMYIAEEIHNTGLLSALDLVEVNPQLATSEEEAKTTANLAVDVIASSFGQTREGGHIVYDQLPTPSSPDESENQARVRI

SEQ ID NO: 29079 - protein, 40 aa, Homo sapiens
VKGLLLNMLGLGHEVEEVEDDTLTVLVVADLEMIDEMLHL

SEQ ID NO: 29080 - protein, 1074 aa, Homo sapiens
VAGGRGRRSARRGRKAAERSSNLRAFGNWKTWWRTRVRTCILPQRVIDVSGMWDQRLVRLALLQHLRAFYGIKVKGVRGQCDRRRHETAATEIGGKIFGVPFNALPHSAVPEYGHIPSFLVDACTSLEDHIHTEGLFRKSGSVIRLKALKNKVDHGEGCLSSAPPCDIAGLLKQFFRELPEPILPADLHEALLKAQQLGTEEKNKATLLLSCLLADHTVHVLRYFFNFLRNVSLRSSENKMDSSNLAVIFAPNLLQTSEGHEKMSSNTEKKLRLQAAVVQTLIDYASDIGRVPDFILEKIPAMLGIDGLCATPSLEGFEEGEYETPGEYKRKRRQSVGDFVSGALNKFKPNRTPSITPQEERIAQLSESPVILTPNAKRTLPVDSSHGFSSKKRKSIKHNFNFELLPSNLFNSSSTPVSVHIDTSSEGSSQSSLSPVLIGGNHLITAGVPRRSKRIAGKKVCRVESGKAGCFSPKISHKEKVRRSLRLKFNLGKNGREVNGCSGVNRYESVGWRLANQQSLKNRIESVKTGLLFSPDVDEKLPKKGSEKISKSEETLLTPERLVGTNYRMSWTGPNNSSFQEVDANEASSMVENLEVENSLEPDIMVEKSPATSCELTPSNLNNKHNSNITSSPLSGDENNMTKETLVKVQKAFSESGSNLHALMNQRQSSVTNVGKVKLTEPSYLEDSPEENLFETNDLTIVESKEKYEHHTGKGEKCFSERDFSPLQTQTFNRETTIKCYSTQMKMEHEKDIHSNMPKDYLSKQEFSSDEEIKKQQSPKDKLNNKLKENENMMEGNLPKCAAHSKDEARSSFSQQSTCVVTNLSKPRPMRIAKQQSLETCEKTVSESSQMTEHRKVSDHIQWFNKLSLNEPNRIKVKSPLKFQRTPVRQSVRRINSLLEYSRQPTGHKLASLGDTASPLVKSVSCDGALSSCIESASKDSSVSCIKSGPKEQKSMSCEESNIGAISKSSMELPSKSFLKMRKHPDSVNASLRSTTVYKQKILSDGQVKVPLDDLTNHDIVKPVVNNNMGISSGINNRVLRRPSERGRAWYKGSPKHPIGKTQLLPTSKPVDL

SEQ ID NO: 29081 - protein, 345 aa, Homo sapiens
LPHWKITPQASLAPSSELTGMVPREAPESAQCLCPSLTIPNAKDVLRKRHKRRSRQHQRFMARKALLQEQGLLSMPPEPGSSPLPTPFGAATATEAASSGKQCLRAGSGSAPCSRRPAPGKASGPLPSKCVAIDCEMVGTGPRGRVSELARCSIVSYHGNVLYDKYIRPEMPIADYRTRWSGITRQHMRKAVPFQVAQKEILKLLKGKVVVGHALHNDFQALKYVHPRSQTRDTTYVPNFLSEPGLHTRARVSLKDLALQLLHKKIQVGQHGHSSVEDATTAMELYRLVEVQWEQQEARSLWTCPEDREPDSSTDMEQYMEDQYWPDDLAHGSRGGAREAQDRRN

SEQ ID NO: 29082 - protein, 40 aa, Homo sapiens
LISGKKEWCTEPVGRMEPLAEARESTCSYGTQQGRRGFVA

SEQ ID NO: 29083 - protein, 43 aa, Homo sapiens
LWCGLVDLGRTTSALTPTPTCPQAGSPQQSRQTSALNRTALQM

SEQ ID NO: 29084 - protein, 74 aa, Homo sapiens
ISAAASMLSLLRNETGNSSISLGISSWPWLGKWGSWQNSFSGKPMGNLAPKAGPPGNGQPFKRSLVTSSSTWWH

SEQ ID NO: 29085 - protein, 42 aa, Homo sapiens
LEPIVYTSQNVALQLTLPCVKESGKPHLKSSTMWTTLKLLRI

SEQ ID NO: 29086 - protein, 203 aa, Homo sapiens
LRLCVPSGNSKVMLLGDTGVGKTCFLIQFKDGAFLSGTFIATVGIDFRNKVVTVDGVRVKLQIWDTAGQERFRSVTHAYYRDAQALLLLYDITNKSSFDNIRAWLTEIHEYAQRDVVIMLLGNKADMSSERVIRSEDGETLAREYGVPFLETSAKTGMNVELAFLAIAKELKYRAGHQADEPSFQIRDYVESQKKRSSCCSFM

SEQ ID NO: 29087 - protein, 84 aa, Homo sapiens
RLQKRLASSVLRCGKKKVWLDPNETNEIANANSRQQIRKLIKDGLIIRKPVTVHSRARCRKNTLARRKGRHMGIGKCGHLLLKK

SEQ ID NO: 29088 - protein, 64 aa, Homo sapiens
VCKKAPCKTRQEDAGGRLLGGTLSFTPVCCHGCRALVLMAPGGTYRMPRAERKWEWRRCDIPRC

SEQ ID NO: 29089 - protein, 29 aa, Homo sapiens
LRSNQMGSSGVLWERLSSVLSRKDSALLV

SEQ ID NO: 29090 - protein, 87 aa, Homo sapiens
IRRASGCNQQPSVLGHGGFRPRGPRESLVGRVAARKERLGWFFICCFLKSRAAGPEMDGGTGDLGTRKRAEGREPVEIDWSLGSVVS

SEQ ID NO: 29091 - protein, 50 aa, Homo sapiens
RPRQKTRSVWTWTSWRRCFRSWCVSVGRGASGGARLAGPKCFSSPQLLDF

SEQ ID NO: 29092 - protein, 42 aa, Homo sapiens
IIWEELVRWNSSPSMEKIIHVSPFSLICLSLKCKAWTKILLH

SEQ ID NO: 29093 - protein, 29 aa, Homo sapiens
RRWLLMREDVAEGLTLGAGVICENGSLFT

SEQ ID NO: 29094 - protein, 13 aa, Homo sapiens
RISLLPEGLGRAL

SEQ ID NO: 29095 - protein, 174 aa, Homo sapiens
VKRKIQALQQQADEAEDRAQGLQRELDGERERREKAEGDVAALNRRIQLVEEELDRAQERLATALQKLEEAEKAADESERGMKVIENRAMKDEEKMEIQEMQLKEAKHIAEEADRKYEEVARKLVILEGELERAEERAEVSELKCGDLEEELKNVTNNLKSLEAASEKRRGLTM

SEQ ID NO: 29096 - protein, 49 aa, Homo sapiens
RPEQPHHAEGAQGAGCEGAGHHEGGRRRGVLGSLQEEEGKRDRFFAGSR

SEQ ID NO: 29097 - protein, 26 aa, Homo sapiens
TTGRDASHPSGCSCGFPVQEEAVGVG

SEQ ID NO: 29098 - protein, 53 aa, Homo sapiens
IKACQAVCSSHGKSCSVEPHKISKKHHSPILTSFTSLCLKKTGLKQGLTPSCF

SEQ ID NO: 29099 - protein, 306 aa, Homo sapiens
KSGGGSGGKKMKNEIAAVVFFFTRLVRKHDKLKKEAVERFAEKLTLILQEKYKNHWYPEKPSKGQAYRCIRVNKFQRVDPDVLKACENSCILYSDLGLPKELTLWVDPCEVCCRRDGVSPCWPDCSQTPDLVIRPPWPPKALDYRREPLRPASSFLIMYGEKNNAFIVASFENKDENKDEISRKVTRALDKVTSDYHSGSSSSDEETSKEMEVKPSSVTAAASPVYQISELIFPPLPMWHPLPRKKPGMYRGNGHQNHYPPPVPFGYPNQGRKNKPYRPIPVTWVPPPGMHCDRNHWINPHMLAPH

SEQ ID NO: 29100 - protein, 88 aa, Homo sapiens
LCSCQSRVSSMEAPSVGSMRSTACPVPTRTIRGRPWKASSSSLVWSPLQVTMNSECVDGWVDGGWQVGRLQGHSWQRLWVCRGPQVPL

SEQ ID NO: 29101 - protein, 441 aa, Homo sapiens [sequence omitted]

SEQ ID NO: 29102 - protein, 180 aa, Homo sapiens
MEKHIEEDEVRSSADLRIRKSQHSVLSRKFVEVMTKYNEAQVDFRERSKGRIQRQLEITGKKTTDEELEEMLESGNPAIFTSGIIDSQISKQALSEIEGRHKDIVRLESSIKELHDMFMDIAMLVENQGSMIDRIENNMDQSVGFVERAVADTKKAVKYQSEARRKLISLQTGVATLVFR

SEQ ID NO: 29103 - protein, 68 aa, Homo sapiens [sequence omitted]

SEQ ID NO: 29104 - protein, 358 aa, Homo sapiens
MILYPLIGIPQTINWETIARLVPGLTPKECAKRFDELKSSGSSPVDNQYNSLMAAGESPVETLATYIKSSLLDIHGEFQETPVGHDAVSKTGRHSIASTRNCSSESENCTTHNGGEMTEESEGPNMVIHVCDEAKNLKEDFTCPRDLLISEMKYFAEYLSMDAQRWEEVDISVHCDVHIFNWLIKYIKRNTKENKDCEMPTLEPGNVISILISSEFLKMDSLVEQCIQYCHKNMNAIVATPCNMNCINANLLTRIADLFSHNEVDDLKDKKDKFKSKLFCKKIERLFDPEYLNPDSRSNAATLYRCCLCKKLLTKETERRIPCIPGKINVDRRGNIVYIHIRCREDKIHTCIFVYIYI

SEQ ID NO: 29105 - protein, 80 aa, Homo sapiens
MDLSQSFHVCSQLPAEKAKGSLPGKPVWLLREPVDTEQSKIRPGFRKNSCLPSKQLGSTQTWYIIHKDEGYGSTLRQGML

SEQ ID NO: 29106 - protein, 130 aa, Homo sapiens
MQEQLSKNKELTQKLQVASESEEEEGGTEDVEELLVPDVVNEVQMNADGPNPWMLRSCTSDTKEAATQEDPEQLPELEAHGVSESEGEERPVAEEEILLREFEERRSLRKRSELSQDAEPAGSQETKGEL

SEQ ID NO: 29107 - protein, 73 aa, Homo sapiens
KTWTDLSVLARQVHTLHGCAMGRDTGPELCLHDSSLPAAGLVHCDLCLGDLPSKSFHSFSFSQSGSFLNGRLR

SEQ ID NO: 29108 - protein, 31 aa, Homo sapiens
RVLYIEGRVGKLIFFFNREGLTIFGRLGAKD

SEQ ID NO: 29109 - protein, 22 aa, Homo sapiens
ILYARPLPLPPGGTSPSPPDLS

SEQ ID NO: 29110 - protein, 77 aa, Homo sapiens
IYTDFIEKEAPKEINIDFQTKTLIAQNIQEATSGCFTTAQKRVYSLMENNSYPRFLESEFYQDLCKKPQITTEPHAT

SEQ ID NO: 29111 - protein, 35 aa, Homo sapiens
RNVPMTGSISHVLVQLPHVFQRMEAENLASVIDAR

SEQ ID NO: 29112 - protein, 27 aa, Homo sapiens
KSVFHGVCLHLLTSQVLKQKTKAMILM

SEQ ID NO: 29113 - protein, 74 aa, Homo sapiens
IFFVFKEKKCPCVCRDDLQFSPAEADRMRLWAVPPPSMLPLFKMKRKPRKGKTTRTEMCLAMSIGSNQWKRSNT

SEQ ID NO: 29114 - protein, 15 aa, Homo sapiens
IPQSHRHANVQEVQM

SEQ ID NO: 29115 - protein, 407 aa, Homo sapiens
VPSDGQAREKLALYVYEYLLHVGAQKSAQTFLSEIRWEKNITLGEPPGFLHSWWCVFWDLYCAAPERRDTCEHSSEAKAFHDYSAAAAPSPVLGNIPPNDGMPGGPIPPGFFQPFMSPRYAGGPRPPIRMGNQPPGGVPGTQPLLPNSMDPTRQQGHPNMGGSMQRMNPPRGMGPMGPGPQNYGSGMRPPPNSLGPAMPGINMGPGAGRPWPNPNSANSIPYSSSSPGTYVGPPGGGGPPGTPIMPSPADSTNSSDNIYTMINPVPPGGSRSNFPMGPGSDGPMGGMGGMEPHHMNGSLGSGDIDGLPKNSPNNISGISNPPGTPRDDGELGGNFLHSFQNDNYSPSMTMSVSPLLRDAERAGIAGGKMPEIMQEVRCHYPGAGGEGISLLPSTPSHPIHAPYLSQF

SEQ ID NO: 29116 - protein, 24 aa, Homo sapiens
KKLEEVQKVDRVKERDFFLKNCDV

SEQ ID NO: 29117 - protein, 22 aa, Homo sapiens
VRACVRVCARASVWTRRWGQLS

SEQ ID NO: 29118 - protein, 7 aa, Homo sapiens
KKMTRSF

SEQ ID NO: 29119 - protein, 84 aa, Homo sapiens
TVPVQCPWWGGSTPRSLRDAPRLAPPTAGVPRPCPRGPSQGVGSRASGVERRKDGALGASEMLPSAREGRARRRQPGSRHDALA

SEQ ID NO: 29120 - protein, 33 aa, Homo sapiens
ISGFPKNRVIGSGCNLDSAQFGYLMGESWEFTH

SEQ ID NO: 29121 - protein, 109 aa, Homo sapiens
INEVVTREYTINIHKRIHGVGFKKRAPRALKEIRKFAMKEMGTPDVRIDTRLNKAVWAKGIRNVPYRIRVRLSRKRNEDEDSPNKLYTLVTYVPVTTFKNLQTVNVDEN

SEQ ID NO: 29122 - protein, 52 aa, Homo sapiens
LGAPSRRLGERRLRWQRQESPAATGRTPPLERILKEMKSALRNEVDCLLAFC

SEQ ID NO: 29123 - protein, 460 aa, Homo sapiens
LLFLCRDVAIDVVPPNVRDLLDILRERGKLSVGDLAELLYRVRRFDLLKRILKMDRKAVETHLLRNPHLVSDYRVLMAEIGEDLDKSDVSSLIFLMKDYMGRGKISKEKSFLDLVVELEKLNLVAPDQLDLLEKCLKNIHRIDLKTKIQKYKQSVQGAGTSYRNVLQAAIQKSLKDPSNNFRLHNGRSKEQRLKEQLGAQQEPVKKSIQESEAFLPQSIPEERYKMKSKPLGICLIIDCIGNETELLRDTFTSLGYEVQKFLHLSMHGISQILGQFACMPEHRDYDSFVCVLVSRGGSQSVYGVDQTHSGLPLHHIRRMFMGDSCPYLAGKPKMFFIQNYVVSEGQLEDSSLLEVDGPAMKNVEFKAQKRGLCTVHREADFFWSLCTADMSLLEQSHSSPSLYLQCLSQKLRQERKRPLLDLHIELNGYMYDWNSRVSAKEKYYVWLQHTLRKKLILSYT

SEQ ID NO: 29124 - protein, 8 aa, Homo sapiens
LPFSCPFF

SEQ ID NO: 29125 - protein, 18 aa, Homo sapiens
IPSTVVNSIAARLLLQII

SEQ ID NO: 29126 - protein, 233 aa, Homo sapiens
LAVHLNTLLGERPVQHREVQGNESDLFMSYFPRGLKYQEGGVESAFHKTSTGAPAAIKKLYQVKGKKNIRATERALNWDSFNTGDCFILDLGQNIFAWCGGKSNILERNKARDLALAIRDSERQGKAQVEIVTDGEEPAEMIQVLGPKPALKEGNPEEDLTADKANAQAAALYKVSDATGQMNLTKVADSSPFALELLISDDCFVLDNGLCGKIYIWKVFQKRLDEFKRAKSE

SEQ ID NO: 29127 - protein, 44 aa, Homo sapiens
LAPLPHDRLDPPACQPVSVLHHWHMDCVCHGCDEPPCMPCGELV

SEQ ID NO: 29128 - protein, 234 aa, Homo sapiens
RPACEALSYIMVEDELALFDKSINEFWNKFKSTDTSCQMAGLRDTYKDSIKAFAEKLSVKLKEEERMVEMFLEYQNQISRQNKLIQEKKDNLLKLIAEVKGKKQELEVLTANIQDLKEEYSRKKETISTANKANAERLKRLQKSADLYKDRLGLEIRKIYGEKLQFIFTNIDPKNPESPFMFSLHLNEARDYEVSDSAPHLEGLAEFQENVRKTNNFSAFLANVRKAFTATVYN

SEQ ID NO: 29129 - protein, 24 aa, Homo sapiens
ITCWMRLCSSPPLSEWSVSINWTP

SEQ ID NO: 29130 - protein, 188 aa, Homo sapiens
VDPHKSGHEIWEEFSMSFTPAVKEVVEFAKRIPGFRDLSQHDQVNLLKAGTFEVLMVRFASLFDAKERTVTFLSGKKYSVDDLHSMGAGDLLNSMFEFSEKLNALQLSDEEMSLFTAVVLVSADRSGIENVNSVEALQETLIRALRTLIMKNHPNEASIFTKLLLKLPDLRSLNNMHSEELLAFKVHP

SEQ ID NO: 29131 - protein, 27 aa, Homo sapiens
LCPRQLHPADPAWAVLRGGGGSPRSTQ

SEQ ID NO: 29132 - protein, 45 aa, Homo sapiens
VVGAEWVGRGRAGPWAVWGPGGGRAGGRRDGLHRERRGQGGGRAL

SEQ ID NO: 29133 - protein, 240 aa, Homo sapiens
RPKLKKASKRMTCHKRYKIQKKVREHHRKLRKEAKKRGHKKPRKDPGVPNSAPFKEALLREAELRKQRLEELKQQQKLDRQKELEKKRKLETNPDIKPSNVEPMEKEFGLCKTENKAKSGKQNSKKLYCQELKKVIEASDVVLEVLDARDPLGCRCPQVEEAIVQSGQKKLVLILNKSDLVPKENLESWLNYLKKELPTVVFRASTKPKDKGKITKVSFISGKKCDSFRFWLKYDECTKS

SEQ ID NO: 29134 - protein, 30 aa, Homo sapiens
LLQRLPVFPTSRDGFAHYQASFPCRHREEG

SEQ ID NO: 29135 - protein, 51 aa, Homo sapiens
MYSVLLKREWLKKKKMKKGMKNQPSLMGQGSQMHFPSSKQKIVITCFPRWT

SEQ ID NO: 29136 - protein, 282 aa, Homo sapiens
RKMPADIMEKNSSSPVAATPASVNTTPDKPKTASEHRKSSKPIMEKRRRARINESLSQLKTLILDALKKDSSRHSKLEKADILEMTVKHLRNLQRAQMTAALSTDPSVLGKYRAGFSECMNEVTRFLSTCEGVNTEVRTRLLGHLANCMTQINAMTYPGQPHPALQAPPPPPPGPGGPQHAPFAPPPPLVPIPGGAAPPPGGAPCKLGSQAGEAAKVFGGFQVVPAPDGQFAFLIPNGAFAHSGPVIPVYTSNSGTSVGPNAVSPSSGPSLTADSMWRPWRN

SEQ ID NO: 29137 - protein, 24 aa, Homo sapiens
RGPYGVVLDSRRNLKGNFHNVRSP

SEQ ID NO: 29138 - protein, 36 aa, Homo sapiens
LKETEGPRMPRTCRPHRGLVLNRGGAGGTLMWHQMK

SEQ ID NO: 29139 - protein, 9 aa, Homo sapiens
LHWWNKCSK

SEQ ID NO: 29140 - protein, 19 aa, Homo sapiens
KKINFGSSLTNFDMWKKYL

SEQ ID NO: 29141 - protein, 54 aa, Homo sapiens
REVRAAGAEATAAAAAGGAIAAAVAATGRGAAVGDRGRGCRRRSGWLANTWCHM

SEQ ID NO: 29142 - protein, 31 aa, Homo sapiens; identical to SEQ ID NO: 15239

SEQ ID NO: 29143 - protein, 43 aa, Homo sapiens
TSAEVQLPQFLAQVDNYRHKPLKLECPVAGISIDLSQLSLQLQ

SEQ ID NO: 29144 - protein, 113 aa, Homo sapiens
LSEGSQKHASLQKSIEKAKIGRCETEERTRLAKELSSLRDQREQLKAEVEKYKDCDPQVVEEIRQANKVAKEAANRWTDNIFAIKSWAKRKFGFEENKIDRTFGIPEDFDYID

SEQ ID NO: 29145 - protein, 35 aa, Homo sapiens
REKHQESTTGGKRNAFGTYPEKAAAPAPFLPMTVL

SEQ ID NO: 29146 - protein, 15 aa, Homo sapiens
LLRPAIIQNGYSDLC

SEQ ID NO: 29147 - protein, 482 aa, Homo sapiens
TRERRKTGTMGRKKIQITRIMDERNRQVTFTKRKFGLMKKAYELSVLCDCEIALIIFNSTNKLFQYASTDMDKVLLKYTEYNEPHESRTNSDIVETLRKKGLNGCDSPDPDADDSVGHSPESEDKYRKINEDIDLMISRQRLCAVPPPNFEMPVSIPVSSHNSLVYSNPVSSLGNPNLLPLAHPSLQRNSMSPGVTHRPPSAGNTGGLMGGDLTSGAGTSAGNGYGNPRNSPGLLVSPGNLNKNMQAKSPPPMNLGMNNRKPDLRVLIPPGSKNTMPSVSEDVDLLLNQRINNSQSAQSLATPVVSVATPTLPGQGMGGYPSAISTTYGTEYSLSSADLSSLSGFNTASALHLGSVTGWQQQHLHNMPPSALSQLGACTSTHLSQSSNLSLPSTQSLNIKSEPVSPPRDRTTTPSRYPQHTRHEAGRSPVDSLSSCSSSYDGSDREDHRNEFHSPIGLTRPSPDERESPSVKRMRLSEGWAT

SEQ ID NO: 29148 - protein, 167 aa, Homo sapiens
TVSRLSRETANCSAVRERERGRERLSSLGTITPLREAENSFPKSFGDFSLFTHLRPCEELRGQFGRRARLPVRRVLGPGNREGPAIARRPPRGCERAWAPAEPRPWCSKPTMPRTRKRCWPARARTRAPASSWESPPPPRPAPPPPRAARPTTRAGARPRVGTSSDP

SEQ ID NO: 29149 - protein, 39 aa, Homo sapiens
TPNCMPSPGVMTGGSAWKTTAAKVLWSIMSDSQEVTGWN

SEQ ID NO: 29150 - protein, 35 aa, Homo sapiens
IPAHPARGQRLRHLLSGPQALARFGGGACRTQHTQ

SEQ ID NO: 29151 - protein, 41 aa, Homo sapiens
VETAALVGEAAAAAAEEEEGEAAAAKENAWTEEMSTISTKA

SEQ ID NO: 29152 - protein, 9 aa, Homo sapiens
LHSFPAGES

SEQ ID NO: 29153 - protein, 12 aa, Homo sapiens
VKSAAIRNRLSY

SEQ ID NO: 29154 - protein, 28 aa, Homo sapiens
RGEKGSEEDSEEGEEARGGWRQKGGEEP

SEQ ID NO: 29155 - protein, 24 aa, Homo sapiens
LKSDDAAIVDMVPDKPMCVDSLSD

SEQ ID NO: 29156 - protein, 482 aa, Homo sapiens
IQFGLINCGNKYLTAEAFGFKVNASASSLKKKQIWTLEQPPDEAGSAAVCLRSHLGRYLAADKDGNVTCEREVPGPDCRFLIVAHDDGRWSLQSEAHRRYFGGTEDRLSCFAQTVSPAEKWSVHIAMHPQVNIYSVTRKRYAHLSARPADEIAVDRDVPWGVDSLITLAFQDQRYSVQTADHRFLRHDGRLVARPEPATGYTLEFRSGKVAFRDCEGRYLAPSGPSGTLKAGKATKVGKDELFALEQSCAQVVLQAANERNVSTRQGMDLSANQDEETDQETFQLEIDRDTKKCAFRTHTGKYWTLTATGGVQSTASSKNASCYFDIEWRDRRITLRASNGKFVTSKKNGQLAASVETAGDSELFLMKLINRPIIVFRGEHGFIGCRKVTGTLDANRSSYDVFQLEFNDGAYNIKDSTGKYWTVGSDSAVTSSGDTPVDFFFEFCDYNKVAIKVGGRYLKGDHAGVLKASAETVDPASLWEY

SEQ ID NO: 29157 - protein, 181 aa, Homo sapiens
KILFVGPCESGKTVLANFLTESSDITEYSPTQGVRILEFENPHVTSNNKGTGCEFELWDCGGDAKFESCWPALMKDAHGVVIVFNADIPSHRKEMEMWYSCFVQQPSLQDTQCMLIAHHKPGSGDDKGSLSLSPPLNKLKLVHSNLEDDPEEIRMEFIKYLKSIINSMSESRDREEMSIMT

SEQ ID NO: 29158 - protein, 31 aa, Homo sapiens
TAPACARPASRATMPPGPSSPPSWGAPGTRA

SEQ ID NO: 29159 - protein, 52 aa, Homo sapiens
IRHFLSYREMNYSLSTGRLTVTGQRLVTVMNLKMTRVLWKSQTVLLVQVISL

SEQ ID NO: 29160 - protein, 40 aa, Homo sapiens
LEGAADATLACHGALGVSLSAWRAFRCGVRDGCQFKRQAP

SEQ ID NO: 29161 - protein, 11 aa, Homo sapiens
LETRSEFFRAV

SEQ ID NO: 29162 - protein, 14 aa, Homo sapiens
LKRTESGFHNGRDQ

SEQ ID NO: 29163 - protein, 252 aa, Homo sapiens
KTSSQTLSLALTMFQRLNKMFVGEVSSSSNQEPEFNEKEDDEWILVDFIDTCTGFSAEEEEEEEDISEESPTEHPSVFSCLPASLECLADTSDSCFLQFESCPMEESWFITPPPCFTAGGLTTIKVETSPMENLLIEHPSMSVYAVHNSCPGLSEATRGTDELHSPSSPRVEAQNEMGQHIHCYVAALAAHTTFLEQPKSFRPSQWIKEHSERQPLNRNSLRRQNLTRDCHPRQVKHNGWVVHQPCPRQYNY

SEQ ID NO: 29164 - protein, 26 aa, Homo sapiens
IDPVLRPLSSFQFRSRPVALRAAVPR

SEQ ID NO: 29165 - protein, 82 aa, Homo sapiens
IPSHEICDGWLCARCKRNAWTAECCLCNLRGGALKQTKNNKWAHVMCAVAVPEVRFTNVPERTQIDVGRIPLQRLKLGRLGI

SEQ ID NO: 29166 - protein, 373 aa, Homo sapiens
RYFDLHDPPQDVVCIDLDTNMLYVSDEKKNMNWKQLPKKPCKNLLSTLKKLYPQLSSVHQKTQEGSAIDMTPIEADFSWQKKMTQLEMEIQEAFLRFMASILKGYRTYLRPITEAPSNKATAADSLFDRQGFLKSRDRAYAKFYTLLSKTQIFIRFIEECSFVSDKDTGLAFFDDCIEKLFPDKGTEKTDKVDFDSAEDTRLIELDDSQKSEHTVFIMPPEPPPDDGKDLSPKYSYKYFPRLDLKLFDRPQELKLCFSRHPTGNSITKSPPLMAKRTKQEIKTAHKLAKRCYTNPPQWAKCLFSHCYSLWFICLPAYVRVSHPKVRALQQAYDVLIKMRKTDVDPLDEASVLSSSDAALWTLGSSCFSSESLI

SEQ ID NO: 29167 - protein, 17 aa, Homo sapiens
LLSYNAGPVIGLSEDHG

SEQ ID NO: 29168 - protein, 299 aa, Homo sapiens
LACGRGDSFFIRSHFECEKETPQSLAFTRGEVFRVVDTLYDGKLGNWLAVRIGNELEKGLIPNKSRAEQMASVQNAQRDNAGDRADFWRMRGQRSGVKKNLRKSREDLTAVVSVSTKFPAYERVLLREAGFKRPVVLFGPIADIAMEKLANELPDWFQTAKTEPKDAGSEKSTGVVRLNTVRQIIEQDKHALLDVTPKAVDLLNYTQWFPIVIFFNPDSRQGVKTMRQRLNPTSNKSSRKLFDQANKLKKTCAHLFTATINLNSANDSWFGSLKDTIQHQQGEAVWVSEGKVCGIDMLL

SEQ ID NO: 29169 - protein, 90 aa, Homo sapiens
KDRIDAFLREVNQRVVRVPSVPETELTDQAWLPAGVRVPLHQVPYAVKGCFRFLPPAQVTVVGSYLLGTCIRPDINVDVALTMPRVRSRV

SEQ ID NO: 29170 - protein, 45 aa, Homo sapiens
VPPMAGRVAGRVPVEGAVLPLLPGGPRRAPTPSGHVLVRGVPAAV

SEQ ID NO: 29171 - protein, 10 aa, Homo sapiens
LVNFWMKPLN

SEQ ID NO: 29172 - protein, 67 aa, Homo sapiens
VIYSAIHLLTVQLDLWEMTCSTGKPLLWGLLIAHIKVESSFSLYIFRQIILLNHQRLLSQQKFTIQT

SEQ ID NO: 29173 - protein, 25 aa, Homo sapiens
ILLAPREAPVFRAVAPASADTAASS

SEQ ID NO: 29174 - protein, 47 aa, Homo sapiens
LARAIGCAARGRGQWAVRAADCAQSGRHPGPAVVCGRRLIRIIASSF

SEQ ID NO: 29175 - protein, 39 aa, Homo sapiens
LMLKMYHLSFQHLTTTSSVSTGISSSLYLSYRPKCHLSL

SEQ ID NO: 29176 - protein, 33 aa, Homo sapiens
IYKFSGCRFSRPAYPYFNPWNCLVPMTVCPPSS

SEQ ID NO: 29177 - protein, 20 aa, Homo sapiens
LRERTTEPRINTNRRAMLLD

SEQ ID NO: 29178 - protein, 57 aa, Homo sapiens
MQLVTTWCSNSFPARASGTPMRRHSKRAWPALPAGGLRCTCCASMAIERTQISRRTL

SEQ ID NO: 29179 - protein, 12 aa, Homo sapiens
MLSSANWELNSR

SEQ ID NO: 29180 - protein, 414 aa, Homo sapiens
LAGVGIEMGDWQEVWDENTGCYYYWNTQTNEVTWELPQYLATQVQGLQHYQPSSVPGAETSFVVNTDIYSKEKTISVSSSKSGPVIAKREVKKEVNEGIQALSNSEEEKKGVAASLLAPLLPEGIKEEEERWRRKVICKEEPVSEVKETSTTVEEATTIVKPQEIMLDNIEDPSQEDLCSVVQSGESEEEEEQDTLELELVLERKKAELRALEEGDGSVSGSSPRSDISQPASQDGMRRLMSKRGKWKMFVRATSPESTSRSSSKTGRDTPENGETAIGAENSEKIDENSDKEMEVEESPEKIKVQTTPKVEEEQDLKFQIGELANTLTSKFEFLGINRQSISNFHVLLLQTETRIADWREGALNGNYLKRKLQDAAEQLKQYEINATPKGWSCHWDRYALFSPFHLSPLTSQT

SEQ ID NO: 29181 - protein, 28 aa, Homo sapiens
ILRASQCRLRTTRRRRTLESRPRKTKTQ

SEQ ID NO: 29182 - protein, 25 aa, Homo sapiens
VASSLLCPSSGLAIFLPEPCQKEWT

SEQ ID NO: 29183 - protein, 8 aa, Homo sapiens
MSSSFSNS

SEQ ID NO: 29184 - protein, 271 aa, Homo sapiens
LVEMGSAKSVPVTPARPPPHNKHLARVADPRSPSAGILRTPIQVESSPQPGLPAGEQLEGLKHAQDSDPRSPTLGIARTPMKTSSGDPPSPLVKQLSEVFETEDSKSNLPPEPVLPPEAPLSSELDLPLGTQLSVEEQMPPWNQTEFPSKQVFSKEEARQPTETPVASQSSDKPSRDPETPRSSGSMRNRWKPNSSKVLGRSPLTILQDDNSPGTLTLRQGKRPSPLSENVSELKEGAILGTGRLLKTGGRAWEQGQDHDKENQHFPLVES

SEQ ID NO: 29185 - protein, 30 aa, Homo sapiens
KPSFRVDIPTSRTVRILKTTQQKVKKWKIV

SEQ ID NO: 29186 - protein, 43 aa, Homo sapiens
LPPSWFRVPCTKCPAKPQKPSLLQSRSCRSPRLRQLCYLCLQP

SEQ ID NO: 29187 - protein, 95 aa, Homo sapiens
ISHLLVQQVLIARVLKEGRKIFLKIKMNLHFLCQRASLNLNFIMAQRRTVQLQANSQKKNLLRYKRKITEKKRKEPQRSCSVQSQILLLLLWLIG

SEQ ID NO: 29188 - protein, 92 aa, Homo sapiens
LTWSGTWGEGTMGRKLDPTKEKRGPGRKARKQKGAETELVRFLPAVSDENSKRLSSRARKRAAKRRLGSVEAPKTNKSPEAKPLPGKLPKGP

SEQ ID NO: 29189 - protein, 188 aa, Homo sapiens
TIFIDEIDSICSRRGTSDEHEASRRVKSELLIQMDGVGGALENDDPSKMVMVLAATNFPWDIDEALRRRLEKRIYIPLPTAKGRAELLKINLREVELDPDIQLEDIAEKIEGYSGADITNVCRDASLMAMRRRINGLSPEEIRALSKEELQMPVTKGDFELALKKIAKSVSAADLEKYEKWMVEFGSA

SEQ ID NO: 29190 - protein, 881 aa, Homo sapiens
RRSRQGAGGRRPRPEAEADREPAMSVVGLDVGSQSCYIAVARAGGIETIANEFSDRCTPSVISFGSKNRTIGVAAKNQQITHANNTVSNFKRFHGRAFNDPFIQKEKENLSYDLVPLKNGGVGIKVMYMGEEHLFSVEQITAMLLTKLKETAENSLKKPVTDCVISVPSFFTDAERRSVLDAAQIVGLNCLRLMNDMTAVALNYGIYKQDLPSLDEKPRIVVFVDMGHSAFQVSACAFNKGKLKVLGTAFDPFLGGKNFDEKLVEHFCAEFKTKYKLDAKSKIRALLRLYQECEKLKKLMSSNSTDLPLNIECFMNDKDVSGKMNRSQFEELCAELLQKIEVPLYSLLEQTHLKVEDVSAVEIVGGATRIPAVKERIAKFFGKDISTTLNADEAVARGCALQCAILSPAFKVREFSVTDAVPFPISLIWNHDSEDTEGVHEVFSRNHAAPFSKVLTFLRRGPFELEAFYSDPQGVPYPEAKIGRFVVQNVSAQKDGEKSRVKVKVRVNTHGIFTISTASMVEKVPTEENEMSSEADMECLNQRPPENPDTDKNVQQDNSEAGTQPQVQTDAQQTSQSPPSPELTSEENKIPDADKANEKKVDQPPEAKKPKIKVVNVELPIEANLVWQLGKDLLNMYIETEGKMIMQDKLEKERNDAKNAVEEYVYEFRDKLCGPYEKFICEQDHQNFLRLLTETEDWLYEEGEDQAKQAYVDKLEELMKIGTPVKVRFQEAEERPKMFEELGQRLQHYAKIAADFRNKDEKYNHIDESEMKKVEKSVNEVMEWMNNVMNAQAKKSLDQDPVVRAQEIKTKIKELNNTCEPVVTQPKPKIESPKLERTPNGPNIDKKEEDLEDKNNFGAEPPHQNGECYPNEKNSVNMDLD

SEQ ID NO: 29191 - protein, 1396 aa, Homo sapiens
LAPAGLPGPSPPPGPEGRVIGRAAGRKGGREPPPPAPPPPLAPTPGRRARAARPEAPAMASPPRHGPPGPASGDGPNLNNNNNNNNHSVRKCGYLRKQKHGHKRFFVLRGPGAGGDEATAGGGSAPQPPRLEYYESEKKWRSKAGAPKRVIALDCCLNINKRADAKHKYLIALYTKDEYFAVAAENEQEQEGWYRALTDLVSEGRAAAGDAPPAAAPAASCSASLPGALGGSAGAAGAEDSYGLVAPATAAYREVWQVNLKPKGLGQSKNLTGVYRLCLSARTIGFVKLNCEQPSVTLQLMNIRRCGHSDSFFFIEVGRSAVTGPGELWMQADDSVVAQNIHETILEAMKALKELFEFRPRSKSQSSGSSATHPISVPGARRHHHLVNLPPSQTGLVRRSRTDSLAATPPAAKCSSCRVRTASEGDGGAAAGAAAAGARPVSVAGSPLSPGPVRAPLSRSHTLSGGCGGRGSKVALLPAGGALQHSRSMSMPVAHSPPAATSPGSLSSSSGHGSGSYPPPPGPHPPLPHPLHHGPGQRPSSGSASASGSPSDPGFMSLDEYGSSPGDLRAFCSHRSNTPESIAETPPARDGGGGGEFYGYMTMDRPLSHCGRSYRRVSGDAAQDLDRGLRKRTYSLTTPARQRPVPQPSSASLDEYTLMRATFSGSAGRLCPSCPASSPKVAYHPYPEDYGDIEIGSHRSSSSNLGADDGYMPMTPGAALAGSGSGSCRSDDYMPMSPASVSAPKQILQPRAAAAAAAAVPSAGPAGPAPTSAAGRTFPASGGGYKASSPAESSPEDSGYMRMWCGSKLSMEHADGKLLPNGDYLNVSPSDAVTTGTPPDFFSAALHPGGEPLRGVPGCCYSSLPRSYKAPYTCGGDSDQYVLMSSPVGRILEEERLEPQATPGPSQAASAFGAGPTQPPHPVVPSPVRPSGGRPEGFLGQRGRAVRPTRLSLEGLPSLPSMHEYPLPPEPKSPGEYINIDFGEPGARLSPPAPPLLASAASSSSLLSASSPASSLGSGTPGTSSDSRQRSPLSDYMNLDFSSPKSPKPGAPSGHPVGSLDGLLSPEASSPYPPLPPRPSASPSSSLQPPPPPPAPGELYRLPPASAVATAQGPGAASSLSSDTGDNGDYTEMAFGVAATPPQPIAAPPKPEAARVASPTSGVKRLSLMEQVSGVEAFLQASQPPDPHRGAKVIRADPQGGRRRHSSETFSSTTTVTPVSPSFAHNPKRHNSASVENVSLRKSSEGGVGVGPGGGDEPPTSPRQLQPAPPLAPQGRPWTPGQPGGLVGCPGSGGSPMRRETSAGFQNGLNYIAIDVREEPGLPPQPQPPPPPLPQPGDKSSWGRTRSLGGLISAVGVGSTGGGCGGPGPGALPPANTYASIDFLSHHLKEATIVKE

SEQ ID NO: 29192 - protein, 68 aa, Homo sapiens
KDVARVESKTVIVTPSQRDTVPLPPGGARGQLGNWMSPADFQRAVDERFPGCMQGNQGRGTVARARKM

SEQ ID NO: 29193 - protein, 60 aa, Homo sapiens
VQIRGCSFAHKRGFAGSLNGKLEQRGKNIASVGDAVQLPKGVRNGNAEAWEKGSGGGRRG

SEQ ID NO: 29194 - protein, 43 aa, Homo sapiens
TSSFVFTYPEADSFPSCAAAHRKGSSSNEPSSDSLSSPTLLAL

SEQ ID NO: 29195 - protein, 358 aa, Homo sapiens
VLRIMSLRGSLSRLLQTRVHSILKKSVHSVAVIGAPFSQGQKRKGVEHGPAAIREAGLMKRLSSLGCHLKDFGDLSFTPVPKDDLYNNLIVNPRSVGLANQELAEVVSRAVSDGYSCVTLGGDHSLAIGTISGHARHCPDLCVVWVDAHADINTPLTTSSGNLHGQPVSFLLRELQDKVPQLPGFSWIKPCISSASIVYIGLRDVDPPEHFILKNYDIQYFSMRDIDRLGIQKVMERTFDLLIGKRQRPIHLSFDIDAFDPTLAPATGTPVVGGLTYREGMYIAEEIHNTGLLSALDLVEVNPQLATSEEEAKTTANLAVDVIASSFGQTREGGHIVYDQLPTPSSPDESENQARVRI

SEQ ID NO: 29196 - protein, 62 aa, Homo sapiens
LDDLTNHDIVKPVVNNNMGISSGINNRVLRRPSERGRAWYKGSPKHPIGKTQLLPTSKPVDL

SEQ ID NO: 29197 - protein, 31 aa, Homo sapiens
LRDSHLAMSPKQGEGARLSVWTLTHSRIIQR

SEQ ID NO: 29198 - protein, 1360 aa, Homo sapiens
ISLSQEPDEHPGDIFFKQTPTKDILTELYKLTTERERLLTNLLSSDHILGITMGNQEGKLQELSVSLAPEDDCFQSAGDWQGELPVGPLNKRSTHGNKKPRRSSGRRESFGALPQKRTKRKGRGGRESAPLMGKDKICSSHSLPLSRTRPNLWVLEEKGNLLPNGALACSLQRRESCPPDIPKTPDTDLGFGSFETAFKDTGLGREVLPPDCSSTEAGGDGIRRPPSGLEHQQTGLSESHQDPEKHPEAEKDEMEKPAKRTCKQKPVSKVVAKVQDLSSQVQRVVKTHSKGKETIAIRPAAHAEFVPKADLLTLPGAEAGAHGSRRQGKERQGDRSSQSPAGETASISSVSASAEGAVNKVPLKVIESEKLDEAPEGKRLGFPVHTSVPHTRPETRNKRRAGLPLGGHKSLFLDLPHKVGPDSSQPRGDKKKPSPPAPAALGKVFNNSASQSSTHKQTSPVPSPLSPRLPSPQQHHRILRLPALPGEREAALNDSPCRKSRVFSGCVSADTLEPPSSAKVTETKGASPAFLRAGQPRLVPGETLEKSLGPGKTTAEPQHQSPPGISSEGFPWDGFNEQTPKDLPNRDGGAWVLGYRAGPACPFLLHEEREKSNRSELYLDLHPDHSLTEQDDRTPGRLQAVWPPPKTKDTEEKVGLKYTEAEYQAAILHLKREHKEEIENLQAQFELRAFHIRGEHAMITARLEETIENLKHELEHRWRGGCEERKDVCISTDDDCPPKTFRNVCVQTDRETFLKPCESESKTTRSNQLVPKKLNISSLSQLSPPNDHKDIHAALQPMEGMASNQQKALPPPPASIPPPPPLPSGLGSLSPAPPMPPVSAGPPLPPPPPPPPPLPPPSSAGPPPPPPPPPLPNSPAPPNPGGPPPAPPPPGLAPPPPPGLFFGLGSSSSQCPRKPAIEPSCPMKPLYWTRIQISDRSQNATPTLWDSLEEPDIRDPSEFEYLFSKDTTQQKKKPLSETYEKKNKVKKIIKLLDGKRSQTVGILISSLHLEMKDIQQAIFNVDDSVVDLETLAALYENRAQEDELVKIRKYYETSKEEELKLLDKPEQFLHELAQIPNFAERAQCIIFRSVFSEGITSLHRKVEIITRASKDLLHVKSVKDILALILAFGNYMNGGNRTRGQADGYSLEILPKLKDVKSRDNGINLVDYVVKYYLRYYDQEAGTEKSVFPLPEPQDFFLASQVKFEDLIKDLRKLKRQLEASEKQMVVVCKESPKEYLQPFKDKLEEFFQKAKKEHKMEESHLENAQKSFETTVRYFGMKPKSGEKEITPSYVFMVWYEFCSDFKTIWKRESKNISKERLKMAQESVSKLTSEKKVETKKINPTASLKERLRQKEASVTTN

SEQ ID NO: 29199 - protein, 42 aa, Homo sapiens
LRLRQWLLAQQLHAPWLRISSSLQRSPSRSAPELSRAHRIQL

SEQ ID NO: 29200 - protein, 18 aa, Homo sapiens
KGLRLDFQGRISSEAPAR

SEQ ID NO: 29201 - protein, 8 aa, Homo sapiens
VTSPAFSP

SEQ ID NO: 29202 - protein, 39 aa, Homo sapiens
IRELILGSETPSSPRAGQLLEVSPHSGPGDRGGGPGWWD

SEQ ID NO: 29203 - protein, 172 aa, Homo sapiens
LVTIIPNFSLDKIYLIGGDLGPFNPGLPVEVPLWLAINLKQRQKCRLLPPEWMDVEKLEKMRDHERKEETFTPMPSPYYMELTKLLLNHASDNIPKADEIRTLVKDMWDTRIAKLRVSADSFVRQQEAHAKLDNLTLMEINTSGTFLTQALNHMYKLRTNLQPLESTQSQDF

SEQ ID NO: 29204 - protein, 151 aa, Homo sapiens
LDFDTDDLDLNSLRIQPVRSDPVSMPGSSRPVSDRRGVSTVIDAASGTFDRSVTLLEVCGSWPEGFGLRHMSSMEHTEEGLRERLADAMAESPSRDVVGSGTELQREGSIETLSNSSGSTSGSIPRNFDGYRSPLPTNESQPLSLFPTGFP

SEQ ID NO: 29205 - protein, 545 aa, Homo sapiens
VEAQARFAAFSLCLITMSTNENANTPAARLHRFKNKGKDSTEMRRRRIEVNVELRKAKKDDQMLKRRNVSSFPDDATSPLQENRNNQGTVNWSVDDIVKGINSSNVENQLQATQAARKLLSREKQPPIDNIIRAGLIPKFVSFLGRTDCSPIQFESAWALTNIASGTSEQTKAVVDGGAIPAFISLLASPHAHISEQAVWALGNIAGDGSVFRDLVIKYGAVDPLLALLAVPDMSSLACGYLRNLTWTLSNLCRNKNPAPPIDAVEQILPTLVRLLHHDDPEVLADTCWAISYLTDGPNERIGMVVKTGVVPQLVKLLGASELPIVTPALRAIGNIVTGTDEQTQVVIDAGALAVFPSLLTNPKTNIQKEATWTMSNITAGRQDQIQQVVNHGLVPFLVSVLSKADFKTQKEAVWAVTNYTSGGTVEQIVYLVHCGIIEPLMNLLTAKDTKIILVILDAISNIFQAAEKLGETEKLSIMIEECGGLDKIEALQNHENESVYKASLSLIEKYFSVEEEEDQNVVPETTSEGYTFQVQDGAPGTFNF

SEQ ID NO: 29206 - protein, 118 aa, Homo sapiens
VKMTRSKTFQAYLPSCHRTYSCIHCRAHLANHDELISKSFQGSQGRAYLFNSVVNVGCGPAEERVLLTGLHAVADIYCENCKTTLGWKYEHAFESSQKYKEGKYIIELAHMIKDNGWD

SEQ ID NO: 29207 - protein, 16 aa, Homo sapiens
ISAESCRGKNHGHFQH

SEQ ID NO: 29208 - protein, 16 aa, Homo sapiens
LKTSRVLSRASRADRC

SEQ ID NO: 29209 - protein, 10 aa, Homo sapiens
IALRGKRPLV

SEQ ID NO: 29210 - protein, 662 aa, Homo sapiens
TVYRNSVPGSCQETGKKVISMKRSSVSSGGAGRLSMQELRSQDVNKQGLYTPQTKEKPTFGKLSINKPTSERKVSLFGKRTSGHGSRNSQLGIFSSSEKIKDPRPLNDKAFIQQCIRQLCEFLTENGYAHNVSMKSLQAPSVKDFLKIFTFLYGFLCPSYELPDTKFEEEVPRIFKDLGYPFALSKSSMYTVGAPHTWPHIVAALVWLIDCIKIHTAMKESSPLFDDGQPWGEETEDGIMHNKLFLDYTIKCYESFMSGADSFDEMNAELQSKLKDLFNVDAFKLESLEAKNRALNEQIARLEQEREKEPNRLESLRKLKASLQGDVQKYQAYMSNLESHSAILDQKLNGLNEEIARVELECETIKQENTRLQNIIDNQKYSVADIERINHERNELQQTINKLTKDLEAEQQKLWNEELKYARGKEAIETQLAEYHKLARKLKLIPKGAENSKGYDFEIKFNPEAGANCLVKYRAQVYVPLKELLNETEEEINKALNKKMGLEDTLEQLNAMITESKRSVRTLKEEVQKLDDLYQQKIKEAEEEDEKCASELESLEKHKHLLESTVNQGLSEAMNELDAVQREYQLVVQTTTEERRKVGNNLQRLLEMVATHVGSVEKHLEEQIAKVDREYEECMSEDLSENIKEIRDKYEKKATLIKSSEE

SEQ ID NO: 29211 - protein, 195 aa, Homo sapiens
LEEFFEEAIEQADPENMVENEYKAVNNSNYGWRALRLLARRSPHFFQPTNQQFKSLPEYLENMVIKLAKELPPPSEEIKTGEDEDEEDNDALLKENESPDVRRDKPVTGEQIEVFANKLGEQWKILAPYLEMKDSEIRQIECDSEDMKMRAKQLLVAWQDQEGVHATPENLINALNKSGLSDLAESLTNDNETNS

SEQ ID NO: 29212 - protein, 57 aa, Homo sapiens
KPRPACPGLGRRSRALDPAAPLGLGATSAAPPLKSQSIQDGKPRRQTRIKCREGQYE

SEQ ID NO: 29213 - protein, 306 aa, Homo sapiens
TQFNKGPSYGLSAEVKNRLLSKYDPQKEAELRTWIEGLTGLSIGPDFQKGLKDGTILCTLMNKLQPGSVPKINRSMQNWHQLENLSNFIKAMVSYGMNPVDLFEANDLFESGNMTQVQVSLLALAGKAKTKGLQSGVDIGVKYSEKQERNFDDATMKAGQCVIGLQMGTNKCASQSGMTAYGTRRHLYDPKNHILPPMDHSTISLQMGTNKCASQVGMTAPGTRRHIYDTKLGTDKCDNSSMSLQMGYTQGANQSGQVFGLGRQIYDPKYCPQGTVADGAPSGTGDCPDPGEVPEYPPYYQEEAGY

SEQ ID NO: 29214 - protein, 33 aa, Homo sapiens
IKLWAQVMKPTSPGDTVSELQGEISRPAKLSSR

SEQ ID NO: 29215 - protein, 112 aa, Homo sapiens
LVGEREAAEWWTTTRRTSRTSTAPAARAMALAAGAAWATTWPRRTTGTGTCCWTRPGRSSSARPSRHGATPTCGRQAHRSRTLMRTSETGSSSCCSWRSYQGSGYLSRSGGR

SEQ ID NO: 29216 - protein, 59 aa, Homo sapiens
VLQPAPASEREMLGCSFKLRTTHHAYPGAEGPDHHSLRTEEAACYSWCCIPPDTLLFPA

SEQ ID NO: 29217 - protein, 28 aa, Homo sapiens
MPSLNFSWTNLQKRLLGRQHLTLKALRM

SEQ ID NO: 29218 - protein, 48 aa, Homo sapiens
IKILKRNTKRRRRPNTKMEAQKSIKTNIKTETRKNEKRKRFEPLGMQK

SEQ ID NO: 29219 - protein, 34 aa, Homo sapiens
KDPTATSTLMRSCMTRWSWSPRRVTAAFWSRLAS

SEQ ID NO: 29220 - protein, 409 aa, Homo sapiens
ITARGIMDRSKENCISGPVKATAPVGGPKRVLVTQQFPCQNPLPVNSGQAQRVLCPSNSSQRIPLQAQKLVSSHKPVQNQKQKQLQATSVPHPVSRPLNNTQKSKQPLPSAPENNPEEELASKQKNEESKKRQWALEDFEIGRPLGKGKFGNVYLAREKQSKFILALKVLFKAQLEKAGVEHQLRREVEIQSHLRHPNILRLYGYFHDATRVYLILEYAPLGTVYRELQKLSKFDEQRTATYITELANALSYCHSKRVIHRDIKPENLLLGSAGELKIADFGWSVHAPSSRRTTLCGTLDYLPPEMIEGRMHDEKVDLWSLGVLCYEFLVGKPPFEANTYQETYKRISRVEFTFPDFVTEGARDLISRLLKHNPSQRPMLREVLEHPWITANSSKPSNCQNKESASKQS

SEQ ID NO: 29221 - protein, 325 aa, Homo sapiens
RGRRAAGAMAEPGSRESETRARSPSVAAMASPQLCRALVSAQWVAEALRAPRAGQPLQLLDASWYLPKLGRDARREFEERHIPGAAFFDIDQCSDRTSPYDHMLPGAEHFAEYAGRLGVGAATHVVIYDASDQGLYSAPRVWWMFRAFGHHAVSLLDGGLRHWLRQNLPLSSGKSQPAPAEFRAQLDPAFIKTYEDIKENLESRRFQVVDSRATGRFRGTEPEPRDGIEPGHIPGTVNIPFTDFLSQEGLEKSPEEIRHLFQEKKVDLSKPLVATCGSGVTACHVALGAYLCGKPDVPIYDGSWVEWYMRARPEDVISEGRGKTH

SEQ ID NO: 29222 - protein, 187 aa, Homo sapiens
VCERAGPSGPRSGSAAQRAPSANMSVDPLSSKALKIKRELSENTPHLSDEALMGLSVRELNRHLRGLSAEEVTRLKQRRRTLKNRGYAASCRVKRVCQKEELQKQKSELEREVDKLARENAAMRLELDALRGKCEALQGFARSVAAARGPATLVAPASVITIVKSTPGSGSGPAHGPDPAHGPASCS

SEQ ID NO: 29223 - protein, 291 aa, Homo sapiens
KLTHPGKAILAGGLAGGIEICITFPTEYVKTQLQLDERSHPPRYRGIGDCVRQTVRSHGVLGLYRGLSSLLYGSIPKAAVRFGMFEFLSNHMRDAQGRLDSTRGLLCGLGAGVAEAVVVVCPMETIKVKFIHDQTSPNPKYRGFFHGVREIVREQGLKGTYQGLTATVLKQGSNQAIRFFVMTSLRNWYRGDNPNKPMNPLITGVFGAIAGAASVFGNTPLDVIKTRMQGLEAHKYRNTWDCGLQILKKEGLKAFYKGTVPRLGRVCLDVAIVFVIYDEVVKLLNKVWKTD

SEQ ID NO: 29224 - protein, 123 aa, Homo sapiens
VNRPRIDLIVFVVNLHSKYSLQNTEESLRHVDASFFLGKVCFLATGAGRESHCSIHRHTVVKLAHTYQSPLLYCDLEVEGFRATMAQRLVRVLQICAGHVPGVSALNLLSLLRSSEGPSLEDL

SEQ ID NO: 29225 - protein, 101 aa, Homo sapiens
MVTPTGVRTCGCGGGEARVAQRAAGPAGLWGARPPRTSWALPRATPLRTTTWATRMWTSRVPARGSEAPSHGRAPYSGWWPLRQAGSSDFSTGGLAPPGTA

SEQ ID NO: 29226 - protein, 7 aa, Homo sapiens
IGCDFRS

SEQ ID NO: 29227 - protein, 32 aa, Homo sapiens
MKKRRMFYLHPISKPLLSCYCMSLQAQYRASS

SEQ ID NO: 29228 - protein, 919 aa, Homo sapiens
METDEKEGLRCQIPDSTAETLVEWLQSQMTNGHLPGNGDVYQERLARLENDKESLVLQVSVLTDQVEAQGEKIRDLEFCLEEHREKVNATEEMLQQELLSRTSLETQKLDLMAEISNLKLKLTAVEKDRLDYEDKFRDTEGLIQEINDLRLKVSEMDSERLQYEKKLKSTKDELASLKEQLEEKESEVKRLQEKLVCKMKGEGVEIVDRDIEVQKMKKAVESLMAANEEKDRKIEDLRQCLNRYKKMQDTVVLAQGKDGEYEELLNSSSISSLLDAQGFSDLEKSPSPTPVMGSPSCDPFNTSVPEEFHTTILQVSIPSLLPATVSMETSEKSKLTPKPETSFEENDGNIILGATVDTQLCDKLLTSSLQKSSSLGNLKKETSDGEKETIQKTSEDRAPAESRPFGTLPPRPPGQDTSMDDNPFGTRKVRSSFGRGFFKIKSNKRTASAPNLAETEKETAEHLDLAGASSRPKDSQRNSPFQIPPPSPDSKKKSRGIMKLFGKLRRSQSTTFNPDDMSEPEFKRGGTRATAGPRLGWSRDLGQSNSDLDMPFAKWTKEQVCNWLMEQGLGSYLNSGKHWIASGQTLLQASQQDLEKELGIKHSLHRKKLQLALQALGSEEETNHGKLDFNWVTRWLDDIGLPQYKTQFDEGRVDGRMLHYMTVDDLLSLKVVSVLHHLSIKRAIQVLRINNFEPNCLRRRPSDENTIAPSEVQKWTNHRVMEWLRSVDLAEYAPNLRGSGVHGGLMVLEPRFNVETMAQLLNIPPNKTLLRRHLATHFNLLIGAEAQHQKRDAMELPDYVLLTATAKVKPKKLAFSNFGNLRKKKQEDGEEYVCPMELGQASGSASKKGFKPGLDMRLYEEDDLDRLEQMEDSEGTVRQIGAFSEGINNLTHMLKEDDMFKDFAARSPSASITDEDSNV

SEQ ID NO: 29229 - protein, 14 aa, Homo sapiens
MDQLTPSRSVNWFI

SEQ ID NO: 29230 - protein, 909 aa, Homo sapiens
MELGPLEGGYLELLNSDADPLCLYHFYDQMDLAGEEEIELYSEPDTDTINCDQFSRLLCDMEGDEETREAYANIAELDQYVFQDSQLEGLSKDIFKHIGPDEVIGESMEMPAEVGQKSQKRPFPEELPADLKHWKPAEPPTVVTGSLLVGPVSDCSTLPCLPLPALFNQEPASGQMRLEKTDQIPMPFSSSSLSCLNLPEGPIQFVPTISTLPHGLWQISEAGTGVSSIFIYHGEVPQASQVPPPSGFTVHGLPTSPDRPGSTSPFAPSATDLPSMPEPALTSRANMTEHKTSPTQCPAAGEVSNKLPKWPEPVEQFYRSLQDTYGAEPAGPDGILVEVDLVQARLERSSSKSLERELATPDWAERQLAQGGLAEVLLAAKEHRRPRETRVIAVLGKAGQGKSYWAGAVSRAWACGRLPQYDFVFSVPCHCLNRPGDAYGLQDLLFSLGPQPLVAADEVFSHILKRPDRVLLILDGFEELEAQDGFLHSTCGPAPAEPCSLRGLLAGLFQKKLLRGCTLLLTARPRGRLVQSLSKADALFELSGFSMEQAQAYVMRYFESSGMTEHQDRALTLLRDRPLLLSHSHSPTLCRAVCQLSEALLELGEDAKLPSTLTGLYVGLLGRAALDSPPGALAELAKLAWELGRRHQSTLQEDQFPSADVRTWAMAKGLVQHPPRAAESELAFPSFLLQCFLGALWLALSGEIKDKELPQYLALTPRKKRPYDNWLEGVPRFLAGLIFQPPARCLGALLGPSAAASVDRKQKVLARYLKRLQPGTLRARQLLELLHCAHEAEEAGIWQHVVQELPGRLSFLGTRLTPPDAHVLGKALEAAGQDFSLDLRSTGICPSGLGSLVGLSCVTRFRWGEGLGEETSLCWALTAVLVPSPVLCGVSFSMQSSRVGQNGFSPFLR

SEQ ID NO: 29231 - protein, 996 aa, Homo sapiens
MGRQEPGQQGIVPQLCEDLFSRVSENQSAQLSYSVEVSYMEIYCERVRDLLNPKSRGSLRVREHPILGPYVQDLSKLAVTSYADIADLMDCGNKARTVAATNMNETSSRSHAVFTIVFTQRCHDQLTGLDSEKVSKISLVDLAGSERADSSGARGMRLKEGANINKSLTTLGKVISALADMQSKKRKSDFIPYRDSVLTWLLKENLGGNSRTAMIAALSPADINYEETLSTLRYADRTKQIRCNAIINEDPNARLIRELQEEVARLRELLMAQGLSASALEGLKTEEGSVRGALPAVSSPPAPVSPSSPTTHNGELEPSFSPNTESQIGPEEAMERLQETEKIIAELNETWEEKLRKTEALRMEREALLAEMGVAVREDGGTVGVFSPKKTPHLVNLNEDPLMSECLLYHIKDGVTRVGQVDMDIKLTGQFIREQHCLFRSIPQPDGEVVVTLEPCEGAETYVNGKLVTEPLVLKSGNRIVMGKNHVFRFNHPEQARLERERGVPPPPGPPSEPVDWNFAQKELLEQQGIDIKLEMEKRLQDLENQYRKEKEEADLLLEQQRLYADSDSGDDSDKRSCEESWRLISSLREQLPPTTVQTIVKRCGLPSSGKRRAPRRVYQIPQRRRLQGKDPRWATMADLKMQAVKEICYEVALADFRHGRAEIEALAALKMRELCRTYGKPDGPGDAWRAVARDVWDTVGEEEGGGAGSGGGSEEGARGAEVEDLRAHIDKLTGILQEVKLQNSSKDRELQALRDRMLRMERVIPLAQDHEDENEEGGEVPWAPPEGSEAAEEAAPSDRMPSARPPSPPLSSWERVSRLMEEDPAFRRGRLRWLKQEQLRLQGLQGSGGRGGGLRRPPARFVPPHDCKLRFPFKSNPQHRESWPGMGSGEAPTPLQPPEEVTPHPATPARRPPSPRRSHHPRRNSLDGGGRSRGAGSAQPEPQHFQPKKHNSYPQPPQPYPAQRPPGPRYPPYTTPPRMRRQRSAPDLKESGAAV

SEQ ID NO: 29232 - protein, 82 aa, Homo sapiens
MADDLDFETGDAGASATFPMQCSALRKNGFVVLKGRPCKIVEMSTSKTGKHGHAKVRISPPHLAFPMPPVSLALPAASCQQC

SEQ ID NO: 29233 - protein, 342 aa, Homo sapiens [sequence omitted]

SEQ ID NO: 29234 - protein, 289 aa, Homo sapiens
MALKSRACHEMALRIVLHSLDLRANCYQRFVVPLLSISADFYVRVFVRVFTGQAKVKASASKQALVFQCVGCGAFHLQRLGKASGVPSGRAKFSAACGPPVTPECEHCGQRHQLGGPMWAEPIHDLDFVGRVLEAVSANPGRFHTSERIRGVLSVITEELPDVPLYYTLDQLSSTIHCNTPSLLQLRSALLHADFRVSLSHACKNAVKTDAPASALWDIMRCWEKECPVKRERLSETSPAFRILSVEPRLQANFTIREDANPSSRQRGLKRFQANPEANWGPRPRARPG

SEQ ID NO: 29235 - protein, 20 aa, Homo sapiens
MRLCSSPPLSEWSVSINWTP

SEQ ID NO: 29236 - protein, 238 aa, Homo sapiens
MTFSGGKFTEEWKAQFIKTERKKLLNYKARLVKNLQPRIYCPFAGYFVESHPSDKYIKETNTKNDPNELNNLIKKNSDVITWTPRPGATLDLGRMLKDRTDSKGIIEPPEGTKIYKDSWDFEPYLEILNAALGDEIFLHSSWIKEYFTWAGFKDYNLVVRMIETDEDFNPFPGGYDYLVDFLDLSFPKERPQREHPYEEIHSRVDVIRHVVKNGLLWDELYIGFQTRLQRDPDIYHHL

SEQ ID NO: 29237 - protein, 60 aa, Homo sapiens
MPHSSAHKTAQPNGDWTYQTLSHLALTPSYGDTYTCVVEHTGAPEPILRDWSKCMADGWN

SEQ ID NO: 29238 - protein, 45 aa, Homo sapiens
MCLSFTPPLSAATAAAAAAAAAAARIAAAPSLARRRYLLGQKFYE

SEQ ID NO: 29239 - protein, 147 aa, Homo sapiens
MGCGESELKSADGEEAAAVPGPPPEPQVPQLRAPVPEPGLDLSLSPRPDSPQPRHGSPGRRKGRAERRGAARQRRQVSGGGWPPARDGLAPTWSLPCPLLPGPLPPDAALPGAVRAAACGAAGAGDARAEEQPGLGPGAAGRSREPL

SEQ ID NO: 29240 - protein, 39 aa, Homo sapiens
LYDSINVIDVNKVVEYVKGLQKEDGSFAGDIWGPTKQLV

SEQ ID NO: 29241 - protein, 14 aa, Homo sapiens
LAASPGLRAMPRAV

SEQ ID NO: 29242 - protein, 33 aa, Homo sapiens
REKAVQPNSEEKRGGKGLDFHIGTTFFPVLKDL

SEQ ID NO: 29243 - protein, 43 aa, Homo sapiens
KKMMMTMLKKGKKRKKRKKEVFEGRRGNEMLKTMERKKMTRSF

SEQ ID NO: 29244 - protein, 96 aa, Homo sapiens
KAQKKDGKKRKRGRKESYSIYVYKVLKQVHPDTGISSKAMGIMNSFVNDIFERIASEASRLAHYKQALHHHVPRSADGRAPAAARRAGQARRVRGH

SEQ ID NO: 29245 - protein, 32 aa, Homo sapiens
TAVRLLLPGKLAKHAVSEGTKAVTKYTSSNIF

SEQ ID NO: 29246 - protein, 59 aa, Homo sapiens
VDFNWQAQALLALQEAAEAFLVHLFEDAYLLTLHAGRVTLFPKDVQLARRIRGLEEGLG

SEQ ID NO: 29247 - protein, 41 aa, Homo sapiens
LDRRGGGPLQGHSALGIPETRGEIFYIPCSGFLCSKRWHSK

SEQ ID NO: 29248 - protein, 47 aa, Homo sapiens
LCNGKDTYRLRRRATRRRINKRGAKNCNAIRHFENTFVVETLICGVV

SEQ ID NO: 29249 - protein, 51 aa, Homo sapiens
LKQMLCLIPAGESHRLELLGRERPSCTLLRDCHAPPGGLRTFDMLQSWPRQ

SEQ ID NO: 29250 - protein, 55 aa, Homo sapiens
TARPRASAATSGTWAARRSCGRCGSPTAAARTASSTWWTRWTWTGWRRPRRSCTR

SEQ ID NO: 29251 - protein, 56 aa, Homo sapiens
RMLPTTMPVVTIPLARRSLTQCWIGSASCLTSAQDFRASWCSTALVGALALASPHS

SEQ ID NO: 29252 - protein, 46 aa, Homo sapiens
LKSFIQKKMQNWCPSWSEDETLCARNVNNEVHFFENNNFSMERFMT

SEQ ID NO: 29253 - protein, 31 aa, Homo sapiens
IHNLSAFYDSELFRMNKFSHDLKRKMILQQF

SEQ ID NO: 29254 - protein, 26 aa, Homo sapiens
LTEKMHARDFTVSALVRGVLKCLDFH

SEQ ID NO: 29255 - protein, 40 aa, Homo sapiens
LARNAPLPRNGTTSTPSLLSAPCSTSSSSSPLLRTSSSTT

SEQ ID NO: 29256 - protein, 27 aa, Homo sapiens
IALEINQFTPEPREGSVSVGSGRSAGL

SEQ ID NO: 29257 - protein, 47 aa, Homo sapiens
ITKGTVIEVNVSELGLVTQGGKVIWGKYAQVTNNPENDGCINAVLLV

SEQ ID NO: 29258 - protein, 114 aa, Homo sapiens
IDRLIRSSPPRAFALCAVIELPPSQVLLRSSKRQRLDVSAGRRFVPSVPASPPAVPSLSRSRSRPRRPAVSAARHGDCDPRAAADGQPRWRPHHAAEPHAPVAAPGEGGAARAQ

SEQ ID NO: 29259 - protein, 8 aa, Homo sapiens
ILETRRKI

SEQ ID NO: 29260 - protein, 212 aa, Homo sapiens
IYIMNPSMKQKQEEIKENIKNSSVPRRTLKMIQPSASGSLVGRENELSAGLSKRKHRNDHLTSTTSSPGVIVPESSENKNLGGVTQESFDLMIKENPSSQYWKEVAEKRRKALYEALKENEKLHKEIEQKDNEIARLKKENKELAEVAEHVQYMAELIERLNGEPLDNFESLDNQEFDSEEETVEDSLVEDSEIGTCAEGTVSSSTDAKPCI

SEQ ID NO: 29261 - protein, 94 aa, Homo sapiens
LGCSCPKSTRLPTCAPRPATTCTPPSWRPARRRSPWSRSTRWARYWAAAASARSTQASASPTTCRWPSNTWRRTGFPTGESCLMALECPWKWSC

SEQ ID NO: 29262 - protein, 9 aa, Homo sapiens
ICTSLWQLK

SEQ ID NO: 29263 - protein, 104 aa, Homo sapiens; identical to SEQ ID NO: 22223

SEQ ID NO: 29264 - protein, 25 aa, Homo sapiens
KKVTGSRPTRRQFSGGKENRAERQQ

SEQ ID NO: 29265 - protein, 31 aa, Homo sapiens
KVRQSLQQQHHKEAKAKPTGARPSALDRFVR

SEQ ID NO: 29266 - protein, 87 aa, Homo sapiens
KRHRKVLRDNIQGITKPAIRRLARRGGVKRISGLIYEETRGVLKVFLENVIRDAVTYTEHAKRKTVTAMDVVYALKRQGRTLYGFGG

SEQ ID NO: 29267 - protein, 72 aa, Homo sapiens
MGSIEQTTEILLCLSPVEVASLKEGINFFRNKSTGKDYVLYKNKSRLRACKNMCKHQGGLFIKDIEDLAGSF

SEQ ID NO: 29268 - protein, 8 aa, Homo sapiens
LWFCHGSY

SEQ ID NO: 29269 - protein, 8 aa, Homo sapiens
VAIFPYQK

SEQ ID NO: 29270 - protein, 71 aa, Homo sapiens
VPFIHVPSPAVPKLSALKARKNVESFLEACRKMGVPEESLCQPHHILEEEGAPGRGLPYIAAVVHALLDRP

SEQ ID NO: 29271 - protein, 60 aa, Homo sapiens
RRQPLVHAADRLRLHPQPGLPDPSGRRPPGPAARRGEKSSIHFLPNSIPWACHSIWEKSN

SEQ ID NO: 29272 - protein, 24 aa, Homo sapiens
KQVTSAEECKQVCWALRDFTRLFR

SEQ ID NO: 29273 - protein, 31 aa, Homo sapiens
VRRLYKPCLRSWLESFCNLFNLIKRPLILSA

SEQ ID NO: 29274 - protein, 97 aa, Homo sapiens
VQIHDTRPVKPELALVYIEYLLTHPKNRECLLSAPRKKLNHLLKALETSKADLESLLQTPGGKPRGFSEAAAPRAFGLHCRLSIHLQHKVCLLLALY

SEQ ID NO: 29275 - protein, 54 aa, Homo sapiens
RIFGPHAPAPDSPLFALAEEQVGQEARAQQPWLLRIPEKHPWSRRWQFTEFESP

SEQ ID NO: 29276 - protein, 85 aa, Homo sapiens
LQRASRMAHKQIYYSDKYFDEHYEYRHVMLPRELSKQVPKTHLMSEEEWRRLGVQQSLGWVHYMIHEPEPHILLFRRPLPKDQQK

SEQ ID NO: 29277 - protein, 29 aa, Homo sapiens
TQSPRTKNAPSLPSRTCYKTAPGPRGHTG

SEQ ID NO: 29278 - protein, 162 aa, Homo sapiens
KFDPNEIKVVYLRCTGGEVGATSALAPKIGPLGLSPKKVGDDIAKATGDWKGLRITVKLTIQNRQAQIEVVPSASALIIKALKEPPRDRKKQKNIKHSGNITFDEIVNIARQMRHRSLARELSGTIKEILGTAQSVGCNVDGRHPHDIIDDINSGAVECPAS

SEQ ID NO: 29279 - protein, 31 aa, Homo sapiens
IAESSPLFTTWSRFILPYPVFGFLSSPSSLC

SEQ ID NO: 29280 - protein, 153 aa, Homo sapiens
KYFNSPPEDIDHKDSYLITRSIMAEPDYIEDDNPELIRPQKLINPVKTSRNHQDLHRELLMNQKRGLAPQNKPELQKVMEKRKRDQVIKQKEEEAQKKKSDLEIELLKRQQKLEQLELEKQKLQEEQENAPEFVKVKGNLRRTGQEVAQAQES

SEQ ID NO: 29281 - protein, 51 aa, Homo sapiens
VQHLPGAPDRARDRLLLGAAVSGGVLATDLPRAGTLPPERALLCFSLRNQI

SEQ ID NO: 29282 - protein, 30 aa, Homo sapiens
LPLPQEAFWCLVQICEVYLPGYYGPHMVRG

SEQ ID NO: 29283 - protein, 20 aa, Homo sapiens
ITGSPWQLYSGVWMLLSKDL

SEQ ID NO: 29284 - protein, 23 aa, Homo sapiens
VEDWDLVQTLGEGAYGEARHRHA

SEQ ID NO: 29285 - protein, 105 aa, Homo sapiens
VDILDPALLRSGRLDRKIEFPMPNEEARARIMQIHSRKMNVSPDVNYEELARCTDDFNGAQCKAVCVEAGMIALRRGATELTHEDYMEGILEVQAKKKANLQYYA

SEQ ID NO: 29286 - protein, 31 aa, Homo sapiens
LAKYNQLMRIEEELGDEARFAGHNFRNPSVL

SEQ ID NO: 29287 - protein, 9 aa, Homo sapiens
MEVVKWQRI

SEQ ID NO: 29288 - protein, 6 aa, Homo sapiens
VWYVHG

SEQ ID NO: 29289 - protein, 33 aa, Homo sapiens
RFGLGSVFFRRRTSECTTTGKSYYRWSKGPGSH

SEQ ID NO: 29290 - protein, 59 aa, Homo sapiens
IDSFEDWAVIKEKAEPPRPLAHLCRLRVRKAIGKYRIKLLDTLPLPGRLIRYLKYENTQ

SEQ ID NO: 29291 - protein, 32 aa, Homo sapiens
IRTDTYVKLDKAADLAHITARLAHQTRAEEGL

SEQ ID NO: 29292 - protein, 55 aa, Homo sapiens
KLWEHEGLAGAHLRLRLHEHLYLRVEDEWSHQLQHRAPPVVPAGFSALRSPHVYP

SEQ ID NO: 29293 - protein, 70 aa, Homo sapiens
IYDKYKEFAIPEEEAEWVGLTLEEAIEKQRLLEEKDPVPLFKIYVAELIQQLQQQALSEPAVVQKRASGQ

SEQ ID NO: 29294 - protein, 23 aa, Homo sapiens
LGCKFVKNQHHVWQLSIGARSLP

SEQ ID NO: 29295 - protein, 42 aa, Homo sapiens
VASPREELHYASVVFDSNTNRIAAQRPREEEPDSDYSVIRKT

SEQ ID NO: 29296 - protein, 36 aa, Homo sapiens
VKSASRPRRRRSSRLYPRRKRPRNKTSHFVCTYWPL

SEQ ID NO: 29297 - protein, 329 aa, Homo sapiens
TAPSGLSTLPQRVLRKEPVTPSALVLMSRSNVQPTAAPGQKVMENSSGTPDILTRHFTIDDFEIGRPLGKGKFGNVYLAREKKSHFIVALKVLFKSQIEKEGVEHQLRREIEIQAHLHHPNILRLYNYFYDRRRIYLILEYAPRGELYKELQKSCTFDEQRTATIMEELADALMYCHGKKVIHRDIKPENLLLGLKGELKIADFGWSVHAPSLRRKTMCGTLDYLPPEMIEGRMHNEKVDLWCIGVLCYELLVGNPPFESASHNETYRRIVKVDLKFPASVPMGAQDLISKLLRHNPSERLPLAQVSAHPWVRANSRRVLPPSALQSVA

SEQ ID NO: 29298 - protein, 50 aa, Homo sapiens
LGCQWIPRLFGQPGILHQRRRGLGPSLWLPVEAFWGRIQRYGIRLFRTGS

SEQ ID NO: 29299 - protein, 47 aa, Homo sapiens
LKRILEDQEENPLPAALVQPHTGKLCWFLDEAAARLLTVPFEKHSTL

SEQ ID NO: 29300 - protein, 353 aa, Homo sapiens
LSEPILPSFSTFASPCRERGLQERWPRAEPESGGTDDDLNSVLDFILSMGLDGLGAEAAPEPPPPPPPPAFYYPEPGAPPPYSAPAGGLVSELLRPELDAPLGPALHGRFLLAPPGRLVKAEPPEADGGGGYGCAPGLTRGPRGLKREGAPGPAASCMRGPGGRPPPPPDTPPLSPDGPARLPAPGPRASFPPPFGGPGFGAPGPGLHYAPPAPPAFGLFDDAAAAAAALGLAPPAARGLLTPPASPLELLEAKPKRGRRSWPRKRTATHTCSYAGCGKTYTKSSHLKAHLRTHTGEKPYHCNWDGCGWKFARSDELTRHYRKHTGHRPFQCHLCDRAFSRSDHLALHMKRHM

SEQ ID NO: 29301 - protein, 90 aa, Homo sapiens
KQRKDPRFCAFVQEAESRPRCRRLQLKDMIPTEMQRLTKYPLLLQSIGQNTEEPTEREKVELAAECCREILHHVNQAVRDMEDLLVSPST

SEQ ID NO: 29302 - protein, 31 aa, Homo sapiens
TCSRSPRWPAPPCLWSRPICPSTSPLASPLT

SEQ ID NO: 29303 - protein, 63 aa, Homo sapiens
KSTLDTDYQMTKRDMGFTEEEFKRLNINAAKSSFLPEDEKRELLDLLYKAYGMPPSASAGQNL

SEQ ID NO: 29304 - protein, 20 aa, Homo sapiens
RILGILKIQENKTKLFENCF

SEQ ID NO: 29305 - protein, 45 aa, Homo sapiens
RSSSHRTRPTWNLLCRQRLQSRCPGCFLETPRTCPTWTPSTCSWR

SEQ ID NO: 29306 - protein, 62 aa, Homo sapiens
LPPSLPEDTISTLTQHDRNIQPNFSPICGHWTAHQHENFYVFTYCFSYHPDDWVSTFCCVSS

SEQ ID NO: 29307 - protein, 21 aa, Homo sapiens
IHRSPQVERVSPPHHFPEEQT

SEQ ID NO: 29308 - protein, 5700 aa, Homo sapiens
MACAILIRQLQTGGIIDTVTGQRLTIDEAVSNDLVAAKIALVILESLWSFMGLLWPESGEILPITDALEQGIVSTELAHKILSNRQHIKALFLPATTEILSWKKAIESGILDRDLANNLKSICIPDVMPHMQLADSAEQNINPGAAVLPCSKSHPKATASQSENLLFQLMTHSYINVQNGQRLLLLDKELMETLTSRDEYQTSPPKVVEIGHQRQKTPEGLQESANVKISGTFSSGWTVRLPEFQFSSQNKEYPDREDCTTEKGKKTTVETEDSSVENPEQDLFVEQKERNPNIDALKVINKVKLEVQRQLIGTQREDQTAVSVRENASRGHLLTIPPAEAEGVPLVVDKDVFSVETPKKEHQPLRNTSFTCQNEQAHTLETEYIHDETGGSHIKPQSKKLQVQVKKTLGIKLELKSETDGNVHPLDKKEMLKKTFLAKDDHKESQEAQNIAGGSMMMSEKTDEEDSGREIFLSCSHPLELLEEATLNVLSAQLLDGGIFHEQTGQKLLLNEAISRGIVPSHTAVKLMEKLNMFQGFFDSQTCESLTTEEVINEGLMDEKLLHNVLMADKAISGVLDPRTQTLCSVKDAVTVGLLDKETATRILERQVVTGGIIDLKRGKKVSVTLASTLGLVDVADQPELINLEKASKGRDAEKTVRERLISLQMETTGLIDPDSKAPLTVVQSIDRGLLEREEAVRLLTKQVVDGGIIHHISGMRLSVDNAFRHGLIGEDLAEKLKRVENLNIHQIFNPETKENISLPKAIKLDLITSDLKREIQEVQAFTGNFVDLISGQRLTLAEAKKEGLLTNEAVLSPGMMHGIVDPENCRIVPYSELVKKCKIDIESGQRYLEVIPFSDIKDGVSDKVLTLSQAIQLGKVDFASTLKVLEAQANTGGIIDTATGKRLTLASALEEKLVDENMVRIIASHQVLNGGIVDIFSDQRVTLVEAIEKRLISPELANMIQIDSSEFSDHRAQIEKQEGIEVCALQNEFLGKDMLIACNQTAEMSCNKVEESERLFQVENQSAQEKVKVRVSDGEQAKKSREISLKEFGCKDQRKPRMSSDAKEFISIINPHNLKGKSLGQVSLTHPYSECDFKLKEVARNNMGNDTNEEQEKAVTKIEIISHMKQSTSCLDSEEIRENQGEVILEVQETYCETSGKLPSEQVLQQPMNARVKSKREKREVIVEESIRTCKPAFLSEEKLYQETAIRDEHDSHIKSQPREMTSSEKGKEADTEMGFSITFKIEESSSQVVPQGISVKHLDALTLFSSKQANEGKVNNLSLCLTLKPEENLSREIACGAQSEPFPCMTPRPEGLHYQESDGKAQVTGPSQISKTDKSFQGTTRQETNYQDSWVTSKTKETKHQISSSNECKEKSYQEVSFDPARGLKLEEITVSRPDSKEVRYLEFSDRKDLHHQGSKSDDKLCGTLKSEIATQELTGEKFLEMANPNVAGLEAGSIEDIVTQRGSRVLGSFLPEKLFKGVSQKENTGQQNAIISPTVLETSEEKTVSLTVCSAVKTEKTPQEKLRESPGSEQTPFMTAPEGKGNGGVNPEPFRATQNVFTRQLCLEHDEKLVSYLSLLRNIEMRTKQIQPLELNLAELQDLLCQAKVLERELKDLTTLVSQELECVNQIIISQPQEVPAQLLKALEKDAKNLQKSLSSVSDTWNSRLLHFQNAVEIEKTKVLNQHTQLEGRLQDLRAWVGNKNLILNSKGSNSEIDVDSLNLCLQQYEDLKQPMAERKAQLDALAFDIQFFISEHAQDLSPQQNRQMLRLLNELQRSFQDILEQTAAQVDALQGHLQQMEQEALVKTLQKQQNTCHQQLEDLCSWVGQAERALAGHQGRTTQQDLSALQKNQSDLKDLQDDIQNRATSFATVVKDIEGFMEENQTKLSPRELTALREKLHQAKEQYEALQEETRVAQKELEEAVTSALQQETEKSKAAKELAENKKKIDALLDWVTSVGSSGGQLLTNLPGMEQLSGASLEKGALDTTDGYMGVNQAPEKLDKQCEMMKARHQELLSQQQNFILATQSAQAFLDQHGHNLTPEEQQMLQQKLGELKEQYSTSLAQSEAELKQVQTLQDELQKFLQDHKEFESWLERSEKELENMHKGGSSPETLPSLLKRQGSFSEDVISHKGDLRFVTISGQKVLDMENSFKEGKEPSEIGNLVKDKLKDATERYTALHSKCTRLGSHLNMLLGQYHQFQNSADSLQAWMQACEANVEKLLSDTVASDPGVLQEQLATTKQLQEELAEHQVPVEKLQKVARDIMEIEGEPAPDHRHVQETTDSILSHFQSLSYSLAERSSLLQKAIAQSQSVQESLESLLQSIGEVEQNLEGKQVSSLSSGVIQEALATNMKLKQDIARQKSSLEATREMVTRFMETADSTTAAVLQGKLAEVSQRFEQLCLQQQEKESSLKKLLPQAEMFEHLSGKLQQFMENKSRMLASGNQPDQDITHFFQQIQELNLEMEDQQENLDTLEHLVTELSSCGFALDLCQHQDRVQNLRKDFTELQKTVKEREKDASSCQEQLDEFRKLVRTFQKWLKETEGSIPPTETSMSAKELEKQIEHLKSLLDDWASKGTLVEEINCKGTSLENLIMEITAPDSQGKTGSILPSVGSSVGSVNGYHTCKDLTEIQCDMSDVNLKYEKLGGVLHERQESLQAILNRMEEVHKEANSVLQWLESKEEVLKSMDAMSSPTKTETVKAQAESNKAFLAELEQNSPKIQKVKEALAGLLVTYPNSQEAENWKKIQEELNSRWERATEVTVARQRQLEESASHLACFQAAESQLRPWLMEKELMMGVLGPLSIDPNMLNAQKQQVQFMLKEFEARRQQHEQLNEAAQGILTGPGDVSLSTSQVQKELQSINQKWVELTDKLNSRSSQIDQAIVKSTQYQELLQDLSEKVRAVGQRLSVQSAISTQPEAVKQQLEETSEIRSDLEQLDHEVKEAQTLCDELSVLIGEQYLKDELKKRLETVALPLQGLEDLAADRINRLQAALASTQQFQQMFDELRTWLDDKQSQQAKNCPISAKLERLQSQLQENEEFQKSLNQHSGSYEVIVAEGESLLLSVPPGEEKRTLQNQLVELKNHWEELSKKTADRQSRLKDCMQKAQKYQWHVEDLVPWIEDCKAKMSELRVTLDPVQLESSLLRSKAMLNEVEKRRSLLEILNSAADILINSSEADEDGIRDEKAGINQNMDAVTEELQAKTGSLEEMTQRLREFQESFKNIEKKVEGAKHQLEIFDALGSQACSNKNLEKLRAQQEVLQALEPQVDYLRNFTQGLVEDAPDGSDASQLLHQAEVAQQEFLEVKQRVNSGCVMMENKLEGIGQFHCRVREMFSQLADLDDELDGMGAIGRDTDSLQSQIEDVRLFLNKIHVLKLDIEASEAECRHMLEEEGTLDLLGLKRELEALNKQCGKLTERGKARQEQLELTLGRVEDFYRKLKGLNDATTAAEEAEALQWVVGTEVEIINQQLADFKMFQKEQVDPLQMKLQQVNGLGQGLIQSAGKDCDVQGLEHDMEEINARWNTLNKKVAQRIAQLQEALLHCGKFQDALEPLLSWLADTEELIANQKPPSAEYKVVKAQIQEQKLLQRLLDDRKATVDMLQAEGGRIAQSAELADREKITGQLESLESRWTELLSKAAARQKQLEDILVLAKQFHETAEPISDFLSVTEKKLANSEPVGTQTAKIQQQIIRHKALEEDIENHATDVHQAVKIGQSLSSLTSPAEQGVLSEKIDSLQARYSEIQDRCCRKAALLDQALSNARLFGEDEVEVLNWLAEVEDKLSSVFVKDFKQDVLHRQHADHLALNEEIVNRKKNVDQAIKNGQALLKQTTGEEVLLIQEKLDGIKTRYADITVTSSKALRTLEQARQLATKFQSTYEELTGWLREVEEELATSGGQSPTGEQIPQFQQRQKELKKEVMEHRLVLDTVNEVSRALLELVPWRAREGLDKLVSDANEQYKLVSDTIGQRVDEIDAAIQRSQQYEQAADAELAWVAETKRKLMALGPIRLEQDQTTAQLQVQKAFSIDIIRHKDSMDELFSHRSEIFGTCGEEQKTVLQEKTESLIQQYEAISLLNSERYARLERAQVLVNQFWETYEELSPWIEETRALIAQLPSPAIDHEQLRQQQEEMRQLRESIAEHKPHIDKLLKIGPQLKELNPEEGEMVEEKYQKAENMYAQIKEEVRQRALALDEAVSQSTQITEFHDKIEPMLETLENLSSRLRMPPLIPAEVDKIRECISDNKSATVELEKLQPSFEALKRRGEELIGRSQGADKDLAAKEIQDKLDQMVFFWEDIKARAEEREIKFLDVLELAEKFWYDMAALLTTIKDTQDIVHDLESPGIDPSIIKQQVEAAETIKEETDGLHEELEFIRILGADLIFACGETEKPEVRKSIDEMNNAWENLNKTWKERLEKLEDAMQAAVQYQDTLQAMFDWLDNTVIKLCTMPPVGTDLNTVKDQLNEMKEFKVEVYQQQIEMEKLNHQGELMLKKATDETDRDIIREPLTELKHLWENLGEKIAHRQHKLEGALLALGQFQHALEELMSWLTHTEELLDAQRPISGDPKVIEVELAKHHVLKNDVLAHQATVETVNKAGNELLESSAGDDASSLRSRLEAMNQCWESVLQKTEEREQQLQSTLQQAQGFHSEIEDFLLELTRMESQLSASKPTGGLPETAREQLDTHMELYSQLKAKEETYNQLLDKGRLMLLSRDDSGSGSKTEQSVALLEQKWHVVSSKMEERKSKLEEALNLATEFQNSLQEFINWLTLAEQSLNIASPPSLILNTVLSQIEEHKVFANEVNAHRDQIIELDQTGNQLKFLSQKQDVVLIKNLLVSVQSRWEKVVQRSIERGRSLDDARKRAKQFHEAWKKLIDWLEDAESHLDSELEISNDPDKIKLQLSKHKEFQKTLGGKQPVYDTTIRTGRALKEKTLLPEDSQKLDNFLGEVRDKWDTVCGKSVERQHKLEEALLFSGQFMDALQALVDWLYKVEPQLAEDQPVHGDLDLVMNLMDAHKVFQKELGKRTGTVQVLKRSGRELIENSRDDTTWVKGQLQELSTRWDTVCKLSVSKQSRLEQALKQAEVFRDTVHMLLEWLSEAEQTLRFRGALPDDTEALQSLIDTHKEFMKKVEEKRVDVNSAVAMGEVILAVCHPDCITTIKHWITIIRARFEEVLTWAKQHQQRLETALSELVANAELLEELLAWIQWAETTLIQRDQEPIPQNIDRVKALIAEHQTFMEEMTRKQPDVDRVTKTYKRKNIEPTHAPFIEKSRSGGRKSLSQPTPPPMPILSQSEAKNPRINQLSARWQQVWLLALERQRKLNDALDRLEELKEFANFDFDVWRKKYMRWMNHKKSRVMDFFRRIDKDQDGKITRQEFIDGILASKFPTTKLEMTAVADIFDRDGDGYIDYYEFVAALHPNKDAYRPTTDADKIEDEVTRQVAQCKCAKRFQVEQIGENKYRFFLGNQFGDSQQLRLVRILRSTVMVRVGGGWMALDEFLVKNDPCRARGRTNIELREKFILPEGASQGMTPFRSRGRRSKPSSRAASPTRSSSSASQSNHSCTSMPSSPATPASGTKVIPSSGSKLKRPTPTFHSSRTSLAGDTSNSSSPASTGAKTNRADPKKSASRPGSRAGSRAGSRASSRRGSDASDFDLLETQSACSDTSESSAAGGQGNSRRGLNKPSKIPTMSKKTTTASPRTPGPKR

SEQ ID NO: 29309 - protein, 227 aa, Homo sapiens
MDSSLQARLFPGLAIKIQRSNGLIHSANVRTVNLEKSCVSVEWAEGGATKGKEIDFDDVAAINPELLQLLPLHPKDNLPLQENVTIQKQKRRSVNSKIPAPKESLRSRSTRMSTVSELRITAQENDMEVELPAAANSRKQFSVPLRRKSCLVKEVEKMKNKREEKKAQNSEMRMKRAQEYDSSFPNWEFARMIKEFRATLECHPLTMTDPGAPPEILSFCRIGQERN

SEQ ID NO: 29310 - protein, 177 aa, Homo sapiens
MLGSLLAQLSFPGFPSIQLPYLIDGAHKITQSNAILCYIARKHNLCGETEEEKIRVDILENQAMDVSNQLARVCYSPDFEKLKPEYLEELPTMMQHFSQFLGKRPWFVGDKITFVDFLAYDVLDLHRIFEPNCLDAFPNLKDFISRFEGLEKISAYMKSSRFLPKPLYTRVAVWGNK

SEQ ID NO: 29311 - protein, 199 aa, Homo sapiens
MVNISLRVLSRPNAQELPSMYQRLGLDYEERVLPSIVNEVLKSVVAKFNASQLITQRAQVSLLIRRELTERAKDFSLILDDVAITELSFSREYTAAVEAKQVAQQEAQRAQFLVEKAKQEQRQKIVQAEGEAEAAKMLGEALSKNPGYIKLRKIRAAQNISKTIATSQNRIYLTADNLVLNLQDESFTRGSDSLIKGKK

SEQ ID NO: 29312 - protein, 78 aa, Homo sapiens
MVKELQEIRLEPQEVPRGSEPWKQQLTEDGDSFLHLAIIHEEKALTMEVIRQVKGDLAFLNFQNNLQQVRRLPGPGSL

SEQ ID NO: 29313 - protein, 26 aa, Homo sapiens
MATKIDKEACRAAYNLVRDDGSAVIW

SEQ ID NO: 29314 - protein, 91 aa, Homo sapiens
MKFPARSTRGATNKKAESRQPSENSVTDSNSDSEDESGMNFLEKRALNIKQNKAMLAKLMSELESFPGSFRGRHPLPGSDSTNEGDLEETP

SEQ ID NO: 29315 - protein, 224 aa, Homo sapiens
MENEIAVLHKIKHPNIVALDDIYESGGHLYLIMQLVSGGELFDRIVEKGFYTERDASRLIFQVLDAVKYLHDLGIVHRDLKPENLLYYSLDEDSKIMISDFGLSKMEDPGSVLSTACGTPGYVAPEVLAQKPYSKAVDCWSIGVIAYILLCGYPPFYDENDAKLFEQILKAEYEFDSPYWDDISDSAKDFIRHLMEKDPEKRFTCEQALQHPCKPSMPRLWCGT

SEQ ID NO: 29316 - protein, 1269 aa, Homo sapiens
MGPSESDNFSHNLRGVIPRSFEYLFSLIDREKEKAGAGKSFLCKCSFIEIYNEQIYDLLDSASAGLYLREHIKKGVFVVGAVEQVVTSAAEAYQVLSGGWRNRRVASTSMNRESSRSHAVFTITIESMEKSNEIVNIRTSLLNLVDLAGSERQKDTHAEGMRLKEAGNINRSLSCLGQVITALVDVGNGKQRHVCYRDSKLTFLLRDSLGGNAKTAIIANVHPGSRCFGETLSTLNFAQRAKLIKNKAVVNEDTQGNVSQLQAEVKRLKEQLAELASGQTPPESFLTRDKKKTNYMEYFQEAMLFFKKSEQEKKSLIEKVTQLEDLTLKKEKFIQSNKMIVKFREDQIIRLEKLHKESRGGFLPEEQDRLLSELRNEIQTLREQIEHHPRVAKYAMENHSLREENRRLRLLEPVKRAQEMDAQTIAKLEKAFSEISGMEKSDKNQQGFSPKAQKEPCLFANTEKLKAQLLQIQTELNNSKQEYEEFKELTRKRQLELESELQSLQKANLNLENLLEATKACKRQEVSQLNKIHAETLKIITTPTKAYQLHSRPVPKLSPEMGSFGSLYTQNSSILDNDILNEPVPPEMNEQAFEAISEELRTVQEQMSALQAKLDEEEHKNLKLQQHVDKLEHHSTQMQELFSSERIDWTKQQEELLSQLNVLEKQLQETQTKNDFLKSEVHDLRVVLHSADKELSSVKLEYSSFKTNQEKEFNKLSERHMHVQLQLDNLRLENEKLLESKACLQDSYDNLQEIMKFEIDQLSRNLQNFKKENETLKSDLNNLMELLEAEKERNNKLSLQFEEDKENSSKEILKVLEAVRQEKQKETAKCEQQMAKVQKLEESLLATEKVISSLEKSRDSDKKVVADLMNQIQELRTSVCEKTETIDTLKQELKDINCKYNSALVDREESRVLIKKQEVDILDLKETLRLRILSEDIERDMLCEDLAHATEQLNMLTEASKKHSGLLQSAQEELTKKEALIQELQHKLNQKKEEVEQKKNEYNFKMRQLEHVMDSAAEDPQSPKTPPHFQTHLAKLLETQEQEIEDGRASKTSLEHLVTKLNEDREVKNAEILRMKEQLREMENLRLESQQLIEKNWLLQGQLDDIKRQKENSDQNHPDNQQLKNEQEESIKERLAKSKIVEEMLKMKADLEEVQSALYNKEMECLRMTDEVERTQTLESKAFQEKEQLRSKLEEMYEERERTSQEMEMLRKQVECLAEENGKLVGHQNLHQKIQYVVRLKKENVRLAEETEKLRAENVFLKEKKRSES

SEQ ID NO: 29317 - protein, 67 aa, Homo sapiens
MVGSVTESLAPQALNDSMINETARDAARVQVASTLSVLVGLFQVWNSQEYVPPTTTSAPATVLSVLP

SEQ ID NO: 29318 - protein, 79 aa, Homo sapiens
MDSWARHRIYAAFKEVLGSGMHHHLQNNELLRDIFGLGPVLLLDATALKACKVPRFEKVCTLGHLSLPPIPISWRPGIL

SEQ ID NO: 29319 - protein, 35 aa, Homo sapiens
MESLLERGEKLDDLVSKSEVLGTQSKAFYKTKIFN

SEQ ID NO: 29320 - protein, 63 aa, Homo sapiens
IPTPLRPVWDSTCLLPNPTLISAWSLPLWPNLSSRLIGDGHSHSLVPNTSSWMDSRHPCPLFN

SEQ ID NO: 29321 - protein, 39 aa, Homo sapiens
KNDLYPNPKPEVLHMIYMRALQIVYGIRLEHFYMEELPN

SEQ ID NO: 29322 - protein, 12 aa, Homo sapiens
MELYYAPTKEHK

SEQ ID NO: 29323 - protein, 27 aa, Homo sapiens
LLKGPEMQGFGIHFEPLSCLTLTSFHY

SEQ ID NO: 29324 - protein, 263 aa, Homo sapiens
ISPVTLKEAYVQKLVKVCTDTDRWSLISLSNKNGKNVELKFVDSIRRQFEFSVDSFQIILDSLLFFYDCSNNPISEHFHPTVIGESMYGDFEEAFDHLQNRLIATKNPEEIRGGGLLKYSNLLVRDFRPTDQEEIKTLERYMCSRFFIDFPDILEQQRKLETYLQNHFAEEERSKYDYLMILRRVVNESTVCLMGHERRQTLNLISLLALRVLAEQNIIPSATNVTCYYQPAPYVSDGNFSNYYVAHPPVTYSQPYPTWLPCN

SEQ ID NO: 29325 - protein, 130 aa, Homo sapiens
IPRPTPAMAFANLRKVLISDSLDPCCRKILQDGGLQVVEKQNLSKEELIAELQDCEGLIVRSATKVTADVINAAEKLQVVGRAGTGVDNVDLEAATRKGILVMNTPNGNSLSAAELTCGMIMCLARTSFV

SEQ ID NO: 29326 - protein, 243 aa, Homo sapiens
VQVNVMSENILTGAKKLTNKATLWYVPLSLKNVDKVLEVPPVVYSRQEQEEEGRKRYEAQKLERMETKWRNGDIVQPVLNPEPNTVSYSQSSLIHLVGPSDCTLHGFVHGGVTMKLMDEVAGIVAARHCKTNIVTASVDAINFHDKIRKGCVITISGRMTFTSNKSMEIEVLVDADPVVDSSQKRYRAASAFFTYVSLSQEGRSLPVPQLVPETEDEKKRFEEGKGRYLQMKAKRQGHAEPQP

SEQ ID NO: 29327 - protein, 41 aa, Homo sapiens
LGEPLHSLIITGGSIHPMEMEMLSLFSIPENSSESQSINGL

SEQ ID NO: 29328 - protein, 71 aa, Homo sapiens
LFRQRTCRGLSEIGRLLITHSFRNLMMQMKIMEEIRALPLRKFDHLPEKLKIRGDLERIHRKIVRTQKTKM

SEQ ID NO: 29329 - protein, 22 aa, Homo sapiens
RAKALHSCSPLHTQELMACWLC

SEQ ID NO: 29330 - protein, 22 aa, Homo sapiens
TPDPLIPPQALPLPSHEWLIYM

SEQ ID NO: 29331 - protein, 66 aa, Homo sapiens
MNTERILYKQKKNSSISIPFIPETPVRTRIVSRLKPDWVLRRDNMEEITNPLQAIQMVMDTLGIPY

SEQ ID NO: 29332 - protein, 93 aa, Homo sapiens
KKDGKKRKRGRKESYSIYVYKVLKQVHPDTGISSKAMGIMNSFVNDIFERIASEASRLAHYKQALHHHVPRSADGRAPAAARRAGQARRVRGH

SEQ ID NO: 29333 - protein, 6 aa, Homo sapiens
IALRIC

SEQ ID NO: 29334 - protein, 80 aa, Homo sapiens
IVAADESTISWGPSPTFGELGYGDHKPKSSTAAQEVKTLDGIFSEQVAMGYSHSLVIARDESETEKEKIKKLPEYNPRTL

SEQ ID NO: 29335 - protein, 72 aa, Homo sapiens
ISSKAMGIMNSFVNDIFERIAGEASRLAHYNKRSTITSREIQTAVRLLLPGKLAKHAVSEGTKAVTKYTSSK

SEQ ID NO: 29336 - protein, 44 aa, Homo sapiens
IRCGSPSRNHTQVAALSSSVISPPHHRPRSPRKPAAHARSILPC

SEQ ID NO: 29337 - protein, 53 aa, Homo sapiens
IVENPQTHEVLHYVEKPSTFISDIINCGIYLFSPEALKPLRDVFQRNQQDGQL

SEQ ID NO: 29338 - protein, 65 aa, Homo sapiens
MKFITPVRRSSRIERAVSRYPEMLQEHDLVVASLDELLEVEETKCFIFRRNEALPVTLGFQTPES

SEQ ID NO: 29339 - protein, 9 aa, Homo sapiens
ISGNLCQQL

SEQ ID NO: 29340 - protein, 524 aa, Homo sapiens [sequence omitted]

SEQ ID NO: 29341 - protein, 24 aa, Homo sapiens
LVESPGPCWGTRWQDVSVVRTSAA

SEQ ID NO: 29342 - protein, 97 aa, Homo sapiens
LHLKAEDSSSPGDFKELRLRGTSAERPPKPSPGQSSSRRSASADRSAQWPRLAAPWSGSPARNHPPPACPKHRDWSTETYQGCTLPTCTKCTSQDGE

SEQ ID NO: 29343 - protein, 22 aa, Homo sapiens
LISLFQESLWLVGFQYAPVPDC

SEQ ID NO: 29344 - protein, 61 aa, Homo sapiens
LEEVELQIGDAAFSLTKLLEATSAVSAQVEELAFKCTENARFLKTWRDLLKEGYDSLKPDD

SEQ ID NO: 29345 - protein, 29 aa, Homo sapiens
LRIALEINQFTPEPREGSVSVGSGRSAGL

SEQ ID NO: 29346 - protein, 26 aa, Homo sapiens
MRLLWAPVQTAPPLERVARRGSRSIL

SEQ ID NO: 29347 - protein, 267 aa, Homo sapiens
IFKMTKFSSFSLFFLIVGAYMTHVCFNMEIIGGKEVSPHSRPFMASIQYGGHHVCGGVLIDPQWVLTAAHCQYRFTKGQSPTVVLGAHSLSKNEASKQTLEIKKFIPFSRVTSDPQSNDIMLVKLQTAAKLNKHVKMLHIRSKTSLRSGTKCKVTGWGATDPDSLRPSDTLREVTVTVLSRKLCNSQSYYNGDPFITKDMVCAGDAKGQKDSCKGDSGGPLICKGVFHAIVSGGHECGVATKPGIYTLLTKKYQTWIKSNLVPPHTN

SEQ ID NO: 29348 - protein, 713 aa, Homo sapiens
LAVNMSFPKAPLKRFNDPSGCAPSPGAYDVKTLEVLKGPVSFQKSQRFKQQKESKQNLNVDKDTTLPASARKVKSSESKIRVLLQERGAQDRRIQDLETELEKMEARLNAALREKTSLSANNATLEKQLIELTRTNELLKSKFSENGNQKNLRILSLELMKLRNKRETKMRGMMAKQEGMEMKLQVTQRSLEESQGKIAQLEGKLVSIEKEKIDEKSETEKLLEYIEEISCASDQVEKYKLDIAQLEENLKEKNDEILSLKQSLEENIVILSKQVEDLNVKCQLLEKEKEDHVNRNREHNENLNAEMQNLKQKFILEQQEREKLQQKELQIDSLLQQEKELSSSLHQKLCSFQEEMVKEKNLFEEELKQTLDELDKLQQKEEQAERLVKQLEEEAKSRAEELKLLEEKLKGKEAELEKSSAAHTQATLLLQEKYDSMVQSLEDVTAQFESYKALTASEIEDLKLENSSLQEKAAKAGKNAEDVQHQILATESSNQEYVRMLLDLQTKSALKETEIKEITVSFLQKITDLQNQLKQQEEDFRKQLEDEEGRKAEKENTTAELTEEINKWRLLYEELYNKTKPFQLQLDAFEVEKQALLNEHGAAQEQLNKIRDSYAKLLGHQNLKQKIKHVVKLKDENSQLKSEVSKLRCQLAKKKQSETKLQEELNKVLGIKHFDPSKAFHHESKENFALKTPLKEGNTNCYRAPMECQESWK

SEQ ID NO: 29349 - protein, 135 aa, Homo sapiens
LHFPACVCEWVCVFSYKGYFAIDRLIRSSPPRAFALCAVIELPPSQVLLRSSKRQRLDVSAGRRFVPSVPASPPAVPSLSRSRSRPRRPAVSAARHGDCDPRAAADGQPRWRPHHAAEPHAPVAAPGEGGAARAQ

SEQ ID NO: 29350 - protein, 15 aa, Homo sapiens
ILTHGSTLSPLERTP

SEQ ID NO: 29351 - protein, 51 aa, Homo sapiens
LTSASWQSTWSPSHVSISLCLALPLSPAVEASSIELSQCRNSPSRSSMPRT

SEQ ID NO: 29352 - protein, 35 aa, Homo sapiens
VCQGIGMVNRVGMVETNSQDRPVDDVKIIKAYPSG

SEQ ID NO: 29353 - protein, 16 aa, Homo sapiens
RGCNCRQVSPRSHKFL

SEQ ID NO: 29354 - protein, 69 aa, Homo sapiens
IEQTTEILLCLSPVEVASLKEGINFFRNKSTGKDYVLYKNKSRLRACKNMCKHQGGLFIKDIEDLAGSC

SEQ ID NO: 29355 - protein, 128 aa, Homo sapiens
KSLVSKGTLVQTKGTGASGSFKLNKKASSVETKPGASKVATKTKATGASKKLKKATGASKKSVKTPKKAKKPAATRKSSKNPKKPKTVKPKKVAKSPAKAKAVKPKAAKARVTKPKTAKPKKAAPKKK

SEQ ID NO: 29356 - protein, 9 aa, Homo sapiens
RSLINSWGV

SEQ ID NO: 29357 - protein, 8 aa, Homo sapiens
ILFRNSNA

SEQ ID NO: 29358 - protein, 38 aa, Homo sapiens
LSADTKEERDLWMQKLNQVLVDIRLWQPDACYKPIGKP

SEQ ID NO: 29359 - protein, 308 aa, Homo sapiens
RVEDAYILTCNVSLEYEKTEVNSGFFYKSAEEREKLVKAERKFIEDRVKKIIELKRKVCGDSDKGFVVINQKGIDPFSLDALSKEGIVALRRAKRRNMERLTLACGGVALNSFDDLSPDCLGHAGLVYEYTLGEEKFTFIEKCNNPRSVTLLIKGPNKHTLTQIKDAVRDGLRAVKNAIDDGCVVPGAGAVEVAMAEALIKHKPSVKGRAQLGVQAFADALLIIPKVLAQNSGFDLQETLVKIQAEHSESGQLVGVDLNTGEPMVAAEVGVWDNYCVKKQLLHSCTVIATNILLVDEIMRAGMSSLKG

SEQ ID NO: 29360 - protein, 82 aa, Homo sapiens
MTLSIPHINLSNDDDDEDKTFDESDFDDEAYYAALGTRPPINMEELDESYQKVIELFSVCTNEDPKDRPSAAHIVEALETDV

SEQ ID NO: 29361 - protein, 26 aa, Homo sapiens
VLDVIFHPTQPWVFSSGADGTVRLFT

SEQ ID NO: 29362 - protein, 47 aa, Homo sapiens
LSEQQVDRIILQLNRYYPQILTNKEAEKVLRSSGTPRHPCVCGSVTS

SEQ ID NO: 29363 - protein, 49 aa, Homo sapiens
IRAAQEREEELKRQRQVLQSTQSPRTKNAPSLPSRTCYKTAPGPRGHTG

SEQ ID NO: 29364 - protein, 80 aa, Homo sapiens
RASSPFRRVREEEIEVDSRVADNSFDAKRGAAGDWGERANQVLKFTKGKSFRHEKTKKKRGSYRGGSISVQVNSIKFDSE

SEQ ID NO: 29365 - protein, 28 aa, Homo sapiens
IQNMTEFKRGLPLFPLVKPHINFMAAKL

SEQ ID NO: 29366 - protein, 17 aa, Homo sapiens
IAQPHPAVQRLPACAPS

SEQ ID NO: 29367 - protein, 50 aa, Homo sapiens
VLGFFRQVHLLTRSHFSRDPLSASHRRQTAGGELRTAACASPAAGWEEGH

SEQ ID NO: 29368 - protein, 23 aa, Homo sapiens
TLEKMQRMPSAPSTLTWNSWASS

SEQ ID NO: 29369 - protein, 23 aa, Homo sapiens
VLHRSGFSESRKTAADRIPGTSV

SEQ ID NO: 29370 - protein, 12 aa, Homo sapiens
TAEPRTLTVSAG

SEQ ID NO: 29371 - protein, 70 aa, Homo sapiens
KYLVPSDLTVGQFYFLIRKRIHLRPEDALFFFVNNTIPPTSATMGQLYEDNHEEDYFLYVAYSDESVYGK

SEQ ID NO: 29372 - protein, 365 aa, Homo sapiens
RVLRSLVEASSSGVSVLSLCEKGDAMIMEETGKIFKKEKEMKKGIAFPTSISVNNCVCHFSPLKSDQDYILKEGDLVKIDLGVHVDGFIANVAHTFVVDVAQGTQVTGRKADVIKAAHLCAEAALRLVKPGNQNTQVTEAWNKVAHSFNCTPIEGMLSHQLKQHVIDGEKTIIQNPTDQQKKDHEKAEFEVHEVYAVDVLVSSGEGKAKDAGQRTTIYKRDPSKQYGLKMKTSRAFFSEVERRFDAMPFTLRAFEDEKKARMGVVECAKHELLQPFNVLYEKEGEFVAQFKFTVLLMPNGPMRITSGPFEPDLYKSEMEVQDAELKALLQSSASRKTQKKKKKKASKTAENATSGETLEENEAGD

SEQ ID NO: 29373 - protein, 105 aa, Homo sapiens
ICDASEACVAALLGNRVDPLSEEGWKQKPNLNAIRSLEAVIRVHSKYWGCMQRLASCPDSWVPRVPGADKEEVEAVTALASLSVGILAEDRPSEQLVEEEEPMNL

SEQ ID NO: 29374 - protein, 132 aa, Homo sapiens
INFEDFLTIMSYFRPIDTTMDEEQVELSRKEKLRFLFHMYDSDSDGRITLEEYRNVVEELLSGNPHIEKESARSIADGAMMEAASVCMGQMEPDQVYEGITFEDFLKIWQGIDIETKMHVRFLNMETMALCH

SEQ ID NO: 29375 - protein, 431 aa, Homo sapiens
LPQPLASAWVRRGGIKPRSESGSFARGALGLCLPRGASGRHPALSRSSTPMIDTLRPVPFASEMAISKTVAWLNEQLELGNERLLLMDCRPQELYESSHIESAINVAIPGIMLRRLQKGNLPVRALFTRGEDRDRFTRRCGTDTVVLYDESSSDWNENTGGESVLGLLLKKLKDEGCRAFYLEGGFSKFQAEFSLHCETNLDGSCSSSSPPLPVLGLGGLRISSDSSSDIESDLDRDPNSATDSDGSPLSNSQPSFPVEILPFLYLGCAKDSTNLDVLEEFGIKYILNVTPNLPNLFENAGEFKYKQIPISDHWSQNLSQFFPEAISFIDEARGKNCGVLVHCLAGISRSVTVTVAYLMQKLNLSMNDAYDIVKMKKSNISPNFNFMGQLLDFERTLGLSSPCDNRVPAQQLYFTTPSNQNVYQVDSLQST

SEQ ID NO: 29376 - protein, 39 aa, Homo sapiens
LLQRSPEPSLSCAKWQLLRKNSLHQLRKKRQQFQTIRSL

SEQ ID NO: 29377 - protein, 8 aa, Homo sapiens
LSPSPPNP

SEQ ID NO: 29378 - protein, 58 aa, Homo sapiens
KASFQRPVKIWLPLRRIMRRLVWILLKERVRKKERNTNYPFLLALQHVMLPEFQLQLN

SEQ ID NO: 29379 - protein, 8 aa, Homo sapiens
LGIIVLET

SEQ ID NO: 29380 - protein, 37 aa, Homo sapiens
INIGWWEYRTRLLRVPCAATFQPWPQVNRVSAKPGLP

SEQ ID NO: 29381 - protein, 149 aa, Homo sapiens
VTHTDLPSPLKQTISRPKGVALHRPDVYLLPPAREQLNLRESATITCLVTGFSPADVFVQWMQRGQPLSPEKYVTSAPMPEPQAPGRYFAHSILTVSEEEWNTGETYTCVVAHEALPNRVTERTVDKSTGKPTLYNVSLVMSDTAGTCY

SEQ ID NO: 29382 - protein, 61 aa, Homo sapiens
ISQSELFDNKSLTTECHLLDSPGLNCSNPFTQLERRHQEHARHISFGGNLITFSPLQPGEF

SEQ ID NO: 29383 - protein, 51 aa, Homo sapiens
RSLSWCPPRASEGSVSEKKQKQKQKQAARRKPRNNRTGAVLHCFGFFEGAG

SEQ ID NO: 29384 - protein, 114 aa, Homo sapiens
LTQKVELLEKFRDNCLAILESKGLDPALGSETLASRQESTTDHMDSMLLLETLQEELKLFNETAKKQMEELQALKVKLEMKEERVRFLEQQTLCNNQVNDLTTALKEMEQLLEM

SEQ ID NO: 29385 - protein, 83 aa, Homo sapiens
IKAAGVNVEPFWPGLFAKALANVNIGSLICNVGAGGPAPAAGAAPAGGPAPSTAAAPAEEKKVEAKKEESEESDDDMGFGLFD

SEQ ID NO: 29386 - protein, 21 aa, Homo sapiens
ISSSRKNSRQTARISSNPERR

SEQ ID NO: 29387 - protein, 29 aa, Homo sapiens
ICRGGLPRQKSFLQKWMGCLQRLMKKMTI

SEQ ID NO: 29388 - protein, 87 aa, Homo sapiens
LAPNTPGKARKLNTTTMSNATANSSIRPIFGGTVYHSPVSRLPPSGSKPVAASTCSGKKTPRTGRHGANKENLELNGSILSEGSVPL

SEQ ID NO: 29389 - protein, 17 aa, Homo sapiens
LFAWKWPRFSFSLGCWW

SEQ ID NO: 29390 - protein, 93 aa, Homo sapiens
LGPPATPPGSPPCSLLLDSSLSSNWDDDSLGPSLSPEAVLARTVGSTSTPRSRCTPRDALDLSDINSEPPRGSFPSFEPRNLLSLFEDTLDPT

SEQ ID NO: 29391 - protein, 23 aa, Homo sapiens
LSLPQRTPGRYGPPLRLAPSVGW

SEQ ID NO: 29392 - protein, 9 aa, Homo sapiens
TPADSTGGP

SEQ ID NO: 29393 - protein, 9 aa, Homo sapiens
LAAAAGVQT

SEQ ID NO: 29394 - protein, 552 aa, Homo sapiens
IPPASPPVEAQARFAAFSLCLITMSTNENANTPAARLHRFKNKGKDSTEMRRRRIEVNVELRKAKKDDQMLKRRNVSSFPDDATSPLQENRNNQGTVNWSVDDIVKGINSSNVENQLQATQAARKLLSREKQPPIDNIIRAGLIPKFVSFLGRTDCSPIQFESAWALTNIASGTSEQTKAVVDGGAIPAFISLLASPHAHISEQAVWALGNIAGDGSVFRDLVIKYGAVDPLLALLAVPDMSSLACGYLRNLTWTLSNLCRNKNPAPPIDAVEQILPTLVRLLHHDDPEVLADTCWAISYLTDGPNERIGMVVKTGVVPQLVKLLGASELPIVTPALRAIGNIVTGTDEQTQVVIDAGALAVFPSLLTNPKTNIQKEATWTMSNITAGRQDQIQQVVNHGLVPFLVSVLSKADFKTQKEAVWAVTNYTSGGTVEQIVYLVHCGIIEPLMNLLTAKDTKIILVILDAISNIFQAAEKLGETEKLSIMIEECGGLDKIEALQNHENESVYKASLSLIEKYFSVEEEEDQNVVPETTSEGYTFQVQDGAPGTFNF

SEQ ID NO: 29395 - protein, 12 aa, Homo sapiens
IHTTNINCQKFT

SEQ ID NO: 29396 - protein, 39 aa, Homo sapiens
IAKVDREYEECMSEDLSENIKEIRDKYEKKATLIKSSEE

SEQ ID NO: 29397 - protein, 16 aa, Homo sapiens
LWMRNPVSPEHWPALL

SEQ ID NO: 29398 - protein, 7 aa, Homo sapiens
TSLPEAP

SEQ ID NO: 29399 - protein, 38 aa, Homo sapiens
RQAHRSRTLMRTSETGSSSCCSWRSYQGSGYLSRSGGR

SEQ ID NO: 29400 - protein, 20 aa, Homo sapiens
KKRRGLWTEQSCLTPWWCAR

SEQ ID NO: 29401 - protein, 48 aa, Homo sapiens
KEPGRSELPAFGHLAHGAEQRSLSAQPGEFKHSSFQEPRNFSAVNSQL

SEQ ID NO: 29402 - protein, 48 aa, Homo sapiens
VPSLFPPQPPFSSLPYVPECGSTASFPAARLPPDLSARVSPIPRGRWC

SEQ ID NO: 29403 - protein, 19 aa, Homo sapiens
LSLCQRRPDGFPKPRPSRH

SEQ ID NO: 29404 - protein, 24 aa, Homo sapiens
LATGFCCEVRPGNGGKKELREAVG

SEQ ID NO: 29405 - protein, 45 aa, Homo sapiens
LSGFPYRAPSPGNAPTKALDSSWPSSAPCLFPVRLYIVLLSPCGL

SEQ ID NO: 29406 - protein, 61 aa, Homo sapiens
LRLLKPKPARLSSFPPACSGVVATPPPCSRRAWSRAPSSRRCWRHSRTSSTRPAGILAPAV

SEQ ID NO: 29407 - protein, 32 aa, Homo sapiens
LCRQRLQSRCPGCFLETPRTCPTWTPSTCSWR

SEQ ID NO: 29408 - protein, 183 aa, Homo sapiens
TMALLTAETFRLQFNNKRRLRRPYYPRKALLCYQLTPQNGSTPTRGYFENKKKCHAEICFINEIKSMGLDETQCYQVTCYLTWSPCSSCAWELVDFIKAHDHLNLGIFASRLYYHWCKPQQKGLRLLCGSQVPVEVMGFPEFADCWENFVDHEKPLSFNPYKMLEELDKNSRAIKRRLERIKS

SEQ ID NO: 29409 - protein, 38 aa, Homo sapiens
VWWWEMGPWARPAFSSATPPTPFPESTSPPCLTTIQPM

SEQ ID NO: 29410 - protein, 53 aa, Homo sapiens
TPCTPGPSLRALGAPWPAGLRWRCCSSACWVFWSPPRMVVSIYPMPFLGMTLT

SEQ ID NO: 29411 - protein, 76 aa, Homo sapiens
ILRGSECTVVLPPEAVLVPSDNFTITFHHCMSGREQVSLVDPEYLPRRHEQHQFWPLHPDLEHQSCLGANDHTSQL

SEQ ID NO: 29412 - protein, 246 aa, Homo sapiens
VPLLVLTPFRSVLVFRSDSLFFVAATEDPGVAMGRRPARCYRYCKNKPYPKSRFCRGVPDAKIRIFDLGRKKAKVDEFPLCGHMVSDEYEQLSSEALEAARICANKYMVKSCGKDGFHIRVRLHPFHVIRINKMLSCAGADRLQTGMRGAFGKPQGTVARVHIGQVIMSIRTKLQNKEHVIEALRRAKFKFPGRQKIHISKKWGFTKFNADEFEDMVAEKRLIPDGCGVKYIPSRGPLDKWRALHS

SEQ ID NO: 29413 - protein, 56 aa, Homo sapiens
KPCVLRAQHCPTVLAKLRQLRCLCRHHAQNDQCACDHHGCRAGVCHPAQHHREAAI

SEQ ID NO: 29414 - protein, 19 aa, Homo sapiens
LGRSGFSFQVTIRKAKFAV

SEQ ID NO: 29415 - protein, 667 aa, Homo sapiens
MVSPGKVSGSPEQAVEENLSSYSLDRRVTPASETLEDPCRTESQHKAETPHGAEEECKAETPHGAEEECRHGGVCAPAAVATSPPGAIPKEACGGAPLQGLPGEALGCPAGVGTPVPADGTQTLTCAHTSAPESTAPTNHLVAGRAMTLSPQEEVAAGQMASSSRSGPVKLEFDVSDGATSKRAPPPRRLGERSGLKPPLRKAAVRQQKAPQEVEEDDGRSGAGEDPPMPASRGSYHLDWDKMDDPNFIPFGGDTKSGCSEAQPPESPETRLGQPAAEQLHAGPATEEPGPCLSQQLHSASAEDTPVVQLAAETPTAESKERALNSASTSLPTSCPGSEPVPTHQQGQPALELKEESFRDPAEGTGAEVDYLEQFGTSSESALRKQSLYLKFDPLLRDSPGRPVPVATETSSMHGANETPSGRPREAKLVEFDFLGALDIPVPGPPPGVPAPGGPPLSTGPIVDLLQYSQKDLDAVVKATQEENRELRSRCEELHGKNLELGKIMDRFEEVVYQAMEEVQKQKELSKAEIQKVLKEKDQLTTDLNSMEKSFSDLFKRFEKQKEVIEGYRKNEESLKKCVEDYLARITQEGQRYQALKAHAEEKLQLANEEIAQVRSKAQAEALALQASLRKEQMRIQSLEKTVEQKTKENEELTRICDDLISKMEKI

SEQ ID NO: 29416 - protein, 440 aa, Homo sapiens
LVMNTPNGNSLSAAELTCGMIMCLARQIPQATASMKDGKWERKKFMGTELNGKTLGILGLGRIGREVATRMQSFGMKTIGYDPIISPEVSASFGVQQLPLEEIWPLCDFITVHTPLLPSTTGLLNDNTFAQCKKGVRVVNCARGGIVDEGALLRALQSGQCAGAALDVFTEEPPRDRALVDHENVISCPHLGASTKEAQSRCGEEIAVQFVDMVKGKSLTGVVNAQALTSAFSPHTKPWIGLAEALGTLMRAWAGSPKGTIQVITQGTSLKNAGNCLSPAVIVGLLKEASKQADVNLVNAKLLVKEAGLNVTTSHSPAAPGEQGFGECLLAVALAGAPYQAVGLVQGTTPVLQGLNGAVFRPEVPLRRDLPLLLFRTQTSDPAMLPTMIGLLAEAGVRLLSYQTSLVSDGETWHVMGISSLLPSLEAWKQHVTEAFQFHF

SEQ ID NO: 29417 - protein, 45 aa, Homo sapiens
LRSMIPHLESGMKSSKSKDVLSAAEVMQWSQSLEKLLANQSKYNY

SEQ ID NO: 29418 - protein, 145 aa, Homo sapiens
LEDQIESDESELKKLKTEENSFKRLMIVKKEKLATAQFKINKKHEDVKQYKRTVIEDCNKVQEKRGAVYERVTTINQEIQKIKLGIQQLKDAAEREKLKSQEIFLNLKTALEKYHDGIEKAAEDSYAKIDEKTAELKRKMFKMST

SEQ ID NO: 29419 - protein, 27 aa, Homo sapiens
IEGRVGKLIFFFNREGLTIFGRLGAKD

SEQ ID NO: 29420 - protein, 368 aa, Homo sapiens
IGWTLPVLPELDDLTVGGLIMGTGIESSSHKYGLFQHICTAYELVLADGSFVRCTPSENSDLFYAVPWSCGTLGFLVAAEIRIIPAKKYVKLRFEPVRGLEAICAKFTHESQRQENHFVEGLLYSLDEAVIMTGVMTDEAEPSKLNSIGNYYKPWFFKHVENYLKTNREGLEYIPLRHYYHRHTRSIFWELQDIIPFGNNPIFRYLFGWMVPPKISLLKLTQGETLRKLYEQHHVVQDMLVPMKCLQQALHTFQNDIHVYPIWLCPFILPSQPGLVHPKGNEAELYIDIGAYGEPRVKHFEARSCMRQLEKFVRSVHGFQMLYADCYMNREEFWEMFDGSLYHKLREKLGCQDAFPEVYDKICKAARH

SEQ ID NO: 29421 - protein, 14 aa, Homo sapiens
LAQICPQAPSRSQT

SEQ ID NO: 29422 - protein, 101 aa, Homo sapiens
KKAITKAQKKDGKKRKRGRKESYSIYVYKVLKQVHPDTGISSKAMGIMNSFVNDIFERIASEASRLAHYKQALHHHVPRSADGRAPAAARRAGQARRVRGH

SEQ ID NO: 29423 - protein, 25 aa, Homo sapiens
KVMITTSRDPSSRLKMFAKVLVSRE

SEQ ID NO: 29424 - protein, 40 aa, Homo sapiens
VEKPSTFISDIINCGIYLFSPEALKPLRDVFQRNQQDGQL

SEQ ID NO: 29425 - protein, 7 aa, Homo sapiens
MDYLAFD

SEQ ID NO: 29426 - protein, 131 aa, Homo sapiens
KVFQFLNAKCESAFLSKRNPRQINWTVLYRRKHKKGQSEEIQKKRTRRAVKFQRAITGASLADIMAKRNQKPEVRKAQREQAIRAAKEAKKAKQASKKTAMAAAKAPTKAAPKQKIVKPVKVSAPRVGGKR

SEQ ID NO: 29427 - protein, 30 aa, Homo sapiens
IKSWAKRKFGFEENKIDRTFGIPEDFDYID

SEQ ID NO: 29428 - protein, 32 aa, Homo sapiens
IASSSANTGLIVSLEKELAPLFEELRQVVEVS

SEQ ID NO: 29429 - protein, 6 aa, Homo sapiens
MSNASG

SEQ ID NO: 29430 - protein, 15 aa, Homo sapiens
RSANALASWLSTFWG

SEQ ID NO: 29431 - protein, 6 aa, Homo sapiens
MNYGAY

SEQ ID NO: 29432 - protein, 223 aa, Homo sapiens
LRGTYQPLSTRTLPHGAGHLAFSQRGLLVAGMGDVVNIWAGQGKASPPSLEQPYLTHRLSGPVHGLQFCPFEDVLGVGHTGGITSMLVPGAGEPNFDGLESNPYRSRKQRQEWEVKALLEKVPAELICLDPRALAEVDVISLEQGKKEQIERLGYDPQAKAPFQPKPKQKGRSSTASLVKRKRKVMDEEHRDKVRQSLQQQHHKEAKAKPTGARPSALDRFVR

SEQ ID NO: 29433 - protein, 34 aa, Homo sapiens
KATLGTNGHHGLVPKENDYESISDLQQGRDITRL

SEQ ID NO: 29434 - protein, 15 aa, Homo sapiens
ISKRFVSFSLGCKKD

SEQ ID NO: 29435 - protein, 12 aa, Homo sapiens
KQAARKMMHDAL

SEQ ID NO: 29436 - protein, 17 aa, Homo sapiens
RKRDVEAATQTSQTRAS

SEQ ID NO: 29437 - protein, 118 aa, Homo sapiens
VKWPRYIRLQRQRAILYKRLKVPPAINQFTQALDRQTATQLLKLAHKYRPETKQEKKQRLLARAEKKAAGKGDVPTKRPPVLRAGVNTVTTLVENKKAQLVVIAHDVDPIEVRLPVDC

SEQ ID NO: 29438 - protein, 24 aa, Homo sapiens
KTITSVAMTSALPIIQKLEPQSEF

SEQ ID NO: 29439 - protein, 94 aa, Homo sapiens
KDVKLPVQLQRAMAAEAEASREARAKVIAAEGEMNASRALKEASMVITESPAALQLRYLQTLTTIAAEKNSTIVFPLPIDMLQGIIGAKHSHLG

SEQ ID NO: 29440 - protein, 17 aa, Homo sapiens
ISQMETRKPSIPCQKLG

SEQ ID NO: 29441 - protein, 22 aa, Homo sapiens
LPRAGTLPPERALLCFSLRNQI

SEQ ID NO: 29442 - protein, 23 aa, Homo sapiens
LGQPMSMHKLCHSEHNETSDTST

SEQ ID NO: 29443 - protein, 28 aa, Homo sapiens
KKWCFGSKSDCCKIMGRCSKTWCKTNTN

SEQ ID NO: 29444 - protein, 19 aa, Homo sapiens
ISDLGLACDFSKKKPHASV

SEQ ID NO: 29445 - protein, 31 aa, Homo sapiens
LRTLFNGPDQDLSGRTNVTLRQERQILFFIK

SEQ ID NO: 29446 - protein, 295 aa, Homo sapiens
IEHLVERKKVVVWADQTAEQPKQNDLPGISVLMTFPQLGPVQPIPCCSSSGGTNLVKIPTEKRTRRKLMPSPLKGQHTLKSPPSQSVQLNDSLSKELQPIVYTPEDCRKAFQNPSTVTLMKPSSFTTSFQAISSNINSDNCLKMLCEVAIPHNRRKECGQEDLDSTFTICEDIKSSKCKLPEQESLPNDNKDILQRLDPSSFSTKHSMPVPSMVPSYMAMTTAAKRKRKLTSSTSNSSLTADVNSGFAKRVRQDNSSEKHLQENKPTMEHKRNICKINPSMVRKFGRNISKGNLR

SEQ ID NO: 29447 - protein, 19 aa, Homo sapiens
LKEGLMSSSFSNSCKLCVG

SEQ ID NO: 29448 - protein, 103 aa, Homo sapiens
KNVTLKTIKKKQKHKGRGTVRTVTKTVSNDSFFNFFAPPEVPESGDLDDDAEAILAADFEIGHFLRERIIPRSVLYFTGEAIEDDDDDYDEEGEEADEVMFTK

SEQ ID NO: 29449 - protein, 80 aa, Homo sapiens
ISWSEKASKKYVSKELAKEIRVKAEPFIKWLKEAEEESSGGEEEDEDENIEVVYSKAASVPKVETVKSDNKDDDIDIDAI

SEQ ID NO: 29450 - protein, 43 aa, Homo sapiens
VHSFGGEYLVSVCSINAMHPTRYILAGGNSSGKIHVFMNEKSC

SEQ ID NO: 29451 - protein, 41 aa, Homo sapiens
VLGSSTSATNSTSVSSRKEHVLCNLITQMMKKNRTFSFIFE

SEQ ID NO: 29452 - protein, 113 aa, Homo sapiens
VNTTQKRYAICSALAASALPALVMSKGHRIEEVPELPLVVEDKVEGYKKTKEAVLLLKKLKAWNDIKKVYASQRMRAGKGKMRNRRRIQRRGPCIIYNEDNGIIKAFRNIPGN

SEQ ID NO: 29453 - protein, 1139 aa, Homo sapiens
LLPGWDSYTMRCLAPRPAGSYLSEPQGSSQCATMELGPLEGGYLELLNSDADPLCLYHFYDQMDLAGEEEIELYSEPDTDTINCDQFSRLLCDMEGDEETREAYANIAELDQYVFQDSQLEGLSKDIFKHIGPDEVIGESMEMPAEVGQKSQKRPFPEELPADLKHWKPAEPPTVVTGSLLVGPVSDCSTLPCLPLPALFNQEPASGQMRLEKTDQIPMPFSSSSLSCLNLPEGPIQFVPTISTLPHGLWQISEAGTGVSSIFIYHGEVPQASQVPPPSGFTVHGLPTSPDRPGSTSPFAPSATDLPSMPEPALTSRANMTEHKTSPTQCPAAGEVSNKLPKWPEPVEQFYRSLQDTYGAEPAGPDGILVEVDLVQARLERSSSKSLERELATPDWAERQLAQGGLAEVLLAAKEHRRPRETRVIAVLGKAGQGKSYWAGAVSRAWACGRLPQYDFVFSVPCHCLNRPGDAYGLQDLLFSLGPQPLVAADEVFSHILKRPDRVLLILDGFEELEAQDGFLHSTCGPAPAEPCSLRGLLAGLFQKKLLRGCTLLLTARPRGRLVQSLSKADALFELSGFSMEQAQAYVMRYFESSGMTEHQDRALTLLRDRPLLLSHSHSPTLCRAVCQLSEALLELGEDAKLPSTLTGLYVGLLGRAALDSPPGALAELAKLAWELGRRHQSTLQEDQFPSADVRTWAMAKGLVQHPPRAAESELAFPSFLLQCFLGALWLALSGEIKDKELPQYLALTPRKKRPYDNWLEGVPRFLAGLIFQPPARCLGALLGPSAAASVDRKQKVLARYLKRLQPGTLRARQLLELLHCAHEAEEAGIWQHVVQELPGRLSFLGTRLTPPDAHVLGKALEAAGQDFSLDLRSTGICPSGLGSLVGLSCVTRFRAALSDTVALWESLQQHGETKLLQAAEEKFTIEPFKAKSLKDVEDLGKLVQTQRTRSSSEDTAGELPAVRDLKKLEFALGPVSGPQAFPKLVRILTAFSSLQHLDLDALSENKIGDEGVSQLSATFPQLKSLETLNLSQNNITDLGAYKLAEALPSLAASLLRLSLYNNCICDVGAESLARVLPDMVSLRVMDVQYNKFTAAGAQQLAASLRRCPHVETLAMWTPTIPFSVQEHLQQQDSRISLR

SEQ ID NO: 29454 - protein, 97 aa, Homo sapiens
VDKNAPTVCGHTAPVLDIAWCPHNDNVIASGSEDCTVMVWEIPDGGLMLPLREPVVTLEGHTKRVGIVAWHTTAQNVLLSAGAAGGGAWGWLVACSG

SEQ ID NO: 29455 - protein, 11 aa, Homo sapiens
LQTFQLCLGLP

SEQ ID NO: 29456 - protein, 45 aa, Homo sapiens
RAAPAPRSGWPRLASSTAPLRTSQTWPSVSSASRSWKAGSQMTTP

SEQ ID NO: 29457 - protein, 27 aa, Homo sapiens
LGAGTEWDRSEISAESCRGKNHGHFQH

SEQ ID NO: 29458 - protein, 104 aa, Homo sapiens [sequence omitted]

SEQ ID NO: 29459 - protein, 45 aa, Homo sapiens
MLPSSGKTPQLLRSTCKKPTQSRSPARSPDPGCPACPCVVFLIFP

SEQ ID NO: 29460 - protein, 175 aa, Homo sapiens
LVPNNTTDQELQHIRNSLPDTVQIRRVEERLSALGNVTTCNDYVALVHPDLDRETEEILADVLKVEVFRQTVADQVLVGSYCVFSNQGGLVHPKTSIEDQDELSSLLQVPLVAGTVNRGSEVIAAGMVVNDWCAFCGLDTTSTELSVVESVFKLNEAQPSTIATSMRDSLIDSLT

SEQ ID NO: 29461 - protein, 37 aa, Homo sapiens
LSPLSKSWEMVIVNASPILEAPGCRGPQLAGCGGSGL

SEQ ID NO: 29462 - protein, 286 aa, Homo sapiens
LDCGWIVSDCTAEALKAVLLLQEKCPHVTEHIPRERLCDAVAVLLNMRNPDGGFATYETKRGGHLLELLNPSEVFGDIMIDYTYVECTSAVMQALKYFHKRFPEHRAAEIRETLTQGLEFCRRQQRADGSWEGSWGVCFTYGTWFGLEAFACMGQTYRDGTACAEVSRACDFLLSRQMADGGWGEDFESCEERRYLQSAQSQIHNTCWAMMGLMAVRHPDIEAQERGVRCLLEKQLPNGDWPQENIAGVFNKSCAISYTSYRNIFPIWALGRFSQLYPERALAGHP

SEQ ID NO: 29463 - protein, 28 aa, Homo sapiens
LVFLPLWAADIPPCFGFLVGSEGQQEAG

SEQ ID NO: 29464 - protein, 301 aa, Homo sapiens
LYLLSQLQQSQMAEKQLEESVSEKEQQLLSTLKCQDEELEKMREVCEQNQQLLRENEIIKQKLTLLQVASRQKHLPKDTLLSPDSSFEYVPPKPKPSRVKEKFLEQSMDIEDLKYCSEHSVNEHEDGDGDDDEGDDEEWKPTKLVKVSRKNIQGCSCKGWCGNKQCGCRKQKSDCGVDCCCDPTKCRNRQQGKDSLGTVERTQDSEGSFKLEDPTEVTPGLSFFNPVCATPNSKILKEMCDVEQVLSKKTPPAPSPFDLPELKHVATEYQENKAPGKKKKRALASNTSFFSGCSPIEEEAH

SEQ ID NO: 29465 - protein, 112 aa, Homo sapiens
MCFSIDSPDSLENIPEKWTPEVKHFCPNVPIILVGNKKDLRQDEHTRRELAKMKQEPVRSEEGRDMANRISAFGYLECSAKTKEGVREVFEMATRAGLQVRKNKRRRGCPIL

SEQ ID NO: 29466 - protein, 87 aa, Homo sapiens
MASRTSSEMSWVDLNIPDTPEAPPCYMDVIPEDHRLESPTTPLLDDMDGSQDSPIFMYAPEFKFMPPPTYTEVRIVIFTVKFVLSFL

SEQ ID NO: 29467 - protein, 2987 aa, Homo sapiens
MLLNICSDSQGLEGLLSGSELQSLLIATTCLREHSCCFWKEPTFCVLRAISKAQNLSIIQYLQATDCVRLSLQNLSRLTDTLPAPEVSEAVSLILGFVKDSYPVSSALFLEFENSEGYPLLLKVLLRYDGLTQSEVDPHLEELLGLVVWLTTCGRSELKVFDSITYPQLEGFKFHHEASGVTVKNLQAFQVLQNVFHKASDSVLCIQVLSVIRTMWAWNARNFFLLEWTLQPISQFVEIMPLKPAPVQEHFFQLLEALVFELHYVPHEILRKVQHLIKESPGPSCTLMALQSILSIAGGDPLFTDIFRDSGLLGLLLAQLRKQAKIMRKSGNKVSTPGVQDPERELTCVMLRIVVTLLKGSVRNAVVLKDHGMVPFIKIFLDDECYREASLSILEQLSAINAEEYMSIIVGALCSSTQGELQLKLDLLKSLLRILVTPKGRAAFRVSSGFNGLLSLLSDLEGSLQEPPLQAWGAVSPRQTLELVLYTLCAVSAALHWDPVNGYFFRRNGLFEKLAEDLCLLGCFGALEEEGNLLRSWVDTKARPFADLLGTAFSSSGSLPPRIQSCLQILGFLDSMASGTLHLRGDLKESLRTKQGPVVDVQKGETGSDPQRNFKQWPDLEERMDEGDAAIMHPGVVCIMVRLLPRLYHEDHPQLSEEIQCSLASHIQSLVKSEKNRQVMCEAGLLGTLMASCHRALVTSGSPLHSRLIRIFEKLASQAIEPDVLRQFLGLGIPSSLSATTKILDSSHTHRGNPGCSGSQTAQGLAEGPWPAAPDAGLHPGVTQAPQPLGESQDSTTALQTALSLISMTSPRNLQPQRAALAPSFVEFDMSVEGYGCLFIPTLSTVMGTSTEYSVSGGIGTGATRPFPPPGGLTFSCWFLISRHGAATEGHPLRFLTLVRHLARTEQPFVCFSVSLCPDDLSLVVSTEEKEFQPLDVMEPEDDSEPSAGCQLQVRCGQLLACGQWHHLAVVVTKEMKRHCTVSTCLDGQVIGSAKMLYIQALPGPFLSMDPSAFVDVYGYIATPRVWKQKSSLIWRLGPTYLFEEAISMETLEVINKLGPRYCGNFQAVHVQGEDLDSEATPFVAEERVSFGLHIASSSITSVADIRNAYNEVDSRLIAKEMNISSRDNAMPVFLLRNCAGHLSGSLRTIGAVAVGQLGVRVFHSSPAASSLDFIGGPAILLGLISLATDDHTMYAAVKVLHSVLTSNAMCDFLMQHICGYQIMAFLLRKKASLLNHRIFQLILSVAGTVELGFRSSAITNTGVFQHILCNFELWMNTADNLELSLFSHLLEILQSPREGPRNAEAAHQAQLIPKLIFLFNEPSLIPSKISTIIGILACQLRGHFSTQDLLRIGLFVVYTLKPSSVNERQICMDGALDPSLPAGSQTSGKTIWLRNQLLEMLLSVISSPQLHLSSESKEEMFLKLGPDWFLLLLQGHLHASTTVLALKLLLYFLASPSLRTRFRDGLCAGSWVERSTEGVDIVMDNLKSQSPLPEQSPCLLPGFRVLNDFLAHHVHIPEVYLIVSTFFLQTPLTELMDGPKDSLDAMLQWLLQRHHQEEVLQAGLCTEGALLLLEMLKATMSQPLAGSEDGAWAQTFPASVLQFLSLVHRTYPQDPAWRAPEFLQTLAIAAFPLGAQKGVGAESTRNTSSPEAAAEGDSTVEGLQAPTKAHPARRKLREFTQLLLRELLLGASSPKQWLPLEVLLEASPDHATSQQKRDFQSEVLLSAMELFHMTSGGDAAMFRDGKEPQPSAEAAAAPSLANISCFTQKLVEKLYSGMFSADPRHILLFILEHIMVVIETASSQRDTVLSTLYSSLNKVILYCLSKPQQSLSECLGLLSILGFLQEHWDVVFATYNSNISFLLCLMHCLLLLNERSYPEGFGLEPKPRMSTYHQVFLSPNEDVKEKREDLPSLSDVQHNIQKTVQTLWQQLVAQRQQTLEDAFKIDLSVKPGEREVKIEEVTPLWEETMLKAWQHYLASEKKSLASRSNVAHHSKVTLWSGSLSSAMKLMPGRQAKDPECKTEDFVSCIENYRRRGQELYASLYKDHVQRRKCGNIKAANAWARIQEQLFGELGLWSQGEETKPCSPWELDWREGPARMRKRIKRLSPLEALSSGRHKESQDKNDHISQTNAENQDELTLREAEGEPDEVGVDCTQLTFFPALHESLHSEDFLELCRERQVILQELLDKEKVTQKFSLVIVQGHLVSEGVLLFGHQHFYICENFTLSPTGDVYCTRHCLSNISDPFIFNLCSKDRSTDHYSCQCHSYADMRELRQARFLLQDIALEIFFHNGYSKFLVFYNNDRSKAFKSFCSFQPSLKGKATSEDTLSLRRYPGSDRIMLQKWQKRDISNFEYLMYLNTAAGRTCNDYMQYPVFPWVLADYTSETLNLANPKIFRDLSKPMGAQTKERKLKFIQRFKEVEKTEGDMTVQCHYYTHYSSAIIVASYLVRMPPFTQAFCALQGGSFDVADRMFHSVKSTWESASRENMSDVRELTPEFFYLPEFLTNCNGVEFGCMQDGTVLGDVQLPPWADGDPRKFISLHRKALESDFVSANLHHWIDLIFGYKQQGPAAVDAVNIFHPYFYGDRMDLSSITDPLIKSTILGFVSNFGQVPKQLFTKPHPARTAAGKPLPGKDVSTPVSLPGHPQPFFYSLQSLRPSQVTVKDMYLFSLGSESPKGAIGHIVSTEKTILAVERNKVLLPPLWNRTFSWGFDDFSCCLGSYGSDKVLMTFENLAAWGRCLCAVCPSPTTIVTSGTSTVVCVWELSMTKGRPRGLRLRQALYGHTQAVTCLAASVTFSLLVSGSQDCTCILWDLDHLTHVTRLPAHREGISAITISDVSGTIVSCAGAHLSLWNVNGQPLASITTAWGPEGAITCCCLMEGPAWDTSQIIITGSQDGMVRVWKTEDVKMSVPGRPAGEEPPAQPPSPRGHKWEKNLALSRELDVSIALTGKPSKTSPAVTALAVSRNHTKLLVGDERGRIFCWSADG

SEQ ID NO: 29468 - protein, 237 aa, Homo sapiens
MSLRGKAVVLMGKNTMMRKAIRGHLENNPALEKLLPHIRGNVGFVFTKEDLTEIRDMLLANKVPAAARAGAIAPCEVTVPAQNTGLGPEKTSFFQALGITTKISRGTIEILVFDNGSIYNPEVLDITEETLHSRFLEGVRNVASVCLQIGYPTVASVPHSIINGYKRVLALSVETDYTFPLAEKVKAFLADPSAFVAAAPVAAATTAAPAAAAAPAKVEAKEESEESDEDMGFGLFD

SEQ ID NO: 29469 - protein, 313 aa, Homo sapiens
MPKFDGAGYDKDLVEALERDIVSRNPSIHWDDIADLEEAKKLLREAVVLPMWMPDFFKGIRRPWKGVLMVGPPGTGKTMLAKAVATECGTTFFNVSSSTLTSKYRGESEKLVRLLFEMARFYAPTTIFIDEIDSICSRRGTSDEHEASRRVKSELLIQMDGVGGALENDDPSKMVMVLAATNFPWDIDEALRRRLEKRIYIPLPTAKGRAELLKINLREVELDPDIQLEDIAEKIEGYSGADITNVCRDASLMAMRRRINGLSPEEIRALSKEELQMPVTKGDFELALKKIAKSVSAADLEKYEKWMVEFGSA

SEQ ID NO: 29470 - protein, 25 aa, Homo sapiens
MTVLINTEKRKLRRNGISLYITTVC

SEQ ID NO: 29471 - protein, 25 aa, Homo sapiens
MLKVYVSFAPSASEPLPLGSTEHRD

SEQ ID NO: 29472 - protein, 271 aa, Homo sapiens
MPPEPGSSPLPTPFGAATATEAASSGKQCLRAGSGSAPCSRRPAPGKASGPLPSKCVAIDCEMVGTGPRGRVSELARCSIVSYHGNVLYDKYIRPEMPIADYRTRWSGITRQHMRKAVPFQVAQKEILKLLKGKVVVGHALHNDFQALKYVHPRSQTRDTTYVPNFLSEPGLHTRARVSLKDLALQLLHKKIQVGQHGHSSVEDATTAMELYRLVEVQWEQQEARSLWTCPEDREPDSSTDMEQYMEDQYWPDDLAHGSRGGAREAQDRRN

SEQ ID NO: 29473 - protein, 25 aa, Homo sapiens
MGEKPGTRVFKKSSPNCKLPTSCDS

SEQ ID NO: 29474 - protein, 48 aa, Homo sapiens
MVSLQPAETPGMEESLAEMSIMTTELQSLCSLLQESKEEAIRTLQRKM

SEQ ID NO: 29475 - protein, 12 aa, Homo sapiens
MYTHRGESGPSD

SEQ ID NO: 29476 - protein, 175 aa, Homo sapiens
MGPPYLRKTEGWSTGVIYHALSQKEANDSDVQLWVADAWRMSRLRASPSGAQRAEAFVRAFLKRSTPRMSPQAREDQLQRKAVVLEYFTRHKRKEKKKKAKGLSARQRRELRLFDIKPEQQRYSLFLPLHELWKQYIRDLCSGLKPDTQPQMIQAKLLKADLHGAIISALVAVRK

SEQ ID NO: 29477 - protein, 255 aa, Homo sapiens
MTNEAGAPRLMITHIVNQNFKSYAGEKILGPFHKRFSCIIGPNGSGKSNVIDSMLFVFGYRAQKIRSKKLSVLIHNSDEHKDIQSCTVEVHFQKIIDKEGDDYEVIPNSNFYVSRTACRDNTSVYHISGKKKTFKDVGNLLRSHGIDLDHNRFLILQGEVEQIAMMKPKGQTEHDEGMLEYLEDIIGCGRLNEPIKVLCRRVEILNEHRGEKLNRVKMVEKEKDALEGEKNIAIEFLTLENEIFRKKNHVCQYYM

SEQ ID NO: 29478 - protein, 690 aa, Homo sapiens
MKVTFQTPLRDPQTHRILSPSMASKLEAPFTQDDTLGLENSHPVWTQKENQQLIKEVDAKTTHGILQKPVEADTDLLGDASPAFGSGSSSESGPGALADLDCSSSSQSPGSSENQMVSPGKVSGSPEQAVEENLSSYSLDRRVTPASETLEDPCRTESQHKAETPHGAEEECKAETPHGAEEECRHGGVCAPAAVATSPPGAIPKEACGGAPLQGLPGEALGCPAGVGTPVPADGTQTLTCAHTSAPESTAPTNHLVAGRAMTLSPQEEVAAGQMASSSRSGPVKLEFDVSDGATSKRAPPPRRLGERSGLKPPLRKAAVRQQKAPQEVEEDDGRSGAGEDPPMPASRGSYHLDWDKMDDPNFIPFGGDTKSGCSEAQPPESPETRLGQPAAEQLHAGPATEEPGPCLSQQLHSASAEDTPVVQLAAETPTAESKERALNSASTSLPTSCPGSEPVPTHQQGQPALELKEESFRDPAEVLGTGAEVDYLEQFGTSSFKESALRKQSLYLKFDPLLRDSPGRPVPVATETSSMHGANETPSGRPREAKLVEFDFLGALDIPVPGPPPGVPAPGGPPLSTGPIVDLLQYSQKDLDAVVRTQVVAIPQNLQAALGLGQQWAGVQQPDPPSLPSLPLLVGVELQRAAGPWPVTTAQVAEGPGFHPVSPQSAAHQQPPRDSPAWAWRWPLVALQQ

SEQ ID NO: 29479 - protein, 178 aa, Homo sapiens [sequence omitted]

SEQ ID NO: 29480 - protein, 107 aa, Homo sapiens
MLSKFRKIIKEEINDIKDTDVIMKRKRGGSPAVTLLISEKISVDITLALESKSSWPASTQEGLRIQNWLSAKVRKQLRLKPFYLVPKHAKEGNGFQGILNIKVNLKK

SEQ ID NO: 29481 - protein, 13 aa, Homo sapiens
MNPAQMSEELTLV

SEQ ID NO: 29482 - protein, 210 aa, Homo sapiens
MNILEKVVLKVLEDQQNIRLIRELLQTLYTSLCTLVQRVGKSVLVGNINMWVYRMETILHWQQQLNNIQITRPAFKGLTFTDLPLCLQLNIMQRLSDGRDLVSLGQAAPDLHVLSEDRLLWKKLCQYHFSERQIRKRLILSDKGQLDWKKMYFKLVRCYPRKEQYGDTLQLCKHCHILSWKGTDHPCTANNPESCSVSLSPQDFINLFKF

SEQ ID NO: 29483 - protein, 78 aa, Homo sapiens
LPCPQQRGTGRGPREVAKWHRAPRLLSARRDGDRTGCPGTAATLPTQNLAYVSQDSPHLQRPPQNRERKERTAAAAAQ

SEQ ID NO: 29484 - protein, 381 aa, Homo sapiens
VGQDPEQWTSRAVVPPISLSTTFKQGAPGQHSGFEYSRSGNPTRNCLEKAVAALDGAKYCLAFASGLAATVTITHLLKAGDQIICMDDVYGGTNRYFRQVASEFGLKISFVDCSKIKLLEAAITPETKLVWIETPTNPTQKVIDIEGCAHIVHKHGDIILVVDNTFMSPYFQRPLALGADISMYSATKYMNGHSDVVMGLVSVNCESLHNRLRFLQNSLGAVPSPIDCYLCNRGLKTLHVRMEKHFKNGMAVAQFLESNPWVEKVIYPGLPSHPQHELVKRQCTGCTGMVTFYIKGTLQHAEIFLKNLKLFTLAESLGGFESLAELPAIMTHASVLKNDRDVLGISDTLIRLSVGLEDEEDLLEDLDQALKAAHPPSGSHS

SEQ ID NO: 29485 - protein, 21 aa, Homo sapiens
IHCVPDVLTSAISPNVGNSTA

SEQ ID NO: 29486 - protein, 6 aa, Homo sapiens
TFAREG

SEQ ID NO: 29487 - protein, 10 aa, Homo sapiens
LGTRLCIASP

SEQ ID NO: 29488 - protein, 20 aa, Homo sapiens
KALHSCSPLHTQELMACWLC

SEQ ID NO: 29489 - protein, 104 aa, Homo sapiens
KGSKKAITKAQKKDGKKRKRGRKESYSIYVYKVLKQVHPDTGISSKAMGIMNSFVNDIFERIASEASRLAHYKQALHHHVPRSADGRAPAAARRAGQARRVRGH

SEQ ID NO: 29490 - protein, 25 aa, Homo sapiens
MALKTALSLCMPLSSSSCHHRLILR

SEQ ID NO: 29491 - protein, 30 aa, Homo sapiens
LLKQERKRDLPCSVTPLEKKKKSRSILLSP

SEQ ID NO: 29492 - protein, 80 aa, Homo sapiens
MCAGQRLASEPQDPAAVSLPTSSVPETRGRNKGSAALGGALALAERSSREGSSQRMPRQPSATRLPKGGGPGKSPTRGST

SEQ ID NO: 29493 - protein, 66 aa, Homo sapiens
VTDSNSDSEDESGMNFLEKRALNIKQNKAMLAKLMSELESFPGSFRGRHPLPGSDSTNEGDLEETP

SEQ ID NO: 29494 - protein, 382 aa, Homo sapiens
KCKPIDVFDFPDNSDVSSIGRLGENEKDEETYETFDPPLHSTAIYADEEEFSKHCGLSLSSTPPGKEAKRSSDTSGNEASEIESVKISAKKPGRKLRPISDDSESIEESDTRRKVKSAEKISTQRHEVIRTTASSELSEKPAESVTSKKTGPLSAQPSVEKENLAIESQSKTQKKGKISHDKRKKSRSKAIGSDTSDIVHIWCPEGMKTSDIKELNIVLPEFEKTHLEHQQRIESKVCKAAIATFYVNVKEQFIKMLKESQMLTNLKRKNAKMISDIEKKRQRMIEVQDELLRLEPQLKQLQTKYDELKERKSSLRNAAYFLSNLKQLYQDYSDVQAQEPNVKETYDSSSLPALLFKARTLLGAESHLRNINHQLEKLLDQG

SEQ ID NO: 29495 - protein, 31 aa, Homo sapiens
ILWPGRCEWSAGQSARCLAPQADPAVHSREQ

SEQ ID NO: 29496 - protein, 24 aa, Homo sapiens
RWSTRDPLSTNPSPPRGPLFAPTR

SEQ ID NO: 29497 - protein, 22 aa, Homo sapiens
ITGKSGQGWEKCRGCSASDFGN

SEQ ID NO: 29498 - protein, 515 aa, Homo sapiens
LEKLEEQLSRSHGQEVNELKTKIEKLKVELDEARLSEKQLKHQVDHQKELLSCKSEELRVMSERVQESMSSEMLALQIELTEMESMKTTLKEEVNELQYRQEQLELLITNLMRQVDRLKEEKEEREKEAVSYYNALEKARVANQDLQVQLDQALQQALDPNSKGNSLFAEVEDRRAAMERQLISMKVKYQSLKKQNVFNREQMQRMKLQIATLLQMKGSQTEFEQQERLLAMLEQKNGEIKHLLGEIRNLEKFKNLYDSMESKPSVDSGTLEDNTYYTDLLQMKLDNLNKEIESTKGELSIQRMKALFESQRALDIERKLFANERCLQLSESENMKLRAKLDELKLKYEPEETVEVPVLKKRREVLPVDITTAKDACVNNSALGGEVYRLPPQKEETQSCPNSLEDNNLQLEKSVSIYTPVVSLSPHKNLPVDMQLKKEKKCVKLIGVPADAEALSERSGNTPNSPRLAAESKLQTEVKEGKETSSKLEKETCKKLHPILYVSSKSTPETQCPQQ

SEQ ID NO: 29499 - protein, 95 aa, Homo sapiens
VDPSTGELQSLQMPESEGPSSLDPSQEGPTGLKEAALYPHLPPEADPRLIESLSQMLSMGFSDEGGWLTRLLQTKNYDIGAALDTIQYSKHPPPL

SEQ ID NO: 29500 - protein, 34 aa, Homo sapiens
RRRWRLLPFRQKLPNSCPSSSIPSIPTRRFSFGS

SEQ ID NO: 29501 - protein, 23 aa, Homo sapiens
VEASSIELSQCRNSPSRSSMPRT

SEQ ID NO: 29502 - protein, 10 aa, Homo sapiens
IPTTSSLRGI

SEQ ID NO: 29503 - protein, 534 aa, Homo sapiens
TDSSFGEQKAPAMQPWHGKAMQRASEAGATAPKASARNARGAPMDPTESPAAPEAALPKAGKFGPARKSGSRQKKSAPDTQERPPVRATGARAKKAPQRAQDTQPSDATSAPGAEGLEPPAAREPALSRAGSCRQRGARCSTKPRPPPGPWDVPSPGLPVSAPILVRRDAAPGASKLRAVLEKLKLSRDDISTAAGMVKGVVDHLLLRLKCDSAFRGVGLLNTGSYYEHVKISAPNEFDVMFKLEVPRIQLEEYSNTRAYYFVKFKRNPKENPLSQFLEGEILSASKMLSKFRKIIKEEINDIKDTDVIMKRKRGGSPAVTLLISEKISVDITLALESKSSWPASTQEGLRIQNWLSAKVRKQLRLKPFYLVPKHAKEGNGFQEETWRLSFSHIEKEILNNHGKSKTCCENKEEKCCRKDCLKLMKYLLEQLKERFKDKKHLDKFSSYHVKTAFFHVCTQNPQDSQWDRKDLGLCFDNCVTYFLQCLRTEKLENYFIPEFNLFSSNLIDKRSKEFLTKQIEYERNNEFPVFDEF

SEQ ID NO: 29504 - protein, 29 aa, Homo sapiens
IELFSVCTNEDPKDRPSAAHIVEALETDV

SEQ ID NO: 29505 - protein, 225 aa, Homo sapiens
KDLVSCAYQVARGMEYLASKKCIHRDLAARNVLVTEDNVMKIADFGLARDIHHIDYYKKTTNGRLPVKWMAPEALFDRIYTHQSDVWSFGVLLWEIFTLGGSPYPGVPVEELFKLLKEGHRMDKPSNCTNELYMMMRDCWHAVPSQRPTFKQLVEDLDRIVALTSNQEYLDLSMPLDQYSPSFPDTRSSTCSSGEDSVFSHEPLPEEPCLPRHPAQLANGGLKRR

SEQ ID NO: 29506 - protein, 86 aa, Homo sapiens
VKWPRYIRLQRQRAILYKRLKVPPAINQFTQALDRQTATQLLKLAHKYRPETKQEKKQRLLARAEKKAAGKGDVPTKRPPVLRAGE

SEQ ID NO: 29507 - protein, 69 aa, Homo sapiens
KVIAAEGEMNASRALKEASMVITESPAALQLRYLQTLTTIAAEKNSTIVFPLPIDMLQGIIGAKHSHLG

SEQ ID NO: 29508 - protein, 111 aa, Homo sapiens
RVIPSFMCQAGDFTNHNGTGGKSIYGSRFPDENFTLKHVGPGVLSMANAGPNTNGSQFFICTIKTDWLDGKHVVFGHVKEGMDVVKKIESFGSKSGRTSKKIVITDCGQLS

SEQ ID NO: 29509 - protein, 21 aa, Homo sapiens
VTAQADRSSHPTSSGAMPKRG

SEQ ID NO: 29510 - protein, 49 aa, Homo sapiens
LGFFRQVHLLTRSHFSRDPLSASHRRQTAGGELRTAACASPAAGWEEGH

SEQ ID NO: 29511 - protein, 52 aa, Homo sapiens
TSNGCRPSRSTAARSSTGTASETKWRMTISRAGRTISKEMKPWIPPRTPARR

SEQ ID NO: 29512 - protein, 643 aa, Homo sapiens
LSRQQPPPPRRAGAACTLRQKLIFSPCSDCEEEEEEEEEEGSGHSTGEDSAFQEPDSPLPPARSPTEPGPERRRSPGPAPGSPGELEEDLLLPGACPGADEAGGGAEGDSWEEEGFGSSSPVKSPAAPYFLGSSFSPVRCGGPGDASPRGCGARRAGEGRRSPRPDHPGTPPHKTFRKLRLFDTPHTPKSLLSKARGIDSSSVKLRGSSLFMDTEKSGKREFDVRQTPQVNINPFTPDSLLLHSSGQCRRRKRTYWNDSCGEDMEASDYELEDETRPAKRITITESNMKSRYTTEFHELEKIGSGEFGSVFKCVKRLDGCIYAIKRSKKPLAGSVDEQNALREVYAHAVLGQHSHVVRYFSAWAEDDHMLIQNEYCNGGSLADAISENYRIMSYFKEAELKDLLLQVGRGLRYIHSMSLVHMDIKPSNIFISRTSIPNAASEEGDEDDWASNKVMFKIGDLGHVTRISSPQVEEGDSRFLANEVLQENYTHLPKADIFALALTVVCAAGAEPLPRNGDQWHEIRQGRLPRIPQVLSQEFTELLKVMIHPDPERRPSAMALVKHSVLLSASRKSAEQLRIELNAEKFKNSLLQKELKKAQMAKAAAEERALFTDRMATRSTTQSNRTSRLIGKKMNRSVSLTIY

SEQ ID NO: 29513 - protein, 340 aa, Homo sapiens
LMAEASSDPGAEEREELLGPTAQWSVEDEEEAVHEQCQHERDRQLQAQDEEGGGHVPERPKQEMLLSLKPSEAPELDEDEGFGDWSQRPEQRQQHEGAQGALDSGEPPQCRSPEGEQEDRPGLHAYEKEDSDEVHLEELSLSKEGPGPEDTVQDNLGAAGAEEEQEEHQKCQQPRTPSPLVLEGTIEQSSPPLSPTTKLIDRTESLNRSIEKSNSVKKSQPDLPISKIDQWLEQYTQAIETAGRTPKLARQASIELPSMAVASTKSRWETGEVQAQSAAKTPSCKDIVAGDMSKKSLWEQKGGSKTSSTIKSTPSGKRYKFVATGHGKYEKVLVEGGPAP

SEQ ID NO: 29514 - protein, 13 aa, Homo sapiens
LVESSPLPAPRQA

SEQ ID NO: 29515 - protein, 12 aa, Homo sapiens
IAAIMGRMHAPG

SEQ ID NO: 29516 - protein, 76 aa, Homo sapiens
TALLCSLGHPRPHLLRLPDLPSFPAFLWIPASGHPSPPSLQGPLLVSLLLEPLPPPPSLQNFSFTPHPPPLPPFLF

SEQ ID NO: 29517 - protein, 63 aa, Homo sapiens
VRVQRSSSAWATAAALGAEVERPHYAKDERLGLAGPASGGPAGNRLGSEEPGSPLWSMQGSGG

SEQ ID NO: 29518 - protein, 30 aa, Homo sapiens
KVLATVTKPVGGDKNGGTRVVKLRKMDAEA

SEQ ID NO: 29519 - protein, 45 aa, Homo sapiens
LGTASQDPEKEMPGEATETVPATEQELPQPQAETVVSHLRVWNRI

SEQ ID NO: 29520 - protein, 11 aa, Homo sapiens
KQVSIPDQKFL

SEQ ID NO: 29521 - protein, 209 aa, Homo sapiens
MIWDQKSLKRCGGFLIRDDFVLTAAHCWGSSINVTLGAHNIKEQEPTQQFIPVKRPIPHPAYNPKNFSNDIMLLQLERKAKRTRAVQPLRLPSNKAQVKPGQTCSVAGWGQTAPLGKHSHTLQEVKMTVQEDRKCESDLRHYYDSTIELCVGDPEIKKTSFKGDSGGPLVCNKVAQGIVSYGRNNGMPPRACTKVSSFVHWIKKTMKRY

SEQ ID NO: 29522 - protein, 1843 aa, Homo sapiens
LGSRSWEDFEEELEARLEDRAHLPGPAPRATHTHGALMETLLDYQWDRPEITSPTKPILRSSGRRLLDVESEAKEAEAALGGLVNAVFLLAPCPHSQRELLQFVSGCEAQAQRLPPTPKQVMEKLLPKRVREVMVARKITFYWVDTTEWSKLWESPDHLGYWTVCELLHHGGGTVLPSESFSWDFAQAGEMLLRSGIKLSSEPHLSPWISMLPTDATLNRLLYNSPEYEASFPRMEGMLFLPVEAGKEIQETWTVTLEPLAMHQRHFQKPVRIFLKGSVAQWSLPTSSTLGTDSWMLGSPEESTATQRLLFQQLVSRLTAEELHLVADVDPGEGRPPITGVISPLSASAMILTVCRTKEAEFQRHVLQTAVADSPRDTASLFSDVVDSILNQTHDSLADTASAASPVPEWAQQELGHTTPWSPAVVEKWFPFCNISGASSDLMESFGLLQAASANKEESSKTEGELIHCLAELYQRKSREESTIAHQEDSKKKRGVPRTPVRQKMNTMCRSLKMLNVARLNVKAQKLHPDGSPDVAGEKGIQKIPSGRTVDKLEDRGRTLRSSKPKDFKTEEELLSYIRENYQKTVATGEIMLYACARNMISTVKMFLKSKGTKELEVNCLNQVKSSLLKTSKSLRQNLGKKLDKEDKVRECQLQVFLRLEMCLQCPSINESTDDMEQVVEEVTDLLRMVCLTEDSAYLAEFLEEILRLYIDSIPKTLGNLYNSLGFVIPQKLAGVLPTDFFSDDSMTQENKSPLLSVPFLSSARRSVSGSPESDELQELRTRSAKKRRKNALIRHKSIAEVSQNLRQIEIPKVSKRATKKENSHPAPQQPSQPVKDTVQEVTKVRRNLFNQELLSPSKRSLKRGLPRSHSVSAVDGLEDKLDNFKKNKGYHKLLTKSVAETPVHKQISKRLLHRQIKGRSSDPGPDIGVVEESPEKGDEISLRRSPRIKQLSFSRTHSASFYSVSQPKSRSVQRVHSFQQDKSDQRENSPVQSIRSPKSLLFGAMSEMISPSEKGSARMKKRSRNTLDSEVPAAYQTPKKSHQKSLSFSKTTPRRISHTPQTPLYTPERLQKSPAKMTPTKQAAFKESLKDSSSPGHDSPLDSKITPQKRHTQAGEGTSLETKTPRTPKRQGTQPPGFLPNCTWPHSVNSSPESPSCPAPPTSSTAQPRRECLTPIRDPLRTPPRAAAFMGTPQNQTHQQPHVLRAARAEEPAQKLKDKAIKTPKRPGNSTVTSSPPVTPKKLFTSPLCDVSKKSPFRKSKIECPSPGELDQKEPQMSPSVAASLSCPVPSTPPELSQRATLDTVPPPPPSKVGKRCRKTSDPRRSIVECQPDASATPGVGTADSPAAPTDSRDDQKGLSLSPQSPPERRGYPGPGLRSDWHASSPLLITSDTEHVTLLSEAEHHGIGDLKSNVLSVEEGEGLRTADAEKSSLSHPGIPPSPPSCGPGSPLMPSRDVHCTTDGRQCQASAQLDNLPASAWHSTDSASPQTYEVELEMQASGLPKLRIKKIDPSSSLEAEPLSKEESSLGEESFLPALSMPRASRSLSKPEPTYVSPPCPRLSHSTPGKSRGQTYICQACTPTHGPSSTPSPFQTDGVPWTPSPKHSGKTTPDIIKDWPRRKRAVGCGAGSSSGRGEVGADLPGSLSLLESEGKDHGLELSIHRTPILEDFELEGVCQLPDQSPPRNSMPKAEEASSWGQFGLSSRKRVLLAKEEADRGAKRICDLREDSEVSKSKEGSPSWSAWQLPSTGDEEVFVSGSTPPPSCAVRSCLSASALQALTQSPLLFQGKTPSSQSKDPRDEDVDVLPSTVEDSPFSRAFSRRRPISRTYTRKKLMGTWLEDL

SEQ ID NO: 29523 - protein, 11 aa, Homo sapiens
LMGCWVDGAGK

SEQ ID NO: 29524 - protein, 30 aa, Homo sapiens
IRAPLAGKGKQLEEKMVQQLQEDVDMEDAP

SEQ ID NO: 29525 - protein, 1152 aa, Homo sapiens
KLRARGGAARLRELLPGWDSYTMRCLAPRPAGSYLSEPQGSSQCATMELGPLEGGYLELLNSDADPLCLYHFYDQMDLAGEEEIELYSEPDTDTINCDQFSRLLCDMEGDEETREAYANIAELDQYVFQDSQLEGLSKDIFKHIGPDEVIGESMEMPAEVGQKSQKRPFPEELPADLKHWKPAEPPTVVTGSLLVGPVSDCSTLPCLPLPALFNQEPASGQMRLEKTDQIPMPFSSSSLSCLNLPEGPIQFVPTISTLPHGLWQISEAGTGVSSIFIYHGEVPQASQVPPPSGFTVHGLPTSPDRPGSTSPFAPSATDLPSMPEPALTSRANMTEHKTSPTQCPAAGEVSNKLPKWPEPVEQFYRSLQDTYGAEPAGPDGILVEVDLVQARLERSSSKSLERELATPDWAERQLAQGGLAEVLLAAKEHRRPRETRVIAVLGKAGQGKSYWAGAVSRAWACGRLPQYDFVFSVPCHCLNRPGDAYGLQDLLFSLGPQPLVAADEVFSHILKRPDRVLLILDGFEELEAQDGFLHSTCGPAPAEPCSLRGLLAGLFQKKLLRGCTLLLTARPRGRLVQSLSKADALFELSGFSMEQAQAYVMRYFESSGMTEHQDRALTLLRDRPLLLSHSHSPTLCRAVCQLSEALLELGEDAKLPSTLTGLYVGLLGRAALDSPPGALAELAKLAWELGRRHQSTLQEDQFPSADVRTWAMAKGLVQHPPRAAESELAFPSFLLQCFLGALWLALSGEIKDKELPQYLALTPRKKRPYDNWLEGVPRFLAGLIFQPPARCLGALLGPSAAASVDRKQKVLARYLKRLQPGTLRARQLLELLHCAHEAEEAGIWQHVVQELPGRLSFLGTRLTPPDAHVLGKALEAAGQDFSLDLRSTGICPSGLGSLVGLSCVTRFRAALSDTVALWESLQQHGETKLLQAAEEKFTIEPFKAKSLKDVEDLGKLVQTQRTRSSSEDTAGELPAVRDLKKLEFALGPVSGPQAFPKLVRILTAFSSLQHLDLDALSENKIGDEGVSQLSATFPQLKSLETLNLSQNNITDLGAYKLAEALPSLAASLLRLSLYNNCICDVGAESLARVLPDMVSLRVMDVQYNKFTAAGAQQLAASLRRCPHVETLAMWTPTIPFSVQEHLQQQDSRISLR

SEQ ID NO: 29526 - protein, 9 aa, Homo sapiens
LPPAHGMDF

SEQ ID NO: 29527 - protein, 166 aa, Homo sapiens
IHHCKEGILIKDFLDEHYDIPKISMVNNIIHNNEGYGVVLVKPTIFSDLQENAEDGTEENKALKIQTSGEPDVAERVDLEELIECATGKMELCARTDPSEQVEGNCEIVNELIAASTQKGQIKKKRLSELGITQADDNLMSQEMFVGIVGNQFKWNGKGSFGTFLF

SEQ ID NO: 29528 - protein, 681 aa, Homo sapiens
LRARPPQKCSTPCGPLRLPPFPSRDSGRLSPDLSVCGQPRDGDELGISASLFSSLASPCPGSPTPRDSVISIGTSACLVAASAVPSGLHLPEVSLDRASLPCSQEEATGGAKDTRMVHQTRASLRSVLFGLMNSGTPEDSEFRADGKNMRESCCKRKLVVGNGPEGPGLSSTGKRRATGQDSCQERGLQEAVRREHQEASVPKGRIVPRGIDRLERTRSSRKSKHQEATETSLLHSHRFKKGQKLGKDSFPTQDLTPLQNVCFWTKTRASFSFHKKKIVTDVSEVCSIYTTATSLSGSLLSECSNRPVMNRTSGAPSSWHSSSMYLLSPLNTLSISNKKASDAEKVYGECSQKGPVPFSHCLPTEKLQRCEKIGEGVFGEVFQTIADHTPVAIKIIAIEGPDLVNGSHQKTFEEILPEIIISKELSLLSGEVCNRTEGFIGLNSVHCVQGSYPPLLLKAWDHYNSTKGSANDRPDFFKDDQLFIVLEFEFGGIDLEQMRTKLSSLATAKSILHQLTASLAVAEASLRFEHRDLHWGNVLLKKTSLKKLHYTLNGKSSTIPSCGLQVSIIDYTLSRLERDGIVVFCDVSMDEDLFTGDGDYQFDIYRLMKKENNNRWGEYHPYSNVLWLHYLTDKMLKQMTFKTKCNTPAMKQIKRKIQEFHRTMLNFSSATDLLCQHSLFK

SEQ ID NO: 29529 - protein, 26 aa, Homo sapiens
IEEHCKPQTLREIVIGVLHQLKNQLY

SEQ ID NO: 29530 - protein, 9 aa, Homo sapiens
MVPGSPTLT

SEQ ID NO: 29531 - protein, 18 aa, Homo sapiens
RWCDSWPRREQRLPHLRG

SEQ ID NO: 29532 - protein, 595 aa, Homo sapiens
RAMKLQAVMETLLQRQQRARQELEARQQLPPDPPAAPPGRARAAPDEDREPESARMQRAQMAALAAMRAAAAGLGHPASPGGSEDGPPGSEEEDAAREGTPGSPGRGREGPGEEHFEDMASDEDMKPKWEEEEMEEDLGEDEEEEEEDYEDEEEEEDEEGLGPPGPASLGTTALFPRKAQPPQAFRGDGVPRVLGGQERPGPGPAHPGGAAHVAPQLQPPDHGDWTYEEQFKQLYELDGDPKRKEFLDDLFSFMQKRGTPVNRIPIMAKQVLDLFMLYVLVTEKGGLVEVINKKLWREITKGLNLPTSITSAAFTLRTQYMKYLYPYECEKRGLSNPNELQAAIDSNRREGRRQSFGGSLFAYSPGGAHGMLSSPKLPVSSLGLAASTNGSSITPAPKIKKEEDSAIPITVPGRLPVSLAGHPVVAAQAAAVQAAAAQAAVAAQAAALEQLREKLESAEPPEKKMALVADEQQRLMQRALQQNFLAMAAQLPMSIRINSQASESRQDSAVNLTGTNGSNSISMSVEINGIMYTGVLFAQPPAPTPTSAPNKGGGGGGGSSSNAGGRGGNTGTSGGQAGPAGLSTPSTSTSNNSLP

SEQ ID NO: 29533 - protein, 182 aa, Homo sapiens
TWQQGYGPQGMWVPAGQAIGGYGPPPAGRGAPPPPPPFTSYIVSTPPGGFPPPQGFPQGYGAPPQFSFGYGPPPPPPDQFAPPGVPPPPATPGAAPLAFPPPPSQAAPDMSKPPTAQPDFPYGQYGYGQDLSGFGQGFSDPSQQPPSYGGPSVPGSGGPPAGGSGFGRGQNHNVQGFHPYRR

SEQ ID NO: 29534 - protein, 46 aa, Homo sapiens
KQSKGTQGNRSSSLRERPSTRPPRAAMSPAPRCCLERGGTWREAAP

SEQ ID NO: 29535 - protein, 9 aa, Homo sapiens
LLGLSALLQ

SEQ ID NO: 29536 - protein, 9 aa, Homo sapiens
VQSLMSPCL

SEQ ID NO: 29537 - protein, 782 aa, Homo sapiens
MKHEAYGECYKVSCLEIPGPSGPKGYRGQKGAKGNMGEPGEPGQKGRQGDPGIEGPIGFPGPKGVPGFKGEKGEFGADGRKGAPGLAGKNGTDGQKGKLGRIGPPGCKGDPGNRGPDGYPGEAGSPGERGDQGGKGDPGRPGRRGPPGEIGAKGSKGYQGNSGAPGSPGVKGAKGGPGPRGPKGEPGRRGDPGTKGSPGSDGPKGEKGDPGPEGPRGLAGEVGNKGAKGDRGLPGPRGPQGALGEPGKQGSRGDPGDAGPRGDSGQPGPKGDPGRPGFSYPGPRGAPGEKGEPGPRGPEGGRGDFGLKGEPGRKGEKGEPADPGPPGEPGPRGPRGVPGPEGEPGPPGDPGLTECDVMTYVRETCGCCDCEKRCGALDVVFVIDSSESIGYTNFTLEKNFVINVVNRLGAIAKDPKSETGTRVGVVQYSHEGTFEAIQLDDERIDSLSSFKEAVKNLEWIAGGTWTPSALKFAYDRLIKESRRQKTRVFAVVITDGRHDPRDDDLNLRALCDRDVTVTAIGIGDMFHEKHESENLYSIACDKPQQVRNMTLFSDLVAEKFIDDMEDVLCPDPQIVCPDLPCQTELSVAQCTQRPVDIVFLLDGSERLGEQNFHKARRFVEQVARRLTLARRDDDPLNARVALLQFGGPGEQQVAFPLSHNLTAIHEALETTQYLNSFSHVGAGVVHAINAIVRSPRGGARRHAELSFVFLTDGVTGNDSLHESAHSMRKQNVVPTVLALGSDVDMDVLTTLSLGDRAAVFHEKDYDSLAQPGFFDRFIRWIC

SEQ ID NO: 29538 - protein, 85 aa, Homo sapiens
KPKPPKQAQKEQRKQMKGRGQLEKPPAPNQAMVVAAAGDACPPQHVPPKDSAPKDSAPQDLAPQVSAHHRSQESLTSQESEDTYL

SEQ ID NO: 29539 - protein, 158 aa, Homo sapiens
KKCSERWKTMSGKEKSKFDEMAKADKVRYDREMKDYGPAKGGKKKKDPNAPKRPPSGFFLFCSEFRPKIKSTNPGISIGDVAKKLGEMWNNLNDSEKQPYITKAAKLKEKYEKDVADYKSKGKFDGAKGPAKVARKKVEEEDEEEEEEEEEEEEEEDE

SEQ ID NO: 29540 - protein, 1399 aa, Homo sapiens
MAQGRQIEYIDIERPSTGGLGFSVVALRSQNLGKVDIFVKDVQPGSVADRDQRLKENDQILAINHTPLDQNISHQQAIALLQQTTGSLRLIVAREPVHTKSSTSSSLNDTTLPETVCWGHVEEVELINDGSGLGFGIVGGKTSGVVVRTIVPGGLADRDGRLQTGDHILKIGGTNVQGMTSEQVAQVLRNCGNSVRMLVARDPAGDISVTPPAPAALPVALPTVASKGPGSDSSLFETYNVELVRKDGQSLGIRIVGYVGTSHTGEASGIYVKSIIPGSAAYHNGHIQVNDKIVAVDGVNIQGFANHDVVEVLRNAGQVVHLTLVRRKTSSSTSPLEPPSDRGTVVEPLKPPALFLTGAVETETNVDGEDEEIKERIDTLKNDNIQALEKLEKVPDSPENELKSRWENLLGPDYEVMVATLDTQIADDAELQKYSKLLPIHTLRLGVEVDSFDGHHYISSIVSGGPVDTLGLLQPEDELLEVNGMQLYGKSRREAVSFLKEVPPPFTLVCCRRLFDDEASVDEPRRTETSLPETEVDHNMDVNTEEDDDGELALWSPEVKIVELVKDCKGLGFSILDYQDPLDPTRSVIVIRSLVADGVAERSGGLLPGDRLVSVNEYCLDNTSLAEAVEILKAVPPGLVHLGICKPLVEDNEEESCYILHSSSNEDKTEFSGTIHDINSSLILEAPKGFRDEPYFKEELVDEPFLDLGKSFHSQQKEIEQSKEAWEMHEFLTPRLQEMDEEREILVDEEYELYQDPSPSMELYPLSHIQEATPVPSVNELHFGTQWLHDNEPSESQEARTGRTVYSQEAQPYGYCPENVMKENFVMESLPSVPSTEGNSQQGRFDDLENLNSLAKTSLDLGMIPNDVQGPSLLIDLPVVAQRREQEDLPLYQHQATRVISKASAYTGMLSSRYATDTCELPEREEGEGEETPNFSHWGPPRIVEIFREPNVSLGISIVGGQTVIKRLKNGEELKGIFIKQVLEDSPAGKTNALKTGDKILEVSGVDLQNASHSEAVEAIKNAGNPVVFIVQSLSSTPRVIPNVHNKANKITGNQNQDTQEKKEKRQGTAPPPMKLPPPYKALTDDSDENEEEDAFTDQKIRQRYADLPGELHIIELEKDKNGLGLSLAGNKDRSRMSIFVVGINPEGPAAADGRMRIGDELLEINNQILYGRSHQNASAIIKTAPSKVKLVFIRNEDAVNQMAVTPFPVPSSSPSSIEDQSGTEPISSEEDGSVEVGIKQLPESESFKLAVSQMKQQKYPTKVSFSSQEIPLAPASSYHSTDADFTGYGGFQAPLSVDPATCPIVPGQEMIIEISKGRSGLGLSIVGGKDTPLVNGVDLRNSSHEEAITALRQTPQKVRLVVYRDEAHYRDEENLEIFPVDLQKKAGRGLGLSIVGKR

SEQ ID NO: 29541 - protein, 208 aa, Homo sapiens
MDSSGSLNAQVLLLLAERLRAKAVFQTQQAKFLTWQFDGEYRGDDYTATLTLGNPDLIGESVIMVAHFLQSLTHRLVLGGELVYHRRPGEEGAILTLAGKYSAVHWVATLNVGSGGAHASYYHRANEQVQVGVEFEANTRLQDTTFSFGYHLTLPQANMVFRGLVDSNWCVGAVLEKKMPPLPVTLALGAFLNHWRNRFHCGFSITVG

SEQ ID NO: 29542 - protein, 12 aa, Homo sapiens
MVSSQTKTVRKN

SEQ ID NO: 29543 - protein, 461 aa, Homo sapiens
MLTLGKNPHLALSRMSQQYGDVLQIRIGSTPVVVLSGLDTIRQALVRQGDDFKGRPDLYTFTLISNGQSMSFSPDSGPVWAARRRLAQNGLKSFSIASDPASSTSCYLEEHVSKEAEVLISTLQELMAGPGHFNPYRYVVVSVTNVICAICFGRRYDHNHQELLSLVNLNNNFGEVVGSGNPADFIPILRYLPNPSLNAFKDLNEKFYSFMQKMVKEHYKTFEKGHIRDITDSLIEHCQEKQLDENANVQLSDEKIINIVLDLFGAGFDTVTTAISWSLMYLVMNPRVQRKIQEELDTVIGRSRRPRLSDRSHLPYMEAFILETFRHSSFVPFTIPHSTTRDTSLKGFYIPKGRCVFVNQWQINHDQKLWVNPSEFLPERFLTPDGAIDKVLSEKVIIFGMGKRKCIGETIARWEVFLFLAILLQRVEFSVPLGVKVDMTPIYGLTMKHACCEHFQMQLRS

SEQ ID NO: 29544 - protein, 777 aa, Homo sapiens
MNERNTLQEENKKLSEQLQQKIENDQQHQAAELECEEDVIPDSPITAFSFSGVNRLRRKENPHVRYIEQTHTKLEHSVCANEMRKVSKSSTHPQHNPNENEILVADTYDQSQSPMAKAHGTSSYTPDKSSFNLATVVAETLGLGVQEESETQGPMSPLGDELYHCLEGNHKKQPFEESTRNTEDSLRFSDSTSKTPPQEELPTRVSSPVFGATSSIKSGLDLNTSLSPSLLQPGKKKHLKTLPFSNTCISRLEKTRSKSEDSALFTHHSLGSEVNKIIIQSSNKQILINKNISESLGEQNRTEYGKDSNTDKHLEPLKSLGGRTSKRKKTEEESEHEVSCPQASFDKENAFPFPMDNQFSMNGDCVMDKPLDLSDRFSAIQRQEKSQGSETSKNKFRQVTLYEALKTIPKGFSSSRKASDGNCTLPKDSPGEPCSQECIILQPLNKCSPDNKPSLQIKEENAVFKIPLRPRESLETENVLDDIKSAGSHEPIKIQTRSDHGGCELASVLQLNPCRTGKIKSLQNNQDVSFENIQWSIDPGADLSQYKMDVTVIDTKDGSQSKLGGETVDMDCTLVSETVLLKMKKQEQKGEKSSNEERKMNDSLEDMFDRTTHEEYESCLADSFSQAADEEEELSTATKKLHTHGDKQDKVKQKAFVEPYFKGDERETSLQNFPHIEVVRKKEERRKLLGHTCKECEIYYADMPAEEREKKLASCSRHRFRYIPPNTPENFWEVGFPSTQTCMERGYIKEDLDPCPRPKRRQPYNAIFSPKGKEQKT

SEQ ID NO: 29545 - protein, 82 aa, Homo sapiens
MVVRNCSSFLIKRNKQTYSTEPNNLKARNSFRYNGLIHRKTVGVEPAADGKGVVVASGSLPPPMCGPPSTRMLAPRSAASDT

SEQ ID NO: 29546 - protein, 854 aa, Homo sapiens
MHQIITGMLYLHSHGILHRDLTLSNLLLTRNMNIKIADFGLATQLKMPHEKHYTLCGTPNYISPEIATRSAHGLESDVWSLGCMFYTLLIGRPPFDTDTVKNTLNKVVLADYEMPSFLSIEAKDLIHQLLRRNPADRLSLSSVLDHPFMSRNSSTKSKDLGTVEDSIDSGHATISTAITASSSTSISGSLFDKRRLLIGQPLPNKMTVFPKNKSSTDFSSSGDGNSFYTQWGNQETSNSGRGRVIQDAEERPHSRYLRRAYSSDRSGTSNSQSQAKTYTMERCHSAEMLSVSKRSGGGENEERYSPTDNNANIFNFFKEKTSSSSGSFERPDNNQALSNHLCPGKTPFPFADPTPQTETVQQWFGNLQINAHLRKTTEYDSISPNRDFQGHPDLQKDTSKNAWTDTKVKKNSDASDNAHSVKQQNTMKYMTALHSKPEIIQQECVFGSDPLSEQSKTRGMEPPWGYQNRTLRSITSPLVAHRLKPIRQKTKKAVVSILDSEEVCVELVKEYASQEYVKEVLQISSDGNTITIYYPNGGRGFPLADRPPSPTDNISRYSFDNLPEKYWRKYQYASRFVQLVRSKSPKITYFTRYAKCILMENSPGADFEVWFYDGVKIHKTEDFIQVIEKTGKSYTLKSESEVNSLKEEIKMYMDHANEGHRICLALESIISEEERKTRSAPFFPIIIGRKPGSTSSPKALSPPPSVDSNYPTRERASFNRMVMHSAASPTQAPILNPSMVTNEGLGLTTTASGTDISSNSLKDCLPKSAQLLKSVFVKNVGWATQLTSGAVWVQFNDGSQLVVQAGVSSISYTSPNGQTTRYGENEKLPDYIKQKLQCLSSILLMFSNPTPNFH

SEQ ID NO: 29547 - protein, 150 aa, Homo sapiens
MMMANNPEDWLSLLLKLEKNSVPLSDALLNKLIGRYSQAIEALPPDKYGQNESFARIQVRFAELKAIQEPDDARDYFQMARANCKKFAFVHISFAQFELSQGNVKKSKQLLQKAVERGAVPLEMLEIALRNLNLQKKQLLSEEEKKNLSE

SEQ ID NO: 29548 - protein, 7 aa, Homo sapiens
MESSTAV

SEQ ID NO: 29549 - protein, 20 aa, Homo sapiens
KKHVSRAYGGSMCAKCVRDR

SEQ ID NO: 29550 - protein, 211 aa, Homo sapiens
KYAWVLDKLKAEREHGITIDISLWKFETSKYYVTIIDAPGHRDLIKNMITGTSQADCAVLIVAAGFGEFEAGISKNGQTREHALLAYTLGVKQLIVGVNKMDSTEPPYSHKRYEEIVKEVSTYIKKIGHNTDTVAFVPVSGWNGDNTLEPSANMPWFKGWKVTRKDGNASGTTLLEALDCILPPTRPTDKPLCLPLQDVYKIGGIGTVPVG

SEQ ID NO: 29551 - protein, 108 aa, Homo sapiens
VTKAQKKDGKKRKRSRKESYSVYVYKVLKQVHPDTGISSKAMGIMNSFVNDIFERIAGEASRLAHYNKRSTITSREIQTAVRLLLPGELAKHAVSEGTKAVTKYTSSK

SEQ ID NO: 29552 - protein, 41 aa, Homo sapiens
KRSTITSREIQTAVRLLLPGELAKHVVSEGTKAVTKYTSSK

SEQ ID NO: 29553 - protein, 17 aa, Homo sapiens
LKKSADTLWGIQKELQF

SEQ ID NO: 29554 - protein, 60 aa, Homo sapiens
LVLRLRGGIIEPSLRQLAQKYNCDKMICRKCYARLHPRAVNCRKKKCGHTNNLRPKKKVK

SEQ ID NO: 29555 - protein, 629 aa, Homo sapiens [sequence omitted]

SEQ ID NO: 29556 - protein, 33 aa, Homo sapiens
MRPLFPIGRREAHQWGHELSASCHSTPMSLGKV

SEQ ID NO: 29557 - protein, 80 aa, Homo sapiens
MLGPPLPAAVARRGVPGAHLSCTPAGRSLPGTGHGQLTSEPHHLHAHQPRPAPRAPAPGLLRTPLLRQRPEWLPAVGERG

SEQ ID NO: 29558 - protein, 144 aa, Homo sapiens
MHDPGVLPGELCEGAEAAGGPAGRPAAGAGGSGTEAELGGGRSGPAAPADPGRAGRRGISVPGLDQSVPCPRWRGPRGAPSERGDASSAARAGEQDPHPCGRDAGQVGQGSRGLPEPDAAERRCDWSDRGAGAPHREAGPAALQ

SEQ ID NO: 29559 - protein, 2372 aa, Homo sapiens
MILESREKGEPSNCEGSVKVSHLNLVDLAGSERAAQTGAAGVRLKEGCNINRSLFILGQVIKKLSDGQVGGFINYRDSKLTRILQNSLGGNAKTRIICTITPVSFDETLTALQFASTAKYMKNTPYVNEVSTDEALLKRYRKEIMDLKKQLEEVSLETRAQAMEKDQLAQLLEEKDLLQKVQNEKIENLTRMLVTSSSLTLQQELKAKRKRRVTWCLGKINKMKNSNYADQFNIPTNITTKTHKLSINLLREIDESVCSESDVFSNTLDTLSEIEWNPATKLLNQENIESELNSLRADYDNLVLDYEQLRTEKEEMELKLKEKNDLDEFEALERKTKKDQENELSSKVELLREKEDQIKKLQEYIDSQKLENIKMDLSYSLESIEDPKQMKQTLFDAETVALDAKRESAFLRSENLELKEKMKELATTYKQMENDIQLYQSQLEAKKKMQVDLEKELQSAFNEITKLTSLIDGKVPKDLLCNLELEGKITDLQKELNKEVEENEALREEVILLSELKSLPSEVERLRKEIQDKSEELHIITSEKDKLFSEVVHKESRVQGLLEEIGKTKDDLATTQSNYKSTDQEFQNFKTLHMDFEQKYKMVLEENERMNQEIVNLSKEAQKFDSSLGALKTELSYKTQELQEKTREVQERLNEMEQLKEQLENRDSTLQTVEREKTLITEKLQQTLEEVKTLTQEKDDLKQLQESLQIERDQLKSDIHDTVNMNIDTQEQLRNALESLKQHQETINTLKSKISEEVSRNLHMEENTGETKDEFQQKMVGIDKKQDLEAKNTQTLTADVKDNEIIEQQRKIFSLIQEKNELQQMLESVIAEKEQLKTDLKENIEMTIENQEELRLLGDELKKQQEIVAQEKNHAIKKEGELSRTCDRLAEVEEKLKEKSQQLQEKQQQLLNVQEEMSEMQKKINEIENLKNELKNKELTLEHMETERLELAQKLNENYEEVKSITKERKVLKELQKSFETERDHLRGYIREIEATGLQTKEELKIAHIHLKEHQETIDELRRSVSEKTAQIINTQDLEKSHTKLQEEIPVLHEEQELLPNVKEVSETQETMNELELLTEQSTTKDSTTLARIEMERLRLNEKFQESQEEIKSLTKERDNLKTIKEALEVKHDQLKEHIRETLAKIQESQSKQEQSLNMKEKDNETTKIVSEMEQFKPKDSALLRIEIEMLGLSKRLQESHDEMKSVAKEKDDLQRLQEVLQSESDQLKENIKEIVAKHLETEEELKVAHCCLKEQEETINELRVNLSEKETEISTIQKQLEAINDKLQNKIQEIYEKEEQFNIKQISEVQEKVNELKQFKEHRKAKDSALQSIESKMLELTNRLQESQEEIQIMIKEKEEMKRVQEALQIERDQLKENTKEIVAKMKESQEKEYQFLKMTAVNETQEKMCEIEHLKEQFETQKLNLENIETENIRLTQILHENLEEMRSVTKERDDLRSVEETLKVERDQLKENLRETITRDLEKQEELKIVHMHLKEHQETIDKLRGIVSEKTNEISNMQKDLEHSNDALKAQDLKIQEELRIAHMHLKEQQETIDKLRGIVSEKTDKLSNMQKDLENSNAKLQEKIQELKANEHQLITLKKDVNETQKKVSEMEQLKKQIKDQSLTLSKLEIENLNLAQKLHENLEEMKSVMKERDNLRRVEETLKLERDQLKESLQETKARDLEIQQELKTARMLSKEHKETVDKLREKISEKTIQISDIQKDLDKSKDELQKKQDRQNHQVKPEKRLLSDGQQHLTESLREKCSRIKELLKRYSEMDDHYECLNRLSLDLEKEIEFQKELSMRVKANLSLPYLQTKHIEKLFTANQRCSMEFHRIMKKLKYVLSYVTKIKEEQHESINKFEMDFIDEVEKQKELLIKIQHLQQDCDVPSRELRDLKLNQNMDLHIEEILKDFSESEFPSIKTEFQQVLSNRKEMTQFLEEWLNTRFDIEKLKNGIQKENDRICQVNNFFNNRIIAIMNESTEFEERSATISKEWEQDLKSLKEKNEKLFKNYQTLKTSLASGAQVNPTTQDNKNPHVTSRATQLTTEKIRELENSLHEAKESAMHKESKIIKMQKELEVTNDIIAKLQAKVHESNKCLEKTKETIQVLQDKVALGAKPYKEEIEDLKMKLVKIDLEKMKNAKEFEKEISATKATVEYQKEVIRLLRENLRRSQQAQDTSVISEHTDPQPSNKPLTCGGGSGIVQNTKALILKSEHIRLEKEISKLKQQNEQLIKQKNELLSNNQHLSNEVKTWKERTLKREAHKQVTCENSPKSPKVTGTASKKKQITPSQCKERNLQDPVPKESPKSCFFDSRSKSLPSPHPVRYFDNSSLGLCPEVQNAGAESVDSQPGPWHASSGKDVPECKTQ

SEQ ID NO: 29560 - protein, 44 aa, Homo sapiens
MSPLRPQNYLFGCELKADKDYHFKVDNDENEHQLSLRTVLKLSK

SEQ ID NO: 29561 - protein, 322 aa, Homo sapiens
MDTCIIVEYKGHKILNIVDCTRPNGGRLPMKVALMMSDFAGGASGFPMTFSGGKFTEEWKAQFIKTERKKLLNYKARLVKNLQPRIYCPFAGYFVESHPSDKYIKETNTKNDPNELNNLIKKNSDVITWTPRPGATLDLGRMLKDRTDSKGIIEPPEGTKIYKDSWDFEPYLEILNAALGDEIFLHSSWIKEYFTWAGFKDYNLVVRMIETDEDFNPFPGGYDYLVDFLDLSFPKERPQREHPYEEIHSRVDVIRHVVKNGLLWDELYIGFQTRLQRDPDIYHHLFWNHFQIKLPLTPPNWKSFLMCCEQNGPVILQECKTT

SEQ ID NO: 29562 - protein, 224 aa, Homo sapiens
MQELKNSTNSSSFGLSDERISLGQLSSSRAAHLSVDPDQLPGSVLSPPPPPPLPPQFSSLQPPCFPPVQPGSNNICDSDNPATEMSKQNPAANKTNYSHHSKSQRNKDIPNMLDVLKDMNKVKLRAIERSPGGRPIHKRKRQNSHWDPVSLISHALKQKFAFQEDDSFEKENRSWESSPFSSPETSRFGHHISQSEGQRTKEEMVNTKAVDQGISNTSLLNSRI

SEQ ID NO: 29563 - protein, 898 aa, Homo sapiens
MVYIAEIYFRAWKKASGKILEAIENDCIQDFMFHGIHLPRRSPVHSKVREVLSYFHHQKKVRQGVEEMLYRLYKPILWRGLKARNSEVRSNAALLFVEAFPIRDPNLHAIEMDSEIQKQFEELYSLLEDPYPMVRSTGILGVCKITSKYWEMMPPTILIDLLKKVTGELAFDTSSADVRCSVFKCLPMILDNKLSHPLLEQLLPALRYSLHDNSEKVRVAFVDMLLKIKAVRAAKFWKICPMEHILVRLETDSRPVSRRLVSLIFNSFLPVNQPEEVWCERCVTLVQMNHAAARRFYQYAHEHTACTNIAKLIHVIRHCLNACIQRAVREPPEDEEEEDGREKENVTVLDKTLSVNDVACMAGLLEIIVILWKSIDRSMENNKEAKLYTINKFASVLPEYLKVFKDDRCKIPLFMLMSFMPASAVPPFSCGVISTLRSREEGAVDKSYCTLLDCLCSWGQVGHILELVDNWLPTEHAQAKSNTASKGRVQIHDTRPVKPELALVYIEYLLTHPKNRECLLSAPRKKLNHLLKALETSKADLESLLQTPGGKPRGFSEAAAPRAFGLHCRLSIHLQHKFCSEGKVYLSMLEDTGFWLESKILSFIQDQEEDYLKLHRVIYQQIIQTYLTVCKDVVMVGLGDHQFQMQLLQRSLGIMQTVKGFFYVSLLLDILKEITGSSLIQKTDSDEEVAMLLDTVQKVFQKMLECIARSFRKQPEEGLRLLYSVQRPLHEFITAVQSRHTDTPVHRGVLSTLIAGPVVEISHQLRKVSDVEELTPPEHLSDLPPFSRCLIGIIIKSSNVVRSFLDELKACVASNDIEGIVCLTAAVHIILVINAGKHKSSKVREVAATVHRKLKTFMEITLEEDSIERYEDLLCCPGWALTPGLLDSIYPSASVPIG

SEQ ID NO: 29564 - protein, 155 aa, Homo sapiens
KISLLKLTQGETLRKLYEQHHVVQDMLVPMKCLQQALHTFQNDIHVYPIWLCPFILPSQPGLVHPKGNEAELYIDIGAYGEPRVKHFEARSCMRQLEKFVRSVHGFQMLYADCYMNREEFWEMFDGSLYHKLREKLGCQDAFPEVYDKICKAARH

SEQ ID NO: 29565 - protein, 24 aa, Homo sapiens
LSKTKKHVSRAYGGSMCAKCVRDR

SEQ ID NO: 29566 - protein, 27 aa, Homo sapiens
LLARAEKKAAGKGDVPTKRPPVLRAGE

SEQ ID NO: 29567 - protein, 14 aa, Homo sapiens
VAAGTEWRLQQRLL

SEQ ID NO: 29568 - protein, 7 aa, Homo sapiens
LISTSLA

SEQ ID NO: 29569 - protein, 13 aa, Homo sapiens
RSLMGCWVDGAGK

SEQ ID NO: 29570 - protein, 26 aa, Homo sapiens
LKPHFHKDWQRRVATWFNQPARKIRR

SEQ ID NO: 29571 - protein, 25 aa, Homo sapiens
VIMREFRSGSSRVLITTDLLVSRGN

SEQ ID NO: 29572 - protein, 123 aa, Homo sapiens
KMSKRGRGGSSGAKFRISLGLPVGAVINCADNTGAKNLYIISVKGIKGRLNRLPAAGVGDMVMATVKKGKPELRKKVHPAVVIRQRKSYRRKDGVFLYFEDNAGVIVNNKGEMKGRKSVQLVP

SEQ ID NO: 29573 - protein, 16 aa, Homo sapiens
KKKKKKKAKEVELVSE

SEQ ID NO: 29574 - protein, 68 aa, Homo sapiens
VDEFPLCGHMVSDEYEQLSSEALEAARICANKYMVKSCGKDGFHIRVRLHPFHVIRINKMLSCAGADR

SEQ ID NO: 29575 - protein, 407 aa, Homo sapiens
MTAIQELMSKEILSSPPNDAVGELEQQLKRALEELQEALAEKEELRQRCEELDMQVTTLQDEKNSLVSENEMMNEKLDQLDGSFDDPNTVVAKKYFHAQLQLEQLQEENFRLEAAKDDYRVHCEELEKQLIEFQHRNDELTSLAEETRALKDEIDVLRATSDKANKLESTVEIYRQKLQDLNDLRKQVKTLQETNMMYMHNTVSLEEELKKANAARTQLETYKRQVQDLHVKLSSESKRADTLAFEMKRLEEKHEALLKEKERLIEQRDTLKETNEELRCSQVQQDHLNQTDASATKSYENLAAEIMPVEYREVFIRLQHENKMLRLQQEGSENERIEELQEQLEQKHRKMNELETEQRLSKERIRELQQQIEDLQKSLQEQGSKSEGESYKRSMNLKLLFRRKMKI

SEQ ID NO: 29576 - protein, 151 aa, Homo sapiens
MRARMQQQLDEYQELLDIKLALDMEIHAYRKLLEGEEERLRLSPSPTSQRSRGRASSHSSQTQGGGSVTKKRKLESTESRSSFSQHARTSGRVAVEEVDEEGKFVRLRNKSNEVGSCSGSKGIQLHQGESGKTEGWHVERGTSLPSEGGPG

SEQ ID NO: 29577 - protein, 1181 aa, Homo sapiens
MQAGIPMGPMPAAGMPYLGQAPFLGMRPPGPQYTPDMQKQFAEEQQKRFEQQQKLLEEERKRRQFEEQKQKLRLLSSVKPKTGEKSRDDALEAIKGNLDGFSRDAKMHPTPASHPKKPGVGVFPSQDPAQPRMPPWIYNESLVPDAYKKILETTMTPTGIDTAKLYPILMSSGLPRETLGQIWALANRTTPGKLTKEELYTVLAMIAVTQRGVPAMSPDALNQFPAAPIPTLSGFSMTLPTPVSQPTVIPSGPAGSMPLSLGQPVMGINLVGPVGGAAAQASSGFIPTYPANQVVKPEEDDFQDFQDASKSGSLDDSFSDFQELPASSKTSNSQHGNSAPSLLMPLPGTKALPSMDKYAVFKGIAADKSSENTVPPGDPGDKYSAFRELEQTAENKPLGESFAEFRSAGTDDGFTDFKTADSVSPLEPPTKDKTFPPSFPSGTIQQKQQTQVKNPLNLADLDMFSSVNCSSEKPLSFSAVFSTSKSVSTPQSTGSAATMTALAATKTSSLADDFGEFSLFGEYSGLAPVGEQDDFADFMAFSNSSISSEQKPDDKYDALKEEASPVPLTSNVGSTVKGGQNSTAASTKYDVFRQLSLEGSGLGVEDLKDNTPSGKSDDDFADFHSSKFSSINSDKSLGEKAVAFRHTKEDSASVKSLDLPSIGGSSVGKEDSEDALSVQFDMKLADVGGDLKHVMSDSSLDLPTVSGQHPPAADIEDLKYAAFGSYSSNFAVSTLTSYDWSDRDDATQGRKLSPFVLSAGSGSPSATSILQKKETSFGSSENITMTSLSKVTTFVSEDALPETTFPALASFKDTIPQTSEQKEYENRDYKDFTKQDLPTAERSQEATCPSPASSGASQETPNECSDDFGEFQSEKPKISKFDFLVATSQSKMKSSEEMIKSELATFDLSVQGSHKRSLSLGDKEISRSSPSPALEQPFRDRSNTLNEKPALPVIRDKYKDLTGEVEENERYAYEWQRCLGSALNVIKKANDTLNGISSSSVCTEVIQSAQGMEYLLGVVEVYRVTKRVELGIKATAVCSEKLQQLLKDIDKVWNNLIGFMSLATLTCCWEKMTVITKHLSPYHELLEEKPDENSLDFSSCMLRPGIKNAQELACGVCLLNVDSRSRKEEKPAEEHPKKAFNSETDSFKLAYGGHQYHASCANFWINCVEPKPPGLVLPDLL

SEQ ID NO: 29578 - protein, 1736 aa, Homo sapiens
MGYRNRAKRLLQSEPENPSLQETSLSVQLSNLGTVRTLRTKQRIQPQKTSVYIELGSDSSEDTVNKATYCSVGDQELLQITPQGTRDEISLDSAKKAACEFSETDVTNTEHHQPSNNDLNTTEKRAAERHPEKYQGSSVSNLHVEPCGTNTHASSLQHENSSLLLTKDRMNVEKAEFCNKSKQPGLARSQHNRWAGSKETCNDRRTPSTEKKVDLNADPLCERKEWNKQKLPCSENPRDTEDVPWITLNSSIQKVNEWFSRSDELLGSDDSHDGESESNAKVADVLDVLNEVDEYSGSSEKIDLLASDPHEALICKSERVHSKSVESNIEDKIFGKTYRKKASLPNLSHVTENLIIGAFVTEPQIIQERPLTNKLKRKRRPTSGLHPEDFIKKADLAVQKTPEMINQGTNQTEQNGQVMNITNSGHENKTKGDSIQNEKNPNPIESLEKESAFKTKAEPISSSISNMELELNIHNSKAPKKNRLRRKSSTRHIHALELVVSRNLSPPNCTELQIDSCSSSEEIKKKKYNQMPVRHSRNLQLMEGKEPATGAKKSNKPNEQTSKRHDSDTFPELKLTNAPGSFTKCSNTSELKEFVNPSLPREEKEEKLETVKVSNNAEDPKDLMLSGERVLQTERSVESSSISLVPGTDYGTQESISLLEVSTLGKAKTEPNKCVSQCAAFENPKGLIHGCSKDNRNDTEGFKYPLGHEVNHSRETSIEMEESELDAQYLQNTFKVSKRQSFAPFSNPGNAEEECATFSAHSGSLKKQSPKVTFECEQKEENQGKNESNIKPVQTVNITAGFPVVGQKDKPVDNAKCSIKGGSRFCLSSQFRGNETGLITPNKHGLLQNPYRIPPLFPIKSFVKTKCKKNLLEENFEEHSMSPEREMGNENIPSTVSTISRNNIRENVFKEASSSNINEVGSSTNEVGSSINEIGSSDENIQAELGRNRGPKLNAMLRLGVLQPEVYKQSLPGSNCKHPEIKKQEYEEVVQTVNTDFSPYLISDNLEQPMGSSHASQVCSETPDDLLDDGEIKEDTSFAENDIKESSAVFSKSVQKGELSRSPSPFTHTHLAQGYRRGAKKLESSEENLSSEDEELPCFQHLLFGKVNNIPSQSTRHSTVATECLSKNTEENLLSLKNSLNDCSNQVILAKASQEHHLSEETKCSASLFSSQCSELEDLTANTNTQDPFLIGSSKQMRHQSESQGVGLSDKELVSDDEERGTGLEENNQEEQSMDSNLGEAASGCESETSVSEDCSGLSSQSDILTTQQRDTMQHNLIKLQQEMAELEAVLEQHGSQPSNSYPSIISDSSALEDLRNPEQSTSEKAVLTSQKSSEYPISQNPEGLSADKFEVSADSSTSKNKEPGVERSSPSKCPSLDDRWYMHSCSGSLQNRNYPSQEELIKVVDVEEQQLEESGPHDLTETSYLPRQDLEGTPYLESGISLFSDDPESDPSEDRAPESARVGNIPSSTSALKVPQLKVAESAQSPAAAHTTDTAGYNAMEESVSREKPELTASTERVNKRMSMVVSGLTPEEFMLVYKFARKHHITLTNLITEETTHVVMKTDAEFVCERTLKYFLGIAGGKWVVSYFWVTQSIKERKMLNEHDFEVRGDVVNGRNHQGPKRARESQDRKIFRGLEICCYGPFTNMPTDQLEWMVQLCGASVVKELSSFTLGTGVHPIVVVQPDAWTEDNGFHAIGQMCEAPVVTREWVLDSVALYQCQELDTYLIPQIPHSHY

SEQ ID NO: 29579 - protein, 36 aa, Homo sapiens
MVSISLKFYKELQAHGADELLKRVYGSFLVNPESGM

SEQ ID NO: 29580 - protein, 967 aa, Homo sapiens
MLFFKKSEQEKKSLIEKVTQLEDLTLKKEKFIQSNKMIVKFREDQIIRLEKLHKESRGGFLPEEQDRLLSELRNEIQTLREQIEHHPRVAKYAMENHSLREENRRLRLLEPVKRAQEMDAQTIAKLEKAFSEISGMEKSDKNQQGFSPKAQKEPCLFANTEKLKAQLLQIQTELNNSKQEYEEFKELTRKRQLELESELQSLQKANLNLENLLEATKACKRQEVSQLNKIHAETLKIITTPTKAYQLHSRPVPKLSPEMGSFGSLYTQNSSILDNDILNEPVPPEMNEQAFEAISEELRTVQEQMSALQAKLDEEEHKNLKLQQHVDKLEHHSTQMQELFSSERIDWTKQQEELLSQLNVLEKQLQETQTKNDFLKSEVHDLRVVLHSADKELSSVKLEYSSFKTNQEKEFNKLSERHMHVQLQLDNLRLENEKLLESKACLQDSYDNLQEIMKFEIDQLSRNLQNFKKENETLKSDLNNLMELLEAEKERNNKLSLQFEEDKENSSKEILKVLEAVRQEKQKETAKCEQQMAKVQKLEESLLATEKVISSLEKSRDSDKKVVADLMNQIQELRTSVCEKTETIDTLKQELKDINCKYNSALVDREESRVLIKKQEVDILDLKETLRLRILSEDIERDMLCEDLAHATEQLNMLTEASKKHSGLLQSAQEELTKKEALIQELQHKLNQKKEEVEQKKNEYNFKMRQLEHVMDSAAEDPQSPKTPPHFQTHLAKLLETQEQEIEDGRASKTSLEHLVTKLNEDREVKNAEILRMKEQLREMENLRLESQQLIEKNWLLQGQLDDIKRQKENSDQNHPDNQQLKNEQEESIKERLAKSKIVEEMLKMKADLEEVQSALYNKEMECLRMTDEVERTQTLESKAFQEKEQLRSKLEEMYEERERTSQEMEMLRKQVECLAEENGKLVGHQNLHQKIQYVVRLKKENVRLAEETEKLRAENVFLKEKKRSES

SEQ ID NO: 29581 - protein, 312 aa, Homo sapiens
MKPQSRAYRFTGHKDAVTCVNFSPSGHLLASGSRDKTVRIWVPNVKGESTVFRAHTATVRSVHFCSDGQSFVTASDDKTVKVWATHRQKFLFSLSQHINWVRCAKFSPDGRLIVSASDDKTVKLWDKSSRECVHSYCEHGGFVTYVDFHPSGTCIAAAGMDNTVKVWDVRTHRLLQHYQLHSAAVNGLSFHPSGNYLITASSDSTLKILDLMEGRLLYTLHGHQGPATTVAFSRTGEYFASGGSDEQVMVWKSNFDIVDHGEVTKVPRPPATLASSMGNLTVSILEQRLTLTEDKLKQCLENQQLIMQRATP

SEQ ID NO: 29582 - protein, 42 aa, Homo sapiens
LGPNTESAKRRPCAGSSRSMMGSSFLANKFPFLSKRAIKSFQ

SEQ ID NO: 29583 - protein, 38 aa, Homo sapiens
LESGMKSSKSKDVLSAAEVMQWSQSLEKLLANQSKYNY

SEQ ID NO: 29584 - protein, 41 aa, Homo sapiens
IFFSGSFASIFWLKKRGLMPGLTFSNELISRDEVSLSQIIG

SEQ ID NO: 29585 - protein, 49 aa, Homo sapiens
RDALKEKVIKAVVPAKYLDEDTIYHLQPSGRFVIGGPQVMSFCCIFLDF

SEQ ID NO: 29586 - protein, 116 aa, Homo sapiens
RKPKRSTWRFNLDLTHPVEDGIFDSGNFEQFLREKVKVNGKTGNLGNVVHIERFKNKITVVSEKQFSKRYLKYLTKKYLKKNNLRDWLRVVASDKETYELRYFQISQDEDESESED

SEQ ID NO: 29587 - protein, 26 aa, Homo sapiens
KPGIYTLLTKKYQTWIKSNLVPPHTN

SEQ ID NO: 29588 - protein, 16 aa, Homo sapiens
TQVVVSRILMAAPGMG

SEQ ID NO: 29589 - protein, 132 aa, Homo sapiens
KLRSHRRDQKWHDKQYKKAHLGTALKANPFGGASHAKGIVLEKVGVEAKQPNSAIRKCVRVQLIKNGKKITAFVPNDGCLNFIEENDEVLVAGFGRKGHAVGDIPGVRFKVVKVANVSLLALYKGKKERPRS

SEQ ID NO: 29590 - protein, 11 aa, Homo sapiens
IELPTPKYEIG

SEQ ID NO: 29591 - protein, 16 aa, Homo sapiens
MTWDLAFLIKFLLPCK

SEQ ID NO: 29592 - protein, 14 aa, Homo sapiens
IIYMGNIFLDSSIK

SEQ ID NO: 29593 - protein, 30 aa, Homo sapiens
IGGTPAVAAPALVQPPSLPLLFLPSLAPCL

SEQ ID NO: 29594 - protein, 53 aa, Homo sapiens
VQEDRKCESDLRHYYDSTIELCVGDPEIKKTSFKVRLCTCLDWLLGERCLGNI

SEQ ID NO: 29595 - protein, 87 aa, Homo sapiens
KAARVIIEKYYTRLGNDFHTNKRVCEEIAIIPSKKLRNKIAGYVTHLMKRIQRGPVRGISIKLQEEERERRDNYVPEVNFLDIWASG

SEQ ID NO: 29596 - protein, 33 aa, Homo sapiens
RSRSPRRRSPVRRRSRSPGRRRHRSRSSSNSSR

SEQ ID NO: 29597 - protein, 16 aa, Homo sapiens
LLFGGSLARIFTSIQG

SEQ ID NO: 29598 - protein, 64 aa, Homo sapiens
LRILFRPVASQLPRIFTSIGEDYDERVLPSITTEILKSVVARFDAGELITYLPAGQSVLLQLPQ

SEQ ID NO: 29599 - protein, 6 aa, Homo sapiens
LSPSLL

SEQ ID NO: 29600 - protein, 203 aa, Homo sapiens
MGDAPDYDRSQWLNEKFKLGLDFPNGMLGSLLAQLSFPGFPSIQLPYLIDGAHKITQSNAILCYIARKHNLCGETEEEKIRVDILENQAMDVSNQLARVCYSPDFEKLKPEYLEELPTMMQHFSQFLGKRPWFVGDKITFVDFLAYDVLDLHRIFEPNCLDAFPNLKDFISRFEGLEKISAYMKSSRFLPKPLYTRVAVWGNK

SEQ ID NO: 29601 - protein, 133 aa, Homo sapiens
MCRGGRMFAPTKTWRRWHRRVNTTQKRYAICSALAASALPALVMSKGHRIEEVPELPLVVEDKVEGYKKTKEAVLLLKKLKAWNDIKKVYASQRMRAGKGKMRNRRRIQRRGPCIIYNEDNGIIKAFRNIPGN

SEQ ID NO: 29602 - protein, 68 aa, Homo sapiens
MACARPLISVYSEKGESSGKNVTLPAVFKAPIRPDIVNFVHTNLRKNNRQPYAVSELAGMDLYLLQIF

SEQ ID NO: 29603 - protein, 80 aa, Homo sapiens
MEVFVDDETKLTLHGLQQYYVKLKDSEKNRKLFDLLDVLEFNQVIIFVKSVQRCMALAQLLVEQNFPAIAIHRGMAQEER

SEQ ID NO: 29604 - protein, 19 aa, Homo sapiens
MYLYTLGDTVKCTSHCGLP

SEQ ID NO: 29605 - protein, 96 aa, Homo sapiens
MSALAARLLQPAHSCSLRLRPFHLAAVRNEAVVISGRKLAQQIKQEVRQEVEEWVASGNKRPHLSVILVGENPASHSYVLNKTRAAAVVGNPSRGG

SEQ ID NO: 29606 - protein, 135 aa, Homo sapiens
MENISSEEVVEIEYVEKYTAPQPEQCMFHDDWISSIKGAEEWILTGSYDKTSRIWSLEGKSIMTIVGHTDVVKDVAWVKKDSLSCLLLSASMDQTILLWEWNVERNKVKALHCCRGHAGSVDSIAVDGSGTKVSS

SEQ ID NO: 29607 - protein, 196 aa, Homo sapiens
MLRPALPAGPVGASSWQAKRVDVSELAAEQLTAPPSASPTQPQTPEGGGQWLNSSCAWSESSQLNKTRSIRRRDSCLNSKTKVMPTPTNQFKIPKFSIGDSPDSSTPKLSRAQRPQSCTSVGRVTVHSTPVRRSSGPAPQSLLSAWRVSALPTPASRRCSGLPPMTPKTMPRAVGSPLCVPARRRSSEPRKNSAMR

SEQ ID NO: 29608 - protein, 20 aa, Homo sapiens
MPPLPGCQWQPTPTPHNPSG

SEQ ID NO: 29609 - protein, 80 aa, Homo sapiens
VELEDHPFFVGVQYHPEFLSRPIKPSPPYFGLLLASVGRLSHYLQKGCRLSPRDTYSDRSGSSSPDSEITELKFPSINHD

SEQ ID NO: 29610 - protein, 89 aa, Homo sapiens
LSFPRYNVAEIVIHIRNKILTGADGKNLTKNDLYPNPKPEVLHMIYMRALQIVYGIRLEHFYMMPVNSEVMYPHLMEGFLPFSNLVTHL

SEQ ID NO: 29611 - protein, 35 aa, Homo sapiens
INVIDVNKVVEYVKGLQKEDGSFAGDIWGPTKQLV

SEQ ID NO: 29612 - protein, 50 aa, Homo sapiens
VATLALLGKLDAINVEKAIEFVLSCMNFDGGFGCRPGSESHAGQVIYEYR

SEQ ID NO: 29613 - protein, 379 aa, Homo sapiens
IAPPLPSPFMARPGLIHSAPGLPDTCALLQPPAASAAAAPSMSGPDVETPSAIQICRIMRPDDANVAGNVHGGTILKMIEEAGAIISTRHCNSQNGERCVAALARVERTDFLSPMCIGEVAHVSAEITYTSKHSVEVQVNVMSENILTGAKKLTNKATLWYVPLSLKNVDKVLEVPPVVYSRQEQEEEGRKRYEAQKLERMETKWRNGDIVQPVLNPEPNTVSYSQSSLIHLVGPSDCTLHGFVHGGVTMKLMDEVAGIVAARHCKTNIVTASVDAINFHDKIRKGCVITISGRMTFTSNKSMEIEVLVDADPVVDSSQKRYRAASAFFTYVSLSQEGRSLPVPQLVPETEDEKKRFEEGKGRYLQMKAKRQGHAEPQP

SEQ ID NO: 29614 - protein, 60 aa, Homo sapiens
KIWFPSAPAVVILNRRSPRPIFIEKRVSPRPPWAASGRLLKDFYPSEGDSPFNFFPTLIF

SEQ ID NO: 29615 - protein, 819 aa, Homo sapiens
TPPGADRPMESQGVPPGPYRATKLWNEVTTSFRAGMPLRKHRQHFKKYGNCFTAGEAVDWLYDLLRNNSNFGPEVTRQQTIQLLRKFLKNHVIEDIKGRWGSENVDDNNQLFRFPATSPLKTLPRRYPELRKNNIENFSKDKDSIFKLRNLSRRTPKRHGLHLSQENGEKIKHEIINEDQENAIDNRELSQEDVEEVWRYVILIYLQTILGVPSLEEVINPKQVIPQYIMYNMANTSKRGVVILQNKSDDLPHWVLSAMKCLANWPRSNDMNNPTYVGFERDVFRTIADYFLDLPEPLLTFEYYELFVNILVVCGYITVSDRSSGIHKIQDDPQSSKFLHLNNLNSFKSTECLLLSLLHREKNKEESDSTERLQISNPGFQERCAKKMQLVNLRNRRVSANDIMGGSCHNLIGLSNMHDLSSNSKPRCCSLEGIVDVPGNSSKEASSVFHQSFPNIEGQNNKLFLESKPKQEFLLNLHSEENIQKPFSAGFKRTSTLTVQDQEELCNGKCKSKQLCRSQSLLLRSSTRRNSYINTPVAEIIMKPNVGQGSTSVQTAMESELGESSATINKRLCKSTIELSENSLLPASSMLTGTQSLLQPHLERVAIDALQLCCLLLPPPNRRKLQLLMRMISRMSQNVDMPKLHDAMGTRSLMIHTFSRCVLCCAEEVDLDELLAGRLVSFLMDHHQEILQVPSYLQTAVEKHLDYLKKGHIENPGDGLFAPLPTYSYCKQISAQEFDEQKVSTSQAAIAELLENIIKNRSLPLKEKRKKLKQFQKEYPLIYQKRFPTTESEAALFGDKPTIKQPMLILRKPKFRSLR

SEQ ID NO: 29616 - protein, 14 aa, Homo sapiens
RVKERDFFLKNCDV

SEQ ID NO: 29617 - protein, 12 aa, Homo sapiens
LTRWNWLNWDPC

SEQ ID NO: 29618 - protein, 15 aa, Homo sapiens
LSAMFSGRVWLGLPP

SEQ ID NO: 29619 - protein, 26 aa, Homo sapiens
RQQHPKKERAGVSTVQKAKKKQKKRD

SEQ ID NO: 29620 - protein, 17 aa, Homo sapiens
LRLVLGLVSVGSAAPAE

SEQ ID NO: 29621 - protein, 147 aa, Homo sapiens
LLAEESLPTTPFYFILGKHRQQQDEKLNETLENELVQLPLTENIPAISELLHTPAHVLPSAAFLCSMFVNSLLLSKETKSAKEIPEDVDMEEEKESEDSDEENDFTEKVQDTSNTGLGEDIIHQLSKSEEKELRKFRKIDYSWIAAL

SEQ ID NO: 29622 - protein, 221 aa, Homo sapiens
IGNETELLRDTFTSLGYEVQKFLHLSMHGISQILGQFACMPEHRDYDSFVCVLVSRGGSQSVYGVDQTHSGLPLHHIRRMFMGDSCPYLAGKPKMFFIQNYVVSEGQLEDSSLLEVDGPAMKNVEFKAQKRGLCTVHREADFFWSLCTADMSLLEQSHSSPSLYLQCLSQKLRQERKRPLLDLHIELNGYMYDWNSRVSAKEKYYVWLQHTLRKKLILSYT

SEQ ID NO: 29623 - protein, 39 aa, Homo sapiens
ILLIYFQTQRKVHGQFVGHLIQGPQFVRGEVGMQKYFDL

SEQ ID NO: 29624 - protein, 1011 aa, Homo sapiens
ISCFRARVKMYIQVEPVLDYLTFLPAEVKEQIQRTVATSGNMQAVELLLSTLEKGVWHLGWTREFVEALRRTGSPLAARYMNPELTDLPSPSFENAHDEYLQLLNLLQPTLVDKLLVRDVLDKCMEEELLTIEDRNRIAAAENNGNESGVRELLKRIVQKENWFSAFLNVLRQTGNNELVQELTGSDCSESNAEIENLSQVDGPQVEEQLLSTTVQPNLEKEVWGMENNSSESSFADSSVVSESDTSLAEGSVSCLDESLGHNSNMGSDSGTMGSDSDEENVAARASPEPELQLRPYQMEVAQPALEGKNIIICLPTGSGKTRVAVYIAKDHLDKKKKASEPGKVIVLVNKVLLVEQLFRKEFQPFLKKWYRVIGLSGDTQLKISFPEVVKSCDIIISTAQILENSLLNLENGEDAGVQLSDFSLIIIDECHHTNKEAVYNNIMRHYLMQKLKNNRLKKENKPVIPLPQILGLTASPGVGGATKQAKAEEHILKLCANLDAFTIKTVKENLDQLKNQIQEPCKKFAIADATREDPFKEKLLEIMTRIQTYCQMSPMSDFGTQPYEQWAIQMEKKAAKEGNRKERVCAEHLRKYNEALQINDTIRMIDAYTHLETFYNEEKDKKFAVIEDDSDEGGDDEYCDGDEDEDDLKKPLKLDETDRFLMTLFFENNKMLKRLAENPEYENEKLTKLRNTIMEQYTRTEESARGIIFTKTRQSAYALSQWITENEKFAEVGVKAHHLIGAGHSSEFKPMTQNEQKEVISKFRTGKINLLIATTVAEEGLDIKECNIVIRYGLVTNEIAMVQARGRARADESTYVLVAHSGSGVIEHETVNDFREKMMYKAIHCVQNMKPEEYAHKILELQMQSIMEKKMKTKRNIAKHYKNNPSLITFLCKNCSVLACSGEDIHVIEKMHHVNMTPEFKELYIVRENKALQKKCADYQINGEIICKCGQAWGTMMVHKGLDLPCLKIRNFVVVFKNNSTKKQYKKWVELPITFPNLDYSECCLFSDED

SEQ ID NO: 29625 - protein, 197 aa, Homo sapiens
LHSVPHSPPTTCLAERTPCRRPAEMLRLPTVFRQMRPVSRVLAPHLTRAYAKDVKFGADARALMLQGVDLLADAVAVTMGPKGRTVIIEQSWGSPKVTKDGVTVAKSIDLKDKYKNIGAKLVQDVANNTNEEAGDGTTTATVLARSIAKEGFEKISKGANPVEIRRGVMLAVDAVIAELKKQSKPVTTPEEIAQVRT

SEQ ID NO: 29626 - protein, 12 aa, Homo sapiens
LSSFQSFTQLCS

SEQ ID NO: 29627 - protein, 90 aa, Homo sapiens
MKPKGQTEHDEGMLEYLEDIIGCGRLNEPIKVLCRRVEILNEHRGEKLNRVKMVEKEKDALEGEKNIAIEFLTLENEIFRKKNHVCQYYM

SEQ ID NO: 29628 - protein, 86 aa, Homo sapiens
KMVEKEKDALEGEKNIAIEFLTLENEIFRKKNHVCQYYIYELQKRIAEMETQKEKIHEDTKEINEKSNILSNEMKAKNKDVKDTEK

SEQ ID NO: 29629 - protein, 25 aa, Homo sapiens
LLVILVEKVEYGELLAKDSQATLCL

SEQ ID NO: 29630 - protein, 44 aa, Homo sapiens
LVGWPGLRPAATTILWPGRCEWSAGQSARCLAPQADPAVHSREQ

SEQ ID NO: 29631 - protein, 680 aa, Homo sapiens
TLGREVMSPLQAMSSYTVAGRNVLRWDLSPEQIKTRTEELIVQTKQVYDAVGMLGIEEVTYENCLQALADVEVKYIVERTMLDFPQHVSSDKEVRAASTEADKRLSRFDIEMSMRGDIFERIVHLQETCDLGKIKPEARRYLEKSIKMGKRNGLHLPEQVQNEIKSMKKRMSELCIDFNKNLNEDDTFLVFSKAELGALPDDFIDSLEKTDDDKYKITLKYPHYFPVMKKCCIPETRRRMEMAFNTRCKEENTIILQQLLPLRTKVAKLLGYSTHADFVLEMNTAKSTSRVTAFLDDLSQKLKPLGEAEREFILNLKKKECKDRGFEYDGKINAWDLYYYMTQTEELKYSIDQEFLKEYFPIEVVTEGLLNTYQELLGLSFEQMTDAHVWNKSVTLYTVKDKATGEVLGQFYLDLYPREGKYNHAACFGLQPGCLLPDGSRMMAVAALVVNFSQPVAGRPSLLRHDEVRTYFHEFGHVMHQICAQTDFARFSGTNVETDFVEVPSQMLENWVWDVDSLRRLSKHYKDGSPIADDLLEKLVASRLVNTGLLTLRQIVLSKVDQSLHTNTSLDAASEYAKYCSEILGVAATPGTNMPATFGHLAGGYDGQYYGYLWSEVFSMDMFYSCFKKEGIMNPEVGMKYRNLILKPGGSLDGMDMLHNFLKREPNQKAFLMSRGLHAP

SEQ ID NO: 29632 - protein, 6 aa, Homo sapiens
IVTLGQ

SEQ ID NO: 29633 - protein, 6 aa, Homo sapiens
ISRSID

SEQ ID NO: 29634 - protein, 527 aa, Homo sapiens
RRSQPALRPPRSELGGSDSGLAAPRAGSAPRTPGAQRPAPRRAERTMPQLDSGGGGAGGGDDLGAPDELLAFQDEGEEQDDKSRDSAAGPERDLAELKSSLVNESEGAAGGAGIPGVPGAGAGARGEAEALGREHAAQRLFPDKLPEPLEDGLKAPECTSGMYKETVYSAFNLLMHYPPPSGAGQHPQPQPPLHKANQPPHGVPQLSLYEHFNSPHPTPAPADISQKQVHRPLQTPDLSGFYSLTSGSMGQLPHTVSWFTHPSLMLGSGVPGHPAAIPHPAIVPPSGKQELQPFDRNLKTQAESKAEKEAKKPTIKKPLNAFMLYMKEMRAKVIAECTLKESAAINQILGRRWHALSREEQAKYYELARKERQLHMQLYPGWSARDNYGKKKRRSREKHQESTTDPGSPKKCRARFGLNQQTDWCGPCRRKKKCIRYLPGEGRCPSPVPSDDSALGCPGSPAPQDSPSYHLLPRFPTELLTSPAEPAPTSPGLSTALSLPTPGPPQAPRSTLQSTQVQQQESQRQVA

SEQ ID NO: 29635 - protein, 59 aa, Homo sapiens
IHYEHFGKESLFEEVPMDECTHSSWVSWLLFGVCYTPVLCPVSSEKFHVCDKLGGRVAS

SEQ ID NO: 29636 - protein, 531 aa, Homo sapiens
LLPLGHACSFTMPGSLPLNAEACWPKDVGIVALEIYFPSQYVDQAELEKYDGVDAGKYTIGLGQAKMGFCTDREDINSLCMTVVQNLMERNNLSYDCIGRLEVGTETIIDKSKSVKTNLMQLFEESGNTDIEGIDTTNACYGGTAAVFNAVNWIESSSWDGRYALVVAGDIAVYATGNARPTGGVGAVALLIGPNAPLIFERGLRGTHMQHAYDFYKPDMLSEYPIVDGKLSIQCYLSALDRCYSVYCKKIHAQWQKEGNDKDFTLNDFGFMIFHSPYCKLVQKSLARMLLNDFLNDQNRDKNSIYSGLEAFGDVKLEDTYFDRDVEKAFMKASSELFSQKTKASLLVSNQNGNMYTSSVYGSLASVLAQYSPQQLAGKRIGVFSYGSGLAATLYSLKVTQDATPGSALDKITASLCDLKSRLDSRTGVAPDVFAENMKLREDTHHLVNYIPQGSIDSLFEGTWYLVRVDEKHRRTYARRPTPNDDTLDEGVGLVHSNIATEHIPSPAKKVPRLPATAAEPEAAVISNGEH

SEQ ID NO: 29637 - protein, 209 aa, Homo sapiens
LVLPMTPPERLFLPRVCGTTLHLLLLGLLLVLLPGAQGLPGVGLTPSAAQTARQHPKMHLAHSTLKPAAHLIGDPSKQNSLLWRANTDRAFLQDGFSLSNNSLLVPTSGIYFVYSQVVFSGKAYSPKATSSPLYLAHEVQLFSSQYPFHVPLLSSQKMVYPGLQEPWLHSMYHGAAFQLTQGDQLSTHTDGIPHLVLSPSTVFFGAFAL

SEQ ID NO: 29638 - protein, 28 aa, Homo sapiens
IHGFSTINRFPSNNQCSTHACICARTSI

SEQ ID NO: 29639 - protein, 6 aa, Homo sapiens
LSLQLP

SEQ ID NO: 29640 - protein, 739 aa, Homo sapiens
KPTLLTITYNPFLFKMPEEVHHGEEEVETFAFQAEIAQLMSLIINTFYSNKEIFLRELISNASDALDKIRYESLTDPSKLDSGKELKIDIIPNPQERTLTLVDTGIGMTKADLINNLGTIAKSGTKAFMEALQAGADISMIGQFGVGFYSAYLVAEKVVVITKHNDDEQYAWESSAGGSFTVRADHGEPIGRGTKVILHLKEDQTEYLEERRVKEVVKKHSQFIGYPITLYLEKEREKEISDDEAEEEKGEKEEEDKDDEEKPKIEDVGSDEEDDSGKDKKKKTKKIKEKYIDQEELNKTKPIWTRNPDDITQEEYGEFYKSLTNDWEDHLAVKHFSVEGQLEFRALLFIPRRAPFDLFENKKKKNNIKLYVRRVFIMDSCDELIPEYLNFIRGVVDSEDLPLNISREMLQQSKILKVIRKNIVKKCLELFSELAEDKENYKKFYEAFSKNLKLGIHEDSTNRRRLSELLRYHTSQSGDEMTSLSEYVSRMKETQKSIYYITGESKEQVANSAFVERVRKRGFEVVYMTEPIDEYCVQQLKEFDGKSLVSVTKEGLELPEDEEEKKKMEESKAKFENLCKLMKEILDKKVEKVTISNRLVSSPCCIVTSTYGWTANMERIMKAQALRDNSTMGYMMAKKHLEINPDHPIVETLRQKAEADKNDKAVKDLVVLLFETALLSSGFSLEDPQTHSNRIYRMIKLGLGIDEDEVAAEEPNAAVPDEIPPLEGDEDASRMEEVD

SEQ ID NO: 29641 - protein, 28 aa, Homo sapiens
LPFRQKLPNSCPSSSIPSIPTRRFSFGS

SEQ ID NO: 29642 - protein, 12 aa, Homo sapiens
LGYLHSLNIVYR

SEQ ID NO: 29643 - protein, 6 aa, Homo sapiens
TPAALL

SEQ ID NO: 29644 - protein, 573 aa, Homo sapiens
IGVKAAGDWASIHCEDRRDTPCCSCLQGSERRKPGAGPAPVAAGHSMEHPSKMEFFQKLGYDREDVLRVLGKLGEGALVNDVLQELIRTGSRPGALEHPAAPRLVPRGSCGVPDSAQRGPGTALEEDFRTLASSLRPIVIDGSNVAMSHGNKETFSCRGIKLAVDWFRDRGHTYIKVFVPSWRKDPPRADTPIREQHVLAELERQAVLVYTPSRKVHGKRLVCYDDRYIVKVAYEQDGVIVSNDNYRDLQSENPEWKWFIEQRLLMFSFVNDRFMPPDDPLGRHGPSLSNFLSRKPKPPEPSWQHCPYGKKCTYGIKCKFYHPERPHHAQLAVADELRAKTGARPGAGAEEQRPPRAPGGSAGARAAPREPFAHSLPPARGSPDLAALRGSFSRLAFSDDLGPLGPPLPVPACSLTPRLGGPDWVSAGGRVPGPLSLPSPESQFSPGDLPPPPGLQLQPRGEHRPRDLHGDLLSPRRPPDDPWARPPRSDRFPGRSVWAEPAWGDGATGGLSVYATEDDEGDARARARIALYSVFPRDQVDRVMAAFPELSDLARLILLVQRCQSAGAPLGKP

SEQ ID NO: 29645 - protein, 219 aa, Homo sapiens
VLVTMSETVPPAPAASAAPEKPLAGKKAKKPAKAAAASKKKPAGPSVSELIVQAASSSKERGGVSLAALKKALAAAGYDVEKNNSRIKLGIKSLVSKGTLVQTKGTGASGSFKLNKKASSVETKPGASKVATKTKATGASKKLKKATGASKKSVKTPKKAKKPAATRKSSKNPKKPKTVKPKKVAKSPAKAKAVKPKAAKARVTKPKTAKPKKAAPKKK

SEQ ID NO: 29646 - protein, 158 aa, Homo sapiens
IATQELRQRLRQLENGTTLGQSPLGQIQLTIRHSSQRNKLIVVVHACRNLIAFSEDGSDPYVRMYLLPDKRRSGRRKTHVSKKTLNPVFDQSFDFSVSLPEVQRRTLDVAVKNSGGFLSKDKGLLGKVLVALASEELAKGWTQWYDLTEDGTRPQAMT

SEQ ID NO: 29647 - protein, 1016 aa, Homo sapiens
KPPETKESAMNNAGNASFILGTGKIVTPQKHAELPPNPCTPDTFKSPLNFSTVTVEQLGITPESFVRNSAGKSSSYLKKCRRRSAVGARGSPETNHLIRFIARQQNIKNARKSPLAQDSPSQGSPALYRNVNTLRERISAFQSAFHSIKENEKMTGCLEFSEAGKESEMTDLTRKEGLSACQQSGFPAVLSSKRRRISYQRDSDENLTDAEGKVIGLQIFNIDTDRACAVETSVDLSEISSKLGSTQSGFLVEESLPLSELTETSNALKVADCVVGKGSSDAVSPDTFTAEVSSDAVPDVRSPATPACRRDLPTPKTFVLRSVLKKPSVKMCLESLQEHCNNLYDDDGTHPSLISNLPNCCKEKEAEDEENFEAPAFLNMRKRKRVTFGEDLSPEVFDESLPANTPLRKGGTPVCKKDFSGLSSLLLEQSPVPEPLPQPDFDDKGENLENIEPLQVSFAVLSSPNKSSISETLSGTDTFSSSNNHEKISSPKVGRITRTSNRRNQLVSVVEESVCNLLNTEVQPCKEKKINRRKSQETKCTKRALPKKSQVLKSCRKKKGKGKKSVQKSLYGERDIASKKPLLSPIPELPEVPEMTPSIPSIRRLGSGYFSSNGKLEEVKTPKNPVKRKDLLRHDPDLHMHQGYDKYDVSEFCSYIKSSSSLGNATSDEDPNTNIMNINENKNIPKAKNKSESENEPKAGTDSPVSCASVTEERVASDSPKPALTLQQGQEFSAGGQNAENLCQFFKISPDLNIKCERKDDFLGAAEGKLQCNRLMPNSQKDCHCLGDVLIENTKESKSQSEDLGRKPMESSSVVSCRDRKDRRRSMCYSDGRSLHLEKNGNHTPSSSVGSSVEISLENSELFKDLSDAIEQTFQRRNSETKVRRSTRLQKDLENEGLVWISLPLPSTSQKAKRRTICTFDSSGFESMSPIKETVSSRQKPQMAPPVSDPENSQGPAAGSSDEPGKRRKSFCISTLANTKATSQFKGYRRRSSLNGKGESSLTALERIEHNGERKQ

SEQ ID NO: 29648 - protein, 105 aa, Homo sapiens
LVSEKMTEEVDFLGQDSDGGSEEVVLTPAELIERLEQAWMNEKFAPELLESKPEIVECVMEQLEHMEENLRRAKREDLKVSIHQMEMERIRYVLSSYLRCRLMKV

SEQ ID NO: 29649 - protein, 272 aa, Homo sapiens
LDFFRVVENQQPPATMPLNVSFTNRNYDLDYDSVQPYFYCDEEENFYQQQQQSELQPPAPSEDIWKKFELLPTPPLSPSRRSGLCSPSYVAVTPFSLRGDNDGGGGSFSTADQLEMVTELLGGDMVNQSFICDPDDETFIKNIIIQDCMWSGFSAAAKLVSEKLASYQAARKDSGSPNPARGHSVCSTSSLYLQDLSAAASECIDPSVVFPYPLNDSSSPKSCASQDSSAFSPSSDSLLSSTESSPQGSPEPLVLHEETPPTTSSDSGGTRR

SEQ ID NO: 29650 - protein, 28 aa, Homo sapiens
RPKTCDLGNRCKCGSMQRKLSEISSAFY

SEQ ID NO: 29651 - protein, 623 aa, Homo sapiens
RLPSPTDSPSSLPPLPSSSGQASVPSELGHGADTQSSESPSVFSSLSSPIAAPISTSTPIESWPLVDRGQAKSEGPPLLPKAELQTESLTPVPNSGSSALGSLFKQPSFPANKGTEDSLMGRTRETGTEKNTSSLELEESLPEQPETGRQEEELPRFPCKKQDYSPSSGEAQEVPFALSLSSDGAVSPVGELAAGGDRDLESQAGSLVESKARDAAEEVAPPLPMGASVPSIDSMMRKLEEMGLNLRKDQKKTKKRVSFSEQLFTEEAVAGAALLVEGHSSCPQELNPAWSVAGNASDGEPPESPHAEDSERESVTTPGPATCGAPASPADHLLLPSQEESFSEVPMSEASSAKDTPLFRMEGEDALVTQYQSKASDHEGLLSDPLSDLQLVSDFKSPIMADLNLSLPSIPEVASDDERIDQVEDDGDQVEDDGETAKSSTLDIGALSLGLVVPCPERGKGPSGEADRLVLGEGLCDFRLQAPQASVTAPSEQTTEFGIHKPHLGKSSSLDKQLPGPSGGEEEKPMGNGSPSPPPGTSLDNPVPSPSPSEIFPVTHSFPSSAHSDTHHTSTAESQKKATAEGSAGRVENFGKRKPLLQAWVSPSETHPVSAQPGAGTGSAKHR

SEQ ID NO: 29652 - protein, 24 aa, Homo sapiens
ILKRYLATTYFHLRPFLPGGETLD

SEQ ID NO: 29653 - protein, 26 aa, Homo sapiens
KTKLLCKHLCTAMCVGICEKKRICEV

SEQ ID NO: 29654 - protein, 625 aa, Homo sapiens
KKARQEIKKKSSDTLKLQKKAKKGRGDIQPQLDSALQDVNDKYLLLEETEKQAVRKALIEERGRFCTFISMLRPVIEEEISMLGEITHLQTISEDLKSLTMDPHKLPSSSEQVILDLKGSDYSWSYQTPPSSPSTTMSRKSSVCSSLNSVNSSDSRSSGSHSHSPSSHYRYRSSNLAQQAPVRLSSVSSHDSGFISQDAFQSKSPSPMPPEAPNQLSNGFSHYSLSSESHVGPTGAGLFPHCLPASRLLPRVTSVHLPDYAHYYTIGPGMFPSSQIPSWKDWAKPGPYDQPLVNTLQRRKEKREPDPNGGGPTTASGPPAAAEEAQRPRSMTVSAATRPGEEMEACEELALALSRGLQLDTQRSSRDSLQCSSGYSTQTTTPCCSEDTIPSQVSDYDYFSVSGDQEADQQEFDKSSTIPRNSDISQSYRRMFQAKRPASTAGLPTTLGPAMVTPGVATIRRTPSTKPSVRRGTIGAGPIPIKTPVIPVKTPTVPDLPGVLPAPPDGPEERGEHSPESPSVGEGPQGVTSMPSSMWSGQASVNPPLPGPKPSIPEEHRQAIPESEAEDQEREPPSATVSPGQIPESDPADLSPRDTPQGEDMLNAIRRGVKLKKTTTNDRSAPRFS

SEQ ID NO: 29655 - protein, 39 aa, Homo sapiens
VGLGKAASPLCSESSGYCGAFPRRSARRHLHLGPTSWAG

SEQ ID NO: 29656 - protein, 38 aa, Homo sapiens
ILQLNRYYPQILTNKEAEKVLRSSGTPRHPCVCGSVTS

SEQ ID NO: 29657 - protein, 78 aa, Homo sapiens
LATQESDVMVGPFKLRSRKQRTLSMIEEEIRAAQEREEELKRQRQVLQSTQSPRTKNAPSLPSRTCYKTAPGPRGHTG

SEQ ID NO: 29658 - protein, 75 aa, Homo sapiens
MLRHAEASAIVEYAYNDKAILEQRNMLTEELYGNTFQLYKSADHRTLDKVLEVQPEKLELIMDEMKQILTPMAQK

SEQ ID NO: 29659 - protein, 372 aa, Homo sapiens
VRGRAVLRSAARGRRSWGSGRAMIRGFEAPMAENPPPPPPPVIFCHDSPKRVLVSVIRTTPIKPTCGGGGEPEPPPPLIPTSPGFSDFMVYPWRWGENAHNVTLSPGAAGAAASAALPAAAAAEHSGLRGRGAPPPAASASAAASGGEDEEEASSPDSGHLKDGIRRGRPRADTVRDLINEGEHSSSRIRCNICNRVFPREKSLQAHKRTHTGERPYLCDYPDCGKAFVQSGQLKTHQRLHTGEKPFVCSENGCLSRFTHANRHCPKHPYARLKREEPTDTLSKHQAADNKAAAEWLARYWEMREQRTPTLKGKLVQKADQEQQDPLEYLQSDEEDDEKRGAQRRLQEQRERLHGALALIELANLTGAPLRQ

SEQ ID NO: 29660 - protein, 36 aa, Homo sapiens
IQLGSVEEAIQALIELHNHDLGENHHLRVSFSKSTI

SEQ ID NO: 29661 - protein, 8 aa, Homo sapiens
MYSTSIFL

SEQ ID NO: 29662 - protein, 24 aa, Homo sapiens
IPVDFGKGHYCPCRKNTSCSLSRI

SEQ ID NO: 29663 - protein, 144 aa, Homo sapiens
LEQDLKLDIPTGTTPQRKSYLYPSTLVRTEPREHLLDQLKRKQPELLMMLNCSENNKEETIPDVDVEEAVLGQYTEEPLSQEPSVDAGVDCSSIGGVPFFQHKKSHGKDKENRGINTLERSKVEETTEHLVTKSRLPLRAQINL

SEQ ID NO: 29664 - protein, 10 aa, Homo sapiens
MVLLNMMISN

SEQ ID NO: 29665 - protein, 155 aa, Homo sapiens
LCARRDSPPEDIDHKDSYLITRSIMAEPDYIEDDNPELIRPQKLINPVKTSRNHQDLHRELLMNQKRGLAPQNKPELQKVMEKRKRDQVIKQKEEEAQKKKSDLEIELLKRQQKLEQLELEKQKLQEEQENAPEFVKVKGNLRRTGQEVAQAQES

SEQ ID NO: 29666 - protein, 870 aa, Homo sapiens
LLQQGASPNAATTSGYTPLHLSAREGHEDVAAFLLDHGASLSITTKKGFTPLHVAAKYGKLEVANLLLQKSASPDAAGKSGLTPLHVAAHYDNQKVALLLLDQGASPHAAAKNGYTPLHIAAKKNQMDIATTLLEYGADANAVTRQGIASVHLAAQEGHVDMVSLLLGRNANVNLSNKSGLTPLHLAAQEDRVNVAEVLVNQGAHVDAQTKMGYTPLHVGCHYGNIKIVNFLLQHSAKVNAKTKNGYTPLHQAAQQGHTHIINVLLQNNASPNELTVNGNTALGIARRLGYISVVDTLKIVTEETMTTTTVTEKHKMNVPETMNEVLDMSDDEGEDAMTGDTDKYLGPQDLKELGDDSLPAEGYMGFSLGARSASPKISSDRSYTLNRSSYARDSMMIEELLVPSKEQHLTFTREFDSDSLRHYSWAADTLDNVNLVSSPIHSGYSSPLPQYDSRFLVSFMVDARGGSMRGSRHHGMRIIIPPRKCTAPTRITCRLVKRHKLANPPPMVEGEGLASRLVEMGPAGAQFLGPVIVEIPHFGSMRGKERELIVLRSENGETWKEHQFDSKNEDLTELLNGMDEELDSPEELGKKRICRIITKDFPQYFAVVSRIKQESNQIGPEGGILSSTTVPLVQASFPEGALTKRIRVGLQAQPVPDEIVKKILGNKATFSPIVTVEPRRRKFHKPITMTIPVPPPSGEGVSNGYKGDTTPNLRLLCSITGGTSPAQWEDITGTTPLTFIKDCVSFTTNVSARFWLADCHQVLETVGLATQLYRELICVPYMAKFVVFAKMNDPVESSLRCFCMTDDKVDKTLEQQENFEEVARSKDIEVPCSQKQVHFITYSRYEVLFCGLNSTHYKIPSALLILLLL

SEQ ID NO: 29667 - protein, 762 aa, Homo sapiens
ISGGRINSILVSPSYRVVEVSYILFELIMNSMKTEENKSFSAMEDDQRTRPEVSKDTVMKQTHADTPVDHCLSGIRKCSSTFKLKSEVNKHETALEMQNPNLNNKECCFTFTLNGNSRKLDRSVFTAYGKPSESIYSALSANDYFSERIKNQFNKNIIVYEEKTIDGHINLGMPLKCLPSDSHFKITFGQRKSSKEDGHILRQCENPNMECILFHVVAIGRTRKKIVKINELHEKGSKLCIYALKGETIEGALCKDGRFRSDIGEFEWKLKEGHKKIYGKQSMVDEVSGKVLEMDISKKKALQQKDIHKKIKQNESATDEINHQSLIQSKKKVHKPKKDGETKDVEHSREQILPPQDLSHYIKDKTRQTIPRIRNYYFCSLPRKYRQINSQVRRRPHLGRRYAINLDVQKEAINLLKNYQTLNEAIMHQYPNFKEEAQWVRKYFREEQKRMNLSPAKQFNIYKKDFGKMTANSVSVATCEQLTYYSKSVGFMQWDNNGNTGNATCFVFNGGYIFTCRHVVHLMVGKNTHPSLWPDIISKCAKVTFTYTEFCPTPDNWFSIEPWLKVSNENLDYAILKLKENGNAFPPGLWRQISPQPSTGLIYLIGHPEGQIKKIDGCTVIPLNERLKKYPNDCQDGLVDLYDTTSNVYCMFTQRSFLSEVWNTHTLSYDTCFSDGSSGSPVFNASGKLVALHTFGLFYQRGFNVHALIEFGYSMDSILCDIKKTNESLYKSLNDEKLETYDEEKGKQESSLQDHQIEPMEC

SEQ ID NO: 29668 - protein, 896 aa, Homo sapiens
KHPHDLVILMRQEATVNYLKELEKQLVAQKIHIEENEDRDTGLEQRHNKEDPDCIKAKVPLGDLDLYDGTYITLESKDISPEDYIDTESPVPPDPEQPDCTKILELPYSIHAFQHLRGVQERVNLSAPLLPKEDPIFTYLSKRLGRSIDDIGHLIHEGLQKNTSSWVLYNMASFYWRIKNEPYQVVECAMRALHFSSRHNKDIALVNLANVLHRAHFSADAAVVVHAALDDSDFFTSYYTLGNIYAMLGEYNHSVLCYDHALQARPGFEQAIKRKHAVLCQQKLEQKLEAQHRSLQRTLNELKEYQKQHDHYLRQQEILEKHKLIQEEQILRNIIHETQMAKEAQLGNHQICRLVNQQHSLHCQWDQPVRYHRGDIFENVDYVQFGEDSSTSSMMSVNFDVQSNQSDINDSVKSSPVAHSILWIWGRDSDAYRDKQHILWPKRADCTESYPRVPVGGELPTYFLPPENKGLRIHELSSDDYSTEEEAQTPDCSITDFRKSHTLSYLVKELEVRMDLKAKMPDDHARKILLSRINNYTIPEEEIGSFLFHAINKPNAPIWLILNEAGLYWRAVGNSTFAIACLQRALNLAPLQYQDVPLVNLANLLIHYGLHLDATKLLLQALAINSSEPLTFLSLGNAYLALKNISGALEAFRQALKLTTKCPECENSLKLIRCMQFYPFLYNITSSVCSGNCHEKTLDNSHDKQKYFDNSQSLDAAEEEPSERGTEEDPVFSVENSGRDSDALRLESTVVEESNGSDEMENSDETKMSEEILALVDEFQQAWPLEGFGGALEMKGRRLDLQGIRVLKKGPQDGVARSSCYGDCRSEDDEATEWITFQVKRVKKPKGDHKKTPGKKVETGQIENGHRYQANLEITGPKVASPGPQGLLDWKTRKVP

SEQ ID NO: 29669 - protein, 33 aa, Homo sapiens
KLFDMCNKFRGSKKINVMIGQEIIQLFTRPLIF

SEQ ID NO: 29670 - protein, 22 aa, Homo sapiens
RRFTMPLGPWRSGRLPTSAERH

SEQ ID NO: 29671 - protein, 24 aa, Homo sapiens
LCVLAGRACSFLPWQPRAMAIIAL

SEQ ID NO: 29672 - protein, 172 aa, Homo sapiens
IGTVGTQDVDCDFIDFTYVRVSSEELDRALRKVVGEFKDALRNSGGDGLGQMSLEFYQKKKSRWPFSDECIPWEVWTVKVHVVALATEQERQICREKVGEKLCEKIINIVEVMNRHEYLPKMPTQSEVDNVFDTGLRDVQPYLYKISFQITDALGTSVTTTMRRLIKDTLAL

SEQ ID NO: 29673 - protein, 32 aa, Homo sapiens
LICPAFQLSSGFRPLVIPPHPLSKALSWSPFF

SEQ ID NO: 29674 - protein, 317 aa, Homo sapiens
IVKVSLHPAVMSKSESPKEPEQLRKLFIGGLSFETTDESLRSHFEQWGTLTDCVVMRDPNTKRSRGFGFVTYATVEEVDAAMNARPHKVDGRVVEPKRAVSREDSQRPGAHLTVKKIFVGGIKEDTEEHHLRDYFEQYGKIEVIEIMTDRGSGKKRGFAFVTFDDHDSVDKIVIQKYHTVNGHNCEVRKALSKQEMASASSSQRGRSGSGNFGGGRGGGFGGNDNFGRGGNFSGRGIGDGYNGFGNDGSNFGGGGSYNDFGNYNNQSSNFGPMKGGNFGGRSSGPYGGGGQYFAKPRNQGGYGGSSSSSSYGSGRRF

SEQ ID NO: 29675 - protein, 955 aa, Homo sapiens
VKNLPNGMKEERFRQLFAAFGTLTDCSLKFTKDGKFRKFGFIGFKSEEEAQKAQKHFNKSFIDTSRITVEFCKSFGDPAKPRAWSKHAQKPSQPKQPPKDSTTPEIKKDEKKKKVAGQLEKLKEDTEFQEFLSVHQRRAQAATWANDGLDAEPSKGKSKPASDYLNFDSDSGQESEEEGAGEDLEEEASLEPKAAVQKELSDMDYLKSKMVKAGSSSSSEEEESEDEAVHCDEGSEAEEEDSSATPVLQERDSKGAGQEQGMPAGKKRPPEARAETEKPANQKEPTTCHTVKLRGAPFNVTEKNVMEFLAPLKPVAIRIVRNAHGNKTGYIFVDFSNEEEVKQALKCNREYMGGRYIEVFREKNVPTTKGAPKNTTKSWQGRILGENEEEEDLAESGRLFVRNLPYTSTEEDLEKLFSKYGPLSELHYPIDSLTKKPKGFAFITFMFPEHAVKAYSEVDGQVFQGRMLHVLPSTIKKEASEDASALGSSSYKKKKEAQDKANSASSHNWNTLFMGPNAVADAIAQKYNATKSQVFDHETKGSVAVRVALGETQLVQEVRRFLIDNGVSLDSFSQAAAERSKTVILVKNLPAGTLAAQLQETFGHFGSLGRVLLPEGGITAIVEFLEPLEARKAFRHLAYSKFHHVPLYLEWAPVGVFSSTAPQKKKLQDTPSEPMEKDPAEPETVPDGETPEDENPTEEGADNSSAKMEEEEEEEEEEEESLPGCTLFIKNLNFDTTEEKLKEVFSKVGTVKSCSISKKKNKAGVLLSMGFGFVEYRKPEQAQKALKQLQGHVVDGHKLEVRISERATKPAVTLARKKQVPRKQTTSKILVRNIPFQAHSREIRELFSTFGELKTVRLPKKMTGTGTHRGFGFVDFLTKQDAKRAFNALCHSTHLYGRRLVLEWADSEVTLQALRRKTAAHFHEPPKKKRSVVLDEILEQLEGSDSDSEEQTLQL

SEQ ID NO: 29676 - protein, 588 aa, Homo sapiens
ISKRPVFLSEETPYSYPTGNHTYQEIAVPPPVPPPPSSEALNGTILDPLDQWQPSSSRFIHQQPQSSSPVYGSSAKTSSVSNPQDSVGSPCSRVGEEEHVYSFPNKQKSAEPSPTVMSTSLGSNLSELDRLLLELNAVQHNPPGFPADEANSSPPLPGALSPLYGVPETNSPLGGKAGPLTKEKPKRNGGRGLEDVRPSVESLLDELESSVPSPVPAITVNQGEMSSPQRVTSTQQQTRISASSATRELDELMASLSDFKGSWPLEEVVLLVSISSSVQEGEKYPHPCAARHRTPSLRSPDQPPPCPQFMAQGKTGSSSPPGGPPKPGSQLDSMLGSLQSDLNKLGVATVAKGVCGACKKPIAGQVVTAMGKTWHPEHFVCTHCQEEIGSRNFFERDGQPYCEKDYHNLFSPRCYYCNGPILDKVVTALDRTWHPEHFFCAQCGAFFGPEGFHEKDGKAYCRKDYFDMFAPKCGGCARAILENYISALNTLWHPECFVCRECFTPFVNGSFFEHDGQPYCEVHYHERRGSLCSGCQKPITGRCITAMAKKFHPEHFVCAFCLKQLNKGTFKEQNDKPYCQNCFLKLFC

SEQ ID NO: 29677 - protein, 53 aa, Homo sapiens
RPVKIWLPLRRIMRRLVWILLKERVRKKERNTNYPFLLALQHVMLPEFQLQLN

SEQ ID NO: 29678 - protein, 688 aa, Homo sapiens
ISDRPFAPPPRPPPVLRSPPLGSPAAGGGAGVTMAEAPQVVEIDPDFEPLPRPRSCTWPLPRPEFSQSNSATSSPAPSGSAAANPDAAAGLPSASAAAVSADFMSNLSLLEESEDFPQAPGSVAAAVAAAAAAAATGGLCGDFQGPEAGCLHPAPPQPPPPGPLSQHPPVPPAAAGPLAGQPRKSSSSRRNAWGNLSYADLITKAIESSAEKRLTLSQIYEWMVKSVPYFKDKGDSNSSAGWKNSIRHNLSLHSKFIRVQNEGTGKSSWWMLNPEGGKSGKSPRRRAASMDNNSKFAKSRSRAAKKKASLQSGQEGAGDSPGSQFSKWPASPGSHSNDDFDNWSTFRPRTSSNASTISGRLSPIMTEQDDLGEGDVHSMVYPPSAAKMASTLPSLSEISNPENMENLLDNLNLLSSPTSLTVSTQSSPGTMMQQTPCYSFAPPNTSLNSPSPNYQKYTYGQSSMSPLPQMPIQTLQDNKSSYGGMSQYNCAPGLLKELLTSDSPPHNDIMTPVDPGVAQPNSRVLGQNVMMGPNSVMSTYGSQASHNKMMNPSSHTHPGHAQQTSAVNGRPLPHTVSTMPHTSGMNRLTQVKTPVQVPLPHPMQMSALGGYSSVSSCNGYGRMGLLHQEKLPSDLDGMFIERLDCDMESIIRNDLMDGDTLDFNFDNVLPNQSFPHSVKTTTHSWVSG

SEQ ID NO: 29679 - protein, 20 aa, Homo sapiens
KKRKKIPQKGRKKKGFRRRR

SEQ ID NO: 29680 - protein, 36 aa, Homo sapiens
VRRTQGSEVATGQAEEAPVGGGGLVAQEKSGREPSW

SEQ ID NO: 29681 - protein, 54 aa, Homo sapiens
LSSSLLQSVEEPMVHLRLEVAAAPGTPAQPVAMSLSADKFQVLLAGEAQLFLDG

SEQ ID NO: 29682 - protein, 9 aa, Homo sapiens
LVWTYYMDQ

SEQ ID NO: 29683 - protein, 44 aa, Homo sapiens
KLFEELVRASSHSTDLMEAMAMGSVEASYKCLAAALIVLTESGR

SEQ ID NO: 29684 - protein, 752 aa, Homo sapiens
TPGHPGSWEMGLLTFRDVAVEFSLEEWEHLEPAQKNLYQDVMLENYRNLVSLGLVVSKPDLITFLEQRKEPWNVKSEETVAIQPDVFSHYNKDLLTEHCTEASFQKVISRRHGSCDLENLHLRKRWKREECEGHNGCYDEKTFKYDQFDESSVESLFHQQILSSCAKSYNFDQYRKVFTHSSLLNQQEEIDIWGKHHIYDKTSVLFRQVSTLNSYRNVFIGEKNYHCNNSEKTLNQSSSPKNHQENYFLEKQYKCKEFEEVFLQSMHGQEKQEQSYKCNKCVEVCTQSLKHIQHQTIHIRENSYSYNKYDKDLSQSSNLRKQIIHNEEKPYKCEKCGDSLNHSLHLTQHQIIPTEEKPCKWKECGKVFNLNCSLYLTKQQQIDTGENLYKCKACSKSFTRSSNLIVHQRIHTGEKPYKCKECGKAFRCSSYLTKHKRIHTGEKPYKCKECGKAFNRSSCLTQHQTTHTGEKLYKCKVCSKSYARSSNLIMHQRVHTGEKPYKCKECGKVFSRSSCLTQHRKIHTGENLYKCKVCAKPFTCFSNLIVHERIHTGEKPYKCKECGKAFPYSSHLIRHHRIHTGEKPYKCKACSKSFSDSSGLTVHRRTHTGEKPYTCKECGKAFSYSSDVIQHRRIHTGQRPYKCEECGKAFNYRSYLTTHQRSHTGERPYKCEECGKAFNSRSYLTTHRRRHTGERPYKCDECGKAFSYRSYLTTHRRSHSGERPYKCEECGKAFNSRSYLIAHQRSHTREKL

SEQ ID NO: 29685 - protein, 74 aa, Homo sapiens
RTSAASMLSLLRNETGNSSISLGISSWPWLGKWGSWQNSFSGKPMGNLAPKAGPPGNGQPFKRSLVTSSSTWWH

SEQ ID NO: 29686 - protein, 1362 aa, Homo sapiens
IHLSSKGHISPAKDTSLQQRTPAEMSPVLHFYVRPSGHEGAAPGHTRRKLQGKLPELQGVETELCYNVNWTAEALPSAEETKKLMWLFGCPLLLDDVARESWLLPGSNDLLLEVGPRLNFSTPTSTNIVSVCRATGLGPVDRVETTRRYRLSFAHPPSAEVEAIALATLHDRMTEQHFPHPIQSFSPESMPEPLNGPINILGEGRLALEKANQELGLALDSWDLDFYTKRFQELQRNPSTVEAFDLAQSNSEHSRHWFFKGQLHVDGQKLVHSLFESIMSTQESSNPNNVLKFCDNSSAIQGKEVRFLRPEDPTRPSRFQQQQGLRHVVFTAETHNFPTGVCPFSGATTGTGGRIRDVQCTGRGAHVVAGTAGYCFGNLHIPGYNLPWEDPSFQYPGNFARPLEVAIEASNGASDYGNKFGEPVLAGFARSLGLQLPDGQRREWIKPIMFSGGIGSMEADHISKEAPEPGMEVVKVGGPVYRIGVGGGAASSVQVQGDNTSDLDFGAVQRGDPEMEQKMNRVIRACVEAPKGNPICSLHDQGAGGNGNVLKELSDPAGAIIYTSRFQLGDPTLNALEIWGAEYQESNALLLRSPNRDFLTHVSARERCPACFVGTITGDRRIVLVDDRECPVRRNGQGDAPPTPLPTPVDLELEWVLGKMPRKEFFLQRKPPMLQPLALPPGLSVHQALERVLRLPAVASKRYLTNKVDRSVGGLVAQQQCVGPLQTPLADVAVVALSHEELIGAATALGEQPVKSLLDPKVAARLAVAEALTNLVFALVTDLRDVKCSGNWMWAAKLPGEGAALADACEAMVAVMAALGVAVDGGKDSLSMAARVGTETVRAPGSLVISAYAVCPDITATVTPDLKHPEGRGHLLYVALSPGQHRLGGTALAQCFSQLGEHPPDLDLPENLVRAFSITQGLLKDRLLCSGHDVSDGGLVTCLLEMAFAGNCGLQVDVPVPRVDVLSVLFAEEPGLVLEVQEPDLAQVLKRYRDAGLHCLELGHTGEAGPHAMVRVSVNGAVVLEEPVGELRALWEETSFQLDRLQAEPRCVAEEERGLRERMGPSYCLPPTFPKASVPREPGGPSPRVAILREEGSNGDREMADAFHLAGFEVWDVTMQDLCSGAIGLDTFRGVAFVGGFSYADVLGSAKGWAAAVTFHPRAGAELRRFRKRPDTFSLGVCNGCQLLALLGWVGGDPNEDAAEMGPDSQPARPGLLLRHNLSGRYESRWASVRVGPGPALMLRGMEGAVLPVWSAHGEGYVAFSSPELQAQIEARGLAPLHWADDDGNPTEQYPLNPNGSPGGVAGICSCDGRHLAVMPHPERAVRPWQWAWRPPPFDTLTTSPWLQLFINARNWTLEGSC

SEQ ID NO: 29687 - protein, 110 aa, Homo sapiens
LQFALYKKMTQAAILIQSKFRSYYEQKRFQQSRRAAVLIQQHYRSYRRRPGPPHRTSATLPARNKGSFLTKKQDQAARKIMRFLRRCRHRMRELKQNQELEGLPQPGLAT

SEQ ID NO: 29688 - protein, 12 aa, Homo sapiens
IQVAIEESPQVS

SEQ ID NO: 29689 - protein, 16 aa, Homo sapiens
RLPRGGMPTLSSSCPQ

SEQ ID NO: 29690 - protein, 16 aa, Homo sapiens
TLRLCSQVRPPRGRGS

SEQ ID NO: 29691 - protein, 6 aa, Homo sapiens
LFALGL

SEQ ID NO: 29692 - protein, 35 aa, Homo sapiens
TYMPRSQPYWRCCCNFLCKRRSEIFCKWRTWKWKH

SEQ ID NO: 29693 - protein, 8 aa, Homo sapiens
IKLRIWDT

SEQ ID NO: 29694 - protein, 572 aa, Homo sapiens
VPEKRFSPSRLRRMKVITCEIAWHNKEPVYSLDFQHGTAGRIHRLASAGVDTNVRIWKVEKGPDGKAIVEFLSNLARHTKAVNVVRFSPTGEILASGGDDAVILLWKVNDNKEPEQIAFQDEDEAQLNKENWTVVKTLRGHLEDVYDICWATDGNLMASASVDNTAIIWDVSKGQKISIFNEHKSYVQGVTWDPLGQYVATLSCDRVLRVYSIQKKRVAFNVSKMLSGIGAEGEARSYRMFHDDSMKSFFRRLSFTPDGSLLLTPAGCVESGENVMNTTYVFSRKNLKRPIAHLPCPGKATLAVRCCPVYFELRPVVETGVELMSLPYRLVFAVASEDSVLLYDTQQSFPFGYVSNIHYHTLSDISWSSDGAFLAISSTDGYCSFVTFEKDELGIPLKEKPVLNMRTPDTAKKTKSQTHRGSSPGPRPVEGTPASRTQDPSSPGTTPPQARQAPAPTVIRDPPSITPAVKSPLPGPSEEKTLQPSSQNTKAHPSRRVTLNTLQAWSKTTPRRINLTPLKTDTPPSSVPTSVISTPSTEEIQSETPGDAQGSPPELKRPRLDENKGGTESLDP

SEQ ID NO: 29695 - protein, 219 aa, Homo sapiens
RPRSQRRPTQPSRRRRRAPMAAAKDTHEDHDTSTENTDESNHDPQFEPIVSLPEQEIKTLEEDEEELFKMRAKLFRFASENDLPEWKERGTGDVKLLKHKEKGAIRLLMRRDKTLKICANHYITPMMELKPNAGSDRAWVWNTHADFADECPKPELLAIRFLNAENAQKFKTKFEECRKEIEEREKKGSGKNDHAEKVAEKLEALSVKEETKEDAEEKQ

SEQ ID NO: 29696 - protein, 10 aa, Homo sapiens
TWTPSTCSWR

SEQ ID NO: 29697 - protein, 493 aa, Homo sapiens
RLNMNPQIRNPMERMYRDTFYDNFENEPILYGRSYTWLCYEVKIKRGRSNLLWDTGVFRGQVYFKPQYHAEMCFLSWFCGNQLPAYKCFQITWFVSWTPCPDCVAKLAEFLSEHPNVTLTISAARLYYYWERDYRRALCRLSQAGARVTIMDYEEFAYCWENFVYNEGQQFMPWYKFDENYAFLHRTLKEILRYLMDPDTFTFNFNNDPLVLRRRQTYLCYEVERLDNGTWVLMDQHMGFLCNEAKNLLCGFYGRHAELRFLDLVPSLQLDPAQIYRVTWFISWSPCFSWGCAGEVRAFLQENTHVRLRIFAARIYDYDPLYKEALQMLRDAGAQVSIMTYDEFEYCWDTFVYRQGCPFQPWDGLEEHSQALSGRLRAILQVRASSLCLVPHRPPPPPRSPVPCLPLCSEPPLGSLLPTGRPAPSLPFLLTASFSFPPPASLPPLPSLSLSPGHLPVPSFHSLTSCSIQPPCSSRIRETEGWASVSKEGRDLG

SEQ ID NO: 29698 - protein, 17 aa, Homo sapiens
LLLFCYKLSCQLEPENP

SEQ ID NO: 29699 - protein, 34 aa, Homo sapiens
ITFPSGMPPVLKPTTTPVEEQPCHQNRAKNGSPK

SEQ ID NO: 29700 - protein, 20 aa, Homo sapiens
MPQTCDGTGQMHLGRLDLGE

SEQ ID NO: 29701 - protein, 449 aa, Homo sapiens
LILFCQSTSPSLPLDKDPMPNPRPGKPSAPSLALGPSPGASPSWRAAPKASDLLGARGPGGTFQGRDLRGGAHASSSSLNPMPPSQLQLPTLPLVMVAPSGARLGPLPHLQALLQDRPHFMHQLSTVDAHARTPVLQVHPLESPAMISLTPPTTATGVFSLKARPGLPPGINVASLEWVSREPALLCTFPNPSAPRKDSTLSAVPQSSYPLLANGVCKWPGCEKVFEEPEDFLKHCQADHLLDEKGRAQCLLQREMVQSLEQQLVLEKEKLSAMQAHLAGKMALTKASSVASSDKGSCCIVAAGSQGPVVPAWSGPREAPDSLFAVRRHLWGSHGNSTFPEFLHNMDYFKFHNMRPPFTYATLIRWAILEAPEKQRTLNEIYHWFTRMFAFFRNHPATWKNAIRHNLSLHKCFVRVESEKGAVWTVDELEFRKKRSQRPSRCSNPTPGP

SEQ ID NO: 29702 - protein, 24 aa, Homo sapiens
ITRRLLGRSGFSFQVTIRKAKFAV

SEQ ID NO: 29703 - protein, 1657 aa, Homo sapiens
MPENLRKNLTELLRAALKIRICLEKQPDPFAPRQKKTLQEVQEDFVFSKYRHRALLLPELLEGVLQILICCLQSAASNPFYFSQAMDLVQEFIQHHGFNLFETAVLQMEWLVLRDGVPPEASEHLKALINSVMKIMSTVKKVKSEQLHHSMCTRKRHRRCEYSHFMHHHRDLSGLLVSAFKNQVSKNPFEETADGDVYYPERCCCIAVCAHQCLRLLQQASLSSTCVQILSGVHNIGICCCMDPKSVIIPLLHAFKLPALKNFQQHILNILNKLILDQLGGAEISPKIKKAACNICTVDSDQLAQLEETLQGNLCDAELSSSLSSPSYRFQGILPSSGSEDLLWKWDALKAYQNFVFEEDRLHSIQIANHICNLIQKGNIVVQWKLYNYIFNPVLQRGVELAHHCQHLSVTSAQSHVCSHHNQCLPQDVLQIYVKTLPILLKSRVIRDLFLSCNGVSQIIELNCLNGIRSHSLKAFETLIISLGEQQKDASVPDIDGIDIEQKELSSVHVGTSFHHQQAYSDSPQSLSKFYAGLKEAYPKRRKTVNQDVHINTINLFLCVAFLCVSKEAESDRESANDSEDTSGYDSTASEPLSHMLPCISLESLVLPSPEHMHQAADIWSMCRWIYMLSSVFQKQFYRLGGFRVCHKLIFMIIQKLFRSHKEEQGKKEGDTSVNENQDLNRISQPKRTMKEDLLSLAIKSDPIPSELGSLKKSADSLGKLELQHISSINVEEVSATEAAPEEAKLFTSQESETSLQSIRLLEALLAICLHGARTSQQKMELELPNQNLSVESILFEMRDHLSQSKVIETQLAKPLFDALLRVALGNYSADFEHNDAMTEKSHQSAEELSSQPGDFSEEAEDSQCCSFKLLVEEEGYEADSESNPEDGETQDDGVDLKSETEGFSASSSPNDLLENLTQGEIIYPEICMLELNLLSASKAKLDVLAHVFESFLKIIRQKEKNVFLLMQQGTVKNLLGGFLSILTQDDSDFQACQRVLVDLLVSLMSSRTCSEELTLLLRIFLEKSPCTKILLLGILKIIESDTTMSPSQYLTFPLLHAPNLSNGVSSQKYPGILNSKAMGLLRRARVSRSKKEADRESFPHRLLSSWHIAPVHLPLLGQNCWPHLSEGFSVSLWFNVECIHEAESTTEKGKKIKKRNKSLILPDSSFDGTESDRPEGAEYINPGERLIEEGCIHIISLGSKALMIQVWADPHNATLIFRVCMDSNDDMKAVLLAQVESQENIFLPSKWQHLVLTYLQQPQGKRRIHGKISIWVSGQRKPDVTLDFMLPRKTSLSSDSNKTFCMIGHCLSSQEEFLQLAGKWDLGNLLLFNGAKVGSQEAFYLYACGPNHTSVMPCKYGKPVNDYSKYINKEILRCEQIRELFMTKKDVDIGLLIESLSVVYTTYCPAQYTIYEPVIRLKGQMKTQLSQRPFSSKEVQSILLEPHHLKNLQPTEYKTIQGILHEIGGTGIFVFLFARVVELSSCEETQALALRVILSLIKYNQQRVHELENCNGLSMIHQVLIKQKCIVGFYILKTLLEGCCGEDIIYMNENGEFKLDVDSNAIIQDVKLLEELLLDWKIWSKAEQGVWETLLAALEVLIRADHHQQMFNIKQLLKAQVVHHFLLTCQVLQEYKEGQLTPMPREMARSFRRKCGQSCT

SEQ ID NO: 29704 - protein, 568 aa, Homo sapiens [sequence omitted]

SEQ ID NO: 29705 - protein, 395 aa, Homo sapiens
MYPKYDRITNHIHVRISHLPLVEELRSLRQLHLNQLIRTSGVVTSCTGVLPQLSMVKYNCNKCNFVLGPFCQSQNQEVKPGSCPECQSAGPFEVNMEETIYQNYQRIRIQESPGKVAAGRLPRSKDAILLADLVDSCKPGDEIELTGIYHNNYDGSLNTANGFPVFATVILANHVAKKDNKVAVGELTDEDVKMITSLSKDQQIGEKIFASIAPSIYGHEDIKRGLALALFGGEPKNPGGKHKVRGDINVLLCGDPGTAKSQFLKYIEKVSSRAIFTTGQGASAVGLTAYVQRHPVSREWTLEAGALVLADRGVCLIDEFDKMNDQDRTSIHEAMEQQSISISKAGIVTSLQARCTVIAAANPIGRDAGPLRGGQPRQTPPQQQGGGGAGQWQRC

SEQ ID NO: 29706 - protein, 669 aa, Homo sapiens
MKKLSLLNGGLQEEELSTSLKRSVYIESRIGTSTSFDSGIAGLSSISQCTSSSQLDETSHRWAQPDTAPLPVPANIRFSIWISFFEIYNELLYDLLEPPSQQRKRQTLRLCEDQNGNPYVKDLNWIHVQDAEEAWKLLKVGRKNQSFASTHLNQNSSRSHSIFSIRILHLQGEGDIVPKISELSLCDLAGSERCKDQKSGERLKEAGNINTSLHTLGRCIAALRQNQQNRSKQNLVPFRDSKLTRVFQGFFTGRGRSCMIVNVNPCASTYDETLHVAKFSAIASQLVHAPPMQLGFPSLHSFIKEHSLQVSPSLEKGAKADTGLDDDIENEADISMYGKEELLQVVEAMKTLLLKERQEKLQLEMHLRDEICNEMVEQMQQREQWCSEHLDTQKELLEEMYEEKLNILKESLTSFYQEEIQERDEKIEELEALLQEARQQSVAHQQSGSELALRRSQRLAASASTQQLQEVKAKLQQCKAELNSTTEELHKYQKMLEPPPSAKPFTIDVDKKLEEGQKNIRLLRTELQKLGESLQSAERACCHSTGAGKLRQALTTCDDILIKQDQTLAELQNNMVLVKLDLRKKAACIAEQYHTVLKLQGQVSAKKRLGTNQENQQPNQQPPGKKPFLRNLLPRTPTCQSSTDCSPYARILRSRRSPLLKSGPFGKKY

SEQ ID NO: 29707 - protein, 22 aa, Homo sapiens
LEQKIEVHFMPPFESLALSPRL

SEQ ID NO: 29708 - protein, 37 aa, Homo sapiens
RGDTMIMKALFSWSRLIHCVPDVLTSAISPNVGNSTA

SEQ ID NO: 29709 - protein, 7 aa, Homo sapiens
THTRTCL

SEQ ID NO: 29710 - protein, 11 aa, Homo sapiens
RGSKVRVPVRE

SEQ ID NO: 29711 - protein, 57 aa, Homo sapiens
TKLKTTQEICWKENDRGKYMNVAIFRPHAALDGCAALCSLCWENCLAVPPSLAKPCV

SEQ ID NO: 29712 - protein, 115 aa, Homo sapiens
TMTCKMSQLERNIETIINTFHQYSVKLGHPDTLNQGEFKELVRKDLQNFLKKENKNEKVIEHIMEDLDTNADKQLSFEEFIMLMARLTWASHEKMHEGDEGPGHHHKPGLGEGTP

SEQ ID NO: 29713 - protein, 33 aa, Homo sapiens
VDSLIPWIKQHTILMSDKTFPQNPVELKVKSRT

SEQ ID NO: 29714 - protein, 6 aa, Homo sapiens
IMPQPH

SEQ ID NO: 29715 - protein, 35 aa, Homo sapiens
KALGWRGRLAAFLVVGPSEQSSWFWRWLRRLDCGV

SEQ ID NO: 29716 - protein, 8 aa, Homo sapiens
LTVVLEET

SEQ ID NO: 29717 - protein, 111 aa, Homo sapiens
LGAGAGSGAASLSAPALLEPHEPLSPWRARGRGTGARRLLLVKYPSRPETRAASRPREVYSPAPFLKGRNRSFSQRTAFLSAFLALSEIGGPQGWQARLAGLLIFFLISNF

SEQ ID NO: 29718 - protein, 95 aa, Homo sapiens [sequence omitted]

SEQ ID NO: 29719 - protein, 16 aa, Homo sapiens
MDIFTYFRSDTKAGSY

SEQ ID NO: 29720 - protein, 17 aa, Homo sapiens
MCMKCTRVFAWLRCLNA

SEQ ID NO: 29721 - protein, 33 aa, Homo sapiens
MKQYSWTEDTEFLIPVGLVLFSVSYNCTWRNRY

SEQ ID NO: 29722 - protein, 48 aa, Homo sapiens
VVTIPLARRSLTQCWIGSASCLTSAQDFRASWCSTALVGALALASPHS

SEQ ID NO: 29723 - protein, 76 aa, Homo sapiens
KIIIVDATLMSTEMTTLKDVNLDIAKETMKAGIRTIVASLLVEVEEVVIKANTGFTTVLHIVVHMGRVTEGKEPGV

SEQ ID NO: 29724 - protein, 66 aa, Homo sapiens
KIIIVDATLMSTEMTTLKDVNLDIAKETMKAGIRTIVASLLVEVEEVVIKANTGFTTVLHIVVHMG

SEQ ID NO: 29725 - protein, 105 aa, Homo sapiens
IWPLLRKKKQLTKHCDNKDYSVCSLQDIHDDIENEFFVFTRYSYMRRSILNSLNIFSSVGPAWQDLSEGMMERLLDYMIWIKPWVEAILPWLNLPGMSLRVKRWQ

SEQ ID NO: 29726 - protein, 792 aa, Homo sapiens
IFCIHQIFLYEKIYFKQSKYFFFCWTSMAGFKRGYDGKIAGLYDLDKTLGRGHFAVVKLARHVFTGEKVAVKVIDKTKLDTLATGHLFQEVRCMKLVQHPNIVRLYEVIDTQTKLYLILELGDGGDMFDYIMKHEEGLNEDLAKKYFAQIVHAISYCHKLHVVHRDLKPENVVFFEKQGLVKLTDFGFSNKFQPGKKLTTSCGSLAYSAPEILLGDEYDAPAVDIWSLGVILFMLVCGQPPFQEANDSETLTMIMDCKYTVPSHVSKECKDLITRMLQRDPKRRASLEEIENHPWLQGVDPSPATKYNIPLVSYKNLSEEEHNSIIQRMVLGDIADRDAIVEALETNRYNHITATYFLLAERILREKQEKEIQTRSASPSNIKAQFRQSWPTKIDVPQDLEDDLTATPLSHATVPQSPARAADSVLNGHRSKGLCDSAKKDDLPELAGPALSTVPPASLKPTASGRKCLFRVEEDEEEDEEDKKPMSLSTQVVLRRKPSVTNRLTSRKSAPVLNQIFEEGESDDEFDMDENLPPKLSRLKMNIASPGTVHKRYHRRKSQGRGSSCSSSETSDDDSESRRRLDKDSGFTYSWHRRDSSEGPPGSEGDGGGQSKPSNASGGVDKASPSENNAGGGSPSSGSGGNPTNTSGTTRRCAGPSNSMQLASRSAGELVESLKLMSLCLGSQLHGSTKYIIDPQNGLSFSSVKVQEKSTWKMCISSTGNAGQVPAVGGIKFFSDHMADTTTELERIKSKNLKNNVLQLPLCEKTISVNIQRNPKEGLLCASSPASCCHVI

SEQ ID NO: 29727 - protein, 42 aa, Homo sapiens
IQKKMQNWCPSWSEDETLCARNVNNEVHFFENNNFSMERFMT

SEQ ID NO: 29728 - protein, 27 aa, Homo sapiens
MQGVPLKHSGHLMKTNLRKGKYLQAKS

SEQ ID NO: 29729 - protein, 41 aa, Homo sapiens [sequence omitted]

SEQ ID NO: 29730 - protein, 122 aa, Homo sapiens
KLTVSNVLKEIKILNIFGVIKGFVEPDHYVVVGAQRDAWGPGAAKSGVGTALLLKLAQMFSDMVLKDGFQPSRSIIFASWSAGDFGSVGATEWLEGYLSSLHLKAFTYINLDKAVLGKYPFH

SEQ ID NO: 29731 - protein, 13 aa, Homo sapiens
KSLLRKAMRILCS

SEQ ID NO: 29732 - protein, 62 aa, Homo sapiens
LIGLVQDNRMNEGDAYYLLKDFALTIKSISVSLRELCENEDDNVVLAFEQLSTTFWEKLNKV

SEQ ID NO: 29733 - protein, 53 aa, Homo sapiens
IAEPFDGTNTARAVHEKQKFDMIKDQFLKSWHRLKNKRDLNSILPVRAAVLKR

SEQ ID NO: 29734 - protein, 12 aa, Homo sapiens
LETRLLVTAKER

SEQ ID NO: 29735 - protein, 19 aa, Homo sapiens
ILEGMRPTSTMIIFICLFV

SEQ ID NO: 29736 - protein, 446 aa, Homo sapiens
LELKVKLERNLQTRKKRSLESDSQDLGLEMPQPSVSGMDPPFGDAFRSHTFSEQTLMSTDLLANSSDPDFMYELDREMNYQQNPRDNFLSLEDCKDIENLESFTDVLDNEGALTSNWEQWDTYCEDLTKYTKLTSCDIWGTKEVDYLGLDDFSSPYQDEEVISKTPTLAQLNSEDSQSVSDSLYYPDSLFSVKQNPLPSSFPGKKITSRAAAPVCSSKTLQAEVPLSDCVQKASKPTSSTQIMVKTNMYHNEKVNFHVECKDYVKKAKVKINPVQQSRPLLSQIHTDAAKENTCYCGAVAKRQEKKGMEPLQGHATPALPFKETQELLLSPLPQEGPGSLAAGESSSLSASTSVSDSSQKKEEHNYSLFVSDNLGEQPTKCSPEEDEEDEEDVDDEDHDEGFGSEHELSENEEEEEEEEDYEDDKDDDISDTFSEPGIIMLASLPD

SEQ ID NO: 29737 - protein, 668 aa, Homo sapiens
LELKVKLERNLQTRKKRSLESDSQDLGLEMPQPSVSGMDPPFGDAFRSHTFSEQTLMSTDLLANSSDPDFMYELDREMNYQQNPRDNFLSLEDCKDIENLESFTDVLDNEGALTSNWEQWDTYCEDLTKYTKLTSCDIWGTKEVDYLGLDDFSSPYQDEEVISKTPTLAQLNSEDSQSVSDSLYYPDSLFSVKQNPLPSSFPGKKITSRAAAPVCSSKTLQAEVPLSDCVQKASKPTSSTQIMVKTNMYHNEKVNFHVECKDYVKKAKVKINPVQQSRPLLSQIHTDAAKENTCYCGAVAKRQEKKGMEPLQGHATPALPFKETQELLLSPLPQEGPGSLAAGESSSLSASTSVSDSSQKKEEHNYSLFVSDNLGEQPTKCSPEEDEEDEEDVDDEDHDEGFGSEHELSENEEEEEEEEDYEDDKDDDISDTFSEPGYENDSVEDLKEVTSISSRKRGKRRYFWEYSEQLTPSQQERMLRPSEWNRDTLPSNMYQKNGLHHGKYAVKKSRRTDVEDLTPNPKKLLQIGNELRKLNKVISDLTPVSELPLTARPRSRKEKNKLASRACRLKKKAQYEANKVKLWGLNTEYDNLLFVINSIKQEIVNRVQNPRDERGPNMGQKLEILIKDTLGLPVAGQTSEFVNQVLEKTAEGNPTGGLVGLRIPTSKV

SEQ ID NO: 29738 - protein, 80 aa, Homo sapiens
LNDFLNDQNRDKNSIYSGLEAFGDVKLEDTYFDRDVEKAFMKASSELFSQKTKASLLVSNQNGNMYTSSVYGSLASVLAQ

SEQ ID NO: 29739 - protein, 36 aa, Homo sapiens
TPEKTSAPTGVFHRVAGSWKSQERLRALDLSFSAHG

SEQ ID NO: 29740 - protein, 48 aa, Homo sapiens
TRRFVGHTKDVLSVAFSSDNRQIVSGSRDKTIKLWNTLGVCKYTVQVK

SEQ ID NO: 29741 - protein, 74 aa, Homo sapiens
LLLLLGGAGYFLWQQQEEKKTQFRKKKREQELREMAWSTMKQEQSTRVKLLEELSKFPFPQRPRHVFLSLLYAP

SEQ ID NO: 29742 - protein, 58 aa, Homo sapiens
LPQRPLRDLGADIATAKRFARQEGPLYVLLSRSWTRRARPRSSEQKSQKRKDWKWQTI

SEQ ID NO: 29743 - protein, 118 aa, Homo sapiens
RQQPFRGECPCTARVPRKRPPSKTTPSFQIYLMTSLKMERQPRRKCHCRSASVTCPTGTAPSPPTQQAPLPTQQIQKLPSPLRSLTSAAWPPRMRVWMTPAQHLPGTPWEKAKSQSHT

SEQ ID NO: 29744 - protein, 25 aa, Homo sapiens
MYIVKIVILKKLNIEKIKESSKGSG

SEQ ID NO: 29745 - protein, 768 aa, Homo sapiens
ILYSSPDVKELWLETLQGQRHSHTGVKSTPGQSAAILMKLRSSHNASKTLNANNMETLIECQSEGDIKEHPLLASCESEDSICQLIEVKKRKKVLSWPFLMRRLSPASDFSGALETDLKASLFDQPLSIICGDSDTLPRPIQDILTILCLKGPSTEGIFRRAANEKARKELKEELNSGDAVDLERLPVHLLAVVFKDFLRSIPRKLLSSDLFEEWMGALEMQDEEDRIEALKQVADKLPRPNLLLLKHLVYVLHLISKNSEVNRMDSSNLAICIGPNMLTLENDQSLSFEAQKDLNNKVKTLVEFLIDNCFEIFGENIPVHSSITSDDSLEHTDSSDVSTLQNDSAYDSNDPDVESNSSSGISSPSRQPQVPMATAAGLDSAGPQDAREVSPEPIVSTVARLKSSLAQPDRRYSEPSMPSSQECLESRVTNQTLTKSEGDFPVPRVGSRLESEEAEDPFPEEVFPAVQGKTKRPVDLKIKNLAPGSVLPRALVLKAFSSSSLDASSDSSPVASPSSPKRNFFSRHQSFTTKTEKGKPSREIKKHSMSFTFAPHKKVLTKNLSAGSGKSQDFTRDHVPRGVRKESQLAGRIVQENGCETHNQTARGFCLRPHALSVDDVFQGADWERPGSPPSYEEAMQGPAARLVASESQTVGSMTVGSMRARMLEAHCLLPPLPPAHHVEDSRHRGSKEPLPGHGLSPLPERWKQSRTVHASGDSLGHVSGPGRPELLPLRTVSESVQRNKRDCLVRRCSQPVFEADQFQYAKESYI

SEQ ID NO: 29746 - protein, 62 aa, Homo sapiens
RLAPKPSQVILHPHPGFSCTCSQSVFLKVILTLLLISYLHEYFSLFSVSLKIELPTPKYEIG

SEQ ID NO: 29747 - protein, 51 aa, Homo sapiens
MNESSCCSASSPAFGVVSILDFHHSNRDSRIHPGGPGTTGAPLRLFPSSIF

SEQ ID NO: 29748 - protein, 14 aa, Homo sapiens
IAYILYRKKIFWKI

SEQ ID NO: 29749 - protein, 16 aa, Homo sapiens
MGLVQFVKIHDFVHLC

SEQ ID NO: 29750 - protein, 70 aa, Homo sapiens
KLASEILMQNWDAAMEDLTRLKETIDNNSVSSPLQSLQQRTWLIHWSLFVFFNHPKGRDNIIDLFLYQPQ

SEQ ID NO: 29751 - protein, 17 aa, Homo sapiens
RLRTHTSLSRALTPLLP

SEQ ID NO: 29752 - protein, 9 aa, Homo sapiens
KRWAFRRGL

SEQ ID NO: 29753 - protein, 20 aa, Homo sapiens
ITIKIQFMCGEDASNAMPVS

SEQ ID NO: 29754 - protein, 62 aa, Homo sapiens
IQFTSSRKYLTPALDPAALLRAEEGGNPMCLLPELPQPIFPQLGTWKKEPRTRLCFSFGPSW

SEQ ID NO: 29755 - protein, 24 aa, Homo sapiens
VASATRGKRLLPSLNWTPRAPESA

SEQ ID NO: 29756 - protein, 36 aa, Homo sapiens
KSGGLQRPMLVLAKSRRSKGAAMMLAVATVDFSQEH

SEQ ID NO: 29757 - protein, 45 aa, Homo sapiens
IFVQTSTFHQCCQHVLLVWKTAHLRILTIRTHISLQEASWPSQTT

SEQ ID NO: 29758 - protein, 15 aa, Homo sapiens
ILWIEKLLELLYKVF

SEQ ID NO: 29759 - protein, 29 aa, Homo sapiens
RLSPTPLQNGFSDTPGSEGVGSPGCARSK

SEQ ID NO: 29760 - protein, 17 aa, Homo sapiens
LRTAACASPAAGWEEGH

SEQ ID NO: 29761 - protein, 47 aa, Homo sapiens
MRRRRRRRKQARRPRRRRARQARLTTGATSGRRPQEPAAGGDSTAEL

SEQ ID NO: 29762 - protein, 61 aa, Homo sapiens
LGPDFGHLHDHSAHHHPSVGRPGPAIDQEASLRPGALPVTCIPRTLSSIPRPAPRGQELCP

SEQ ID NO: 29763 - protein, 17 aa, Homo sapiens
KDEDRIFTNLYGRHDWR

SEQ ID NO: 29764 - protein, 17 aa, Homo sapiens
LEDRNKIENENIVKSFR

SEQ ID NO: 29765 - protein, 64 aa, Homo sapiens
IKENSEKIKVNKTLPYLVSNVIELLDVDPNDQEEDGANIDLDSQRKGKCAVIKTSTRQVSVAQQ

SEQ ID NO: 29766 - protein, 17 aa, Homo sapiens
LLGSKVSNFTVFNALSI

SEQ ID NO: 29767 - protein, 43 aa, Homo sapiens
KRGRRGGLLARHSLLSGILQRWRRRRQPGSCCCPTGRVVAPTG

SEQ ID NO: 29768 - protein, 59 aa, Homo sapiens
LWAEHSGNHTLRNCGGSGLQPPKAPCQTKHACHTCYNSLDGFFCLQLFTHSKYFARYRK

SEQ ID NO: 29769 - protein, 76 aa, Homo sapiens
MEHILYATTDQEGITQLGHIREEPPAVPAPIMTSVWTISVLTDSETKSNVTTLLYIQAGPYIHVTDTLLSFSLLIQ

SEQ ID NO: 29770 - protein, 67 aa, Homo sapiens
LKGSGNLEAIHIIKKLGGSLADSYLDEGFLLDKKIGVNQPKRIENAKILIANTGMDTDKIKVCNSTF

SEQ ID NO: 29771 - protein, 54 aa, Homo sapiens
LSCDYFAVNQSRLLVCDLGNPMKAGASLWGGLRFTVPHLRDTKKTIQFDFQILR

SEQ ID NO: 29772 - protein, 28 aa, Homo sapiens
VGSGLQDAPRKSAAALCRLSPTPAASSG

SEQ ID NO: 29773 - protein, 458 aa, Homo sapiens
IERDSLTLRASGCSWVQREPPALLLSRLPQPLASAWVRRGGIKPRSESGSFARGALGLCLPRGASGRHPALSRSSTPMIDTLRPVPFASEMAISKTVAWLNEQLELGNERLLLMDCRPQELYESSHIESAINVAIPGIMLRRLQKGNLPVRALFTRGEDRDRFTRRCGTDTVVLYDESSSDWNENTGGESVLGLLLKKLKDEGCRAFYLEGGFSKFQAEFSLHCETNLDGSCSSSSPPLPVLGLGGLRISSDSSSDIESDLDRDPNSATDSDGSPLSNSQPSFPVEILPFLYLGCAKDSTNLDVLEEFGIKYILNVTPNLPNLFENAGEFKYKQIPISDHWSQNLSQFFPEAISFIDEARGKNCGVLVHCLAGISRSVTVTVAYLMQKLNLSMNDAYDIVKMKKSNISPNFNFMGQLLDFERTLGLSSPCDNRVPAQQLYFTTPSNQNVYQVDSLQST

SEQ ID NO: 29774 - protein, 46 aa, Homo sapiens
LTNRLSMVLHSRINCTSVCAKSTRHWRNSRNNTWYRHMDLSGKRSR

SEQ ID NO: 29775 - protein, 42 aa, Homo sapiens
ICQHGKPLLRMHPSLETPLKGWSLGDHIKRKMPTTSTTSTRF

SEQ ID NO: 29776 - protein, 211 aa, Homo sapiens
VPAAARAGAIAPCEVTVPAQNTGLGPEKTSFFQALGITTKISRGTIEILSDVQLIKTGDKVGASEATLLNMLNISPFSFGLVIQQVFDNGSIYNPEVLDITEETLHSRFLEGVRNVASVCLQIGYPTVASVPHSIINGYKRVLALSVETDYTFPLAEKVKAFLADPSAFVAAAPVAAATTAAPAAAAAPAKVEAKEESEESDEDMGFGLFD

SEQ ID NO: 29777 - protein, 37 aa, Homo sapiens
IMADPRDKALQDYRKKLLEHKEIDGRLKECECTFLSI

SEQ ID NO: 29778 - protein, 23 aa, Homo sapiens
TTPSQTTDLSGSQPPKTPSGRKY

SEQ ID NO: 29779 - protein, 37 aa, Homo sapiens
MGPLVLTEVLFNEKIREQIKKYRRHFLRVSKVLWIHK

SEQ ID NO: 29780 - protein, 21 aa, Homo sapiens
LTFHLIFGARTSREIHVQAAF

SEQ ID NO: 29781 - protein, 50 aa, Homo sapiens
VRRFSDIQIRRLKRLGIEKTDPTTLTDEEINRFARLDIDPETITWQRGPV

SEQ ID NO: 29782 - protein, 76 aa, Homo sapiens
RGALGSARGDSAAPPAGASLPGELGRSLSWCPPRASEGSVSEKKQKQKQKQAARRKPRNNRTGAVLHCFGFFEGAG

SEQ ID NO: 29783 - protein, 63 aa, Homo sapiens
LETETSGPERPPEKPRKHDSGAADLERVTDYAEEKEIQSSNLETAMSVIGDRRSREQKAKQER

SEQ ID NO: 29784 - protein, 24 aa, Homo sapiens
KQHHGGLKMPHLDWMNSKFCLLAF

SEQ ID NO: 29785 - protein, 53 aa, Homo sapiens
KSPSSTTQEDPSQSPKEEPTEKLENHVEAKPICKDHAPEHHSSPGQESQAPGG

SEQ ID NO: 29786 - protein, 22 aa, Homo sapiens
LTFETPLVCHPHALLGRGAGRS

SEQ ID NO: 29787 - protein, 12 aa, Homo sapiens
LRLMLGQPRSQM

SEQ ID NO: 29788 - protein, 63 aa, Homo sapiens
LTRASSAGESPAPPAPSSSSSSSSTSGFWGITVLSRQQNEPAGGPLQQVPPRVWTAGQGRPVL

SEQ ID NO: 29789 - protein, 107 aa, Homo sapiens
IGGTVLNISKSGSCSAIRIGHVGMQIEHIIENIVAVTKGLSEKLPEKWESVKLLFVKTEKSAALPIFSSFVSNWDEATKRSLLNKKKKVSRILNTYRMNNEGCKFSH

SEQ ID NO: 29790 - protein, 21 aa, Homo sapiens
MAAVQAAEVKVDGSEPKLSKK

SEQ ID NO: 29791 - protein, 182 aa, Homo sapiens
MHRMLAQHRDVCRSEQAQLGKGERISAPEREIYCHYCNQMIPENKYFHHMGKCCPDSEFKKHFPVGNPEILPSSLPSQAAENQTSTMEKDVRPKTRSINRFPLHSESSSKKAPRSKNKTLDPLLMSEPKPRTSSPRGDKAAYDILRRCSQCGILLPLPILNQHQEKCRWLASSKGKQVRNFS

SEQ ID NO: 29792 - protein, 9 aa, Homo sapiens
ICPRLKNSS

SEQ ID NO: 29793 - protein, 53 aa, Homo sapiens
ICDLARLGPPEPMMAECLEKFTVSLNHKLDSHAELLDATQHTLQQQIQTLVKE

SEQ ID NO: 29794 - protein, 16 aa, Homo sapiens
LPSSSEPFYLVSRVMM

SEQ ID NO: 29795 - protein, 31 aa, Homo sapiens
VVSGGCCGSDYKQYVFGGWAWAWWCISDTQR

SEQ ID NO: 29796 - protein, 657 aa, Homo sapiens
RGVPAMSPDALNQFPAAPIPTLSGFSMTLPTPVSQPTVIPSGPAGSMPLSLGQPVMGINLVGPVGGAAAQASSGFIPTYPANQVVKPEEDDFQDFQDASKSGSLDDSFSDFQELPASSKTSNSQHGNSAPSLLMPLPGTKALPSMDKYAVFKGIAADKSSENTVPPGDPGDKYSAFRELEQTAENKPLGESFAEFRSAGTDDGFTDFKTADSVSPLEPPTKDKTFPPSFPSGTIQQKQQTQVKNPLNLADLDMFSSVNCSSEKPLSFSAVFSTSKSVSTPQSTGSAATMTALAATKTSSLADDFGEFSLFGEYSGLAPVGEQDDFADFMAFSNSSISSEQKPDDKYDALKEEASPVPLTSNVGSTVKGGQNSTAASTKYDVFRQLSLEGSGLGVEDLKDNTPSGKSDDDFADFHSSKFSSINSDKSLGEKAVAFRHTKEDSASVKSLDLPSIGGSSVGKEDSEDALSVQFDMKLADVGGDLKHVMSDSSLDLPTVSGQHPPAAGSGSPSATSILQKKETSFGSSENITMTSLSKVTTFVSEDALPETTFPALASFKDTIPQTSEQKEYENRDYKDFTKQDLPTAERSQEATCPSPASSGASQETPNECSDDFGEFQSEKPKISKFDFLVATSQSKMKSSEEMIKSELATFDLSVQGE

SEQ ID NO: 29797 - protein, 36 aa, Homo sapiens [sequence omitted]

SEQ ID NO: 29798 - protein, 49 aa, Homo sapiens
LDTADAAALEEFHVSPETAGPAPGRIAVASLPLLHPGGCSPLPPAPGAP

SEQ ID NO: 29799 - protein, 130 aa, Homo sapiens
VVLLGGYEISLIFFFPGRKFLERFFQIFLHFLLEDRLTFFGLLYYSPPPVGPAGRVEETVAEADSVQRDSAFCPWGSNPSLAPGSYGACTFKRYSGILWGPGHRRKTAQKLCHCWNGTLLLPRASPDSVL

SEQ ID NO: 29800 - protein, 48 aa, Homo sapiens
LARRSSRGTTRTSVWASRHPRRCGEPQKKEGEPGVPARVPTTSCPACI

SEQ ID NO: 29801 - protein, 23 aa, Homo sapiens
LRPTTCSATRASARSSTATGRKA

SEQ ID NO: 29802 - protein, 27 aa, Homo sapiens
IKPEAVKMVQVWRDISLTKFNVSYLKR

SEQ ID NO: 29803 - protein, 1110 aa, Homo sapiens
RSLQEPRHQPPTMGSKERFHWQSHNVKQSGVDDMVLLPQITEDAIAANLRKRFMDDYIFTYIGSVLISVNPFKQMPYFTDREIDLYQGAAQYENPPHIYALTDNMYRNMLIDCENQCVIISGESGAGKTVAAKYIMGYISKVSGGGEKVQHVKDIILQSNPLLEAFGNAKTVRNNNSSRFGKYFEIQFSRGGEPDGGKISNFLLEKSRVVMQNENERNFHIYYQLLEGASQEQRQNLGLMTPDYYYYLNQSDTYQVDGTDDRSDFGETLSAMQVIGIPPSIQQLVLQLVAGILHLGNISFCEDGNYARVESVDLLAFPAYLLGIDSGRLQEKLTSRKMDSRWGGRSESINVTLNVEQAAYTRDALAKGLYARLFDFLVEAINRAMQKPQEEYSIGVLDIYGFEIFQKNGFEQFCINFVNEKLQQIFIELTLKAEQEEYVQEGIRWTPIQYFNNKVVCDLIENKLSPPGIMSVLDDVCATMHATGGGADQTLLQKLQAAVGTHEHFNSWSAGFVIHHYAGKVSYDVSGFCERNRDVLFSDLIELMQTSEQAFLRMLFPEKLDGDKKGRPSTAGSKIKKQANDLVATLMRCTPHYIRCIKPNETKRPRDWEENRVKHQVEYLGLKENIRVRRAGFAYRRQFAKFLQRYAILTPETWPRWRGDERQGVQHLLRAVNMEPDQYQMGSTKVFVKNPESLFLLEEVRERKFDGFARTIQKAWRRHVAVRKYEEMREEASNILLNKKERRRNSINRNFVGDYLGLEERPELRQFLGKRERVDFADSVTKYDRRFKPIKRDLILTPKCVYVIGREKVKKGPEKGQVCEVLKKKVDIQALRGVSLSTRQDDFFILQEDAADSFLESVFKTEFVSLLCKRFEEATRRPLPLTFSDTLQFRVKKEGWGGGGTRSVTFSRGFGDLAVLKVGGRTLTVSVGDGLPKSSKPTRKGMAKGKPRRSSQAPTRAAPAPPRGMDRNGVPPSARGGPLPLEIMSGGGTHRPPRGPPSTSLGASRRPRARPPSEHNTEFLNVPDQGMAGMQRKRSVGQRPVPGVGRPKPQPRTHGPRCRALYQYVGQDVDELSFNVNEVIEILMEDPSGWWKGRLHGQEGLFPGNYVEKI

SEQ ID NO: 29804 - protein, 58 aa, Homo sapiens
LTRSQAGLMASLKLMLSAGPFVGWVSQMIPFSDWPRPMASSQRTFDWRESQMWNICHK

SEQ ID NO: 29805 - protein, 8 aa, Homo sapiens
ISMAPTQG

SEQ ID NO: 29806 - protein, 32 aa, Homo sapiens
LNSFRMMLPSRPTLLTSRRREASPATLFSSSR

SEQ ID NO: 29807 - protein, 512 aa, Homo sapiens
RGRDRSTWLRHRRREAADPGRVRHPRRPGAMAALMTPGTGAPPAPGDFSGEGSQGLPDPSPEPKQLPELIRMKRDGGRLSEADIRGFVAAVVNGSAQGAQIGAMLMAIRLRGMDLEETSVLTQALAQSGQQLEWPEAWRQQLVDKHSTGGVGDKVSLVLAPALAACGCKVPMISGRGLGHTGGTLDKLESIPGFNVIQSPEQMQVLLDQAGCCIVGQSEQLVPADGILYAARDVTATVDSLPLITASILSKKLVEGLSALVVDVKFGGAAVFPNQEQARELAKTLVGVGASLGLRVAAALTAMDKPLGRCVGHALEVEEALLCMDGAGPPDLRDLVTTLGGALLWLSGHAGTQAQGAARVAAALDDGSALGRFERMLAAQGVDPGLARALCSGSPAERRQLLPRAREQEELLAPADGTVELVRALPLALVLHELGAGRSRAGEPLRLGVGAELLVDVGQRLRRGTPWLRVHRDGPALSGPQSRALQEALVLSDRAPFAAPSPFAELVLPPQQ

SEQ ID NO: 29808 - protein, 16 aa, Homo sapiens
LTAAAPLRSSRLQREH

SEQ ID NO: 29809 - protein, 52 aa, Homo sapiens
IREYTDVYPEIIERACFVLEKKFGIQLKEIDKEEHLYILISTPESLAGILGT

SEQ ID NO: 29810 - protein, 8 aa, Homo sapiens
VEVLPLSC

SEQ ID NO: 29811 - protein, 13 aa, Homo sapiens
LSMRRKSKRCAGS

SEQ ID NO: 29812 - protein, 35 aa, Homo sapiens
VPSSGSQRSVMPSREGRTHWWRAALPMTWTRWPGC

SEQ ID NO: 29813 - protein, 590 aa, Homo sapiens
MPGSDPERRAQNLLEQFQKQEVETDNGLPNTISFSLEEEEELEGGESAEFTCFSEDLVAEQLTYMDAQLFKKVVPHHCLGCIWSRRDKKENKHLAPTIRATISQFNTLTKCVVSTILGGKELKTQQRAKIIEKWINIAHECRLLKNFSSLRAIVSALQSNSIYRLKKTWAAVPRDRMLMFEELSDIFSDHNNHLTSRELLMKEGTSKFANLDSSVKENQKRTQRRLQLQKDMGVMQGTVPYLGTFLTDLTMLDTALQDYIEGGLINFEKRRREFEVIAQIKLLQSACNSYCMTPDQKFIQWFQRQQLLTEEESYALSCEIEAAADASTTSPKPRKSMVKRLSLLFLGSDMITSPTPTKEQPKSTASGSSGESMDSVSVSSCESNHSEAEEGSITPMDTPDEPQKKLSESSSSCSSIHSMDTNSSGMSSLINPLSSPPSCNNNPKIHKRSVSVTSITSTVLPPVYNQQNEDTCIIRISVEDNNGNMYKSIMLTSQDKTPAVIQRAMLKHNLDSDPAEEYELVQVISEDKELVIPDSANVFYAMNSQVNFDFILRKKNSMEEQVKLRSRTSLTLPRTAKRGCWSNRHSKITL

SEQ ID NO: 29814 - protein, 9 aa, Homo sapiens
MRMAALLPQ

SEQ ID NO: 29815 - protein, 449 aa, Homo sapiens
MQNQRVLVTSVPHAMTGSDVLQWIVQRLWISSLEAQNLGNFIVRYGYIYPLQDPKNLILKPDGSLYRFQTPYFWPTQQWPAEDTDYAIYLAKRNIKKKGILEEYEKENYNFLNQKMNYKWDFVIMQAKEQYRAGKERNKADRYALDCQEKAYWLVHRCPPGMDNVLDYGLDRVTNPNEVKKQTVVAVKKEIMYYQQALMRSTVKSSVSLGGIVKYSEQFSSNDAIMSGCLPSNPWITDDTQFWDLNAKLVEIPTKMRVERWAFNFSELIRDPKGRQSFQYFLKKEFSGENLGFWEACEDLKYGDQSKVKEKAEEIYKLFLAPGARRWINIDGKTMDITVKGLKHPHRYVLDAAQTHIYMLMKKDSYARYLKSPIYKDMLAKAIEPQETTKKSSTLPFMRRHLRSSPSPVILRQLEEEAKAREAANTVDITQVMSKLDRRSQLQKELPPK

SEQ ID NO: 29816 - protein, 82 aa, Homo sapiens
MAETYDFLFKFLVIGSAGTGKSCLLHQFIENKCEFPAVVLGTLSCVYAHGVGWWAAGGEGRAGHRYKSSAGFLVLALSYVLY

SEQ ID NO: 29817 - protein, 585 aa, Homo sapiens
MLLSQGLGVLRVAWDSRACSPALRALLRKLGGLFLPPEASLSLDSSEGLLARAVVQAVIEQLLVSGQPLLIFLEEPPGALGPRLSALGQAWVGFVVQAVQVGIVPDALLVPVAVTYDLVPDAPCDIDHASAPLGLWTGALAVLRSLWSRWGCSHRICSRVHLAQPFSLQEYIVSARSCWGGRQTLEQLLQPIVLGQCTAVPDTEKEQEWTPITGPLLALKEEDQLLVRRLSCHVLSASVGSSAVMSTAIMATLLLFKHQKGVFLSQLLGEFSWLTEEILLRGFDVGFSGQLRSLLQHSLSLLRAHVALLRIRQGDLLVVPQPGPGLTHLAQLSAELLPVFLSEAVGACAVRGLLAGRVPPQGPWELQGILLLSQNELYRQILLLMHLLPQDLLLLKPCQSSYCYCQEVLDRLIQCGLLVAEETPGSRPACDTGRQRLSRKLLWKPSGDFTDSDSDDFGEADGRYFRLSQQSHCPDFFLFLCRLLSPLLKAFAQAAAFLRQGQLPDTELGYTEQLFQFLQATAQEEGIFECADPKLAISAVWTFRDLGVLQQTPSPAGPRLHLSPTFASLDNQEKLEQFIRQFICS

SEQ ID NO: 29818 - protein, 85 aa, Homo sapiens
MTLLFGGKGKGSPSHRKHIGSINPNCNVLEVIKDGYENARRLCDLYYINSPELELEELNECNESHYGTPCQQRCLPPYSSSCHAG

SEQ ID NO: 29819 - protein, 531 aa, Homo sapiens
MALFQCDHVQYTLVPVSGWQELETAFLEHKEQFHYFILINCGANVDLLDILQPDEDTIFFVCDTHRPVNVVNVYNDTQIKLLIKQDDDLEVPAYEDIFRDEEEDEEHSGNDSDGSEPSEKRTRLEEEIVEQTMRRRQRREWEARRRDILFDYEQYEYHGTSSAMVMFELAWMLSKDLNDMLWWAIVGLTDQWVQDKITQMKYVTDVGVLQRHVSRHNHRNEDEENTLSVDCTRISFEYDLRLVLYQHWSLHDSLCNTSYTAARFKLWSVHGQKRLQEFLADMGLPLKQVKQKFQAMDISLKENLREMIEESANKFGMKDMRVQTFSIHFGFKHKFLASDVVFATMSLMESPEKDGSGTDHFIQALDSLSRSNLDKLYHGLELAKKQLRATQQTIASCLCTNLVISQGPFLYCSLMEGTPDVMLFSRPASLSLLSKHLLKSFVCSTKNRRCKLLPLVMAAPLSMEHGTVTVVGIPPETDSSDRKNSFFGRAFEKAAESTSSRMLHNHFDLSVIELKAEDRSKFLDALISLLS

SEQ ID NO: 29820 - protein, 223 aa, Homo sapiens
MYKLLNGELKQLYTAITRARVNLWIFDENREKRAPAFKYFIRRDFVQVVKTDENKDFDDSMFVKTSTPAEWIAQGDYYAKHQCWKVAAKCYQKGGAFEKEKLALAHDTALSMKSKKVSPKEKQLEYLELAKTYLECKEPTLSLKCLSYAKEFQLSAQLCERLGKIRDAAYFYKRSQCYKDAFRCFEQIQEFDLALKMYCQEELFEEAAIAVENRIKGSPSEPH

SEQ ID NO: 29821 - protein, 237 aa, Homo sapiens
MNENIDILETAIKQAAEQGARIIVTPEDALYGWKFTRETVFPYLEDIPDPQVNWIPCQDPHRFGHTPVQARLSCLAKDNSIYVLANLGDKKPCNSRDSTCPPNGYFQYNTNVVYNTEGKLVARYHKYHLYSEPQFNVPEKPELVTFNTAFGRFGIFTCFDIFFYDPGVTLVKDFHVDTILFPTAWMNVLPLLTAIEFHSAWAMGMGVNLLVANTHHVSLNMTVVFMHQMVPKCIIMT

SEQ ID NO: 29822 - protein, 322 aa, Homo sapiens
MDIAYYQALSAERLQTDAAKIHPSTSASQEFYEPGLEPSATAKLGDLQRSWETLKNVISEKQRTLYEALERQQKYQDSLQSISTKMEAIELKLSESPEPGRSPESQMAEHQSFLQALMDEILMLQDEINELQSSLAEELVSESCEADPAEQLALQSTLTVLAERMSTIRMKASGKRQLLEEKLNDQLEEQRQEQALQRYRCEADELDSWLLSTKATLDTALSPPKEPMDMEAQLMDCQNMLVEIEQKVVALSELSVHNENLLLEGKAHTKDEAEQLAGKLRRLKGSLLELQRALHDKQLNMQVRVPAAGPQLKVGTLFTCSF

SEQ ID NO: 29823 - protein, 120 aa, Homo sapiens
MLYEKFSPAGPILSIRVCRDMITRRSLGYAYVNFQQPADAERALDTMNFDVIKGKPVRIMWSQRDPSLRKSGVGNIFIKNLDKSIDNKALYDTFSAFGNILSCKVSQKCPIHMFTLLSYI

SEQ ID NO: 29824 - protein, 541 aa, Homo sapiens
MNIEGAWKRGYTGKNIVVTILDDGIERTHPDLMQNYDALASCDVNGNDLDPMPRYDASNENKHGTRCAGEVAAAANNSHCTVGIAFNAKIGGVRMLDGDVTDMVEAKSVSFNPQHVHIYSASWGPDDDGKTVDGPAPLTRQAFENGVRMGRRGLGSVFVWASGNGGRSKDHCSCDGYTNSIYTISISSTAESGKKPWYLEECSSTLATTYSSGESYDKKIITTDLRQRCTDNHTGTSASAPMAAGIIALALEANPFLTWRDVQHVIVRTSRAGHLNANDWKTNAAGFKVSHLYGFGLMDAEAMVMEAEKWTTVPRQHVCVESTDRQIKTIRPNSAVRSIYKASGCSDNPNRHVNYLEHVVVRITITHPRRGDLAIYLTSPSGTRSQLLANRLFDHSMEGFKNWEFMTIHCWGERAAGDWVLEVYDTPSQLRNFKTPGKLKEWSLVLYGTSVQPYSPTNEFPKVERFRYSRVEDPTDDYGTEDYAGELASSGTQAKKRQLMHHPTTWENRMEWNGMKWNGMKWNGMEWNGMEWNRIESNRIE

SEQ ID NO: 29825 - protein, 525 aa, Homo sapiens
MKLEAIDKKNPYLICPATIGDVKGDEVHITFDGWSGAFDYWCKYDSRDIFPAGWCRLTGDVLQPPGTSVPIVKNIAKTESSPSEASQHSMQSPQKTTLILPTQQVRRSSRIKPPGPTAVPKRSSSVKNITPRKKGPNSGKKEKPLPVICSTSAASLKSLTRDRGMLYKDVASGPCKIVMSTVCVYVNKHGNFGPHLDPKRIQQLPDHFGPGPVNVVLRRIVQACVDCALETKTVFGYLKPDNRGGEVITASFDGETHSIQLPPVNSASFALRFLENFCHSLQCDNLLSSQPFSSSRGHTHSSAEHDKNQSAKEDVTERQSTKRSPQQTVPYVVPLSPKLPKTKEYASEGEPLFAGGSAIPKEENLSEDSKSSSLNSGNYLNPACRNPMYIHTSVSQDFSRSVPGTTSSPLVGDISPKSSPHEVKFQMQRKSEAPSYIAVPDPSVLKQGFSKDPSTWSVDEVIQFMKHTDPQISGPLADLFRQHEIDGKALFLLKSDVMMKYMGLKLGPALKLCYYIEKLKEGKYS

SEQ ID NO: 29826 - protein, 17 aa, Homo sapiens
LANKFPFLSKRAIKSFQ

SEQ ID NO: 29827 - protein, 53 aa, Homo sapiens [sequence omitted]

SEQ ID NO: 29828 - protein, 27 aa, Homo sapiens
LKYYNSDVHRAAFVLPEFARKALNDVS

SEQ ID NO: 29829 - protein, 24 aa, Homo sapiens
LGAAMTQPPPEKTPAKKHVRLQER

SEQ ID NO: 29830 - protein, 19 aa, Homo sapiens
MSMWAGPDHWRFRPRRKRM

SEQ ID NO: 29831 - protein, 14 aa, Homo sapiens
KSHLQDGHEPQAAL

SEQ ID NO: 29832 - protein, 65 aa, Homo sapiens
VQDPGLHVWRVEKLKPVPVAQENQGVFFSGDSYLVLHNGPEEVSHLHLWIGQQSSRDEQGACAGQ

SEQ ID NO: 29833 - protein, 16 aa, Homo sapiens
IKEMHGLRIFTSVPKR

SEQ ID NO: 29834 - protein, 32 aa, Homo sapiens
MVDVLDSGDSAHLTLMKRPELGVTLTKLHCWS

SEQ ID NO: 29835 - protein, 25 aa, Homo sapiens
VRKILFNLGSPSYGNLLKIHISLLE

SEQ ID NO: 29836 - protein, 28 aa, Homo sapiens
KASLLVSNQNGNMYTSSVYGSLASVLAQ

SEQ ID NO: 29837 - protein, 7 aa, Homo sapiens
VGSPPWD

SEQ ID NO: 29838 - protein, 77 aa, Homo sapiens
LYLQTRGSRFIKFQEMKMQEHSDQVPVGNIPRSITVLVEGENTRIAQPGDHVSVTGIFLPILRTGFRQVVQVRKSLT

SEQ ID NO: 29839 - protein, 19 aa, Homo sapiens
MSSYAEALREVSCSCFSLS

SEQ ID NO: 29840 - protein, 11 aa, Homo sapiens
MTKAGKFQVRT

SEQ ID NO: 29841 - protein, 299 aa, Homo sapiens
MGTLLISKIREEYPDRIMNTFSVVPSPKVSDTVVEPYNATLSVHQLVENTDETYCIDNEALYDICFRTLKLTTPTYGDLNHLVSATMSGVTTCLRFPGQLNADLRKLAVNMVPFPRLHFFMPGFAPLTSRGSQQYRALTVPELTQQMFDAKNMMAACDPRHGRYLTVAAVFRGRMSMKEVDEQMLNVQNKNSSYFVEWIPNNVKTAVCDIPPRGLKMSATFIGNSTAIQELFKRISEQFTAMFRRKAFLHWYTGEGMDEMEFTEAESNMNDLVSEYQQYQDATAEEEGEFEEEAEEEVA

SEQ ID NO: 29842 - protein, 61 aa, Homo sapiens
LDRAKMAVIEYKGNCLPPLPLPRRDSHLTLLNQLLQGLRQDLRQSQEASNHSSHTAQTPGI

SEQ ID NO: 29843 - protein, 14 aa, Homo sapiens
KLFLTACETRASWM

SEQ ID NO: 29844 - protein, 7 aa, Homo sapiens
IINNVCH

SEQ ID NO: 29845 - protein, 57 aa, Homo sapiens
LWKFETSKYYATVIDAPGHRDFIKNMITGTSQADCAVLIFAAGVGEFEAGISKNGQT

SEQ ID NO: 29846 - protein, 10 aa, Homo sapiens
IFPSAPDVKA

SEQ ID NO: 29847 - protein, 277 aa, Homo sapiens
IANVAHTFVVDVAQGTQVTGRKADVIKAAHLCAEAALRLVKPGNQNTQVTEAWNKVAHSFNCTPIEGMLSHQLKQHVIDGEKTIIQNPTDQQKKDHEKAEFEVHEVYAVDVLVSSGEGKAKDAGQRTTIYKRDPSKQYGLKMKTSRAFFSEVERRFDAMPFTLRAFEDEKKARMGVVECAKHELLQPFNVLYEKEGEFVAQFKFTVLLMPNGPMRITSGPFEPDLYKSEMEVQDAELKALLQSSASRKTQKKKKKKASKTAENATSGETLEENEAGD

SEQ ID NO: 29848 - protein, 16 aa, Homo sapiens
ILSKFMPKVMSSQLDS

SEQ ID NO: 29849 - protein, 12 aa, Homo sapiens
VLCVCVSERASE

SEQ ID NO: 29850 - protein, 19 aa, Homo sapiens
LCVHCHRLPGSYDSTSSDR

SEQ ID NO: 29851 - protein, 9 aa, Homo sapiens
LLSSSRGPS

SEQ ID NO: 29852 - protein, 41 aa, Homo sapiens
KLALRYAGRQTEALKCVAQASKNRSLADFEKVSMILGWYGM

SEQ ID NO: 29853 - protein, 306 aa, Homo sapiens
MLKDEVRTLTYRNSMFHNRHLFKDKVVLDVGSGTGILCMFAAKAGARKVIGIECSSISDYAVKIVKANKLDHVVTIIKGKVEEVELPVEKVDIIISEWMGYCLFYESMLNTVLYARDKWLAPDGLIFPDRATLYVTAIEDRQYKDYKIHWWENVYGFDMSCIKDVAIKEPLVDVVDPKQLVTNACLIKEVDIYTVKVEDLTFTSPFCLQVKRNDYVHALVAYFNIEFTRCHKRTGFSTSPESPYTHWKQTVFYMEDYLTVKTGEEIFGTIGMRPNAKNNRDLDFTIDLDFKGQLCELSCSTDYRMR

SEQ ID NO: 29854 - protein, 12 aa, Homo sapiens
ILNVEWAKPSTN

SEQ ID NO: 29855 - protein, 25 aa, Homo sapiens
KYMPSVKVSPSGQTGPGATWFLQLC

SEQ ID NO: 29856 - protein, 10 aa, Homo sapiens
IPPDTLLFPA

SEQ ID NO: 29857 - protein, 8 aa, Homo sapiens
KRLFCVLL

SEQ ID NO: 29858 - protein, 9 aa, Homo sapiens
KRLASVPGC

SEQ ID NO: 29859 - protein, 32 aa, Homo sapiens
IALSRRVEKHWRLIGWGQIRRGVTIKPTVDDD

SEQ ID NO: 29860 - protein, 15 aa, Homo sapiens
LQPVQLSTWLTLGTQ

SEQ ID NO: 29861 - protein, 29 aa, Homo sapiens
MGRRPARCYRYCKNKPYPKSRFCRGVPGK

SEQ ID NO: 29862 - protein, 56 aa, Homo sapiens
MTEQAISFAKDFLAGGIAAAISKTAVAPIERVKLLLQGGMSQRFKRPREDHLSSGV

SEQ ID NO: 29863 - protein, 402 aa, Homo sapiens
MSILKIHAREIFDSRGNPTVEVDLFTSKGLFRAAVPSGASTGIYEALELRDNDKTRYMGKGVSKAVEHINKTIAPALVSKKLNVTEQEKIDKLMIEMDGTENKSKFGANAILGVSLAVCKAGAVEKGVPLYRHIADLAGNSEVILPVPAFNVINGGSHAGNKLAMQEFMILPVGAANFREAMRIGAEVYHNLKNVIKEKYGKDATNVGDEGGFAPNILENKEGLELLKTAIGKAGYTDKVVIGMDVAASEFFRSGKYDLDFKSPDDPSRYISPDQLADLYKSFIKDYPVVSIEDPFDQDDWGAWQKFTASAGIQVVGDDLTVTNPKRIAKAVNEKSCNCLLLKVNQIGSVTESLQACKLAQANGWGVMVSHRSGETEDTFIADLVVGLCTGQVRMSVSSFLL

SEQ ID NO: 29864 - protein, 364 aa, Homo sapiens; identical to SEQ ID NO: 19306

SEQ ID NO: 29865 - protein, 348 aa, Homo sapiens
MLLQLTVIKVMTTRILSVKTEFHAKEQYRDVIKILLESAKVDSKLICMFQNSDKLLSHMAAQCLALLLYFQLREKITLSNSWIAFCQKNLSEYSESNKAIYCLWTLTAIIKEIFKDSCSQKTEILKQFLTHFDTIFEVFYNSLFSQHFENCRDTSKIVNILMCFLDLLELLIASRIHLKLHFTCQRILFLKPSCMLEVITWPIQAFVKRKVIIFLKKCLLCKVGEDLCRGSVPALMPPDHHVAVDMLALANAVLQAVNSGLLKTLSVYEKHSFFGGDEVQPECELITSPDHVILRAASLVIMKSLEIKFQNYSSASEVKGNSPNSFCMQCVIIYLSTVIHNYQISGLV

SEQ ID NO: 29866 - protein, 376 aa, Homo sapiens
MVHKRSHTGERPFQCNQCGASFTQKGNLLRHIKLHTGEKPFKCHLCNYACQRRDALTGHLRTHSVEKPYKCEFCGRSYKQRSSLEEHKERCRTFLQSTDPGDTASAEARHIKAEMGSERALVLDRLASNVAKRKSSMPQKFIGEKRHCFDVNYNSSYMYEKESELIQTRMMDQAINNAISYLGAEALRPLVQTPPAPTSEMVPVISSMYPIALTRAEMSNGAPQELEKKSIHLPEKSVPSERGLSPNNSGHDSTDTDSNHEERQNHIYQQNHMVLSRARNGMPLLKEVPRSYELLKPPPICPRDSVKVINKEGEVMDVYRCDHCRVLFLDYVMFTIHMGCHGFRDPFECNMCGYRSHDRYEFSSHIARGEHRALLK

SEQ ID NO: 29867 - protein, 211 aa, Homo sapiens
MEHQAVVGAVKSLQALGEVIEAELRSTKHWELTAEGEEIAREGSHEARVFRSIPPEGLAQSELMRLPSGKVGFSKAMSNKWIRVDKSAADGPRVFRVVDSMEDEVQRRLQLVRGGQAEKLGEKERSELRKRKLLAEVTLKTYWVSKGSAFSTSISKQETELSPEMISSGSWRDRPFKPYNFLAHGVLPDSGHLHPLLKVRSQFRQIFLEMG

SEQ ID NO: 29868 - protein, 125 aa, Homo sapiens
MFLEYQNQISRQNKLIQEKKDNLLKLIAEVKGKKQELEVLTANIQDLKEEYSRKKETISTANKANAERLKRLQKSADLYKDRLGLEIRKIYGEKLQFIFTNIDPKNPESPFMFSLHLNEARDYEE

SEQ ID NO: 29869 - protein, 174 aa, Homo sapiens
MGAPGSSYWTGSLFVYNITTNKYKAFLDKQNQVKFGSYLGYSVGAGHFRSQHTTEVVGGAPQHEQIGKAYIFSIDEKELNILHEMKGKKLGSYFGASVCAVDLNADGFSDLLVGAPMQSTIREEGRVFVYINSGSGAVMNAMETNLVGSDKYAARFGESIVNLGDIDNDGFEGN

SEQ ID NO: 29870 - protein, 519 aa, Homo sapiens [sequence omitted]

SEQ ID NO: 29871 - protein, 77 aa, Homo sapiens
MPKAGYSSILNDFVESNFFVIDGDSLLVTCLGVKSFKWGQNLHFFYLVECYLVDLLSNGGQFTIVFFKMEFRSFCTG

SEQ ID NO: 29872 - protein, 61 aa, Homo sapiens
MGTLAFDEYGRPFLIIKDQDRKSRLMGLEALKSHIMAAKAVANTMRTSLGPNGKSPPFRVF

SEQ ID NO: 29873 - protein, 305 aa, Homo sapiens
MPLGADCARYTTLSLLRRARMHIQKLEDQEQRARQLKERLRSKQQSLQRQLEQLRGLAGAAERERLRADSLDSSGLSSERSDSDQGECPEAEGLCGPRGEPGLLTGPLPAQRSWRWMWRAWCLGVRPSCCGASSPARSTATRTAAAPGYDVPHPGRASALYSCQAHLPGRSPPQAFRAARSHLLEWTKRTLVWEQVLPKHPAAGCQAGPLEGKGQDSSGPPWTPAGQAAWARAQAFGSAAPKGTGSLLGLFPSWTRPPAFASHKLYSIFIKSLFHNFPSIVLPNENGGTPNHRPTGRGNNISSHH

SEQ ID NO: 29874 - protein, 289 aa, Homo sapiens
MQEYVQAPRRPVHKRYRGFSRKCVTLNDFQMLNQPCIFQILNQCGIKSTCFMAQVVEMDENNGLLLLELNPPNPWDLQPRSPEELAFGEVQITYLTHACMDLKLGDKRMVFDPWLIGPAFARGWWLLHEPPSDWLERLCQADLIYISHLHSDHLSYPTLKKLAGRRPDIPIYVGNTERPVFWNLNQSGVQLTNINVVPFGIWQQVDKNLRFMILMDGVHPEMDTCIIVEYKGHKILNIVDCTRPNGGRLPMKVALMMSDFAGGASGFPMTFSGGKFTVYIHCLPECVTT

SEQ ID NO: 29875 - protein, 46 aa, Homo sapiens
LRRLSLLRTWPTFPRTLPISRGPHKTGKGRKGQRRQQLNECLQQKA

SEQ ID NO: 29876 - protein, 490 aa, Homo sapiens
IKEFRATLECHPLTMTDPIEEHRICVCVRKRPLNKQELAKKEIDVISIPSKCLLLVHEPKLKVDLTKYLENQAFCFDFAFDETASNEVVYRFTARPLVQTIFEGGKATCFAYGQTGSGKTHTMGGDLSGKAQNASKGIYAMASRDVFLLKNQPCYRKLGLEVYVTFFEIYNGKLFDLLNKKAKLRVLEDGKQQVQVVGLQEHLVNSADDVIKMIDMGSACRTSGQTFANSNSSRSHACFQIILRAKGRMHGKFSLVDLAGNERGADTSSADRQTRMEGAEINKSLLALKECIRALGQNKAHTPFRESKLTQVLRDSFIGENSRTCMIATISPGISSCEYTLNTLRYADRVKELSPHSGPSGEQLIQMETEEMEACSNGALIPGNLSKEEEELSSQMSSFNEAMTQIRELEEKAMEELKEIIQQGPDWLELSEMTEQPDYDLETFVNKAESALAQQAKHFSALRDVIKALRLAMQLEEQASRQISSKKRPQ

SEQ ID NO: 29877 - protein, 393 aa, Homo sapiens
LKMAEESSCTRDCMSFSVLNWDQVSRLHEVLTEVVPIHGRGNFPTLEITLKDIVQTVRSRLEEAGIKVHDVRLNGSAAGHVLVKDNGLGCKDLDLIFHVALPTEAEFQLVRDVVLCSLLNFLPEGVNKLKISPVTLKEAYVQKLVKVCTDTDRWSLISLSNKNGKNVELKFVDSIRRQFEFSVDSFQIILDSLLFFYDCSNNPISEHFHPTVIGESMYGDFEEAFDHLQNRLIATKNPEEIRGGGLLKYSNLLVRDFRPTDQEEIKTLERYMCSRFFIDFPDILEQQRKLETYLQNHFAEEERSKYDYLMILRRVVNESTVCLMGHERRQTLNLISLLALRVLAEQNIIPSATNVTCYYQPAPYVSDGNFSNYYVAHPPVTYSQPYPTWLPCN

SEQ ID NO: 29878 - protein, 136 aa, Homo sapiens
IKSDAPDTLLLEKHADYIASYGSKKDDYEYCMSEYLRMSGIYWGLTVMDLMGQLHRMNREEILAFIKSCQHECGGISASIGHDPHLLYTLSAVQILTLYDSINVIDVNKVVEYVKGLQKEDGSFAGDIWGPTKQLV

SEQ ID NO: 29879 - protein, 20 aa, Homo sapiens
ICTQSFLLSHSAILTTLKKK

SEQ ID NO: 29880 - protein, 7 aa, Homo sapiens
KKQKKRD

SEQ ID NO: 29881 - protein, 26 aa, Homo sapiens
TSSMRAKALHSCSPLHTQELMACWLC

SEQ ID NO: 29882 - protein, 19 aa, Homo sapiens
LAAWEVAGAAFAFARDSSN

SEQ ID NO: 29883 - protein, 53 aa, Homo sapiens
LPHCDRIIAVFGSLRSRRHRLGALSWPLFPQMSDSDSRTEKRKKKRPNGKATF

SEQ ID NO: 29884 - protein, 30 aa, Homo sapiens
LIPTELRREALALQGSLEFDDAGGEGNYTR

SEQ ID NO: 29885 - protein, 20 aa, Homo sapiens
IVKIRKRMAAETQTLNFGPE

SEQ ID NO: 29886 - protein, 26 aa, Homo sapiens
LATPRCERGRECSRRRRGRVHQPPGQ

SEQ ID NO: 29887 - protein, 64 aa, Homo sapiens
VRAARAWELTPLTDPQSQSQRCEETSTLPGPQGQRGSASEAPFSVPIPIQALLALTTPRDSSGS

SEQ ID NO: 29888 - protein, 12 aa, Homo sapiens
MRNSSHTSRKEE

SEQ ID NO: 29889 - protein, 27 aa, Homo sapiens
IWIKPWVEAILPWLNLPGMSLRVKRWQ

SEQ ID NO: 29890 - protein, 20 aa, Homo sapiens
KKRKTKRRILIRFNFLGPMA

SEQ ID NO: 29891 - protein, 886 aa, Homo sapiens
IQIMAENSVLTSTTGRTSLADSSIFDSKVTEISKENLLIGSTSYVEEEMPQIETRVILVQEAGKQEELIKALKDIKVGFVKMESVEEFEGLDSPEFENVFVVTDFQDSVFNDLYKADCRVIGPPVVLNCSQKGEPLPFSCRPLYCTSMMNLVLCFTGFRKKEELVRLVTLVHHMGGVIRKDFNSKVTHLVANCTQGEKFRVAVSLGTPIMKPEWIYKAWERRNEQDFYAAVDDFRNEFKVPPFQDCILSFLGFSDEEKTNMEEMTEMQGGKYLPLGDERCTHLVVEENIVKDLPFEPSKKLYVVKQEWFWGSIQMDARAGETMYLYEKANTPELKKSVSMLSLNTPNSNRKRRRLKETLAQLSRETDVSPFPPRKRPSAEHSLSIGSLLDISNTPESSINYGDTPKSCTKSSKSSTPVPSKQSARWQVAKELYQTESNYVNILATIIQLFQVPLEEEGQRGGPILAPEEIKTIFGSIPDIFDVHTKIKDDLEDLIVNWDESKSIGDIFLKYSKDLVKTYPPFVNFFEMSKETIIKCEKQKPRFHAFLKINQAKPECGRQSLVELLIRPVQRLPSVALLLNDLKKHTADENPDKSTLEKAIGSLKEVMTHINEDKRKTEAQKQIFDVVYEVDGCPANLLSSHRSLVQRVETISLGEHPCDRGEQVTLFLFNDCLEIARKRHKVIGTFRSPHGQTRPPASLKHIHLMPLSQIKKVLDIRETEDCHNAFALLVRPPTEQANVLLSFQMTSDELPKENWLKMLCRHVANTICKADAENLIYTADPESFEVNTKDMDSTLSRASRAIKKTSKKVTRAFSFSKTPKRALRRALMTSHGSVEGRSPSSNDKHVMSRLSSTSSLAGIPSPSLVSLPSFFERRSHTLSRSTTHLI

SEQ ID NO: 29892 - protein, 19 aa, Homo sapiens
LVLKSLNPEAVSPASKMQL

SEQ ID NO: 29893 - protein, 44 aa, Homo sapiens
LILVGGYGTRLRPLTLSTPKPLVDFCNKPILLHQVEALAAAWTT

SEQ ID NO: 29894 - protein, 35 aa, Homo sapiens
MVFYLPNICLSQSNKSSACLSEWQAQRCRETCIIF

SEQ ID NO: 29895 - protein, 11 aa, Homo sapiens
VVSASSPGAAV

SEQ ID NO: 29896 - protein, 131 aa, Homo sapiens
IHFGMKGFIMINPLEYKYKNGASPVLEVQLTKDLICFFDSSVELRNSMESQQRIRMMKELDVCSPEFSFLRAESEVKKQKGRMLGDVLMDQNVLPGVGNIIKNEALFDSGLHPAVKIQCSRVKKILLSLAT

SEQ ID NO: 29897 - protein, 45 aa, Homo sapiens
RSPGVHVQPWTLNPGVRGPWALGERFRALGDSGEACSAVCVMWPS

SEQ ID NO: 29898 - protein, 10 aa, Homo sapiens
LLIIFSLKLG

SEQ ID NO: 29899 - protein, 398 aa, Homo sapiens
KNTLERTHSMKDKAGQKCKPIDVFDFPDNSDVSSIGRLGENEKDEETYETFDPPLHSTAIYADEEEFSKHCGLSLSSTPPGKEAKRSSDTSGNEASEIESVKISAKKPGRKLRPISDDSESIEESDTRRKVKSAEKISTQRHEVIRTTASSELSEKPAESVTSKKTGPLSAQPSVEKENLAIESQSKTQKKGKISHDKRKKSRSKAIGSDTSDIVHIWCPEGMKTSDIKELNIVLPEFEKTHLEHQQRIESKVCKAAIATFYVNVKEQFIKMLKESQMLTNLKRKNAKMISDIEKKRQRMIEVQDELLRLEPQLKQLQTKYDELKERKSSLRNAAYFLSNLKQLYQDYSDVQAQEPNVKETYDSSSLPALLFKARTLLGAESHLRNINHQLEKLLDQG

SEQ ID NO: 29900 - protein, 9 aa, Homo sapiens
RLVLQRNHP

SEQ ID NO: 29901 - protein, 64 aa, Homo sapiens
KANQPPHGVPQLSLYEHFNSPHPTPAPADISQKQVHRPLQTPDLSGFYSLTSGSMGQLPHTVSW

SEQ ID NO: 29902 - protein, 20 aa, Homo sapiens
ILAVSWRGLDIFDSFPPRLN

SEQ ID NO: 29903 - protein, 12 aa, Homo sapiens
LFAASYSSIYPP

SEQ ID NO: 29904 - protein, 27 aa, Homo sapiens
LSFRGSLPFLCCRSVTLALSPCLDHFL

SEQ ID NO: 29905 - protein, 32 aa, Homo sapiens
LVSGHILSNSPVAAVMCSSMGTHLSPFKGTLL

SEQ ID NO: 29906 - protein, 237 aa, Homo sapiens
TAGGVMTALIKRNSTIPTKQTQIFTTYSDNQPGVLIQVYEGERAMTKDNNLLGRFELSGIPPAPRGVPQIEVTFDIDANGILNVTATDKSTGKANKITITNDKGRLSKEEIERMVQEAEKYKAEDEVQRERVSAKNALESYAFNMKSAVEDEGLKGKISEADKKKVLDKCQEVISWLDANTLAEKDEFEHKRKELEQVCNPIISGLYQGAGGPGPGGFGAQGPKGGSGSGPTIEEVD

SEQ ID NO: 29907 - protein, 31 aa, Homo sapiens
IRRTGWHCLKRRLLGDCAARWIHCPRRFNQL

SEQ ID NO: 29908 - protein, 77 aa, Homo sapiens
RNRQTMGSIEQTTEILLCLSPVEVASLKEGINFFRNKSTGKDYVLYKNKSRLRACKNMCKHQGGLFIKDIEDLAGSC

SEQ ID NO: 29909 - protein, 30 aa, Homo sapiens
VQAPRRPVHKRYRGFSRKLLKWMKTTDFCF

SEQ ID NO: 29910 - protein, 32 aa, Homo sapiens
TGTPFSTNSVLGGWGPSRDHSATGVGVAAGDR

SEQ ID NO: 29911 - protein, 56 aa, Homo sapiens
LEMTPQRGDVYTCHVEHPSLQSPITVEWRKGILSFCYYGPTRQRAPSDPFLPISYP

SEQ ID NO: 29912 - protein, 36 aa, Homo sapiens
LLFRFRAYSLLAVSCHHVGNRSCRDSHPSAGGEIPG

SEQ ID NO: 29913 - protein, 49 aa, Homo sapiens
VLYRLIALQVCNKKWPPTKLHCKKWEKNRMERVKKLKRQSLKNLSWKKY

SEQ ID NO: 29914 - protein, 99 aa, Homo sapiens
RQSPPPQSDFPLPPKGKHEERQDEHGYISRCFTRKYTLPPGVDPTQVSSSLSPEGTLTVEAPMPKLATQSNEITIPVTFESRAQLGGPEAAKSDETAAK

SEQ ID NO: 29915 - protein, 6 aa, Homo sapiens
LSSGPR

SEQ ID NO: 29916 - protein, 60 aa, Homo sapiens [sequence omitted]

SEQ ID NO: 29917 - protein, 635 aa, Homo sapiens
MLLECFININYIKKEEGRRFLSCLFNWNINFIKMIHGTIKNQLQGLQKSLMVYIAEIYFRAWKKASGKILEAIENDCIQDFMFHGIHLPRRSPVHSKVREVLSYFHHQKKVRQGVEEMLYRLYKPILWRGLKARNSEVRSNAALLFVEAFPIRDPNLHAIEMDSEIQKQFEELYSLLEDPYPMVRSTGILGVCKITSKYWEMMPPTILIDLLKKVTGELAFDTSSADVRCSVFKCLPMILDNKLSHPLLEQLLPALRYSLHDNSEKVRVAFVDMLLKIKAVRAAKFWKICPMEHILVRLETDSRPVSRRLVSLIFNSFLPVNQPEEVWCERCVTLVQMNHAAARRFYQYAHEHTACTNIAKLIHVIRHCLNACIQRAVREPPEDEEEEDGREKENVTVLDKTLSVNDVACMAGLLEIIVILWKSIDRSMENNKEAKLYTINKFASVLPEYLKVFKDDRCKIPLFMLMSFMPASAVPPFSCGVISTLRSREEGAVDKSYCTLLDCLCSWGQVGHILELVDNWLPTEHAQAKSNTASKGRVQIHDTRPVKPELALVYIEYLLTHPKNRECLLSAPRKKLNHLLKALETSKADLESLLQTPGGKPRGFSEAAAPRAFGLHCRLSIHLQHKVCLLLALY

SEQ ID NO: 29918 - protein, 28 aa, Homo sapiens
MQTCSILSSWTTHSKKNASTRRTGTILH

SEQ ID NO: 29919 - protein, 9 aa, Homo sapiens
MLTEKQHLL

SEQ ID NO: 29920 - protein, 464 aa, Homo sapiens
RWYKLKSKPGKKDKERGEIEVDIQFMRNNMTASMFDLSMKDKSRNPFGKLKDKIKGKNKDSGSDTASAIIPSTTPSVDSDDESVVKDKKKKSKIKTLLSKSNLQKTPLSQSMSVLPTSKPEKVLLRPGDFQSQWDEDDNEDESSSASDVMSHKRTASTDLKQLNQVNFTLPKKEGLSFLGGLRSKNDVLSRSNVCINGNHVYLEQPEAKGEIKDSSPSSSPSPKGFRKKHLFSSTENLAAGSWKEPAEGGGLSSDRQLSESSTKDSLKSMTLPSYRPAPLVSGDLRENMAPANSEATKEAKESKKPESRRSSLLSLMTGKKDVAKGSEGENPLTVPGREKEGMLMGVKPGEDASGPAEDLVRRSEKDTAAVVSRQGSSLNLFEDVQITEPEAEPESKSEPRPPISSPRAPQTRAVKPRLHPVKPMNAMATKVANCSLGTATIISENLNNEVMMKVCPLRSWCVR

SEQ ID NO: 29921 - protein, 24 aa, Homo sapiens
KRGKSLSKSKKLENMRYISSLVNT

SEQ ID NO: 29922 - protein, 11 aa, Homo sapiens
LSYSGFYAPAL

SEQ ID NO: 29923 - protein, 24 aa, Homo sapiens
RGTIMASPPCTGPAERAALLWLRC

SEQ ID NO: 29924 - protein, 35 aa, Homo sapiens
IVRVVGLEKFRGGGGAGQDKDSGTGPWACRSPCRQ

SEQ ID NO: 29925 - protein, 7 aa, Homo sapiens
MGKQIKY

SEQ ID NO: 29926 - protein, 17 aa, Homo sapiens
RKAGQLIVVCCHPFMSR

SEQ ID NO: 29927 - protein, 18 aa, Homo sapiens
MRLPFARCRETSRSHTRK

SEQ ID NO: 29928 - protein, 20 aa, Homo sapiens
IRPRRPLPSASHPGHSSPPP

SEQ ID NO: 29929 - protein, 27 aa, Homo sapiens
IQFLCGPLLQHMPKLFLTACETRASWM

SEQ ID NO: 29930 - protein, 6 aa, Homo sapiens
IQRITR

SEQ ID NO: 29931 - protein, 462 aa, Homo sapiens
KKDGINLPLRLPPGPIFCPLLQEMNLLPNIESPVTRQEKMATVWDEAEQDGIGEEVLKMSTEEIIQRTRLLDSEIKIMKSEVLRVTHELQAMKDKIKENSEKIKVNKTLPYLVSNVIELLDVDPNDQEEDGANIDLDSQRKGKCAVIKTSTRQTYFLPVIGLVDAEKLKPGDLVGVNKDSYLILETLPTEYDSRVKAMEVDERPTEQYSDIGGLDKQIQELVEAIVLPMNHKEKFENLGIQPPKGVLMYGPPGTGKTLLARACAAQTKATFLKLAGPQLVQMFIGDGAKLVRDAFALAKEKAPSIIFIDELDAIGTKRFDSEKAGDREVQRTMLELLNQLDGFQPNTQVKVIAATNRVDILDPALLRSGRLDRKIEFPMPNEEARARIMQIHSRKMNVSPDVNYEELARCTDDFNGAQCKAVCVEAGMIALRRGATELTHEDYMEGILEVQAKKKANLQYYA

SEQ ID NO: 29932 - protein, 91 aa, Homo sapiens
VLASLGPPRPATSVNSTEETATTVVAAASSTSIPSSEATTPTPGASPPAPEMERPPAPESVGTEEMPEDGEPDAAELRRRRLQKLESPVAH

SEQ ID NO: 29933 - protein, 32 aa, Homo sapiens
LSTLCPPLARRRAPMPTLKSFVILAFSNKKAT

SEQ ID NO: 29934 - protein, 57 aa, Homo sapiens
LAPARQCTWRQCWSTSPLRSWSWRAMRPATTRRRESSPATCSWPSATTRSSTSCWAA

SEQ ID NO: 29935 - protein, 22 aa, Homo sapiens
MSEAPKWMSVPQMSKRMAQNGT

SEQ ID NO: 29936 - protein, 16 aa, Homo sapiens
VPSLLRSWNIISHGSV

SEQ ID NO: 29937 - protein, 8 aa, Homo sapiens
LSKVSCRS

SEQ ID NO: 29938 - protein, 30 aa, Homo sapiens
KLYLGFSALHRFGFSWLLLPGPICKRSRKP

SEQ ID NO: 29939 - protein, 274 aa, Homo sapiens
LQLLVEMGSAKSVPVTPARPPPHNKHLARVADPRSPSAGILRTPIQVESSPQPGLPAGEQLEGLKHAQDSDPRSPTLGIARTPMKTSSGDPPSPLVKQLSEVFETEDSKSNLPPEPVLPPEAPLSSELDLPLGTQLSVEEQMPPWNQTEFPSKQVFSKEEARQPTETPVASQSSDKPSRDPETPRSSGSMRNRWKPNSSKVLGRSPLTILQDDNSPGTLTLRQGKRPSPLSENVSELKEGAILGTGRLLKTGGRAWEQGQDHDKENQHFPLVES

SEQ ID NO: 29940 - protein, 403 aa, Homo sapiens
LGSALRSARASLVADGTMKDCSNGCSAECTGEGGSKEVVGTFKAKDLIVTPATILKEKPDPNNLVFGTVFTDHMLTVEWSSEFGWEKPHIKPLQNLSLHPGSSALHYAVELFEGLKAFRGVDNKIRLFQPNLNMDRMYRSAVRATLPVFDKEELLECIQQLVKLDQEWVPYSTSASLYIRPTFIGTEPSLGVKKPTKALLFVLLSPVGPYFSSGTFNPVSLWANPKYVRAWKGGTGDCKMGGNYGSSLFAQCEAVDNGCQQVLWLYGEDHQITEVGTMNLFLYWINEDGEEELATPPLDGIILPGVTRRCILDLAHQWGEFKVSERYLTMDDLTTALEGNRVREMFGSGTACVVCPVSDILYKGETIHIPTMENGPKLASRILSKLTDIQYGREESDWTIVLS

SEQ ID NO: 29941 - protein, 11 aa, Homo sapiens
VALRAGTCWTR

SEQ ID NO: 29942 - protein, 10 aa, Homo sapiens
LVTGPNGPLP

SEQ ID NO: 29943 - protein, 697 aa, Homo sapiens
ILALKRRRIPRPEATMSTPAVPQDLQLPPSQRAQSAFKEQRRQKLKEHLLRRKTLFAYKQENEMLSSRDQRVVTSEDQVQEGTKVLKLKTKMADKENMKRPAESKNNTVVGKHCIPLKPSNELTNSTVVIDTHKPKDSNQTPHLLLTEDDPQSQHMTLSQAFHLKNNSKKKQMTTEKQKQDANMPKKPVLGSYRGQIVQSKINSFRKPLQVKDESSAATKKLSATIPKATKPQPVNTSSVTVKSNRSSNMTATTKFVSTTSQNTQLVRPPIRSHHSNTRDTVKQGISRTSANVTIRKGPHEKELLQSKTALSSVKTSSSQGIIRNKTLSRSIASEVIARPASLSNDKLMEKSEPVDQRRHTAGKAIVDSRSAQPKETSEERKARLSEWKAGKGRVLKRPPNSVVTQHEPAGQNEKPVGSFWTTMAEEDEQRLFTEKVNNTFSECLNLINEGCPKEDILVTLNDLIKNIPDAKKLVKYWICLALIEPITSPIENIIAIYEKAILAGAQPIEEMRHTIVDILTMKSQEKANLGENMEKSCASKEEVKEVSIEDTGVDVDPEKLEMESKLHRNLLFQDCEKEQDNKTKDPTHDVKTPNTETRTSCLIKYNVSTTPYLQSVKKKVQFDGTNSAFKELKFLTPVRRSRRLQEKTSKLPDMLKDHYPCVSSLEQLTELGRETDAFVCRPNAALCRVYYEADTT

SEQ ID NO: 29944 - protein, 7 aa, Homo sapiens
MFHYSAG

SEQ ID NO: 29945 - protein, 26 aa, Homo sapiens
KLRSGRYIQKVPRRNFLLEKMKKQYL

SEQ ID NO: 29946 - protein, 25 aa, Homo sapiens
LPFLLFSACGGSQRLGRSEPGGRPP

SEQ ID NO: 29947 - protein, 19 aa, Homo sapiens
TNFLPQKCSTCKNRKSSYS

SEQ ID NO: 29948 - protein, 11 aa, Homo sapiens
LGCLRVFSSLG

SEQ ID NO: 29949 - protein, 19 aa, Homo sapiens
IELEDTDSENSSSEKKLKT

SEQ ID NO: 29950 - protein, 48 aa, Homo sapiens
KVFQTESHMKIVRKSEMEETGENLLLIQNKKLEDNYCEITVFNYRTYP

SEQ ID NO: 29951 - protein, 22 aa, Homo sapiens
RWPGPQCPKRALMVPSDRLALL

SEQ ID NO: 29952 - protein, 57 aa, Homo sapiens
RLAAKEGSPLSSQPVKTAPACPDPPVASRPVALVTVSSSLPATPFFLVTAGSSSGHN

SEQ ID NO: 29953 - protein, 14 aa, Homo sapiens
VEFKNSMELIRVYH

SEQ ID NO: 29954 - protein, 49 aa, Homo sapiens
VFFFKALLLTGDFSQAGNKGHHVWVTKDELGDYLKPKYLAQVRRFVSDL

SEQ ID NO: 29955 - protein, 170 aa, Homo sapiens
LLSTRQKMTDCEFGYIYRLAQDYLQCVLQIPQPGSGPSKTSRVLQNVAFSVQKEVEKNLKSCLDNVNVVSVDTARTLFNQVMEKEFEDGIINWGRIVTIFAFEGILIKKLLRQQIAPDVDTYKEISYFVAEFIMNNTGEWIRQNGGWGKWHNHTPMLVESVAHKKRKMAL

SEQ ID NO: 29956 - protein, 110 aa, Homo sapiens
IPATPGPKPLVRTSREPGKDVTTSGYSSVSTASPTSSVDGGLGALPQPTSVLSLDSDSHTQPCHHQARKSCLQCRPPSPPESSVPQQQVKRINLCIHSEEEDMNLGLVRL

SEQ ID NO: 29957 - protein, 56 aa, Homo sapiens
LFVLGKVVDALNQGLPRVPYRDSKLTRLLQVRPTCLREEGAAEGGSQACCGVGNSS

SEQ ID NO: 29958 - protein, 59 aa, Homo sapiens [sequence omitted]

SEQ ID NO: 29959 - protein, 35 aa, Homo sapiens
RPPSLAVPGAASRPGRAAISSSEPSPLLATLCFFS

SEQ ID NO: 29960 - protein, 37 aa, Homo sapiens
VGRSRSLSLGNMRVTSTATSSMDWLLPNSHTVGLFLT

SEQ ID NO: 29961 - protein, 23 aa, Homo sapiens
RWETAGVQSGFWSLRRRYSGTLC

SEQ ID NO: 29962 - protein, 35 aa, Homo sapiens
TDLRLESVCWGPCLWKRPRGLKDGLVRSGTIMLSC

SEQ ID NO: 29963 - protein, 16 aa, Homo sapiens
LGTAVEPHPLWIIIAT

SEQ ID NO: 29964 - protein, 12 aa, Homo sapiens
VGVYESAKLMNV

SEQ ID NO: 29965 - protein, 41 aa, Homo sapiens
IRAPARMIEVVCNDRLGKKVRVKCKYPLAAERQWYPQGCLA

SEQ ID NO: 29966 - protein, 194 aa, Homo sapiens
LVTEAAHVRMLRVLHDLFFQPMAECLFFPLEELQNIFPSLDELIEVHSLFLDRLMKRRQESGYLIEEIGDVLLARFDGAEGSWFQKISSRFCSRQSFALEQLKAKQRKDPRFCAFVQEAESRPRCRRLQLKDMIPTEMQRLTKYPLLLQSIGQNTEEPTEREKVELAAECCREILHHVNQAVRDMEDLLVSPST

SEQ ID NO: 29967 - protein, 28 aa, Homo sapiens
VSLSSARRRTGSQHHGRTGCGKRSFGLR

SEQ ID NO: 29968 - protein, 28 aa, Homo sapiens
KEIQKLIKEPAPDSGLLGLFQGQNSLLH

SEQ ID NO: 29969 - protein, 29 aa, Homo sapiens
VAPHGSRGSQNLILALDLRRESLTRDETQ

SEQ ID NO: 29970 - protein, 36 aa, Homo sapiens
VLTTLSLGDRAAVFHEKDYDSLAQPGFFDRFIRWIC

SEQ ID NO: 29971 - protein, 22 aa, Homo sapiens
TWMSTTPRTRGRMKSTSAAMEL

SEQ ID NO: 29972 - protein, 73 aa, Homo sapiens
LKDLLELTRREFQREDIALNYRDAEGDLVRLLSDEDVALMVRQARGLPSQKRLFPWKLHITQKDNYRVYNTMP

SEQ ID NO: 29973 - protein, 193 aa, Homo sapiens
LWPEAQIRNTMALLTAETFRLQFNNKRRLRRPYYPRKALLCYQLTPQNGSTPTRGYFENKKKCHAEICFINEIKSMGLDETQCYQVTCYLTWSPCSSCAWELVDFIKAHDHLNLGIFASRLYYHWCKPQQKGLRLLCGSQVPVEVMGFPEFADCWENFVDHEKPLSFNPYKMLEELDKNSRAIKRRLERIKQS

SEQ ID NO: 29974 - protein, 42 aa, Homo sapiens
ICELAASSREISWQSEGLEITSFGLSRMQHSCDHIILFFILI

SEQ ID NO: 29975 - protein, 36 aa, Homo sapiens
IFITFPSGMPPVLKPTTTPVEEQPCHQNRAKNGSPK

SEQ ID NO: 29976 - protein, 24 aa, Homo sapiens
RSSWTTRPRSARQPANRCVGPRRS

SEQ ID NO: 29977 - protein, 50 aa, Homo sapiens
LRWRCCSSACWVFWSPPRMVVSIYPMPFLTMKTRNPLQSPRNPVLGMTLT

SEQ ID NO: 29978 - protein, 54 aa, Homo sapiens
KKTPPAPSPFDLPELKHVATEYQENKAPGKKKKRALASNTSFFSGCSPIEEEAH

SEQ ID NO: 29979 - protein, 41 aa, Homo sapiens
LTAFPIPTFPVTAARTDRHCCRELATVFHAVAGGSRLHAPF

SEQ ID NO: 29980 - protein, 571 aa, Homo sapiens
MANPEALKILSAITQPMVVVAIVGLYRTGKSYLMNKLAGKKKGFSLGSTVQSHTKGIWMWCVPHPKKPGHILVLLDTEGLGDVEKGDNQNDSWIFALAVLLSSTFVYNSIGTINQQAMDQLYYVTELTHRIRSKSSPDENENEVEDSADFVSFFPDFVWTLRDFSLDLEADGQPLTPDEYLTYSLKLKKGTSQKDETFNLPRLCIRKFFPKKKCFVFDRPVHRRKLAQLEKLQDEELDPEFVQQVADFCSYIFSNSKTKTLSGGIQVNGPRLESLVLTYVNAISSGDLPCMENAVLALAQIENSAAVQKAIAHYEQQMGQKVQLPTETLQELLDLHRDSEREAIEVFIRSSFKDVDHLFQKELAAQLEKKRDDFCKQNQEASSDRCSALLQVIFSPLEEEVKAGIYSKPGGYRLFVQKLQDLKKKYYEEPRKGIQAEEILQTYLKSKESMTDAILQTDQTLTEKEKEIEVERVKAESAQASAKMLQEMQRKNEQMMEQKERSYQEHLKQLTEKMENDRVQLLKEQERTLALKLQEQEQLLKEGFQKESRIMKNEIQDLQTKMRRRKACTIS

SEQ ID NO: 29981 - protein, 11 aa, Homo sapiens
MSEVMLEKRSS

SEQ ID NO: 29982 - protein, 156 aa, Homo sapiens
MIVTVLVTNIFQCIQEKHQRQEILRNCSEKYIMQNDNYLKEQILTNKTLKFDVLKNSFQQKKELDSRLIQKNRCHRENEIVFKVLQNTGKFSEDHGSCCGVNCYYFTMQKKDWKGCKQTCQHCRSSLLKIDDKDELVFYIHFYSLGLCFSMLDLRY

SEQ ID NO: 29983 - protein, 111 aa, Homo sapiens [sequence omitted]

SEQ ID NO: 29984 - protein, 83 aa, Homo sapiens
MSVLLLHLCGESEASNFDCCLGYTDRILHPKFIVGFTRQLANEGCDINAIIFHTKKKLSVCANPKQTWVKYIVRLLSKKVKNM

SEQ ID NO: 29985 - protein, 697 aa, Homo sapiens
MATLTYETPQGLRIWGGRLIKERNEGEIQDSSMKPADRTDGSVQAAAWGPELPSHRTVLGADSKSGEVDATSDQEESVAWALAPAVPQSPLKNELRRKYLTQVDILLQGAEYFECAGNRAGRDVRVTPLPSLASPAVPAPGYCSRISRKSPGDPAKPASSPREWDPLHPSSTDMALVPRNDSLSLQETSSSSFLSSQPFEDDDICNVTISDLYAGMLHSMSRLLSTKPSSIISTKTFIMQNWNSRRRHRYKSRMNKTYCKGARRSQRSSKENFIPCSEPVKGTGALRDCKNVLDVSCRKTGLKLEKAFLEVNRPQIHKLDPSWKERKVTPSKYSSLIYFDSSATYNLDEENRFRTLKWLISPVKIVSRPTIRQGHGENRQREIEIRFDQLHREYCLSPRNQPRRMCLPDSWAMNMYRGGPASPGGLQGLETRRLSLPSSKAKAKSLSEAFENLGKRSLEAGRCLPKSDSSSSLPKTNPTHSATRPQQTSDLHVQGNSSGIFRKSVSPSKTLSVPDKEVPGHGRNRYDEIKEEFDKLHQKYCLKSPGQMTVPLCIGVSTDKASMEVRYQTEGFLGKLNPDPHFQGFQKLPSSPLGCRKSLLGSTAIEAPSSTCVARAITRDGTRDHQFPAKRPRLSEPQGSGRQGNSLGASDGVDNTVRPGDQGSSSQPNSEERGENTSYRMEEKSDFMLEKLETKSV

SEQ ID NO: 29986 - protein, 179 aa, Homo sapiens
MFRAFGHHAVSLLDGGLRHWLRQNLPLSSGKSQPAPAEFRAQLDPAFIKTYEDIKENLESRRFQVVDSRATGRFRGTEPEPRDGNAGEGGRRSSGARPLRPEQCPGLDLSFIFLIYLAFISFPFFFPFLPFPFPPFPLFPTLAFFSQGLALPPRLECSGTIMAHCSLNLLGSGDPPRSA

SEQ ID NO: 29987 - protein, 21 aa, Homo sapiens
MYLFVKIRLKMWSPEMNIDVL

SEQ ID NO: 29988 - protein, 337 aa, Homo sapiens
MDTCIIVEYKGHKILNIVDCTRPNGGRLPMKVALMMSDFAGGASGFPMTFSGGKFTEEWKAQFIKTERKKLLNYKARLVKNLQPRIYCPFAGYFVESHPSDKYIKETNTKNDPNELNNLIKKNSDVITWTPRPGATLDLGRMLKDRTDSKGIIEPPEGTKIYKDSWDFEPYLEILNAALGDEIFLHSSWIKEYFTWAGFKDYNLVVRMIETDEDFNPFPGGYDYLVDFLDLSFPKERPQREHPYEEIHSRVDVIRHVVKNGLLWDELYIGFQTRLQRDPDIYHHLFWNHFQIKLPLTPPNWKSFLMCCEQNGPVILQFSTERTNEPNRNKFSVENKA

SEQ ID NO: 29989 - protein, 296 aa, Homo sapiens
RFCSALVSGPQPPPSAMAPRKGSSRVAKTNSLRRRKLASFLKDFDREVEIRIKQIESDRQNLLKEVDNLYNIEILRLPKALREMNWLDYFALGGNKQALEEAATADLDITEINKLTAEAIQTPLKSAKTRKVIQVDEMIVEEEEEEENERKNLQTARVKRCPPSKKRTQSIQGKGKGKRSSRANTVTPAVGRLEVSMVKPTPGLTPRFDSRVFKTPGLRTPAAGERIYNISGNGSPLADSKEIFLTVPVGGGESLRLLASDLQRHSIAQLDPEALGNIKKLSNRLAQICSSIRTHK

SEQ ID NO: 29990 - protein, 37 aa, Homo sapiens
KRIRQKLHLCYPVQTSQPKLELVDSRPRRSSTRKSTS

SEQ ID NO: 29991 - protein, 37 aa, Homo sapiens
LLSPRRAGAGATAERREEEEEEVEEVEEVEEAPDRGG

SEQ ID NO: 29992 - protein, 425 aa, Homo sapiens
KDRKMSPKRIAKRRSPPADAIPKSKKVKVSHRSHSTEPGLVLTLGQGDVGQLGLGENVMERKKPALVSIPEDVVQAEAGGMHTVCLSKSGQVYSFGCNDEGALGRDTSVEGSEMVPGKVELQEKVVQVSAGDSHTAALTDDGRVFLWGSFRDNNGVIGLLEPMKKSMVPVQVQLDVPVVKVASGNDHLVMLTADGDLYTLGCGEQGQLGRVPELFANRGGRQGLERLLVPKCVMLKSRGSRGHVRFQDAFCGAYFTFAISHEGHVYGFGLSNYHQLGTPGTESCFIPQNLTSFKNSTKSWVGFSGGQHHTVCMDSEGKAYSLGRAEYGRLGLGEGAEEKSIPTLISRLPAVSSVACGASVGYAVTKDGRVFAWGMGTNYQLGTGQDEDAWSPVEMMGKQLENRVVLSVSSGGQHTVLLVKDKEQS

SEQ ID NO: 29993 - protein, 53 aa, Homo sapiens
INPELLQLLPLHPKDNLPLQENVTIQKQKRRSVNSKIPAPKERIWEVGEPLSW

SEQ ID NO: 29994 - protein, 84 aa, Homo sapiens
RELEEKAMEELKEIIQQGPDWLELSEMTEQPDYDLETFVNKAESALAQQAKHFSALRDVIKALRLAMQLEEQASRQISSKKRPQ

SEQ ID NO: 29995 - protein, 23 aa, Homo sapiens
LGLAVFSSCSAVGGGGRNQSLGD

SEQ ID NO: 29996 - protein, 10 aa, Homo sapiens
MLSKQSESAI

SEQ ID NO: 29997 - protein, 142 aa, Homo sapiens [sequence omitted]

SEQ ID NO: 29998 - protein, 74 aa, Homo sapiens
LGERLFPLIQTMHSNLAGKITGMLLEIDNSELLHMLESPESLRSKVDEAVAVLQAHHAKKEAAQKVGAVAAATS

SEQ ID NO: 29999 - protein, 18 aa, Homo sapiens
IFLLDYFLISILPIVLMF

SEQ ID NO: 30000 - protein, 30 aa, Homo sapiens
IQTFSTTMDIMGTLMVLQQHCVKLGLLKNC

SEQ ID NO: 30001 - protein, 45 aa, Homo sapiens
LCSFVTEDEVEWMRQAGLLTTDPRVRERKKPGQEGARRKFTWKKR

SEQ ID NO: 30002 - protein, 11 aa, Homo sapiens
TVKAAQLWMVR

SEQ ID NO: 30003 - protein, 50 aa, Homo sapiens
KQMLCLIPAGESHRLELLGRERPSCTLLRDCHAPPGGLRTFDMLQSWPRQ

SEQ ID NO: 30004 - protein, 56 aa, Homo sapiens
IQIQDNGTGIRKEDLDIVCERFTTSKLQSFEDLASISTYGFRGESKLLRWKTESPS

SEQ ID NO: 30005 - protein, 8 aa, Homo sapiens
LLRVGTLS

SEQ ID NO: 30006 - protein, 14 aa, Homo sapiens
IDNIFNMTDYVSTL

SEQ ID NO: 30007 - protein, 54 aa, Homo sapiens
MYQDARLVHADLSEFNMLYHGGGVYIIDVSQSVEHDHPHALEFLRKDCANVNGE

SEQ ID NO: 30008 - protein, 216 aa, Homo sapiens
LCFTIYIMNPSMKQKQEEIKENIKNSSVPRRTLKMIQPSASGSLVGRENELSAGLSKRKHRNDHLTSTTSSPGVIVPESSENKNLGGVTQESFDLMIKENPSSQYWKEVAEKRRKALYEALKENEKLHKEIEQKDNEIARLKKENKELAEVAEHVQYMAELIERLNGEPLDNFESLDNQEFDSEEETVEDSLVEDSEIGTCAEGTVSSSTDAKPCI

SEQ ID NO: 30009 - protein, 18 aa, Homo sapiens
MRPIALTTRPSMISASAL

SEQ ID NO: 30010 - protein, 25 aa, Homo sapiens
RACKNMCKHQGGLFIKDIEDLAGSC

SEQ ID NO: 30011 - protein, 9 aa, Homo sapiens
KFSWSSWLG

SEQ ID NO: 30012 - protein, 99 aa, Homo sapiens
LRCYRCYHFCGCYPTPGPSLKLLLQCGQMTCKTTHSCTQCTARMGVPVWDSLRPTTRTSFSSSTFPRTLGCLACPNLLTGLRNREMLLPFYLTKSSASG

SEQ ID NO: 30013 - protein, 165 aa, Homo sapiens
TAAWRNPGTMGASRLYTLVLVLQPQRVLLGMKKRGFGAGRWNGFGGKVQEGETIEDGARRELQEESGLTVDALHKVGQIVFEFVGEPELMDVHVFCTDSIQGTPVESDEMRPCWFQLDQIPFKDMWPDDSYWFPLLLQKKKFHGYFKFQGQDTILDYTLREVDTV

SEQ ID NO: 30014 - protein, 19 aa, Homo sapiens
LAARDPAWVGRCFCEKPKD

SEQ ID NO: 30015 - protein, 9 aa, Homo sapiens
IPCFAGWSP

SEQ ID NO: 30016 - protein, 7 aa, Homo sapiens
TGCPRAR

SEQ ID NO: 30017 - protein, 47 aa, Homo sapiens
ITIKIQFMCGEDASNAMPVIFGKSSGPEFLQEVYTAVTYHNNGCQFS

SEQ ID NO: 30018 - protein, 64 aa, Homo sapiens
IRNLLIWIKKNLLKERPELFIQGDSVRPGILVLINDADWELLGELDYQLQDQDSVLFISTLHGG

SEQ ID NO: 30019 - protein, 287 aa, Homo sapiens
LGCGLESGPMALEQNLSDLQLQAAVEVAGDLEVDCYRAPCSESQEELALQHFMKEKLLAELEGKLRVFENIVAVLNKEVEASHLALATSIHQSQLDRERILSLEQRVVELQQTLAQKDQALGKLEQSLRLMEEASFDGTFLWKITNVTRRCHESACGRTVSLFSPAFYTAKYGYKLCLRLYLNGDGTGKRTHLSLFIVIMRGEYDALLPWPFRNKVTFMLLDQNNREHAIDAFRPDLSSASFQRPQSETNVASGCPLFFPLSKLQSPKHAYVKDDTMFLKCIVETST

SEQ ID NO: 30020 - protein, 44 aa, Homo sapiens
KGFGSLSNLPRSFTLRRSSASISRQSHLEPDTFEATRPGAMGRG

SEQ ID NO: 30021 - protein, 76 aa, Homo sapiens
IMLGTAPPGGCEAWGSWPGWLCSLPSGSCGCWGQPLGVPRHPSPRSPSLSGTGPSLTSPQSCPATPAPATASPAAT

SEQ ID NO: 30022 - protein, 788 aa, Homo sapiens
KARMSWDRESTEIRYRRLQHLLEKSNIYSKFLLTKMEQQQLEEQKKKEKLERKKESLKVKKGKNSIDASEEKPVMRKKRGREDESYNISEVMSKEEILSVAKKNKKENEDENSSSTNLCVEDLQKNKDSNSIIKDRLSETVRQNTKFFFDPVRKCNGQPVPFQQPKHFTGGVMRWYQVEGMEWLRMLWENGINGILADEMGLGKTVQCIATIALMIQRGVPGPFLVCGPLSTLPNWMAEFKRFTPDIPTMLYHGTQEERQKLVRNIYKRKGTLQIHPVVITSFEIAMRDRNALQHCYWKYLIVDEGHRIKNMKCRLIRELKRFNADNKLLLTGTPLQNNLSELWSLLNFLLPDVFDDLKSFESWFDITSLSETAEDIIAKEREQNVLHMLHQILTPFLLRRLKSDVALEVPPKREVVVYAPLSKKQEIFYTAIVNRTIANMFGSSEKETIELSPTGRPKRRTRKSINYSKIDDFPNELEKLISQIQPEVDRERAVVEVNIPVESEVNLKLQNIMMLLRKCCNHPYLIEYPIDPVTQEFKIDEELVTNSGKFLILDRMLPELKKRGHKVLLFSQMTSMLDILMDYCHLRDFNFSRLDGSMSYSEREKNMHSFNTDPEVFIFLVSTRAGGLGINLTAADTVIIYDSDWNPQSDLQAQDRCHRIGQTKPVVVYRLVTANTIDQKIVERAAAKRKLEKLIIHKNHFKGGQSGLNLSKNFLDPKELMELLKSRDYEREIKGSREKVISDKDLELLLDRSDLIDQMNASGPIKEKMGIFKILENSEDSSPECLF

SEQ ID NO: 30023 - protein, 494 aa, Homo sapiens
IETHQGQEMLVRGTEGIKEYINLGMPLSCFPEGGQVVITFSQSKSKQKEDNHIFGRQDKASTECVKFYIHAIGIGKCKRRIVKCGKLHKKGRKLCVYAFKGETIKDALCKDGRFLSFLENDDWKLIENNDTILESTQPVDELEGRYFQVEVEKRMVPSAAASQNPESEKRNTCVLREQIVAQYPSLKRESEKIIENFKKKMKVKNGETLFELHRTTFGKVTKNSSSIKVVKLLVRLSDSVGYLFWDSATTGYATCFVFKGLFILTCRHVIDSIVGDGIEPSKWATIIGQCVRVTFGYEELKDKETNYFFVEPWFEIHNEELDYAVLKLKENGQQVPMELYNGITPVPLSGLIHIIGHPYGEKKQIDACAVIPQGQRAKKCQERVQSKKAESPEYVHMYTQRSFQKIVHNPDVITYDTEFFFGASGSPVFDSKGSLVAMHAAGFAYTYQNETRSIIEFGSTMESILLDIKQRHKPWYEEVFVNQQDVEMMSDEDL

SEQ ID NO: 30024 - protein, 17 aa, Homo sapiens
LVLCKSSYLSGSQLSHL

SEQ ID NO: 30025 - protein, 27 aa, Homo sapiens
KNANFINMIELYKVYHNEFDFEFDLWK

SEQ ID NO: 30026 - protein, 129 aa, Homo sapiens
LNVTVDVQSPACTSYQMTPQGHRAPPKINPDNYGMDLNSDDSTDDEAHPRKPIPTWARGTPLSQAIIHQYYHPPNLLELFGTILPLDLEDIFKKSKPRYHKRTSSAVWNSPPLQGARVPSSLAYSLKKH

SEQ ID NO: 30027 - protein, 27 aa, Homo sapiens
VVINVFITAFGAHKTGFLAARASRNPL

SEQ ID NO: 30028 - protein, 14 aa, Homo sapiens
ISLIQELLISTSLA

SEQ ID NO: 30029 - protein, 325 aa, Homo sapiens
LSLCRDPEPPPPLCLLRVSLLCALRAGGRGSRWGEDGARLLLLPPARAAGNGEAEPSGGPSYAGRMLESSGCKALKEGVLEKRSDGLLQLWKKKCCILTEEGLLLIPPKQLQHQQQQQQQQQQQQQQQPGQGPAEPSQPSGPAVASLEPPVKLKELHFSNMKTVDCVERKGKYMYFTVVMAEGKEIDFRCPQDQGWNAEITLQMVQYKNRQAILAVKSTRQKQQHLVQQQPPSQPQPQPQLQPQPQPQPQPQPQPQSQPQPQPQPKPQPQQLHPYPHPHPHPHSHPHSHPHPHPHPHPHQIPHPHPQPHSQPHGHRLLRSTSNSA

SEQ ID NO: 30030 - protein, 12 aa, Homo sapiens
LEKRKECHFENY

SEQ ID NO: 30031 - protein, 60 aa, Homo sapiens
VGLNFGNLGSTSTPATTSAPSSGFGTGLFGSKPATGFTLGGTNTGIATTITTGLTLGKNF

SEQ ID NO: 30032 - protein, 23 aa, Homo sapiens
RTQNGRSFQRTGTLAFERVYTAK

SEQ ID NO: 30033 - protein, 16 aa, Homo sapiens
LAVPTSCHLGIIVLET

SEQ ID NO: 30034 - protein, 55 aa, Homo sapiens
RMAGAEGAAGRQSELEPVVSLVDVLEEDEELENEACAVLGGSDSEKCSYSQKFSL

SEQ ID NO: 30035 - protein, 108 aa, Homo sapiens
KGPTMGKESGWDSGRAAVAAVVGGVVAVGTVLVALSAMGFTSVGIAASSIAAKMMSTAAIANGGGVAAGSLVAILQSVGAAGLSVTSKVIGGFAGTALGAWLGSPPSS

SEQ ID NO: 30036 - protein, 93 aa, Homo sapiens
ISDHAKVLTLSDDLERTIEERVNILFDFVKKKKEEGVIDSSDKEIVAEAERLDVKAMGPLVLTEVLFNEKIREQIKKYRRHFLRVSKVLWIHK

SEQ ID NO: 30037 - protein, 869 aa, Homo sapiens
VVVQTECSLLFVWLRFHARRWLRMSSSHFASRHRKDISTEMIRTKIAHRKSLSQKENRHKEYERNRHFGLKDVNIPTLEGRILVELDETSQGLVPEKTNVKPRAMKTILGDQRKQMLQKYKEEKQLQKLKEQREKAKRGIFKVGRYRPDMPCFLLSNQNAVKAEPKKAIPSSVRITRSKAKDQMEQTKIDNESDVRAIRPGPRQTSEKKVSDKEKKVVQPVMPTSLRMTRSATQAAKQVPRTVSSTTARKPVTRAANENEPEGKVPSKGRPAKNVETKPDKGISCKVDSEENTLNSQTNATSGMNPDGVLSKMENLPEINTAKIKGKNSFAPKDFMFQPLDGLKTYQVTPMTPRSANAFLTPSYTWTPLKTEVDESQATKEILAQKCKTYSTKTIQQDSNKLPCPLGPLTVWHEEHVLNKNEATTKNLNGLPIKEVPSLERNEGRIAQPHHGVPYFRNILQSETEKLTSHCFEWDRKLELDIPDDAKDLIRTAVGQTRLLMKERFKQFEGLVDDCEYKRGIKETTCTDLDGFWDMVSFQIEDVIHKFNNLIKLEESGWQVNNNMNHNMNKNVFRKKVVSGIASKPKQDDAGRIAARNRLAAIKNAMRERIRQEECAETAVSVIPKEVDKIVFDAGFFRVESPVKLFSGLSVSSEGPSQRLGTPKSVNKAVSQSRNEMGIPQQTTSPENAGPQNTKSEHVKKTLFLSIPESRSSIEDAQCPGLPDLIEENHVVNKTDLKVDCLSSERMSLPLLAGGVADDINTNKKEGISDVVEGMELNSSITSQDVLMSSPEKNTASQNSILEEGETKISQSELFDNKSLTTECHLLDSPGLNCSNPFTQLERRHQEHARHISFGGNLITFSPLQPGEF

SEQ ID NO: 30038 - protein, 9 aa, Homo sapiens
LTALQRETE

SEQ ID NO: 30039 - protein, 29 aa, Homo sapiens
MESEMLKVYVSFAPSASEPLPLGSTEHRD

SEQ ID NO: 30040 - protein, 26 aa, Homo sapiens
RGRWTCSSSWCCTSRRSCPLHCCCSS

SEQ ID NO: 30041 - protein, 176 aa, Homo sapiens
KMTDCEFGYIYRLAQDYLQCVLQIPQPGSGPSKTSRVLQNVAFSVQKEVEKNLKSCLDNVNVVSVDTARTLFNQVMEKEFEDGIINWGRIVTIFAFEGILIKKLLRQQIAPDVDTYKEISYFVAEFIMNNTGEWIRQNGGWENGFVKKFEPKSGWMTFLEVTGKICEMLSLLKQYC

SEQ ID NO: 30042 - protein, 641 aa, Homo sapiens
LLSGPCGVGLDLDSRLLGASAMRRSEVLAEESIVCLQKALNHLREIWELIGIPEDQRLQRTEVVKKHIKELLDMMIAEEESLKERLIKSISVCQKELNTLCSELHVEPFQEEGETTILQLEKDLRTQVELMRKQKKERKQELKLLQEQDQELCEILCMPHYDIDSASVPSLEELNQFRQHVTTLRETKASRREEFVSIKRQIILCMEALDHTPDTSFERDVVCEDEDAFCLSLENIATLQKLLRQLEMQKSQNEAVCEGLRTQIRELWDRLQIPEEEREAVATIMSGSKAKVRKALQLEVDRLEELKMQNMKKVIEAIRVELVQYWDQCFYSQEQRQAFAPFCAEDYTESLLQLHDAEIVRLKNYYEVHKELFEGVQKWEETWRLFLEFERKASDPNRFTNRGGNLLKEEKQRAKLQKMLPKLEEELKARIELWEQEHSKAFMVNGQKFMEYVAEQWEMHRLEKERAKQERQLKNKKQTETEMLYGSAPRTPSKRRGLAPNTPGKARKLNTTTMSNATANSSIRPIFGGTVYHSPVSRLPPSGSKPVAASTCSGKKTPRTGRHGANKENLELNGSILSGGYPGSAPLQRNFSINSVASTYSEFAKDPSLSDSSTVGLQRELSKASKSDATSGILNSTNIQS

SEQ ID NO: 30043 - protein, 19 aa, Homo sapiens
MATDVIYFSTARTFKGFQI

SEQ ID NO: 30044 - protein, 14 aa, Homo sapiens
VNFVSVGPTYMRVS

SEQ ID NO: 30045 - protein, 296 aa, Homo sapiens
IHVMNPFWSMSTSSVRKRSEGEEKTLTGDVKTSPPRTAPKKQLPSIPKNALPITKPTSPAPAAQSTNGTHASYGPFYLEYSLLAEFTLVVKQKLPGVYVQPSYRSALMWFGVIFIRHGLYQDGVFKFTVYIPDNYPDGDCPRLVFDIPVFHPLVDPTSGELDVKRAFAKWRRNHNHIWQVLMYARRVFYKIDTASPLNPEAAVLYEKDIQLFKSKVVDSVKVCTARLFDQPKIEDPYAISFSPWNPSVHDEAREKMLTQKKKPEEQHNKSVHVAGLSWVKPGSVQPFSKEEKTVAT

SEQ ID NO: 30046 - protein, 24 aa, Homo sapiens
LDFEECLKDSPRFRQTRWTQALFP

SEQ ID NO: 30047 - protein, 38 aa, Homo sapiens
KKMQRRNDDKSISDARARFLERKQQRTQDHSDTRKETG

SEQ ID NO: 30048 - protein, 37 aa, Homo sapiens; identical to SEQ ID NO: 29960

SEQ ID NO: 30049 - protein, 1071 aa, Homo sapiens
VWLKAINCATSGVVGLVNCLRREPGGNRLRCVLLSNLSSTSHVPEVDPGSAELQKVLQGDLVMNVYRDGAWGAFRHFLLEEDKPEEPTAHAFVSTLTRGDLSSIRWVCSSLRHAQPTCPGAQLCTVYYASLNFRDIMLATGKLSPDAIPGKWTSQDSLLGMEFSGRDASGKRVMGLVPAKGLATSVLLSPDFLWDVPSNWTLEEAASVPVVYSTAYYALVVRGRVRPGETLLIHSGSGGVGQAAIAIALSLGCRVFTTVGSAEKRAYLQARFPQLDSTSFANSRDTSFEQHVLWHTGGKGVDLVLNSLAEEKLQASVRCLATHGRFLEIGKFDLSQNHPLGMAIFLKNVTFHGVLLDAFFNESSADWREVWALVQAGIRDGVVRPLKCTVFHGAQVEDAFRYMAQGKHIGKVVVQVLAEEPEAVLKGAKPKLMSAISKTFCPAHKSYIIAGGLGGFGLELAQWLIQRGVQKLVLTSRSGIRTGYQAKQVRRWRRQGVQVQVSTSNISSLEGARGLIAEAAQLGPVGGVFNLAVVLRDGLLENQTPEFFQDVCKPKYSGTLNLDRVTREACPELDYFVVFSSVSCGRGNAGQSNYGFANSAMERICEKRRHEGLPGLAVQWGAIGDVGILVETMSTNDTIVSGTLPQRMASCLEVLDLFLNQPHMVLSSFVLAEKAAAYRDRDSQRDLVEAVAHILGIRDLAAVNLDSSLADLGLDSLMSVEVRQTLERELNLVLSVREVRQLTLRKLQELSSKADEASELACPTPKEDGLAQQQTQLNLRSLLVNPEGPTLMRLNSVQSSERPLFLVHPIEGSTTVFHSLASRLSIPTYGLQCTRAAPLDSIHSLAAYYIDCIRQVQPEGPYRVAGYSYGACVAFEMCSQLQAQQSPAPTHNSLFLFDGSPTYVLAYTQSYRAKLTPGCEAEAETEAICFFVQQFTDMEHNRVLEALLPLKGLEERVAAAVDLIIKSHQGLDRQELSFAARSFYYKLRAAEQYTPKAKYHGNVMLLRAKTGGAYGEDLGADYNLSQVCDGKVSVHVIEGDHRTLLEGSGLESIISIIHSSLAEPRVSVREG

SEQ ID NO: 30050 - protein, 77 aa, Homo sapiens
LDDGTFMIPGEKVAHTSLDALVTFHQQKPIEPRRELLTQPCRQKDPANVDYEDLFLYSNAVAEEAACPVSAPEEVCI

SEQ ID NO: 30051 - protein, 367 aa, Homo sapiens
LQRGPERPRRDPPQTAWAARMCTKMEQPFYHDDSYTATGYGRAPGGLSLHDYKLLKPSLAVNLADPYRSLKAPGARGPGPEGGGGGSYFSGQGSDTGASLKLASSELERLIVPNSNGVITTTPTPPGQYFYPRGGGSGGGAGGAGGGVTEEQEGFADGFVKALDDLHKMNHVTPPNVSLGATGGPPAGPGGVYAGPEPPPVYTNLSSYSPASASSGGAGAAVGTGSSYPTTTISYLPHAPPFAGGHPAQLGLGRGASTFKEEPQTVPEARSRDATPPVSPINMEDQERIKVERKRLRNRLAATKCRKRKLERIARLEDKVKTLKAENAGLSSTAGLLREQVAQLKQKVMTHVSNGCQLLLGVKGHAF

SEQ ID NO: 30052 - protein, 82 aa, Homo sapiens
RALPTGASLSSMARVSFARSLLMICLWDAPWMRLCGWSRPSSTQTSMGKFVPLAGSLAVTRLSPTWMTARNISPNTIRLANG

SEQ ID NO: 30053 - protein, 78 aa, Homo sapiens
LHHRFVADSKDKEPEVVFIGDSLVQLMHQCEIWRELFSPLHALNFGIGGDGTQHVLWRLENGELEHIRPKVSGAWVGL

SEQ ID NO: 30054 - protein, 596 aa, Homo sapiens
LPCARPSSQPSAGPAAMEVPQPEPAPGSALSPAGVCGGAQRPGHLPGLLLGSHGLLGSPVRAAASSPVTTLTQTMHDLAGLGSETPKSQVGTLLFRSRSRLTHLSLSRRASESSLSSESSESSDAGLCMDSPSPMDPHMAEQTFEQAIQAASRIIRNEQFAIRRFQSMPVRLLGHSPVLRNITNSQAPDGRRKSEAGSGAASSSGEDKENDGFVFKMPWKPTHPSSTHALAEWASRREAFAQRPSSAPDLMCLSPDRKMEVEELSPLALGRFSLTPAEGDTEEDDGFVDILESDLKDDDAVPPGMESLISAPLVKTLEKEEEKDLVMYSKCQRLFRSPSMPCSVIRPILKRLERPQDRDTPVQNKRRRSVTPPEEQQEAEEPKARVLRSKSLCHDEIENLLDSDHRELIGDYSKAFLLQTVDGKHQDLKYISPETMVALLTGKFSNIVDKFVIVDCRYPYEYEGGHIKTAVNLPLERDAESFLLKSPIAPCSLDKRVILIFHCEFSSERGPRMCRFIRERDRAVNDYPSLYYPEMYILKGGYKEFFPQHPNFCEPQDYRPMNHEAFKDELKTFRLKTRSWAGERSRRELCSRLQDQ

SEQ ID NO: 30055 - protein, 48 aa, Homo sapiens
KRLQACLQGQSGADMDKRVKKLPLMALSTTMAESFKELDPDSSMGPWR

SEQ ID NO: 30056 - protein, 42 aa, Homo sapiens
KPQSQVIFITFPSGMPPVLKPTTTPVEEQPCHQNRAKNGSPK

SEQ ID NO: 30057 - protein, 61 aa, Homo sapiens
LRALGAPWPAGLRWRCCSSACWVFWSPPRMVVSIYPMPFLTMKTRNPLQSPRNPVLGMTLT

SEQ ID NO: 30058 - protein, 90 aa, Homo sapiens
LAPLHQAPGGTHKCILRGSECTVVLPPEAVLVPSDNFTITFHHCMSGREQVSLVDPEYLPRRHEQHQFWPLHPDLEHQSCLGANDHTSQL

SEQ ID NO: 30059 - protein, 119 aa, Homo sapiens
VVSKRSCRLLRCRCWFSHLLGLFSSSVPTLSFSLQPLKILVSPWAAAPPVVTGIVRTSRTQSLASAEVSLMPRFAFLTWGGKRQKWMSFRFVATWCQMNMSSCPLKPWRLPEFVPISTW

SEQ ID NO: 30060 - protein, 298 aa, Homo sapiens
MGTGIESSSHKYGLFQHICTAYELVLADGSFVRCTPSENSDLFYAVPWSCGTLGFLVAAEIRIIPAKKYVKLRFEPVRGLEAICAKFTHESQRQENHFVEGLLYSLDEAVIMTGVMTDEAEPSKLNSIGNYYKPWFFKHVENYLKTNREGLEYIPLRHYYHRHTRSIFWELQDIIPFGNNPIFRYLFGWMVPPKISLLKLTQGETLRKLYEQHHVVQDMLVPMKCLQQALHTFQNDIHVYPIWLCPFILPSQPGLVHPKGNEAELYIDIGAYGEPRVKHFEARSCMRQLEKFVRSVHG

SEQ ID NO: 30061 - protein, 155 aa, Homo sapiens [sequence omitted]

SEQ ID NO: 30062 - protein, 110 aa, Homo sapiens
MPWGGTGSLGWNQEAGTVRGPPSHPSTSWLPALPVSHHPLVTKVLCPALGWMLGTQSEFEVARPRGANVWPNMDAQDSWETAPAGPRAVPECPQRPALSHWASPARAAFP

SEQ ID NO: 30063 - protein, 1808 aa, Homo sapiens [sequence omitted]

SEQ ID NO: 30064 - protein, 283 aa, Homo sapiens [sequence omitted]

SEQ ID NO: 30065 - protein, 84 aa, Homo sapiens [sequence omitted]

SEQ ID NO: 30066 - protein, 97 aa, Homo sapiens
MILAHGKLRLPGSSDSPASASRVAGITGMCHHAPLARLVSNTLPQVILPPLGLQAEELPRRQEVEQNTPSLVPIIDNIMTLHVMDQLTPSRSVNWFI

SEQ ID NO: 30067 - protein, 39 aa, Homo sapiens
MKSHRCYDLIPTSSKLVVFDTSLQVGEILFSLPPLEPVV

SEQ ID NO: 30068 - protein, 98 aa, Homo sapiens
MPSDKTIGGGDDSFNTFFSETGAGKHVPRAVFVDLEPTVIDEVRTGTYRQLFHPEQLITGKEDAANNYARGHYTIGKEIIDLVLDRIRKLVCFFSRIK

SEQ ID NO: 30069 - protein, 11 aa, Homo sapiens
MTITPLLYPEQ

SEQ ID NO: 30070 - protein, 17 aa, Homo sapiens
MMIMTLMIFNRIKIEFF

SEQ ID NO: 30071 - protein, 79 aa, Homo sapiens
MDERNRQVTFTKRKFGLMKKAYELSVLCDCEIALIIFNSSNKLFQYASTDMDKVLLKYTEYNEPHESRTNSDIVEVTHI

SEQ ID NO: 30072 - protein, 130 aa, Homo sapiens
MDSCSLEIANWRNHQETLKYQFDAFYGERSTQQDIYAGSVQPILRHLLEGQNASVLAYGPTGAGKTHTMLGSPEQPGVIPRALMDLLQLTREEGAEGRPWALSVTMSYLEIYQEKVRPRAGWERSNKGSK

SEQ ID NO: 30073 - protein, 108 aa, Homo sapiens
MIFPGGSARVWRTSAWIWGPFRAASICRTWALGPLPTASLGRPQTAAPPVKNQEEILFSPAWQGPKTCQGGAAGKGRGAAQRAGGGSASMPQLWMRNPVSPEHWPALL

SEQ ID NO: 30074 - protein, 113 aa, Homo sapiens [sequence omitted]

SEQ ID NO: 30075 - protein, 347 aa, Homo sapiens
MAALMTPGTGAPPAPGDFSGEGSQGLPDPSPEPKQLPELIRMKRDGGRLSEADIRGFVAAVVNGSAQGAQIGAMLMAIRLRGMDLEETSVLTQALAQSGQQLEWPEAWRQQLVDKHSTGGVGDKVSLVLAPALAACGCKVPMISGRGLGHTGGTLDKLESIPGFNVIQSPEQMQVLLDQAGCCIVGQSEQLVPADGILYAARDVTATVDSLPLITGWRGSQPRASGRGSADRHGQAPGSLRGPRPGGGGGAALHGRRRPARLKGPGHHARGRPALAQRTRGDSGPGRCPGGRGAGRRLGPWPLRADAGGAGRGSRSGPSPVLGKSRRTPAAAASRPGAGGAAGARRW

SEQ ID NO: 30076 - protein, 160 aa, Homo sapiens
MIVDKLLDDSRGGEGLRDAAGGCGLMTSPLNLSYFYGASPPAAAPGACDASCSVLGPSAPGSPGSDSSDFSSASSVSSCGAVESRSRGGARAERQPVEPHMGVGRQQRGPFQGVRVKNSVKELLLHIRSHKQKASGQAVDDFKTQGVNIEQFRGKSYLYL

SEQ ID NO: 30077 - protein, 739 aa, Homo sapiens
MCSRQERIQKDIDVVIQKSRAEKDCLFADFRYSDSTFTFTYVGGPRSVSYSVHVSEDYPDNTYVSSSENDEDVLVTTEPIPVIFHRIATELRKTNDINCCLSIKSKLQKENGEESRQNSTVEEDSEGDNDSEEFYYGGQVNYDGELHKHPQLEADLSAVREIYGPHAVSLREYGAIDDVDIDLHIDVSFLDEEIAVAWEVIRTEPIIVRLHCSLTQYLNGPVPTVDVFQISTKERFGLGHQLKKIMQTFVTQQWKQSKEKSNCLHNKKLSEKKVKSPLHLFSTLRRSPSYPPPGCGKSKSKLKSEQDGISKTHKLLRRTCSSTVKTDDVCVTKSHRTFGRSLSSDPRAEQAMTAIKSHKLLNRPCPAAVKSEECLTLKSHRLLTRSCSGDPRCEHNTNLKPHKLLSRSYSSNLRMEELYGLKNHKLLSKSYSSAPKSSKTELFKEPNAEGRRLSLTSGLIGILTPSSSSSSQLAPNGAKCIPVRDRGFLVQTIEFAEQRIPVLNEYCVVCDEPHVFQNGPMLRPTVCERELCVFAFQTLGVMNEAADEIATGAQKKNYDRVMKALDSITSIREMTQAPYLEIKKQMDKQDPLAHPLLQWVISSNRSHIVKLPVNRQLKFMHTPHQFLLLSSPPAKESNFRAAKKLFGSTFAFHGSHIENWHSILRNGLVVASNTRLQLHGAMYGSGIYLSPMSSISFGYSGMNKKQKVSAKDEPASSSKSSNTSQKTKKRTAIPIPAKP

SEQ ID NO: 30078 - protein, 317 aa, Homo sapiens
MPITRMRMRPWLEMQINSNQIPGLIWINKPYVYVCIVQEEMIFQIPWKHAAKHGWDINKDACLFRSWAIHTGRYKAGEKEPDPKTWKANFRCAMNSLPDIEEVKDQSRNKGSSAVRVYRMLPPLTKNQRKERKSKSSRDAKSKAKRKSCGDSSPDTFSDGLSSSTLPDDHSSYTVPGYMQDLEVEQALTPGELVQVWQETPQVSGMTLSLGGMVLAHGGPLVQAAGLVGGRSMSCKLRKHTTLTCGFCCSPALSPCAVSSTLPDWHIPVEVVPDSTSDLYNFQVSPMPSTSEGWCSWGLACLLDCLGPVKGFLREKR

SEQ ID NO: 30079 - protein, 141 aa, Homo sapiens
MTLRGTLKGHNGWVTQIATTPQFPDMILSASRDKTIIMWKLTRDETNYGIPQRALRGHSHFVSDVVISSDGQFALSGSWDGTLRLWDLTTGTTTRRFVGHTKDVLSVAFSSDNRQIVSGSRDKTIKLWNTLGVCKYTVQVK

SEQ ID NO: 30080 - protein, 365 aa, Homo sapiens
MLTMKAKHATMLLTVTEVEGLAEGTEDLDGELLPTPSAHPSVVMDIAYYQALSAERLQTDAAKIHPSTSASQEFYEPGLEPSATAKLGDLQRSWETLKNVISEKQRTLYEALERQQKYQDSLQSISTKMEAIELKLSESPEPGRSPESQMAEHQSFLQALMDEILMLQDEINELQSSLAEELVSESCEADPAEQLALQSTLTVLAERMSTIRMKASGKRQLLEEKLNDQLEEQRQEQALQRYRCEADELDSWLLSTKATLDTALSPPKEPMDMEAQLMDCQNMLVEIEQKVVALSELSVHNENLLLEGKAHTKDEAEQLAGKLRRLKGSLLELQRALHDKQLNMQVRVPAAGPQLKVGTLFTCSF

SEQ ID NO: 30081 - protein, 33 aa, Homo sapiens; identical to SEQ ID NO: 26638

SEQ ID NO: 30082 - protein, 32 aa, Homo sapiens
IDVNKVVEYVKGLQKEDGSFAGDIWGPTKQLV

SEQ ID NO: 30083 - protein, 93 aa, Homo sapiens
ISTPKLDKMPGMFFSANPKELKGTTHSLLDDKMQKRRPKTFGMDMKAYLRSMIPHLESGMKSSKSKDVLSAAEVMQWSQSLEKLLANQSKYNY

SEQ ID NO: 30084 - protein, 98 aa, Homo sapiens
KSVGIMLTELEKALNSIIDVYHKYSLIKGNFHAVYRDDLKKLLETECPQYIRKKGADVWFKELDINTDGAVNFQEFLILVIKMGVAAHKKSHEESHKE

SEQ ID NO: 30085 - protein, 26 aa, Homo sapiens
MQINDAKKTEKKKKKRQDISVHKLKL

SEQ ID NO: 30086 - protein, 147 aa, Homo sapiens
VNNRIIEETLALKFENAAAGNKPEAVEVTFADFDGVLYHISNPNGDKTKVMVSISLKFYKELQAHGADELLKRVYGSFLVNPESGYNVSLLYDLENLPASKDSIVHQAGMLKRNCFASVFEKYFQFQEEGKEGENRAVIHYRDDETM

SEQ ID NO: 30087 - protein, 279 aa, Homo sapiens
IFIAQVSEAAMAEVPELASEMMAYYSGNEDDLFFEADGPKQMKCSFQDLDLCPLDGGIQLRISDHHYSKGFRQAASVVVAMDKLRKMLVPCPQTFQENDLSTFFPFIFEEEPIFFDTWDNEAYVHDAPVRSLNCTLRDSQQKSLVMSGPYELKALHLQGQDMEQQVVFSMSFVQGEESNDKIPVALGLKEKNLYLSCVLKDDKPTLQLESVDPKNYPKKKMEKRFVFNKIEINNKLEFESAQFPNWYISTSQAENMPVFLGGTKGGQDITDFTMQFVSS

SEQ ID NO: 30088 - protein, 9 aa, Homo sapiens
RQLMCTFSV

SEQ ID NO: 30089 - protein, 36 aa, Homo sapiens
LKWMQSELNVEEVVNDRSWKVFNERCRIHFKPPKNE

SEQ ID NO: 30090 - protein, 16 aa, Homo sapiens
IEKFSGRGGCSKKYSL

SEQ ID NO: 30091 - protein, 81 aa, Homo sapiens
KFLQEFYQDDELGKKQFKYGNQLVRLAHREQVALYVDLDDVAEDDPELVDSICENARRYAKLFADAVQELLPQYKEREVSG

SEQ ID NO: 30092 - protein, 83 aa, Homo sapiens
LDDVAEDDPELVDSICENARRYAKLFADAVQELLPQYKEREVVNKDVLDVYIEHRLMMEQRSRDPGMVRSPQNQYPAELMRRL

SEQ ID NO: 30093 - protein, 78 aa, Homo sapiens
RCWARTVEMSEKKQPVDLGLLEEDDEFEEFPAEDWAGLDEDEDAHVWEDNWDDDNVEDDFSNQLRAELEKHGYKMETS

SEQ ID NO: 30094 - protein, 376 aa, Homo sapiens
LKKAYRKLALKYHPDKNPNEGEKFKQISQAYEVLSDAKKRELYDKGGEQAIKEGGAGGGFGSPMDIFDMFFGGGGRMQRERRGKNVVHQLSVTLEDLYNGATRKLALQKNVICDKCEGRGGKKGAVECCPNCRGTGMQIRIHQIGPGMVQQIQSVCMECQGHGERISPKDRCKSCNGRKIVREKKILEVHIDKGMKDGQKITFHGEGDQEPGLEPGDIIIVLDQKDHAVFTRRGEDLFMCMDIQLVEALCGFQKPISTLDNRTIVITSHPGQIVKHGDIKCVLNEGMPIYRRPYEKGRLIIEFKVNFPENGFLSPDKLSLLEKLLPERKEVEETDEMDQVELVDFDPNQERRRHYNGEAYEDDEHHPRGGVQCQTS

SEQ ID NO: 30095 - protein, 8 aa, Homo sapiens
ISPKEMHR

SEQ ID NO: 30096 - protein, 23 aa, Homo sapiens
ISSFPWRFVQMPMSEVMLEKRSS

SEQ ID NO: 30097 - protein, 44 aa, Homo sapiens
IDAPGHRDFIKNMITGTSQADCAVLIFAAGVGEFEAGISKNGQT

SEQ ID NO: 30098 - protein, 20 aa, Homo sapiens
LEALGSCLNNKYSEGYPGKR

SEQ ID NO: 30099 - protein, 38 aa, Homo sapiens
LARLVSNTLPQVILPPLGLQTLHVMDQLTPSRSVNWFI

SEQ ID NO: 30100 - protein, 14 aa, Homo sapiens
ICIRGRILTRSSVP

SEQ ID NO: 30101 - protein, 9 aa, Homo sapiens
LTFLHLPFF

SEQ ID NO: 30102 - protein, 23 aa, Homo sapiens
LEDMATPVGVEHGEQSQAFSDDD

SEQ ID NO: 30103 - protein, 27 aa, Homo sapiens
LVIKYGAVDPLLALLAVPDMSSLAVSY

SEQ ID NO: 30104 - protein, 68 aa, Homo sapiens
LHGLQQYYVKLKDSEKNRKLFDLLDVLEFNQVIIFVKSVQRCMALAQLLVEQNFPAIAIHRGMAQEER

SEQ ID NO: 30105 - protein, 1203 aa, Homo sapiens
MLVARDPAGDISVTPPAPAALPVALPTVASKGPGSDSSLFETYNVELVRKDGQSLGIRIVGYVGTSHTGEASGIYVKSIIPGSAAYHNGHIQVNDKIVAVDGVNIQGFANHDVVEVLRNAGQVVHLTLVRRKTSSSTSPLEPPSDRGTVVEPLKPPALFLTGAVETETNVDGEDEEIKERIDTLKNDNIQALEKLEKVPDSPENELKSRWENLLGPDYEVMVATLDTQIADDAELQKYSKLLPIHTLRLGVEVDSFDGHHYISSIVSGGPVDTLGLLQPEDELLEVNGMQLYGKSRREAVSFLKEVPPPFTLVCCRRLFDDEASVDEPRRTETSLPETEVDHNMDVNTEEDDDGELALWSPEVKIVELVKDCKGLGFSILDYQDPLDPTRSVIVIRSLVADGVAERSGGLLPGDRLVSVNEYCLDNTSLAEAVEILKAVPPGLVHLGICKPLVEDNEEESCYILHSSSNEDKTEFSGTIHDINSSLILEAPKGFRDEPYFKEELVDEPFLDLGKSFHSQQKEIEQSKEAWEMHEFLTPRLQEMDEEREILVDEEYELYQDPSPSMELYPLSHIQEATPVPSVNELHFGTQWLHDNEPSESQEARTGRTVYSQEAQPYGYCPENVMKENFVMESLPSVPSTEGNSQQGRFDDLENLNSLAKTSLDLGMIPNDVQGPSLLIDLPVVAQRREQEDLPLYQHQATRVISKASAYTGMLSSRYATDTCELPEREEGEGEETPNFSHWGPPRIVEIFREPNVSLGISIVGGQTVIKRLKNGEELKGIFIKQVLEDSPAGKTNALKTGDKILEVSGVDLQNASHSEAVEAIKNAGNPVVFIVQSLSSTPRVIPNVHNKANKITGNQNQDTQEKKEKRQGTAPPPMKLPPPYKALTDDSDENEEEDAFTDQKIRQRYADLPGELHIIELEKDKNGLGLSLAGNKDRSRMSIFVVGINPEGPAAADGRMRIGDELLEINNQILYGRSHQNASAIIKTAPSKVKLVFIRNEDAVNQMAVTPFPVPSSSPSSIEDQSGTEPISSEEDGSVEVGIKQLPESESFKLAVSQMKQQKYPTKVSFSSQEIPLAPASSYHSTDADFTGYGGFQAPLSVDPATCPIVPGQEMIIEISKGRSGLGLSIVGGKDTPLVNGVDLRNSSHEEAITALRQTPQKVRLVVYRDEAHYRDEENLEIFPVDLQKKAGRGLGLSIVGKR

SEQ ID NO: 30106 - protein, 195 aa, Homo sapiens
MCSVKGAEKSVLYSWTPREPHASESNGGSILTVSRTPCDPDLPYICTAQNPVSQRSSLPVHVGQFCTDPGASRGGTTGETVVGVLGEPVTLPLALPACRDTEKVVWLFNTSIISKEREEAATADPLIKSRDPYKNRVWVSSQDCSLKISQLKIEDAGPYHAYVCSEASSVTSMTHVTLLIYRESLGRAPITRFLL

SEQ ID NO: 30107 - protein, 385 aa, Homo sapiens
MELTAPSLIQPLGMVPLIPSPLSSAVPLILPQAPSGPSYAIYLQPTQAHQSVTPPQGLSPTVCTTHSSKATGSKDSTDATTEKAANDTSKASASTRPGSLLPAPERQGAKSRTREPAGERGSKRASMLEDSGSKKKFKEDLKGLENVSATLFPSGYLIPLTQCSSLGAESILSGKENSSALSPNHRIYSSPIAGVIPVTSSELTAVNFPSFHVTPLKLMVSPTSVAAVPVGNSPALASSHPVPIQNPSSAIVNFTLQHLGLISPNVQLSASPGSGIVPVSPRIESVNVAPENAGTQQGRATNYDSPVPGQSQPNGQSVAVTGAQQPVPVTPKGSQLVAESFFRTPGGPTKPTSSSCMDFEGANKTSLGTLFVPQRKLEVSTEDVH

SEQ ID NO: 30108 - protein, 306 aa, Homo sapiens
MENGIKPVYVFDGKPPQLKSGELAKRSERRAEAEKQLQQAQAAGAEQEVEKFTKRLVKVTKQHNDECKHLLSLMGIPYLDAPSEAEASCAALVKAGKVYAAATEDMDCLTFGSPVLMRHLTASEAKKLPIQEFHLSRILQELGLNQEQFVDLCILLGSDYCESIRGIGPKRAVDLIQKHKSIEEIVRRLDPNKYPVPENWLHKEAHQLFLEPEVLDPESVELKWSEPNEEELIKFMCGEKQFSEERIRSGVKRLSKSRQGSTQGRLDDFFKVTGSLSSAKRKEPEPKGSTKKKAKTGAAGKFKRGK

SEQ ID NO: 30109 - protein, 347 aa, Homo sapiens
MDNKDLVWLEEIQEEAERMFTREFSKEPELMPKTPSQKNRRKKRRISYVQDENRDPIRRRLSRRKSRSSQLSSRRLRSKDSVEKLATVVGENGSVLRRVTRAAAAAAAATMALAAPSSPTPESPTMLTKKPEDNHTQCQLVPVVEIGISERQNAEQHVTQLMSTEPLPRTLSPTPASATAPTSQGIPTSDEESTPKKSKARILESITVSSLMATPQDPKGQGVGTGRSASKLRIAQVSPGPRDSPAFPDSPWRERVLAPILPDNFSTPTGSRTDSQSVRHSPIAPSSPSPQVLAQKYSLVAKQESVVRRASRRLAKKTAEEPAASGRIICHSYLERLLNVEVPQKVG

SEQ ID NO: 30110 - protein, 76 aa, Homo sapiens
MNTLPLPKKSMGTTWNRLLGCSSGINIISKSHWLICPTLPLSQMSGLWKIKSYLSKPLVFMGKLFIESNKCFQINL

SEQ ID NO: 30111 - protein, 589 aa, Homo sapiens
MYQLLRGLKYIHSANVLHRDLKPANLFINTEDLVLKIGDFGLARIMDPHYSHKGHLSEGLVTKWYRSPRLLLSPNNYTKAIDMWAAGCIFAEMLTGKTLFAGAHELEQMQLILESIPVVHEEDRQELLSVIPVYIRNDMTEPHKPLTQLLPGISREALDFLEQILTFSPMDRLTAEEALSHPYMSIYSFPMDEPISSHPFHIEDEVDDILLMDETHSHIYNWERYHDCQFSEHDWPVHNNFDIDEVQLDPRALSDVTDEEEVQVDPRKYLDGDREKYLEDPAFDTNYSTEPCWQYSDHHENKYCDLECSHTCNYKTRSSSYLDNLVWRESEVNHYYEPKLIIDLSNWKEQSKEKSDKKGKSKCERNGLVKAQIALEEASQQLAGKEREKNQGFDFDSFIAGTIQLSSQHEPTDVVDKLNDLNSSVSQLELKSLISKSVSQEKQEKGMANLAQLEALYQSSWDSQFVSGGEDCFFINQFCEVRKDEQVEKENTYTSYLDKFFSRKEDTEMLETEPVEDGKLGERGHEEGFLNNSGEFLFNKQLESIGIPQFHSPVGSPLKSIQATLTPSAMKSSPQIPHQTYSSILKHLN

SEQ ID NO: 30112 - protein, 315 aa, Homo sapiens
MFQNLFPSINVHKVNLNTIKRCLLIDYNPDSQELDFRHYSIKVVPVGASRGMKKLLQEKFPNMSRLQDISELLATGAGLSESEAEPDGDHNITELPQAVAGRGNMRAQQSAVRLTEIGPRMTLQLIKVQEGVGEGKVMFHSFVSKTEEELQAILEAKEKKLRLKAQRQAQQAQNVQRKQEQREAHRKKSLEGMKKARVGGSDEEASGIPSRTASLELGEDDDEQEDDDIEYFCQAVGEAPSEDLFPEAKQKRLAKSPGRKRKRWEMDRGRGRLCDQKFPKTKDKSQGAQARRGPRGASRDGGRGRGRGRPGKRVA

SEQ ID NO: 30113 - protein, 175 aa, Homo sapiens
MCVVGDGFPSRLAAGAACADQDLAAVEEGGTAFREDGSSKMMPKDANMQIFVKTLTGKTITLEVEPSDTIENVKAKIQDKEGIPPDQQRLIFAGKQLEDGRTLSDYNIQKESTLHLVLRLRGGIIEPSLRQLAQKYNCDKMICRKCYARLHPRAVNCRKKKCGHTNNLRPKKKVK

SEQ ID NO: 30114 - protein, 462 aa, Homo sapiens
MDPHMAEQTFEQAIQAASRIIRNEQFAIRRFQSMPVRLLGHSPVLRNITNSQAPDGRRKSEAGSGAASSSGEDKENDGFVFKMPWKPTHPSSTHALAEWASRREAFAQRPSSAPDLMCLSPDRKMEVEELSPLALGRFSLTPAEGDTEEDDGFVDILESDLKDDDAVPPGMESLISAPLVKTLEKEEEKDLVMYSKCQRLFRSPSMPCSVIRPILKRLERPQDRDTPVQNKRRRSVTPPEEQQEAEEPKARVLRSKSLCHDEIENLLDSDHRELIGDYSKAFLLQTVDGKHQDLKYISPETMVALLTGKFSNIVDKFVIVDCRYPYEYEGGHIKTAVNLPLERDAESFLLKSPIAPCSLDKRVILIFHCEFSSERGPRMCRFIRERDRAVNDYPSLYYPEMYILKGGYKEFFPQHPNFCEPQDYRPMNHEAFKDELKTFRLKTRSWAGERSRRELCSRLQDQ

SEQ ID NO: 30115 - protein, 220 aa, Homo sapiens
MLPGAEHFAEYAGRLGVGAATHVVIYDASDQGLYSAPRVWWMFRAFGHHAVSLLDGGLRHWLRQNLPLSSGKSQPAPAEFRAQLDPAFIKTYEDIKENLESRRFQVVDSRATGRFRGTEPEPRDGNAGEGGRRSSGARPLRPEQCPGLDLSFIFLIYLAFISFPFFFPFLPFPFPPFPLFPTLAFFSQGLALPPRLECSGTIMAHCSLNLLGSGDPPRSA

SEQ ID NO: 30116 - protein, 1051 aa, Homo sapiens
MFILLRLAEDVVTFQTLPPQRRRDIQQTLTQNMERIFSFLLNTLQENVNKYQQVKTDTSQESKAQANCRVGVAALNTLAGYIDWVSMSHITAENCKLLEILCLLLNEQELQLGAAECLLIAVSRKGKLEDRKPLMVLFGDVAMHYILSAAQTADGGGLVEKHYVFLKRLCQVLCALGNQLCALLGADSDVETPSNFGKYLESFLAFTTHPSQFLRSSTQMTWGALFRHEILSRDPLLLAIIPKYLRASMTNLVKMGFPSKTDSPSCEYSRFDFDSDEDFNAFFNSSRAQQGEVMRLACRLDPKTSFQMAGEWLKYQLSTFLDAGSVNSCSAVGTGEGSLCSVFSPSFVQWEAMTLFLESVITQMFRTLNREEIPVNDGIELLQMVLNFDTKDPLILSCVLTNVSALFPFVTYRPEFLPQVFSKLFSSVTFETVEESKAPRTRAVRNVRRHACSSIIKMCRDYPQLVLPNFDMLYNHVKQLLSNELLLTQMEKCALMEALVLISNQFKNYERQKVFLEELMAPVASIWLSQDMHRVLSDVDAFIAYVGTDQKSCDPGLEDPCGLNRARMSFCVYSILGVVKRTCWPTDLEEAKAGGFVVGYTSSGNPIFRNPCTEQILKLLDNLLALIRTHNTLYAPEMLAKMAEPFTKALDMLDAEKSAILGLPQPLLELNDSPVFKTVLERMQRFFSTLYENCFHILGKAGPSMQQDFYTVEDLATQLLSSAFVNLNNIPDYRLRPMLRVFVKPLVLFCPPEHYEALVSPILGPLFTYLHMRLSQKWQVINQRSLLCGEDEAADENPESQEMLEEQLVRMLTREVMDLITVCCVSKKGADHSSAPPADGDDEEMMATEVTPSAMAELTDLGKCLMKHEDVCTALLITAFNSLAWKDTLSCQRTTSQLCWPLLKQVLSGTLLADAVTWLFTSVLKGLQMHGQHDGCMASLVHLAFQIYEALRPRYLEIRAVMEQIPEIQKDSLDQFDCKLLNPSLQKVADKRRKDQFKRLIAGCIGKPLGEQFRKEVHIKNLPSLFKKTKPMLETEVLDNDGGGLATIFEP

SEQ ID NO: 30117 - protein, 489 aa, Homo sapiens
MSRKSSVCSSLNSVNSSDSRSSGSHSHSPSSHYRYRSSNLAQQAPVRLSSVSSHDSGFISQDAFQSKSPSPMPPEAPNQLSNGFSHYSLSSESHVGPTGAGLFPHCLPASRLLPRVTSVHLPDYAHYYTIGPGMFPSSQIPSWKDWAKPGPYDQPLVNTLQRRKEKREPDPNGGGPTTASGPPAAAEEAQRPRSMTVSAATRPGEEMEACEELALALSRGLQLDTQRSSRDSLQCSSGYSTQTTTPCCSEDTIPSQVSDYDYFSVSGDQEADQQEFDKSSTIPRNSDISQSYRRMFQAKRPASTAGLPTTLGPAMVTPGVATIRRTPSTKPSVRRGTIGAGPIPIKTPVIPVKTPTVPDLPGVLPAPPDGPEERGEHSPESPSVGEGPQGVTSMPSSMWSGQASVNPPLPGPKPSIPEEHRQAIPESEAEDQEREPPSATVSPGQIPESDPADLSPRDTPQGEDMLNAIRRGVKLKKTTTNDRSAPRFS

SEQ ID NO: 30118 - protein, 35 aa, Homo sapiens
IQTRKDLMDKTQKVKVKKETVNSPAIYKFQSRRKR

SEQ ID NO: 30119 - protein, 20 aa, Homo sapiens
ISGSILASLSAFQQMWISKQ

SEQ ID NO: 30120 - protein, 67 aa, Homo sapiens
MGIMNSFVNDIFERIAGEASRLAHYNKRSTITSREIQTAVRLLLPGKLAKHAVSEGTKAVTKYTSSK

SEQ ID NO: 30121 - protein, 41 aa, Homo sapiens
LGIVCQLRLDRGGMIQTAEQYQFLHHTLALYAGQLPEEPSP

SEQ ID NO: 30122 - protein, 16 aa, Homo sapiens
VGIAAAEQGFWKALRT

SEQ ID NO: 30123 - protein, 6 aa, Homo sapiens
LETKSV

SEQ ID NO: 30124 - protein, 35 aa, Homo sapiens
TCSGIFSTRGRHRRRLASSGLICATCPLHTPPPSW

SEQ ID NO: 30125 - protein, 8 aa, Homo sapiens
RKMILQQF

SEQ ID NO: 30126 - protein, 28 aa, Homo sapiens
MQINSNQIPGLIWINKVSVTLWVFLPLF

SEQ ID NO: 30127 - protein, 246 aa, Homo sapiens
ISVGELWPFARCCSHSYVRSLRGLSVSTHLLCFTIYIMNPSMKQKQEEIKENIKNSSVPRRTLKMIQPSASGSLVGRENELSAGLSKRKHRNDHLTSTTSSPGVIVPESSENKNLGGVTQESFDLMIKENPSSQYWKEVAEKRRKALYEALKENEKLHKEIEQKDNEIARLKKENKELAEVAEHVQYMAELIERLNGEPLDNFESLDNQEFDSEEETVEDSLVEDSEIGTCAEGTVSSSTDAKPCI

SEQ ID NO: 30128 - protein, 89 aa, Homo sapiens
RMALSTIVSQRKQIKRKAPRGFLKRVFKRKKPQLRLEKSGDLLVHLNCLLFVHRLAEESRTNACASKCRVINKEHVLAAAKVILKKSRG

SEQ ID NO: 30129 - protein, 13 aa, Homo sapiens
IQQLRKGSFQKRS

SEQ ID NO: 30130 - protein, 60 aa, Homo sapiens
LAAFLTGMNESRYQRFFAWRDRLRVRLFTDWRERFCAICDRYPHLPRSQVYEDLEGWFQA

SEQ ID NO: 30131 - protein, 73 aa, Homo sapiens
LEDKWFSQKPCYWKRLQSGFSPIPLPNGGKAGSSPIKLSWVGPWGTWRFQCACMEWNECCWCLSEDSAPRFRD

SEQ ID NO: 30132 - protein, 43 aa, Homo sapiens [sequence omitted]

SEQ ID NO: 30133 - protein, 11 aa, Homo sapiens
MQEDWPPKPVY

SEQ ID NO: 30134 - protein, 27 aa, Homo sapiens
KEHLLRRKTLFAYKQENEMLSRLIKKT

SEQ ID NO: 30135 - protein, 916 aa, Homo sapiens
RLLTGRGCLCVLLSVRGTARPRGPEQNAARAESGGRRSRQGAGGRRPRPEAEADREPAMSVVGLDVGSQSCYIAVARAGGIETIANEFSDRCTPSVISFGSKNRTIGVAAKNQQITHANNTVSNFKRFHGRAFNDPFIQKEKENLSYDLVPLKNGGVGIKVMYMGEEHLFSVEQITAMLLTKLKETAENSLKKPVTDCVISVPSFFTDAERRSVLDAAQIVGLNCLRLMNDMTAVALNYGIYKQDLPSLDEKPRIVVFVDMGHSAFQVSACAFNKGKLKVLGTAFDPFLGGKNFDEKLVEHFCAEFKTKYKLDAKSKIRALLRLYQECEKLKKLMSSNSTDLPLNIECFMNDKDVSGKMNRSQFEELCAELLQKIEVPLYSLLEQTHLKVEDVSAVEIVGGATRIPAVKERIAKFFGKDISTTLNADEAVARGCALQCAILSPAFKVREFSVTDAVPFPISLIWNHDSEDTEGVHEVFSRNHAAPFSKVLTFLRRGPFELEAFYSDPQGVPYPEAKIGRFVVQNVSAQKDGEKSRVKVKVRVNTHGIFTISTASMVEKVPTEENEMSSEADMECLNQRPPENPDTDKNVQQDNSEAGTQPQVQTDAQQTSQSPPSPELTSEENKIPDADKANEKKVDQPPEAKKPKIKVVNVELPIEANLVWQLGKDLLNMYIETEGKMIMQDKLEKERNDAKNAVEEYVYEFRDKLCGPYEKFICEQDHQNFLRLLTETEDWLYEEGEDQAKQAYVDKLEELMKIGTPVKVRFQEAEERPKMFEELGQRLQHYAKIAADFRNKDEKYNHIDESEMKKVEKSVNEVMEWMNNVMNAQAKKSLDQDPVVRAQEIKTKIKELNNTCEPVVTQPKPKIESPKLERTPNGPNIDKKEEDLEDKNNFGAEPPHQNGECYPNEKNSVNMDLD

SEQ ID NO: 30136 - protein, 24 aa, Homo sapiens
LKVYVSFAPSASEPLPLGSTEHRD

SEQ ID NO: 30137 - protein, 64 aa, Homo sapiens
KVAEQVLNAVNKGLYREATELWGKAEMIIEQNTDGVNFYNILTKSTPTSTMESSLEFTQSHLGE

SEQ ID NO: 30138 - protein, 253 aa, Homo sapiens
LRLRAMAGLNSLEAVKRKIQALQQQADEAEDRAQGLQRELDGERERREKAEGDVAALNRRIQLVEEELDRAQERLATALQKLEEAEKAADESERGMKVIENRAMKDEEKMEIQEMQLKEAKHIAEEADRKYEEVARKLVILEGELERAEERAEVSELKCGDLEEELKNVTNNLKSLEAASEKYSEKEDKYEEEIKLLSDKLKEAETRAEFAERTVAKLEKTIDDLEEKLAQAKEENVGLHQTLDQTLNELNCI

SEQ ID NO: 30139 - protein, 22 aa, Homo sapiens
LCYSHVTPGDPGAGAGQGPAPS

SEQ ID NO: 30140 - protein, 442 aa, Homo sapiens
KCLLAARGEERGASIMAEQDVENDLLDYDEEEEPQAPQESTPAPPKKDIKGSYVSIHSSGFRDFLLKPELLRAIVDCGFEHPSEVQHECIPQAILGMDVLCQAKSGMGKTAVFVLATLQQIEPVNGQVTVLVMCHTRELAFQISKEYERFSKYMPSVKVSVFFGGLSIKKDEEVLKKNCPHVVVGTPGRILALVRNRSFSLKNVKHFVLDECDKMLEQLDMRRDVQEIFRLTPHEKQCMMFSATLSKDIRPVCRKFMQDPMEVFVDDETKLTLHGLQQYYVKLKDSEKNRKLFDLLDVLEFNQVIIFVKSVQRCMALAQLLVEQNFPAIAIHRGMAQEERLSRYQQFKDFQRRILVATNLFGRGMDIERVNIVFNYDMPEDSDTYLHRVARAGRFGTKGLAITFVSDENDAKILNDVQDRFEVNVAELPEEIDISTYIEQSR

SEQ ID NO: 30141 - protein, 236 aa, Homo sapiens
RKGAGGTRPRPAAAMNSNVENLPPHIIRLVYKEVTTLTADPPDGIKVFPNEEDLTDLQVTIEGPEGTPYAGGLFRMKLLLGKDFPASPPKGYFLTKIFHPNVGANGEICVNVLKRDWTAELGIRHVLLTIKCLLIHPNPESALNEEAGRLLLENYEEYAARARLLTEIHGGAGGPSGRAEAGRALASGTEASSTDPGAPGGPGGAEGPMAKKHAGERDKKLAAKKKTDKKRALRRL

SEQ ID NO: 30142 - protein, 34 aa, Homo sapiens
MTKMIEIGLIFTVGEGCICSSTQESPDVFLFSLN

SEQ ID NO: 30143 - protein, 162 aa, Homo sapiens
MREDGLSPNESKLCTESEGISPNNSAWNGPQLSSSNNNFQQTVSDKNMPDSENPTSVFSRISDHSETPNMELSCRNGGSHKSSCEMRSLVVSTSSNKQDVLNKDSGKMKGHERRLGKVIPVLQTKTRTNVPTFSQSNLEQQKQLYLRSVIAHIEDPEDTNQG

SEQ ID NO: 30144 - protein, 167 aa, Homo sapiens [sequence omitted]

SEQ ID NO: 30145 - protein, 758 aa, Homo sapiens
MRSSTGPGIGFLSPAVGTLFRFPGGVSGEESHHSESRARQCGLDSRGLLVRSPVSKSAAAPTVTSVRGTSAHFGIQLRGGTRLPDRLSWPCGPGSAGWQQEFAAMDSSETLDASWEAACSDGARRVRAAGSLPSAELSSNSCSPGCGPEVPPTPPGSHSAFTSSFSFIRLSLGSAGERGEAEGCPPSREAESHCQSPQEMGAKAASLDGPHEDPRCLSRPFSLLATRVSADLAQAARNSSRPERDMHSLPDMDPGSSSSLDPSLAGCGGDGSSGSGDAHSWDTLLRKWEPVLRDCLLRNRRQMEVISLRLKLQKLQEDAVENDDYDKAETLQQRLEDLEQEKISLHFQLPSRQPALSSFLGHLAAQVQAALRRGATQQASGDDTHTPLRMEPRLLEPTAQDSLHVSITRRDWLLQEKQQLQKEIEALQARMFVLEAKDQQLRREIEEQEQQLQWQGCDLTPLVGQLSLGQLQEVSKALQDTLASAGQIPFHAEPPETIRSLQERIKSLNLSLKEITTKVCMSEKFCSTLRKKVNDIETQLPALLEAKMHAISGNHFWTAKDLTEEIRSLTSEREGLEGLLSKLLVLSSRNVKKLGSVKEDYNRLRREVEHQETAYETSVKENTMKYMETLKNKLCSCKCPLLGKVWEADLEACRLLIQSLQLQEARGSLSVEDERQMDDLEGAAPPIPPRLHSEDKRKTPLKVLEEWKTHLIPSLHCAGGEQKEVCPFHMASRGDPYSKGCFGTMLQMGTINIGKASH

SEQ ID NO: 30146 - protein, 597 aa, Homo sapiens
MKFLKLLGYSKDELQKKVATWLKSDVGLGESPQPKGNDLNSDRQQAFCSQASKHTTKEASASSAFFDELVPQNMTPWEIPITKDIDGLLSQALLLGELGPAVELCLKEERFADAIILAQAGGTDLLKQTQERYLAKKKTKISSLLACVVQKNWKDVVCTCSLKNWREALALLLTYSGTEKFPELCDMLGTRMEQEGSRALTSEARLCYVCSGSVERLVECWAKCHQALSPMALQDLMEKVMVLNRSLEQLRGPHGVSPGPATTYRVTQYANLLAAQGSLATAMSFLPRDCAQPPVQQLRDRLFHAQGSAVLGQQSPPFPFPRIVVGATLHSKETSSYRLGSQPSHQVPTPSPRPRVFTPQSSPAMPLAPSHPSPYQGPRTQNISDYRAPGPQAIQPLPLSPGVRPGPQDSWKEAPAPRGNLQRNKLPETFMPPAPITAPVMSLTPELQGILPSQPPVSSVSHAPPGVPGELSLQQLQHLPPEKMERKELPPEHQSLKSSFEALLQRCSLSATDLKTKRKLEEAAQRLEYLYEKLCEGTLSPHVVAGLHEVARCVDAGSFEQGLAVHAQVAGCSSFSEVSSFMPILKAVLIIAHKLLV

SEQ ID NO: 30147 - protein, 46 aa, Homo sapiens
MRDELGSSGLRRLCCVPMFRLPQTGISSLSEELLHFIWEQKTAGSC

SEQ ID NO: 30148 - protein, 52 aa, Homo sapiens
MGSAKSVPVTPARPPPHNKHLARVADPRSPSAGILRTPIQVLWASVGKAENV

SEQ ID NO: 30149 - protein, 27 aa, Homo sapiens
MCSVSSSPRQSSLLHKTEGLKRSVERH

SEQ ID NO: 30150 - protein, 123 aa, Homo sapiens
MRKQKKERKQELKLLQEQDQELCEILCMPHYDIDSASVPSLEELNQFRQHVTTLRETKASRREEFVSIKRQIILCMEALDHTPDTSFERDVVCEDEDAFCLSLENIATLQKLLRQVLSSQIMP

SEQ ID NO: 30151 - protein, 87 aa, Homo sapiens
MSGSREVMLLQLTVIKVMTTRILSVKTEFHAKEQYRDVIKILLESAKVDSKLICMFQNSDKLLSHMAAQCLALLLYFQLREKALVSG

SEQ ID NO: 30152 - protein, 56 aa, Homo sapiens
MKHLNEGLITLNSAFVKYAFLLSSFILQYVCRSVDSDLNQIYFTLSLICRYVQTTS

SEQ ID NO: 30153 - protein, 208 aa, Homo sapiens
MRNAASIDPAAQPSSRHALRLPWQAAPAWATISSAGSPASLWCIMRGLCGTTQQAWWRRTRMACLAAKELDGVEEKHFSQAPCSLSTSPLQTRLLEAIIRLWPLGLVLANTAMGVGSFQRKLVVWACLQLPRGSPSSYTVQTAQDQAGVTSIRALPQGSIKFHCRKSPLRYADICPEPSPYSITGFNQILLERHRLIHVTSSAFTGLG

SEQ ID NO: 30154 - protein, 144 aa, Homo sapiens
MSVAQDIPKLQKLGITHVLNAAEGRSFMHVNTNANFYKDSGITYLGIKANDTQEFNLSAYFERAADFIDQALAQKNGRVLVHCREGYSRSPTLVIAYLMMRQKMDVKSALSIVRQNREIGPNDGFLAQLCQLNDRLAKEGKLKP

SEQ ID NO: 30155 - protein, 354 aa, Homo sapiens
MREGRPHLLSFAPQIASEPPPVREIPPSCAPLTAQAIQEGLRKEPIHRVSAAELGGKVNRALQQVGGLKSPWRGEYKEPRHPPPNQANYHQTLHAQPRELSPRAPGPRPAEETTGRAPKLQPPLPPEPPEPNKSPPLTLSKEESGMWEPLPLSSLEPAPARNPSSPERKATVPEQELQQLEIELFLNSLSQPFSLEEQEQILSCLSIDSLSLSDDSEKNPSKASQSSRDTLSSGVHSWSSQAEARSSSWNMVLARGRPTDTPSYFNGVKVQIQSLNGEHLHIREFHRVKVGDIATGISSQIPAAAFSLVTKDGQPVRYDMEVPDSGIDLQCTLAPDGSFAWSWRVKHGQLENRP

SEQ ID NO: 30156 - protein, 205 aa, Homo sapiens
MDPAKGIQYFIEHKLLTPDVQDIARFLYKGEGLNKTAIGTYLGERDPINLQVLQAFVDCHEFANLNLVQALRQFLWSFRLPGEAQKIDRMMEAFATRYCLCNPGVFQSTDTCYVLSFSIIMLNTSLHNPNVRDRPPFERFVSMNRGINNGSDLPEDQLRVTWECSQRRSRERTFQKEEVARTEACPDWERRGVQCGREPLRQHQE

SEQ ID NO: 30157 - protein, 77 aa, Homo sapiens
MTSLDILENFEENCCVMRYTTAGQLWNIISPREFVDFSYTVGYKEGLLSCGNNLNMLCFFSVWFKYLCFLGWMSLSL

SEQ ID NO: 30158 - protein, 123 aa, Homo sapiens
MPLGADCARYTTLSLLRRARMHIQKLEDQEQRARQLKERLRSKQQSLQRQLEQLRGLAGAAERERLRADSLDSSGLSSERSDSDQEELEVDVESLVFGGEAELLRGFVAGQEHSYSHGGGAWL

SEQ ID NO: 30159 - protein, 183 aa, Homo sapiens [sequence omitted]

SEQ ID NO: 30160 - protein, 70 aa, Homo sapiens
LGNFLSPDSPSPPGPRTFTPASLSWPVITHPQSHPAPPRNYLLPSPGLGPSSPLHSAQSGTPPASSPIPH

SEQ ID NO: 30161 - protein, 79 aa, Homo sapiens
VGFKLLQEEHCDIFMNLTKKQRQTLRKMVIDMVLATDMSKHMSLLADLKTMVETKKVTSSGVLLLDNYTDRIQVFEESL

SEQ ID NO: 30162 - protein, 13 aa, Homo sapiens
VCLRNFKRCRPPD

SEQ ID NO: 30163 - protein, 135 aa, Homo sapiens
KSDAPDTLLLEKHADYIASYGSKKDDYEYCMSEYLRMSGIYWGLTVMDLMGQLHRMNREEILAFIKSCQHECGGISASIGHDPHLLYTLSAVQILTLYDSINVIDVNKVVEYVKGLQKEDGSFAGDIWGPTKQLV

SEQ ID NO: 30164 - protein, 53 aa, Homo sapiens
LRSVGVFLLPAPYWAPRERWLGSLRRPSLVHGYPVLAWHSARCWCQAWTEEPR

SEQ ID NO: 30165 - protein, 257 aa, Homo sapiens
IAMVLNATKVFKYESSENEQRRMFHATVATQTQFFHVKVLNINLKRKFIKKRIIIISNYSKRNSLLEVNEASSVSEAGPDQTFEVPKDIIRRAKKIPKINILHKQTSGYIVYGLFMLHTKIVNRKTTIYEIQDKTGSMAVVGKGECHNIPCEKGDKLRLFCFRLRKRENMSKLMSEMHSFIQIQKNTNQRSHDSRSMALPQEQSQHPKPSEASTTLPESHLKTPQMPPTTPSSSSFTKVQYPGSHDSYLPNINYKDH

SEQ ID NO: 30166 - protein, 360 aa, Homo sapiens
ILRFHLFQLQGAMAEKVLVTGGAGYIGSHTVLELLEAGYLPVVIDNFHNAFRGGGSLPESLRRVQELTGRSVEFEEMDILDQGALQRLFKKYSFMAVIHFAGLKAVGESVQKPLDYYRVNLTGTIQLLEIMKAHGVKNLVFSSSATVYGNPQYLPLDEAHPTGGCTNPYGKSKFFIEEMIRDLCQADKTWNAVLLRYFNPTGAHASGCIGEDPQGIPNNLMPYVSQVAIGRREALNVFGNDYDTEDGTGVRDYIHVVDLAKGHIAALRKLKEQCGCRIYNLGTGTGYSVLQMVQAMEKASGKKIPYKVVARREGDVAACYANPSLAQEELGWTAALGLDRMCEDLWRWQKQNPSGFGTQA

SEQ ID NO: 30167 - protein, 76 aa, Homo sapiens
VLPFAARPGLAESAPTKIWFPSAPAVVILNRRSPRPIFIEKRVSPRPPWAASGRLLKDFYPSEGDSPFNFFPTLIF

SEQ ID NO: 30168 - protein, 20 aa, Homo sapiens
KERAGVSTVQKAKKKQKKRD

SEQ ID NO: 30169 - protein, 48 aa, Homo sapiens
LAHYNKRSTITSREIQTAVRLLLPGKLAKHAVSEGTKAVTKYTSSNIF

SEQ ID NO: 30170 - protein, 119 aa, Homo sapiens
IKTAAEKTATDKKRERRKKKYQKRMKIKEKEKRRKLLEKSSVDQAGKYSKTVASEKLKQLTKTGKASFIKDEGKDKALKSSQAFFSKLQDQVKMQINDAKKTEKKKKKRQDISVHKLKL

SEQ ID NO: 30171 - protein, 25 aa, Homo sapiens
RKRDLPCSVTPLEKKKKSRSILLSP

SEQ ID NO: 30172 - protein, 39 aa, Homo sapiens
KLQEYLAAKGKLKSQNTKPYLKSKNNCQNQPPSKSVHQH

SEQ ID NO: 30173 - protein, 17 aa, Homo sapiens
RQPPRYVCWEGVIVTAL

SEQ ID NO: 30174 - protein, 33 aa, Homo sapiens
ILGSGEWPGRQSRGPRTPGLFSERWAAETDLPP

SEQ ID NO: 30175 - protein, 91 aa, Homo sapiens
LQCSRARAYALLLQHLPVLVWLPRYPVRDWLLGDLLSGLSVAIMQLPQGLAYALLAGLPPVFGLYSSFYPVFIYFLFGTSRHISVGKWRQA

SEQ ID NO: 30176 - protein, 72 aa, Homo sapiens
ILTILTIWLFKNHRFRFLHETGGAMVYDKPPKFAMSREQMSQSCSHTAHNASLLTDAGPLSCGESRASCLFL

SEQ ID NO: 30177 - protein, 30 aa, Homo sapiens
LPNWPSESPTPMPGCAVKKMSRQLMCTFSV

SEQ ID NO: 30178 - protein, 69 aa, Homo sapiens
TLGGEVLLEPLWLLSAEWKRVLLFVSLAMALQLSREQGITLRGSAEIVAEFFLHPEKSLRKLSRMKSVQ

SEQ ID NO: 30179 - protein, 13 aa, Homo sapiens
KMLQFSGSMVVLR

SEQ ID NO: 30180 - protein, 21 aa, Homo sapiens
LILAVSWRGLDIFDSFPPRLN

SEQ ID NO: 30181 - protein, 54 aa, Homo sapiens
KKVETGEAVRFFSVTSLTGQHGGEVRELWGSRGSVKWFEGYRYSGSRVCWPSSS

SEQ ID NO: 30182 - protein, 59 aa, Homo sapiens
RSHFSEKESASWKPEEKYETGNHRVMCVLPLAECVESCSGVRYSVFDRGGLRGTRCSEL

SEQ ID NO: 30183 - protein, 23 aa, Homo sapiens
IKDGKIGENCPSPWPACSWYTLV

SEQ ID NO: 30184 - protein, 116 aa, Homo sapiens
LATKAARKSAPATGGVKKPHRYRPGTVALREIRRYQKSTELLIRKLPFQRLVREIAQDFKTDLRFQSSAVMALQEACEAYLVGLFEDTNLCAIHAKRVTIMPKDIQLARRIRGERA

SEQ ID NO: 30185 - protein, 26 aa, Homo sapiens
LCSCRHNVRRWGDHPTPMSTMTLFPR

SEQ ID NO: 30186 - protein, 34 aa, Homo sapiens
RGMVAILIAFMKQRRMGLNDFIQKIANNSYACKQ

SEQ ID NO: 30187 - protein, 50 aa, Homo sapiens
KPLQLKPNITNSARHLLEGLLQKDRTKRLGAKDDFVSDVFLSSWAGRDVH

SEQ ID NO: 30188 - protein, 15 aa, Homo sapiens
KWLLVAAWRTPAALL

SEQ ID NO: 30189 - protein, 26 aa, Homo sapiens
KILEDDKGAFQLYSKAIQRVTVSVCR

SEQ ID NO: 30190 - protein, 20 aa, Homo sapiens
TERTSALKQKSPELRSPRRG

SEQ ID NO: 30191 - protein, 7 aa, Homo sapiens
LFRNSNA

SEQ ID NO: 30192 - protein, 452 aa, Homo sapiens
KKQIWTLEQPPDEAGSAAVCLRSHLGRYLAADKDGNVTCEREVPGPDCRFLIVAHDDGRWSLQSEAHRRYFGGTEDRLSCFAQTVSPAEKWSVHIAMHPQVNIYSVTRKRYAHLSARPADEIAVDRDVPWGVDSLITLAFQDQRYSVQTADHRFLRHDGRLVARPEPATGYTLEFRSGKVAFRDCEGRYLAPSGPSGTLKAGKATKVGKDELFALEQSCAQVVLQAANERNVSTRQGMDLSANQDEETDQETFQLEIDRDTKKCAFRTHTGKYWTLTATGGVQSTASSKNASCYFDIEWRDRRITLRASNGKFVTSKKNGQLAASVETAGDSELFLMKLINRPIIVFRGEHGFIGCRKVTGTLDANRSSYDVFQLEFNDGAYNIKDSTGKYWTVGSDSAVTSSGDTPVDFFFEFCDYNKVAIKVGGRYLKGDHAGVLKASAETVDPASLWEY

SEQ ID NO: 30193 - protein, 55 aa, Homo sapiens
LGTTGRHAANVIALQVCNKKWPPTKLHCKKWEKNRMERVKKLKRQSLKNLSWKKY

SEQ ID NO: 30194 - protein, 9 aa, Homo sapiens
IDVSILEAL

SEQ ID NO: 30195 - protein, 26 aa, Homo sapiens
IFGQCNCGTGTYFSEEKLCGSMAFII

SEQ ID NO: 30196 - protein, 36 aa, Homo sapiens
VGKRRRLLQQQGLPIYPAKLSAERTTGKASKPGPRL

SEQ ID NO: 30197 - protein, 765 aa, Homo sapiens
VRACDLPAWVHFPDTERAEWLNKTVKHMWPFICQFIEKLFRETIEPAVRGANTHLSTFSFTKVDVGQQPLRINGVKVYTENVDKRQIILDLQISFVGNCEIDLEIKRYFCRAGVKSIQIHGTMRVILEPLIGDMPLVGALSIFFLRKPLLEINWTGLTNLLDVPGLNGLSDTIILDIISNYLVLPNRITVPLVSEVQIAQLRFPVPKGVLRIHFIEAQDLQGKDTYLKGLVKGKSDPYGIIRVGNQIFQSRVIKENLSPKWNEVYEALVYEHPGQELEIELFDEDPDKDDFLGSLMIDLIEVEKERLLDEWFTLDEVPKGKLHLRLEWLTLMPNASNLDKVLTDIKADKDQANDGLSSALLILYLDSARNLPSNPLEFNPDVLKKTAVQRALKSGKKISSNPNPVVQMSVGHKAQESKIRYKTNEPVWEENFTFFIHNPKRQDLEVEVRDEQHQCSLGNLKVPLSQLLTSEDMTVSQRFQLSNSGPNSTIKMKIALRVLHLEKRERPPDHQHSAQVKRPSVSKEGRKTSIKSHMSGSPGPGGSNTAPSTPVIGGSDKPGMEEKAQPPEAGPQGLHDLGRSSSSLLASPGHISVKEPTPSIASDISLPIATQELRQRLRQLENGTTLGQSPLGQIQLTIRHSSQRNKLIVVVHACRNLIAFSEDGSDPYVRMYLLPDKRRSGRRKTHVSKKTLNPVFDQSFDFSVSLPEVQRRTLDVAVKNSGGFLSKDKGLLGKVLVALASEELAKGWTQWYDLTEDGTRPQAMT

SEQ ID NO: 30198 - protein, 336 aa, Homo sapiens
IIMGQTGKKSEKGPVCWRKRVKSEYMRLRQLKRFRRADEVKSMFSSNRQKILERTEILNQEWKQRRIQPVHILTSVSSLRGTRECSVTSDLDFPTQVIPLKTLNAVASVPIMYSWSPLQQNFMVEDETVLHNIPYMGDEVLDQDGTFIEELIKNYDGKVHGDRECGFINDEIFVELVNALGQYNDDDDDDDGDDPEEREEKQKDLEDHRDDKESRPPRKFPSDKIFEAISSMFPDKGTAEELKEKYKELTEQQLPGALPPECTPNIDGPNAKSVQREQSLHSFHTLFCRRCFKYDCFLHPFHATPNTYKRKNTETALDNKPCGPQCYQHLPLLPRN

SEQ ID NO: 30199 - protein, 26 aa, Homo sapiens
KRRRRRKMMMRKKTTWKLRKKMESWS

SEQ ID NO: 30200 - protein, 10 aa, Homo sapiens
LSLMFKQSCE

SEQ ID NO: 30201 - protein, 101 aa, Homo sapiens
VSDLSSYCNKEVYNKENLFNSLNYDVAAKKRKKDMLNSKTKTQYFHQEKWIYVHKGSTKERHGYCTLGEAFNRLDFSTAILDSRRFNYVVRALPLASEGNR

SEQ ID NO: 30202 - protein, 16 aa, Homo sapiens
RSARRHLHLGPTSWAG

SEQ ID NO: 30203 - protein, 54 aa, Homo sapiens
IQVCSGPKRYDWTGKNWVYSHDGVSLHELLAAELTKALKTKLDLSSLAYSGKDA

SEQ ID NO: 30204 - protein, 121 aa, Homo sapiens
RGPPQPLPAVQPSGPINMEETRPEGSYFSKYSEAAELRSTASLLATQESDVMVGPFKLRSRKQRTLSMIEEEIRAAQEREEELKRQRQVLQSTQSPRTKNAPSLPSRTCYKTAPGPRGHTG

SEQ ID NO: 30205 - protein, 23 aa, Homo sapiens
LSPKLPPGREKRPGAKNEPFSST

SEQ ID NO: 30206 - protein, 182 aa, Homo sapiens
LAKVKNNFKDLMSKLTEGQYVLCRWTDGLYYLGKIKRVSSSKQSCLVTFEDNSKYWVLWKDIQHAGVPGEEPKCNICLGKTSGPLNEILICGKCGLGYHQQCHIPIAGSADQPLLTPWFCRRCIFALAVRVSLPSSPVPASPASSSGADQRLPSQSLSSKQKGHTWALETDSASATVLGQDL

SEQ ID NO: 30207 - protein, 22 aa, Homo sapiens
LNCGRGNKTVLSAEAHYGCNWR

SEQ ID NO: 30208 - protein, 481 aa, Homo sapiens
KTVVSSIASLDLATISEMSSRSTKDLIKSKWGSKPSNSKSETTLEKLKGEIAHLKTSVDEITSGKGKLTDKERHRLLEKIRVLEAEKEKNAYQLTEKDKEIQRLRDQLKARYSTTTLLEQLEETTREGERREQVLKALSEEKDVLKQQLSAATSRIAELESKTNTLRLSQTVAPNCFNSSINNIHEMEIQLKDALEKNQQWLVYDQQREVYVKGLLAKIFELEKKTETAAHSLPQQTKKPESEGYLQEEKQKCYNDLLASAKKDLEVERQTITQLSFELSEFRRKYEETQKEVHNLNQLLYSQRRADVQHLEDDRHKTEKIQKLREENDIARGKLEEEKKRSEELLSQVQFLYTSLLKQQEEQTRVALLEQQMQACTLDFENEKLDRQHVQHQLHVILKELRKARNQITQLESLKQLHEFAITEPLVTFQGETENREKVAASPKSPTAALNESLVECPKCNIQYPATEHRDLLVHVEYCSK

SEQ ID NO: 30209 - protein, 9 aa, Homo sapiens
LIRIIASSF

SEQ ID NO: 30210 - protein, 12 aa, Homo sapiens
RHYFVERLASPS

SEQ ID NO: 30211 - protein, 24 aa, Homo sapiens
IITLHQQLLASQQPEHRQERVSGK

SEQ ID NO: 30212 - protein, 299 aa, Homo sapiens
KDFGKMTANSVSVATCEQLTYYSKSVGFMQWDNNGNTGNATCFVFNGGYIFTCRHVVHLMVGKNTHPSLWPDIISKCAKVTFTYTEFCPTPDNWFSIEPWLKVSNENLDYAILKLKENGNAFPPGLWRQISPQPSTGLIYLIGHPEGQIKKIDGCTVIPLNERLKKYPNDCQDGLVDLYDTTSNVYCMFTQRSFLSEVWNTHTLSYDTCFSDGSSGSPVFNASGKLVALHTFGLFYQRGFNVHALIEFGYSMDSILCDIKKTNESLYKSLNDEKLETYDEEKGKQESSLQDHQIEPMEC

SEQ ID NO: 30213 - protein, 23 aa, Homo sapiens
ILGLFLLHRRNSNTKWYKVMMIP

SEQ ID NO: 30214 - protein, 176 aa, Homo sapiens
ITVLNNSGLASEKDYPFQGKVRAHRCHPKKYQKVAWIQDFIMLQNNEHRIAQYLATYGPITVTINMKPLQLYRKGVIKATPTTCDPQLVDHSVLLVGFGSVKSEEGIWAETVSSQSQPQPPHPTPYWILKNSWGAQWGEKGYFRLHRGSNTCGITKFPLTARVQKPDMKPRVSCPP

SEQ ID NO: 30215 - protein, 27 aa, Homo sapiens
KDLRRQLELHKDQMVDIMRASQGANFK

SEQ ID NO: 30216 - protein, 471 aa, Homo sapiens
VEDWDLVQTLGEGAYGEVQLAVNRVTEEAVAVKIVDMKRAVDCPENIKKEICINKMLNHENVVKFYGHRREGNIQYLFLEYCSGGELFDRIEPDIGMPEPDAQRFFHQLMAGVVYLHGIGITHRDIKPENLLLDERDNLKISDFGLATVFRYNNRERLLNKMCGTLPYVAPELLKRREFHAEPVDVWSCGIVLTAMLAGELPWDQPSDSCQEYSDWKEKKTYLNPWKKIDSAPLALLHKILVENPSARITIPDIKKDRWYNKPLKKGAKRPRVTSGGVSESPSGFSKHIQSNLDFSPVNSASSEENVKYSSSQPEPRTGLSLWDTSPSYIDKLVQGISFSQPTCPDHMLLNSQLLGTPGSSQNPWQRLVKRMTRFFTKLDADKSYQCLKETCEKLGYQWKKSCMNQVTISTTDRRNNKLIFKVNLLEMDDKILVDFRLSKGDGLEFKRHFLKIKGKLIDIVSSQKIWLPAT

SEQ ID NO: 30217 - protein, 386 aa, Homo sapiens
ITHFVHVAEKLLQLQNFNTLMAVVGGLSHSSISRLKETHSHVSPETIKLWEGLTELVTATGNYGNYRRRLAACVGFRFPILGVHLKDLVALQLALPDWLDPARTRLNGAKMKQLFSILEELAMVTSLRPPVQANPDLLSLLTVSLDQYQTEDELYQLSLQREPRSKSSPTSPTSCTPPPRPPVLEEWTSAAKPKLDQALVVEHIEKMVESVFRNFDVDGDGHISQEEFQIIRGNFPYLSAFGDLDQNQDGCISREEMVSYFLRSSSVLGGRMGFVHNFQESNSLRPVACRHCKALILGIYKQGLKCRACGVNCHKQCKDRLSVECRRRAQSVSLEGSAPSPSPMHSHHHRAFSFSLPRPGRRGSRPPEIREEEVQTVEDGVFDIHL

SEQ ID NO: 30218 - protein, 40 aa, Homo sapiens
VAALSSLCWASCSSRVFISSFPWRFVQMPMSEVMLEKRSS

SEQ ID NO: 30219 - protein, 141 aa, Homo sapiens
VNSHIAKLQELWKTPQNQTIHLSKSMMEASFFKHPDLTTGQKRYLCSIAKIYNANYLKMLMKRQYMHVLQHSSQKPGVLTHHRSRLSSRYSQKQHYPCTTWRHQLEREDSGSSDIAAASAPEMLIQHSLWRPVRNKEGSVS

SEQ ID NO: 30220 - protein, 33 aa, Homo sapiens
ILVFGFHPQPVTKDLTTQSPAPQNTARHGHRCD

SEQ ID NO: 30221 - protein, 17 aa, Homo sapiens
IKSSPRACSAPRGTFIF

SEQ ID NO: 30222 - protein, 139 aa, Homo sapiens
RLDKSNFQQPYITNRTFMLAKEASLADNNTDVRLIGEKLFHGVSMSERCYLMKQVLNFTLEEVLFPQSDRFQPYMQEVVPFLARLSNRLSTCHIEGDDLHIQRNVQKLKDTVKKLGESGEIKAIGELDLLFMSLRNACI

SEQ ID NO: 30223 - protein, 14 aa, Homo sapiens
RTCPQRDKRYRYCG

SEQ ID NO: 30224 - protein, 684 aa, Homo sapiens
TMSTPAVPQDLQLPPSQRAQSAFKEQRRQKLKEHLLRRKTLFAYKQENEMLSSSRDQRVVTSEDQVQEGTKVLKLKTKMADKENMKRPAESKNNTVVGKHCIPLKPSNELTNSTVVIDTHKPKDSNQTPHLLLTEDDPQSQHMTLSQAFHLKNNSKKKQMTTEKQKQDANMPKKPVLGSYRGQIVQSKINSFRKPLQVKDESSAATKKLSATIPKATKPQPVNTSSVTVKSNRSSNMTATTKFVSTTSQNTQLVRPPIRSHHSNTRDTVKQGISRTSANVTIRKGPHEKELLQSKTALSSVKTSSSQGIIRNKTLSRSIASEVIARPASLSNDKLMEKSEPVDQRRHTAGKAIVDSRSAQPKETSEERKARLSEWKAGKGRVLKRPPNSVVTQHEPAGQNEKPVGSFWTTMAEEDEQRLFTEKVNNTFSECLNLINEGCPKEDILVTLNDLIKNIPDAKKLVKYWICLALIEPITSPIENIIAIYEKAILAGAQPIEEMRHTIVDILTMKSQEKANLGENMEKSCASKEEVKEVSIEDTGVDVDPEKLEMESKLHRNLLFQDCEKEQDNKTKDPTHDVKTPNTETRTSCLIKYNVSTTPYLQSVKKKVQFDGTNSAFKELKFLTPVRRSRRLQEKTSKLPDMLKDHYPCVSSLEQLTELGRETDAFVCRPNAALCRVYYEADTT

SEQ ID NO: 30225 - protein, 421 aa, Homo sapiens
LESFPAVLSMDPIRSFCGKLRSLASTLDCETARLQRALDGEESDFEDYPMRILYDLHSEVQTLKDDVNILLDKARLENQEGIDFIKATKVLMEKNSMDIMKIREYFQKYGYSPRVKKNSVHEQEAINSDPELSNCENFQKTDVKDDLSDPPVASSCISEKSPRSPQLSDFGLERYIVSQVLPNPPQAVNNYKEEPVIVTPPTKQSLVKVLKTPKCALKMDDFECVTPKLEHFGISEYTMCLNEDYTMGLKNARNNKSEEAIDTESRLNDNVFATPSPIIQQLEKSDAEYTNSPLVPTFCTPGLKIPSTKNSIALVSTNYPLSKTNSSSNDLEVEDRTSLVLNSDTCFENLTDPSSPTISSYENLLRTPTPPEVTKIPEDILQLLSKYNSNLATPIAIKAVPPSKRFLKHGQNIRDVSNKEN

SEQ ID NO: 30226 - protein, 27 aa, Homo sapiens
LYRFLRLSLKRLAVPTSCHLGIIVLET

SEQ ID NO: 30227 - protein, 38 aa, Homo sapiens
IANTHLNRESSRSHSVFNIKLVQAPLDADGDNVLQVKL

SEQ ID NO: 30228 - protein, 272 aa, Homo sapiens
LGSVKETFDAMKNSTKEFVRHHKEKIKQAKEAVKENLKKFSDSVKSTFRHFKDTTKNIFDEKGNKRFGATKEAAEKPRTVFSDYLHPQYKAPTENHHNRGPTMQNDGRKEKPVHFKEFRKNTNSKKCSPGHDCRENSHSFRKACSGVFDCAQQESMSLFNTVVNPIRMDEFRQIIQRYMLKELDTFCHWNELDQFINKFFLNGVFIHDQKLFTDFVNDVKDYLRNMKEYEVDNDGVFEKLDEYIYRHFFGHTFSPPYGPRSVYIKPCHYSSL

SEQ ID NO: 30229 - protein, 93 aa, Homo sapiens
KGESSGKNVTLPAVFKAPIRPDIVNFVHTNLRKNNRQPYAVSELAGHQTSAESWGTGRAVARIPRVRGGGTHRSGQGAFGNVSFVSLPKTGHL

SEQ ID NO: 30230 - protein, 198 aa, Homo sapiens
VQPSYRSALMWFGVIFIRHGLYQDGVFKFTVYIPDNYPDGDCPRLVFDIPVFHPLVDPTSGELDVKRAFAKWRRNHNHIWQVLMYARRVFYKIDTASPLNPEAAVLYEKDIQLFKSKVVDSVKVCTARLFDQPKIEDPYAISFSPWNPSVHDEAREKMLTQKKKPEEQHNKSVHVAGLSWVKPGSVQPFSKEEKTVAT

SEQ ID NO: 30231 - protein, 10 aa, Homo sapiens
MLKNIQSLTS

SEQ ID NO: 30232 - protein, 299 aa, Homo sapiens
LPSSLSCKVHVASVNNFPTAAGLASSAAGYACLAYTLARVYGVESDLSEVARRGSGSACRSLYGGFVEWQMGEQADGKDSIARQVAPESHWPELRVLILVVSAEKKLTGSTVGMRASVETSPLLRFRAESVVPARMAEMARCIRERDFPSFAQLTMKDSNQFHATCLDTFPPISYLNAISWRIIHLVHRFNAHHGDTKVAYTFDAGPNAVIFTLDDTVAEFVAAVWHGFPPGSNGDTFLKGLQVRPAPLSAELQAALAMEPTPGGVKYIIVTQVGPGPQILDDPCAHLLGPDGLPKPAA

SEQ ID NO: 30233 - protein, 60 aa, Homo sapiens [sequence omitted]

SEQ ID NO: 30234 - protein, 96 aa, Homo sapiens
KMAVVRYMFFNREDVLWFKPVELRTKWGRRGHIKEPLGTHGHMKCSFDGKLKSQDTVLMNLYKRVFPKWTYDPYVPEPVPWLKSEISSTVPQGGME

SEQ ID NO: 30235 - protein, 22 aa, Homo sapiens
LECTEVTTGLSVQTGAFGQIFF

SEQ ID NO: 30236 - protein, 59 aa, Homo sapiens
TQMGRSVRASSTHISRTSLSNSFQRWIILLYFWLFFMYTELYVKRCFGIHQFPLPRTCL

SEQ ID NO: 30237 - protein, 133 aa, Homo sapiens
VAAQRQDRLTVGVYESAKLMNVDPDSVVLCLLAIDEEEEDDIALQIHFTLIQSFCCDNDINIVRVSGMQRLAQLLGEPAETQGTTEARDLHCLLVTNPHTDAWKSHGLVEVASYCEESRGNNQWVPYISLQER

SEQ ID NO: 30238 - protein, 15 aa, Homo sapiens
ILPLLMATGSGKGSV

SEQ ID NO: 30239 - protein, 114 aa, Homo sapiens
LAASASAPARRAPRPSSPPGRPRRRVNGGLRGGSLGSSGLGRLWQPGPGRGLRWRRKALHRPFGRSLGLCLSRGVVARGGRRRGAGAAGALRRVQRAPATREGAPPAALFALGL

SEQ ID NO: 30240 - protein, 15 aa, Homo sapiens
VLPCSIQVKQHCTGL

SEQ ID NO: 30241 - protein, 26 aa, Homo sapiens
TARAVSQNLILALDLRRESLTRDETQ

SEQ ID NO: 30242 - protein, 75 aa, Homo sapiens
VGGSDYCKIAEQLGDGDEVIEKFDYVFAENGTVQYKHGRLLSKQTIQNHLGEELLQDLINFCLSYMALLRLPKKR

SEQ ID NO: 30243 - protein, 40 aa, Homo sapiens
VDNFRPLQPLMNRTVRSSFRHDYVLNVQAKPKPATSQATP

SEQ ID NO: 30244 - protein, 45 aa, Homo sapiens
LSRIPAVGPSLSRVASLSVGCGTTPGKRRGRNLILIGGGRFEGLL

SEQ ID NO: 30245 - protein, 58 aa, Homo sapiens
KDAASGEHPGSKTGPGLSTVGSVTRLGKAGAPAVGLLLANERSPRRRRGANDPTQDGE

SEQ ID NO: 30246 - protein, 27 aa, Homo sapiens
KRDSDGTAGSKDEWSPPFGCCGLQART

SEQ ID NO: 30247 - protein, 32 aa, Homo sapiens
MLLGRLTSQLLRAVPWAASDAHRGNLRGSGQE

SEQ ID NO: 30248 - protein, 292 aa, Homo sapiens
MSPRYAGGPRPPIRMGNQPPGGVPGTQPLLPNSMDPTRQQGHPNMGGSMQRMNPPRGMGPMGPGPQNYGSGMRPPPNSLGPAMPGINMGPGAGRPWPNPNSANSIPYSSSSPGTYVGPPGGGGPPGTPIMPSPADSTNSSDNIYTMINPVPPGGSRSNFPMGPGSDGPMGGMGGMEPHHMNGSLGSGDIDGLPKNSPNNISGISNPPGTPRDDGELGGNFLHSFQNDNYSPSMTMSVSPLLRDAERAGIAGGKMPEIMQEVRCHYPGAGGEGISLLPSTPSHPIHAPYLSQF

SEQ ID NO: 30249 - protein, 165 aa, Homo sapiens
MQQQLDEYQELLDIKLALDMEIHAYRKLLEGEEERLRLSPSPTSQRSRGRASSHSSQTQGGGSVTKKRKLESTESRSSFSQHARTSGRVAVEEVDEEGKFVRLRNKSNEDQSMGNWQIKRQNGDDPLLTYRFPPKFTLKAGQVVTVSGRALGTLGRPWVAMGALG

SEQ ID NO: 30250 - protein, 98 aa, Homo sapiens
MTALGGASSSTHHPITTYPPYVPEYSSGLFPPSSLLGGSPTGFGCKSRPKARSSTVCSQESRDVLCELSDHHNHTLEEECQWGPCLQCLWALLQASQY

SEQ ID NO: 30251 - protein, 57 aa, Homo sapiens
MGRMHAPGKGLSQSALPYRRSVPTWLKLTSDDVKEQIYKLAKKGLTPSQIGECLCLT

SEQ ID NO: 30252 - protein, 101 aa, Homo sapiens
MSTEEIIQRTRLLDSEIKIMKSEVLRVTHELQAMKDKIKENSEKIKVNKTLPYLVSNVIELLDVDPNDQEEDGANIDLDSQRKGKCAVIKTSTRQVSVAQQ

SEQ ID NO: 30253 - protein, 360 aa, Homo sapiens
MSSNSTDLPLNIECFMNDKDVSGKMNRSQFEELCAELLQKIEVPLYSLLEQTHLKVEDVSAVEIVGGATRIPAVKERIAKFFGKDISTTLNADEAVARGCALQCAILSPAFKVREFSVTDAVPFPISLIWNHDSEDTEGVHEVFSRNHAAPFSKVLTFLRRGPFELEAFYSDPQGVPYPEAKIGRFVVQNVSAQKDGEKSRVKVKVRVNTHGIFTISTASMVEKVPTEENEMSSEADMECLNQRPPENPDTDKNVQQDNSEAGTQPQVQTDAQQTSQSPPSPELTSEENKIPDADKANEKKVDQPPEAKKPKIKVVNVELPIEANLVWQLGKDLLNMYIETEVSTSIKYFYFEICLVSWP

SEQ ID NO: 30254 - protein, 52 aa, Homo sapiens [sequence omitted]

SEQ ID NO: 30255 - protein, 127 aa, Homo sapiens
MSQWKATRSPIKCAPSHPRMRSCRPWRSSSLTWHQAPSMRPGLDMSSAPRRWWKHPLSCACGRLCREEAADTGDDILPHETGLQPGMVPLKYLLEEGVWGAGVGCGVFPAISTAYDHCNNLSPSEEH

SEQ ID NO: 30256 - protein, 435 aa, Homo sapiens
MTGSDVLQWIVQRLWISSLEAQNLGNFIVRYGYIYPLQDPKNLILKPDGSLYRFQTPYFWPTQQWPAEDTDYAIYLAKRNIKKKGILEEYEKENYNFLNQKMNYKWDFVIMQAKEQYRAGKERNKADRYALDCQEKAYWLVHRCPPGMDNVLDYGLDRVTNPNEVKKQTVVAVKKEIMYYQQALMRSTVKSSVSLGGIVKYSEQFSSNDAIMSGCLPSNPWITDDTQFWDLNAKLVEIPTKMRVERWAFNFSELIRDPKGRQSFQYFLKKEFSGENLGFWEACEDLKYGDQSKVKEKAEEIYKLFLAPGARRWINIDGKTMDITVKGLKHPHRYVLDAAQTHIYMLMKKDSYARYLKSPIYKDMLAKAIEPQETTKKSSTLPFMRRHLRSSPSPVILRQLEEEAKAREAANTVDITQVMSKLDRRSQLQKELPPK

SEQ ID NO: 30257 - protein, 365 aa, Homo sapiens [sequence omitted]

SEQ ID NO: 30258 - protein, 72 aa, Homo sapiens
MVPRAPLRAEPAPPLRCQQGPLQPLQLDPQHQPWAYPGGLLQEPGDGGRDADAGGLGQVQGRGGRPGADVQW

SEQ ID NO: 30259 - protein, 93 aa, Homo sapiens
MASHYAVQACLRLLATNDLPALAFQSAGITGVSHCIPATNLSHFISFRKVHILGSFQNIKMARTAICNLILGNPPSKVYGNIRAVASRSADRF

SEQ ID NO: 30260 - protein, 78 aa, Homo sapiens
MLGEPNPKREPASVESGVRASPRQGIAEPQRGALGSAASPTGQGMTAPALEYRLCFGAFGISFHLVRKSVVSPASSGK

SEQ ID NO: 30261 - protein, 61 aa, Homo sapiens
MRRSILNSLNIFSSVGPAWQDLSEGMMERLLDYMIWIKPWVEAILPWLNLPGMSLRVKRWQ

SEQ ID NO: 30262 - protein, 135 aa, Homo sapiens
MTSPLNLSYFYGASPPAAAPGACDASCSVLGPSAPGSPGSDSSDFSSASSVSSCGAVESRSRGGARAERQPVEPHMGVGRQQRGPFQGVRVKNSVKELLLHIRSHKQKASGQAVDDFKTQGVNIEQFRGKSYLYL

SEQ ID NO: 30263 - protein, 42 aa, Homo sapiens
MSTGMQKELSCSSNGKIMHRGYTPEQNSMDFRNSLYWLWYLY

SEQ ID NO: 30264 - protein, 83 aa, Homo sapiens
MGQGEPGGPQGDPWVPHELLLPSLCDSSHASSWGSGSITCAWRGGDSSSHPLVSGHILSNSPVAAVMCSSMGTHLSPFKGTLL

SEQ ID NO: 30265 - protein, 1110 aa, Homo sapiens
MELIANGTLNILEEENHIKDALSRIVVEMIKREWPQHWPDMLIELDTLSKQGETQTELVMFILLRLAEDVVTFQTLPPQRRRDIQQTLTQNMERIFSFLLNTLQENVNKYQQVKTDTSQESKAQANCRVGVAALNTLAGYIDWVSMSHITAENCKLLEILCLLLNEQELQLGAAECLLIAVSRKGKLEDRKPLMVLFGDVAMHYILSAAQTADGGGLVEKHYVFLKRLCQVLCALGNQLCALLGADSDVETPSNFGKYLESFLAFTTHPSQFLRSSTQMTWGALFRHEILSRDPLLLAIIPKYLRASMTNLVKMGFPSKTDSPSCEYSRFDFDSDEDFNAFFNSSRAQQGEVMRLACRLDPKTSFQMAGEWLKYQLSTFLDAGSVNSCSAVGTGEGSLCSVFSPSFVQWEAMTLFLESVITQMFRTLNREEIPVNDGIELLQMVLNFDTKDPLILSCVLTNVSALFPFVTYRPEFLPQVFSKLFSSVTFETVEESKAPRTRAVRNVRRHACSSIIKMCRDYPQLVLPNFDMLYNHVKQLLSNELLLTQMEKCALMEALVLISNQFKNYERQKVFLEELMAPVASIWLSQDMHRVLSDVDAFIAYVGTDQKSCDPGLEDPCGLNRARMSFCVYSILGVVKRTCWPTDLEEAKAGGFVVGYTSSGNPIFRNPCTEQILKLLDNLLALIRTHNTLYAPEMLAKMAEPFTKALDMLDAEKSAILGLPQPLLELNDSPVFKTVLERMQRFFSTLYENCFHILGKAGPSMQQDFYTVEDLATQLLSSAFVNLNNIPDYRLRPMLRVFVKPLVLFCPPEHYEALVSPILGPLFTYLHMRLSQKWQVINQRSLLCGEDEAADENPESQEMLEEQLVRMLTREVMDLITVCCVSKKGADHSSAPPADGDDEEMMATEVTPSAMAELTDLGKCLMKHEDVCTALLITAFNSLAWKDTLSCQRTTSQLCWPLLKQVLSGTLLADAVTWLFTSVLKGLQMHGQHDGCMASLVHLAFQIYEALRPRYLEIRAVMEQIPEIQKDSLDQFDCKLLNPSLQKVADKRRKDQFKRLIAGCIGKPLGEQFRKEVHIKNLPSLFKKTKPMLETEVLDNDGGGLATIFEP

SEQ ID NO: 30266 - protein, 181 aa, Homo sapiens
MDLIKKYKQNTQGLKSPENPKKAALVMQTEAARDYRDEESSSPARHGEQMPSFYPAENLDNGLIDQRVLKQRRNVKQILARSKALQWTKSYVLPEFPYDVKCMLAEQKCPDHSMRIRIIEFLQADMTKYLEGSLYPSTQQYNDVVNALLQAHPFLDEDGCGFCHKIAVRIKGRIDILFLLP

SEQ ID NO: 30267 - protein, 344 aa, Homo sapiens
MSEQRLYYIDLKKSRSILKCIQFYADESYNLMFEVPLDISLSNSGFKLVNFGCDYHQYRDKFSKHLTLCVFTNHTGSLCVCYSPKCASWGQITYSVFYIHKGHSKTFTTSLENVGSHMTKGITFLNLDYYVAVYLPGHFFHLLNVQHPDLICHNLFLTGNNEMIDMLPHCPLQSLSGSLVLDCCSGKLYRALLSQSSLLQLLQNTCLDCEKMAALHCALYCGQGAQFLEAQIIQWISENVSACHSFDLIQEFIIASSYWSVYSETSNMDKLLPHSSVLTWNTEIPGITLVTEDIALPLMKVLSFKGYWEKLNSNLEYVKYAKPHFHYNNSVVRREWHNLISEEV

SEQ ID NO: 30268 - protein, 410 aa, Homo sapiens
MYQDCPMQGRRDTDHWLRSNWIYRGEEASRVHVELQFTVRDCKSFPGGAGPLGCKETFNLLYMESDQDVGIQLRRPLFQKVTTVAADQSFTIRDLVSGSVKLNVERCSLGRLTRRGLYLAFHNPGACVALVSVRVFYQRCPETLNGLAQFPDTLPGPAGLVEVAGTCLPHARASPRPSGAPRMHCSPDGEWLVPVGRCHCEPGYEEGGSGEACVACPSGSYRMDMDTPHCLTCPQQSTAESEGATICTCESGHYRAPGEGPQVACTGPPSAPRNLSFSASGTQLSLRWEPPADTGGRQDVRYSVRCSQCQGTAQDGGPCQPCGVGVHFSPGARGLTTPAVHVNGLEPYANYTFNVEAQNGVSGLGSSGHASTSVSISMGHAGERLRGAGTGTWWRQKGLRPQNKLMGRKP

SEQ ID NO: 30269 - protein, 48 aa, Homo sapiens
MWGRLYKEWTQGCSKHSTEWPLLETQPCMCRRAPWPATWGPRAAAISI

SEQ ID NO: 30270 - protein, 55 aa, Homo sapiens
LPRNCGDSPYSELGLRFPGLSPSPEAPTKPGKEGKDSGGSSSMSAYSRKPERARS

SEQ ID NO: 30271 - protein, 70 aa, Homo sapiens
KSCQHECGGISASIGHDPHLLYTLSAVQILTLYDSINVIDVNKVVEYVKGLQKEDGSFAGDIWGPTKQLV

SEQ ID NO: 30272 - protein, 31 aa, Homo sapiens
TGSLFSGSFSKRKKQKFLPADSFSFRLFGPV

SEQ ID NO: 30273 - protein, 38 aa, Homo sapiens
MADFGAMGCVDIMPLDVALENLNLKESNKGNEPPPPPL

SEQ ID NO: 30274 - protein, 404 aa, Homo sapiens
RPLPHTDTNMNGQLNGFHEAFIEEGTFLFTSESVGEGHPDKICDQISDAVLDAHLQQDPDAKVACETVAKTGMILLAGEITSRAAVDYQKVVREAVKHIGYDDSSKGFDYKTCNVLVALEQQSPDIAQGVHLDRNEEDIGAGDQGLMFGYATDETEECMPLTIVLAHKLNAKLAELRRNGTLPWLRPDSKTQVTVQYMQDRGAVLPIRVHTIVISVQHDEEVCLDEMRDALKEKVIKAVVPAKYLDEDTIYHLQPSGRFVIGGPQGDAGLTGRKIIVDTYGGWGAHGGGAFSGKDYTKVDRSAAYAARWVAKSLVKGGLCRRVLVQVSYAIGVSHPLSISIFHYGTSQKSERELLEIVKKNFDLRPGVIVRDLDLKKPIYQRTAAYGHFGRDSFPWEVPKKLKY

SEQ ID NO: 30275 - protein, 71 aa, Homo sapiens
LSLFLVPSGAFPILVLRSSRSELVRRGWELVPAEIQWEEPAAARATPPLERILKEMKSALRNEVDCLLAFC

SEQ ID NO: 30276 - protein, 38 aa, Homo sapiens
MTTMWSLERCSCRSSKKDAEPATQPHRSSLATGNLLWS

SEQ ID NO: 30277 - protein, 59 aa, Homo sapiens
KATQPCASWSDLYSQCLYKGSCNTAAMAIWRTSALGQRIALTPHSPAALRWTIIEGFKC

SEQ ID NO: 30278 - protein, 6 aa, Homo sapiens
RLAGST

SEQ ID NO: 30279 - protein, 95 aa, Homo sapiens
ITDPVVLSPKDRVRDVFEAKARHGFCGIPITDTGRMGSRLVGIISSRDIDFLKEEEHDCFLEEIMTKREDLVVAPAGITLKEANEILQRSKKGKS

SEQ ID NO: 30280 - protein, 56 aa, Homo sapiens
IHYEHFGKESLFEEVPMDECTHSSWVSWLLFGVCYTPVLCPVSSEKVCICYSSESS

SEQ ID NO: 30281 - protein, 280 aa, Homo sapiens
LEQRSFISVRLLSYLSACRHPMEDSMDMDMSPLRPQNYLFGCELKADKDYHFKVDNDENEHQLSLRTVSLGAGAKDELHIVEAEAMNYEGSPIKVTLATLKMSVQPTVSLGGFEITPPVVLRLKCGSGPVHISGQHLVAVEEDAESEDEEEEDVKLLSISGKRSAPGGGSKVPQKKVKLAADEDDDDDDEEDDDEDDDDDDFDDEEAEEKAPVKKSIRDTPAKNAQKSNQNGKDSKPSSTPRSKGQESFKKQEKTPKTPKGPSSVEDIKAKMQASIEKAH

SEQ ID NO: 30282 - protein, 30 aa, Homo sapiens
IQFILRMSTISHAINVLVLKNTYLVLVRYF

SEQ ID NO: 30283 - protein, 37 aa, Homo sapiens
LSGASWTSQTRTKCTGLFLREPKKEPSSSPWRTRRCP

SEQ ID NO: 30284 - protein, 107 aa, Homo sapiens
KLNKKASSVETKPGASKVATKTKATGASKKLKKATGASKKSVKTPKKAKKPAATRKSSKNPKKPKTVKPKKVAKSPAKAKAVKPKAAKARVTKPKTAKPKKAAPKKK

SEQ ID NO: 30285 - protein, 77 aa, Homo sapiens
RNRQTMGSIEQTTEILLCLSPVEVASLKEGINFFRNKSTGKDYVLYKNKSRLRACKNMCKHQGGLFIKDIEDLAGSF

SEQ ID NO: 30286 - protein, 101 aa, Homo sapiens
VGTLFKAMPLQPSILREVSEEHNLLPQPPRSKYIHPDDELVLEDELQRIKLKGTIDVSKLVTGTVLAVFGSVRDDGKFLVEDYCFADLAPQKPAPPLDTDR

SEQ ID NO: 30287 - protein, 89 aa, Homo sapiens
THTGEKPFSCSWKGCERRFARSDELSRHRRTHTGEKKFACPMCDRRFMRSDHLTKHARRHLSAKKLPNWQMEVSKLNDIALPPTPAPTQ

SEQ ID NO: 30288 - protein, 53 aa, Homo sapiens
MNESRYQRFFAWRDRLRVRLFTDWRERFCAICDRYPHLPRSQVYEDLEGWFQA

SEQ ID NO: 30289 - protein, 41 aa, Homo sapiens
ISLAPIPPPPPLQRLPPGSCRMEEISWRRCPSTWKTTFALI

SEQ ID NO: 30290 - protein, 21 aa, Homo sapiens
LQTKWPYIELLWTTDRSPSLN

SEQ ID NO: 30291 - protein, 29 aa, Homo sapiens
RCAENPKKAEDNVCVKKIRTRSHRDSEDI

SEQ ID NO: 30292 - protein, 40 aa, Homo sapiens
MERPPAPESVGTEEMPEDGEPDAAELRRRRLQKLESPVAH

SEQ ID NO: 30293 - protein, 22 aa, Homo sapiens
LTTGKRTIKTVDLGISDLEDDC

SEQ ID NO: 30294 - protein, 67 aa, Homo sapiens
RRQKPSDRADSRRSWHEESPFEKQFKRRSCQMEFGESIMSENRSREELGKVGSQSSFSGSMEIIEVS

SEQ ID NO: 30295 - protein, 34 aa, Homo sapiens
IMPVCLPRSVLKTTKFKMETEGKSVKGMGERTCP

SEQ ID NO: 30296 - protein, 94 aa, Homo sapiens
KNADPILISLKHGYIPGKNRDLKVVKKNILDSKPTANKKCDLISIPKKTTDTASVQNEAKLDEILKEIKSIKDTICNQDERISKLEQQMAKIAA

SEQ ID NO: 30297 - protein, 20 aa, Homo sapiens
KTELCKETSCRTICSWRDNN

SEQ ID NO: 30298 - protein, 13 aa, Homo sapiens
IQTLARAHHHGPL

SEQ ID NO: 30299 - protein, 97 aa, Homo sapiens
VYSEKGESSGKNVTLPAVFKAPIRPDIVNFVHTNLRKNNRQPYAVSELAGHQTSAESWGTGRAVARIPRVRGGGTHRSGQGAFGNVSFVSLPKTGHL

SEQ ID NO: 30300 - protein, 44 aa, Homo sapiens
VKHFYWTSDSCPRPGVVLLTFRDKEICADPRVPWVKMILNKLSQ

SEQ ID NO: 30301 - protein, 733 aa, Homo sapiens
RYIKENSPCVTPVSTATHSLSRLHTMLTGLRNAPSEKLEQILRTCSRDPTQAIANRLKEMFEIYSQHFQPDEDFSNCAKEIASKHFRFAEMLYYKVLESVIEQEQKRLGDMDLSGILEQDAFHRSLLACCLEVVTFSYKPPGNFPFITEIFDVPLYHFYKVIEVFIRAEDGLCREVVKHLNQIEEQILDHLAWKPESPLWEKIRDNENRVPTCEEVMPPQNLERADEICIAGSPLTPRRVTEVRADTGGLGRSITSPTTLYDRYSSPPASTTRRRLFVENDSPSDGGTPGRMPPQPLVNAVPVQNVSGETVSVTPVPGQTLVTMATATVTANNGQTVTIPVQGIANENGGITFFPVQVNVGGQAQAVTGSIQPLSAQALAGSLSSQQVTGTTLQVPGQVAIQQISPGGQQQKQGQSVTSSSNRPRKTSSLSLFFRKVYHLAAVRLRDLCAKLDISDELRKKIWTCFEFSIIQCPELMMDRHLDQLLMCAIYVMAKVTKEDKSFQNIMRCYRTQPQARSQVYRSVLIKGKRKRRNSGSSDSRSHQNSPTELNKDRTSRDSSPVMRSSSTLPVPQPSSAPPTPTRLTGANSDMEEEERGDLIQFYNNIYIKQIKTFAMKYSQANMDAPPLSPYPFVRTGSPRRIQLSQNHPVYISPHKNETMLSPREKIFYYFSNSPSKRLREINSMIRTGETPTKKRGILLEDGSESPAKRICPENHSALLRRLQDVANDRGSH

SEQ ID NO: 30302 - protein, 28 aa, Homo sapiens
MVLKPHFHKDWQRRVATWFNQPARKIRR

SEQ ID NO: 30303 - protein, 50 aa, Homo sapiens
ISKTYSYLTPDLWKETVFTKSPYQEFTDHLVKTHTRVSVQRTQAPAVATT

SEQ ID NO: 30304 - protein, 9 aa, Homo sapiens
VIKMIDHEA

SEQ ID NO: 30305 - protein, 20 aa, Homo sapiens
TDLRGLKDGLVRSGTIMLSC

SEQ ID NO: 30306 - protein, 73 aa, Homo sapiens
LARILQFLPGDCRGAASTVDYNCNMTLEELVACDNAAQKMQTVTAAVEELLVAAQRQDRLTVGVYESAKLMNV

SEQ ID NO: 30307 - protein, 29 aa, Homo sapiens
LGPTGWLQRRRRKRWTSRTRPRGSSAAAS

SEQ ID NO: 30308 - protein, 162 aa, Homo sapiens
LQNIFPSLDELIEVHSLFLDRLMKRRQESGYLIEEIGDVLLARFDGAEGSWFQKISSRFCSRQSFALEQLKAKQRKDPRFCAFVQEAESRPRCRRLQLKDMIPTEMQRLTKYPLLLQSIGQNTEEPTEREKVELAAECCREILHHVNQAVRDMEDLLVSPST

SEQ ID NO: 30309 - protein, 99 aa, Homo sapiens
ILLSGYPPFVGRCGSDCGWDRGEACPACQNMLFESIQEGKYEFPDKDWAHISCAAKDLISKLLVRDAKQRLSAAQVLQHPWVQGCAPENTLPTPMVLQR

SEQ ID NO: 30310 - protein, 24 aa, Homo sapiens
VSKTQAARVPASRIQASGICATRT

SEQ ID NO: 30311 - protein, 7 aa, Homo sapiens
IRILPVV

SEQ ID NO: 30312 - protein, 10 aa, Homo sapiens
IQVKQHCTGL

SEQ ID NO: 30313 - protein, 54 aa, Homo sapiens
LSPLSKSWEMVIVNASPILEAPGCRGPQLDPSHPWSLTLDLSQKAEKRSSLESL

SEQ ID NO: 30314 - protein, 375 aa, Homo sapiens [sequence omitted]

SEQ ID NO: 30315 - protein, 23 aa, Homo sapiens
RTLGASSNYKTVEFKLSTTCTST

SEQ ID NO: 30316 - protein, 1285 aa, Homo sapiens
MNRNSVLSDPGLDSPRTSPVIMARVAQHHRRQGSDAAVPSTGDQGVDQSPKPLIIGPEEDYDPGYFNNESDIIFQDLEKLKSRPAHLGVFLRYIFSQADPSPLLFYLCAEVYQQASPKDSRSLGKDIWNIFLEKNAPLRVKIPEMLQAEIDSRLRNSEDARGVLCEAQEAAMPEIQEQIHDYRTKRTLGLGSLYGENDLLDLDGDPLRERQVAEKQLAALGDILSKYEEDRSAPMDFALNTYMSHAGIRLREARPSNTAEKAQSAPDKDKWLPFFPKTKKSSNSKKEKDALEDKKRNPILKYIGKPKSSSQSTFHIPLSPVEVKPGNVRNIIQHFENNQQYDAPEPGTQRLSTGSFPEDLLESDSSRSEIRLGRSESLKGREEMKRSRKAENVPRSRSDVDMDAAAEATRLHQSASSSTSSLSTRSLENPTPPFTPKMGRRSIESPSLGFCTDTLLPHLLEDDLGQLSDLEPEPDAQNWQHTVGKDVVAGLTQREIDRQEVINELFVTEASHLRTLRVLDLIFYQRMKKENLMPREELARLFPNLPELIEIHNSWCEAMKKLREEGPIIKEISDLMLARFDGPAREELQQVAAQFCSYQSIALELIKTKQRKESRFQLFMQEAESHPQCRRLQLRDLIISEMQRLTKYPLLLESIIKHTEGGTSEHEKLCRARDQCREILKYVNEAVKQTENRHRLEGYQKRLDATALERASNPLAAEFKSLDLTTRKMIHEGPLTWRISKDKTLDLHVLLLEDLLVLLQKQDEKLLLKCHSKTAVGSSDSKQTFSPVLKLNAVLIRSVATDKRAFFIICTSKLGPPQIYELVALTSSDKNTWMELLEEAVRNATRHPGAAPMPVHPPPPGPREPAQQGPTPSRVELDDSDVFHGEPEPEELPGGTGSQQRVQGKHQVLLEDPEQEGSAEEEELGVLPCPSTSLDGENRGIRTRNPIHLAFPGPLFMEGLADSALEDVENLRHLILWSLLPGHTMETQAAQEPEDDLTPTPSVISVTSHPWDPGSPGQAPPGGEGDNTQLAGLEGERPEQEDMGLCSLEHLPPRTRNSGIWESPELDRNLAEDASSTEAAGGYKVVRKAEVAGSKVVPALPESGQSEPGPPEVEGGTKATGNCFYVSMPSGPPDSSTDHSEAPMSPPQPDSLPAGQTEPQPQLQGGNDDPRRPSRSPPSLALRDVGMIFHTIEQLTLKLNRLKDMELAHRELLKSLGGESSGGTTPVGSFHTEAARWTDGSLSPPAKEPLASDSRNSHELGPCPEDGSDAPLEDSTADAAASPGP

SEQ ID NO: 30317 - protein, 139 aa, Homo sapiens
MFTAEKMVRRGKEEVRRKKQGNECCSVTQAGVQWHDLGSLQPPPPGFKRFSCLSLPSSWDYRLECDGMILAHGKLRLPGSSDSPASASRVAGITGMCHHAPLARLVSNTLPQVILPPLGLQTLHVMDQLTPSRSVNWFI

SEQ ID NO: 30318 - protein, 2183 aa, Homo sapiens
MRSIRRWAYEMFRNERAIRFVVMVTPEDLKANAEYIKMADHYVPVPGGPNNNNYANVELIVDIAKRIPVQAVWAGWGHASENPKLPELLCKNGVAFLGPPSEAMWALGDKIASTVVAQTLQVPTLPWSGSGLTVEWTEDDLQQGKRISVPEDVYDKGCVKDVDEGLEAAERIGFPLMIKASEGGGGKGIRKAESAEDFPILFRQVQSEIPGSPIFLMKLAQHARHLEVQILADQYGNAVSLFGRDCSIQRRHQKIVEEAPATIAPLAIFEFMEQCAIRLAKTVGYVSAGTVEYLYSQDGSFHFLELNPRLQVEHPCTEMIADVNLPAAQLQIAMGVPLHRLKDIRLLYGESPWGVTPISFETPSNPPLARGHVIAARITSENPDEGFKPSSGTVQELNFRSSKNVWGYFSVAATGGLHEFADSQFGHCFSWGENREEAISNMVVALKELSIRGDFRTTVEYLINLLETESFQNNDIDTGWLDYLIAEKVQAEKPDIMLGVVCGALNVADAMFRTCMTDFLHSLERGQVLPADSLLNLVDVELIYGGVKYILKVARQSLTMFVLIMNGCHIEIDAHRLNDGGLLLSYNGNSYTTYMKEEVDSYRITIGNKTCVFEKENDPTVLRSPSAGKLTQYTVEDGGHVEAGSSYAEMEVMKMIMTLNVQERGRVKYIKRPGAVLEAGCVVARLELDDPSKVHPAEPFTGELPAQQTLPILGEKLHQVFHSVLENLTNVMSGFCLPEPVFSIKLKEWVQKLMMTLRHPSLPLLELQEIMTSVAGRIPAPVEKSVRRVMAQYASNITSVLCQFPSQQIATILDCHAATLQRKADREVFFINTQSIVQLVQRYRSGIRGYMKTVVLDLLRRYLRVEHHFQQAHYDKCVINLREQFKPDMSQVLDCIFSHAQVAKKNQLVIMLIDELCGPDPSLSDELISILNELTQLSKSEHCKVALRARQILIASHLPSYELRHNQVESIFLSAIDMYGHQFCPENLKKLILSETTIFDVLPTFFYHANKVVCMASLEVYVRRGYIAYELNSLQHRQLPDGTCVVEFQFMLPSSHPNRMTVPISITNPDLLRHSTELFMDSGFSPLCQRMGAMVAFRRFEDFTRNFDEVISCFANVPKDTPLFSEARTSLYSEDDCKSLREEPIHILNVSIQCADHLEDEALVPILRTFVQSKKNILVDYGLRRITFLIAQEKEFPKFFTFRARDEFAEDRIYRHLEPALAFQLELNRMRNFDLTAVPCANHKMHLYLGAAKVKEGVEVTDHRFFIRAIIRHSDLITKEASFEYLQNEGERLLLEAMDELEVAFNNTSVRTDCNHIFLNFVPTVIMDPFKIEESVRYMVMRYGSRLWKLRVLQAEVKINIRQTTTGSAVPIRLFITNESGYYLDISLYKEVTDSRSGNIMFHSFGNKQGPQHGMLINTPYVTKDLLQAKRFQAQTLGTTYIYDFPEMFRQALFKLWGSPDKYPKDILTYTELVLDSQGQLVEMNRLPGGNEVGMVAFKMRFKTQEYPEGRDVIVIGNDITFRIGSFGPGEDLLYLRASEMARAEGIPKIYVAANSGARIGMAEEIKHMFHVAWVDPEDPHKGFKYLYLTPQDYTRISSLNSVHCKHIEEGGESRYMITDIIGKDDGLGVENLRGSGMIAGESSLAYEEIVTISLVTCRAIGIGAYLVRLGQRVIQVENSHIILTGASALNKVLGREVYTSNNQLGGVQIMHYNGVSHITVPDDFEGVYTILEWLSYMPKDNHSPVPIITPTDPIDREIEFLPSRAPYDPRWMLAGRPHPTLKGTWQSGFFDHGSFKEIMAPWAQTVVTGRARLGGIPVGVIAVETRTVEVAVPADPANLDSEAKIIQQAGQVWFPDSAYKTAQAVKDFNREKLPLMIFANWRGFSGGMKDMYDQVLKFGAYIVDGLRQYKQPILIYIPPYAELRGGSWVVIDATINPLCIEMYADKESRGGVLEPEGTVEIKFRKKDLIKSMRRIDPAYKKLMEQLGEPDLSDKDRKDLEGRLKAREDLLLPIYHQVAVQFADFHDTPGRMLEKGVISDILEWKTARTFLYWRLRRLLLEDQVKQEILQASGELSHVHIQSMLRRWFVETEGAVKAYLWDNNQVVVQWLEQHWQAGDGPRSTIRENITYLKHDSVLKTIRGLVEENPEVAVDCVIYLSQHISPAERAQVVHLLSTMDSPAST

SEQ ID NO: 30319 - protein, 123 aa, Homo sapiens
MLEERALGRYRPDLNPHSSCFGPCNSRLPLNPLSSINTWLSRNNYDLGPGPSGIFTPNLNFITLERETVEWNDSPELQIEGIFSSDFGDYVSNLSGNKISMAGTPSWPLYSWYVFFLWTMRNM

SEQ ID NO: 30320 - protein, 144 aa, Homo sapiens
MARRGPKECVPEDLELKKKIFAQLDSIIDDRVILSSSTSCLMPSKLFAGLVHVKQCIVAHPVNPPYYIPLVELVPHPETAPTTVDRTHALMKKIGQCPMRVQKEVAGFVLNRLQYAIISEAWRLVERLRWTCWCNPFFLAAALG

SEQ ID NO: 30321 - protein, 156 aa, Homo sapiens
MASSPDMDLATVSALRKMGVKLTPHNKETVQHSDVLFLAVKPHIIPFILDEIGADIEDRHIVVSCAAGVTISSIEKKLSAFRPAPRVIRCMTNTPVVVREGATVYATGTHAQVEDGRLMEQLLSSVGFCTEVEEDLIDAVTGLSGSGPAYGAAVHG

SEQ ID NO: 30322 - protein, 470 aa, Homo sapiens
MEELRTGVTGVLQELDLQLKTKGSPLLQDISAERSPNGVQLERSNTAEKLYDSNHSGKVFNEHPFLMTHMITHIGEKTSEDNQSGKALRKNFPHSFYKKSHAEGKMPKCVKHEKAFNQFPNLTRQNKTHTQEKLCECKDCWRTFLNQSSLKLHIRSHNGDKHYVCKECGKAFSNSSHLIGHGRIHSGEKPYVCKECGKAFTQSTGLKLHIRTHSGEKPYKCKECGKAFTHSSYLTDHTRIHSGKKPYVCMECGKAFTRSTGLILHMRIHTGEKPYECKECGKAFIHSSYLTKHVRIHSGEKLYLCKACGKAFTRSSGLVLHMRTHTGEKPYECKECGKAFNNSSMLSQHVRIHTGEKPYECKECGKAFTQSSGLSTHLRTHTGEKACECKECGKAFARSTNLNMHMRTHTGEKPYACKECGKAFRYSTYLNVHTRTHTGAKPYECKKCGKNFTQSSALAKHLRTKACEKT

SEQ ID NO: 30323 - protein, 731 aa, Homo sapiens
MEDKLKAANIQTSESETRLYNKCQDLESLIQEKDDVIQNLELQLEEQKQIRIQEAKIIEEKAAKIKEWVTVKLNELELENQNLRLINQNQTEEIRTMQSKLQEVQGKKSSTVSTLKLSEGQRLSSLTFGCFLSRARSPPQVVKSEEMSKISSKEPEFTEGKDMEEMEIPEKSVDNQVLENNRGQRTLHQTPCGSEQNRKTRTSFATDGGISQNSGAPVSDWSSDEEDGSKGRSKSRCTSTLSSHTSEEGVQCSRMGSEMYLTASDDSSSIFEEETFGIKRPEHKKLYSWQQEAQWKALNSPLGKGNSELSKKEQDSSSDELNKKFQSQRLDYSSSSSEANTPSPILTPALMPKHPNSLSGKGTQLVPSSHLPPPKLRIPNVFSISVALAKRHLSQPQLSSDRMFGTNRNAISMIRPLRPQETDLDLVDGDSTEVLENMDTSCDDGLFSYDSLDSPNSDDQEHCDSAKKVAYSKPPTPPLHRFPSWESRIYAVAKSGIRMSEAFNMESVNKNSAATLSYTTSGLYTSLIYKNMTTPVYTTLKGKATQISSSPFLDDSSGSEEEDSSRSSSRTSESDSRSRSGPGSPRAMKRGVSLSSVASESDYAIPPDAYSTDTEYSQPEQKLPKTCSSSSDNGKNEPLEKSGYLLKMSGKVKSWKRRWFVLKGGELLYYKSPSDVIRKPQGHIELSASCSILRGDNKQTVQVLNFFFFFFFFVSCQTQFSIIQPNGKEIG

SEQ ID NO: 30324 - protein, 85 aa, Homo sapiens
MDTGLGSSASPTSAEEHRKFCSTGFLCSSTYASSFSLVACRAWLALRPEVLKSAGILHLCNLLLSPSHHRNQSLEAFGLGAAFTV

SEQ ID NO: 30325 - protein, 78 aa, Homo sapiens
MQKWRSAPGKAGECRKEGGLREAGGSLHPPVAWVGLCPPNPPTQLPTLGAQFLPPLPSSAWCGSSLRERAEEVAFLLP

SEQ ID NO: 30326 - protein, 200 aa, Homo sapiens
MGPAMLRPALPAGPVGASSWQAKRVDVSELAAEQLTAPPSASPTQPQTPEGGGQWLNSSCAWSESSQLNKTRSIRRRDSCLNSKTKVMPTPTNQFKIPKFSIGDSPDSSTPKLSRAQRPQSCTSVGRVTVHSTPVRRSSGPAPQSLLSAWRVSALPTPASRRCSGLPPMTPKTMPRAVGSPLCVPARRRSSEPRKNSAMR

SEQ ID NO: 30327 - protein, 172 aa, Homo sapiens
MKPFLHLIPQQSGGFPLSSASFTLRGVSSRAGNPGSPADRGIALPFSQQCASALGLGCYVAAADIQDLVSCLACLESVFSRFYGLGGSSTSPVVPASLHGLLSAALQAWALLLTICPSTQISHILDRQLPRLPQLLSSESVNLRIAAGETIALLFELARDLEVRGTRMGGAW

SEQ ID NO: 30328 - protein, 515 aa, Homo sapiens
MCCHPSVFTWQTWETLSRLAFARAQLSRLGSPAWGISDELEESMPQTPPFSAMFDSSGYNRNLYQSAEDSCGGLYYHDNNLLSGSLEALIQHLVPNVDYYPDRTYIFTFLLSSRLFMHPYELMAKVCHLCVEHQRLSDPDSDKNQMRKIAPKILQLLTEWTETFPYDFRDERMMRNLKDLAHRIASGEETYRKNVQQMMQCLIRKLAALSQYEEVLAKISSTSTDRLTVLKTKPQSIQRDIITVCNDPYTLAQQLTHIELERLNYIGPEEFVQAFVQKDPLDNDKSCYSERKKTRNLEAYVEWFNRLSYLVATEICMPVKKKHRARMIEYFIDVARECFNIGNFNSLMAIISGMNMSPVSRLKKTWAKVKTAKFDILEHQMDPSSNFYNYRTALRGAAQRSLTAHSSREKIVIPFFSLLIKDIYFLNEGCANRLPNGHVNFEKFWELAKQVSEFMTWKQVECPFERDRKILQYLLTVPVFSEDALYLASYESEGPENHIEKDRWKSLRSSLLGRV

SEQ ID NO: 30329 - protein, 741 aa, Homo sapiens
MGMCSRQERIQKDIDVVIQKSRAEKDCLFADFRYSDSTFTFTYVGGPRSVSYSVHVSEDYPDNTYVSSSENDEDVLVTTEPIPVIFHRIATELRKTNDINCCLSIKSKLQKENGEESRQNSTVEEDSEGDNDSEEFYYGGQVNYDGELHKHPQLEADLSAVREIYGPHAVSLREYGAIDDVDIDLHIDVSFLDEEIAVAWEVIRTEPIIVRLHCSLTQYLNGPVPTVDVFQISTKERFGLGHQLKKIMQTFVTQQWKQSKEKSNCLHNKKLSEKKVKSPLHLFSTLRRSPSYPPPGCGKSKSKLKSEQDGISKTHKLLRRTCSSTVKTDDVCVTKSHRTFGRSLSSDPRAEQAMTAIKSHKLLNRPCPAAVKSEECLTLKSHRLLTRSCSGDPRCEHNTNLKPHKLLSRSYSSNLRMEELYGLKNHKLLSKSYSSAPKSSKTELFKEPNAEGRRLSLTSGLIGILTPSSSSSSQLAPNGAKCIPVRDRGFLVQTIEFAEQRIPVLNEYCVVCDEPHVFQNGPMLRPTVCERELCVFAFQTLGVMNEAADEIATGAQKKNYDRVMKALDSITSIREMTQAPYLEIKKQMDKQDPLAHPLLQWVISSNRSHIVKLPVNRQLKFMHTPHQFLLLSSPPAKESNFRAAKKLFGSTFAFHGSHIENWHSILRNGLVVASNTRLQLHGAMYGSGIYLSPMSSISFGYSGMNKKQKVSAKDEPASSSKSSNTSQKTKKRTAIPIPAKP

SEQ ID NO: 30330 - protein, 28 aa, Homo sapiens
MARPASYGSTLRRVPGCILCLPNSASWV

SEQ ID NO: 30331 - protein, 34 aa, Homo sapiens
MEGPLSVFGDRSTGETIRSQNDKESFNEQKTCRI

SEQ ID NO: 30332 - protein, 275 aa, Homo sapiens
KALGGPLLTSGSHLPSYVKSYLLPDKQSKRKTAVKKRNLNPVFNETLRYSVPQAELQGRVLSLSVWHRESLGRNIFLGEVEVPLDTWDWGSEPTWLPLQPRVPPSPDDLPSRGLLALSLKYVPAGSEGAGLPPSGELHFWVKEARDLLPLRAGSLDTYVQCFVLPDDSQASRQRTRVVRRSLSPVFNHTMVYDGFGPADLRQACAELSLWDHGALANRQLGGTRLSLGTGSSYGLQVPWMDSTPEEKQLWQALLEQPCEWVDGLLPLRTNLAPRT

SEQ ID NO: 30333 - protein, 182 aa, Homo sapiens
KLMRSEKREKKPAPSLRGNRSSNCFSEKSSKGGSEGKKQKRGRHASACRGERSRDRRSRGGSATKETVTGSGAAKEEAVLPGSAPGHSWLAAALSAAKGHRPGTARGGKVAPGAEAAERSPRRRPDWLPRNCGDSPYSELGLRFPGLSPSPEAPTKPGKEGKDSGGSSSMSAYSRKPERARS

SEQ ID NO: 30334 - protein, 26 aa, Homo sapiens
RMAEGDTHRLKADCDSPYPHKAILTP

SEQ ID NO: 30335 - protein, 88 aa, Homo sapiens
ISSLTLLCWEPSTPESAGHTAGVQCFLSVTLGIVLPGIVVGEEPLASLNCSLSGWSSLSSVDIKLWVLAMMSLDSIAKGTICCSYHSN

SEQ ID NO: 30336 - protein, 22 aa, Homo sapiens
IQRRLAWPLRKDDTQIREAFHI

SEQ ID NO: 30337 - protein, 83 aa, Homo sapiens
IFTMATPSILKSQVFPLVQPCLSANWPVSIVMKFKYVEQRSSLVLLQNSLKIYPAYRRENRGLWPAPGKEDETPTYTLSILYS

SEQ ID NO: 30338 - protein, 9 aa, Homo sapiens
RTGRCHPSA

SEQ ID NO: 30339 - protein, 137 aa, Homo sapiens
IIKSDAPDTLLLEKHADYIASYGSKKDDYEYCMSEYLRMSGIYWGLTVMDLMGQLHRMNREEILAFIKSCQHECGGISASIGHDPHLLYTLSAVQILTLYDSINVIDVNKVVEYVKGLQKEDGSFAGDIWGPTKQLV

SEQ ID NO: 30340 - protein, 25 aa, Homo sapiens
KALSPQQPQQLALHPVSLTTTTKNI

SEQ ID NO: 30341 - protein, 81 aa, Homo sapiens
VTCRGREQGARRPPAVPLPWGGAVTTRLSPEAAAAAPSPRTRDPPARGRNVAEVLLKGPEMQGFGIHFEPLSCLTLTSFHY

SEQ ID NO: 30342 - protein, 15 aa, Homo sapiens
ILFYSAYNMTRWRKI

SEQ ID NO: 30343 - protein, 45 aa, Homo sapiens
TKLKTTQEICWKENDRGKYMNVAIFSSLCWENCLAVPPSLAKPCV

SEQ ID NO: 30344 - protein, 1084 aa, Homo sapiens
INSQFEFGRKKENMTSPAKFKKDKEIIAEYDTQVKEIRAQLTEQMKCLDQQCELRVQLLQDLQDFFRKKAEIEMDYSRNLEKLAERFLAKTRSTKDQQFKKDQNVLSPVNCWNLLLNQVKRESRDHTTLSDIYLNNIIPRFVQVSEDSGRLFKKSKEVGQQLQDDLMKVLNELYSVMKTYHMYNADSISAQSKLKEAEKQEEKQIGKSVKQEDRQTPRSPDSTANVRIEEKHVRRSSVKKIEKMKEKRQAKYTENKLKAIKARNEYLLALEATNASVFKYYIHDLSDLIDQCCDLGYHASLNRALRTFLSAELNLEQSKHEGLDAIENAVENLDATSDKQRLMEMYNNVFCPPMKFEFQPHMGDMASQLCAQQPVQSELVQRCQQLQSRLSTLKIENEEVKKTMEATLQTIQDIVTVEDFDVSDCFQYSNSMESVKSTVSETFMSKPSIAKRRANQQETEQFYFTKMKEYLEGRNLITKLQAKHDLLQKTLGESQRTDCSLARRSSTVRKQDSSQAIPLVVESCIRFISRHGLQHEGIFRVSGSQVEVNDIKNAFERGEDPLAGDQNDHDMDSIAGVLKLYFRGLEHPLFPKDIFHDLMACVTMDNLQERALHIRKVLLVLPKTTLIIMRYLFAFLNHLSQFSEENMMDPYNLAICFGPSLMSVPEGHDQVSCQAHVNELIKTIIIQHENIFPSPRELEGPVYSRGGSMEDYCDSPHGETTSVEDSTQDVTAEHHTSDDECEPIEAIAKFDYVGRTARELSFKKGASLLLYQRASDDWWEGRHNGIDGLIPHQYIVVQDTEDGVVERSSPKSEIEVISEPPEEKVTARAGASCPSGGHVADIYLANINKQRKRPESGSIRKTFRSDSHGLSSSLTDSSSPGVGASCRPSSQPIMSQSLPKEGPDKCSISGHGSLNSISRHSSLKNRLDSPQIRKTATAGRSKSFNNHRPMDPEVIAQDIEATMNSALNELRELERQSSVKHTPDVVLDTLEPLKTSPVVAPTSEPSSPLHTQLLKDPEPAFQRSASTAGDIACAFRPVKSVKMAAPVKPPATRPKPTVFPKTNATSPGVNSSTSPQSTDKSCTV

SEQ ID NO: 30345 - protein, 80 aa, Homo sapiens
KQVHPDTGISSKAMGIMNSFVNDIFERIAGEASRLAHYNKRSTITSREIQTAVRLLLPGKLAKHAVSEGTKAVTKYTSSK

SEQ ID NO: 30346 - protein, 16 aa, Homo sapiens
REPYSTAIPPRIILPL

SEQ ID NO: 30347 - protein, 122 aa, Homo sapiens
LPQDMNTSLSWFEQLDVLLNATDGNVVRNKQWLYPLGVSTELIGLCICFFCSSGCIFLGSPPQNSTAVTPAVLWEESEIMQKELKLLQYQLSQHQELLLKQLAEGRQAQVGSWKDLHSCCPI

SEQ ID NO: 30348 - protein, 80 aa, Homo sapiens
KQVHPDTGISSKTMGIMNSFVNDIFERIAGEASRLAHYNKRSTITSREIQTAVRLLLPGELAKHAVSEGTKAVTKYTSSK

SEQ ID NO: 30349 - protein, 48 aa, Homo sapiens
IPASSTTMCSEHVEEKKQLYLLVSFCLSSWTLTFSETQQSLQWSVGPP

SEQ ID NO: 30350 - protein, 6 aa, Homo sapiens
LNWDPC

SEQ ID NO: 30351 - protein, 41 aa, Homo sapiens
ILGILKIMRSFKSFHETFCVVAPPTSNMKCVSFSASGKIST

SEQ ID NO: 30352 - protein, 87 aa, Homo sapiens
KVTRSQQLPRSPEAGASSTHSSAVSAGMMGRPCLLTAGRPCLWRRMAPSLSRPQSNTCSLRPRPRTQTRSAWSSTWTRPWCTAPSSQ

SEQ ID NO: 30353 - protein, 11 aa, Homo sapiens
RRKWIHRDLWA

SEQ ID NO: 30354 - protein, 76 aa, Homo sapiens
VGVGASASATPVVRAARAWELTPLTDPQSQSQRCEETSTLPGPQGQRGSASEAPFSVPIPIQALLALTTPRDSSGS

SEQ ID NO: 30355 - protein, 11 aa, Homo sapiens
VSPLWNQMYPS

SEQ ID NO: 30356 - protein, 61 aa, Homo sapiens
KTPGLQREREESRALRSKASVSPRSIHHEQSSPSRVEKIYGQEVIIEIKWWQTCPRNIAGI

SEQ ID NO: 30357 - protein, 272 aa, Homo sapiens
KMAKVPDMFEDLKNCYSENEEDSSSIDHLSLNQKSFYHVSYGPLHEGCMDQSVSLSISETSKTSKLTFKESMVVVATNGKVLKKRRLSLSQSITDDDLEAIANDSEEEIIKPRSAPFSFLSNVKYNFMRIIKYEFILNDALNQSIIRANDQYLTAAALHNLDEAVKFDMGAYKSSKDDAKITVILRISKTQLYVTAQDEDQPVLLKEMPEIPKTITGSETNLLFFWETHGTKNYFTSVAHPNLFIATKQDYWVCLAGGPPSITDFQILENQA

SEQ ID NO: 30358 - protein, 9 aa, Homo sapiens
ILQGHSTMC

SEQ ID NO: 30359 - protein, 778 aa, Homo sapiens
TMPDNRQPRNRQPRIRSGNEPRSAPAMEPDGRGAWAHSRAALDRLEKLLRCSRCTNILREPVCLGGCEHIFCSNCVSDCIGTGCPVCYTPAWIQDLKINRQLDSMIQLCSKLRNLLHDNELSDLKEDKPRKSLFNDAGNKKNSIKMWFSPRSKKVRYVVSKASVQTQPAIKKDASAQQDSYEFVSPSPPADVSERAKKASARSGKKQKKKTLAEINQKWNLEAEKEDGEFDSKEESKQKLVSFCSQPSVISSPQINGEIDLLASGSLTESECFGSLTEVSLPLAEQIESPDTKSRNEVVTPEKVCKNYLTSKKSLPLENNGKRGHHNRLSSPISKRCRTSILSTSGDFVKQTVPSENIPLPECSSPPSCKRKVGGTSGRKNSNMSDEFISLSPGTPPSTLSSSSYRRVMSSPSAMKLLPNMAVKRNHRGETLLHIASIKGDIPSVEYLLQNGSDPNVKDHAGWTPLHEACNHGHLKVVELLLQHKALVNTTGYQNDSPLHDAAKNGHVDIVKLLLSYGASRNAVNIFGLRPVDYTDDESMKSLLLLPEKNESSSASHCSVMNTGQRRDGPLVLIGSGLSSEQQKMLSELAVILKAKKYTEFDSTVTHVVVPGDAVQSTLKCMLGILNGCWILKFEWVKACLRRKVCEQEEKYEIPEGPRRSRLNREQLLPKLFDGCYFYLWGTFKHHPKDNLIKLVTAGGGQILSRKPKPDSDVTQTINTVAYHARPDSDQRFCTQYIIYEDLCNYHPERVRQGKVWKAPSSWFIDCVMSFELLPLDS

SEQ ID NO: 30360 - protein, 8 aa, Homo sapiens
MQNPQVFK

SEQ ID NO: 30361 - protein, 86 aa, Homo sapiens [sequence omitted]

SEQ ID NO: 30362 - protein, 251 aa, Homo sapiens
VFVLPSTANMKRPKLKKASKRMTCHKRYKIQKKVREHHRKLRKEAKKRGHKKPRKDPGVPNSAPFKEALLREAELRKQRLEELKQQQKLDRQKELEKKRKLETNPDIKPSNVEPMEKEFGLCKTENKAKSGKQNSKKLYCQELKKVIEASDVVLEVLDARDPLGCRCPQVEEAIVQSGQKKLVLILNKSDLVPKENLESWLNYLKKELPTVVFRASTKPKDKGKITKVSFISGKKCDSFRFWLKYDECTKS

SEQ ID NO: 30363 - protein, 484 aa, Homo sapiens
RMAAPGPLPAAALSPGAPTPRELMHGVAGVTSRAGRDREAGSVLPAGNRGARKASRRSSSRSMSRDNKFSKKDCLSIRNVVASIQTKEGLNLKLISGDVLYIWADVIVNSVPMNLQLGGGPLSRAFLQKAGPMLQKELDDRRRETEEKVGNIFMTSGCNLDCKAVLHAVAPYWNNGAETSWQVATGDIATEQVDVIVNSTARTFNRKSGVSRAILEGAGQAVESECAVLAAQPHRDFIITPGGCLKCKIIIHVPGGKDVRKTVTSVLEECEQRKYTSVSLPAIGTGNLPEHWTDMNHQLFCMVQLEPGQSEYNTIKDKFTRTCSSYAIEKIERIQNAFLWQSYQVKKRQMDIKNDHKNNERLLFHGTDADSVPYVNQHGFNRSCAGKNAVSYGKGTYFAVDASYSAKDTYSKPDSNGRKHMYVVRVLTGVFTKGRAGLVTPPPKNPHNPTDLFDSVTNNTRSPKLFVVFFDNQAYPEYLITFTA

SEQ ID NO: 30364 - protein, 70 aa, Homo sapiens
MTNCPTLIVMVGLPARGKTYISKKLTRYLNWIGVPTREFNVGQYRRDVVKTYKSFEFFLPDNEEGLKIRK

SEQ ID NO: 30365 - protein, 48 aa, Homo sapiens
IFNIQKYLSWWLMQKTLSSSKSFVIVGPENPFATGTDMFCLSGLVKGG

SEQ ID NO: 30366 - protein, 31 aa, Homo sapiens
VAATGRGAAVGDRGRGCRRRSGWLANTWCHM

SEQ ID NO: 30367 - protein, 156 aa, Homo sapiens
RPSSRATPGPRSPGMATSIGVSFSVGDGVPEAEKNAGEPENTYILRPVFQQRFRPSVVKDCIHAVLKEELANAEYSPEEMPQLTKHLSENIKDKLKEMGFDRYKMVVQVVIGEQRGEGVFMASRCFWDADTDNYTHDVFMNDSLFCVVAAFGCFYY

SEQ ID NO: 30368 - protein, 11 aa, Homo sapiens
ILCNSYKFSVL

SEQ ID NO: 30369 - protein, 44 aa, Homo sapiens
VKIMHKRQDFLCYQFWPYWTIKLIIALKDKKKKNKKKLSMKKYS

SEQ ID NO: 30370 - protein, 713 aa, Homo sapiens
VRLGSAECEAWRAAARSDGPGAATPRGRPAARRAGDLPLHAPCALQLAGGTMKKFSRMPKSEGGSGGGAAGGGAGGAGAGAGCGSGGSSVGVRVFAVGRHQVTLEESLAEGGFSTVFLVRTHGGIRCALKRMYVNNMPDLNVCKREITIMKELSGHKNIVGYLDCAVNSISDNVWEVLILMEYCRAGQVVNQMNKKLQTGFTEPEVLQIFCDTCEAVARLHQCKTPIIHRDLKVENILLNDGGNYVLCDFGSATNKFLNPQKDGVNVVEEEIKKYTTLSYRAPEMINLYGGKPITTKADIWALGCLLYKLCFFTLPFGESQVAICDGNFTIPDNSRYSRNIHCLIRFMLEPDPEHRPDIFQVSYFAFKFAKKDCPVSNINNSSIPSALPEPMTASEAAARKSQIKARITDTIGPTETSIAPRQRPKANSATTATPSVLTIQSSATPVKVLAPGEFGNHRPKGALRPGNGPEILLGQGPPQQPPQQHRVLQQLQQGDWRLQQLHLQHRHPHQQQQQQQQQQQQQQQQQQQQQQQQQQQHHHHHHHHLLQDAYMQQYQHATQQQQMLQQQFLMHSVYQPQPSASQYPTMMPQYQQAFFQQQMLAQHQPSQQQASPEYLTSPQEFSPALVSYTSSLPAQVGTIMDSSYSANRSVADKEAIANFTNQKNISNPPDMSGWNPFGEDNFSKLTEEELLDREFDLLRSSKGHLKAYFASQ

SEQ ID NO: 30371 - protein, 49 aa, Homo sapiens
IMIPLPKNKKILIRKFKKSKKGRELCSNIILPTMENIKVQDQKMTSNLV

SEQ ID NO: 30372 - protein, 115 aa, Homo sapiens
RPCAVSPGITGGDFMEPGGWASGWGERLQTGSSPWLCPPLSLLEWWGPCILSCPPPPFSPNCRRLLSPGDTVPASSGLGKHGLSSPALAPAPPASWTWAFLHPVEPHSQERCLEG

SEQ ID NO: 30373 - protein, 144 aa, Homo sapiens
IERLTERLEEKEREMQQLLSQPQHEREKEVVLLRRSMAEGERARAASDVLCRSLANETHQLRRTLTATAHMCQHLAKCLDERQHAQRNVGERSPDQSEHTDGHTSVQSVIEKLQEENRLLKQKVTHVSVFHISFEKNTWLTNCK

SEQ ID NO: 30374 - protein, 20 aa, Homo sapiens
IVEFLNRWITFCQSIISTLT

SEQ ID NO: 30375 - protein, 219 aa, Homo sapiens
RERREEAPEEETEAWGRQKRLRLSRALFLSPRRLEAARAREQREAAKVPRFAGAAAARRREAGLGRARSSEPRRAPRLSLLTAAAGLRLSALGSAASAPLHSTSAPSDSLPSASTPPAPVRIVSQLLATRPVPGCFSISRPPLLEYFTPCIWGQGLEKGRVERPVEKKEARPAGGGGSADCGEETPRHPFWSSPLPPRPCAHSLAGELLSDQESKSGPG

SEQ ID NO: 30376 - protein, 40 aa, Homo sapiens
VPSTAESPRLPAKTLFLANFSFSSPPPRPPSSAPPPSLAD

SEQ ID NO: 30377 - protein, 38 aa, Homo sapiens
LRPAATTILWPGRCEWSAGQSARCLAPQADPAVHSREQ

SEQ ID NO: 30378 - protein, 453 aa, Homo sapiens
TLGVRWRRPRPGWVPTALGGAMDEAVGDLKQALPCVAESPTVHVEVHQRGSSTAKKEDINLSVRKLLNRHNIVFGDYTWTEFDEPFLTRNVQSVSIIDTELKVKDSQPIDLSACTVALHIFQLNEDGPSSENLEEETENIIAANHWVLPAAEFHGLWDSLVYDVEVKSHLLDYVMTTLLFSDKNVNSNLITWNRVVLLHGPPGTGKTSLCKALAQKLTIRLSSRYRYGQLIEINSHSLFSKWFSESGKLVTKMFQKIQDLIDDKDALVFVLIDEVESLTAARNACRAGTEPSDAIRVVNAVLTQIDQIKRHSNVVILTTSNITEKIDVAFVDRADIKQYIGPPSAAAIFKIYLSCLEELMKCQIIYPRQQLLTLRELEMIGFIENNVSKLSLLLNDISRKSEGLSGRVLRKLPFLAHALYVQAPTVTIEGFLQALSLAVDKQFEERKKLAAYI

SEQ ID NO: 30379 - protein, 32 aa, Homo sapiens
KMNSPRPEPLAEWTPSRPQVARSGLSGSRKLQ

SEQ ID NO: 30380 - protein, 17 aa, Homo sapiens
IKFRTKELSNLSKLFTQ

SEQ ID NO: 30381 - protein, 17 aa, Homo sapiens
LLQPGLISLLHHHQQRS

SEQ ID NO: 30382 - protein, 544 aa, Homo sapiens
RMAAAKAEMQLMSPLQISDPFGSFPHSPTMDNYPKLEEMMLLSNGAPQFLGAAGAPEGSGSNSSSSSSGGGGGGGGGSNSSSSSSTFNPQADTGEQPYEHLTAESFPDISLNNEKVLVETSYPSQTTRLPPITYTGRFSLEPAPNSGNTLWPEPLFSLVSGLVSMTNPPASSSSAPSPAASSASASQSPPLSCAVPSNDSSPIYSAAPTFPTPNTDIFPEPQSQAFPGSAGTALQYPPPAYPAAKGGFQVPMIPDYLFPQQQGDLGLGTPDQKPFQGLESRTQQPSLTPLSTIKAFATQSGSQDLKALNTSYQSQLIKPSRMRKYPNRPSKTPPHERPYACPVESCDRRFSRSDELTRHIRIHTGQKPFQCRICMRNFSRSDHLTTHIRTHTGEKPFACDICGRKFARSDERKRHTKIHLRQKDKKADKSVVASSATSSLSSYPSPVATSYPSPVTTSYPSPATTSYPSPVPTSFSSPGSSTYPSPVHSGFPSPSVATTYSSVPPAFPAQVSSFPSSAVTNSFSASTGLSDMTATFSPRTIEIC

SEQ ID NO: 30383 - protein, 453 aa, Homo sapiens
LWKSSSILELKVKLERNLQTRKKRSLESDSQDLGLEMPQPSVSGMDPPFGDAFRSHTFSEQTLMSTDLLANSSDPDFMYELDREMNYQQNPRDNFLSLEDCKDIENLESFTDVLDNEGALTSNWEQWDTYCEDLTKYTKLTSCDIWGTKEVDYLGLDDFSSPYQDEEVISKTPTLAQLNSEDSQSVSDSLYYPDSLFSVKQNPLPSSFPGKKITSRAAAPVCSSKTLQAEVPLSDCVQKASKPTSSTQIMVKTNMYHNEKVNFHVECKDYVKKAKVKINPVQQSRPLLSQIHTDAAKENTCYCGAVAKRQEKKGMEPLQGHATPALPFKETQELLLSPLPQEGPGSLAAGESSSLSASTSVSDSSQKKEEHNYSLFVSDNLGEQPTKCSPEEDEEDEEDVDDEDHDEGFGSEHELSENEEEEEEEEDYEDDKDDDISDTFSEPGIIMLASLPD

SEQ ID NO: 30384 - protein, 675 aa, Homo sapiens
LWKSSSILELKVKLERNLQTRKKRSLESDSQDLGLEMPQPSVSGMDPPFGDAFRSHTFSEQTLMSTDLLANSSDPDFMYELDREMNYQQNPRDNFLSLEDCKDIENLESFTDVLDNEGALTSNWEQWDTYCEDLTKYTKLTSCDIWGTKEVDYLGLDDFSSPYQDEEVISKTPTLAQLNSEDSQSVSDSLYYPDSLFSVKQNPLPSSFPGKKITSRAAAPVCSSKTLQAEVPLSDCVQKASKPTSSTQIMVKTNMYHNEKVNFHVECKDYVKKAKVKINPVQQSRPLLSQIHTDAAKENTCYCGAVAKRQEKKGMEPLQGHATPALPFKETQELLLSPLPQEGPGSLAAGESSSLSASTSVSDSSQKKEEHNYSLFVSDNLGEQPTKCSPEEDEEDEEDVDDEDHDEGFGSEHELSENEEEEEEEEDYEDDKDDDISDTFSEPGYENDSVEDLKEVTSISSRKRGKRRYFWEYSEQLTPSQQERMLRPSEWNRDTLPSNMYQKNGLHHGKYAVKKSRRTDVEDLTPNPKKLLQIGNELRKLNKVISDLTPVSELPLTARPRSRKEKNKLASRACRLKKKAQYEANKVKLWGLNTEYDNLLFVINSIKQEIVNRVQNPRDERGPNMGQKLEILIKDTLGLPVAGQTSEFVNQVLEKTAEGNPTGGLVGLRIPTSKV

SEQ ID NO: 30385 - protein, 12 aa, Homo sapiens
LWQMQLQMPSPE

SEQ ID NO: 30386 - protein, 64 aa, Homo sapiens
LTRGPTQGPPERQDSGPDLQRLQAQRPQAAWAERRFQALARSLNCRSSVDSHQSGGVLKEFYVD

SEQ ID NO: 30387 - protein, 54 aa, Homo sapiens
IASWGPGRTELPGCGMRPWSFFVLRCRYGNIAVVSRAMSIVSQRPKLWIGCMSC

SEQ ID NO: 30388 - protein, 23 aa, Homo sapiens
LFDQHWNWKLGFEEVKSKYNIVF

SEQ ID NO: 30389 - protein, 79 aa, Homo sapiens
TGNHRVMCVLPLAECVESCSGVRLHSEKLPLAARSAGPSLLVIIQSSQCPGGRRCPTPACIHPSRVPGVTGPRRQPWFC

SEQ ID NO: 30390 - protein, 46 aa, Homo sapiens
RSVRMPICPASTPQPPQGTSCPSAGAKEPVLCLNVATWCSGLMKGM

SEQ ID NO: 30391 - protein, 65 aa, Homo sapiens
IAWATGPTCVMWPCGPSRSLASSLGSTPNCMPSPGVMTGGSAWKTTAAKVLWSIMSDSQEVTGWN

SEQ ID NO: 30392 - protein, 10 aa, Homo sapiens
LCCSHVSSDP

SEQ ID NO: 30393 - protein, 77 aa, Homo sapiens
RFLPRTPRGVHLMLVGTQSAQPSLRHCVSRAGPQTRPPLPHPSQGGACVGRTLNPAARPLDGRRRDGWPPCTAPAVS

SEQ ID NO: 30394 - protein, 348 aa, Homo sapiens
LKMAASQAVEEMRSRVVLGEFGVRNVHTTDFPGNYSGYDDAWDQDRFEKNFRVDVVHMDENSLEFDMVGIDAAIANAFRRILLAEVPTMAVEKVLVYNNTSIVQDEILAHRLGLIPIHADPRLFEYRNQGDEEGTEIDTLQFRLQVRCTRNPHAAKDSSDPNELYVNHKVYTRHMTWIPLGNQADLFPEGTIRPVHDDILIAQLRPGQEIDLLMHCVKGIGKDHAKFSPVATASYRLLPDITLLEPVEGEAAEELSRCFSPGVIEVQEVQGKKVARVANPRLDTFSREIFRNEKLKKVVRLARVRDHYIFSVESTGVLPPDVLVSEAIKVLMGKCRRFLDELDAVQMD

SEQ ID NO: 30395 - protein, 70 aa, Homo sapiens
RGSHLPKMQDGSRAAAVQPFLPHHGLHLPAPAQRAPGHPAGPGEFCGMPACCSVCCFLVSHLLTSWYNQL

SEQ ID NO: 30396 - protein, 42 aa, Homo sapiens [sequence omitted]

SEQ ID NO: 30397 - protein, 14 aa, Homo sapiens
ITSRFLDLLLVSGS

SEQ ID NO: 30398 - protein, 30 aa, Homo sapiens
LKVLVEQPQGSEFQGSLFRFGIETSVFPFC

SEQ ID NO: 30399 - protein, 65 aa, Homo sapiens
IQAADLLMADFKVLSSQDIMWALHELKGHYAITRKAFSDAIKKWQELSPETSGKRKKRKEMNQYS

SEQ ID NO: 30400 - protein, 20 aa, Homo sapiens
KRGTPQLVDTSRLLSQFRAW

SEQ ID NO: 30401 - protein, 32 aa, Homo sapiens
LHILMSAFFLRSGARHCGHNRAGSGYLLQGRV

SEQ ID NO: 30402 - protein, 8 aa, Homo sapiens
ISMAPAQG

SEQ ID NO: 30403 - protein, 16 aa, Homo sapiens
IRRLYIFFSEISWELL

SEQ ID NO: 30404 - protein, 59 aa, Homo sapiens
IKVCAVDPRMKPAWKIPSLETEPDRGRCTGRTLSGFSNQAAILAPQVWDFWVFSWLASC

SEQ ID NO: 30405 - protein, 55 aa, Homo sapiens
VLESCVLAARDPAWVGRCFCVGVWPFHQSCGGPRDFLPVLLGFQVVAPSSEKPKD

SEQ ID NO: 30406 - protein, 37 aa, Homo sapiens
VTRRKRRSRKDDSSLAIIWYSLISKSCIIFMASKDKN

SEQ ID NO: 30407 - protein, 11 aa, Homo sapiens
LEFYTGIAEDT

SEQ ID NO: 30408 - protein, 79 aa, Homo sapiens
LIWPPCVEVKRCTGCCNTSSVKCQPSRVHHRSVKVAKVEYVRKKPKLKEVQVRLEEHLECACATTSLNPDYREEDTDVR

SEQ ID NO: 30409 - protein, 195 aa, Homo sapiens
RMAKQKRKVPEVTEKKNKKLKKASAEGPLLGPEAAPSGEGAGSKGEAVLRPGLDAEPELSPEEQRVLERKLKKERKKEERQRLREAGLVAQHPPARRSGAELALDYLCRWAQKHKNWRFQKTRQTWLLLHMYDSDKVPDEHFSTLLAYLEGLQGRARELTVQKAEALMRELDEEGSDPPLPGRAQRIRQVLQLLS

SEQ ID NO: 30410 - protein, 39 aa, Homo sapiens
VTYSMPCSLSLTSLGRLLYSKGMKETTSMSLIKGKWMCT

SEQ ID NO: 30411 - protein, 29 aa, Homo sapiens
ILGPTCCLTIPEPRPGIVAEHPRPAEVPP

SEQ ID NO: 30412 - protein, 17 aa, Homo sapiens
RLAVVDLRPREVMLSCF

SEQ ID NO: 30413 - protein, 248 aa, Homo sapiens
KMVDREQLVQKARLAEQAERYDDMAAAMKNVTELNEPLSNEERNLLSVAYKNVVGARRSSWRVISSIEQKTSADGNEKKIEMVRAYREKIEKELEAVCQDVLSLLDNYLIKNCSETQYESKVFYLKMKGDYYRYLAEVATGEKRATVVESSEKAYSEAHEISKEHMQPTHPIRLGLALNYSVFYYEIQNAPEQACHLAKTAFDDAIAELDTLNEDSYKDSTLIMQLLRDNLTLWTSDQQDDDGGEGNN

SEQ ID NO: 30414 - protein, 38 aa, Homo sapiens
RKNEEAVSTSGRNEPGRGTGTISEAMPLRLELALSPRR

SEQ ID NO: 30415 - protein, 766 aa, Homo sapiens
TRGNNASRRAGRRIIMGQTGKKSEKGPVCWRKRVKSEYMRLRQLKRFRRADEVKSMFSSNRQKILERTEILNQEWKQRRIQPVHILTSVSSLRGTRECSVTSDLDFPTQVIPLKTLNAVASVPIMYSWSPLQQNFMVEDETVLHNIPYMGDEVLDQDGTFIEELIKNYDGKVHGDRECGFINDEIFVELVNALGQYNDDDDDDDGDDPEEREEKQKDLEDHRDDKESRPPRKFPSDKIFEAISSMFPDKGTAEELKEKYKELTEQQLPGALPPECTPNIDGPNAKSVQREQSLHSFHTLFCRRCFKYDCFLHRKCNYSFHATPNTYKRKNTETALDNKPCGPQCYQHLEGAKEFAAALTAERIKTPPKRPGGRRRGRLPNNSSRPSTPTINVLESKDTDSDREAGTETGGENNDKEEEEKKDETSSSSEANSRCQTPIKMKPNIEPPENVEWSGAEASMFRVLIGTYYDNFCAIARLIGTKTCRQVYEFRVKESSIIAPAPAEDVDTPPRKKKRKHRLWAAHCRKIQLKKDGSSNHVYNYQPCDHPRQPCDSSCPCVIAQNFCEKFCQCSSECQNRFPGCRCKAQCNTKQCPCYLAVRECDPDLCLTCGAADHWDSKNVSCKNCSIQRGSKKHLLLAPSDVAGWGIFIKDPVQKNEFISEYCGEIISQDEADRRGKVYDKYMCSFLFNLNNDFVVDATRKGNKIRFANHSVNPNCYAKVMMVNGDHRIGIFAKRAIQTGEELFFDYRYSQADALKYVGIEREMEIP

SEQ ID NO: 30416 - protein, 297 aa, Homo sapiens
IKKMAALTPRKRKQDSLKCDSLLHFTENLFPSPNKKHCFYQNSDKNEENLHCSQQEHFVLSALKTTEINRLPSANQGSPFKSALSTVSFYNQNKWYLNPLERKLIKESRSTCLKTNDEDKSFPIVTEKMQGKPVCSKKNNKKPQKSLTAKYQPKYRHIKPVSRNSRNSKQNRVIYKPIVEKENNCHSAENNSNAPRVLSQKIKPQVTLQGGAAFFVRKKSSLRKSSLENEPSLGRTQKSKSEVIEDSDVETVSEKKTFATRQVPKCLVLEEKLKIGLLSASSKNKEKLIKVKLNISL

SEQ ID NO: 30417 - protein, 604 aa, Homo sapiens
IKKMAALTPRKRKQDSLKCDSLLHFTENLFPSPNKKHCFYQNSDKNEENLHCSQQEHFVLSALKTTEINRLPSANQGSPFKSALSTVSFYNQNKWYLNPLERKLIKESRSTCLKTNDEDKSFPIVTEKMQGKPVCSKKNNKKPQKSLTAKYQPKYRHIKPVSRNSRNSKQNRVIYKPIVEKENNCHSAENNSNAPRVLSQKIKPQVTLQGGAAFFVRKKSSLRKSSLENEPSLGRTQKSKSEVIEDSDVETVSEKKTFATRQVPKCLVLEEKLKIGLLSASSKNKEKLIKDSSDDRVSSKEHKVDKNEAFSSEDSLGENKTISPKSTVYPIFSASSVNSKRSLGEEQFSVGSVNFMKQTNIQKNTNTRDTSKKTKDQLIIDAGQKHFGATVCKSCGMIYTASNPEDEMQHVQHHHRFLEGIKYVGWKKERVVAEFWDGKIVLVLPHDPSFAIKKVEDVQELVDNELGFQQVVPKCPNKIKTFLFISDEKRVVGCLIAEPIKQAFRVLSEPIGPESPSSTECPRAWQCSDVPEPAVCGISRIWVFRLKRRKRIARRLVDTLRNCFMFGCFLSTDEIAFSDPTPDGKLFATKYCNTPNFLVYNFNS

SEQ ID NO: 30418 - protein, 18 aa, Homo sapiens
LLMGLVQFVKIHDFVHLC

SEQ ID NO: 30419 - protein, 72 aa, Homo sapiens
RQGGRIQWKCVTSCRYCPWTGRSPSTSSAAEEPSASAPAPLSSAAPIPGSSLRGVELFPMTVLIRLHYTFVC

SEQ ID NO: 30420 - protein, 34 aa, Homo sapiens
MGAFASEDLQCHNKHMPALFYREPWRSWDRGHID

SEQ ID NO: 30421 - protein, 144 aa, Homo sapiens
KHRNENTCPLPQEMKALFKKKTYDEKKTYDQQKFDSERADGTISSEIKSARGSHHLSIYAENSLKSDGYHKRTDRKSRIIAKNVSTSKPEFEFTTLDFPELQGAENNMSEIQKQPKWGPVHSVSTDISLLREVVKPAAVLSKVR

SEQ ID NO: 30422 - protein, 37 aa, Homo sapiens
IHRRAHTRSLTRTHRHKRAHRLRTHTSLSRALTPLLP

SEQ ID NO: 30423 - protein, 36 aa, Homo sapiens
LTVPAVAVEVGTAAASSPLVTAQARTPAEPLGCALP

SEQ ID NO: 30424 - protein, 51 aa, Homo sapiens
TCGIFPREPAQRGRRARRGIAAGAGQGRRLEAAARRSPGPWMLRAEALPVT

SEQ ID NO: 30425 - protein, 222 aa, Homo sapiens
KWDRRTRSLACQGKLMENRALDPGTRDSYGATSHLPNKGALAKVKNNFKDLMSKLTEGQYVLCRWTDGLYYLGKIKRVSSSKQSCLVTFEDNSKYWVLWKDIQHAGVPGEEPKCNICLGKTSGPLNEILICGKCGLGYHQQCHIPIAGSADQPLLTPWFCRRCIFALAVRVSLPSSPVPASPASSSGADQRLPSQSLSSKQKGHTWALETDSASATVLGQDL

SEQ ID NO: 30426 - protein, 368 aa, Homo sapiens
KGLDLSQIPYINLVKHLTSACPNVCRISRFHHTTPDSKTHSGEKYTDPFKLGWRDLKGLYEDIRKELLISTSELKEMSEYYFDGKGKAFRPIIVALMARACNIHHNNSRHVQASQRAIALIAEMIHTASLVHDDVIDDASSRRGKHTVNKIWGEKKAVLAGDLILSAASIALARIGNTTVISILTQVIEDLVRGEFLQLGSKENENERFAHYLEKTFKKTASLIANSCKAVSVLGCPDPVVHEIAYQYGKNVGIAFQLIDDVLDFTSCSDQMGKPTSADLKLGLATGPVLFACQQFPEMNAMIMRRFSLPGDVDRARQYVLQSDGVQQTTYLAQQYCHEAIREISKLRPSPERDALIQLSEIVLTRDK

SEQ ID NO: 30427 - protein, 42 aa, Homo sapiens
RTPVQRSLARRIAESSPLFTTWSRFILPYPVFGFLSSPSSLC

SEQ ID NO: 30428 - protein, 60 aa, Homo sapiens
ILRSRLGSATKPLDTGLRLSAVAPQILLPGWPDPISVQSSDLPWGNTHYRPEPLSSTTWL

SEQ ID NO: 30429 - protein, 34 aa, Homo sapiens
IARRGDSLTVIITLHQQLLASQQPEHRQERVSGK

SEQ ID NO: 30430 - protein, 65 aa, Homo sapiens
IHLCSRFSIRDSSSSAIVSASGFYMWPNTILLPTWPREAKRLDTHQTDGKGRFRLFFREVAGFTR

SEQ ID NO: 30431 - protein, 42 aa, Homo sapiens
VWPNMDAQDSWETAPAGPRAVPECPQRPALSHWASPARAAFP

SEQ ID NO: 30432 - protein, 675 aa, Homo sapiens
TWRTRPQARSVLDPAGLRSPVLGPVPRAAMSFLSRQQPPPPRRAGAACTLRQKLIFSPCSDCEEEEEEEEEEGSGHSTGEDSAFQEPDSPLPPARSPTEPGPERRRSPGPAPGSPGELEEDLLLPGACPGADEAGGGAEGDSWEEEGFGSSSPVKSPAAPYFLGSSFSPVRCGGPGDASPRGCGARRAGEGRRSPRPDHPGTPPHKTFRKLRLFDTPHTPKSLLSKARGIDSSSVKLRGSSLFMDTEKSGKREFDVRQTPQVNINPFTPDSLLLHSSGQCRRRKRTYWNDSCGEDMEASDYELEDETRPAKRITITESNMKSRYTTEFHELEKIGSGEFGSVFKCVKRLDGCIYAIKRSKKPLAGSVDEQNALREVYAHAVLGQHSHVVRYFSAWAEDDHMLIQNEYCNGGSLADAISENYRIMSYFKEAELKDLLLQVGRGLRYIHSMSLVHMDIKPSNIFISRTSIPNAASEEGDEDDWASNKVMFKIGDLGHVTRISSPQVEEGDSRFLANEVLQENYTHLPKADIFALALTVVCAAGAEPLPRNGDQWHEIRQGRLPRIPQVLSQEFTELLKVMIHPDPERRPSAMALVKHSVLLSASRKSAEQLRIELNAEKFKNSLLQKELKKAQMAKAAAEERALFTDRMATRSTTQSNRTSRLIGKKMNRSVSLTIY

SEQ ID NO: 30433 - protein, 55 aa, Homo sapiens
TPGSRGTTAMCSLASGATGYSHLLKKHFHTVSLSISLILTAWFINMDLNFMDTLS

SEQ ID NO: 30434 - protein, 27 aa, Homo sapiens
KEIKIIYLPEHFSLKISVLAGHGGSGL

SEQ ID NO: 30435 - protein, 48 aa, Homo sapiens
IFFRVGQAVSYWHILPLCRIEIVPVFGKDFKMSDSYLEQRANNQSTAN

SEQ ID NO: 30436 - protein, 605 aa, Homo sapiens
IMNIVENSIFLSNLMKSANTFELKYDLSCELYRMSTYSTFPAGVPVSERSLARAGFYYTGVNDKVKCFCCGLMLDNWKRGDSPTEKHKKLYPSCRFVQSLNSVNNLEATSQPTFPSSVTNSTHSLLPGTENSGYFRGSYSNSPSNPVNSRANQDFSALMRSSYHCAMNNENARLLTFQTWPLTFLSPTDLAKAGFYYIGPGDRVACFACGGKLSNWEPKDNAMSEHLRHFPKCPFIENQLQDTSRYTVSNLSMQTHAARFKTFFNWPSSVLVNPEQLASAGFYYVGNSDDVKCFCCDGGLRCWESGDDPWVQHAKWFPRCEYLIRIKGQEFIRQVQASYPHLLEQLLSTSDSPGDENAESSIIHFEPGEDHSEDAIMMNTPVINAAVEMGFSRSLVKQTVQRKILATGENYRLVNDLVLDLLNAEDEIREEERERATEEKESNDLLLIRKNRMALFQHLTCVIPILDSLLTAGIINEQEHDVIKQKTQTSLQARELIDTILVKGNIAATVFRNSLQEAEAVLYEHLFVQQDIKYIPTEDVSDLPVEEQLRRLQEERTCKVCMDKEVSIVFIPCGHLVVCKDCAPSLRKCPICRSTIKGTVRTFLS

SEQ ID NO: 30437 - protein, 21 aa, Homo sapiens
LVSGSPWQLYSGVWMLLSKDL

SEQ ID NO: 30438 - protein, 72 aa, Homo sapiens
RSQPCPGQRKTTRIPGSGRRPGWAAPVRAGDSAPPLAAVSGNWVPALRGFQRTGTPFPGSPAHPAGEGGRCR

SEQ ID NO: 30439 - protein, 46 aa, Homo sapiens
VRAGDSAPPLAAVSGNWVPALRGFQRTGTPFPGSPAHPAGEGGRCR

SEQ ID NO: 30440 - protein, 1518 aa, Homo sapiens
RTPIHTTTLTWSWRPAPAWREDPPIRVRLPHPRRREAPGSPPLSPRGHCPPAPAKPMHPENKLTNHGKTGNGGAQSQHQNVNQGPTCNVGSKGVGAGNHGAKANQISPSNSSLKNPQAGVPPFSSLKGKVKRDRSVSVDSGEQREAGTPSLDSEAKEVAPRSKRRCVLERKQPYSGDEWCSGPDSEEDDKPIGATHNCNVADPAMAAPQLGPGQTTQLPLSESSVPGAPHGPPPGLRPDAPGGGGGGGGVPGKPPSQFVYVFTTHLANTAAEAVLQGRADSILAYHQQNVPRAKLDQAPKVPPTPEPLPLSTPSAGTPQSQPPPLPPPPPPAPGSAPPALPPEGPPEDSSQDLAPNSVGAASTGGGTGGTHPNTPTATTANNPLPPGGDPSSAPGPALLGEAAAPGNGQRSLVGSEGLSKEQLEHRERSLQTLRDIERLLLRSGETEPFLKGPPGGAGEGGPPAQAPPPPQQPPTAPPSGLKKYEEPLQSMISQTQSLGGPPLEHEVPGHPPGGDMGQQMNMMIQRLGQDSLTPEQVAWRKLQEEYYEEKRRKEEQIGLHGSRPLQDMMGMGGMMVRGPPPPYHSKPGDQWPPGMGAQLRGPMDVQDPMQLRGGPPFPGPRFPGNQIQRVPGFGGMQSMPMEVPMNAMQRPVRPGMGWTEDLPPMGGPSNFAQNTMPYPGGQGEAERFMTPRVREELLRHQLLEKRSMGMQRPLGMAGSGMGQSMEMERMMQAHRQMDPAMFPGQMAGGEGLAGTPMGMEFGGGRGLLSPPMGQSGLREVDPPMGPGNLNMNMNVNMNMNMNLNVQMTPQQQMLMSQKMRGPGDLMGPQGLSPEEMARVRAQNSSGVMGGPQKMLMPSQFPNQGQQGFSGGQGPYQAMSQDMGNTQDMFSPDQSSMPMSNVGTTRLSHMPLPPASNPPGTVHSAPNRGLGRRPSDLTISINQMGSPGMGHLKSPTLSQVHSPLVTSPSANLKSPQTPSQMVPLPSANPPGPLKSPQVLGSSLSVRSPTGSPSRLKSPSMAVPSPGWVASPKTAMPSPGVSQNKQPPLNMNSSTTLSNMEQGTLPPSGPRSSSSAPPANPPSGLMNPSLPFTSSPDPTPSQNPLSLMMTQMSKYAMPSSTPLYHNAIKTIATSDDELLPDRPLLPPPPPPQGSGPGISNSQPSQMHLNSAAAQSPMGMNLPGQQPLSHEPPPAMLPSPTPLGSNIPLHPNAQGTGGPPQNSMMMAPGGPDSLNAPCGPVPSSSQMMPFPPRLQQPHGAMAPTGGGGGGPGLQQHYPSGMALPPEDLPNQPPGPMPPQQHLMGKAMAGRMGDAYPPGVLPGVASVLNDPELSEVIRPTPTGIPEFDLSRIIPSEKPSSTLQYFPKSENQPPKAQPPNLHLMNLQNMMAEQTPSRPPNLPGQQGVQRGLNMSMCHPGQMSLLGRTGVPPQQGMVPHGLHQGVMSPPQGLMTQQNFMLMKQRGVGGEVYSQPPHMLSPQGSLMGPPPQQNLMVSHPLRQRSVSLDSQMGYLPAPGGMANLPF

SEQ ID NO: 30441 - protein, 916 aa, Homo sapiens
LHALFKMIDLSFLTEEEQEAIMKVLQRDAALKRAEEERVRHLPEKIKDDQQLKNMSGQWFYEAKAKRHRDKIHGADIIRASMRKKRPQIAAEQSKDRENGAKESWVNNVNKDAFLPPELAGVVEEPEEDAAPASPSSSVVNPASSVIDMSQENTRKPNVSPEKRKNPFNSSKLPEGHSSQQTKNEQSKNGRTGLFQTSKEDELSESKEKSTVADTSIQKLEKSKQTLPGLSNGSQIKAPIPKARKMIYKSTDLNKDDNQSFPRQRTDSLKARGAPRGILKRNSSSSSTDSETLRYNHNFEPKSKIVSPGLTIHERISEKEHSLEDNSSPNSLEPLKHVRFSAVKDELPQSPGLIHGREVGEFSVLESDRLKNGMEDAGDTEEFQSDPKPSQYRKPSLFHQSTSSPYVSKSETHQPMTSGSFPINGLHSHSEVLTARPQSMENSPTINEPKDKSSELTRLESVLPRSPADELSHCVEPEPSQVPGGSSRDRQQGSEEEPSPVLKTLERSAARKMPSKSLEDISSDSSNQAKVDNQPEELVRSAEDDEKPDQKPVTNECVPRISTVPTQPDNPFSHPDKLKRMSKSVPAFLQDEVSGSVMSVYSGDFGNLEVKGNIQFAIEYVESLKELHVFVAQCKDLAAADVKKQRSDPYVKAYLLPDKGKMGKKKTLVVKKTLNPVYNEILRYKIEKQILKTQKLNLSIWHRDTFKRNSFLGEVELDLETWDWDNKQNKQLRWYPLKRKTAPVALEAENRGEMKLALQYVPEPVPGKKLPTTGEVHIWVKECLDLPLLRGSHLNSFVKCTILPDTSRKSRQKTRAVGKTTNPIFNHTMVYDGFRPEDLMEACVELTVWDHYKLTNQFLGGLRIGFGTGKSYGTEVDWMDSTSEEVALWEKMVNSPNTWIEATLPLRMLLIAKISK

SEQ ID NO: 30442 - protein, 406 aa, Homo sapiens
KPVTNECVPRISTVPTQPDNPFSHPDKLKRMSKSVPAFLQDESDDRETDTASESSYQLSRHKKSPSSLTNLSSSSGMTSLSSVSGSVMSVYSGDFGNLEVKGNIQFAIEYVESLKELHVFVAQCKDLAAADVKKQRSDPYVKAYLLPDKGKMGKKKTLVVKKTLNPVYNEILRYKIEKQILKTQKLNLSIWHRDTFKRNSFLGEVELDLETWDWDNKQNKQLRWYPLKRKTAPVALEAENRGEMKLALQYVPEPVPGKKLPTTGEVHIWVKECLDLPLLRGSHLNSFVKCTILPDTSRKSRQKTRAVGKTTNPIFNHTMVYDGFRPEDLMEACVELTVWDHYKLTNQFLGGLRIGFGTGKSYGTEVDWMDSTSEEVALWEKMVNSPNTWIEATLPLRMLLIAKISK

SEQ ID NO: 30443 - protein, 7 aa, Homo sapiens
LTMSSLH

SEQ ID NO: 30444 - protein, 52 aa, Homo sapiens
LKMTWTWVDGSPIDSKIFFIKGPAKENSCAAIKESKIFSETCSSVFKWICQY

SEQ ID NO: 30445 - protein, 40 aa, Homo sapiens
TASGASMMADSQGPLRRGGAANGEPHSLARVLRRSSWLPS

SEQ ID NO: 30446 - protein, 1016 aa, Homo sapiens
LTNNKMMSDASDMLAAALEQMDGIIAGSKALEYSNGIFDCQSPTSPFMGSLRALHLVEDLRGLLEMMETDEKEGLRCQIPDSTAETLVEWLQSQMTNGHLPGNGDVYQERLARLENDKESLVLQVSVLTDQVEAQGEKIRDLEFCLEEHREKVNATEEMLQQELLSRTSLETQKLDLMAEISNLKLKLTAVEKDRLDYEDKFRDTEGLIQEINDLRLKVSEMDSERLQYEKKLKSTKSLMAKLSSMKIKVGQMQYEKQRMEQKWESLKDELASLKEQLEEKESEVKRLQEKLVCKMKGEGVEIVDRDIEVQKMKKAVESLMAANEEKDRKIEDLRQCLNRYKKMQDTVVLAQGKDGEYEELLNSSSISSLLDAQGFSDLEKSPSPTPVMGSPSCDPFNTSVPEEFHTTILQVSIPSLLPATVSMETSEKSKLTPKPETSFEENDGNIILGATVDTQLCDKLLTSSLQKSSSLGNLKKETSDGEKETIQKTSEDRAPAESRPFGTLPPRPPGQDTSMDDNPFGTRKVRSSFGRGFFKIKSNKRTASAPNLAETEKETAEHLDLAGASSRPKDSQRNSPFQIPPPSPDSKKKSRGIMKLFGKLRRSQSTTFNPDDMSEPEFKRGGTRATAGPRLGWSRDLGQSNSDLDMPFAKWTKEQVCNWLMEQGLGSYLNSGKHWIASGQTLLQASQQDLEKELGIKHSLHRKKLQLALQALGSEEETNHGKLDFNWVTRWLDDIGLPQYKTQFDEGRVDGRMLHYMTVDDLLSLKVVSVLHHLSIKRAIQVLRINNFEPNCLRRRPSDENTIAPSEVQKWTNHRVMEWLRSVDLAEYAPNLRGSGVHGGLMVLEPRFNVETMAQLLNIPPNKTLLRRHLATHFNLLIGAEAQHQKRDAMELPDYVLLTATAKVKPKKLAFSNFGNLRKKKQEDGEEYVCPMELGQASGSASKKGFKPGLDMRLYEEDDLDRLEQMEDSEGTVRQIGAFSEGINNLTHMLKEDDMFKDFAARSPSASITDEDSNV

SEQ ID NO: 30447 - protein, 7 aa, Homo sapiens
TQIHNEN

SEQ ID NO: 30448 - protein, 76 aa, Homo sapiens
RPGKTDDKGKFSEDHGSCCGVNCYYFTMQKKDWKGCKQTCQHCRSSLLKIDDKDELVFYIHFYSLGLCFSMLDLRY

SEQ ID NO: 30449 - protein, 15 aa, Homo sapiens
RFLCRRGTKKKISEF

SEQ ID NO: 30450 - protein, 82 aa, Homo sapiens
IQPLYTPRAPAAAPPPPHKMAAPIEETAAASPAPFCGRREICQHGKPLLRMHPSLETPLKGWSLGDHIKRKMPTTSTTSTRF

SEQ ID NO: 30451 - protein, 97 aa, Homo sapiens
ILAHGKLRLPGSSDSPASASRVAGITGMCHHAPLARLVSNTLPQVILPPLGLQQAEELPRRQEVEQNTPSLVPIIDNIMTLHVMDQLTPSRSVNWFI

SEQ ID NO: 30452 - protein, 11 aa, Homo sapiens
KPFSFKILPEA

SEQ ID NO: 30453 - protein, 67 aa, Homo sapiens
ICVHRGRRAQSHLLQSDRWSAAGHYPGRGPSLQIATSQNRIYLTADNLVLNLQDESFTSDSLIKGKK

SEQ ID NO: 30454 - protein, 29 aa, Homo sapiens
IDYPMSCPCFCPVALRKDGYYDAECAESV

SEQ ID NO: 30455 - protein, 182 aa, Homo sapiens
LSAMAALQKSVSSFLMGTLATSCLLLLALLVQGGAAAPISSHCRLDKSNFQQPYITNRTFMLAKEASLADNNTDVRLIGEKLFHGVSMSERCYLMKQVLNFTLEEVLFPQSDRFQPYMQEVVPFLARLSNRLSTCHIEGDDLHIQRNVQKLKDTVKKLGESGEIKAIGELDLLFMSLRNACI

SEQ ID NO: 30456 - protein, 36 aa, Homo sapiens
LKPSPPLPPPPPPDRGIRRFPRQRNLRPQSQHLGGT

SEQ ID NO: 30457 - protein, 13 aa, Homo sapiens
KMAVAEGLTERPS

SEQ ID NO: 30458 - protein, 37 aa, Homo sapiens
LNNFFEIMVAILGVESALHKYTLYANDDKLVRMSRAA

SEQ ID NO: 30459 - protein, 77 aa, Homo sapiens
KENFNNVPDLELNPIRSKIVRAFFDNRNLRKGPSGLADEINFEDFLTIMSYFRPIDTTMDEEQVELSRKEKLRCACH

SEQ ID NO: 30460 - protein, 94 aa, Homo sapiens
KSPHISNLSPLLLQVYRSKQKCTGYLKWNNFLVAKQRHGSIMLHVPPRFEINLGIVKFFFQISYNHISQYFSQSFFTHLTLCFVASRSLRTLKT

SEQ ID NO: 30461 - protein, 109 aa, Homo sapiens
LDSLGSRSLTSCSSDITLRGGREGFESDTDSEFTFKMQDYNKDDMSYRRISAVEPKTALPFNRFLPNKSRQPSYVPAPLRKKKPDKHEDNRRSWASPVYTEADGTFSRY

SEQ ID NO: 30462 - protein, 698 aa, Homo sapiens
ILALKRRRIPRPEATMSTPAVPQDLQLPPSQRAQSAFKEQRRQKLKEHLLRRKTLFAYKQENEMLSSSRDQRVVTSEDQVQEGTKVLKLKTKMADKENMKRPAESKNNTVVGKHCIPLKPSNELTNSTVVIDTHKPKDSNQTPHLLLTEDDPQSQHMTLSQAFHLKNNSKKKQMTTEKQKQDANMPKKPVLGSYRGQIVQSKINSFRKPLQVKDESSAATKKLSATIPKATKPQPVNTSSVTVKSNRSSNMTATTKFVSTTSQNTQLVRPPIRSHHSNTRDTVKQGISRTSANVTIRKGPHEKELLQSKTALSSVKTSSSQGIIRNKTLSRSIASEVIARPASLSNDKLMEKSEPVDQRRHTAGKAIVDSRSAQPKETSEERKARLSEWKAGKGRVLKRPPNSVVTQHEPAGQNEKPVGSFWTTMAEEDEQRLFTEKVNNTFSECLNLINEGCPKEDILVTLNDLIKNIPDAKKLVKYWICLALIEPITSPIENIIAIYEKAILAGAQPIEEMRHTIVDILTMKSQEKANLGENMEKSCASKEEVKEVSIEDTGVDVDPEKLEMESKLHRNLLFQDCEKEQDNKTKDPTHDVKTPNTETRTSCLIKYNVSTTPYLQSVKKKVQFDGTNSAFKELKFLTPVRRSRRLQEKTSKLPDMLKDHYPCVSSLEQLTELGRETDAFVCRPNAALCRVYYEADTT

SEQ ID NO: 30463 - protein, 715 aa, Homo sapiens
KFWARASTPPRLPPSFRPLAAPASFPQISDRPFAPPPRPPPVLRSPPLGSPAAGGGAGVTMAEAPQVVEIDPDFEPLPRPRSCTWPLPRPEFSQSNSATSSPAPSGSAAANPDAAAGLPSASAAAVSADFMSNLSLLEESEDFPQAPGSVAAAVAAAAAAAATGGLCGDFQGPEAGCLHPAPPQPPPPGPLSQHPPVPPAAAGPLAGQPRKSSSSRRNAWGNLSYADLITKAIESSAEKRLTLSQIYEWMVKSVPYFKDKGDSNSSAGWKNSIRHNLSLHSKFIRVQNEGTGKSSWWMLNPEGGKSGKSPRRRAASMDNNSKFAKSRSRAAKKKASLQSGQEGAGDSPGSQFSKWPASPGSHSNDDFDNWSTFRPRTSSNASTISGRLSPIMTEQDDLGEGDVHSMVYPPSAAKMASTLPSLSEISNPENMENLLDNLNLLSSPTSLTVSTQSSPGTMMQQTPCYSFAPPNTSLNSPSPNYQKYTYGQSSMSPLPQMPIQTLQDNKSSYGGMSQYNCAPGLLKELLTSDSPPHNDIMTPVDPGVAQPNSRVLGQNVMMGPNSVMSTYGSQASHNKMMNPSSHTHPGHAQQTSAVNGRPLPHTVSTMPHTSGMNRLTQVKTPVQVPLPHPMQMSALGGYSSVSSCNGYGRMGLLHQEKLPSDLDGMFIERLDCDMESIIRNDLMDGDTLDFNFDNVLPNQSFPHSVKTTTHSWVSG

SEQ ID NO: 30464 - protein, 129 aa, Homo sapiens
KISAMPHSSDSSDSSFSRSPPPGKQDSSDDVRRVQRREKNRIAAQKSRQRQTQKADTLHLESEDLEKQNAALRKEIKQLTEELKYFTSVLNSHEPLCSVLAASTPSPPEVVYSAHAFHQPHVSSPRFQP

SEQ ID NO: 30465 - protein, 153 aa, Homo sapiens
KVMSYEVDLLTHEWVTTRSLETAGWTPTCAFQLLLEPQGPRKAVWSLQPGPSPGRNTSTFAKDSLIHHHGTQKKKMQKRRLKLWPTQGGCKLFEIFLVEKWGSKFPPLNLGRPSDCLTNRNSMEATLYRFLRLSLKRLAVPTSCHLGIIVLET

SEQ ID NO: 30466 - protein, 18 aa, Homo sapiens
RGSAPGLESLRVPLGLAR

SEQ ID NO: 30467 - protein, 48 aa, Homo sapiens
IRTDDDCKMKTYFQLLFPPSRRIKLNLLLTSCKKKKKEKSSFIHSVSI

SEQ ID NO: 30468 - protein, 689 aa, Homo sapiens
VTHTMAEWLLSASWQRRAKAMTAAAGSAGRAAVPLLLCALLAPGGAYVLDDSDGLGREFDGIGAVSGGGATSRLLVNYPEPYRSQILDYLFKPNFGASLHILKVEIGGDGQTTDGTEPSHMHYALDENYFRGYEWWLMKEAKKRNPNITLIGLPWSFPGWLGKGFDWPYVNLQLTAYYVVTWIVGAKRYHDLDIDYIGIWNERSYNANYIKILRKMLNYQGLQRVKIIASDNLWESISASMLLDAELFKVVDVIGAHYPGTHSAKDAKLTGKKLWSSEDFSTLNSDMGAGCWGRILNQNYINGYMTSTIAWNLVASYYEQLPYGRCGLMTAQEPWSGHYVVESPVWVSAHTTQFTQPGWYYLKTVGHLEKGGSYVALTDGLGNLTIIIETMSHKHSKCIRPFLPYFNVSQQFATFVLKGSFSEIPELQVWYTKLGKTSERFLFKQLDSLWLLDSDGSFTLSLHEDELFTLTTLTTGRKGSYPLPPKSQPFPSTYKDDFNVDYPFFSEAPNFADQTGVFEYFTNIEDPGEHHFTLRQVLNQRPITWAADASNTISIIGDYNWTNLTIKCDVYIETPDTGGVFIAGRVNKGGILIRSARGIFFWIFANGSYRVTGDLAGWIIYALGRVEVTAKKWYTLTLTIKGHFTSGMLNDKSLWTDIPVNFPKNGWAAIGTHSFEFAQFDNFLVEATR

SEQ ID NO: 30469 - protein, 48 aa, Homo sapiens
MATKNARLRTSSQARLTHSGLSSWRKRHSAKQNLGCLHHILPVDTGRI

SEQ ID NO: 30470 - protein, 415 aa, Homo sapiens
KMQTFLKGKRVGYWLSEKKIKKLNFQAFAELCRKRGMEVVQLNLSRPIEEQGPLDVIIHKLTDVILEADQNDSQSLELVHRFQEYIDAHPETIVLDPLPAIRTLLDRSKSYELIRKIEAYMEDDRICSPPFMELTSLCGDDTMRLLEKNGLTFPFICKTRVAHGTNSHEMAIVFNQEGLNAIQPPCVVQNFINHNAVLYKVFVVGESYTVVQRPSLKNFSAGTSDRESIFFNSHNVSKPESSSVLTELDKIEGVFERPSDEVIRELSRALRQALGVSLFGIDIIINNQTGQHAVIDINAFPGYEGVSEFFTDLLNHIATVLQGQSTAMAATGDVALLRHSKLLAEPAGGLVGERTCSASPGCCGSMMGQDAPWKAEADAGGTAKLPHQRLGCNAGVSPSFQQHCVASLATKASSQ

SEQ ID NO: 30471 - protein, 293 aa, Homo sapiens
VTARNFPPSQDASGDLYTTSSQLTLPATQCPDGKSVTCHVKHYTNSSQDVTVPCRVPPPPPCCHPRLSLHRPALEDLLLGSEANLTCTLTGLRDASGATFTWTPSSGKSAVQGPPERDLCGCYSVSSVLPGCAQPWNHGETFTCTAAHPELKTPLTANITKSGNTFRPEVHLLPPPSEELALNELVTLTCLARGFSPKDVLVRWLQGSQELPREKYLTWASRQEPSQGTTTYAVTSILRVAAEDWKKGETFSCMVGHEALPLAFTQKTIDRMAGKPTHINVSVVMAEADGTCY

SEQ ID NO: 30472 - protein, 55 aa, Homo sapiens
LPLRNQGFSDLLFPPPHWVSVLEARVRGGGGWPRRSALGAASVPLGRRSTACTAA

SEQ ID NO: 30473 - protein, 251 aa, Homo sapiens
TLGIPDLDSAGEMPLGHIMRLDLEKIALEYIVPCLHEVGFCYLDNFLGEVVGDCVLERVKQLHCTGALRDGQLAGPRAGVSKRHLRGDQITWIGGNEEGCEAISFLLSLIDRLVLYCGSRLGKYYVKERSKAMVACYPGNGTGYVRHVDNPNGDGRCITCIYYLNKNWDAKLHGGILRIFPEGKSFIADVEPIFDRLLFFWSDRRNPHEVQPSYATRYAMTVWYFDAEERAEAKKKFRNLTRKTESALTED

SEQ ID NO: 30474 - protein, 15 aa, Homo sapiens
IFRSLMGCWVDGAGK

SEQ ID NO: 30475 - protein, 50 aa, Homo sapiens
RRRITATRCSRPSRFYNTWWNVSGRSTRSSRIQQLSQEYSLATSIGIKRS

SEQ ID NO: 30476 - protein, 346 aa, Homo sapiens
RSAADRVMAMQMQLEANADTSVEEESFGPQPISRLEQCGINANDVKKLEEAGFHTVEAVAYAPKKELINIKGISEAKADKILAEAAKLVPMGFTTATEFHQRRSEIIQITTGSKELDKLLQGGIETGSITEMFGEFRTGKTQICHTLAVTCQLPIDRGGGEGKAMYIDTEGTFRPERLLAVAERYGLSGSDVLDNVAYARAFNTDHQTQLLYQASAMMVESRYALLIVDSATALYRTDYSGRGELSARQMHLARFLRMLLRLADEFGVAVVITNQVVAQVDGAAMFAADPKKPIGGNIIAHASTTRLYLRKGRGETRICKIYDSPCLPEAEAMFAINADGVGDAKD

SEQ ID NO: 30477 - protein, 37 aa, Homo sapiens
RELLAGGSGNSLGGRRGRTGGCWEPSLGLRPAVSVGL

SEQ ID NO: 30478 - protein, 489 aa, Homo sapiens
IADVKKMWEEYPDVYGVRRSNRSRQEPSRFNIKEEASSGSESGSPKRRGQRQLKKQEKWKQEPSEDEQEQGTSAESEPEQKKVKARRPVPRRTVPKPRVKKQPKTQRGKRKKQDSSDEDDDDDEAPKRQTRRRAAKNVSYKEDDDFETDSDDLIEMTGEGVDEQQDNSETIEKVLDSRLGKKGATGASTTVYAIEANGDPSGDFDTEKDEGEIQYLIKWKGWSYIHSTWESEESLQQQKVKGLKKLENFKKKEDEIKQWLGKVSPEDVEYFNCQQELASELNKQYQIVERVIAVKTSKSTLGQTDFPAHSRKPAPSNEPEYLCKWMGLPYSECSWEDEALIGKKFQNCIDSFHSRNNSKTIPTRECKALKQRPRFVALKKQPAYLGGENLELRDYQLEGLNWLAHSWCKNNSVILADEMGLGKTIQTISFLSYLFHQHQLYGPFLIVVPLSTLTSWQREFEIWAPEINVVVYIGDLMSRNTVCKQKELG

SEQ ID NO: 30479 - protein, 17 aa, Homo sapiens
RDNMVSGDGRPKSRIRL

SEQ ID NO: 30480 - protein, 6 aa, Homo sapiens
MMLVIK

SEQ ID NO: 30481 - protein, 1151 aa, Homo sapiens
LRARGGAARLRELLPGWDSYTMRCLAPRPAGSYLSEPQGSSQCATMELGPLEGGYLELLNSDADPLCLYHFYDQMDLAGEEEIELYSEPDTDTINCDQFSRLLCDMEGDEETREAYANIAELDQYVFQDSQLEGLSKDIFKHIGPDEVIGESMEMPAEVGQKSQKRPFPEELPADLKHWKPAEPPTVVTGSLLVGPVSDCSTLPCLPLPALFNQEPASGQMRLEKTDQIPMPFSSSSLSCLNLPEGPIQFVPTISTLPHGLWQISEAGTGVSSIFIYHGEVPQASQVPPPSGFTVHGLPTSPDRPGSTSPFAPSATDLPSMPEPALTSRANMTEHKTSPTQCPAAGEVSNKLPKWPEPVEQFYRSLQDTYGAEPAGPDGILVEVDLVQARLERSSSKSLERELATPDWAERQLAQGGLAEVLLAAKEHRRPRETRVIAVLGKAGQGKSYWAGAVSRAWACGRLPQYDFVFSVPCHCLNRPGDAYGLQDLLFSLGPQPLVAADEVFSHILKRPDRVLLILDGFEELEAQDGFLHSTCGPAPAEPCSLRGLLAGLFQKKLLRGCTLLLTARPRGRLVQSLSKADALFELSGFSMEQAQAYVMRYFESSGMTEHQDRALTLLRDRPLLLSHSHSPTLCRAVCQLSEALLELGEDAKLPSTLTGLYVGLLGRAALDSPPGALAELAKLAWELGRRHQSTLQEDQFPSADVRTWAMAKGLVQHPPRAAESELAFPSFLLQCFLGALWLALSGEIKDKELPQYLALTPRKKRPYDNWLEGVPRFLAGLIFQPPARCLGALLGPSAAASVDRKQKVLARYLKRLQPGTLRARQLLELLHCAHEAEEAGIWQHVVQELPGRLSFLGTRLTPPDAHVLGKALEAAGQDFSLDLRSTGICPSGLGSLVGLSCVTRFRAALSDTVALWESLQQHGETKLLQAAEEKFTIEPFKAKSLKDVEDLGKLVQTQRTRSSSEDTAGELPAVRDLKKLEFALGPVSGPQAFPKLVRILTAFSSLQHLDLDALSENKIGDEGVSQLSATFPQLKSLETLNLSQNNITDLGAYKLAEALPSLAASLLRLSLYNNCICDVGAESLARVLPDMVSLRVMDVQYNKFTAAGAQQLAASLRRCPHVETLAMWTPTIPFSVQEHLQQQDSRISLR

SEQ ID NO: 30482 - protein, 26 aa, Homo sapiens
TKTNDYCKSLPAALSATEIEKSISAR

SEQ ID NO: 30483 - protein, 753 aa, Homo sapiens
KTPGHPGSWEMGLLTFRDVAVEFSLEEWEHLEPAQKNLYQDVMLENYRNLVSLGLVVSKPDLITFLEQRKEPWNVKSEETVAIQPDVFSHYNKDLLTEHCTEASFQKVISRRHGSCDLENLHLRKRWKREECEGHNGCYDEKTFKYDQFDESSVESLFHQQILSSCAKSYNFDQYRKVFTHSSLLNQQEEIDIWGKHHIYDKTSVLFRQVSTLNSYRNVFIGEKNYHCNNSEKTLNQSSSPKNHQENYFLEKQYKCKEFEEVFLQSMHGQEKQEQSYKCNKCVEVCTQSLKHIQHQTIHIRENSYSYNKYDKDLSQSSNLRKQIIHNEEKPYKCEKCGDSLNHSLHLTQHQIIPTEEKPCKWKECGKVFNLNCSLYLTKQQQIDTGENLYKCKACSKSFTRSSNLIVHQRIHTGEKPYKCKECGKAFRCSSYLTKHKRIHTGEKPYKCKECGKAFNRSSCLTQHQTTHTGEKLYKCKVCSKSYARSSNLIMHQRVHTGEKPYKCKECGKVFSRSSCLTQHRKIHTGENLYKCKVCAKPFTCFSNLIVHERIHTGEKPYKCKECGKAFPYSSHLIRHHRIHTGEKPYKCKACSKSFSDSSGLTVHRRTHTGEKPYTCKECGKAFSYSSDVIQHRRIHTGQRPYKCEECGKAFNYRSYLTTHQRSHTGERPYKCEECGKAFNSRSYLTTHRRRHTGERPYKCDECGKAFSYRSYLTTHRRSHSGERPYKCEECGKAFNSRSYLIAHQRSHTREKL

SEQ ID NO: 30484 - protein, 132 aa, Homo sapiens
RSPMSLPSTSTPPTPSAQQYFILLIITDGVISDMEETRHAVVQASKLPMSIIIVGVGNADFAAMEFLDGDSRMLRSHTGEEAARDIVQFVPFREFRNAAKETLAKAVLAELPQQVVQYFKHKNLPPTNSEPA

SEQ ID NO: 30485 - protein, 121 aa, Homo sapiens
LSSSGPLRLHPCPPQAPSASTPALLRPPPPPPLPSSGPLRLHPCPPQAPSASTPALLRPPPPPPLPSSGPLRPRLVLLRPPPPPAPSSSGPLRLRLRPPLAPSAPGPGPTAGCGTTPAPSA

SEQ ID NO: 30486 - protein, 1074 aa, Homo sapiens
LLLEVIPDSMRKQEVRTGREAGQGHGTGSPAEQVKALMDLLAGKGSQGSQAPQALDRTPDAPLGPCSNDSRIQRHRKALLSKVGGGPELGGPWHRLASLLLVEGLTDLQLREHDFTQVEATRGGGHPARTVALDRLFLPLSRVSVPPRVSITIGVAGMGKTTLVRHFVRLWAHGQVGKDFSLVLPLTFRDLNTHEKLCADRLICSVFPHVGEPSLAVAVPARALLILDGLDECRTPLDFSNTVACTDPKKEIPVDHLITNIIRGNLFPEVSIWITSRPSASGQIPGGLVDRMTEIRGFNEEEIKVCLEQMFPEDQALLGWMLSQVQADRALYLMCTVPAFCRLTGMALGHLWRSRTGPQDAELWPPRTLCELYSWYFRMALSGEGQEKGKASPRIEQVAHGGRKMVGTLGRLAFHGLLKKKYVFYEQDMKAFGVDLALLQGAPCSCFLQREETLASSVAYCFTHLSLQEFVAAAYYYGASRRAIFDLFTESGVSWPRLGFLTHFRSAAQRAMQAEDGRLDVFLRFLSGLLSPRVNALLAGSLLAQGEHQAYRTQVAELLQGCLRPDAAVCARAINVLHCLHELQHTELARSVEEAMESGALARLTGPAHRAALAYLLQVSDACAQEANLSLSLSQGVLQSLLPQLLYCRKLRLDTNQFQDPVMELLGSVLSGKDCRIQKISLAENQISNKGAKALARSLLVNRSLTSLDLRGNSIGPQGAKALADALKINRTLTSLSLQGNTVRDDGARSMAEALASNRTLSMLHLQKNSIGPMGAQRMADALKQNRSLKELMFSSNSIGDGGAKALAEALKVNQGLESLDLQSNSISDAGVAALMGALCTNQTLLSLSLRENSISPEGAQAIAHALCANSTLKNLDLTANLLHDQGARAIAVAVRENRTLTSLHLQWNFIQAGAAQALGQALQLNRSLTSLDLQENAIGDDGACAVARALKVNTALTALYLQVASIGASGAQVLGEALAVNRTLEILDLRGNAIGVAGAKALANALKVNSSLRRLNLQENSLGMDGAICIATALSGNHRLQHINLQGNHIGDSGARMISEAIKTNAPTCTVEM

SEQ ID NO: 30487 - protein, 144 aa, Homo sapiens
LMAAPTSSCTSLMWKGSMSQWKATRSPIKCAPSHPRMRSCRPWRSSSLTWHQAPSMRPGLDMSSAPRRWWKHPLSCACGRLCREEAADTGDDILPHETGLQPGMVPLKYLLEEGVWGAGVGCGVFPAISTAYDHCNNLSPSEEH

SEQ ID NO: 30488 - protein, 159 aa, Homo sapiens
THFRTFRSHADYRRITRASALLDACGFYWGPLSVHGAHERLRAEPVGTFLVRDSRQRNCFFALSVKMASGPTSIRVHFQAGRFHLDGSRESFDCLFELLEHYVAAPRRMLGAPLRQRRVRPLQELCRQRIVATVGRENLARIPLNPVLRDYLSSFPFQI

SEQ ID NO: 30489 - protein, 48 aa, Homo sapiens
LGNPSNQKFIQLFICFESSGCKSMQLSYTGEDSFHVNIHILWGNLLPK

SEQ ID NO: 30490 - protein, 8 aa, Homo sapiens
TSSSTWWH

SEQ ID NO: 30491 - protein, 6 aa, Homo sapiens
LCMPWV

SEQ ID NO: 30492 - protein, 26 aa, Homo sapiens
IMVWVLRKRAWTQINTTKSAVKQFIS

SEQ ID NO: 30493 - protein, 55 aa, Homo sapiens
MEIPLTLLCPHICPRPQSPYKERFPTQYQHRTQLGSEASEFCSLTSEKTSLPPIP

SEQ ID NO: 30494 - protein, 28 aa, Homo sapiens
LARARALCMVYRRQLTFEEEIAALRSFL

SEQ ID NO: 30495 - protein, 17 aa, Homo sapiens
KRPRNKTSHFVCTYWPL

SEQ ID NO: 30496 - protein, 293 aa, Homo sapiens
IGLSWAMAAEARVSRWYFGGLASCGAACCTHPLDLLKVHLQTQQEVKLRMTGMALRVVRTDGILALYSGLSASLCRQMTYSLTRFAIYETVRDRVAKGSQGPLPFHEKVLLGSVSGLAGGFVGTPADLVNVRMQNDVKLPQGQRRNYAHALDGLYRVAREEGLRRLFSGATMASSRGALVTVGQLSCYDQAKQLVLSTGYLSDNIFTHFVASFIAGGCATFLCQPLDVLKTRLMNSKGEYQGVFHCAVETAKLGPLAFYKGLVPAGIRLIPHTVLTFVFLEQLRKNFGIKVPS

SEQ ID NO: 30497 - protein, 57 aa, Homo sapiens
IPVVMEGHICQSLESAKAGTRFPGPQWGCANPRELGCKFVKNQHHVWQLSIGARSLP

SEQ ID NO: 30498 - protein, 10 aa, Homo sapiens
ITNRKCRQKR

SEQ ID NO: 30499 - protein, 52 aa, Homo sapiens
LDPIPGPPYQLTSSSVLQAPLGSSLPWLFLPLPLYRRLSVGALGFIKLGSEC

SEQ ID NO: 30500 - protein, 273 aa, Homo sapiens
IAITGNLEVETPFCHPSVPRAAANPPAGLQDPGLTERPHRSRRPRARYAPGIMGEKSRRKGPAPRHADGKLGRTCDHPYAPWSFTPSSRAPTAWVRPPCPVWASRLQEHSPEPRRARAPPTRRAQAALYAPALRLRDHLDRFSILMTSCTSWLQAPQAPGLCRDEQSSRISVPQLSGAPILLPDLEGTKLSNFQESSPLPHKHERKDKRSTPEEEGRSAPEKIIQSLKLCPGGHRPASLSSGCPAGCRLSFNLPPSMLLSVQKCCMPSSLKTC

SEQ ID NO: 30501 - protein, 904 aa, Homo sapiens
IYWCKFNMEANHCSLGVYPSYPDLVIDVGEVTLGEENRKKLQKTQRDQERARVIRAACALLNSGGGVIQMEMANRDERPTEMGLDLEESLRKLIQYPYLQAFFETKQHGRCFYIFVKSWSGDPFLKDGSFNSRICSLSSSLYCRSGTSVLHMNSRQAFDFLKTKERQSKYNLINEGSPPSKIMKAVYQNISESNPAYEVFQTDTIEYGEILSFPESPSIEFKQFSTKHIQQYVENIIPEYISAFANTEGGYLFIGVDDKSRKVLGCAKEQVDPDSLKNVIARAISKLPIVHFCSSKPRVEYSTKIVEVFCGKELYGYLCVIKVKAFCCVVFSEAPKSWMVREKYIRPLTTEEWVEKMMDADPEFPPDFAEAFESQLSLSDSPSLCRPVYSKKGLEHKADLQQHLFPVPPGHLECTPESLWKELSLQHEGLKELIHKQMRPFSQGIVILSRSWAVDLNLQEKPGVICDALLIAQNSTPILYTILREQDAEGQDYCTRTAFTLKQKLVNMGGYTGKVCVRAKVLCLSPESSAEALEAAVSPMDYPASYSLAGTQHMEALLQSLVIVLLGFRSLLSDQLGCEVLNLLTAQQYEIFSRSLRKNRELFVHGLPGSGKTIMAMKIMEKIRNVFHCEAHRILYVCENQPLRNFISDRNICRAETRETFLREKFEHIQHIVIDEAQNFRTEDGDWYRKAKTITQREKDCPGVLWIFLDYFQTSHLGHSGLPPLSAQYPREELTRVVRNADEIAEYIQQEMQLIIENPPINIPHGYLAILSEAKWVPGVPGNTKIIKNFTLEQIVTYVADTCRCFFERGYSPKDVAVLVSTVTEVEQYQSKLLKAMRKKMVVQLSDACDMLGVHIVLDSVRRFSGLERSIVFGIHPRTADPAILPNILICLASRAKQHLYIFL

SEQ ID NO: 30502 - protein, 481 aa, Homo sapiens
VPDEAVARDVQRLLVQFQDEGGQLLGSPFDVPVDITPDRLQLVCNALLAQEDPLPLAFFVHDAEIVSSLGKTLESQAVETEKVLDIIYQPQAIFRVRAVTRCTSSLEGHSEAVISVAFSPTGKYLASGSGDTTVRFWDLSTETPHFTCKGHRHWVLSISWSPDGRKLASGCKNGQILLWDPSTGKQVGRTLAGHSKWITGLSWEPLHANPECRYVASSSKDGSVRIWDTTAGRCERILTGHTQSVTCLRWGGDGLLYSASQDRTIKVWRAHDGVLCRTLQGHGHWVNTMALSTDYALRTGAFEPAEASVNPQDLQGSLQELKERALSRYNLVRGQGPERLVSGSDDFTLFLWSPAEDKKPLTRMTGHQALINQVLFSPDSRIVASASFDKSIKLWDGRTGKYLASLRGHVAAVYQIAWSADSRLLVSGSSDSTLKVWDVKAQKLAMDLPGHADEVYAVDWSPDGQRVASGGKDKCLRIWRR

SEQ ID NO: 30503 - protein, 204 aa, Homo sapiens
KTPQICVVGSGPAGFYTAQHLLKQHPQAHVDIYEKQPVPFGLVRFGVAPDHPEVKTAHSGRCAFWGNVEVGRDVTVPELQEAYHAVVLSYGAEDHRALEIPGEELPGVCSARAFVGWYNGLPENQELEPDLSCDTAVILGQGNVALDVARILLTPPEHLERTDITKAALGVLRQSRVKTVWLVGRRGPLQVAFTIKRSPARGSG

SEQ ID NO: 30504 - protein, 100 aa, Homo sapiens
RSQGCRGVSVSLTMNLEPPKAEFRSATRVAGGPVTPRKGPPKFKQRQTRQFKSKPPKKGVQGFGDDIPGMEGLGTDITVICPWEAFNHLELHELAQYGII

SEQ ID NO: 30505 - protein, 25 aa, Homo sapiens
KRGEAKPRALGCFSREDSLPPASGC

SEQ ID NO: 30506 - protein, 14 aa, Homo sapiens
KRKHYSLSNKINKK

SEQ ID NO: 30507 - protein, 46 aa, Homo sapiens
KLREEGGNKYFCLILKPWKELSPCLTRTQPFLLSRRRSCLTLPCGL

SEQ ID NO: 30508 - protein, 309 aa, Homo sapiens
IRWEPESRRGGLEVEGPGEAAMKPSGEDQAALAAGPWEECFQAAVQLALRAGQIIRKALTEEKRVSTKTSAADLVTETDHLVEDLIISELRERFPSHRFIAEEAAASGAKCVLTHSPTWIIDPIDGTCNFVHRFPTVAVSIGFAVRQELEFGVIYHCTEERLYTGRRGRGAFCNGQRLRVSGETDLSKALVLTEIGPKRDPATLKLFLSNMERLLHAKAHGVRVIGSSTLALCHLASGAADAYYQFGLHCWDLAAATVIIREAGGIVIDTSGGPLDLMACRVVAASTREMAMLIAQALQTINYGRDDEK

SEQ ID NO: 30509 - protein, 901 aa, Homo sapiens
ILSKMNISGSSCGSPNSADTSSDFKDLWTKLKECHDREVQGLQVKVTKLKQERILDAQRLEEFFTKNQQLREQQKVLHETIKVLEDRLRAGLCDRCAVTEEHMRKKQQEFENIRQQNLKLITELMNERNTLQEENKKLSEQLQQKIENDQQHQAAELECEEDVIPDSPITAFSFSGVNRLRRKENPHVRYIEQTHTKLEHSVCANEMRKVSKSSTHPQHNPNENEILVADTYDQSQSPMAKAHGTSSYTPDKSSFNLATVVAETLGLGVQEESETQGPMSPLGDELYHCLEGNHKKQPFEESTRNTEDSLRFSDSTSKTPPQEELPTRVSSPVFGATSSIKSGLDLNTSLSPSLLQPGKKKHLKTLPFSNTCISRLEKTRSKSEDSALFTHHSLGSEVNKIIIQSSNKQILINKNISESLGEQNRTEYGKDSNTDKHLEPLKSLGGRTSKRKKTEEESEHEVSCPQASFDKENAFPFPMDNQFSMNGDCVMDKPLDLSDRFSAIQRQEKSQGSETSKNKFRQVTLYEALKTIPKGFSSSRKASDGNCTLPKDSPGEPCSQECIILQPLNKCSPDNKPSLQIKEENAVFKIPLRPRESLETENVLDDIKSAGSHEPIKIQTRSDHGGCELASVLQLNPCRTGKIKSLQNNQDVSFENIQWSIDPGADLSQYKMDVTVIDTKDGSQSKLGGETVDMDCTLVSETVLLKMKKQEQKGEKSSNEERKMNDSLEDMFDRTTHEEYESCLADSFSQAADEEEELSTATKKLHTHGDKQDKVKQKAFVEPYFKGDERETSLQNFPHIEVVRKKEERRKLLGHTCKECEIYYADMPAEEREKKLASCSRHRFRYIPPNTPENFWEVGFPSTQTCMERGYIKEDLDPCPRPKRRQPYNAIFSPKGKEQKT

SEQ ID NO: 30510 - protein, 6 aa, Homo sapiens
RIFLVV

SEQ ID NO: 30511 - protein, 71 aa, Homo sapiens
RLRFPGSVAEWAAAPAEMPGKKARKNAQPSPARAPAELEVECATQLRRFGDKLNFRQKLLNLISKLFCSGT

SEQ ID NO: 30512 - protein, 56 aa, Homo sapiens
LMTAVLSSRYLHGLQKFGPWVVSGNWKKGHKHEAQFSFQRWCWPPLHAGVKIPGCK

SEQ ID NO: 30513 - protein, 55 aa, Homo sapiens
IFMSTIQPSLADQRLEFKLILDMSALVMTLMYSCMDLYAIFFHYPRSTLDTSCLN

SEQ ID NO: 30514 - protein, 16 aa, Homo sapiens
RFTKAVEIICIVSDVP

SEQ ID NO: 30515 - protein, 32 aa, Homo sapiens
VRPVWLLLWKQCCSYWKIKGKASPWWGKVWLR

SEQ ID NO: 30516 - protein, 53 aa, Homo sapiens
ILFSPAWQGPKTCQGGAAGKGRGAAQRAGGGSASMPQLWMRNPVSPEHWPALL

SEQ ID NO: 30517 - protein, 21 aa, Homo sapiens
LMPRSRRSWRMPTGRTTTNTS

SEQ ID NO: 30518 - protein, 62 aa, Homo sapiens
KPDRAFAHSCRLAATRPRQPPRTRDQAPSPVTAAESSPLAAARPGAAPQGPSPDRLGRPDVH

SEQ ID NO: 30519 - protein, 14 aa, Homo sapiens
MSRARPSPVRVAAL

SEQ ID NO: 30520 - protein, 644 aa, Homo sapiens
RPPGAPLSQLCGPGGDVMAAAVLTDRAQVSVTFDDVAVTFTKEEWGQLDLAQRTLYQEVMLENCGLLVSLGCPVPKAELICHLEHGQEPWTRKEDLSQDTCPGDKGKPKTTEPTTCEPALSEGISLQGQVTQGNSVDSQLGQAEDQDGLSEMQEGHFRPGIDPQEKSPGKMSPECDGLGTADGVCSRIGQEQVSPGDRVRSHNSCESGKDPMIQEEENNFKCSECGKVFNKKHLLAGHEKIHSGVKPYECTECGKTFIKSTHLLQHHMIHTGERPYECMECGKAFNRKSYLTQHQRIHSGEKPYKCNECGKAFTHRSNFVLHNRRHTGEKSFVCTECGQVFRHRPGFLRHYVVHSGENPYECLECGKVFKHRSYLMWHQQTHTGEKPYECSECGKVFLESAALIHHYVIHTGEKPFECLECGKAFNHRSYLKRHQRIHTGEKPFVCSECGKAFTHCSTFILHKRAHTGEKPFECKECGKAFSNRKDLIRHFSIHTGEKPYECVECGKAFTRMSGLTRHKRIHSGEKPYECVECGKSFCWSTNLIRHAIIHTGEKPYKCSECGKAFSRSSSLTQHQRMHTGKNPISVTDVGRPFTSGQTSVTLRELLLGKDFLNVTTEANILPEETSSSASDQPYQRETPQVSSL

SEQ ID NO: 30521 - protein, 72 aa, Homo sapiens
LPFMPPEEPPRIPCPLLAAAADPWALRWSRACCPLTPSEPELPASWDSAVSSLPPVQSNCLQENKSVFRCTE

SEQ ID NO: 30522 - protein, 10 aa, Homo sapiens
VMVTSMKGGF

SEQ ID NO: 30523 - protein, 220 aa, Homo sapiens
KMASAGDTQAGPRDAADQNFDYMFKLLLIGNSSVGKTSFLFRYADDSFTPAFVSTVGIDFKVKTVYRHDKRIKLQIWDTAGQERYRTITTAYYRGAMGFLLMYDIANQESFAAVQDWATQIKTYSWDNAQVILVGNKCDLEDERVVPAEDGRRLADDLGFEFFEASAKENINVKQVFERLVDVICEKMNESLEPSSSSGSNGKGPAVGDAPAPQPSSCSC

SEQ ID NO: 30524 - protein, 11 aa, Homo sapiens
RAMPKPPPRSP

SEQ ID NO: 30525 - protein, 91 aa, Homo sapiens
LSPPWPSHRAMVPSLASQGPRSTRRYCLMCGYCLGGCPWPSGMQPQPRCVSSLWTSSRPTSTSMRYTMRRRSGGPSRRHPRIRATRRRRRS

SEQ ID NO: 30526 - protein, 19 aa, Homo sapiens
LSEIFPRLQTPTDLLWEPE

SEQ ID NO: 30527 - protein, 92 aa, Homo sapiens
RRPGSAPPEPSLLQTSAIWGHSTSWSQGPHVPPRETLVFPAPRAKEPGRSELPAFGHLAHGAEQRSLSAQPGEFKHSSFQEPRNFSAVNSQL

SEQ ID NO: 30528 - protein, 180 aa, Homo sapiens
KPHPPEAKMSSKRAKAKTTKKRPQRATSNVFAMFDQSQIQEFKEAFNMIDQNRDGFIDKEDLHDMLASLGKNPTDEYLEGMMSEAPGPINFTMFLTMFGEKLNGTDPEDVIRNAFACFDEEASGFIHEDHLRELLTTMGDRFTDEEVDEMYREAPIDKKGNFNYVEFTRILKHGAKDKDD

SEQ ID NO: 30529 - protein, 70 aa, Homo sapiens
REPASVESGVRASPRQGIAEPQRGALGSAASPTGQGMTAPALEYRLCFGAFGISFHLVRKSVVSPASSGK

SEQ ID NO: 30530 - protein, 88 aa, Homo sapiens
LSVRLQFLTPTLRAARTMAAPPQLRALLVVVNALLRKRRYHAALAVLKGFRNGAVYGAKIRAPHALVMTFLFRNGRSTCTCCHASCLP

SEQ ID NO: 30531 - protein, 16 aa, Homo sapiens
MPVTSIHMEQIAAVGG

SEQ ID NO: 30532 - protein, 21 aa, Homo sapiens
LLPWPGCSLPVDVIDKISKVL

SEQ ID NO: 30533 - protein, 35 aa, Homo sapiens
INLVICHGLVVQLVRSFRINMHFITVKCSFNSESK

SEQ ID NO: 30534 - protein, 455 aa, Homo sapiens
RQARSGEVGAMWPGNAWRAALFWVPRGRRAQSALAQLRGILEGELEGIRGAGTWKSERVITSRQGPHIRVDGVSGGPGTVIFPGLPLPHLSCCIHLLSFTSGILNFCANNYLGLSSHPEVIQAGLQALEEFGAGLSSVRFICGTQSIHKNLEAKIARFHQREDAILYPSCYDANAGLFEALLTPEDAVLSDELNHASIIDGIRLCKAHKYRYRHLDMADLEAKLQEAQKHRLRLVATDGAFSMDGDIAPLQEICCLASRYGALVFMDECHATGFLGPTGRGTDELLGVMDQVTIINSTLGKALGGASGGYTTGPGPLVSLLRQRARPYLFSNSLPPAVVGCASKALDLLMGSNTIVQSMAAKTQRFRSKMEAAGFTISGASHPICPVMLGDARLASRMADDMLKRGIFVIGFSYPVVPKGKARIRVQISAVHSEEDIDRCVEAFVEVGRLHGALP

SEQ ID NO: 30535 - protein, 37 aa, Homo sapiens
ILIATDVASRGLEALISAADHSIHGRDKSTLAGSSSR

SEQ ID NO: 30536 - protein, 327 aa, Homo sapiens
LHILEHRVRVLSVARPGLWLYTHPLIKLLFLPRRSRCKFFSLTETPEDYTLMVDEEGFKELPPSEFLQVAEATWLVLNVSSHSGAAVQAAGVTKIARSVIAPLAEHHVSVLMLSTYQTDFILVREQDLSVVIHTLAQEFDIYREVGGEPVPVTRDDSSNGFPRTQHGPSPTVHPIQSPQNRFCVLTLDPETLPAIATTLIDVLFYSHSTPKEAASSSPEPSSITFFAFSLIEGYISIVMDAETQKKFPSDLLLTSSSGELWRMVRIGGQPLGFDECGIVAQIAGPLAAADISAYYISTFNFDHALVPEDGIGSVIEVLQRRQEGLAS

SEQ ID NO: 30537 - protein, 34 aa, Homo sapiens
LILPIHGTSKGQGNGPPQTDVHWFCSSHLGVSTG

SEQ ID NO: 30538 - protein, 213 aa, Homo sapiens
LRPLLTDFRLQFICAPASSLSLRRLRLRPQKEISILCPEQNRMAMSQESLTFKDVFVDFTLEEWQQLDSAQKNLYRDVMLENYSHLVSVGYLVAKPDVIFRLGPGEESWMADGGTPVRTCAGEDRPEVWQVDEQIDHYKESQDKLPWQAAFIGKETLKDESGQESRTCRKSIYLSTEFDSVRQRLPKYYSWEKAFKTSFKLSWSKWKLCKKER

SEQ ID NO: 30539 - protein, 33 aa, Homo sapiens
IRKMVFYGKYLSVGLNVKERGRERNPFIMFSLP

SEQ ID NO: 30540 - protein, 12 aa, Homo sapiens
VLPMPRMFSLTC

SEQ ID NO: 30541 - protein, 111 aa, Homo sapiens
IWAARLRFASWPSFPGTSLGLEHWTMDWQGRLPWAGCTGSASCATLTARKSQIPASVRSSSWRWQSSWSQKAGRMQVMSTSALMTVGWLPKEIQKADFRQTLSAFLMGFAS

SEQ ID NO: 30542 - protein, 104 aa, Homo sapiens
MFFLVLITVPPPPPDRPGLQEKRKVEQLQYNLELAFHHHLCKTHRQSILAKLPPKGKLRSLCSQHVERLQIFQHLHPIVVQAAFPPLYKELFSTETESPVGLSK

SEQ ID NO: 30543 - protein, 1488 aa, Homo sapiens
MSDSDLMGKTMTEDDDITTGWDESSSISSGLSDASDNLSSEEFNASSSLNSLPSTPTASRRNSTIVLRTDSEKRSLAESGLSWFSESEEKAPKKLEYDSGSLKMEPGTSKWRRERPESCDDSSKGGELKKPISLGHPGSLKKGKTPPVAVTSPITHTAQSALKVAGKPEGKATDKGKLAVKNTGLQRSSSDAGRDRLSDAKKPPSGIARPSTSGSFGYKKPPPATGTATVMQTGGSATLSKIQKSSGIPVKPVNGRKTSLDVSNSAEPGFLAPGARSNIQYRSLPRPAKSSSMSVTGGRGGPRPVSSSIDPSLLSTKQGGLTPSRLKEPTKVASGRTTPAPVNQTDREKEKAKAKAVALDSDNISLKSIGSPESTPKNQASHPTATKLAELPPTPLRATAKSFVKPPSLANLDKVNSNSLDLPSSSDTTHASKVPDLHATSSASGGPLPSCFTPSPAPILNINSASFSQGLELMSGFSVPKETRMYPKLSGLHRSMESLQMPMSLPSAFPSSTPVPTPPAPPAAPTEEETEELTWSGSPRAGQLDSNQRDRNTLPKKGLRYQLQSQEETKERRHSHTIGGLPESDDQSELPSPPALPMSLSAKGQLTNIVSPTAATTPRITRSNSIPTHEAAFELYSGSQMGSTLSLAERPKGMIRSGSFRDPTDDVHGSVLSLASSASSTYSSAEERMQSEQIRKLRRELESSQEKVATLTSQLSANANLVAAFEQSLVNMTSRLRHLAETAEEKDTELLDLRETIDFLKKKNSEAQAVIQGALNASETTPKELRIKRQNSSDSISSLNSITSHSSIGSSKDADAKKKKKKSWVYELRSSFNKAFSIKKGPKSASSYSDIEEIATPDSSAPSSPKLQHGSTETASPSIKSSTSSSVGTDVTEGPAHPAPHTRLFHANEEEEPEKKEVSELRSELWEKEMKLTDIRLEALNSAHQLDQLRETMHNMQLEVDLLKAENDRLKVAPGPSSGSTPGQVPGSSALSSPRRSLGLALTHSFGPSLADTDLSPMDGISTCGPKEEVTLRVVVRMPPQHIIKGDLKQQEFFLGCSKVSGKVDWKMLDEAVFQVFKDYISKMDPASTLGLSTESIHGYSISHVKRVLDAEPPEMPPCRRGVNNISVSLKGLKEKCVDSLVFETLIPKPMMQHYISLLLKHRRLVLSGPSGTGKTYLTNRLAEYLVERSGREVTEGIVSTFNMHQQSCKDLQLYLSNLANQIDRETGIGDVPLVILLDDLSEAGSISELVNGALTCKYHKCPYIIGTTNQPVKMTPNHGLHLSFRMLTFSNNVEPANGFLVRYLRRKLVESDSDINANKEELLRVLDWVPKLWYHLHTFLEKHSTSDFLIGPCFFLSCPIGIEDFRTWFIDLWNNSIIPYLQEGAKDGIKVHGQKAAWEDPVEWVRDTLPWPSAQQDQSKLYHLPPPTVGPHSIASPPEDRTVKDSTPSSLDSDPLMAMLLKLQEAANYIESPDRETILDPNLQATL

SEQ ID NO: 30544 - protein, 99 aa, Homo sapiens
MPREDRATWKSNYFLKIIQLLDDYPKCFIVGADNVGSKQMQQIRMSLRGKAVVLMGKNTMMRKAIRGHLENNPALEKSVPLAVLSFLPSARLPLPGEWC

SEQ ID NO: 30545 - protein, 309 aa, Homo sapiens
MYQEISVLQDNSSKICQDMKEPEDNSPNTCQVISVIQDHPFKMYQDMAKREDLAPKMCQEAAVPKILPCPTSEDTADLAGCSLQAYPKPDVPKGYILDTDQNPAEPEEYNETDQGIAETEGLFPKIQEIAEPKDLSTKTHQESAEPKYLPHKTCNEIIVPKAPSHKTIQETPHSEDYSIEINQETPGSEKYSPETYQEIPGLEEYSPEIYQETSQLEEYSPEIYQETPGPEDLSTETYKNKDVPKECFPEPHQETGGPQGQDPKAHQEDAKDAYTFPQEMKEKPKEEPGIPAILNESHPENDVYSYVLF

SEQ ID NO: 30546 - protein, 88 aa, Homo sapiens
LTEESIFTMATPSILKSQVFPLVQPCLSANWPVSIVMKFKYVEQRSSLVLLQNSLKIYPAYRRENRGLWPAPGKEDETPTYTLSILYS

SEQ ID NO: 30547 - protein, 43 aa, Homo sapiens
KYRQNTKGFWHLKSKSIQRWMNYKRNLKLQDLRSFSPNLYLLW

SEQ ID NO: 30548 - protein, 47 aa, Homo sapiens
RDVRRGSRCWNRRNCFYSILPVIQIIYPEVNSKASDGSYNTHRLSIY

SEQ ID NO: 30549 - protein, 6 aa, Homo sapiens
KNLLET

SEQ ID NO: 30550 - protein, 39 aa, Homo sapiens
IRGRAAEACGWDTQCETLIQFSLHLFSLYNPISYYHSLQ

SEQ ID NO: 30551 - protein, 461 aa, Homo sapiens
TPRLILMDLKGSLSSLKEEGGLYRDKQLDAAIAWQGKLTTHKGSSPLPTATTPKPLIPTEASIRVWSDFLRVHLHPRSICMIQKYNHDGEAGRLEAFGQGESVLKEPKYQEELEDRLHFYVEECDYLQGFQILCDLHDGFSGVGAKAAELLQDEYSGRGIITWGLLPGPYHRGEAQRNIYRLLNTAFGLVHLTAHSSLVCPLSLGGSLGLRPEPPVSFPYLHYDATLPFHCSAILATALDTVTVPYRLCSSPVSMVHLADMLSFCGKKVVTAGAIIPFPLAPGQSLPDSLMQFGGATPWTPLSACGEPSGTRCFAQSVVLRGIDRACHTSQLTPGTPPPSALHACTTGEEILAQYLQQQQPGVMSSSHLLLTPCRVAPPYPHLFSSCSPPAVESIPVFGALCSSSSLHQTLEALARDLTKLDLRRWASFMDAGVEHDDVAELLQELQSLAQCYQGGDSLVD

SEQ ID NO: 30552 - protein, 23 aa, Homo sapiens
LLPFLFPFPLKTNQEVTARIGPP

SEQ ID NO: 30553 - protein, 31 aa, Homo sapiens
KSHLCSSSCSSPLSSRTAWGELVSKSLARVS

SEQ ID NO: 30554 - protein, 51 aa, Homo sapiens
TTGVGVRVAVGVPGPEHEPERESAARTPVATRVPGAARATSAALPWSPAAR

SEQ ID NO: 30555 - protein, 28 aa, Homo sapiens
ISLMGIQKRFGPPQECFPRNSLFVSTNM

SEQ ID NO: 30556 - protein, 58 aa, Homo sapiens
ISSPYMQAELLSSQRMCNWPGGSGALRRDSAELLHPVFLSVFPAQPGGMIPGTLQSHD

SEQ ID NO: 30557 - protein, 259 aa, Homo sapiens
RNCSSESENCTTHNGGEMTEESEGPNMVIHVCDEAKNLKEDFTCPRDLLISEMKYFAEYLSMDAQRWEEVDISVHCDVHIFNWLIKYIKRNTKENKDCEMPTLEPGNVISILISSEFLKMDSLVEQCIQYCHKNMNAIVATPCNMNCINANLLTRIADLFSHNEVDDLKDKKDKFKSKLFCKKIERLFDPEYLNPDSRSNAATLYRCCLCKKLLTKETERRIPCIPGKINVDRRGNIVYIHIRCREDKIHTCIFVYIYI

SEQ ID NO: 30558 - protein, 56 aa, Homo sapiens
LRTLPHCDRIIAVFGSLRSRRHRLGALSWPLFPQMSDSDSRTEKRKKKRPNGKATF

SEQ ID NO: 30559 - protein, 20 aa, Homo sapiens
ILVEACVELFRDLAVSSFPE

SEQ ID NO: 30560 - protein, 27 aa, Homo sapiens
LKSSIRLKKHLIQMRRRCCSFCAGMLL

SEQ ID NO: 30561 - protein, 24 aa, Homo sapiens
IRKMPKEHPQNRPEDKNPEVQAVW

SEQ ID NO: 30562 - protein, 17 aa, Homo sapiens
KDSWTSTKTYDTENQET

SEQ ID NO: 30563 - protein, 27 aa, Homo sapiens
KGGSTCLPLRWSSPGTALIRVTSSCWT

SEQ ID NO: 30564 - protein, 36 aa, Homo sapiens
IGYLKIHGKQVDDQKSVQTHLLLNPLVYTEYSCAHT

SEQ ID NO: 30565 - protein, 97 aa, Homo sapiens
IMSGGSADYNREHGGPEGMDPDGVIESNWNEIVDNFDDMNLKESLLRGIYAYGFEKPSAIQQRAIIPCIKDPKGNSGTWRLYGSHLSCLHWWNKCSK

SEQ ID NO: 30566 - protein, 42 aa, Homo sapiens
RQPVRPAAPPVNAPAFSAPLQRTALGGMSWMSRASRKTLRKS

SEQ ID NO: 30567 - protein, 37 aa, Homo sapiens
KEKKKNTSKVSSEIVLHLLYSLEDFHYVLTTLKCVNS

SEQ ID NO: 30568 - protein, 114 aa, Homo sapiens
MSEMIFRRIKMPWLWLDLWYLMFKEGWEHKKSLQILHTFTNSVIAERANEMNANEDCRGDGRGSAPSKNKRRAFLDLLLSVTDDEGNRLSHEDIREEVDTFMFEVLYIVRFRYH

SEQ ID NO: 30569 - protein, 37 aa, Homo sapiens
IFKAEAATERQRRRSDKLTDRAGWWREQREQPERCRP

SEQ ID NO: 30570 - protein, 135 aa, Homo sapiens
RGLEVPEASGLGTHGRDTQGRPCAVSPGITGGDFMEPGGWASGWGERLQTGSSPWLCPPLSLLEWWGPCILSCPPPPFSPNCRRLLSPGDTVPASSGLGKHGLSSPALAPAPPASWTWAFLHPVEPHSQERCLEG

SEQ ID NO: 30571 - protein, 42 aa, Homo sapiens
LISRSKIWHPESSPQREGYPHDSLPCLAFDYFSLLPPQCKGM

SEQ ID NO: 30572 - protein, 41 aa, Homo sapiens
RSCTLQCMMDTVDLQQLISVIPTWRNVLWICFLRRRTWKLC

SEQ ID NO: 30573 - protein, 70 aa, Homo sapiens
RGRTECVCRLELRAEAFGPEAPAVTPRDSAVPSTAESPRLPAKTLFLANFSFSSPPPRPPSSAPPPSLAD

SEQ ID NO: 30574 - protein, 1309 aa, Homo sapiens
TMGSKDHAVFFREMTQLILNEMPKAGYSSILNDFVESNFFVIDGDSLLVTCLGVKSFKWGQNLHFFYLVECYLVDLLSNGGQFTIVFFKDAEYAYFDFPELLSLRTALILHLQHNTNIDVQTEFSGCLSQDWKLFLEQHYPYFLIVSEEGLSDLQTYLFNFLIIHSWGMKVNVVLSSGHESDTLRFYAYTMESTDRNQTFSKENETVIQSAYKSLIQHLEEIRVLVLATHFEHLKWNDMMEEAYQTLFLLQHLWSEGSDIQRVLCVTSCSLSLRMYHRVLVHSNCLSLQEVEDFCRLRCLCVAFQLHLPLSQRACSRVITCSWIRNSDSFLKMNKWCEYFILSNLNVFGCWNLNLNHVSDLYDEQLLKNIAFYYEFESTQEPHLNLGDSIRRDYEDLWNVVSHLVKEFNVGKSFPLRTTRRHFLRQEKSVIQEISLEKMPSVGFIPMTSAVIDEFVGDMMKDLPILKSDDPVVPSLFKQKTSDELLHWHAQRLLSDDYDRIKCHVDEQSRDPHVLDFLKKIQDYQQFYGKSLESISTKVIVTQTTRPKEDSSGASGEILQNTKPHQITKKSKKKSFLKEDQNKAQQNDDLLFSIEEEMKNNLHSGIRKLEDYLTSCASNSVKFGVEMLGLIACFKAWKKHCRGEGKISKDLSIAVQMMKRIHSLLERYPEILEAEHHQYIAKCLKYLGFNDLANSLDPTLIGDDKNKKKYSIDIGPARFQLQYMGHYLIRDERKDRDPRVQDFIPNAWQQELLDVVDKNESAVIVAPTSSGKTYASYYCMEKVLRESDVGVVVYVAPAKSLVGQVAATVENRFTKTLPAGRTLCGAFTRDYCHNVLNCQVLITVPECFEILLLAPHRQKWVERIRYVIFDEVHYLGREVGAKFWELLLVIIRCPFLVLSATINNPNLLTKWLQSVKQYWKQADKIMEEKCISEKQADKCLNFLQDHSYKNQSYEVRLVLCGERYNDLEKHICSVKHDDVYFDHFHPCAALTTDIIEKYGFPPDLTLTPQESIQLYDTMAQVWETWPRAQELCPEEFILFKNKIVIKKLDARKYEENLKAELTNWIKNGQVKKVKRVLKNLSPDSLSSSKDMVKMFPLLVEKLRQMDKLPAIFFLFKNDDVGKRAGSVCTFLEKTETKSHPHTECHSYVFAIDEVLEKVRKTQKRISTKKNPKKAEKLERKKVYRAEYINFLENLKILEISEDCTYADVKALHTEITRNKDSTLERVLPRVRFTRHGKELKALAQRGIGYHHSSMYFKEKEFVEILFVKGLIRVVTATETLALGIHMPCKSVVFAQDSVYLDALNYRQIM

SEQ ID NO: 30575 - protein, 52 aa, Homo sapiens
ILELQEQPPLRRAARCISGRLWLATLGSACLRLSQPPRPCVVSSWVSERAGW

SEQ ID NO: 30576 - protein, 58 aa, Homo sapiens
KWSHKTTDGMSDECEAHLYIQEKCHKFGCEYSSTSYISQVWSEKSVKIQICRPSELLL

SEQ ID NO: 30577 - protein, 45 aa, Homo sapiens
LTSGGLTSTGRCPRTLRSQRTPGPLSPSAAASSSSSSSSRSSPDL

SEQ ID NO: 30578 - protein, 594 aa, Homo sapiens
LSGNKMSVSVHENRKSRASSGSINIYLFHKSSYADSVLTHLNLLRQQRLFTDVLLHAGNRTFPCHRAVLAACSRYFEAMFSGGLKESQDSEVNFDNSIHPEVLELLLDYAYSSRVIINEENAESLLEAGDMLEFQDIRDACAEFLEKNLHPTNCLGMLLLSDAHQCTKLYELSWRMCLSNFQTIRKNEDFLQLPQDMVVQLLSSEELETEDERLVYESAINWISYDLKKRYCYLPELLQTVRLALLPAIYLMENVAMEELITKQRKSKEIVEEAIRCKLKILQNDGVVTSLCARPRKTGHALFLLGGQTFMCDKLYLVDQKAKEIIPKADIPSPRKEFSACAIGCKVYITGGRGSENGVSKDVWVYDTLHEEWSKAAPMLVARFGHGSAELKHCLYVVGGHTAATGCLPASPSVSLKQVEHYDPTINKWTMVAPLREGVSNAAVVSAKLKLFAFGGTSVSHDKLPKVQCYDQCENRWTVPATCPQPWRYTAAAVLGNQIFIMGGDTEFSACSAYKFNSETYQWTKVGDVTAKRMSCHAVASGNKLYVVGGYFGIQRCKTLDCYDPTLDVWNSITTVPYSLIPTAFVSTWKHLPS

SEQ ID NO: 30579 - protein, 36 aa, Homo sapiens
KRKQPAQTGTARVLFDQHWNWKLGFEEVKSKYNIVF

SEQ ID NO: 30580 - protein, 50 aa, Homo sapiens
IGEFIRALYESEENCEVDPIKCTASSLAEHQANLRMCCELALCKVVNSHW

SEQ ID NO: 30581 - protein, 448 aa, Homo sapiens
VRSFPATFSRKMPKFKAARGVGGQEKHAPLADQILAGNAVRAGVREKRRGRGTGEAEEEYVGPRLSRRILQQARQQQEELEAEHGTGDKPAAPRERTTRLGPRMPQDGSDDEDEEWPTLEKAATMTAAGHHAEVVVDPEDERAIEMFMNKNPPARRTLADIIMEKLTEKQTEVETVMSEVSGFPMPQLDPRVLEVYRGVREVLSKYRSGKLPKAFKIIPALSNWEQILYVTEPEAWTAAAMYQATRIFASNLKERMAQRFYNLVLLPRVRDDVAEYKRLNFHLYMALKKALFKPGAWFKGILIPLCESGTCTLREAIIVGSIITKCSIPVLHSSAAMLKIAEMEYSGANSIFLRLLLDKKYALPYRVLDALVFHFLGFRTEKRELPVLWHQCLLTLVQRYKADLATDQKEALLELLRLQPHPQLSPEIRRELQSAVPRDVEDVPITVE

SEQ ID NO: 30582 - protein, 17 aa, Homo sapiens
LLCLHRSPCAALMCCAR

SEQ ID NO: 30583 - protein, 27 aa, Homo sapiens
VRSEGPEKRGTPQLVDTSRLLSQFRAW

SEQ ID NO: 30584 - protein, 17 aa, Homo sapiens
LDSPGPQAHALSASSAA

SEQ ID NO: 30585 - protein, 35 aa, Homo sapiens
RGRCTGRTLSGFSNQAAILAPQVWDFWVFSWLASC

SEQ ID NO: 30586 - protein, 25 aa, Homo sapiens
VLESCVLAARDPAWVGRCFCEKPKD

SEQ ID NO: 30587 - protein, 40 aa, Homo sapiens
RVTREETRDTHSLAATGSRGGLGRPLPHQSPDPWGFRGRS

SEQ ID NO: 30588 - protein, 29 aa, Homo sapiens
IPSVAARLFLGTCAGMRPACVNTPSEEWS

SEQ ID NO: 30589 - protein, 7 aa, Homo sapiens
LRFGITC

SEQ ID NO: 30590 - protein, 747 aa, Homo sapiens
IMGQTGKKSEKGPVCWRKRVKSEYMRLRQLKRFRRADEVKSMFSSNRQKILERTEILNQEWKQRRIQPVHILTSVSSLRGTRECSVTSDLDFPTQVIPLKTLNAVASVPIMYSWSPLQQNFMVEDETVLHNIPYMGDEVLDQDGTFIEELIKNYDGKVHGDRECGFINDEIFVELVNALGQYNDDDDDDDGDDPEEREEKQKDLEDHRDDKESRPPRKFPSDKIFEAISSMFPDKGTAEELKEKYKELTEQQLPGALPPECTPNIDGPNAKSVQREQSLHSFHTLFCRRCFKYDCFLHPFHATPNTYKRKNTETALDNKPCGPQCYQHLEGAKEFAAALTAERIKTPPKRPGGRRRGRLPNNSSRPSTPTINVLESKDTDSDREAGTETGGENNDKEEEEKKDETSSSSEANSRCQTPIKMKPNIEPPENVEWSGAEASMFRVLIGTYYDNFCAIARLIGTKTCRQVYEFRVKESSIIAPAPAEDVDTPPRKKKRKHRLWAAHCRKIQLKKDGSSNHVYNYQPCDHPRQPCDSSCPCVIAQNFCEKFCQCSSECQNRFPGCRCKAQCNTKQCPCYLAVRECDPDLCLTCGAADHWDSKNVSCKNCSIQRGSKKHLLLAPSDVAGWGIFIKDPVQKNEFISEYCGEIISQDEADRRGKVYDKYMCSFLFNLNNDFVVDATRKGNKIRFANHSVNPNCYAKVMMVNGDHRIGIFAKRAIQTGEELFFDYRYSQADALKYVGIEREMEIP

SEQ ID NO: 30591 - protein, 394 aa, Homo sapiens
LATEYAAVPFDSFTLQKVYQLETGLTRHPEEKPVRKDKRDELVEAIESALETLNSPAENSPNHRPYTASDFIEGIYRTERDKGTLYELTFKGDHKHEFKRLILFRPFGPIMKVKNEKLNMANTLINVIVPLAKRVDKFRQFMQNFREMCIEQDGRVHLTVVYFGKEEINEVKGILENTSKAANFRNFTFIQLNGEFSRGKGLDVGARFWKGSNVLLFFCDVDIYFTSEFLNTCRLNTQPGKKVFYPVLFSQYNPGIIYGHHDAVPPLEQQLVIKKETGFWRDFGFGMTCQYRSDFINIGGFDLDIKGWGGEDVHLYRKYLHSNLIVVRTPVRGLFHLWHEKRCMDELTPEQYKMCMQSKAMNEASHGQLGMLVFRHEIEAHLRKQKQKTSSKKT

SEQ ID NO: 30592 - protein, 120 aa, Homo sapiens
LGLGRRERGFPARGRSPPALPPSRPGAPEPRPPPTAGAGGRGRAGAARRQGGRIQWKCVTSCRYCPWTGRSPSTSSAAEEPSASAPAPLSSAAPIPGSSLRGVELFPMTVLIRLHYTFVC

SEQ ID NO: 30593 - protein, 41 aa, Homo sapiens
IPHQPLTASGSRWACTPQPFRDSSCDSPPVQISGQLSRNSL

SEQ ID NO: 30594 - protein, 312 aa, Homo sapiens
TGRWLRGLPPRPGLGAAVAAAGDRKGRRKGGGRSRHAEEQPTMPRDNMASLIQRIARQACLTFRGSGGGRGASDRDAASGPEAPMQPGFPENLSKLKSLLTQLRAEDLNIAPRKATLQPLPPNLPPVTYMHIYETDGFSLGVFLLKSGTSIPLHDHPGMHGMLKVLYGTVRISCMDKLDAGGGQRPRALPPEQQFEPPLQPREREAVRPGVLRSRAEYTEASGPCILTPHRDNLHQIDAVEGPAAFLDILAPPYDPDDGRDCHYYRVLEPVRPKEASSSACDLPREVWLLETPQADDFWCEGEPYPGPKVFP

SEQ ID NO: 30595 - protein, 12 aa, Homo sapiens
KMTILNSLGLRN

SEQ ID NO: 30596 - protein, 50 aa, Homo sapiens
VARPRGANVWPNMDAQDSWETAPAGPRAVPECPQRPALSHWASPARAAFP

SEQ ID NO: 30597 - protein, 36 aa, Homo sapiens
LDLSCLICKKEIKIIYLPEHFSLKISVLAGHGGSGL

SEQ ID NO: 30598 - protein, 26 aa, Homo sapiens
TRETSPPPPPQTPPRCATSPPTCWLP

SEQ ID NO: 30599 - protein, 17 aa, Homo sapiens
KKITTPSAFCPPDHSPF

SEQ ID NO: 30600 - protein, 55 aa, Homo sapiens
RWASDPCCTCPSGSCASSPAPCPSPQCCVSGMPSSVRVSGAASGWGRSLGVWVGR

SEQ ID NO: 30601 - protein, 12 aa, Homo sapiens
ILLPLSAMLKKR

SEQ ID NO: 30602 - protein, 139 aa, Homo sapiens
LQAETDKLEDEKSGLQREIEELQKQKERLELVLEAHRPICKIPEGAKEGDTGSTSGTSSPPAPCRPVPCISLSPGPVLEPEALHTPTLMTTPSLTPFTPSLVFTYPSTPEPCASAHRKSSSSSGDPSSDPLGSPTLLAL

SEQ ID NO: 30603 - protein, 59 aa, Homo sapiens
VWVAPDSLPRPAPPRLRTLAPLSAAALPRSSQPRVRQYVQLGQQGCPPQEGAGALPDGG

SEQ ID NO: 30604 - protein, 39 aa, Homo sapiens
MMSQCQRLKVRLKFLMLNLKVPKWTLMSQMWRFKAQTGT

SEQ ID NO: 30605 - protein, 56 aa, Homo sapiens
LSRPGSATVPPPDVLLPLARPSQRPQPSREGAPGRKDPPVCRRPPFSWSPSPSSWW

SEQ ID NO: 30606 - protein, 14 aa, Homo sapiens
ISLETAARDLRYLL

SEQ ID NO: 30607 - protein, 68 aa, Homo sapiens
ILHFTNTYRIWDTQTLKYVLLCHQKQKNAQQRDNKSLLQESYQKILDSDSTHYIPSCNRKSCYKRMWS

SEQ ID NO: 30608 - protein, 32 aa, Homo sapiens
IFPASVGRARRRFWKERRDGCAGRAPGPVQSR

SEQ ID NO: 30609 - protein, 41 aa, Homo sapiens
MRRLVWILLKERVRKKERNTNYPFLLALQHVMLPEFQLQLN

SEQ ID NO: 30610 - protein, 54 aa, Homo sapiens
RCLDRREVRVGIGRLEELDSSRWESASLSGTLDDLQSGWRSHGGLLEVTAKEIL

SEQ ID NO: 30611 - protein, 73 aa, Homo sapiens
RFFQSFSDALIDQDPQAALEELTKALEQKPDDTQYYCQRAYCHILLGNYCGSFSYKVYCPFLISYLYILPMAN

SEQ ID NO: 30612 - protein, 29 aa, Homo sapiens
RTGRHPTLPTSATETTCVHTLTAAKGAIT

SEQ ID NO: 30613 - protein, 16 aa, Homo sapiens
MLFWPKCSIIQLADTT

SEQ ID NO: 30614 - protein, 119 aa, Homo sapiens
KTRARVLSLDSGTVACLNDSNRLMAPESIKPLTTSKSDLEAKEGEVLDELSLLGRASQLETVTRSRNSLPNQVAFPEGEEQDAVSGGKFSSTLYETGGCDMSLVNFEPAARRASNIWYV

SEQ ID NO: 30615 - protein, 589 aa, Homo sapiens
TRPAPLSRPSGDGPRELLFPKMESSKKMDSPGALQTNPPLKLHTDRSAGTPVFVPEQGGYKEKFVKTVEDKYKCEKCHLVLCSPKQTECGHRFCESCMAALLSSSSPKCTACQESIVKDKVFKDNCCKREILALQIYCRNESRGCAEQLMLGHLLVHLKNDCHFEELPCVRPDCKEKVLRKDLRDHVEKACKYREATCSHCKSQVPMIALQKHEDTDCPCVVVSCPHKCSVQTLLRSELSAHLSECVNAPSTCSFKRYGCVFQGTNQQIKAHEASSAVQHVNLLKEWSNSLEKKVSLLQNESVEKNKSIQSLHNQICSFEIEIERQKEMLRNNESKILHLQRVIDSQAEKLKELDKEIRPFRQNWEEADSMKSSVESLQNRVTELESVDKSAGQVARNTGLLESQLSRHDQMLSVHDIRLADMDLRFQVLETASYNGVLIWKIRDYKRRKQEAVMGKTLSLYSQPFYTGYFGYKMCARVYLNGDGMGKGTHLSLFFVIMRGEYDALLPWPFKQKVTLMLMDQGSSRRHLGDAFKPDPNSSSFKKPTGEMNIASGCPVFVAQTVLENGTYIKDDTIFIKVIVDTSDLPDP

SEQ ID NO: 30616 - protein, 100 aa, Homo sapiens
LPPGARSRLSSPHHFSLQTVPQAPGVPASVAVAPECPSEPRGACPPAPRRGPARHLGRRRTDAGTSTRSRLLDLGTLTRFLWGTAEDYFEFRWSPVVWHI

SEQ ID NO: 30617 - protein, 36 aa, Homo sapiens
ILERYFIALNRTVFQENVKVKWKSSGISLPPVDKKR

SEQ ID NO: 30618 - protein, 293 aa, Homo sapiens
VIDLPDYEHVEDETFPPFPPPASPERQDGEGTEPDEESGNGAPVRVPPKRTVKRNIPKLDAQRLISERGLPALRHVFDKAKFKGKGHEAEDLKMLIRHMEHWAHRLFPKLQFEDFIDRVEYLGSKKEVQTCLKRIRLDLPILHEDFVSNNDEVAENNEHDVTSTELDPFLTNLSESEMFASELSRSLTEEQQQRIERNKQLALERRQAKLLSNSQTLGNDMLMNTPRAHTVEEVNTDEDQKEESNGLNEDILDNPCNDAIANTLNEEETLLDQSFKNVQQQLDATSRNITEAR

SEQ ID NO: 30619 - protein, 99 aa, Homo sapiens
IESLAGPLGIGPENGPISGEEKRRPPVTLWKLDTYVTRKVIWTRGSPMMTSTHPLLSQPAKPRAPTAPSMGTVKQNSPWSLKCRAWSGAKNSPRGPTRC

SEQ ID NO: 30620 - protein, 29 aa, Homo sapiens
LTTKGLRLDFQGRISSEAPVSGQGLPPHQ

SEQ ID NO: 30621 - protein, 96 aa, Homo sapiens
RPPPPPPLPSSGPLRLHPCPPQAPSASTPALLRPPPPPPLPSSGPLRPRLVLLRPPPPPAPSSSGPLRLRLRPPLAPSAPGPGPTAGCGTTPAPSA

SEQ ID NO: 30622 - protein, 35 aa, Homo sapiens
RSMEMDAPRPPSLAVPGAASRPGRTVDNGRLSPIH

SEQ ID NO: 30623 - protein, 60 aa, Homo sapiens
IGHSTQFHVFESTRQLPRFSMYALTSLDPASEPISYVNFTIAERAQRVSISLFSFNAFTQ

SEQ ID NO: 30624 - protein, 12 aa, Homo sapiens
LVYNPPLLNVTV

SEQ ID NO: 30625 - protein, 424 aa, Homo sapiens
LAPLLQPIWRSGGGGGGGGRRMASELAMSNSDLPTSPLAMEYVNDFDLMKFEVKKEPVETDRIISQCGRLIAGGSLSSTPMSTPCSSVPPSPSFSAPSPGSGSEQKAHLEDYYWMTGYPQQLNPEALGFSPEDAVEALISNSHQLQGGFDGYARGAQQLAAAAGAGAGASLGGSGEEMGPAAAVVSAVIAAAAAQSGAGPHYHHHHHHAAGHHHHPTAGAPGAAGSAAASAGGAGGAGGGGPASAGGGGGGGGGGGGGGAAGAGGALHPHHAAGGLHFDDRFSDEQLVTMSVRELNRQLRGVSKEEVIRLKQKRRTLKNRGYAQSCRFKRVQQRHVLESEKNQLLQQVDHLKQEISRLVRERDAYKEKYEKLVSSGFRENGSSSDNPSSPEFFITEPTRKLEPSVGYATFWKPQHRVLTSVFTK

SEQ ID NO: 30626 - protein, 12 aa, Homo sapiens
RSLVTSSSTWWH

SEQ ID NO: 30627 - protein, 52 aa, Homo sapiens
ILPHETGLQPGMVPLKYLLEEGVWGAGVGCGVFPAISTAYDHCNNLSPSEEH

SEQ ID NO: 30628 - protein, 70 aa, Homo sapiens
LGPPGTSALPRLSRSPFTSTLPSSSASISTTQVFSLAGSTFSLPSTHIFGTPMGAVNPLLSQAESSHTGM

SEQ ID NO: 30629 - protein, 46 aa, Homo sapiens
IVPPGPSPRRSLSSFPLISPSWDRKCLHLHPQGPGLQGPLAPQQAS

SEQ ID NO: 30630 - protein, 174 aa, Homo sapiens
IMSASQDSRSRDNGPDGMEPEGVIESNWNEIVDSFDDMNLSESLLRGIYAYGFEKPSAIQQRAILPCIKGYDVIAQAQSGTGKTATFAISILQQIELDLKATQALVLAPTRELAQQIQKVVMALGDYMGASCHACIGGTNVRAEVQKLQMEAPHIIVGTPGRVFDMLNRRYLCE

SEQ ID NO: 30631 - protein, 42 aa, Homo sapiens
RSVGVRPEQPGLYSYVKLSTKSHGNNGVKKIVSWVFVTYKLS

SEQ ID NO: 30632 - protein, 345 aa, Homo sapiens
RMAQKENSYPWPYGRQTAPSGLSTLPQRVLRKEPVTPSALVLMSRSNVQPTAAPGQKVMENSSGTPDILTRHFTIDDFEIGRPLGKGKFGNVYLAREKKSHFIVALKVLFKSQIEKEGVEHQLRREIEIQAHLHHPNILRLYNYFYDRRRIYLILEYAPRGELYKELQKSCTFDEQRTATIMEELADALMYCHGKKVIHRDIKPENLLLGLKGELKIADFGWSVHAPSLRRKTMCGTLDYLPPEMIEGRMHNEKVDLWCIGVLCYELLVGNPPFESASHNETYRRIVKVDLKFPASVPMGAQDLISKLLRHNPSERLPLAQVSAHPWVRANSRRVLPPSALQSVA

SEQ ID NO: 30633 - protein, 59 aa, Homo sapiens
RGHWYWLGMGRAFPSRHKTARFECALVSASLTTAGTPGKNLSSYNSKCGGKTHQSRDGK

SEQ ID NO: 30634 - protein, 80 aa, Homo sapiens
RHPITIEVPSLPVNLPINPWMIQERIFMSTIQPSLADQRLEFKLILDMSALVMTLMYSCMDLYAIFFHYPRSTLDTSCLN

SEQ ID NO: 30635 - protein, 7 aa, Homo sapiens
IITCLMK

SEQ ID NO: 30636 - protein, 98 aa, Homo sapiens
IAKMPGPPESLDMGPLTFRDVAIEFSLEEWQCLDTAQQDLYRKVMLENYRNLVFLAGIAVSKPDLVTCLEQGKDPWNMKGHSTVVKPPGFLPPSVTAS

SEQ ID NO: 30637 - protein, 26 aa, Homo sapiens
RKTAQKLCHCWNGTLLLPRASPDSVL

SEQ ID NO: 30638 - protein, 321 aa, Homo sapiens
IDFYSGECIAKMFGHSEIITSMKFTYDCHHLITVSGDSCVFIWHLGPEITNCMKQHLLEIDHRQQQQHTNDKKRSGHPRQDTYVSTPSEIHSLSPGEQTEDDLEEECEPEEMLKTPSKDSLDPDPRCLLTNGKLPLWAKRLLGDDDVADGLAFHAKRSYQPHGRWAERAGQEPLKTILDAQDLDCYFTPMKPESLENSILDSLEPQSLASLLSESESPQEAGRGHPSFLPQQKESSEASELILYSLEAEVTVTGTDSQYCRKEVEAGPGDQQGDSYLRVSSDSPKDQSPPEGECRAGRDPVTVCAFSQAPFWAPMVTLTQY

SEQ ID NO: 30639 - protein, 509 aa, Homo sapiens
VDSQLGQAEDQDGLSEMQEGHFRPGIDPQEKSPGKMSPECDGLGTADGVCSRIGQEQVSPGDRVRSHNSCESGKDPMIQEEENNFKCSECGKVFNKKHLLAGHEKIHSGVKPYECTECGKTFIKSTHLLQHHMIHTGERPYECMECGKAFNRKSYLTQHQRIHSGEKPYKCNECGKAFTHRSNFVLHNRRHTGEKSFVCTECGQVFRHRPGFLRHYVVHSGENPYECLECGKVFKHRSYLMWHQQTHTGEKPYECSECGKVFLESAALIHHYVIHTGEKPFECLECGKAFNHRSYLKRHQRIHTGEKPFVCSECGKAFTHCSTFILHKRAHTGEKPFECKECGKAFSNRKDLIRHFSIHTGEKPYECVECGKAFTRMSGLTRHKRIHSGEKPYECVECGKSFCWSTNLIRHAIIHTGEKPYKCSECGKAFSRSSSLTQHQRMHTGKNPISVTDVGRPFTSGQTSVTLRELLLGKDFLNVTTEANILPEETSSSASDQPYQRETPQVSSL

SEQ ID NO: 30640 - protein, 29 aa, Homo sapiens
MQEKNPVHVIGVEEPSVGASMLFDIREST

SEQ ID NO: 30641 - protein, 61 aa, Homo sapiens
ICLIPSSPGALRLHIPLGTHVAACPCCCHLSHGTWGFRPQLPVPICRPTTTHKIIFHPNLK

SEQ ID NO: 30642 - protein, 13 aa, Homo sapiens
MRTSPTHIRVSRP

SEQ ID NO: 30643 - protein, 67 aa, Homo sapiens
RYCLMCGYCLGGCPWPSGMQPQPRCVSSLWTSSRPTSTSMRYTMRRRSGGPSRRHPRIRATRRRRRS

SEQ ID NO: 30644 - protein, 91 aa, Homo sapiens
RLGEPWEEKREQLGRGSPSSRSLERLKFTFQPLAPFAPLGLASEAVAVLGRRLGGAGCEQGLRATLLLATGFCCEVRPGNGGKKELREAVG

SEQ ID NO: 30645 - protein, 36 aa, Homo sapiens
RPTKRSRSSCRRTSRSTGPRTACCCWVLENLVKAPL

SEQ ID NO: 30646 - protein, 29 aa, Homo sapiens
LPLLLPHEELLGQPNWEPRCLGLVTTKAL

SEQ ID NO: 30647 - protein, 271 aa, Homo sapiens
KSSALACTLPTLPAKVYVGVKQEIAEMRIPALNAYMKSLLSLPVWVLMDEDVRIFFYQSPYDSEQVPQALRRLRPRTRKVKSVSPQGNSVDRMAAPRAEALFDFTGNSKLELNFKAGDVIFLLSRINKDWLEGTVRGATGIFPLSFVKILKDFPEEDDPTNWLRCYYYEDTISTIKSVAWEGGACPAFLPSLRPLPLTSPSHGSLSHSKAPSGSQMSHNAVTSHQRPGWPGQPHSPFPHPTPHFQPDASLLQPVTPLGTSRWRKISAALPY

SEQ ID NO: 30648 - protein, 352 aa, Homo sapiens
MLWRMGVQRERRLSIFGNPKRLLSVEFVWQRYLDYRPVTDCKPVEYEFFWGPRSHLETTKMKILKFMAKIYNKDPMDWPEKYNEALEEDAARAFAEGWQALPHFRRPFFEEAAAEVPSPDSEVSSYSSKYAPHSWPESRLESKARKLVQLFLLMDSTKLPIPKKGILYYIGRECSKVFPDLLNRAARTLNHVYGTELVVLDPRNHSYTLYNRREMEETEEIVDSPNRPGNNFLMQVLSFIFIMGNHARESAVWAFLRGLGVQAGRKHVITCRYLSQRYIDSLRVPDSDPVQYEFVWGPRARLETSKMKALRYVARIHRKEPQDWPQQYREAMEDEANRADVGHRQIFVHNFR

SEQ ID NO: 30649 - protein, 25 aa, Homo sapiens
KKLLSSFLTMCAHLDGRAVRIVYWM

SEQ ID NO: 30650 - protein, 9 aa, Homo sapiens
MPRMFSLTC

SEQ ID NO: 30651 - protein, 59 aa, Homo sapiens
IPASVRSSSWRWQSSWSQKAGRMQVMSTSALMTVGWLPKEIQKADFRQTLSAFLMGFAS

SEQ ID NO: 30652 - protein, 19 aa, Homo sapiens
KQTNKNKGSCCLFSLWVGL

SEQ ID NO: 30653 - protein, 167 aa, Homo sapiens
MMVALGRSPSDEYKDNLHQVSKRLRGEVGLLFTNRTKEEVNEWFTKYTEMDYARAGNKAAFTVSLDPGPLEQFPHSMEPQLRQLGLPTALKRGVVTLLSDYEVCKEGDVLTPEQARVLKLFGYEMAEFKVTIKYMWDSQSGRFQQMGDDLPESASESTEESDSEDDD

SEQ ID NO: 30654 - protein, 165 aa, Homo sapiens
MKLERLDSVPVEEQEEFKQLSDGIQELQQSLNQDFHQKTIVLQEGNSQKKSNISEKTKRLNELKLSVVSLKEIQESLKTKIVDSPEKLKNYKEKMKDTVQKLKNARQEVVEKYEIYGDSVDCLPSCQLEVQLYQKKIQDLSDNREKLASILKEVCIVWNFDVFII

SEQ ID NO: 30655 - protein, 481 aa, Homo sapiens [sequence omitted]

SEQ ID NO: 30656 - protein, 120 aa, Homo sapiens [sequence omitted]

SEQ ID NO: 30657 - protein, 387 aa, Homo sapiens
MPWFHGKISGQEAVQQLQPPEDGLFLVRESARHPGDYVLCVSFGRDVIHYRVLHRDGHLTIDEAVFFCNLMDMVEHYSKDKGAICTKLVRPKRKHGTKSAEEELARAGWLLNLQHLTLGAQIGEGEFGAVLQGEYLGQKVAVKNIKCDVTAQAFLDETAVMTKMQHENLVRLLGVILHQGLYIVMEHVSKGNLVNFLRTRGRALVNTAQLLQFSLHVAEGMEYLESKKLVHRDLAARNILVSEDLVAKVSDFGLAKAERKGLDSSRLPVKWTAPEALKHGFTSKSDVWSFGVLLWEVFSYGRAPYPKMSLKEVSEAVEKGYRMEPPEGCPGPVHVLMSSCWEAEPARRPPFRKLAEKLARELRSAGAPASVSGQDADGSTSPRSQEP

SEQ ID NO: 30658 - protein, 154 aa, Homo sapiens
MASWAKGRSYLAPGLLQGQVAIVTGGATGIGKAIVKELLELGSNVVIASRKLERLKSAADELQANLPPTKQARVIPIQCNIRNEEEVNNLVKSTLDTFGKINFLVNNGGGQFLSPAEHISSKGWHAVLETNLTGTFYMCKAGKSAMSYQSKIPC

SEQ ID NO: 30659 - protein, 350 aa, Homo sapiens
MSGFYGKGPSIKQFMDIFSLPEMALLSCVVDYFLGHSLEFDQAHLYKDVTDAIRDVHVKGLMYQWIEQDMEKYILRGDETFAVLSRLVAHGKQLFLITNSPFSFVDKGMRHMVGPDWRQLFDVVIVQADKPSFFTDRRKPFRKLDEKGSLQWDRITRLEKGKIYRQGNLFDFLRLTEWRGPRVLYFGDHLYSDLADLMLRHGWRTGAIIPELEREIRIINTEQYMHSLTWQQALTGLLERMQTYQDAESRQVLAAWMKERQELRCITKALFNAQFGSIFRTFHNPTYFSRRLVRFSDLYMASLSCLLNYRVDFTFYPRRTPLQHEAPLWMDQLCTGCMKTPFLGDMAHIR

SEQ ID NO: 30660 - protein, 534 aa, Homo sapiens
MVSLASPDSDEEDEERPARKRRQVERATEDGEEDEEMIESIENLEDLKGHSVREWVSMAGPRLEIHHRFKNFLRTHVDSHGHNVFKERISDMCKENRESLVVNYEDLAAREHVLAYFLPEAPAELLQIFDEAALEVVLAMYPKYDRITNHIHVRISHLPLVEELRSLRQLHLNQLIRTSGVVTSCTGVLPQLSMVKYNCNKCNFVLGPFCQSQNQEVKPGSCPECQSAGPFEVNMEETIYQNYQRIRIQESPGKVAAGRLPRSKDAILLADLVDSCKPGDEIELTGIYHNNYDGSLNTANGFPVFATVILANHVAKKDNKVAVGELTDEDVKMITSLSKDQQIGEKIFASIAPSIYGHEDIKRGLALALFGGEPKNPGGKHKVRGDINVLLCGDPGTAKSQFLKYIEKVSSRAIFTTGQGASAVGLTAYVQRHPVSREWTLEAGALVLADRGVCLIDEFDKMNDQDRTSIHEAMEQQSISISKAGIVTSLQARCTVIAAANPIGRDAGPLRGGQPRQTPPQQQGGGGAGQWQRC

SEQ ID NO: 30661 - protein, 48 aa, Homo sapiens
LAFENIWACWRKRKITNFVQMTTVKNKNTSKLFGRRLLKKIQMNSTTK

SEQ ID NO: 30662 - protein, 34 aa, Homo sapiens
KRRPCAGSSRSMMGSSFLANKFPFLSKRAIKSFQ

SEQ ID NO: 30663 - protein, 47 aa, Homo sapiens
LALLGKLDAINVEKAIEFVLSCMNFDGGFGCRPGSESHAGQVIYEYR

SEQ ID NO: 30664 - protein, 22 aa, Homo sapiens
IFLEKACGEGGQKKEASSEVHS

SEQ ID NO: 30665 - protein, 150 aa, Homo sapiens
MGPGAGRPWPNPNSANSIPYSSSSPGTYVGPPGGGGPPGTPIMPSPADSTNSSDNIYTMINPVPPGGSRSNFPMGPGSDGPMGGMGGMEPHHMNGSLGSGDIDGLPKNSPNNISGISNPPGTPRDDGELGGNFLHSFQNDNYSPSMTMSV

SEQ ID NO: 30666 - protein, 250 aa, Homo sapiens
LAEFKRDLEWVERLDVTLGPVPEIGGSEAPAPQNKDQKAVDPEDDFQREMSFYRQAQAAVLAVLPRLHQLKVPTKRPTDYFAEMAKSDLQMQKIRQKLQTKQAAMERSEKAKQLRALRKYGKKVQTEVLQKRQQEKAHMMNAIKKYQKGFSDKLDFLEGDQKPLAQRKKAGAKGQQMRKGPSAKRRYKNQKFGFGGKKKGSKWNTRESYDDVSSFRAKTAHGRGLKRPGKKGSNKRPGKRTREKMKNRTH

SEQ ID NO: 30667 - protein, 55 aa, Homo sapiens
MCTGRPGWLTVSLRVGKYKKTHKNIMINLMDILEVDTKKQMESCSVLQVGLGAVA

SEQ ID NO: 30668 - protein, 53 aa, Homo sapiens
KTCLLIVFSKDQFPEVYVPTVFENYIADIEVDGKQVKAEMPFPPHPETPPPSH

SEQ ID NO: 30669 - protein, 16 aa, Homo sapiens
RGWSFQVLPERNVPSL

SEQ ID NO: 30670 - protein, 28 aa, Homo sapiens
RKRQQHPKKERAGVSTVQKAKKKQKKRD

SEQ ID NO: 30671 - protein, 54 aa, Homo sapiens
LSEPPLGPAPHLSMVQAHGGRSRAQPLTLSLGAAMTQPPPEKTPAKKHVRLQER

SEQ ID NO: 30672 - protein, 347 aa, Homo sapiens
KTSNNTYLCLAVLDGIFCVIFLHGRNSPQSSPTSTPKLSKSLSFEMQQDELIEKPMSPMQYARSGLGTAEMNGKLIAAGGYNREECLRTVECYNPHTDHWSFLAPMRTPRARFQMAVLMGQLYVVGGSNGHSDDLSCGEMYDSNIDDWIPVPELRTNRCNAGVCALNGKLYIVGGSDPYGQKGLKNCDVFDPVTKLWTSCAPLNIRRHQSAVCELGGYLYIIGGAESWNCLNTVERYNPENNTWTLIAPMNVARRGAGVAVLNGKLFVCGGFDGSHAISCVEMYDPTRNEWKMMGNMTSPRSNAGIATVGNTIYAVGGFDGNEFLNTVEVYNLESNEWSPYTKIFQF

SEQ ID NO: 30673 - protein, 90 aa, Homo sapiens
LHCPLNFTGTPGPLKGQAALPFSPLVIPAFPAHFLATAGPSPMAAGLMHFPPTSFDSALRHRLCPASSAWHAPPVTTYAAPHFFHLNTKL

SEQ ID NO: 30674 - protein, 53 aa, Homo sapiens
LSHSFVSSPGDGHRLIMRGAHLTALEMLTAFASHIRARDAAGSGDKPGADTGR

SEQ ID NO: 30675 - protein, 76 aa, Homo sapiens
IPQSGSPFPGSVQDPGLHVWRVEKLKPVPVAQENQGVFFSGDSYLVLHNGPEEVSHLHLWIGQQSSRDEQGACAGQ

SEQ ID NO: 30676 - protein, 15 aa, Homo sapiens
INYIQLSLQDWEELG

SEQ ID NO: 30677 - protein, 21 aa, Homo sapiens
VQWCHQFAAASTSQAQMILLP

SEQ ID NO: 30678 - protein, 9 aa, Homo sapiens
LMMASAAFS

SEQ ID NO: 30679 - protein, 163 aa, Homo sapiens
ITGTSQADCAVLIVAAGFGEFEAGISKNGQTREHALLAYTLGVKQLIVGVNKMDSTEPPYSHKRYEEIVKEVSTYIKKIGHNTDTVAFVPVSGWNGDNTLEPSANMPWFKGWKVTRKDGNASGTTLLEALDCILPPTRPTDKPLCLPLQDVYKIGGIGTVPVG

SEQ ID NO: 30680 - protein, 50 aa, Homo sapiens
TVKTEAAKGTLTYSRMRGMVAILIAFMKQRRMGLNDFIQKIANNSYACKQ

SEQ ID NO: 30681 - protein, 73 aa, Homo sapiens
VMIAALDYGRDDLALFCLQELRRQFPGSHRVKRLTGMRFEAMERYDDAIQLYDRILQEDPTNTVSWQIVLKKI

SEQ ID NO: 30682 - protein, 89 aa, Homo sapiens
LIPQPAVRNPCRIHETLPIAAGGHFALELTTPEQGRDSPDAGRLFCPFGDTSPPLPGPASLKGSPCSCLDAGFFSGSGKPASRDDAPQR

SEQ ID NO: 30683 - protein, 24 aa, Homo sapiens
LEAAKSEPRCSGLRASRRSWTRRR

SEQ ID NO: 30684 - protein, 34 aa, Homo sapiens
KKEKISSWLHCGCKSERSQLGYCKKRREGYSWTD

SEQ ID NO: 30685 - protein, 90 aa, Homo sapiens
LQFLVQCPNNSVDLKLELLINKHIKKQALVTVCESGMQTKHVYQNLSQFLLDYLQVNTTISVNVDTFQYIDTSTFPLENVLSIFLYSNSD

SEQ ID NO: 30686 - protein, 72 aa, Homo sapiens
TAPPGGCEAWGSWPGWLCSLPSGSCGCWGQPLGVPRHPSPRSPSLSGTGPSLTSPQSCPATPAPATASPAAT

SEQ ID NO: 30687 - protein, 30 aa, Homo sapiens
KLQGQFKGLVKAARRGSQVGHKNRRKDRRP

SEQ ID NO: 30688 - protein, 27 aa, Homo sapiens
LDGPTRVTAQADRSSHPTSSGAMPKRG

SEQ ID NO: 30689 - protein, 39 aa, Homo sapiens
LEAATRPAPPPWYVESRSLEGLGQSSGDWGMTSHLSCHP

SEQ ID NO: 30690 - protein, 150 aa, Homo sapiens [sequence omitted]

SEQ ID NO: 30691 - protein, 60 aa, Homo sapiens
LPDLPSFPAFLWIPASGHPSPPSLQGPLLVSLLLEPLPPPPSLQNFSFTPHPPPLPPFLF

SEQ ID NO: 30692 - protein, 148 aa, Homo sapiens
VVMAEGKEIDFRCPQDQGWNAEITLQMVQYKNRQAILAVKSTRQKQQHLVQQQPPSQPQPQPQLQPQPQPQPQPQPQPQSQPQPQPQPKPQPQQLHPYPHPHPHPHSHPHSHPHPHPHPHPHQIPHPHPQPHSQPHGHRLLRSTSNSA

SEQ ID NO: 30693 - protein, 42 aa, Homo sapiens
RFGLGSVFFRRRTSECTTTGKSYYRWSKGKFISMPDTYMIYM

SEQ ID NO: 30694 - protein, 263 aa, Homo sapiens
LEGVNTNSSDLGSLPEKMQPFLLLLAFLLTPGAGTEEIIGGHEAKPHSRPYMAFVQFLQEKSRKRCGGILVRKDFVLTAAHCQGSSINVTLGAHNIKEQERTQQFIPVKRPIPHPAYNPKNFSNDIMLLQLERKAKWTTAVRPLRLPSSKAQVKPGQLCSVAGWGYVSMSTLATTLQEVLLTVQKDCQCERLFHGNYSRATEICVGDPKKTQTGFKGDSGGPLVCKDVAQGILSYGNKKGTPPGVYIKVSHFLPWIKRTMKRL

SEQ ID NO: 30695 - protein, 37 aa, Homo sapiens
VDEVSTEPIPESWRSEVTFSTPALYIYTSGTTGCLQL

SEQ ID NO: 30696 - protein, 8 aa, Homo sapiens
IRQISHIS

SEQ ID NO: 30697 - protein, 30 aa, Homo sapiens
KELSGLGSALKNPFGNAGLLLGEAGKQLRR

SEQ ID NO: 30698 - protein, 25 aa, Homo sapiens
IEEKEIEHALKDKALIGNILATGLP

SEQ ID NO: 30699 - protein, 9 aa, Homo sapiens
IPCVFIIKL

SEQ ID NO: 30700 - protein, 53 aa, Homo sapiens
LGQSWFCSCCRDTELAISALRARTATGSPGSCRCTAGPLPCASALESCCCRVT

SEQ ID NO: 30701 - protein, 290 aa, Homo sapiens
TSAASMSDKLPYKVADIGLAAWGRKALDIAENEMPGLMRMRERYSASKPLKGARIAGCLHMTVETAVLIETLVTLGAEVQWSSCNIFSTQDHAAAAIAKAGIPVYAWKGETDEEYLWCIEQTLYFKDGPLNMILDDGGDLTNLIHTKYPQLLPGIRGISEETTTGVHNLYKMMANGILKVPAINVNDSVTKSKFDNLYGCRESLIDGIKRATDVMIAGKVAVVAGYGDVGKGCAQALRGFGARVIITEIDPINALQAAMEGYEVTTMDEACQEGNIFVTTTGCIDIILGR

SEQ ID NO: 30702 - protein, 23 aa, Homo sapiens
LWDWRCAGRRWWCGAAADSWPPP

SEQ ID NO: 30703 - protein, 18 aa, Homo sapiens
VETHPEFIGIKIIYSDHR

SEQ ID NO: 30704 - protein, 42 aa, Homo sapiens
RPLDKLPGLNTATILLVGTEDALLQQLADSMLKEDCASELKV

SEQ ID NO: 30705 - protein, 106 aa, Homo sapiens
ITRNKARKKLQLSLADFRRLCILKGIYPHEPKHKKKVNKGSTAARTFYLIKDIRFLLHEPIVNKFREYKVFVRKLRKAYGKSEWNTVERLKDNKPNYKLDHIIKER

SEQ ID NO: 30706 - protein, 211 aa, Homo sapiens
MVLCIATDDSHSLSCLSLKFGVSLKSCRHLLENAKKHHVEVVGVSFHIGSGCPDPQAYAQSIADARLVFEMGTELGHKMHVLDLGGGFPGTEGAKVRFEEIASVINSALDLYFPEGCGVDIFAELGRYYVTSAFTVAVSIIAKKEVLLDQPGREEENGSTSKTIVYHLDEGVYGIFNSVLFDNICPTPILQKSKNHSPCYMSLESIHFIAV

SEQ ID NO: 30707 - protein, 40 aa, Homo sapiens
MTAWEAMAPHVNPTLKDKALSPQQPQQLALHPVSLTTTSK

SEQ ID NO: 30708 - protein, 260 aa, Homo sapiens
MQLVSGGELFDRIVEKGFYTEKDASTLIRQVLDAVYYLHRMGIVHRDLKPENLLYYSQDEESKIMISDFGLSKMEGKGDVMSTACGTPGYVAPEVLAQKPYSKAVDCWSIGVIAYILLCGYPPFYDENDSKLFEQILKAEYEFDSPYWDDISDSAKDFIRNLMEKDPNKRYTCEQAARHPWIAGDTALNKNIHESVSAQIRKNFAKSKWRQAFNATAVVRHMRKLHLGSSLDSSNASVSSSLSLASQKDCAYVAKPESLS

SEQ ID NO: 30709 - protein, 72 aa, Homo sapiens
MCDQTPNTPEAQWCRGASNLSRAGVEGLKVRVTDSHRTRSWTLLFLCKNSPSTSRVALQKKLRPSSLSVAFS

SEQ ID NO: 30710 - protein, 17 aa, Homo sapiens
MHSWAVLLVSDSPLTLQ

SEQ ID NO: 30711 - protein, 22 aa, Homo sapiens
MRVASLQRAWVCGDPMHSFSAC

SEQ ID NO: 30712 - protein, 42 aa, Homo sapiens
MEEQVILTEKDLLEDGFGEHPFYHCLVAEVPKEHWTPEGYSL

SEQ ID NO: 30713 - protein, 605 aa, Homo sapiens
LTGGSEAGRRSKSKMKYILVTGGVISGIGKGIIASSVGTILKSCGLHVTSIKIDPYINIDAGTFSPYEHGEVFVLDDGGEVDLDLGNYERFLDIRLTKDNNLTTGKIYQYVINKERKGDYLGKTVQVVPHITDAIQEWVMRQALIPVDEDGLEPQVCVIELGGTVGDIESMPFIEAFRQFQFKVKRENFCNIHVSLVPQPSSTGEQKTKPTQNSVRELRGLGLSPDLVVCRCSNPLDTSVKEKISMFCHVEPEQVICVHDVSSIYRVPLLLEEQGVVDYFLRRLDLPIERQPRKMLMKWKEMADRYDRLLETCSIALVGKYTKFSDSYASVIKALEHSALAINHKLEIKYIDSADLEPITSQEEPVRYHEAWQKLCSAHGVLVPGGFGVRGTEGKIQAIAWARNQKKPFLGVCLGMQLAVVEFSRNVLGWQDANSTEFDPTTSHPVVVDMPEHNPGQMGGTMRLGKRRTLFQTKNSVMRKLYGDADYLEERHRHRFEVNPVWKKCLEEQGLKFVGQDVEGERMEIVELEDHPFFVGVQYHPEFLSRPIKPSPPYFGLLLASVGRLSHYLQKGCRLSPRDTYSDRSGSSSPDSEITELKFPSINHD

SEQ ID NO: 30714 - protein, 159 aa, Homo sapiens
VLGSASISVALFSPSWYSPPNLGFLHARVASCSTSLSLILVSTSSPGKFPFSRLALPTRASDFHPSFSLLASDYPPPIPPRPAAQLPPPFTRTGTIIPTPLRPVWDSTCLLPNPTLISAWSLPLWPNLSSRLIGDGHSHSLVPNTSSWMDSRHPCPLFN

SEQ ID NO: 30715 - protein, 28 aa, Homo sapiens
LKDKALSPQQPQQLALHPVSLTTTTKNI

SEQ ID NO: 30716 - protein, 32 aa, Homo sapiens
KRDRAGIRIWEQVREDVCWALEEGGRDRALLL

SEQ ID NO: 30717 - protein, 45 aa, Homo sapiens
KFSGSPEISRVTFVRPANLIKILLESALLVSYLCQISSWETAVTT

SEQ ID NO: 30718 - protein, 15 aa, Homo sapiens
LISMSCCGAFTAFGL

SEQ ID NO: 30719 - protein, 12 aa, Homo sapiens
KVRRPELTGVPG

SEQ ID NO: 30720 - protein, 87 aa, Homo sapiens
LPIPSAIPRPASRMPLTSRSVPPGRGALPPDSLSTRKGLPRPSTAGHRVRESGHKVPVSQRLNLPVMGATRSNLQPPRKVAVPGPTR

SEQ ID NO: 30721 - protein, 82 aa, Homo sapiens
KQVHPDTGISSKAMGIMNSFVNDIFERIAGEASRLAHYNKRSTITSREIQTAVRLLLPGKLAKHAVSEGTKAVTKYTSSNIF

SEQ ID NO: 30722 - protein, 16 aa, Homo sapiens
IFGFWSSVRSGRIDLA

SEQ ID NO: 30723 - protein, 2001 aa, Homo sapiens
MSTDSNSLAREFLTDVNRLCNAVVQRVEAREEEEEETHMATLGQYLVHGRGFLLLTKLNSIIDQALTCREELLTLLLSLLPLVWKIPVQEEKATDFNLPLSADIILTKEKNSSSQRSTQEKLHLEGSALSSQVSAKVNVFRKSRRQRKITHRYSVRDARKTQLSTSDSEANSDEKGIAMNKHRRPHLLHHFLTSFPKQDHPKAKLDRLATKEQTPPDAMALENSREIIPRQGSNTDILSEPAALSVISNMNNSPFDLCHVLLSLLEKVCKFDVTLNHNSPLAASVVPTLTEFLAGFGDCCSLSDNLESRVVSAGWTEEPVALIQRMLFRTVLHLLSVDVSTAEMMPENLRKNLTELLRAALKIRICLEKQPDPFAPRQKKTLQEVQEDFVFSKYRHRALLLPELLEGVLQILICCLQSAASNPFYFSQAMDLVQEFIQHHGFNLFETAVLQMEWLVLRDGVPPEASEHLKALINSVMKIMSTVKKVKSEQLHHSMCTRKRHRRCEYSHFMHHHRDLSGLLVSAFKNQVSKNPFEETADGDVYYPERCCCIAVCAHQCLRLLQQASLSSTCVQILSGVHNIGICCCMDPKSVIIPLLHAFKLPALKNFQQHILNILNKLILDQLGGAEISPKIKKAACNICTVDSDQLAQLEETLQGNLCDAELSSSLSSPSYRFQGILPSSGSEDLLWKWDALKAYQNFVFEEDRLHSIQIANHICNLIQKGNIVVQWKLYNYIFNPVLQRGVELAHHCQHLSVTSAQSHVCSHHNQCLPQDVLQIYVKTLPILLKSRVIRDLFLSCNGVSQIIELNCLNGIRSHSLKAFETLIISLGEQQKDASVPDIDGIDIEQKELSSVHVGTSFHHQQAYSDSPQSLSKFYAGLKEAYPKRRKTVNQDVHINTINLFLCVAFLCVSKEAESDRESANDSEDTSGYDSTASEPLSHMLPCISLESLVLPSPEHMHQAADIWSMCRWIYMLSSVFQKQFYRLGGFRVCHKLIFMIIQKLFRSHKEEQGKKEGDTSVNENQDLNRISQPKRTMKEDLLSLAIKSDPIPSELGSLKKSADSLGKLELQHISSINVEEVSATEAAPEEAKLFTSQESETSLQSIRLLEALLAICLHGARTSQQKMELELPNQNLSVESILFEMRDHLSQSKVIETQLAKPLFDALLRVALGNYSADFEHNDAMTEKSHQSAEELSSQPGDFSEEAEDSQCCSFKLLVEEEGYEADSESNPEDGETQDDGVDLKSETEGFSASSSPNDLLENLTQGEIIYPEICMLELNLLSASKAKLDVLAHVFESFLKIIRQKEKNVFLLMQQGTVKNLLGGFLSILTQDDSDFQACQRVLVDLLVSLMSSRTCSEELTLLLRIFLEKSPCTKILLLGILKIIESDTTMSPSQYLTFPLLHAPNLSNGVSSQKYPGILNSKAMGLLRRARVSRSKKEADRESFPHRLLSSWHIAPVHLPLLGQNCWPHLSEGFSVSLWFNVECIHEAESTTEKGKKIKKRNKSLILPDSSFDGTESDRPEGAEYINPGERLIEEGCIHIISLGSKALMIQVWADPHNATLIFRVCMDSNDDMKAVLLAQVESQENIFLPSKWQHLVLTYLQQPQGKRRIHGKISIWVSGQRKPDVTLDFMLPRKTSLSSDSNKTFCMIGHCLSSQEEFLQLAGKWDLGNLLLFNGAKVGSQEAFYLYACGPNHTSVMPCKYGKPVNDYSKYINKEILRCEQIRELFMTKKDVDIGLLIESLSVVYTTYCPAQYTIYEPVIRLKGQMKTQLSQRPFSSKEVQSILLEPHHLKNLQPTEYKTIQGILHEIGGTGIFVFLFARVVELSSCEETQALALRVILSLIKYNQQRVHELENCNGLSMIHQVLIKQKCIVGFYILKTLLEGCCGEDIIYMNENGEFKLDVDSNAIIQDVKLLEELLLDWKIWSKAEQGVWETLLAALEVLIRADHHQQMFNIKQLLKAQVVHHFLLTCQVLQEYKEGQLTPMPREMARSFRRKCGQSCT

SEQ ID NO: 30724 - protein, 45 aa, Homo sapiens
KGSSRPPGLPLRPLRDPETCRPHFCPPSTMSTSCARQRNPWPTST

SEQ ID NO: 30725 - protein, 12 aa, Homo sapiens
ITCILKRSWTVL

SEQ ID NO: 30726 - protein, 15 aa, Homo sapiens
VNPKVSPLWNQMYPS

SEQ ID NO: 30727 - protein, 225 aa, Homo sapiens
IMVEDELALFDKSINEFWNKFKSTDTSCQMAGLRDTYKDSIKAFAEKLSVKLKEEERMVEMFLEYQNQISRQNKLIQEKKDNLLKLIAEVKGKKQELEVLTANIQDLKEEYSRKKETISTANKANAERLKRLQKSADLYKDRLGLEIRKIYGEKLQFIFTNIDPKNPESPFMFSLHLNEARDYEVSDSAPHLEGLAEFQENVRKTNNFSAFLANVRKAFTATVYN

SEQ ID NO: 30728 - protein, 31 aa, Homo sapiens
KPWAAPTLTKNLMNYVLNLVWSLMKLHLRRK

SEQ ID NO: 30729 - protein, 8 aa, Homo sapiens
VTSRMRTS

SEQ ID NO: 30730 - protein, 97 aa, Homo sapiens
KQLTKHCDNKDYSVCSLQDIHDDIENEFFVFTRYSYMRRSILNSLNIFSSVGPAWQDLSEGMMERLLDYMIWIKPWVEAILPWLNLPGMSLRVKRWQ

SEQ ID NO: 30731 - protein, 23 aa, Homo sapiens
TCLPLRWSSPGTALIRVTSSCWT

SEQ ID NO: 30732 - protein, 26 aa, Homo sapiens
IVRVFQGLTPTVKPSPVILTPSSHSS

SEQ ID NO: 30733 - protein, 76 aa, Homo sapiens
KGVQVLGALNKELDKTHKQSKKRKKQQKQRCIENENTLHRVGAGRASSSRAQLQNFLGFKYPLEVSIGYLVYTLCI

SEQ ID NO: 30734 - protein, 85 aa, Homo sapiens
LTPRPPRPVPGMPRARKGNTLRKGGQRRGGGARSSAQADSGSSDDEAASEARSTASECPSLLSTTAEDSLVPRPGRVLLRACAWP

SEQ ID NO: 30735 - protein, 25 aa, Homo sapiens
RHRPGLGRCQGELSVVSASSPGAAV

SEQ ID NO: 30736 - protein, 89 aa, Homo sapiens
RLQTGSSPWLCPPLSLLEWWGPCILSCPPPPFSPNCRRLLSPGDTVPASSGLGKHGLSSPALAPAPPASWTWAFLHPVEPHSQERCLEG

SEQ ID NO: 30737 - protein, 107 aa, Homo sapiens
LAAPDANPVVGFLAYSRPSVLPGWHRPHRTSRVGLSGSSTAGPRNSRFGAAPSRLGHTGARCRSPVLRHLVWNFRLAVSSRSGALCGVVWWKNGPCVGLTPSVCVSE

SEQ ID NO: 30738 - protein, 13 aa, Homo sapiens
LEKTGVYKSTGKQ

SEQ ID NO: 30739 - protein, 18 aa, Homo sapiens
LLQPGLISLLHHHQQSRH

SEQ ID NO: 30740 - protein, 54 aa, Homo sapiens
RAARAGDQGSAPPARTASHLNAVLPQTRPAGTAKLGLVFEGKKIASKKSSTILH

SEQ ID NO: 30741 - protein, 31 aa, Homo sapiens
LKMNHGWININQKLSMNLLCIKRKLKKSKPG

SEQ ID NO: 30742 - protein, 31 aa, Homo sapiens
IFHSSLLGHTFQKKNLHPGNQKKNMRRGIIV

SEQ ID NO: 30743 - protein, 88 aa, Homo sapiens
IGKDDMPAPLLKNVQLSESKARELYLQVIQYMRRMYQDARLVHADLSEFNMLYHGGGVYIIDVSQSVEHDHPHALEFLRKDCANVNGE

SEQ ID NO: 30744 - protein, 22 aa, Homo sapiens
LGLKHGPHCPTPARVVLVWEGL

SEQ ID NO: 30745 - protein, 41 aa, Homo sapiens
TAGGSFSGSLGGRWMGSRGPRGTGPGKRRRRRRRSRSPGEA

SEQ ID NO: 30746 - protein, 13 aa, Homo sapiens
IWVMVYVKHQRNL

SEQ ID NO: 30747 - protein, 15 aa, Homo sapiens
KLTLKGCSSLNTVLS

SEQ ID NO: 30748 - protein, 57 aa, Homo sapiens
RVGNAGAGPAPRKAGLRAAPARLPGPCATPPFPRPQPGCRPRPGSSSLNHVFHLWPK

SEQ ID NO: 30749 - protein, 50 aa, Homo sapiens
ISEEWKAQFIKTERKKLLNYKARLVKNLQPRIYCPFAGYFVESHPSDKYG

SEQ ID NO: 30750 - protein, 103 aa, Homo sapiens
KEPSNSPATDPHPKEIQEMSYRELWKLILTKIRGIQETSEKESKEMSTAILDMVEVFTNQIQSFPEHMANVELKKSLDEIQSILESFNDRLDQAEKKLSKLKI

SEQ ID NO: 30751 - protein, 8 aa, Homo sapiens
KRPLILSA

SEQ ID NO: 30752 - protein, 12 aa, Homo sapiens
RAWGKRKKILSR

SEQ ID NO: 30753 - protein, 12 aa, Homo sapiens
TPYTTWLHILLH

SEQ ID NO: 30754 - protein, 66 aa, Homo sapiens
LLCSVRAALELCSPGRSPSTSSAAEEPSASAPAPLSSAAPIPGSSLRGVELFPMTVLIRLHYTFVC

SEQ ID NO: 30755 - protein, 116 aa, Homo sapiens
RRERGFPARGRSPPALPPSRPGAPEPRPPPTAGAGGRGRAGAARRQGGRIQWKCVTSCRYCPWTGRSPSTSSAAEEPSASAPAPLSSAAPIPGSSLRGVELFPMTVLIRLHYTFVC

SEQ ID NO: 30756 - protein, 11 aa, Homo sapiens
RRRTIQTFDWR

SEQ ID NO: 30757 - protein, 117 aa, Homo sapiens
TADGWKRFLDEKSGSFVSDLSSYCNKEVYNKENLFNSLNYDVAAKKRKKDMLNSKTKTQYFHQEKWIYVHKGSTKERHGYCTLGEAFNRLDFSTAILDSRRFNYVVRALPLASEGNR

SEQ ID NO: 30758 - protein, 38 aa, Homo sapiens
KQFKTLMIALQQPTHGDCANLLLSYNAGPVIGLSEDHG

SEQ ID NO: 30759 - protein, 7 aa, Homo sapiens
IPVTFGL

SEQ ID NO: 30760 - protein, 39 aa, Homo sapiens
RQTYKISSADLEKFRMWRSSHGKMTKETHRKFLHISTSV

SEQ ID NO: 30761 - protein, 25 aa, Homo sapiens
ILVTDVNNFIENIEKIAAPFRSSYW

SEQ ID NO: 30762 - protein, 288 aa, Homo sapiens
KGRRKGGGRSRHAEEQPTMPRDNMASLIQRIARQACLTFRGSGGGRGASDRDAASGPEAPMQPGFPENLSKLKSLLTQLRAEDLNIAPRKATLQPLPPNLPPVTYMHIYETDGFSLGVFLLKSGTSIPLHDHPGMHGMLKVLYGTVRISCMDKLDAGGGQRPRALPPEQQFEPPLQPREREAVRPGVLRSRAEYTEASGPCILTPHRDNLHQIDAVEGPAAFLDILAPPYDPDDGRDCHYYRVLEPVRPKEASSSACDLPREVWLLETPQADDFWCEGEPYPGPKVFP

SEQ ID NO: 30763 - protein, 47 aa, Homo sapiens
ITTPAVHDAADATRCSQKERKCIFKAPPFGIPTVSNLRRPRKSCGQK

SEQ ID NO: 30764 - protein, 16 aa, Homo sapiens
LLLAGGVERSCWEAAG

SEQ ID NO: 30765 - protein, 470 aa, Homo sapiens
LAGSGPSHWFSPLSLPVASKAPGTMAQALGEDLVQPPELQDDSSSLGSDSELSGPGPYRQADRYGFIGGSSAEPGPGHPPADLIRQREMKWVEMTSHWEKTMSRRYKKVKMQCRKGIPSALRARCWPLLCGAHVCQKNSPGTYQELAEAPGDPQWMETIGRDLHRQFPLHEMFVSPQGHGQQGLLQVLKAYTLYRPEQGYCQAQGPVAAVLLMHLPPEEAFWCLVQICEVYLPGYYGPHMEAVRLDAEVFMALLRRLLPHVHKHLQQVGVGPLLYLPEWFLCLFARSLPFPTVLRVWDAFLSEGARVLFRVGLTLVRLALGTAEQRGACPGLLETLGALRAIPPAQLQEEAFMSQVHSVVLSERDLQREIKAQLAQLPDSAPGPPPRPQVRLAGAQAIFEAQQLAGVRRGAKPEVPRIVVQPPEEPRPPRRKPQTRGKTFHGLLTRARGPPIEGPPRPQRGSTSFLDTRF

SEQ ID NO: 30766 - protein, 164 aa, Homo sapiens
RRQGYCRRRAGGSRGPEWLRLVPQRPLAGVLAPVASPGSVRVPTLGKLGAPPPLPPPPAWLWVPEPPPLAQPDSLLLPEPSGSGSFPGDGWPLSHGSVRPPQSARHGCERGAVQQSHPPEEPPTAPRHHQAWIGAGRAPLHGVPQSPRTKSLGIHGRKKCSGSM

SEQ ID NO: 30767 - protein, 25 aa, Homo sapiens
KDFRNGSNSRSRVITNLMFLHWTLS

SEQ ID NO: 30768 - protein, 32 aa, Homo sapiens
VGPEVGGPWLNDATCSCPTLRPWCPCSTCHRS

SEQ ID NO: 30769 - protein, 43 aa, Homo sapiens
KRFVTVTSGESWKKERELLQERKIGIVQPENIQPPLQCQKSHG

SEQ ID NO: 30770 - protein, 7 aa, Homo sapiens
MCIIIFP

SEQ ID NO: 30771 - protein, 150 aa, Homo sapiens
KMEKEETTRELLLPNWQGSGSHGLTIAQRDDGVFVQEVTQNSPAARTGVVKEGDQIVGATIYFDNLQSGEVTQLLNTMGHHTVGLKLHRKGDRSPEPGQTWTREVFSSCSSEVVLNTPQPSALECKDQNKQKEASSQAGAVSVSTPNAGL

SEQ ID NO: 30772 - protein, 50 aa, Homo sapiens
RPETTGTEVGHLFPESGLEISELPILRPSSGERVPGSQESWALPLTSWRP

SEQ ID NO: 30773 - protein, 15 aa, Homo sapiens
IPSCNRKSCYKRMWS

SEQ ID NO: 30774 - protein, 51 aa, Homo sapiens
TDPSRRMNWTKPAPLQTCGISTCEDASWAERERRVHNLVSSSFWLFLFFVF

SEQ ID NO: 30775 - protein, 319 aa, Homo sapiens
THAFPHCYIVRRGPGEPRSKEAPGTIEFVADPAALATILSGEGVKSCHLGRQPSLAKRVLVRGSQGGTTQRVQGVRASAYLAPRTPTHRLDPARASCFSRLEGPGPRGRTLCPQRLQALISPSGPSFHPSTRPSFQELRRETAGSSRTSVSQASGLLLETPVQPAFSLPKGEREVVTHSDEGGVASLGLAQRVPLRENREMSHTRDSHDSHLMPSPAPVAQPLPGHVVPCPSPFGRAQRVPSPGPPTLTSYSVLRRLTVQPKTRFTPMPSTPRVQQAQWLRGVSPQSCSEDPALPWVSIRSFPLLRSLALCCQPGGPGV

SEQ ID NO: 30776 - protein, 259 aa, Homo sapiens
KRYYRQRAHSNPMADHTLRYPVKPEEMDWSELYPEFFAPLTQNQSHDDPKDKKEKRAQAQVEFADIGCGYGGLLVELSPLFPDTLILGLEIRVKVSDYVQDRIRALRAAPAGGFQNIACLRSNAMKHLPNFFYKGQLTKMFFLFPDPHFKRTKHKWRIISPTLLAEYAYVLRVGGLVYTITDVLELHDWMCTHFEEHPLFERVPLEDLSEDPVVGHLGTSTEEGKKVLRNGGKNFPAIFRRIQDPVLQAVTSQTSLPGH

SEQ ID NO: 30777 - protein, 24 aa, Homo sapiens
VESALHKYTLYANDDKLVRMSRAA

SEQ ID NO: 30778 - protein, 91 aa, Homo sapiens
VREHYLRDDIGCGAPGCAACGGAHEGPALEPQPQDPASSVCPQPHYLLPDTNVLLHQIVSAWRPGTWASVASSLRLPGSLLMFLRTLPSGM

SEQ ID NO: 30779 - protein, 49 aa, Homo sapiens
VTKVKEKKLKYLIYHFLFLSHLNWTPLVPWSQYMLFWPKCSIIQLADTT

SEQ ID NO: 30780 - protein, 429 aa, Homo sapiens
LQRASEKPRLSRRPRRSERAVTVLLPSSAPQRPPVSAPRPLARLCLTATMMFSGFNADYEASSSRCSSASPAGDSLSYYHSPADSFSSMGSPVNAQDFCTDLAVSSANFIPTVTAISTSPDLQWLVQPALVSSVAPSQTRAPHPFGVPAPSAGAYSRAGVVKTMTGGRAQSIGRRGKVEQLSPEEEEKRRIRRERNKMAAAKCRNRRRELTDTLQAETDQLEDEKSALQTEIANLLKEKEKLEFILAAHRPACKIPDDLGFPEEMSVASLDLTGGLPEVATPESEEAFTLPLLNDPEPKPSVEPVKSISSMELKTEPFDDFLFPASSRPSGSETARSVPDMDLSGSFYAADWEPLHSGSLGMGPMATELEPLCTPVVTCTPSCTAYTSSFVFTYPEADSFPSCAAAHRKGSSSNEPSSDSLSSPTLLAL

SEQ ID NO: 30781 - protein, 56 aa, Homo sapiens
ILNKVKTQPTGGSPRIRVEAHRGEGANHGKGEWMGLRQGCCSSCGRRRGSWTLCDI

SEQ ID NO: 30782 - protein, 44 aa, Homo sapiens
LNKVKTQPTGGSPRIRVEAHRGEGANHGKGEWMGLRGSWTLCDI

SEQ ID NO: 30783 - protein, 60 aa, Homo sapiens
VTSILRVAAEDWKKGDTFSCMVGHEALPLAFTQKTIDRLAGKPTHVNVSVVMAEVDGTCY

SEQ ID NO: 30784 - protein, 13 aa, Homo sapiens
MFLSLWDLSLDVI

SEQ ID NO: 30785 - protein, 112 aa, Homo sapiens
IQNLTILVRNIKTYYQEVLQQLIVMNLPNVLMIGRDPLSGKSMEEIKKVLLLVLGCAVQCERKEEFIERIKQLDIETQAGIVAHIQEVGAWPRGGLSCGLLLLWWPGGKTSL

SEQ ID NO: 30786 - protein, 56 aa, Homo sapiens
ITIHLNRAKVGYMESTCGPSAQGWILFCSLIAKHCLIWNKSSWVIPISPYHMSTTS

SEQ ID NO: 30787 - protein, 1034 aa, Homo sapiens
ILPQRVIDVSGMWDQRLVRLALLQHLRAFYGIKVKGVRGQCDRRRHETAATEIGGKIFGVPFNALPHSAVPEYGHIPSFLVDACTSLEDHIHTEGLFRKSGSVIRLKALKNKVDHGEGCLSSAPPCDIAGLLKQFFRELPEPILPADLHEALLKAQQLGTEEKNKATLLLSCLLADHTVHVLRYFFNFLRNVSLRSSENKMDSSNLAVIFAPNLLQTSEGHEKMSSNTEKKLRLQAAVVQTLIDYASDIGRVPDFILEKIPAMLGIDGLCATPSLEGFEEGEYETPGEYKRKRRQSVGDFVSGALNKFKPNRTPSITPQEERIAQLSESPVILTPNAKRTLPVDSSHGFSSKKRKSIKHNFNFELLPSNLFNSSSTPVSVHIDTSSEGSSQSSLSPVLIGGNHLITAGVPRRSKRIAGKKVCRVESGKAGCFSPKISHKEKVRRSLRLKFNLGKNGREVNGCSGVNRYESVGWRLANQQSLKNRIESVKTGLLFSPDVDEKLPKKGSEKISKSEETLLTPERLVGTNYRMSWTGPNNSSFQEVDANEASSMVENLEVENSLEPDIMVEKSPATSCELTPSNLNNKHNSNITSSPLSGDENNMTKETLVKVQKAFSESGSNLHALMNQRQSSVTNVGKVKLTEPSYLEDSPEENLFETNDLTIVESKEKYEHHTGKGEKCFSERDFSPLQTQTFNRETTIKCYSTQMKMEHEKDIHSNMPKDYLSKQEFSSDEEIKKQQSPKDKLNNKLKENENMMEGNLPKCAAHSKDEARSSFSQQSTCVVTNLSKPRPMRIAKQQSLETCEKTVSESSQMTEHRKVSDHIQWFNKLSLNEPNRIKVKSPLKFQRTPVRQSVRRINSLLEYSRQPTGHKLASLGDTASPLVKSVSCDGALSSCIESASKDSSVSCIKSGPKEQKSMSCEESNIGAISKSSMELPSKSFLKMRKHPDSVNASLRSTTVYKQKILSDGQVKVPLDDLTNHDIVKPVVNNNMGISSGINNRVLRRPSERGRAWYKGSPKHPIGKTQLLPTSKPVDL

SEQ ID NO: 30788 - protein, 39 aa, Homo sapiens
IFLLVDRTLGLDILHGSVNTWAQDFKANTDSPSPLIFKN

SEQ ID NO: 30789 - protein, 1200 aa, Homo sapiens
LPVSAEILQRGTLGTMSLLNPVLLPPKVKAYLSQGERFIKWDDETTVASPVILRVDPKGYYLYWTYQSKEMEFLDITSIRDTRFGKFAKMPKSQKLRDVFNMDFPDNSFLLKTLTVVSGPDMVDLTFHNFVSYKENVGKAWAEDVLALVKHPLTANASRSTFLDKILVKLKMQLNSEGKIPVKNFFQMFPADRKRVEAALSACHLPKGKNDAINPEDFPEPVYKSFLMSLCPRPEIDEIFTSYHAKAKPYMTKEHLTKFINQKQRDSRLNSLLFPPARPDQVQGLIDKYEPSGINAQRGQLSPEGMVWFLCGPENSVLAQDKLLLHHDMTQPLNHYFINSSHNTYLTAGQFSGLSSAEMYRQVLLSGCRCVELDCWKGKPPDEEPIITHGFTMTTDIFFKEAIEAIAESAFKTSPYPIILSFENHVDSPRQQAKMAEYCRTIFGDMLLTEPLEKFPLKPGVPLPSPEDLRGKILIKNKKNQFSGPTSSSKDTGGEAEGSSPPSAPAGEGTVWAGEEGTELEEEEVEEEEEEESGNLDEEEIKKMQSDEGTAGLEVTAYEEMSSLVNYIQPTKFVSFEFSAQKNRSYVISSFTELKAYDLLSKASVQFVDYNKRQMSRIYPKGTRMDSSNYMPQMFWNAGCQMVALNFQTMDLPMQQNMAVFEFNGQSGYLLKHEFMRRPDKQFNPFSVDRIDVVVATTLSITVISGQFLSERSVRTYVEVELFGLPGDPKRRYRTKLSPSTNSINPVWKEEPFVFEKILMPELASLRVAVMEEGNKFLGHRIIPINALNSGYHHLCLHSESNMPLTMPALFIFLEMKDYIPGAWADLTVALANPIKFFSAHDTKSVKLKEAMGGLPEKPFPLASPVASQVNGALAPTSNGSPAARAGAREEAMKEAAEPRTASLEELRELKGVVKLQRRHEKELRELERRGARRWEELLQRGAAQLAELGPPGVGGVGACKLGPGKGSRKKRSLPREESAGAAPGEGPEGVDGRVRELKDRLELELLRQGEEQYECVLKRKEQHVAEQISKMMELAREKQAAELKALKETSENDTKEMKKKLETKRLERIQGMTKVTTDKMAQERLKREINNSHIQEVVQVIKQMTENLERHQEKLEEKQAACLEQIREMEKQFQKEALAEYEARMKGLEAEVKESVRACLRTCFPSEAKDKPERACECPPELCEQDPLIAKADAQESRL

SEQ ID NO: 30790 - protein, 40 aa, Homo sapiens
KPSSFIRLMQNSVILIPPRKEQAQLTLRTRKVPPTTPALR

SEQ ID NO: 30791 - protein, 73 aa, Homo sapiens [sequence omitted]

SEQ ID NO: 30792 - protein, 19 aa, Homo sapiens
LGSQFVLSSPLFLFEHGAD

SEQ ID NO: 30793 - protein, 653 aa, Homo sapiens
TRSDIAGVCGWLLLSGPCGVGLDLDSRLLGASAMRRSEVLAEESIVCLQKALNHLREIWELIGIPEDQRLQRTEVVKKHIKELLDMMIAEEESLKERLIKSISVCQKELNTLCSELHVEPFQEEGETTILQLEKDLRTQVELMRKQKKERKQELKLLQEQDQELCEILCMPHYDIDSASVPSLEELNQFRQHVTTLRETKASRREEFVSIKRQIILCMEALDHTPDTSFERDVVCEDEDAFCLSLENIATLQKLLRQLEMQKSQNEAVCEGLRTQIRELWDRLQIPEEEREAVATIMSGSKAKVRKALQLEVDRLEELKMQNMKKVIEAIRVELVQYWDQCFYSQEQRQAFAPFCAEDYTESLLQLHDAEIVRLKNYYEVHKELFEGVQKWEETWRLFLEFERKASDPNRFTNRGGNLLKEEKQRAKLQKMLPKLEEELKARIELWEQEHSKAFMVNGQKFMEYVAEQWEMHRLEKERAKQERQLKNKKQTETEMLYGSAPRTPSKRRGLAPNTPGKARKLNTTTMSNATANSSIRPIFGGTVYHSPVSRLPPSGSKPVAASTCSGKKTPRTGRHGANKENLELNGSILSGGYPGSAPLQRNFSINSVASTYSEFAKDPSLSDSSTVGLQRELSKASKSDATSGILNSTNIQS

SEQ ID NO: 30794 - protein, 6 aa, Homo sapiens
MLWDCH

SEQ ID NO: 30795 - protein, 24 aa, Homo sapiens
RAGRCRASCPTREASSRTRSFLGS

SEQ ID NO: 30796 - protein, 647 aa, Homo sapiens
IGATRRPPPARVRVAVRLRPFVDGTAGASDPPCVRGMDSCSLEIANWRNHQETLKYQFDAFYGERSTQQDIYAGSVQPILRHLLEGQNASVLAYGPTGAGKTHTMLGSPEQPGVIPRALMDLLQLTREEGAEGRPWALSVTMSYLEIYQEKVLDLLDPASGDLVIREDCRGNILIPGLSQKPISSFADFERHFLPASRNRTVGATRLNQRSSRSHAVLLVKVDQRERLAPFRQREGKLYLIDLAGSEDNRRTGNKGLRLKESGAINTSLFVLGKVVDALNQGLPRVPYRDSKLTRLLQDSLGGSAHSILIANIAPERRFYLDTVSALNFAARSKEVINRPFTNESLQPHALGPVKLSQKELLGPPEAKRARGPEEEEIGSPEPMAAPASASQKLSPLQKLSSMDPAMLERLLSLDRLLASQGSQGAPLLSTPKRERMVLMKTVEEKDLEIERLKTKQKELEAKMLAQKAEEKENHCPTMLRPLSHRTVTGAKPLKKAVVMPLQLIQEQAASPNAEIHILKNKGRKRKVKVAGGLGYTWSPELESLDALEPEEKAEDCWELQISPELLAHGRQKILDLLNEGSARDLRSLQRIGPKKAQLIVGWRELHGPFSQVEDLERVEGITGKQMESFLKANILGLAAGQRCGAS

SEQ ID NO: 30797 - protein, 21 aa, Homo sapiens
ILGFPGPPDPAARPWPSGTLR

SEQ ID NO: 30798 - protein, 74 aa, Homo sapiens
LAPTRLLSGHWVSLCWTLSVSGPPRHGWDVLAVCPALFSRPSGAWWGCTPLPGRTPFPWVCTPRRLFIRLPTGT

SEQ ID NO: 30799 - protein, 28 aa, Homo sapiens
TPSLHPFTDGHLSCFRFSCHECLSMGVP

SEQ ID NO: 30800 - protein, 9 aa, Homo sapiens
KRGWRGCKS

SEQ ID NO: 30801 - protein, 52 aa, Homo sapiens
VGVCKPERTGLQIREESASCLAAEYWSQEPAMRLYSQRMSVPRTSSCHQFGF

SEQ ID NO: 30802 - protein, 45 aa, Homo sapiens
VPPGPSPRRSLSSFPLISPSWDRKCLHLHPQGPGLQGPLAPQQAS

SEQ ID NO: 30803 - protein, 29 aa, Homo sapiens
TDQSRWSWRRGRQAADSANIICPRLKNSS

SEQ ID NO: 30804 - protein, 200 aa, Homo sapiens
TCDHPYAPWSFTPSSRAPTAWVRPPCPVWASRLQEHSPEPRRARAPPTRRAQAALYAPALRLRDHLDRFSILMTSCTSWLQAPQAPGLCRDEQSSRISVPQLSGAPILLPDLEGTKLSNFQESSPLPHKHERKDKRSTPEEEGRSAPEKIIQSLKLCPGGHRPASLSSGCPAGCRLSFNLPPSMLLSVQKCCMPSSLKTC

SEQ ID NO: 30805 - protein, 25 aa, Homo sapiens
KKRVHTVSSCWFWITLECVSNPKPG

SEQ ID NO: 30806 - protein, 21 aa, Homo sapiens
LALLGPGPQPRRLPRGKVFAS

SEQ ID NO: 30807 - protein, 137 aa, Homo sapiens
LSVITEELPDVPLYYTLDQLSSTIHCNTPSLLQLRSALLHADFRVSLSHACKNAVKTDAPASALWDIMRCWEKECPVKRERLSETSPAFRILSVEPRLQANFTIREDANPSSRQRGLKRFQANPEANWGPRPRARPG

SEQ ID NO: 30808 - protein, 926 aa, Homo sapiens
RENSDANMQRSIMSFFHPKKEGKAKKPEKEASNSSRETEPPPKAALKEWNGVVSESDSPVKRPGRKAARVLGSEGEEEDEALSPAKGQKPALDCSQVSPPRPATSPENNASLSDTSPMDSSPSGIPKRRTARKQLPKRTIQEVLEEQSEDEDREAKRKKEEEEEETPKESLTEAEVATEKEGEDGDQPTTPPKPLKTSKAETPTESVSEPEVATKQELQEEEEQTKPPRRAPKTLSSFFTPRKPAVKKEVKEEEPGAPGKEGAAEGPLDPSGYNPAKNNYHPVEDACWKPGQKVPYLAVARTFEKIEEVSARLRMVETLSNLLRSVVALSPPDLLPVLYLSLNHLGPPQQGLELGVGDGVLLKAVAQATGRQLESVRAEAAEKGDVGLVAENSRSTQRLMLPPPPLTASGVFSKFRDIARLTGSASTAKKIDIIKGLFVACRHSEARFIARSLSGRLRLGLAEQSVLAALSQAVSLTPPGQEFPPAMVDAGKGKTAEARKTWLEEQGMILKQTFCEVPDLDRIIPVLLEHGLERLPEHCKLSPGIPLKPMLAHPTRGISEVLKRFEEAAFTCEYKYDGQRAQIHALEGGEVKIFSRNQEDNTGKYPDIISRIPKIKLPSVTSFILDTEAVAWDREKKQIQPFQVLTTRKRKEVDASEIQVQVCLYAFDLIYLNGESLVREPLSRRRQLLRENFVETEGEFVFATSLDTKDIEQIAEFLEQSVKDSCEGLMVKTLDVDATYEIAKRSHNWLKLKKDYLDGVGDTLDLVVIGAYLGRGKRAGRYGGFLLASYDEDSEELQAICKLGTGFSDEELEEHHQSLKALVLPSPRPYVRIDGAVIPDHWLDPSAVWEVKCADLSLSPIYPAARGLVDSDKGISLRFPRFIRVREDKQPEQATTSAQVACLYRKQSQIQNQQGEDSGSDPEDTY

SEQ ID NO: 30809 - protein, 30 aa, Homo sapiens
ICRARAVWKWTTACRRWSSGCSYRKTSWRS

SEQ ID NO: 30810 - protein, 83 aa, Homo sapiens
KREQLGRGSPSSRSLERLKFTFQPLAPFAPLGLASEAVAVLGRRLGGAGCEQGLRATLLLATGFCCEVRPGNGGKKELREAVG

SEQ ID NO: 30811 - protein, 518 aa, Homo sapiens
LARLAGQLESMNDVEELTALLRSAGEYEERKLIRAAIRRVRAQEIEAATLAGRLYSGRPNSGSREDSKGLAAHRLEQCEVPEREEQEQQAEVSKPTPTPEGTSQDVTTVTLLLRAPPGSTSSSPASPSSSPTPASPEPPLEPAEAQCLTAEVPGSPEPPPSPPKTTSPEPQESPTLPSTEGQVVNKLLSGPKETPAAQSPTRGPSDTKRADVAGPRPCQRSLSVLSPRQPAQNRESTPLASGPSSFQRAGSVRDRVHKFTSDSPMAARLQDGTPQAALSPLTPARLLGPSLTSTTPASSSSGSSSRGPSDTSSRFSKEQRGVAQPLAQLRSCPQEEGPRGRGLAARPLENRAGGPVARSEEPGAPLPVAVGTAEPGGSMKTTFTIEIKDGRGQASTGRVLLPTGNQRAELTLGLRAPPTLLSTSSGGKSTITRVNSPGTLARLGSVTHVTSFSHAPPSSRGGCSIKMEAEPAEPLAAAVEAANGAEQTRVNKAPEGRSPLSAEELMTIEDEGVLDKMV

SEQ ID NO: 30812 - protein, 395 aa, Homo sapiens
KSGTGTSVSKRLNMNPQIRNPMERMYRDTFYDNFENEPILYGRSYTWLCYEVKIKRGRSNLLWDTGVFRGQVYFKPQYHAEMCFLSWFCGNQLPAYKCFQITWFVSWTPCPDCVAKLAEFLSEHPNVTLTISAARLYYYWERDYRRALCRLSQAGARVTIMDYEEFAYCWENFVYNEGQQFMPWYKFDENYAFLHRTLKEILRYLMDPDTFTFNFNNDPLVLRRRQTYLCYEVERLDNGTWVLMDQHMGFLCNEAKNLLCGFYGRHAELRFLDLVPSLQLDPAQIYRVTWFISWSPCFSWGCAGEVRAFLQENTHVRLRIFAARIYDYDPLYKEALQMLRDAGAQVSIMTYDEFEYCWDTFVYRQGCPFQPWDGLEEHSQALSGRLRAILQNQGN

SEQ ID NO: 30813 - protein, 377 aa, Homo sapiens
LGASYRRGASSFPVPPPGAQGVAELLRDATGAEEEAPWAATERRMPGQCSVLLFPGQGSQVVGMGRGLLNYPRVRELYAAARRVLGYDLLELSLHGPQETLDRTVHCQPAIFVASLAAVEKLHHLQPSVIENCVAAAGFSVGEFAALVFAGAMEFAEGLYAVKIRAEAMQEASEAVPSGMLSVLGQPQSKFNFACLEAREHCKSLGIENPVCEVSNYLFPDCRVISGHQEALRFLQKNSSKFHFRRTRMLPVSGAFHTRLMEPAVEPLTQALKAVDIKKPLVSVYSNVHAHRYRHPGHIHKLLAQQLVSPVKWEQTMHAIYERKKGRGFPQTFEVGPGRQLGAILKSCNMQAWKSYSAVDVLQTLEHVDLDPQEPPR

SEQ ID NO: 30814 - protein, 25 aa, Homo sapiens
RRSGVWRPASPSWRRSWRRSRATRS

SEQ ID NO: 30815 - protein, 605 aa, Homo sapiens
MKGRELEELKDNIEFRGHKPLNSITVSKKRNWLYQSTLRPLNLEEENKKCQDRSHLSISPVSLPKHQLSQSFLKSSKEYCTYVVCNATNSSLSKNCALDFNEENDADDEGEIWYNPIPEDDDLGISSALSFGEADSAVLKLPAVNLSMLSGSDLMKAERHTEDSLCSSEHAGDIQTTRSNGMNPIHPAHSTEFVQQYKQKLGHKTQEGIMVEDSPMLKSPFAGSGILAATNSTELGIMEPSSPNPSPVKKGSSINWSLPDKIKSPRTVRKLSMKMKKLPEFSRKLSVKGTLNYINSPDNTPSLSKYNCREVHHTDILPSGNTTTAAKRNVISRYHLDTSVSSQQSYQKKNSMSSKYSCKGGYLSDGDSPELTTKASKHGSENKFGKGKEIISNSCSKNEIDIDAFRHYSFSDQPKCSQYISGLMSVHFYGAEDLKPPRIDSKDVFCAIQVDSVNKARTALLTCRTTFLDMDHTFNIEIENAQHLKLVVFSWEPTPRKNRVCCHGTVVLPTLFRVTKTHQLAVKLEPRGLIYVKVTLMEQWENSLHGLDINQEPIIFGVDIQKVVEKENIGLMVPLLIQKCIMEIEKRGCQVLSYYGSLLLPLLID

SEQ ID NO: 30816 - protein, 628 aa, Homo sapiens
MTPWEIPITKDIDGLLSQALLLGELGPAVELCLKEERFADAIILAQAGGTDLLKQTQERYLAKKKTKISSLLACVVQKNWKDVVCTCSLKNWREALALLLTYSGTEKFPELCDMLGTRMEQEGSRALTSEARLCYVCSGSVERLVECWAKCHQALSPMALQDLMEKVMVLNRSLEQLRGPHGVSPGPATTYRVTQYANLLAAQGSLATAMSFLPRDCAQPPVQQLRDRLFHAQGSAVLGQQSPPFPFPRIVVGATLHSKETSSYRLGSQPSHQVPTPSPRPRVFTPQSSPAMPLAPSHPSPYQGPRTQNISDYRAPGPQAIQPLPLSPGVRPASSQPQLLGGQRVQVPNPVGFPGTWPLPGSPLPMACPGIMRPGSTSLPETPRLFPLLPLRPLGPGRMVSHTPAPPASFPVPYLPGDPGAPCSSVLPTTGILTPHPGPQDSWKEAPAPRGNLQRNKLPETFMPPAPITAPVMSLTPELQGILPSQPPVSSVSHAPPGVPGELSLQLQHLPPEKMERKELPPEHQSLKSSFEALLQRCSLSATDLKTKRKLEEAAQRLEYLYEKLCEGTLSPHVVAGLHEVARCVDAGSFEQGLAVHAQVAGCSSFSEVSSFMPILKAVLIIAHKLLV

SEQ ID NO: 30817 - protein, 322 aa, Homo sapiens [sequence omitted]

SEQ ID NO: 30818 - protein, 62 aa, Homo sapiens
MRRLRVSKCQEHETRTWQDILLPTNLKAYSVMGEWFQFDKLGFLERLCSRNTGRQVAADWRR

SEQ ID NO: 30819 - protein, 34 aa, Homo sapiens [sequence omitted]

SEQ ID NO: 30820 - protein, 11 aa, Homo sapiens
MILVCSMASPA

SEQ ID NO: 30821 - protein, 38 aa, Homo sapiens
MSPLKYHRKTMGRCCSPRLQPSFQGRVGFATGIQCLSV

SEQ ID NO: 30822 - protein, 93 aa, Homo sapiens
LAAALSAAKGHRPGTARGGKVAPGAEAAERSPRRRPDWLPRNCGDSPYSELGLRFPGLSPSPEAPTKPGKEGKDSGGSSSMSAYSRKPERARS

SEQ ID NO: 30823 - protein, 23 aa, Homo sapiens
MMGSSFLANKFPFLSKRAIKSFQ

SEQ ID NO: 30824 - protein, 40 aa, Homo sapiens
TIPAADTGIWLCPYRIDEVTSWKVPGPFLGAALRDFWVKG

SEQ ID NO: 30825 - protein, 106 aa, Homo sapiens
IVEATEGVATAGGQFLAPPGAYYQQPGKERQIRAAGHEPHLLARQGILLDGDKGKFLLQVFTKSLFTEDTFFLELIQRQGATGFGQGNIRALWQSVQEQSARSQEA

SEQ ID NO: 30826 - protein, 20 aa, Homo sapiens
RPRRTNDSEWINMKVIQAQS

SEQ ID NO: 30827 - protein, 386 aa, Homo sapiens
RPRLTSPIAPPLPSPFMARPGLIHSAPGLPDTCALLQPPAASAAAAPSMSGPDVETPSAIQICRIMRPDDANVAGNVHGGTILKMIEEAGAIISTRHCNSQNGERCVAALARVERTDFLSPMCIGEVAHVSAEITYTSKHSVEVQVNVMSENILTGAKKLTNKATLWYVPLSLKNVDKVLEVPPVVYSRQEQEEEGRKRYEAQKLERMETKWRNGDIVQPVLNPEPNTVSYSQSSLIHLVGPSDCTLHGFVHGGVTMKLMDEVAGIVAARHCKTNIVTASVDAINFHDKIRKGCVITISGRMTFTSNKSMEIEVLVDADPVVDSSQKRYRAASAFFTYVSLSQEGRSLPVPQLVPETEDEKKRFEEGKGRYLQMKAKRQGHAEPQP

SEQ ID NO: 30828 - protein, 24 aa, Homo sapiens
VSQLLVHVMIFSVTNDVMILPNEI

SEQ ID NO: 30829 - protein, 173 aa, Homo sapiens
LVLRDLKLRKFIFKDEERTRVKLESLEDAYILRGDDDSLSDKHGCPAYVSPEILNTSGSYSGKAADVWSLGVMLYTMLVGRYPFHDIEPSSLFSKIRRGQFNIPETLSPKAKCLIRSILRREPSERLTSQEILDHPWFSTDFSVSNSAYGAKEVSDQLVPDVNMEENLDPFFN

SEQ ID NO: 30830 - protein, 211 aa, Homo sapiens
LISEMKYFAEYLSMDAQRWEEVDISVHCDVHIFNWLIKYIKRNTKENKDCEMPTLEPGNVISILISSEFLKMDSLVEQCIQYCHKNMNAIVATPCNMNCINANLLTRIADLFSHNEVDDLKDKKDKFKSKLFCKKIERLFDPEYLNPDSRSNAATLYRCCLCKKLLTKETERRIPCIPGKINVDRRGNIVYIHIRCREDKIHTCIFVYIYI

SEQ ID NO: 30831 - protein, 22 aa, Homo sapiens
RLKKHLIQMRRRCCSFCAGMLL

SEQ ID NO: 30832 - protein, 48 aa, Homo sapiens
RILQKICGALRENLAEAVHWNAFTVIVMEAKYMKEKLLFVSLLIAPDD

SEQ ID NO: 30833 - protein, 121 aa, Homo sapiens
IHTLRQVRREVRNRWKCILEDLGFQKEADSLLSVTKLSTISDSKNTRKAREMLLKLAEETNIFPTSWELSERYLFVVDRLIALDAAEEFFKLARRTYPKKPGVPCLADGQKELHYLPFPSP

SEQ ID NO: 30834 - protein, 59 aa, Homo sapiens
VLTWPGTNPTLSSILLNSHTDVVPVFKEHWSHDPFEAFKDSEGYIYARGAQDMKCVSIQ

SEQ ID NO: 30835 - protein, 915 aa, Homo sapiens
IMAENSVLTSTTGRTSLADSSIFDSKVTEISKENLLIGSTSYVEEEMPQIETRVILVQEAGKQEELIKALKTIKIMEVPVIKIKESCPGKSDEKLIKSVINMDIKVGFVKMESVEEFEGLDSPEFENVFVVTDFQDSVFNDLYKADCRVIGPPVVLNCSQKGEPLPFSCRPLYCTSMMNLVLCFTGFRKKEELVRLVTLVHHMGGVIRKDFNSKVTHLVANCTQGEKFRVAVSLGTPIMKPEWIYKAWERRNEQDFYAAVDDFRNEFKVPPFQDCILSFLGFSDEEKTNMEEMTEMQGGKYLPLGDERCTHLVVEENIVKDLPFEPSKKLYVVKQEWFWGSIQMDARAGETMYLYEKANTPELKKSVSMLSLNTPNSNRKRRRLKETLAQLSRETDVSPFPPRKRPSAEHSLSIGSLLDISNTPESSINYGDTPKSCTKSSKSSTPVPSKQSARWQVAKELYQTESNYVNILATIIQLFQVPLEEEGQRGGPILAPEEIKTIFGSIPDIFDVHTKIKDDLEDLIVNWDESKSIGDIFLKYSKDLVKTYPPFVNFFEMSKETIIKCEKQKPRFHAFLKINQAKPECGRQSLVELLIRPVQRLPSVALLLNDLKKHTADENPDKSTLEKAIGSLKEVMTHINEDKRKTEAQKQIFDVVYEVDGCPANLLSSHRSLVQRVETISLGEHPCDRGEQVTLFLFNDCLEIARKRHKVIGTFRSPHGQTRPPASLKHIHLMPLSQIKKVLDIRETEDCHNAFALLVRPPTEQANVLLSFQMTSDELPKENWLKMLCRHVANTICKADAENLIYTADPESFEVNTKDMDSTLSRASRAIKKTSKKVTRAFSFSKTPKRALRRALMTSHGSVEGRSPSSNDKHVMSRLSSTSSLAGIPSPSLVSLPSFFERRSHTLSRSTTHLI

SEQ ID NO: 30836 - protein, 9 aa, Homo sapiens
LWPVRSASL

SEQ ID NO: 30837 - protein, 418 aa, Homo sapiens
KPLPHPGFTHLTLALSQEDPSLERHFKGHRDAVTCVDFSINTKQLASGSMDSCLMVWHMKPQSRAYRFTGHKDAVTCVNFSPSGHLLASGSRDKTVRIWVPNVKGESTVFRAHTATVRSVHFCSDGQSFVTASDDKTVKVWATHRQKFLFSLSQHINWVRCAKFSPDGRLIVSASDDKTVKLWDKSSRECVHSYCEHGGFVTYVDFHPSGTCIAAAGMDNTVKVWDVRTHRLLQHYQLHSAAVNGLSFHPSGNYLITASSDSTLKILDLMEGRLLYTLHGHQGPATTVAFSRTGEYFASGGSDEQVMVWKSNFDIVDHGEVTKVPRPPATLASSMGNLPEVDFPVPPGRGRSVESVQSQPQEPVSVPQTLTSTLEHIVGQLDVLTQTVSILEQRLTLTEDKLKQCLENQQLIMQRATP

SEQ ID NO: 30838 - protein, 30 aa, Homo sapiens
LSLETQAPRVWKDIHLGCLTDSPVGAMLCA

SEQ ID NO: 30839 - protein, 529 aa, Homo sapiens
RPGAAMELGPEPPHRRRLLFACSPPPASQPVVKALFGASAAGGLSPVTNLTVTMDQLQGLGSDYEQPLEVKNNSNLQRMGSSESTDSGFCLDSPGPLDSKENLENPMRRIHSLPQKLLGCSPALKRSHSDSLDHDIFQLIDPDENKENEAFEFKKPVRPVSRGCLHSHGLQEGKDLFTQRQNSAPARMLSSNERDSSEPGNFIPLFTPQSPVTATLSDEDDGFVDLLDGENLKNEEETPSCMASLWTAPLVMRTTNLDNRCKLFDSPSLCSSSTRSVLKRPERSQEESPPGSTKRRKSMSGASPKESTNPEKAHETLHQSLSLASSPKGTIENILDNDPRDLIGDFSKGYLFHTVAGKHQDLKYISPEIMASVLNGKFANLIKEFVIIDCRYPYEYEGGHIKGAVNLHMEEEVEDFLLKKPIVPTDGKRVIVVFHCEFSSERGPRMCRYVRERDRLGNEYPKLHYPELYVLKGGYKEFFMKCQSYCEPPSYRPMHHEDFKEDLKKFRTKSRTWAGEKSKREMYSRLKKL

SEQ ID NO: 30840 - protein, 18 aa, Homo sapiens
RILQIQVMCSFSGSEKNT

SEQ ID NO: 30841 - protein, 27 aa, Homo sapiens
LLWAFWPIPAPQSCRDGTARIGLPGLG

SEQ ID NO: 30842 - protein, 148 aa, Homo sapiens
RVTMKFNPFVTSDRSKNRKRHFNAPSHVRRKIMSSPLSKELRQKYNVRSMPIRKDDEVQVVRGHYKGQQIGKVVQVYRKKYVIYIERVQREKANGTTVHVGIHPSKVVITRLKLDKDRKKILERKAKSRQVGKEKGKYKEELIEKMQE

SEQ ID NO: 30843 - protein, 8 aa, Homo sapiens
LLLVWGLR

SEQ ID NO: 30844 - protein, 14 aa, Homo sapiens
TLLRPWTHHMMVLR

SEQ ID NO: 30845 - protein, 15 aa, Homo sapiens
LITMVVISSLNAGFI

SEQ ID NO: 30846 - protein, 16 aa, Homo sapiens
KPLSHFIFRSTSSLWT

SEQ ID NO: 30847 - protein, 131 aa, Homo sapiens
LLRMSEHRNEALGNYLEMRLKSSFLRGLGSWKSNPLRLGGWTILLTLTMGQGEPGGPQGDPWVPHELLLPSLCDSSHASSWGSGSITCAWRGGDSSSHPLVSGHILSNSPVAAVMCSSMGTHLSPFKGTLL

SEQ ID NO: 30848 - protein, 120 aa, Homo sapiens
LQCGAPLSLVDLAGSERLDPGLALGPGERERLRETQAINSSLSTLGLVIMALSNKESHVPYRNSKLTYLLQNSLGGSAKMLMFVNISPLEENVSESLNSLRFASKVRLPPVSLVRTRGWL

SEQ ID NO: 30849 - protein, 32 aa, Homo sapiens
MTFSMHMQACHQEQSTEGQHSFCASSWLPSRS

SEQ ID NO: 30850 - protein, 18 aa, Homo sapiens
ILQRHTLPTTPSLTMRPP

SEQ ID NO: 30851 - protein, 39 aa, Homo sapiens
TAALVGEAAAAAAEEEEGEAAAAKENAWTEEMSTISTKA

SEQ ID NO: 30852 - protein, 107 aa, Homo sapiens
LSSIMSGRGKGGKGLGKGGAKRHRKVLRDNIQGITKPAIRRLARRGGVKRISGLIYEETRGVLKVFLENVIRDAVTYTEHAKRKTVTAMDVVYALKRQGRTLYGFGG

SEQ ID NO: 30853 - protein, 27 aa, Homo sapiens
LGLSGYRKASLRCSLLRIILFFSRFLF

SEQ ID NO: 30854 - protein, 10 aa, Homo sapiens
RRKRLGEGWC

SEQ ID NO: 30855 - protein, 46 aa, Homo sapiens
RKAGLRAAPARLPGPCATPPFPRPQPGCRPRPGSSSLNHVFHLWPK

SEQ ID NO: 30856 - protein, 13 aa, Homo sapiens
RIWSPLFKMQRKM

SEQ ID NO: 30857 - protein, 14 aa, Homo sapiens
LLVHGVTPVTCTDL

SEQ ID NO: 30858 - protein, 417 aa, Homo sapiens
KGPLHPPLPPPHQPQPQQPQQQPPPQHQPPHQPPHQPPPQHQPPPQHPPQHPPQHQHHHHHHHLSVPPPPLMPMSQPQFRPHVQTAQPQASSSRMQCPQRQGLRHNTTSQNVSKRPMQQMQPTAPRNSNLRELPIAPSHVIEMSSSRCSATPSAQVKPIVSASPPSRAVAGSRSSQGKTEVKVKPASPVAQPKEEAKTETEFPDEDEETRLYRLKIEEQKRLREEILKQKELRRQQQAGARKKELLERLAQQQQQLYAPPPPAEQEEQALSPSPTNGNPLLPFPGAQVRQNVKNRLLVKNQDVSISNVQPKTSNFVPSSANMQYQGQQMKALKHLRQTRTVPQSQTQPLHKVLPIKPADVEEPAVPQTPRVASIQGRPQDTKPGVKRTVTHRTNSGGGDGPHISSKVRVIKLSGGVS

SEQ ID NO: 30859 - protein, 616 aa, Homo sapiens
RRARRALRRRNSIKKMAALTPRKRKQDSLKCDSLLHFTENLFPSPNKKHCFYQNSDKNEENLHCSQQEHFVLSALKTTEINRLPSANQGSPFKSALSTVSFYNQNKWYLNPLERKLIKESRSTCLKTNDEDKSFPIVTEKMQGKPVCSKKNNKKPQKSLTAKYQPKYRHIKPVSRNSRNSKQNRVIYKPIVEKENNCHSAENNSNAPRVLSQKIKPQVTLQGGAAFFVRKKSSLRKSSLENEPSLGRTQKSKSEVIEDSDVETVSEKKTFATRQVPKCLVLEEKLKIGLLSASSKNKEKLIKDSSDDRVSSKEHKVDKNEAFSSEDSLGENKTISPKSTVYPIFSASSVNSKRSLGEEQFSVGSVNFMKQTNIQKNTNTRDTSKKTKDQLIIDAGQKHFGATVCKSCGMIYTASNPEDEMQHVQHHHRFLEGIKYVGWKKERVVAEFWDGKIVLVLPHDPSFAIKKVEDVQELVDNELGFQQVVPKCPNKIKTFLFISDEKRVVGCLIAEPIKQAFRVLSEPIGPESPSSTECPRAWQCSDVPEPAVCGISRIWVFRLKRRKRIARRLVDTLRNCFMFGCFLSTDEIAFSDPTPDGKLFATKYCNTPNFLVYNFNS

SEQ ID NO: 30860 - protein, 33 aa, Homo sapiens
TLACHGALGVSLSAWRAFRCGVRDGCQFKRQAP

SEQ ID NO: 30861 - protein, 28 aa, Homo sapiens
LRVGRPVLRFPGPGPPLPSPPPAVGGEP

SEQ ID NO: 30862 - protein, 18 aa, Homo sapiens
IQMNEDPIRKDTWPAVQS

SEQ ID NO: 30863 - protein, 27 aa, Homo sapiens
IMNYMKLLGQVALQRSNLPAISLLERW

SEQ ID NO: 30864 - protein, 128 aa, Homo sapiens
VHRRRRREDQMDGDGPRPREAFWEPTSSDEGGAASDDSMTDLYPPELFTRKDLGSTEDGDGTDDFLTDKEDEKAKPPREKATDEGRRETTVYRGLVQKRGKKQLGSLKKKFKSHHRKPKSFSSCKQPG

SEQ ID NO: 30865 - protein, 13 aa, Homo sapiens
VSPGGKIVPISKM

SEQ ID NO: 30866 - protein, 52 aa, Homo sapiens
LLGNNRILRNLVGWRSTPKIKYRSRHGFKKIRISTASSERIRRASCMPAYLV

SEQ ID NO: 30867 - protein, 367 aa, Homo sapiens
VLRSAARGRRSWGSGRAMIRGFEAPMAENPPPPPPPVIFCHDSPKRVLVSVIRTTPIKPTCGGGGEPEPPPPLIPTSPGFSDFMVYPWRWGENAHNVTLSPGAAGAAASAALPAAAAAEHSGLRGRGAPPPAASASAAASGGEDEEEASSPDSGHLKDGIRRGRPRADTVRDLINEGEHSSSRIRCNICNRVFPREKSLQAHKRTHTGERPYLCDYPDCGKAFVQSGQLKTHQRLHTGEKPFVCSENGCLSRFTHANRHCPKHPYARLKREEPTDTLSKHQAADNKAAAEWLARYWEMREQRTPTLKGKLVQKADQEQQDPLEYLQSDEEDDEKRGAQRRLQEQRERLHGALALIELANLTGAPLRQ

SEQ ID NO: 30868 - protein, 57 aa, Homo sapiens
LGRWRLCRCMLHQLEASLLITAAGMPSWKPILQRGDTSFQRSGKLARPSLGWSIRMA

SEQ ID NO: 30869 - protein, 384 aa, Homo sapiens
LGPSAAAEVRAQVHRRKGLDLSQIPYINLVKHLTSACPNVCRISRFHHTTPDSKTHSGEKYTDPFKLGWRDLKGLYEDIRKELLISTSELKEMSEYYFDGKGKAFRPIIVALMARACNIHHNNSRHVQASQRAIALIAEMIHTASLVHDDVIDDASSRRGKHTVNKIWGEKKAVLAGDLILSAASIALARIGNTTVISILTQVIEDLVRGEFLQLGSKENENERFAHYLEKTFKKTASLIANSCKAVSVLGCPDPVVHEIAYQYGKNVGIAFQLIDDVLDFTSCSDQMGKPTSADLKLGLATGPVLFACQQFPEMNAMIMRRFSLPGDVDRARQYVLQSDGVQQTTYLAQQYCHEAIREISKLRPSPERDALIQLSEIVLTRDK

SEQ ID NO: 30870 - protein, 27 aa, Homo sapiens
IRYHYYSSTWISHIYSRKCVYSCFSDF

SEQ ID NO: 30871 - protein, 9 aa, Homo sapiens
LTSVHDAGP

SEQ ID NO: 30872 - protein, 56 aa, Homo sapiens
KKHADESFDTLKYFYSDKEKSRTKLFDMCNKFRGSKKINVMIGQEIIQLFTRPLIF

SEQ ID NO: 30873 - protein, 131 aa, Homo sapiens
VASPGSVRVPTLGKLGAPPPLPPPPAWLWVPEPPPLAQPDSLLLPEPSGSGSFPGDGWPLSHGSVRPPQSARHGCERGAVQQSHPPEEPPTAPRHHQAWIGAGRAPLHGVPQSPRTKSLGIHGRKKCSGSM

SEQ ID NO: 30874 - protein, 33 aa, Homo sapiens
LALQRPGGPWLNDATCSCPTLRPWCPCSTCHRS

SEQ ID NO: 30875 - protein, 19 aa, Homo sapiens
RTHAFGESRILVGSSAQAG

SEQ ID NO: 30876 - protein, 6 aa, Homo sapiens
MFPRLS

SEQ ID NO: 30877 - protein, 61 aa, Homo sapiens
RHSRKLGMWRTGLGASSWTCAPLPLHWNMSTKGSCSLPLPSPCSLPQPYPSYLTRRGKEGG

SEQ ID NO: 30878 - protein, 56 aa, Homo sapiens
LGMWRTGLGASSWTCAPLPLHWNMSTKGSCSLPLPSPCSLPQPYPSYLTRRGKEGG

SEQ ID NO: 30879 - protein, 24 aa, Homo sapiens
ILDSDSTHYIPSCNRKSCYKRMWS

SEQ ID NO: 30880 - protein, 83 aa, Homo sapiens
KRYYRQRAHSNPMADHTLRYPVKPEEMDWSELYPEFFAPLTQNQSHDDPKDKKEKRAQAQVEFADIGCGYGGLLGNTQALFLG

SEQ ID NO: 30881 - protein, 86 aa, Homo sapiens
RLRRARLVCAQPRSGQARMGPQVCAPYSPPITYQRALQELLTNRLSMVLHSRINCTSVCAKSTRHWRNSRNNTWYRHMDLSGKRSR

SEQ ID NO: 30882 - protein, 10 aa, Homo sapiens
LSQCRNRDPP

SEQ ID NO: 30883 - protein, 51 aa, Homo sapiens
MIQNDYKAGSSLISLRNIRGWECQTHTGSCLMPTGTTRFVKLTPENFMFPG

SEQ ID NO: 30884 - protein, 116 aa, Homo sapiens
LHPRVRRTQGSEDSSDDVRRVQRREKNRIAAQKSRQRQTQKADTLHLESEDLEKQNAALRKEIKQLTEELKYFTSVLNSHEPLCSVLAASTPSPPEVVYSAHAFHQPHVSSPRFQP

SEQ ID NO: 30885 - protein, 32 aa, Homo sapiens
LPTTSDAQPLVELEPPSINRMAVERQAQSLSP

SEQ ID NO: 30886 - protein, 41 aa, Homo sapiens
LRTSSQARLTHSGLSSWRKRHSAKQNLGCLHHILPVDTGRI

SEQ ID NO: 30887 - protein, 249 aa, Homo sapiens
VCVRRSFRAHAGDQPRRPPGPIPVPGTMKQESAAPNTPPTSQSPTPSAQFPRNDGDPQALWIFGYGSLVWRPDFAYSDSRVGFVRGYSRRFWQGDTFHRGSDKMPGRVVTLLEDHEGCTWGVAYQVQGEQVSKALKYLNVREAVLGGYDTKEVTFYPQDAPDQPLKALAYVATPQNPGYLGPAPEEAIATQILACRGFSGHNLEYLLRLADFMQLCGPQAQDEHLAAIVDAVGTMLPCFCPTEQALALV

SEQ ID NO: 30888 - protein, 56 aa, Homo sapiens
KAPLTPGLILPEDGATGGCGIRAPCPALCLPAQAGHSAGRPPSAAHRGQPCGQEPL

SEQ ID NO: 30889 - protein, 2361 aa, Homo sapiens
KSAQNLSRRFAAAEKFSSKMDGVSSEANEENDNIERPVRRRHSSILKPPRSPLQDLRGGNERVQESNALRNKKNSRRVSFADTIKVFQTESHMKIVRKSEMEGCSAMVPSQLQLLPPGFKRFSCLSLPETETGENLLLIQNKKLEDNYCEITGMNTLLSAPIHTQMQQKEFSIIEHTRERKHANDQTVIFSDENQMDLTSSHTVMITKGLLDNPISEKSTKIDTTSFLANLKLHTEDSRMKKEVNFSVDQNTSSENKIDFNDFIKRLKTGKCSAFPDVPDKENFEIPIYSKEPNSASSTHQMHVSLKEDENNSNITRLFREKDDGMNFTQCHTANIQTLIPTSSETNSRESKGNDITIYGNDFMDLTFNHTLQILPATGNFSEIENQTQNAMDVTTGYGTKASGNKTVFKSKQNTAFQDLSINSADKIHITRSHIMGAETHIVSQTCNQDARILAMTPESIYSNPSIQGCKTVFYSSCNDAMEMTKCLSNMREEKNLLKHDSNYAKMYCNPDAMSSLTEKTIYSGEENMDITKSHTVAIDNQIFKQDQSNVQIAAAPTPEKEMMLQNLMTTSEDGKMNVNCNSVPHVSKERIQQSLSNPLSISLTDRKTELLSGENMDLTESHTSNLGSQVPLAAYNLAPESTSESHSQSKSSSDECEEITKSRNEPFQRSDIIAKNSLTDTWNKDKDWVLKILPYLDKDSPQSADCNQEIATSHNIVYCGGVLDKQITNRNTVSWEQSLFSTTKPLFSSGQFSMKNHDTAISSHTVKSVLGQNSKLAEPLRKSLSNPTPDYCHDKMIICSEEEQNMDLTKSHTVVIGFGPSELQELGKTNLEHTTGQLTTMNRQIAVKVEKCGKSPIEKSGVLKSNCIMDVLEDESVQKPKFPKEKQNVKIWGRKSVGGPKIDKTIVFSEDDKNDMDITKSYTIEINHRPLLEKRDCHLVPLAGTSETILYTCRQDDMEITRSHTTALECKTVSPDEITTRPMDKTVVFVDNHVELEMTESHTVFIDYQEKERTDRPNFELSQRKSLGTPTVICTPTEESVFFPGNGESDRLVANDSQLTPLEEWSNNRGPVEVADNMELSKSATCKNIKDVQSPGFLNEPLSSKSQRRKSLKLKNDKTIVFSENHKNDMDITQSCMVEIDNESALEDKEDFHLAGASKTILYSCGQDDMEITRSHTTALECKTLLPNEIAIRPMDKTVLFTDNYSDLEVTDSHTVFIDCQATEKILEENPKFGIGKGKNLGVSFPKDNSCVQEIAEKQALAVGNKIVLHTEQKQQLFAATNRTTNEIIKFHSAAMDEKVIGKVVDQACTLEKAQVESCQLNNRDRRNVDFTSSHATAVCGSSDNYSCLPNVISCTDNLEGSAMLLCDKDEEKANYCPVQNDLAYANDFASEYYLESEGQPLSAPCPLLEKEEVIQTSTKGQLDCVITLHKDQDLIKDPRNLLANQTLVYSQDLGEMTKLNSKRVSFKLPKDQMKVYVDDIYVIPQPHFSTDQPPLPKKGQSSINKEEVILSKAGNKSLNIIENSSAPICENKPKILNSEEWFAAACKKELKENIQTTNYNTALDFHSNSDVTKQVIQTHVNAGEAPDPVITSNVPCFHSIKPNLNNLNGKTGEFLAFQTVHLPPLPEQLLELGNKAHNDMHIVQATEIHNINIISSNAKDSRDEENKKSHNGAETTSLPPKTVFKDKVRRCSLGIFLPRLPNKRNCSVTGIDDLEQIPADTTDINHLETQPVSSKDSGIGSVAGKLNLSPSQYINEENLPVYPDEINSSDSINIETEEKALIETYQKEISPYENKMGKTCNSQKRTWVQEEEDIHKEKKIRKNEIKFSDTTQDREIFDHHTEEDIDKSANSVLIKNLSRTPSSCSSSLDSIKADGTSLDFSTYRSSQMESQFLRDTICEESLREKLQDGRITIREFFILLQVHILIQKPRQSNLPGNFTVNTPPTPEDLMLSQYVYRPKIQIYREDCEARRQKIEELKLSASNQDKLLVDINKNLWEKMRHCSDKELKAFGIYLNKIKSCFTKMTKVFTHQGKVALYGKLVQSAQNEREKLQIKIDEMDKILKKIDNCLTEMETETKNLEDEEKNNPVEEWDSEMRAAEKELEQLKTEEEELQRNLLELEVQKEQTLAQIDFMQKQRNRTEELLDQLSLSEWDVVEWSDDQAVFTFVYDTIQLTITFEESVVGFPFLDKRYRKIVDVNFQSLLDEDQAPPSSLLVHKLIFQYVEEKESWKKTCTTQHQLPKMLEEFSLVVHHCRLLGEEIEYLKRWGPNYNLMNIDINNNELRLLFSSSAAFAKFEITLFLSAYYPSVPLPSTIQNHVGNTSQDDIATILSKVPLENNYLKNVVKQIYQDLFQDCHFYH

SEQ ID NO: 30890 - protein, 54 aa, Homo sapiens
KEMRIRMKVKLLHPLVMRLRYRSATRKKLRDSHLAMSPKQGEGARLSVWTLTHR

SEQ ID NO: 30891 - protein, 35 aa, Homo sapiens
IRLMQNSVILIPPRKEQAQLTLRTRKVPPTTPALR

SEQ ID NO: 30892 - protein, 77 aa, Homo sapiens
RRPPVTLWKLDTYVTRKVIWTRGSPMMTSTHPLLSQPAKPRAPTAPSMGTVKQNSPWSLKCRAWSGAKNSPRGPTRC

SEQ ID NO: 30893 - protein, 41 aa, Homo sapiens
KFIQLFICFESSGCKSMQLSYTGEDSFHVNIHILWGNLLPK

SEQ ID NO: 30894 - protein, 566 aa, Homo sapiens
LSCAVVMPQTRSQAQATISFPKRKLSRALNKAKNSSDAKLEPTNVQTVTCSPRVKALPLSPRKRLGDDNLCNTPHLPPCSPPKQGKKENGPPHSHTLKGRRLVFDNQLTIKSPSKRELAKVHQNKILSSVRKSQEITTNSEQRCPLKKESACVRLFKQEGTCYQQAKLVLNTAVPDRLPAREREMDVIRNFLREHICGKKAGSLYLSGAPGTGKTACLSRILQDLKKELKGFKTIMLNCMSLRTAQAVFPAIAQEICQEEVSRPAGKDMMRKLEKHMTAEKGPMIVLVLDEMDQLDSKGQDVLYTLFEWPWLSNSHLVLIGIANTLDLTDRILPRLQAREKCKPQLLNFPPYTRNQIVTILQDRLNQVSRDQVLDNAAVQFCARKVSAVSGDVRKALDVCRRAIEIVESDVKSQTILKPLSECKSPSEPLIPKRVGLIHISQVISEVDGNRMTLSQEGAQDSFPLQQKILVCSLMLLIRQLKIKEVTLGKLYEAYSKVCRKQQVAAVDQSECLSLSGLLEARGILGLKRNKETRLTKVFFKIEEKEIEHALKDKALIGNILATGLP

SEQ ID NO: 30895 - protein, 22 aa, Homo sapiens
KVARGWSGLALGVRRAVLQLPG

SEQ ID NO: 30896 - protein, 11 aa, Homo sapiens
ISPNTPKTWGW

SEQ ID NO: 30897 - protein, 62 aa, Homo sapiens
VAQMQKLPLVMISECVSFICQASPWQILIYHPKWSQSCAVSLLSVFQEVQSLKGWVMLHLWS

SEQ ID NO: 30898 - protein, 60 aa, Homo sapiens
ITETIFYGAFSKSKPGTIGIFSPKGETLDRTALMIITAGLLACPSHPMHPFCQIIRMRVF

SEQ ID NO: 30899 - protein, 59 aa, Homo sapiens
IFYGAFSKSKPGTIGIFSPKGETLDRTALMIITAGLLACPSHPMHPFCQIIRMREWKTS

SEQ ID NO: 30900 - protein, 16 aa, Homo sapiens
LRSLHLQEGQDFLHFS

SEQ ID NO: 30901 - protein, 179 aa, Homo sapiens
LPRRPLPPAAQERDAEPRPPHGELQYLGQIQHILRCGVRKDDRTGTGTLSVFGMQARYSLRDEFPLLTTKRVFWKGVLEELLWFIKGSTNAKELSSKGVKIWDANGSRDFLDSLGFSTREEGDLGPVYGFQWRHFGAEYRDMESDYSGQGVDQLQRVIDTIKTNPDDRRIIMCAWNPRG

SEQ ID NO: 30902 - protein, 15 aa, Homo sapiens
ISNTYIFVFSKQSEN

SEQ ID NO: 30903 - protein, 31 aa, Homo sapiens
LWKQCCSYWKIKGKASPWWGKVICENGSLFT

SEQ ID NO: 30904 - protein, 95 aa, Homo sapiens
KGQLPPPPPRHLPEDAGPSAGQHPTPYLHMGPCKSSHRLHCQEEDPVPQHWASPRTSVGAKGAENPAMTRKIQSLTSSVPVPLPRSCLHRFNPEQ

SEQ ID NO: 30905 - protein, 113 aa, Homo sapiens
KQKDGQELSNDLDAQDPPEDMKQDRDIQAVATSLLPLTEANLRMFQRAQDDLIPAVDRQFACSSCDHVWWRRVPQRKEVSRCRKCRKRYEPVPADKMWGLAEFHCPKCRHNFR

SEQ ID NO: 30906 - protein, 6 aa, Homo sapiens
KRLEMR

SEQ ID NO: 30907 - protein, 342 aa, Homo sapiens
VPREMFQAFPGDYDSGSRCSSSPSAESQYLSSVDSFGSPPTAAASQECAGLGEMPGSFVPTVTAITTSQDLQWLVQPTLISSMAQSQGQPLASQPPVVDPYDMPGTSYSTPGMSGYSSGGASGSGGPSTSGTTSGPGPARPARARPRRPREETLTPEEEEKRRVRRERNKLAAAKCRNRRRELTDRLQAETDQLEEEKAELESEIAELQKEKERLEFVLVAHKPGCKIPYEEGPGPGPLAEVRDLPGSAPAKEDGFSWLLPPPPPPPLPFQTSQDAPPNLTASLFTHSEVQVLGDPFPVVNPSYTSSFVLTCPEVSAFAGAQRTSGSDQPSDPLNSPSLLAL

SEQ ID NO: 30908 - protein, 56 aa, Homo sapiens
VPSLLHPLEEPGQRGKTQMMKLEPGLPVRVSYLPQPCPPLKATWRLGGCPSSYLLC

SEQ ID NO: 30909 - protein, 1120 aa, Homo sapiens; identical to SEQ ID NO: 26011

SEQ ID NO: 30910 - protein, 119 aa, Homo sapiens
KTKVSDLTEKLEERIYQIYNDHNKIIQEKLQEFTQKMAKISHLETELKQVCHSVETVYKDLCLQPEQSLRLRWGPDHSRGKSPPRPGNSQPPDVFVSSVAETTSQATASEVQTNRDGEC

SEQ ID NO: 30911 - protein, 75 aa, Homo sapiens
RKNGALLSSDVARIKKISFFMTLPLPEFPALFHLIQLQLALRHGLAARRAGPAAGPAAAQRLTVAQHSHSAHRAG

SEQ ID NO: 30912 - protein, 7 aa, Homo sapiens
KMVAELL

SEQ ID NO: 30913 - protein, 19 aa, Homo sapiens
LVLGTFDWRESQMWNICHK

SEQ ID NO: 30914 - protein, 11 aa, Homo sapiens
RCLGLVTTKAL

SEQ ID NO: 30915 - protein, 33 aa, Homo sapiens
RPACSGETARAVSQNLILALDLRRESLTRDETQ

SEQ ID NO: 30916 - protein, 458 aa, Homo sapiens
RGGWSEWRSVKSPVGSSVPECPWRCLVPAQRLCIRSWAPRRPVGYCLLLITARGIMDRSKENCISGPVKATAPVGGPKRVLVTQQFPCQNPLPVNSGQAQRVLCPSNSSQRIPLQAQKLVSSHKPVQNQKQKQLQATSVPHPVSRPLNNTQKSKQPLPSAPENNPEEELASKQKNEESKKRQWALEDFEIGRPLGKGKFGNVYLAREKQSKFILALKVLFKAQLEKAGVEHQLRREVEIQSHLRHPNILRLYGYFHDATRVYLILEYAPLGTVYRELQKLSKFDEQRTATYITELANALSYCHSKRVIHRDIKPENLLLGSAGELKIADFGWSVHAPSSRRTTLCGTLDYLPPEMIEGRMHDEKVDLWSLGVLCYEFLVGKPPFEANTYQETYKRISRVEFTFPDFVTEGARDLISRLLKHNPSQRPMLREVLEHPWITANSSKPSNCQNKESASKQS

SEQ ID NO: 30917 - protein, 188 aa, Homo sapiens
KDWAFINTNIFARTKIDPSALVQKLELDVRSVTSVRRGEAGSSARSVPSIRRGAEAKTVLPKKEKMKLRREQWLQKIEAIKLAEQKHREERRRRATVVVGDLHPLRDALPELLGLEAGSRRQARSRESNKPRPSELSRMSAAQRQQLLEEERTRFQELLASPAYRASPLVAIGQTLARQMQLEDGGQL

SEQ ID NO: 30918 - protein, 15 aa, Homo sapiens
IPNYISTDAFHFNSS

SEQ ID NO: 30919 - protein, 100 aa, Homo sapiens
VRLLCASSMWAPLCSCQSRVSSMEAPSVGSMRSTACPVPTRTIRGRPWKASSSSLVWSPLQVTMNSECVDGWVDGGWQVGRLQGHSWQRLWVCRGPQVPL

SEQ ID NO: 30920 - protein, 143 aa, Homo sapiens
LGDTHRECGSGPVAGSFKVATQERNPQRVQMRLRRQKKGVVPFLGDFLTELQRLDSAIPDDLDGNTNKRSKEVRVLQEMQLLQVAAMNYRLRPLEKFVTYFTRMEQLSDKERWGFTMMSRIVSNSWPQAIHPPQPPKVLTLQV

SEQ ID NO: 30921 - protein, 19 aa, Homo sapiens
RTWHTMALEVQIISSTSWR

SEQ ID NO: 30922 - protein, 13 aa, Homo sapiens
RQPTSTTISPSSA

SEQ ID NO: 30923 - protein, 10 aa, Homo sapiens
MGNKRIMNTL

SEQ ID NO: 30924 - protein, 154 aa, Homo sapiens
KTLLGKAVRCYESLILKAEGKVESDFFCQLGHFNLLLEDYSKALSAYQRYYSLQADYWKNAAFLYGLGLVYFYYNAFHWAIKAFQDVLYVDPSFCRAKEIHLRLGLMFKVNTDYKSSLKHFQLALIDCNPCTLSNAEIQFHIAHLYETQVSVLT

SEQ ID NO: 30925 - protein, 17 aa, Homo sapiens
MEAEVNLERTGRCHPSA

SEQ ID NO: 30926 - protein, 197 aa, Homo sapiens
MGGTESSISEPGSPSRNRENETSRQNLSECKVWRNPLNLFRGAEYRRYTWVTGKEPLTYYDMNLSAQDHQTFFTCDTDFLRPSDTVMQKAWRERNPPARIKAAYQALELNNDCATAYVLLAEEEATTIVDAERLFKQALKAGETIYRQSQQCQHQSPQHEAQLRRDTNVLVYIKRRLAMCARKLGRIREAVKIMRDI

SEQ ID NO: 30927 - protein, 114 aa, Homo sapiens [sequence omitted]

SEQ ID NO: 30928 - protein, 55 aa, Homo sapiens
MFFSANPKELKGTTHSLLDDKMQKRRPKTLLSAAEVMQWSQSLEKLLANQSKYNY

SEQ ID NO: 30929 - protein, 763 aa, Homo sapiens
MLTLLAEDRAVPSAPTGPGPLLEFALHEDLLTRVLTWQLQWDELGDGVEERRAEQLKLFEMLVSEARQPLLRHGPVREALLTLLDACGRPVPSSPALDEGLVLLLSQLCVCVAQEPSLLEFFLQPPPEPGAAPRLLLFSRLVPFVHREGTLGQQARDALLLLMALSAGSPTVGRYIADHSYFCPVLATGLSALYSSLPRKIEVPGDDWHCLRREDWLGVPALALFMSSLEFCNAVIQVAHPLVQKQLVDYIHNGFLVPVMGPALHKTSVEEMIASTAYLELFLRSISEPALLRTFLRFLLLHRHDTHTILDTLVARIGSNSRLCMVSLSLFRTLLNLSCEDVLLQLVLRYLVPCNHVMLSQKPAVRDVDLYGRAADKFLSLIPRCCRHHAPSPPRPEHASWARGPGSPSVDSSSVTTVPRPSTPSRLALFLRQQSLGGSESPGPAPCSPGLSASPASSPGRRPTPAEEPGELEDNYLEYLREARRGVDRCVRACRTWSAPYDGERPSPEPSPFGSRTKKRSLLPEEDRNNVGEGEEEELGRRGRAGGAGEGPGHLPPPQLNGVPGSWPEGAKKVRLVPKEGAGELLEGISEGMAGLEGFGQELRELEVALSNGGTGSESPLEPPLPLEEEEAYESFTCPPEPPGPFLSSPLRTLNQLPSQPFTGKLLSLGLPFCVLFACSRHVCAGFLDLLAMSFLCTCLAPHPSCLHHFQIRVMSYLCPCVCLYVFHACAGLSIDLHLSLVCMSYVHVPPLSLVWPFPAICN

SEQ ID NO: 30930 - protein, 106 aa, Homo sapiens
MFNPEERSCSLEGNPVACINLSFCLNASGKHVADSIGFTVELQLDWQKQKGGVRRALFLASRQATLTQTLLIQNGAREDCREMKIYLRVWPRGRGVDWPGRVATQN

SEQ ID NO: 30931 - protein, 33 aa, Homo sapiens
MLSLEISSVKAKHLILQETLKWIWKLGSQLGSS

SEQ ID NO: 30932 - protein, 67 aa, Homo sapiens
MLDGFIKKFVLCPECENPETDLHVNPKKQTIGNSCKACGYRGMLDTHHKLCTFILKNPPGESSMMNS

SEQ ID NO: 30933 - protein, 358 aa, Homo sapiens
MLVHRTEVIKYTLDPVWKPFTVPLVSLCDGDMEKPIQVMCYDYDNDGGHDFIGEFQTSVSQMCEARDSVPLEFECINPKKQRKKKNYKNSGIIILRSCKINRDYSFLDYILGGCQLMFTVGIDFTASNGNPLDPSSLHYINPMGTNEYLSAIWAVGQIIQDYDSDKMFPALGFGAQLPPDWKVSHEFAINFNPTNPFCSGVDGIAQAYSACLPHIRFYGPTNFSPIVNHVARFAAQATQQRTATQYFILLIITDGVISDMEETRHAVVQASKLPMSIIIVGVGNADFAAMEFLDGDSRMLRSHTGEEAARDIVQFVPFREFRNAAKETLAKAVLAELPQQVVQYFKHKNLPPTNSEPA

SEQ ID NO: 30934 - protein, 360 aa, Homo sapiens
MVNGYEAKVYGASNVELITRTRTEHLSEQHKGKVKGCKTPLQSFLGIAEQHGGPQNGTLITQTLSQANPTAITAEEYFNPNFELGNRDMGRPMELTTKTQKFKAKLWLCEEHPLSLCEQVAPIIDLMAVSNALFAKLRDFITLRLPPGFPVKIEIPIFHILNARITFGNLNGCDEPVPSVRGSPSSETPSPGSDSSSVSSSSSTTSCRGCEISPALFEAPRGYSMMGGQREAATRDDDDDLLQFAIQQSLLEAGSEYDQVTIWEALTNSKPGTHPMSYEGRRQDRSAPPTPQRQPAPPASVPSPRPSSGPGSGGHVFRSYDEQLRLAMELSAQEQEERRRRARQEEEELERILRLSLTEQ

SEQ ID NO: 30935 - protein, 20 aa, Homo sapiens
MCRVIVLGVISIIYISLAKG

SEQ ID NO: 30936 - protein, 86 aa, Homo sapiens
MLRLQKRLASSVLRCGKKKVWLDPNETNEIANANSRQQIRKLIKDGLIIRKPVTVHSRARCRKNTLARRKGRHMGIGKCGHLLLKK

SEQ ID NO: 30937 - protein, 23 aa, Homo sapiens
MHASRAWQEGTQVSRSGLSWFSY

SEQ ID NO: 30938 - protein, 320 aa, Homo sapiens
MLYVLVTEKGGLVEVINKKLWREITKGLNLPTSITSAAFTLRTQYMKYLYPYECEKRGLSNPNELQAAIDSNRREGRRQSFGGSLFAYSPGGAHGMLSSPKLPVSSLGLAASTNGSSITPAPKIKKEEDSAIPITVPGRLPVSLAGHPVVAAQAAAVQAAAAQAAVAAQAAALEQLREKLESAEPPEKKMALVADEQQRLMQRALQQNFLAMAAQLPMSIRINSQASESRQDSAVNLTGTNGSNSISMSVEINGIMYTGVLFAQPPAPTPTSAPNKGGGGGGGSSSNAGGRGGNTGTSGGQAGPAGLSTPSTSTSNNSLP

SEQ ID NO: 30939 - protein, 1332 aa, Homo sapiens
MKWYGKKHAEYTLERGDFLSEEWRERIANTSVIFVNNFAFGPEVDHQLKERFANMKEGGRIVSSKPFAPLNFRINSRNLSDIGTIMRVVELSPLKGSVSWTGKPVSYYLHTIDRTILENYFSSLKNPKLREEQEAARRRQQRESKSNAATPTKGPEGKVAGPADAPMDSGAEEEKAGAATVKKPSPSKARKKKLNKKGRKMAGRKRGRPKKMNTANPERKPKKNQTALDALHAQTVSQTAASSPQDAYRSPHSPFYQLPPSVQRHSPNPLLVAPTPPALQKLLESFKIQYLQFLAYTKTPQYKASLQELLGQEKEKNAQLLGAAQQLLSHCQAQKEEIRRLFQQKLDELGVKALTYNDLIQAQKEISAHNQQLREQSEQLEQDNRALRGQSLQLLKARCEELQLDWATLSLEKLLKEKQALKSQISEKQRHCLELQISIVELEKSQRQQELLQLKSCVPPDDALSLHLRGKGALGRELEPDASRLHLELDCTKFSLPHLSSMSPELSMNGQAAGYELCGVLSRPSSKQNTPQYLASPLDQEVVPCTPSHVGRPRLEKLSGLAAPDYTRLSPAKIVLRRHLSQDHTVPGRPAASELHSRAEHTKENGLPYQSPSVPGSMKLSPQDPRPLSPGALQLAGEKSSEKGLRERAYGSSGELITSLPISIPLSTVQPNKLPVSIPLASVVLPSRAERARSTPSPVLQPRDPSSTLEKQIGANAHGAGSRSLALAPAGFSYAGSVAISGALAGSPASLTPGAEPATLDESSSSGSLFATVGSRSSTPQHPLLLAQPRNSLPASPAHQLSSSPRLGGAAQGPLPEASKGDLPSDSGFSDPESEAKRRIVFTITTGAGSAKQSPSSKHSPLTASARGDCVPSHGQDSRRRGRRKRASAGTPSLSAGVSPKRRALPSVAGLFTQPSGSPLNLNSMVSNINQPLEITAISSPETSLKSSPVPYQDHDQPPVLKKERPLSQTNGAHYSPLTSDEEPGSEDEPSSARIERKIATISLESKSPPKTLENGGGLAGRKPAPAGEPVNSSKWKSTFSPISDIGLAKSADSPLQASSALSQNSLFTFRPALEEPSADAKLAAHPRKGFPGSLSGADGLSPGTNPANGCTFGGGLAADLSLHSFSDGASLPHKGPEAAGLSSPLSFPSQRGKEGSDANPFLSKRQLDGLAGLKGEGSRGKEAGEGGLPLCGPTDKTPLLSGKAAKARDREVDLKNGHNLFISAAAVPPGSLLSGPGLAPAASSAGGAASSAQTHRSFLGPFPPGPQFALGPMSLQANLGSVAGSSVLQSLFSSVPAAAGLVHVSSAATRLTNSHAMGSFSGVAGGTVGGN

SEQ ID NO: 30940 - protein, 123 aa, Homo sapiens [sequence omitted]

SEQ ID NO: 30941 - protein, 165 aa, Homo sapiens
MLRREARLRREYLYRKAREEAQRSAQERKERLRRALEENRLIPTELRREALALQGSLEFDDAGGEGVTSHVDDEYRWAGVEDPKVMITTSRDPSSRLKMFAKELKLVFPGAQRMNRGRHEVGALVRACKANGVTDLLVVHEHRGTPGKAGGRESGWEPSEGRRGL

SEQ ID NO: 30942 - protein, 34 aa, Homo sapiens
MMMTSSEMPSGCRRGQALGTEPQCEPAQDSFRWF

SEQ ID NO: 30943 - protein, 628 aa, Homo sapiens
MDVTDYKGETVFHYAVQGDNSQVLQLLGRNAVAGLNQVNNQGLTPLHLACQLGKQEMVRVLLLCNARCNIMGPNGYPIHSAMKFSQKGCAEMIISMDSSQIHSKDPRYGASPLHWAKNAEMARMLLKRGCNVNSTSSAGNTALHVAVMRNRFDCAIVLLTHGANADARGEHGNTPLHLAMSKDNVEMIKALIVFGAEVDTPNDFGETPTFLASKIGRLVTRKAILTLLRTVGAEYCFPPIHGVPAEQGSAAPHHPFSLERAQPPPISLNNLELQDLMHISRARKPAFILGSMRDEKRTHDHLLCLDGGGVKGLIIIQLLIAIEKASGVATKDLFDWVAGTSTGGILALAILHSKSMAYMRGMYFRMKDEVFRGSRPYESGPLEEFLKREFGEHTKMTDVRKPKVMLTGTLSDRQPAELHLFRNYDAPETVREPRFNQNVNLRPPAQPSDQLVWRAARSSGAAPTYFRPNGRFLDGGLLANNPTLDAMTEIHEYNQDLIRKGQANKVKKLSIVVSLGTGRSPQVPVTCVDVFRPSNPWELAKTVFGAKELGKMVVDCCTDPDGRAVDRARAWCEMVGIQYFRLNPQLGTDIMLDEVSDTVLVNALWETEVYIYEHREEFQKLIQLLLSP

SEQ ID NO: 30944 - protein, 855 aa, Homo sapiens
MKEKRQAKYSENKLKCTKARNDYLLNLAATNAAISKYYIHDVSDLIDCCDLGFHASLARTFRTYLSAEYNLETSRHEGLDVIENAVDNLDSRSDKHTVMDMCNQVFCPPLKFEFQPHMGDEVCQVSAQQPVQTELLMRYHQLQSRLATLKIENEEVRKTLDATMQTLQDMLTVEDFDVSDAFQHSRSTESVKSAASETYMSKINIAKRRANQQETEMFYFTKFKEYVNGSNLITKLQAKHDLLKQTLGEGERAECGTTRGRRNARTRNQDSGQAIPLVVESCIRYINLYGLQQQGIFRVPGSQVEVNDIKNSFERGEDPLVDDQNERDINSVAGVLKLYFRGLENPLFPKERFQDLISTIKLENPAERVHQIQQILVTLPRVVIVVMRYLFAFLNHLSQYSDENMMDPYNLAICFGPTLMHIPDGQDPVSCQAHINEVIKTIIIHHEAIFPSPRELEGPVYEKCMAGGEEYCDSPHSEPGAIDEVDHDNGTEPHTSDEEVEQIEAIAKFDYMGRSPRELSFKKGASLLLYHRASEDWWEGRHNGVDGLIPHQYIVVQDMDDAFSDSLSQKADSEASSGPLLDDKASSKNDLQSPTEHISDYGFGGVMGRVRLRSDGAAIPRRRSGGDTHSPPRGLGPSIDTPPRAAACPSSPHKIPLTRGRIESPEKRRMATFGSAGSINYPDKKALSEGHSMRSTCGSTRHSSLGDHKSLEAEALAEDIEKTMSTALHELRELERQNTVKQAPDVVLDTLEPLKNPPGPVSSEPASPLHTIVIRDPDAAMRRSSSSSTEMMTTFKPALSARLAGAQLRPPPMRPVRPVVQHRSSSSSSSGVGSPAVTPTEKMFPNSSADKSGTM

SEQ ID NO: 30945 - protein, 140 aa, Homo sapiens
METLKLYFLFSLQLLIKEDYLNKKGNPKKFAGLASYLHGHEPSNLVFVNFLKRGLFHNLCKPAWKGSQQFSQDVMEKLVLVLANLFGRKYIPAKFQNANLSFSQSKTQQQNNNKQTEPKKMCIRTWECRRSLFLSSNPSE

SEQ ID NO: 30946 - protein, 391 aa, Homo sapiens
MEWDFMWHLRKVPRIVSERTFHLTSPAFEADAKMMVNTVCGIECQKELPTPSLSELEDYLSYETVFENGTRTLTRVKVQDLVLEPTQNITTKGVSVRRKRQVYGTDSRFSILDKRFLTNFPFSTAVKLSTGCSGILISPQHVLTAAHCVHDGKDYVKGSKKLRVGLLKMRNKSGGKKRRGSKRSRREASGGDQREGTREHLRERAKGGRRRKKSGRGQRIAEGRPSFQWTRVKNTHIPKGWARGGMGDATLDYDYALLELKRAHKKKYMELGISPTIKKMPGGMIHFSGFDNDRADQLVYRFCSVSDESNDLLYQYCDAESGSTGSGVYLRLKDPDKKNWKRKIIAVYSGHQWVDVHGVQKDYNVAVRITPLKYAQICLWIHGNDANCAYG

SEQ ID NO: 30947 - protein, 186 aa, Homo sapiens
MNENIDILETAIKQAAEQGARIIVTPEDALYGWKFTRETVFPYLEDIPDPQVNWIPCQDPHRFGHTPVQARLSCLAKDNSIYVLANLGDKKPCNSRDSTCPPNGYFQYNTNVVYNTEGKLVARYHKAESGSVIPAGVQWHDLSSLQPLTPRFNPFSCLSLLSSWDYRLSFFLVYLEGIGKLNTFLW

SEQ ID NO: 30948 - protein, 342 aa, Homo sapiens [sequence omitted]

SEQ ID NO: 30949 - protein, 36 aa, Homo sapiens [sequence omitted]

SEQ ID NO: 30950 - protein, 47 aa, Homo sapiens
LEEFSAGEQKTERMDKVGDALEEVLSKALSQRTITVGVYEAAKLLNV

SEQ ID NO: 30951 - protein, 18 aa, Homo sapiens
VPDRHPRTIQKEKAHFGG

SEQ ID NO: 30952 - protein, 21 aa, Homo sapiens
ILLKMEKMENLCHLCCVTLWG

SEQ ID NO: 30953 - protein, 29 aa, Homo sapiens
KSIQRWMNYKRNLKLQDLRSFSPNLYLLW

SEQ ID NO: 30954 - protein, 67 aa, Homo sapiens
IFMNLTKKQRQTLRKMVIDMVLATDMSKHMSLLADLKTMVETKKVTSSGVLLLDNYTDRIQVFEESL

SEQ ID NO: 30955 - protein, 19 aa, Homo sapiens
TEMCLAMSIGSNQWKRSNT

SEQ ID NO: 30956 - protein, 88 aa, Homo sapiens
RGELSPLAKDLLHPSPEEEKRKHKKKRLVQSPNSYFMDVKCPGCYKITTVFSHAQTVVLCVGCSTVLCQPTGGKARLTEGCSFRRKQH

SEQ ID NO: 30957 - protein, 2803 aa, Homo sapiens
VNKFQELQLQLEKAKVELIEKEKVLNKCRDELVRTTAQYDQASTKYTALEQKLKKLTEDLSCQRQNAESARCSLEQKIKEKEKEFQEELSRQQRSFQTLDQECIQMKARLTQELQQAKNMHNVLQAELDKLTSVKQQLENNLEEFKQKLCRAEQAFQASQIKENELRRSMEEMKKENNLLKSHSEQKAREVCHLEAELKNIKQCLNQSQNFAEEMKAKNTSQETMLRDLQEKINQQENSLTLEKLKLAVADLEKQRDCSQDLLKKREHHIEQLNDKLSKTEKESKALLSALELKKKEYEELKEEKTLFSCWKSENEKLLTQMESEKENLQSKINHLETCLKTQQIKSHEYNERVRTLEMDRENLSVEIRNLHNVLDSKSVEVETQKLAYMELQQKAEFSDQKHQKEIENMCLKTSQLTGQVEDLEHKLQLLSNEIMDKDRCYQDLHAEYESLRDLLKSKDASLVTNEDHQRSLLAFDQQPAMHHSFANIIGEQGSMPSERSECRLEADQSPKNSAILQNRVDSLEFSLESQKQMNSDLQKQCEELVQIKGEIEENLMKAEQMHQSFVAETSQRISKLQEDTSAHQNVVAETLSALENKEKELQLLNDKVETEQAEIQELKKSNHLLEDSLKELQLLSETLSLEKKEMSSIISLNKREIEELTQENGTLKEINASLNQEKMNLIQKSESFANYIDEREKSISELSDQYKQEKLILLQRCEETGNAYEDLSQKYKAAQEKNSKLECLLNECTSLCENRKNELEQLKEAFAKEHQEFLTKLAFAEERNQNLMLELETVQQALRSEMTDNQNNSKSEAGGLKQEIMTLKEEQNKMQKEVNDLLQENEQLMKVMKTKHECQNLESEPIRNSVKERESERNQCNFKPQMDLEVKEISLDSYNAQLVQLEAMLRNKELKLQESEKEKECLQHELQTIRGDLETSNLQDMQSQEISGLKDCEIDAEEKYISGPHELSTSQNDNAHLQCSLQTTMNKLNELEKICEILQAEKYELVTELNDSRSECITATRKMAEEVGKLLNEVKILNDDSGLLHGELVEDIPGGEFGEQPNEQHPVSLAPLDESNSYEHLTLSDKEVQMHFAELQEKFLSLQSEHKILHDQHCQMSSKMSELQTYVDSLKAENLVLSTNLRNFQGDLVKEMQLGLEEGLVPSLSSSCVPDSSSLSSLGDSSFYRALLEQTGDMSLLSNLEGAVSANQCSVDEVFCSSLQEENLTRKETPSAPAKGVEELESLCEVYRQSLEKLEEKMESQGIMKNKEIQELEQLLSSERQELDCLRKQYLSENEQWQQKLTSVTLEMESKLAAEKKQTEQLSLELEVARLQLQGLDLSSRSLLGIDTEDAIQGRNESCDISKEHTSETTERTPKHDVHQICDKDAQQDLNLDIEKITETGAVKPTGECSGEQSPDTNYEPPGEDKTQGSSECISELSFSGPNALVPMDFLGNQEDIHNLQLRVKETSNENLRLLHVIEDRDRKVESLLNEMKELDSKLHLQEVQLMTKIEACIELEKIVGELKKENSDLSEKLEYFSCDHQELLQRVETSEGLNSDLEMHADKSSREDIGDNVAKVNDSWKERFLDVENELSRIRSEKASIEHEALYLEADLEVVQTEKLCLEKDNENKQKVIVCLEEELSVVTSERNQLRGELDTMSKKTTALDQLSEKMKEKTQELESHQSECLHCIQVAEAEVKEKTELLQTLSSDVSELLKDKTHLQEKLQSLEKDSQALSLTKCELENQIAQLNKEKELLVKESESLQARLSESDYEKLNVSKALEAALVEKGEFALRLSSTQEEVHQLRRGIEKLRVRIEADEKKQLHIAEKLKERERENDSLKDKVENLERELQMSEENQELVILDAENSKAEVETLKTQIEEMARSLKVFELDLVTLRSEKENLTKQIQEKQGQLSELDKLLSSFKSLLEEKEQAEIQIKEESKTAVEMLQNQLKELNEAVAALCGDQEIMKATEQSLDPPIEEEHQLRNSIEKLRARLEADEKKQLCVLQQLKESEHHADLLKGRVENLERELEIARTNQEHAALEAENSKGEVETLKAKIEGMTQSLRGLELDVVTIRSEKENLTNELQKEQERISELEIINSSFENILQEKEQEKVQMKEKSSTAMEMLQTQLKELNERVAALHNDQEACKAKEQNLSSQVECLELEKAQLLQGLDEAKNNYIVLQSSVNGLIQEVEDGKQKLEKKDEEISRLKNQIQDQEQLVSKLSQVEGEHQLWKEQNLELRNLTVELEQKIQVLQSKNASLQDTLEVLQSSYKNLENELELTKMDKMSFVEKVNKMTAKETELQREMHEMAQKTAELQEELSGEKNRLAGELQLLLEEIKSSKDQLKELTLENSELKKSLDCMHKDQVEKEGKVREEIAEYQLRLHEAEKKHQALLLDTNKQYEVEIQTYREKLTSKEECLSSQKLEIDLLKSSKEELNNSLKATTQILEELKKTKMDNLKYVNQLKKENERAQGKMKLLIKSCKQLEEEKEILQKELSQLQAAQEKQKTGTVMDTKVDELTTEIKELKETLEEKTKEADEYLDKYCSLLISHEKLEKAKEMLETQVAHLCSQQSKQDSRGSPLLGPVVPGPSPIPSVTEKRLSSGQNKASGKRQRSSGIWENGRGPTPATPESFSKKSKKAVMSGIHPAEDTEGTEFEPEGLPEVVKKGFADIPTGKTSPYILRRTTMATRTSPRLAAQKLALSPLSLGKENLAESSKPTAGGSRSQKVKVAQRSPVDSGTILREPTTKSVPVNNLPERSPTDSPREGLRVKRGRLVPSPKAGLESNGSENCKVQ

SEQ ID NO: 30958 - protein, 151 aa, Homo sapiens
LESGQPVQCESDVIMYIQECEGLIRQLQVDLQILRDENYYQLEELAFRVMRLQDELVTLRLECTNLYRKGHFTSLELVPPSTLTTTHLKAEPLTKATHSSSTSWFRKPMTRAELVAISSSEDEGNLRFVYELLSWVEEMQVGAYPKAYAVH

SEQ ID NO: 30959 - protein, 81 aa, Homo sapiens
RESIAEHKPHIDKLLKIGPQLKELNPEEGEMVEEKYQKAENMYAQIKEEVRQRALALDEAVSQSTQVCVCLTLITLNCLLF

SEQ ID NO: 30960 - protein, 37 aa, Homo sapiens
LSVPGKFGIIRPGCALESTTAILQQKYGLLPSHASYL

SEQ ID NO: 30961 - protein, 10 aa, Homo sapiens
IGFRNQGYVF

SEQ ID NO: 30962 - protein, 23 aa, Homo sapiens
LQNSGLIGSTGCRKSTAQDLLPC

SEQ ID NO: 30963 - protein, 20 aa, Homo sapiens
KKREEEKDSTFTLEQPSFQC

SEQ ID NO: 30964 - protein, 23 aa, Homo sapiens
TMPSTPRSSRPRADLMATVTPRS

SEQ ID NO: 30965 - protein, 12 aa, Homo sapiens
VEKSRVPSLRKT

SEQ ID NO: 30966 - protein, 72 aa, Homo sapiens
LRCQGKDNKNTHQKVYYKDGKQLPNSYNLEKITVNSVSRDNSKYHCTAYRKFYILDIEVTSKPLNIQVQGNG

SEQ ID NO: 30967 - protein, 1622 aa, Homo sapiens
LNALTHSSRLKLHLKSDMSECENDDPLLRSAGKVRDINRTYVISASRKTADMPLTPNPVGRLALQRRTTRNKESSLLVSELEDTTEKTAETRLTLQRRAKTDSAEKWKTAEIDSVKMTLNVGGETENNGVSKESRTNVRIVNNAKNSFVASSVPLDEDPQVIEMMADKKYKETFSAPSRANENVALKYSSNRPPIASLSQTEVVRSGHLTTKPTQSKLDIKVLGTGNLYHRSIGKEIAKTSNKFGSLEKRTPTKCTTEHKLTTKCSLPQLKSPAPSILKNRMSNLQVKQRPKSSFLANKQERSAENTILPEEETVVQNTSAGKDPLKVENSQVTVAVRVRPFTKREKIEKASQVVFMSGKEITVEHPDTKQVYNFIYDVSFWSFDECHPHYASQTTVYEKLAAPLLERAFEGFNTCLFAYGQTGSGKSYTMMGFSEEPGIIPRFCEDLFSQVARKQTQEVSYHIEMSFFEVYNEKIHDLLVCKDENGQRKQPLRVREHPVYGPYVEALSMNIVSSYADIQSWLELGNKQRATAATGMNDKSSRSHSVFTLVMTQTKTEFVEGEEHDHRITSRINLIDLAGSERCSTAHTNGDRLKEGVSINKSLLTLGKVISALSEQANQRSVFIPYRESVLTWLLKESLGGNSKTAMIATISPAASNIEETLSTLRYANQARLIVNIAKVNEDMNAKLIRELKAEIAKLKAAQRNSRNIDPERYRLCRQEITSLRMKLHQQERDMAEMQRVWKEKFEQAEKRKLQETKELQKAGIMFQMDNHLPNLVNLNEDPQLSEMLLYMIKEGTTTVGKYKPNSSHDIQLSGVLIADDHCTIKNFGGTVSIIPVGEAKTYVNGKHILEITVLRHGDRVILGGDHYFRFNHPVEVQKGKRPSGRDTPISEGPKDFEFAKNELLMAQRSQLEAEIKEAQLKAKEEMMQGIQIAKEMAQQELSSQKAAYESKIKALEAELREESQRKKMQEINNQKANHKIEELEKAKQHLEQEIYVNKKRLEMETLATKQALEDHSIRHARILEALETEKQKIAKEVQILQQNRNNRDKTFTVQTTWSSMKLSMMIQEANAISSKLKTYYVFGRHDISDKSSSDTSIRVRNLKLGISTFWSLEKFESKLAAMKELYESNGSNRGEDAFCDPEDEWEPDITDAPVSSLSRRRSRSLMKNRRISGCLHDIQVHPIKNLHSSHSSGLMDKSSTIYSNSAESFLPGICKELIGSSLDFFGQSYDEERTIADSLINSFLKIYNGLFAISKAHEEQDEESQDNLFSSDRAIQSLTIQTACAFEQLVVLMKHWLSDLLPCTNIARLEDELRQEVKKLGGYLQLFLQGCCLDISSMIKEAQKNAIQIVQQAVKYVGQLAVLKGSKLHFLENGNNKAASVQEEFMDAVCDGVGLGMKILLDSGLEKAKELQHELFRQCTKNEVTKEMKTNAMGLIRSLENIFAESKIKSFRRQVQEENFEYQDFKRMVNRAPEFLKLKHCLEKAIEIIISALKGCHSDINLLQTCVESIRNLASDFYSDFSVPSTSVGSYESRVTHIVHQELESLAKSLLFCFESEESPDLLKPWETYNQNTKEEHQQSKSSGIDGSKNKGVPKRVYELHGSSPAVSSEECTPSRIQWV

SEQ ID NO: 30968 - protein, 38 aa, Homo sapiens
ILKIMRSFKSFHETFCVVAPPTSNMKCVSFSASGKIST

SEQ ID NO: 30969 - protein, 20 aa, Homo sapiens
LILSFRKPRSSTLTVVLEET

SEQ ID NO: 30970 - protein, 51 aa, Homo sapiens
IFVPVPQLKSFQKIQVRLVRELEKKFSGKHVVFIAQVSVLLLQHVSVCEFC

SEQ ID NO: 30971 - protein, 23 aa, Homo sapiens
RKILAKQCLKMVLLSSKKSFGKS

SEQ ID NO: 30972 - protein, 23 aa, Homo sapiens
IRSDTSFMFQRVLVSLSAVSDCF

SEQ ID NO: 30973 - protein, 22 aa, Homo sapiens
ITTSRDPSSRLKMFAKVLVSRE

SEQ ID NO: 30974 - protein, 43 aa, Homo sapiens
LTSSYWIGSTLSKMQLTDCQRIQVVHQETWNYSKSKDPLALNC

SEQ ID NO: 30975 - protein, 20 aa, Homo sapiens
TEDIVDLNSSELEGFLGDLF

SEQ ID NO: 30976 - protein, 10 aa, Homo sapiens
LSLRILLSTM

SEQ ID NO: 30977 - protein, 49 aa, Homo sapiens
LTGPELYCKTLVSFPSLRVGCLLKSSIRLKKHLIQMRRRCCSFCAGMLL

SEQ ID NO: 30978 - protein, 73 aa, Homo sapiens
KKANMNLKDLSKIRGRKRGKPGTHFTQSDRAPQKRVRSRGKKEKRNALSITKHLISCALCCIFSNKPISLIVL

SEQ ID NO: 30979 - protein, 38 aa, Homo sapiens
TQTSCPTTSCSQRGGSRRSSYTSRRKKSRLPQPTVLRD

SEQ ID NO: 30980 - protein, 44 aa, Homo sapiens
IGSIVTSMGSSMPPSPSNGSSFSLPTNLTVATVTTLMPLTTFSK

SEQ ID NO: 30981 - protein, 17 aa, Homo sapiens
RSLEDPENEAHRKQVTC

SEQ ID NO: 30982 - protein, 25 aa, Homo sapiens
TWRSSRGCRCWFGQSPTDHYSWNQR

SEQ ID NO: 30983 - protein, 24 aa, Homo sapiens
VKFSFSPKPRMTHRKENQTSKKQS

SEQ ID NO: 30984 - protein, 15 aa, Homo sapiens
TRNTKSTPAKSPIRA

SEQ ID NO: 30985 - protein, 59 aa, Homo sapiens
LGKRMLPTTMPVVTIPLARRSLTQCWIGSASCLTSAQDFRASWCSTALVGALALASPHS

SEQ ID NO: 30986 - protein, 51 aa, Homo sapiens
RASAATSGTWAARRSCGRCGSPTAAARTASSTWWTRWTWTGWRRPRRSCTR

SEQ ID NO: 30987 - protein, 99 aa, Homo sapiens
TPSPSVRSSAASSRRSPSRPTTLPPWPPPPTTAVSSSSSSRAWRPPRSRRRRPARPSPPGPPHLPRRPSASSCRAACPTRPCSTRPPAPRTRCRTATAT

SEQ ID NO: 30988 - protein, 126 aa, Homo sapiens
LRTDARLPAESLLRVCFGIPSIWPLLRKKKQLTKHCDNKDYSVCSLQDIHDDIENEFFVFTRYSYMRRSILNSLNIFSSVGPAWQDLSEGMMERLLDYMIWIKPWVEAILPWLNLPGMSLRVKRWQ

SEQ ID NO: 30989 - protein, 761 aa, Homo sapiens
KRGYDGKIAGLYDLDKTLGRGHFAVVKLARHVFTGEKVAVKVIDKTKLDTLATGHLFQEVRCMKLVQHPNIVRLYEVIDTQTKLYLILELGDGGDMFDYIMKHEEGLNEDLAKKYFAQIVHAISYCHKLHVVHRDLKPENVVFFEKQGLVKLTDFGFSNKFQPGKKLTTSCGSLAYSAPEILLGDEYDAPAVDIWSLGVILFMLVCGQPPFQEANDSETLTMIMDCKYTVPSHVSKECKDLITRMLQRDPKRRASLEEIENHPWLQGVDPSPATKYNIPLVSYKNLSEEEHNSIIQRMVLGDIADRDAIVEALETNRYNHITATYFLLAERILREKQEKEIQTRSASPSNIKAQFRQSWPTKIDVPQDLEDDLTATPLSHATVPQSPARAADSVLNGHRSKGLCDSAKKDDLPELAGPALSTVPPASLKPTASGRKCLFRVEEDEEEDEEDKKPMSLSTQVVLRRKPSVTNRLTSRKSAPVLNQIFEEGESDDEFDMDENLPPKLSRLKMNIASPGTVHKRYHRRKSQGRGSSCSSSETSDDDSESRRRLDKDSGFTYSWHRRDSSEGPPGSEGDGGGQSKPSNASGGVDKASPSENNAGGGSPSSGSGGNPTNTSGTTRRCAGPSNSMQLASRSAGELVESLKLMSLCLGSQLHGSTKYIIDPQNGLSFSSVKVQEKSTWKMCISSTGNAGQVPAVGGIKFFSDHMADTTTELERIKSKNLKNNVLQLPLCEKTISVNIQRNPKEGLLCASSPASCCHVI

SEQ ID NO: 30990 - protein, 299 aa, Homo sapiens
LFVQNGFHVNEEFLQMMKKYFNAAVNHVDFSQNVAVANYINKWVENNTNNLVKDLVSPRDFDAATYLALINAVYFKGNWKSQFRPENTRTFSFTKDDESEVQIPMMYQQGEFYYGEFSDGSNEAGGIYQVLEIPYEGDEISMMLVLSRQEVPLATLEPLVKAQLVEEWANSVKKQKVEVYLPRFTVEQEIDLKDVLKALGITEIFIKDANLTGLSDNKEIFLSKAIHKSFLEVNEEGSEAAAVSGMIAISRMAVLYPQVIVDHPFFFLIRNRRTGTILFMGRVMHPETMNTSGHDFEEL

SEQ ID NO: 30991 - protein, 49 aa, Homo sapiens
RDIDFLKEEEHDCFLEEIMTKREDLVVAPAGITLKEANEILQRSKKGKS

SEQ ID NO: 30992 - protein, 178 aa, Homo sapiens
IPFPACSVAGDWKTLCDSVQSLGRKASFQDSSSPGAASSPKGIMAALRPLVKPKIVKKRTKKFIRHQSDRYVKIKRNWRKPRGIDNRVRRRFKGQILMPNIGYGSNKKTKHMLPSGFRKFLVHNVKELEVLLMCNKSYCAEIAHNVSSKNRKAIVERAAQLAIRVTNPNARLRSEENE

SEQ ID NO: 30993 - protein, 294 aa, Homo sapiens
IDVENQYLTVRKWEIEKSSLVILFIHLTLPSLLLEDCEEAFLKNPEGKPRLIFHRLEDGKVSSDSVQQLIDQVSNLNKTSKAKIIDHSGDPAEGVYKTYICVEKIIKQDILGFENTDLETKDLGSEDSIPEEDDFGDVLWDIHDEQEQMETFQQASNSAHELGFEKYYQRLNDLVAAPAPIPPLLVSGGPGSGKSLLLSKWIQLQQKNSPNTLILSHFVGRPMSTSSESSLIIKRLTLKLMQHSWSVSALTLDPAKLLEEFPRWLEKLSARHQGSIIIVIDSIDQVQVVAYTSS

SEQ ID NO: 30994 - protein, 37 aa, Homo sapiens
ITEDCFTEAKKERNKRFVGNIQFKKMFQVNIVVSVSS

SEQ ID NO: 30995 - protein, 64 aa, Homo sapiens
KMAPKDRKPKRSTWRFNLDLTHPVEDGIFDSGNFGTFPSEYLGFSSLVLHFFCFKIGAISTGEG

SEQ ID NO: 30996 - protein, 17 aa, Homo sapiens
TFSLPFLLSSRLRRRRR

SEQ ID NO: 30997 - protein, 732 aa, Homo sapiens
RRQHQHLLTWKYTDTIGKRKHSIASSRFQVALFGRFYTDLIPVMEDTGIQRGIWDGDAKAVQQCLTDIFTSVYTTCDIPENAIFGPCVLSHTSLYDSIAFIALKSTDKRTVPYIFRVDTSAANGSSEGLMWLRLVQSARDKEEQNLEAYIKNGQLFYRSLRRIAKDEELLVWYGKELTELLLLCPSRSHNKMNGSSPYTCLECSQRFQFEFPYVAHLRFRCPKRLHSADISPQDEQGGGVGTKDHGGGGGGGKDQQQQQQEAPLGPGPKFCKAGPLHHYPSPSPESSNPSAAAGGSSAKPSTDFHNLARELENSRGGSSCSPAQSLSSGSGSGGGGGHQEAELSPDGIATGGGKGKRKFPEEAAEGGGGAGLVGGRGRFVERPLPASKEDLVCTPQQYRASGSYFGLEENGRLFAPPSPETGEAKRSAFVEVKKAARAASLQEEGTADGAGVASEDQDAGGGGGSSTPAAASPVGAEKLLAPRPGGPLPSRLEGGSPARGSAFTSVPQLGSAGSTSGGGGTGAGAAGGAGGGQGAASDERKSAFSQPARSFSQLSPLVLGQKLGALEPCHPADGVGPTRLYPAAADPLAVKLQGAADLNGGCGSLPSGGGGLPKQSPFLYATAFWPKSSAAAAAAAAAAAAGPLQLQLPSALTLLPPSFTSLCLPAQNWCAKCNASFRMTSDLVYHMRSHHKKEYAMEPLVKRRREEKLKCPICNESFRERHHLSRHMTSHN

SEQ ID NO: 30998 - protein, 8 aa, Homo sapiens
IVIYSTKC

SEQ ID NO: 30999 - protein, 29 aa, Homo sapiens
MTDTYRLKYHQRPKLSFPESSGFCNNSLS

SEQ ID NO: 31000 - protein, 68 aa, Homo sapiens
RRKMLTPTFHFTILEDFLDIMNEQANILVKKLEKHINQEAFNCFFYITLCALDIICGESHRSVSKFMA

SEQ ID NO: 31001 - protein, 27 aa, Homo sapiens
LCPSTPRTVSLSQMEAELNTLRWMMET

SEQ ID NO: 31002 - protein, 125 aa, Homo sapiens
LGTHGRDTQGRPCAVSPGITGGDFMEPGGWASGWGERLQTGSSPWLCPPLSLLEWWGPCILSCPPPPFSPNCRRLLSPGDTVPASSGLGKHGLSSPALAPAPPASWTWAFLHPVEPHSQERCLEG

SEQ ID NO: 31003 - protein, 945 aa, Homo sapiens
IEFSPEEWKCLDPAQQNLYRDVMLENYRNLVSLAMCSHFTQDFLPVQGIEDSFHKLILRRYEKCGHDNLQLRKGCKSMNVCKVQKGVYNGINKCLSNTQSKIFQCNARVKVFSKFANSNKDKTRHTGEKHFKCNECGKSFQKFSDLTQHKGIHAGEKPYTCEERGKDFGWYTDLNQHKKIHTGEKPYKCEECGKAFNRSTNLTAHKRIHNREKAYTGEDRDRAFGWSTNLNEYKKIHTGDKPYKCKECGKAFMHSSHLNKHEKIHTGEKPYKCKECGKVISSSSSFAKHKRIHTGEKPFKCLECGKAFNISTTLTKHRRIHTGEKPYTCEVCGKAFRQSANLYVHRRIHTGEKPYTCGECGKTFRQSANLYVHRRIHTGEKPYKCEDCGKAFGRYTALNQHKKIHTGEKPYKCEECGKAFNSSTNLTAHKRIHTREKPYTCEDRGRAFGLSTNLNEYKKIHTGDKPYKCKECGKAFIHSLHLNKHEKIHTGKKPYKCKQCGKVITSSSSFAKHKRIHTGEKPFECLECGKAFTSSTTLTKHRRIHTGEKPYTCEVCGKAFRQSAILYVHRRIHTGEKPYTCEECGKTFRQSANLYVHRRIHTGEKPYKCEECGKAFGRYTDLNQHKKIHTGEKLYKCEECGKDFVWYTDLNQQKKIYTGEKPYKCEECGKAFAPSTDLNQHTKILTGEQSYKCEECGKAFGWSIALNQHKKIHTGEKPYKCEECGKAFSRSRNLTTHRRVHTREKPYKCEDRGRSFGWSTNLNEYKKIHTGDKLYKCKECGKVFKQSSHLNRHEKIHTGKKPYKCKECGKVITSSSSFAKHKRIHTGEKPFKCLECGKAFTSSTTLTKHRRIHTGEKPYTCEECGKAFRQSAILYVHRRIHTGEKPYTCGECGKTFRQSANLYAHKKIHTGEKPYTCGDCGKTFRQSANLYAHKKIHTGDKTIQV

SEQ ID NO: 31004 - protein, 47 aa, Homo sapiens
VTPRDSAVPSTAESPRLPAKTLFLANFSFSSPPPRPPSSAPPPSLAD

SEQ ID NO: 31005 - protein, 43 aa, Homo sapiens
RNTDINFTLRSLLETLIHKDNHCQPLFRLLQEPSSKIKHKKVF

SEQ ID NO: 31006 - protein, 43 aa, Homo sapiens
KKMKGLFLLTTNVSVPGLLPGSSVLPKILMRTLWRETSELLFL

SEQ ID NO: 31007 - protein, 70 aa, Homo sapiens
IKCSSHSPPLFFFFLTLPWRARASAFSLLFFLKKVSLCREHICINIGQLYVSIRKIIIGKHVLELVTKII

SEQ ID NO: 31008 - protein, 38 aa, Homo sapiens
KQTIMETLEQGPAQASPSYVPLFKDIVVPSLNVAKLLK

SEQ ID NO: 31009 - protein, 25 aa, Homo sapiens
LPSFMYILEGMRPTSTMIIFICLFV

SEQ ID NO: 31010 - protein, 30 aa, Homo sapiens
LSPSCGYRQHFPAPTAAPGAPYPSPLLSCA

SEQ ID NO: 31011 - protein, 36 aa, Homo sapiens
ISLVCYQDSDSLAATTQLHPSMISEETVADPGHGYV

SEQ ID NO: 31012 - protein, 485 aa, Homo sapiens
RLGPWCSPTGSPAPLSCETGCGEGSWILVCRLLVPTQVSLLSMEEDIDTRKINNSFLRDHSYATEADIISTVEFNHTGELLATGDKGGRVVIFQREQESKNQVHRRGEYNVYSTFQSHEPEFDYLKSLEIEEKINKIRWLPQQNAAYFLLSTNDKTVKLWKVSERDKRPEGYNLKDEEGRLRDPATITTLRVPVLRPMDLMVEATPRRVFANAHTYHINSISVNSDYETYMSADDLRINLWNFEITNQSFNIVDIKPANMEELTEVITAAEFHPHHCNTFVYSSSKGTIRLCDMRASALCDRHTKFFEEPEDPSNRSFFSEIISSISDVKFSHSGRYIMTRDYLTVKVWDLNMENRPIETYQVHDYLRSKLCSLYENDCIFDKFECVWNGSDSVIMTGSYNNFFRMFDRNTKRDVTLEASRENSKPRAILKPRKVCVGGKRRKDEISVDSLDFSKKILHTAWHPSENIIAVAATNNLYIFQDKVN

SEQ ID NO: 31013 - protein, 52 aa, Homo sapiens
LEGHASSRLPPQPCGWGQSSDCLLKIDVYFLELFNFVANLDKHGTNPAGRSR

SEQ ID NO: 31014 - protein, 19 aa, Homo sapiens
IASISPITTTSPKPTSQKH

SEQ ID NO: 31015 - protein, 52 aa, Homo sapiens
KGTTTRRFVGHTKDVLSVAFSSDNRQIVSGSRDKTIKLWNTLGVCKYTVQVK

SEQ ID NO: 31016 - protein, 29 aa, Homo sapiens
RVTTSTRASLWRTTTRQTSAPGSTRPLTS

SEQ ID NO: 31017 - protein, 8 aa, Homo sapiens
LFFRHGSH

SEQ ID NO: 31018 - protein, 52 aa, Homo sapiens
IHLFMPVCCMQAFWLPTLQQNNCTNSLVPIPPTESPGATVFFALHCRRGTKC

SEQ ID NO: 31019 - protein, 148 aa, Homo sapiens
VARTAQNERSSRSHSVFQLQISGEHSSRGLQCGAPLSLVDLAGSERLDPGLALGPGERERLRETQAINSSLSTLGLVIMALSNKESHVPYRNSKLTYLLQNSLGGSAKMLMFVNISPLEENVSESLNSLRFASKVNQCVIGTAQANRK

SEQ ID NO: 31020 - protein, 27 aa, Homo sapiens
VKWMKTTSRTNLILLDSMSRSLTIDKL

SEQ ID NO: 31021 - protein, 135 aa, Homo sapiens
LSALSLSSAMPDPAKSAPAPKKGSKKAVTKAQKKDGKKRKRSRKESYSIYVYKVLKQVHPDTGISSKAMGIMNSFVNDIFERIAGEASRLAHYNKRSTITSREIQTAVRLLLPGELAKHAVSEGTKAVTKYTSSK

SEQ ID NO: 31022 - protein, 7 aa, Homo sapiens
MVPFDLI

SEQ ID NO: 31023 - protein, 39 aa, Homo sapiens
LSPGQIKMTFSMHMQACHQEQSTEGQHSFCASSWLPSRS

SEQ ID NO: 31024 - protein, 794 aa, Homo sapiens
LESTMAEQVLPQALYLSNMRKAVKIRERTPEDIFKPTNGIIHHFKTMHRYTLEMFRTCQFCPQFREIIHKALIDRNIQATLESQKKLNWCREVRKLVALKTNGDGNCLMHATSQYMWGVQDTDLVLRKALFSTLKETDTRNFKFRWQLESLKSQEFVETGLCYDTRNWNDEWDNLIKMASTDTPMARSGLQYNSLEEIHIFVLCNILRRPIIVISDKMLRSLESGSNFAPLKVGGIYLPLHWPAQECYRYPIVLGYDSHHFVPLVTLKDSGPEIRAVPLVNRDRGRFEDLKVHFLTDPENEMKEKLLKEYLMVIEIPVQGWDHGTTHLINAAKLDEANLPKEINLVDDYFELVQHEYKKWQENSEQGRREGHAQNPMEPSVPQLSLMDVKCETPNCPFFMSVNTQPLCHECSERRQKNQNKLPKLNSKPGPEGLPGMALGASRGEAYEPLAWNPEESTGGPHSAPPTAPSPFLFSETTAMKCRSPGCPFTLNVQHNGFCERCHNARQLHASHAPDHTRHLDPGKCQACLQDVTRTFNGICSTCFKRTTAEASSSLSTSLPPSCHQRSKSDPSRLVRSPSPHSCHRAGNDAPAGCLSQAARTPGDRTGTSKCRKAGCVYFGTPENKGFCTLCFIEYRENKHFAAASGKVSPTASRFQNTIPCLGRECGTLGSTMFEGYCQKCFIEAQNQRFHEAKRTEEQLRSSQRRDVPRTTQSTSRPKCARASCKNILACRSEELCMECQHPNQRMGPGAHRGEPAPEDPPKQRCRAPACDHFGNAKCNGYCNECFQFKQMYG

SEQ ID NO: 31025 - protein, 143 aa, Homo sapiens
KLFCGFAMARTKQTARKSTGGKAPRKQLATKAARKSAPATGGVKKPHRYRPGTVALREIRRYQKSTELLIRKLPFQRLVREIAQDFKTDLRFQSSAVMALQEACEAYLVGLFEDTNLCAIHAKRVTIMPKDIQLARRIRGERA

SEQ ID NO: 31026 - protein, 48 aa, Homo sapiens
IKSIKLHQEGCPGNGHRRDQWDLMSKCSFVQQFGLYLTCPNIFRPDGN

SEQ ID NO: 31027 - protein, 42 aa, Homo sapiens
KDRQKFSEQVFKVASSDLVNMGISVVSYTLKDIHDDQVKLGN

SEQ ID NO: 31028 - protein, 26 aa, Homo sapiens
LYCSPRRLRVTTRPRASKTRTLILAF

SEQ ID NO: 31029 - protein, 43 aa, Homo sapiens
KGTLTYSRMRGMVAILIAFMKQRRMGLNDFIQKIANNSYACKQ

SEQ ID NO: 31030 - protein, 10 aa, Homo sapiens
KKAILKKKEV

SEQ ID NO: 31031 - protein, 204 aa, Homo sapiens
LQQAVQACIDCAHQQKLVFSLVKQGYGGEMVSVSASFDGKQHLRSLPVVNSIGYVLRFLAKLCRSLLCDDLFSHQPFPRGCSASEKVQEKEEGRMESVKTVTTEEYLVNPVGMNRYSVDTSASTFNHRGSLHPSSSLYCKRQNSGDSHLGGGPAATAGGPRTSPMSSGGPSAPGLRPPASSPKRNTTSLEGNRCGNVMHASASH

SEQ ID NO: 31032 - protein, 162 aa, Homo sapiens
LRSLPVVNSIGYVLRFLAKLCRSLLCDDLFSHQPFPRGCSASEKVQEKEEGRMESVKTVTTEEYLVNPVGMNRYSVDTSASTFNHRGSLHPSSSLYCKRQNSGDSHLGGGPAATAGGPRTSPMSSGGPSAPGLRPPASSPKRNTTSLEGNRCGNVMHASASH

SEQ ID NO: 31033 - protein, 467 aa, Homo sapiens
ITYLTHACMDLKLGDKRMVFDPWLIGPAFARGWWLLHEPPSDWLERLCQADLIYISHLHSDHLSYPTLKKLAGRRPDIPIYVGNTERPVFWNLNQSGVQLTNINVVPFGIWQQVDKNLRFMILMDGVHPEMDTCIIVEYKGHKILNIVDCTRPNGGRLPMKVALMMSDFAGGASGFPMTFSGGKFTEEWKAQFIKTERKKLLNYKARLVKNLQPRIYCPFAGYFVESHPSDKYIKETNTKNDPNELNNLIKKNSDVITWTPRPGATLDLGRMLKDRTDSKGIIEPPEGTKIYKDSWDFEPYLEILNAALGDEIFLHSSWIKEYFTWAGFKDYNLVVRMIETDEDFNPFPGGYDYLVDFLDLSFPKERPQREHPYEEIHSRVDVIRHVVKNGLLWDELYIGFQTRLQRDPDIYHHLFWNHFQIKLPLTPPNWKSFLMCCEQNGPVILQFSTERTNEPNRNKFSVENKA

SEQ ID NO: 31034 - protein, 58 aa, Homo sapiens
VWKNALECDISARMLKYRFPAGTMALSSVAQWSSSEDAKIHEKTSRTSGRIFNGKSLG

SEQ ID NO: 31035 - protein, 44 aa, Homo sapiens
VKLFLGTMWASMSRMCLSRMFVVATLLVTAKMTHQWKQLASLLR

SEQ ID NO: 31036 - protein, 7 aa, Homo sapiens
KASGDCL

SEQ ID NO: 31037 - protein, 287 aa, Homo sapiens
IPNTEKSYKCDVCGKIFHQSSALTRHQRIHTREKPYKCKECEKSFSQSSSLSRHKRIHTREKPYKCEASDKSCEASDKSCSPSSGIIQHKKIHTRAKSYKCSSCERVFSRSVHLTQHQKIHKEMPCKCTVCGSDFCHTSYLLEHQRVHHEEKAYEYDEYGLAYIKQQGIHFREKPYTCSECGKDFRLNSHLIQHQRIHTGEKAHECNECGKAFSQTSCLIQHHKMHRKEKSYECNEYEGSFSHSSDLILQQEVLTRQKAFDCDVWEKNSSQRAHLVQHQSIHTKENS

SEQ ID NO: 31038 - protein, 12 aa, Homo sapiens
IWSPLFKMQRKM

SEQ ID NO: 31039 - protein, 341 aa, Homo sapiens
VVRKCIKKDSGKEFAAKFMRKRRKGQDCRMEIIHEIAVLELAQDNPWVINLHEVYETASEMILVLEYAAGGEIFDQCVADREEAFKEKDVQRLMRQILEGVHFLHTRDVVHLDLKPQNILLTSESPLGDIKIVDFGLSRILKNSEELREIMGTPEYVAPEILSYDPISMATDMWSIGVLTYVMLTGISPFLGNDKQETFLNISQMNLSYSEEEFDVLSESAVDFIRTLLVKKPEDRATAEECLKHPWLTQSSIQEPSFRMEKALEEANALQEGHSVPEINSDTDKSETKESIVTEELIVVTSYTLGQCRQSEKEKMEQKAISKRFKFEEPLLQEIPGEFIY

SEQ ID NO: 31040 - protein, 45 aa, Homo sapiens
VCEGRFICKMGLRELRIKSAESSTSLWIKRDVWMKLQSQEEAREN

SEQ ID NO: 31041 - protein, 30 aa, Homo sapiens
LLQRRLENLENLLRNRNFWILRLPPGACGI

SEQ ID NO: 31042 - protein, 17 aa, Homo sapiens
IKVSLINKNKICLMYIM

SEQ ID NO: 31043 - protein, 34 aa, Homo sapiens
RIAQPGDHVSVTGIFLPILRTGFRQVVQVRKSLT

SEQ ID NO: 31044 - protein, 34 aa, Homo sapiens
VTHKQLTDFHKQVTSAEECKQVCWALRDFTRLFR

SEQ ID NO: 31045 - protein, 30 aa, Homo sapiens
KSQRVCRPRSIWRAKATLDMPDEEFRFNFF

SEQ ID NO: 31046 - protein, 78 aa, Homo sapiens
IHETLPIAAGGHFALELTTPEQGRDSPDAGRLFCPFGDTSPPLPGPASLKGSPCSCLDAGFFSGSGKPAASRDDAPQR

SEQ ID NO: 31047 - protein, 77 aa, Homo sapiens
IHETLPIAAGGHFALELTTPEQGRDSPDAGRLFCPFGDTSPPLPGPASLKGSPCSCLDAGFFSGSGKPASRDDAPQR

SEQ ID NO: 31048 - protein, 36 aa, Homo sapiens
KPVTVACACTPATREDRLSPVKLQRAVRMPPHSGLG

SEQ ID NO: 31049 - protein, 596 aa, Homo sapiens
LGHGADTQSSESPSVFSSLSSPIAAPISTSTPIESWPLVDRGQAKSEGPPLLPKAELQTESLTPVPNSGSSALGSLFKQPSFPANKGTEDSLMGRTRETGTEKNTSSLELEESLPEQPETGRQEEELPRFPCKKQDYSPSSGEAQEVPFALSLSSDGAVSPVGELAAGGDRDLESQAGSLVESKARDAAEEVAPPLPMGASVPSIDSMMRKLEEMGLNLRKDQKKTKKRVSFSEQLFTEEAVAGAALLVEGHSSCPQELNPAWSVAGNASDGEPPESPHAEDSERESVTTPGPATCGAPASPADHLLLPSQEESFSEVPMSEASSAKDTPLFRMEGEDALVTQYQSKASDHEGLLSDPLSDLQLVSDFKSPIMADLNLSLPSIPEVASDDERIDQVEDDGDQVEDDGETAKSSTLDIGALSLGLVVPCPERGKGPSGEADRLVLGEGLCDFRLQAPQASVTAPSEQTTEFGIHKPHLGKSSSLDKQLPGPSGGEEEKPMGNGSPSPPPGTSLDNPVPSPSPSEIFPVTHSFPSSAHSDTHHTSTAESQKKATAEGSAGRVENFGKRKPLLQAWVSPSETHPVSAQPGAGTGSAKHR

SEQ ID NO: 31050 - protein, 125 aa, Homo sapiens
IDLFGSDNEEEDKEAAQLREERLRQYAEKKAKKPALVAKSSILLDVKPWDDETDMAQLEACVRSIQLDGLVWGASKLVPVGYGIRKLQIQCVVEDDKVGTDLLEEEITKFEEHVQSVDIAAFNKI

SEQ ID NO: 31051 - protein, 19 aa, Homo sapiens
LRCGMQHFGRKIEDVFKKT

SEQ ID NO: 31052 - protein, 23 aa, Homo sapiens
LLRYLKCGMQHFGRKIEDVFKKT

SEQ ID NO: 31053 - protein, 38 aa, Homo sapiens
IFALEEQFILSQVALLEQVNALVPMLDSAHIKGISLGL

SEQ ID NO: 31054 - protein, 9 aa, Homo sapiens
RREGYSWTD

SEQ ID NO: 31055 - protein, 7 aa, Homo sapiens
TASPAAT

SEQ ID NO: 31056 - protein, 49 aa, Homo sapiens
MCVALILNFGGILLCEADRHCKGPRVACLSLEMELNQIKSFHWRLVLTL

SEQ ID NO: 31057 - protein, 90 aa, Homo sapiens
ITATVPRRWFCPDVSWNNAEDCLSGSRPIQFTSSRKYLTPALDPAALLRAEEGGNPMCLLPELPQPIFPQLGTWKKEPRTRLCFSFGPSW

SEQ ID NO: 31058 - protein, 73 aa, Homo sapiens
LTEQVVRRRLLLLSALRYPGDPRRDSASERLRTPVQRSLARRIAESSPLFTTWSRFILPYPVFGFLSSPSSLC

SEQ ID NO: 31059 - protein, 470 aa, Homo sapiens
LATISEMSSRSTKDLIKSKWGSKPSNSKSETTLEKLKGEIAHLKTSVDEITSGKGKLTDKERHRLLEKIRVLEAEKEKNAYQLTEKDKEIQRLRDQLKARYSTTTLLEQLEETTREGERREQVLKALSEEKDVLKQQLSAATSRIAELESKTNTLRLSQTVAPNCFNSSINNIHEMEIQLKDALEKNQQWLVYDQQREVYVKGLLAKIFELEKKTETAAHSLPQQTKKPESEGYLQEEKQKCYNDLLASAKKDLEVERQTITQLSFELSEFRRKYEETQKEVHNLNQLLYSQRRADVQHLEDDRHKTEKIQKLREENDIARGKLEEEKKRSEELLSQVQFLYTSLLKQQEEQTRVALLEQQMQACTLDFENEKLDRQHVQHQLHVILKELRKARNQITQLESLKQLHEFAITEPLVTFQGETENREKVAASPKSPTAALNESLVECPKCNIQYPATEHRDLLVHVEYCSK

SEQ ID NO: 31060 - protein, 29 aa, Homo sapiens
VSWRLDHSRRSKGAAMMLAVATVDFSQEH

SEQ ID NO: 31061 - protein, 25 aa, Homo sapiens
LDHSRRSKGAAMMLAVATVDFSQEH

SEQ ID NO: 31062 - protein, 31 aa, Homo sapiens
MLISNEDSCLKIFFNLMVSIFCKNHVNLFHS

SEQ ID NO: 31063 - protein, 9 aa, Homo sapiens
MKKMLGLRK

SEQ ID NO: 31064 - protein, 14 aa, Homo sapiens
KAVGLQPAGDVNLP

SEQ ID NO: 31065 - protein, 21 aa, Homo sapiens
TTKDTSSRLLPVKTWPKCTTS

SEQ ID NO: 31066 - protein, 8 aa, Homo sapiens
MTSFVRNI

SEQ ID NO: 31067 - protein, 75 aa, Homo sapiens
ICLQVEELIFVQTSTFHQCCQHVLLVWKENAVETNFVDRETVGTALQSILTAHLRILTIRTHISLQEASWPSQTT

SEQ ID NO: 31068 - protein, 13 aa, Homo sapiens
LPISTEVRLGQSL

SEQ ID NO: 31069 - protein, 100 aa, Homo sapiens
LLLIFCGYFSDFPQKPTDPGGSHPIRPPIMEESITFYLPNILKMLEDPYAAWRLLFLGTQVSSLYCYNFFSRTAVFFACTNGTSSSAGYFSTAGVWREEG

SEQ ID NO: 31070 - protein, 111 aa, Homo sapiens
KDIKILQKSRPPQVEPRPRCAPRAAGGWCCRCCSWPRQPWPKATPRGSRRARPPAISWRTSNGCRPSRSTAARSSTGTASETKWRMTISRAGRTISKEMKPWIPPRTPARR

SEQ ID NO: 31071 - protein, 64 aa, Homo sapiens
MTSWASRGTLEAVSAGRMRRRRRRRKQARRPRRRRARQARLTTGATSGRRPQEPAAGGDSTAEL

SEQ ID NO: 31072 - protein, 740 aa, Homo sapiens
ILFELIMNSMKTEENKSFSAMEDDQRTRPEVSKDTVMKQTHADTPVDHCLSGIRKCSSTFKLKSEVNKHETALEMQNPNLNNKECCFTFTLNGNSRKLDRSVFTAYGKPSESIYSALSANDYFSERIKNQFNKNIIVYEEKTIDGHINLGMPLKCLPSDSHFKITFGQRKSSKEDGHILRQCENPNMECILFHVVAIGRTRKKIVKINELHEKGSKLCIYALKGETIEGALCKDGRFRSDIGEFEWKLKEGHKKIYGKQSMVDEVSGKVLEMDISKKKALQQKDIHKKIKQNESATDEINHQSLIQSKKKVHKPKKDGETKDVEHSREQILPPQDLSHYIKDKTRQTIPRIRNYYFCSLPRKYRQINSQVRRRPHLGRRYAINLDVQKEAINLLKNYQTLNEAIMHQYPNFKEEAQWVRKYFREEQKRMNLSPAKQFNIYKKDFGKMTANSVSVATCEQLTYYSKSVGFMQWDNNGNTGNATCFVFNGGYIFTCRHVVHLMVGKNTHPSLWPDIISKCAKVTFTYTEFCPTPDNWFSIEPWLKVSNENLDYAILKLKENGNAFPPGLWRQISPQPSTGLIYLIGHPEGQIKKIDGCTVIPLNERLKKYPNDCQDGLVDLYDTTSNVYCMFTQRSFLSEVWNTHTLSYDTCFSDGSSGSPVFNASGKLVALHTFGLFYQRGFNVHALIEFGYSMDSILCDIKKTNESLYKSLNDEKLETYDEEKGKQESSLQDHQIEPMEC

SEQ ID NO: 31073 - protein, 22 aa, Homo sapiens
IDGAYVQAPVHRKEQNRHSSWS

SEQ ID NO: 31074 - protein, 82 aa, Homo sapiens
LPAGPGVGSLLSNQGSASSSSTVQCRRRKSACDPTPEEVQLRVVRRNCSQLLWQLQNIQETVVALYFQRTDDSLGLGLKTMV

SEQ ID NO: 31075 - protein, 35 aa, Homo sapiens
IFKEMTDGCLSTTDLFWTVKTKSLMYCSWETPWCS

SEQ ID NO: 31076 - protein, 979 aa, Homo sapiens
ITYTDYWDSRLQTQESQMLGSMARKKPRNTSRLPLALNPLKSKDVLAVLAERNEAIVPVGAWVEPASPGSSEIPAYTSAYLIEEELKEQLRKKQEALKHFQKQVKYRVNQQIRLRKKQQLQKSYERAQKEGSIAMQSSATHLTSKRTSVFPNNLNVAIGSSRLPPSLMPGDGIEDEENQNELFQQQAQALSETMKQARHRLASFKTVIKKKGSVFPDDGRKSFLTREEVLSRKPASTGINTGIRGELPIKVHQGLLAAVPYQNYMENQELDYEEPDYEESSSLVTDEKGKEDLFGRGQQDQQAIHSEDKNKPFSRVQKVKFKNPLFVLMEEEEQKQLHFEGLQDILPEAQDYFLEAQGDLLETQGDLTGIQSVKPDTQAVEMKVQVTEPEGQAIEPEGQPIKTETQGIMLKAQSIELEEGSIVLKTQDFLPTNQALLTKNQDVLLKDHCVLPKDQSILLKYQDQDFLPRDQHVLHKDQDILPKYQDQNFLPKDQNFLSRDQHVLPKDQDILPKYQDQNFLPKDQNFLSRDQHVLPKDQNILPKYQGQDFLPKDQDFLSRDQHVLPKDWNILPKCQDQDFLPRDQGVLPKDQNILPICQDQDFLPRDQGYLPKDQNILPICQDRDFLPRDLHVLSNDQNILPKCQDQDFLPKYQKVHFKEPYSDMTDEKGREDFSLADYQCLPPKSQDQDDIKNQQPASFMREERVREELPLDYHQYVVPKIQDQDSPREQNKHIKLPSSFEKWEIARGNTPGVPLAYDRYQSGLSTEFQAPLAFQSDVDKEEDKKERQKQYLRHRRLFMDIEREQVKEQQRQKEQKKKIEKIKKKREQECYAAEQRILRMNFHEDPYSGEKLSEILAQLQLQEIKGTREKQQREKEYLSSLCLIILYLYRYVEALRAQIQEKMQLYNITLPPLCCCGPDFWDAHPDTCANNCIFYKNHRAYTRALHSFINSCDVPGGNSTLRVAIHNFASAHRRTLKNL

SEQ ID NO: 31077 - protein, 43 aa, Homo sapiens
RPRRANPKGLRGQAVTGSMCGILGGSAADLAKWTGLLRRLCRW

SEQ ID NO: 31078 - protein, 45 aa, Homo sapiens
LARTPSGTGAAFILGRVFPVEAEKYSTVQLWFIFSHLRRTSEELE

SEQ ID NO: 31079 - protein, 292 aa, Homo sapiens
KETQQSSSENSYFCSTKFSYIPLASCHFPIDQLQLSKPAVQELKCIEELLSQTTNPDRFSLLRHRIINFFHRFGSHVNQGPLHLGGIYWWKAISEGYCTEQLAEVRQQSAEALDIFIRDSYSGFGVKVAAGVNVSDSHSKTATQTKTSQNLQTKVQLSVAQTGGPPEADGLVQWKAGLIASNQTWCVIDRGLQLVPVWDIILSSHRSNFKDPLQVANFLKDSYTALTSITAQIQNGEELLSAGKEARVFLEDVKSWEVSDPEEQLKKLINFMKMLSQKLKSYDTWINICLTD

SEQ ID NO: 31080 - protein, 101 aa, Homo sapiens [sequence omitted]

SEQ ID NO: 31081 - protein, 89 aa, Homo sapiens
LDSEIKIMKSEVLRVTHELQAMKDKIKENSEKIKVNKTLPYLVSNVIELLDVDPNDQEEDGANIDLDSQRKGKCAVIKTSTRQVSVAQQ

SEQ ID NO: 31082 - protein, 49 aa, Homo sapiens
KGLSQSALPYRRSVPTWLKLTSDDVKEQIYKLAKKGLTPSQIGECLCLT

SEQ ID NO: 31083 - protein, 12 aa, Homo sapiens
LFWFRKINIPLS

SEQ ID NO: 31084 - protein, 160 aa, Homo sapiens
TEISQGAFSNPNAAAQVLPALMGKTFLDINKDSSCVSASGNFNISADEPITVTPPDSQSYISVNYSVRINETYFTNVTVLNGSVFLSVMEKAQKMNDTIFGFTMEERSWGPYITCIQGLCANNNDRTYWELLSGGEPLSQGAGSYVVRNGENLEVRWSKY

SEQ ID NO: 31085 - protein, 153 aa, Homo sapiens
KNGALAGSEGLVAGWLRVANMQLFVRAQELHTFEVTGQETVAQIKAHVASLEGIAPEDQVVLLAGAPLEDEATLGQCGVEALTTLEVAGRMLGGKVHGSLARAGKVRGQTPKVAKQEKKKKKTGRAKRRMQYNRRFVNVVPTFGKKKGPNANS

SEQ ID NO: 31086 - protein, 21 aa, Homo sapiens
RAPMPTLKSFVILAFSNKKAT

SEQ ID NO: 31087 - protein, 106 aa, Homo sapiens
KMKQLFSILEELAMVTSLRPPVQANPDLLSLLTVSLDQYQTEDELYQLSLQREPRSKSSPTSPTSCTPPPRPPVLEEWTSAAKPKLDQALVVEHIEKMVEVSSCGA

SEQ ID NO: 31088 - protein, 80 aa, Homo sapiens
LQNQRGGRIFLQDIKKPDCDDWESGLNAMECALHLEKNVNQSLLELHKLATDKNDPHVSIGTPGNKWRKSFALGIGKAAH

SEQ ID NO: 31089 - protein, 54 aa, Homo sapiens
MAWISVPTRPNCFKMRYPSLTFSFLSTCHLTQDCALTLLLQLPLPGLLVLALWQ

SEQ ID NO: 31090 - protein, 32 aa, Homo sapiens
VCIQKKKICTMYFKTCVHKTEDFLFYLVQMPS

SEQ ID NO: 31091 - protein, 21 aa, Homo sapiens
LDGFFCLQLFTHSKYFARYRK

SEQ ID NO: 31092 - protein, 35 aa, Homo sapiens
ISTRSTNRRARPTASARLAPATCPSTPRSPSSSSA

SEQ ID NO: 31093 - protein, 23 aa, Homo sapiens
RSRRAEQSRCVTSPKTRPQVGYL

SEQ ID NO: 31094 - protein, 123 aa, Homo sapiens
RGRPIVSASASLTIFPAMFNPEERSCSLEGNPVACINLSFCLNASGKHVADSIGFTVELQLDWQKQKGGVRRALFLASRQATLTQTLLIQNGAREDCREMKIYLRVWPRGRGVDWPGRVATQN

SEQ ID NO: 31095 - protein, 52 aa, Homo sapiens
VPAEKGRRQQRGCRGNLQVPDHVSVGSGLQDAPRKSAAALCRLSPTPAASSG

SEQ ID NO: 31096 - protein, 34 aa, Homo sapiens
IAISRAVNSPQRSRLFAYPTLESLQKWKEQNVRV

SEQ ID NO: 31097 - protein, 44 aa, Homo sapiens
VQQQLDVTPKENGFAGKEYTKLMSKIMGKIENNIIKCKTSKVLF

SEQ ID NO: 31098 - protein, 35 aa, Homo sapiens
ILLKERVRKKERNTNYPFLLALQHVMLPEFQLQLN

SEQ ID NO: 31099 - protein, 9 aa, Homo sapiens
RPSRNRSRR

SEQ ID NO: 31100 - protein, 26 aa, Homo sapiens
KAALHDPGFPSYCQVSASPSQSNQDK

SEQ ID NO: 31101 - protein, 32 aa, Homo sapiens
LSLEISSVKAKHLILQETLKWIWKLGSQLGSS

SEQ ID NO: 31102 - protein, 38 aa, Homo sapiens
ITGNLEVDMEAWQPAWIFLRASFLHTIFRLLFRDILST

SEQ ID NO: 31103 - protein, 90 aa, Homo sapiens
VSTTPYLQSVKKKVQFDGTNSAFKELKFLTPVRRSRRLQEKTSKLPDMLKDHYPCVSSLEQLTELGRETDAFVCRPNAALCRVYYEADTT

SEQ ID NO: 31104 - protein, 28 aa, Homo sapiens
RPRRTSPRAARRRSSSPPTPSRWTASFT

SEQ ID NO: 31105 - protein, 111 aa, Homo sapiens
LDSGTVACLNDSNRLMAPESIKPLTTSKSDLEAKEGEVLDELSLLGRASQLETVTRSRNSLPNQVAFPEGEEQDAVSGGKFSSTLYETGGCDMSLVNFEPAARRASNIWYV

SEQ ID NO: 31106 - protein, 27 aa, Homo sapiens
KEQTPGLTFHLIFGARTSREIHVQAAF

SEQ ID NO: 31107 - protein, 10 aa, Homo sapiens
ILTALQRETE

SEQ ID NO: 31108 - protein, 1074 aa, Homo sapiens
KAYSCALKSGKLVTAVSNNTIQVHTFPEGVPDGILTRFTTNANHVVFNGDGTKIAAGSSDFLVKIVDVMDSSQQKTFRGHDAPVLSLSFDPKDIFLASASCDGSVRVWQISDQTCAISWPLLQKCNDVINAKSICRLAWQPKSGKLLAIPVEKSVKLYRRESWSHQFDLSDNFISQTLNIVTWSPCGQYLAAGSINGLIIVWNVETKDCMERVKHEKGYAICGLAWHPTCGRISYTDAEGNLGLLENVCDPSGKTSSSKVSSRVEKDYNDLFDGDDMSNAGDFLNDNAVEIPSFSKGIINDDEDDEDLMMASGRPRQRSHILEDDENSVDISMLKTGSSLLKEEEEDGQEGSIHNLPLVTSQRPFYDGPMPTPRQKPFQSGSTPLHLTHRFMVWNSIGIIRCYNDEQDNAIDVEFHDTSIHHATHLSNTLNYTIADLSHEAILLACESTDELASKLHCLHFSSWDSSKEWIIDLPQNEDIEAICLGQGWAAAATSALLLRLFTIGGVQKEVFSLAGPVVSMAGHGEQLFIVYHRGTGFDGDQCLGVQLLELGKKKKQILHGDPLPLTRKSYLAWIGFSAEGTPCYVDSEGIVRMLNRGLGNTWTPICNTREHCKGKSDHYWVVGIHENPQQLRCIPCKGSRFPPTLPRPAVAILSFKLPYCQIATEKGQMEEQFWRSVIFHNHLDYLAKNGYEYEESTKNQATKEQQELLMKMLALSCKLEREFRCVELADLMTQNAVNLAIKYASRSRKLILAQKLSELAVEKAAELTATQVEEEEEEEDFRKKLNAGYSNTATEWSQPRFRNQVEEDAEDSGEADDEEKPEIHKPGQNSFSKSTNSSDVSAKSGAVTFSSQGRVNPFKVSASSKEPAMSMNSARSTNILDNMGKSSKKSTALSRTTNNEKSPIIKPLIPKPKPKQASAASYFQKRNSQTNKTEEVKEENLKNVLSETPAICPPQNTENQRPKTGFQMWLEENRSNILSDNPDFSDEADIIKEGMIRFRVLSTEERKVWANKAKGETASEGTEAKKRKRVVDESDETENQEEKAKENLNLSKKQKPLDFSTNQKLSAFAFKQE

SEQ ID NO: 31109 - protein, 40 aa, Homo sapiens
IIFSRMKPWQPKQDSLANHDREVLMDELLMKDCQQLLYWK

SEQ ID NO: 31110 - protein, 47 aa, Homo sapiens
RRGTRPFRGTPGRGHLLMKFPVPVSAAVELPWQCDSLIPGKSEEQAT

SEQ ID NO: 31111 - protein, 14 aa, Homo sapiens
ISTKWLRMLWFQSL

SEQ ID NO: 31112 - protein, 73 aa, Homo sapiens
RPSLHPATSTASGSASPTLARAMASVSELACIYSALILHDDEVTVTEDKINALIKAAGVNVEPFWPGLFAKVR

SEQ ID NO: 31113 - protein, 56 aa, Homo sapiens
LQAAVRTDGFDEFKVRLQDLSSCITQGKDAAVSKKASPEAASTPRDPIDVDLVRWV

SEQ ID NO: 31114 - protein, 34 aa, Homo sapiens
ICRGVYLLGVQRHQRLGPHSSRLHFSTSFEERAS

SEQ ID NO: 31115 - protein, 11 aa, Homo sapiens
LGKSVFYIAKI

SEQ ID NO: 31116 - protein, 52 aa, Homo sapiens
RLLLVLRSRRSLWWEKRQQLPRNQPLKRSLQRRNLLQRRRSLLHKLLNLIIP

SEQ ID NO: 31117 - protein, 26 aa, Homo sapiens
KHIARWTCTWCGRQTDWGSQQLVFAG

SEQ ID NO: 31118 - protein, 101 aa, Homo sapiens
LPSPRNMHAHSASLWVAFFYRSPFLFFTTGPPPPTSSSPAGLPLLESTVDASRPNWLPLLLSPPLPFLSIECTLYNFSGIVIENKIFTIITGFFQVTSCRL

SEQ ID NO: 31119 - protein, 18 aa, Homo sapiens
ISTPSFSLQAFLDSVLLV

SEQ ID NO: 31120 - protein, 26 aa, Homo sapiens
ITPDKIQFERNFDRQKSKRHFSWGGK

SEQ ID NO: 31121 - protein, 55 aa, Homo sapiens
KIEGFLDIMEIKEIRPGKNSKDFERAKAVRQKEDCCFTILYGTQFVLSTLSLAVG

SEQ ID NO: 31122 - protein, 43 aa, Homo sapiens
RTCTHPPQGPTLPSRLRSGWGVGMLGPSSSPSRMATYPQRAGS

SEQ ID NO: 31123 - protein, 82 aa, Homo sapiens
IAPRPASGPIRPIVRCPTVRYHTKVRAGRGFSLEELRVSTGSAAVSGRPRSPLCWPQSRDDILRNRCTALMKAHLNPFPSDC

SEQ ID NO: 31124 - protein, 14 aa, Homo sapiens
RMHLFSPQSDWNIG

SEQ ID NO: 31125 - protein, 37 aa, Homo sapiens
RDALERPLPSATVFLCQLVGEGRKAAGRGARAGETLF

SEQ ID NO: 31126 - protein, 27 aa, Homo sapiens
RPPSLAVPGAASRPGRTVDNGRLSPIH

SEQ ID NO: 31127 - protein, 40 aa, Homo sapiens
LWLWPLCCGERPRPGGSFERPRTTMPAWTLQTFQLCLGLP

SEQ ID NO: 31128 - protein, 43 aa, Homo sapiens
KWSHEYQEATIEKIIRFLQGRSSRDSSAGSDTSLEGAAPMGPT

SEQ ID NO: 31129 - protein, 352 aa, Homo sapiens
KYVRPFLNSISKAKAARLVRSLLDLFLDMEAATGQEVELCLECIEWAKSEKRTFLRQALEARLVSLYFDTKRYQEALHLGSQLLRELKKMDDKALLVEVQLLESKTYHALSNLPKARAALTSARTTANAIYCPPKLQATLDMQSGIIHAAEEKDWKTAYSYFYEAFEGYDSIDSPKAITSLKYMLLCKIMLNTPEDVQALVSGKLALRYAGRQTEALKCVAQASKNRSLADFEKALTDYRAELRDDPIISTHLAKLYDNLLEQNLIRVIEPFSRVQIEHISSLIKLSKADVERKLSQMILDKKFHGILDQGEGVLIIFDEPPVDKTYEAALETIQNMSKVVDSLYNKAKKLT

SEQ ID NO: 31130 - protein, 6 aa, Homo sapiens
RNSSLS

SEQ ID NO: 31131 - protein, 39 aa, Homo sapiens
MTSSLPWKFHSLSCAPTFVLGLRVPIKRDSQLSISTGHS

SEQ ID NO: 31132 - protein, 16 aa, Homo sapiens
ISSILRTPLRSSCLFS

SEQ ID NO: 31133 - protein, 21 aa, Homo sapiens
ISFSSKSSSSSNSSSSWPPRS

SEQ ID NO: 31134 - protein, 150 aa, Homo sapiens
LKTFFSCHKEFQTVPFYIFSESYGGKMAAGIGLELYKAIQRGTIKCNFAGVALGDSWISPVDSVLSWGPYLYSMSLLEDKGLAEVSKVAEQVLNAVNKGLYREATELWGKAEMIIEQNTDGVNFYNILTKSTPTSTMESSLEFTQSHLGE

SEQ ID NO: 31135 - protein, 71 aa, Homo sapiens
LANTYPLHSFLSPCFGLVFWNERSLLFYKPLCISNVVSFRFLLDMLLKRELRVWTDCGTQTHTKTCLFSHP

SEQ ID NO: 31136 - protein, 44 aa, Homo sapiens
LLHICFLFQHGDMDQKERDVIMREFRSGSSRVLITTDLLVSRGN

SEQ ID NO: 31137 - protein, 390 aa, Homo sapiens
KMSLRIDVDTNFPECVVDAGKVTLGTQQRQEMDPRLREKQNEIILRAVCALLNSGGGIIKAEIENKGYNYERHGVGLDVPPIFRSHLDKMQKENHFLIFVKSWNTEAGVPLATLCSNLYHRERTSTDVMDSQEALAFLKCRTQTPTNINVSNSLGPQAAQGSVQYEGNINVSAAALFDRKRLQYLEKLNLPESTHVEFVMFSTDVSHCVKDRLPKCVSAFANTEGGYVFFGVHDETCQVIGCEKEKIDLTSLRASIDGCIKKLPVHHFCTQRPEIKYVLNFLEVHDKGALRGYVCAIKVEKFCCAVFAKVPSSWQVKDNRVRQLPTREWTAWMMEADPDLSRCPEMVLQLSLSSATPRSKPVCIHKNSECLKEQQKRYFPVSARKTSASQ

SEQ ID NO: 31138 - protein, 830 aa, Homo sapiens
IENKGYNYERHGVGLDVPPIFRSHLDKMQKENHFLIFVKSWNTEAGVPLATLCSNLYHRERTSTDVMDSQEALAFLKCRTQTPTNINVSNSLGPQAAQGSVQYEGNINVSAAALFDRKRLQYLEKLNLPESTHVEFVMFSTDVSHCVKDRLPKCVSAFANTEGGYVFFGVHDETCQVIGCEKEKIDLTSLRASIDGCIKKLPVHHFCTQRPEIKYVLNFLEVHDKGALRGYVCAIKVEKFCCAVFAKVPSSWQVKDNRVRQLPTREWTAWMMEADPDLSRCPEMVLQLSLSSATPRSKPVCIHKNSECLKEQQKRYFPVFSDRVVYTPESLYKELFSQHKGLRDLINTEMRPFSQGILIFSQSWAVDLGLQEKQGVICDALLISQNNTPILYTIFSKWDAGCKGYSMIVAYSLKQKLVNKGGYTGRLCITPLVCVLNSDRKAQSVYSSYLQIYPESYNFMTPQHMEALLQSLVIVLLGFKSFLSEELGSEVLNLLTNKQYELLSKNLRKTRELFVHGLPGSGKTILALRIMEKIRNVFHCEPANILYICENQPLKKLVSFSKKNICQPVTRKTFMKNNFEHIQHIIIDDAQNFRTEDGDWYGKAKFITQTARDGPGVLWIFLDYFQTYHLSCSGLPPPSDQYPREEINRVVRNAGPIANYLQQVMQEARQNPPPNLPPGSLVMLYEPKWAQGVPGNLEIIEDLNLEEILIYVANKCRFLLRNGYSPKDIAVLFTKASEVEKYKDRLLTAMRKRKLSQLHEESDLLLQIGDASDVLTDHIVLDSVCRFSGLERNIVFGINPGVAPPAGAYNLLLCLASRAKRHLYILKASV

SEQ ID NO: 31139 - protein, 19 aa, Homo sapiens
LELSLLEDPWKSMESADLG

SEQ ID NO: 31140 - protein, 27 aa, Homo sapiens
RAAGAQAPTPAQRGRKGPPPAQRAQRP

SEQ ID NO: 31141 - protein, 28 aa, Homo sapiens
IRQPNSGPYKKQAFPMISKRPEHLRMNL

SEQ ID NO: 31142 - protein, 30 aa, Homo sapiens
RRLHHGTRRPRWTSATWGLTPSWSRCAGRP

SEQ ID NO: 31143 - protein, 43 aa, Homo sapiens
TRNTCRRRSTSTARSASRTPASTAASTSSPPPATPSGPWTSSL

SEQ ID NO: 31144 - protein, 18 aa, Homo sapiens
ILLLSSLGQTSEDFSDGS

SEQ ID NO: 31145 - protein, 976 aa, Homo sapiens
KELQHENIVALYDVQELPNSVFLVMEYCNGGDLADYLQAKGTLSEDTIRVFLHQIAAAMRILHSKGIIHRDLKPQNILLSYANRRKSSVSGIRIKIADFGFARYLHSNMMAATLCGSPMYMAPEVIMSQHYDAKADLWSIGTVIYQCLVGKPPFQANSPQDLRMFYEKNRSLMPSIPRETSPYLANLLLGLLQRNQKDRMDFEAFFSHPFLEQGPVKKSCPVPVPMYSGSVSGSSCGSSPSCRFASPPSLPDMQHIQEENLSSPPLGPPNYLQVSKDSASTSSKNSSCDTDDFVLVPHNISSDHSCDMPVGTAGRRASNEFLVCGGQCQPTVSPHSETAPIPVPTQIRNYQRIEQNLTSTASSGTNVHGSPRSAVVRRSNTSPMGFLRPGSCSPVPADTAQTVGRRLSTGSSRPYSPSPLVGTIPEQFSQCCCGHPQGHDSRSRNSSGSPVPQAQSPQSLLSGARLQSAPTLTDIYQNKQKLRKQHSDPVCPSHTGAGYSYSPQPSRPGSLGTSPTKHLGSSPRSSDWFFKTPLPTIIGSPTKTTAPFKIPKTQASSNLLALVTRHGPAEEQSKDGNEPRECAHCLLVQGSERQRAEQQSKAVFGRSVSTGKLSDQQGKTPICRHQGSTDSLNTERPMDIAPAGACGGVLAPPAGTAASSKAVLFTVGSPPHSAAAPTCTHMFLRTRTTSVGPSNSGGSLCAMSGRVCVGSPPGPGFGSSPPGAEAAPSLRYVPYGASPPSLEGLITFEAPELPEETLMEREHTDTLRHLNVMLMFTECVLDLTAMRGGNPELCTSAVSLYQIQESVVVDQISQLSKDWGRVEQLVLYMKAAQLLAASLHLAKAQIKSGKLSPSTAVKQVVKNLNERYKFCITMCKKLTEKLNRFFSDKQRFIDEINSVTAEKLIYNCAVEMVQSAALDEMFQQTEDIVYRYHKAALLLEGLSRILQDPADIENVHKYKCSIERRLSALCHSTATV

SEQ ID NO: 31146 - protein, 24 aa, Homo sapiens
VTSTATSSMDWLLPNSHTVGLFLT

SEQ ID NO: 31147 - protein, 17 aa, Homo sapiens
LTTLRRAASAPSPVSSS

SEQ ID NO: 31148 - protein, 31 aa, Homo sapiens
LSLGNMRVTSTATSSMDWLLPNSHTVGLFLT

SEQ ID NO: 31149 - protein, 19 aa, Homo sapiens
IRFANHSVNPNCYAKGESQ

SEQ ID NO: 31150 - protein, 19 aa, Homo sapiens
MTLFSLYVNIYKMATDSQF

SEQ ID NO: 31151 - protein, 45 aa, Homo sapiens
IEKKRIRKGRVEYLVKWRGWSPKYNTWEPEENILDPRLLIAFQNR

SEQ ID NO: 31152 - protein, 64 aa, Homo sapiens
LLGNFVRSAWPSLRLYDLELDPTALEEEEKQSLLVKELQSLAVAQRDHMLRGMPLSLAEKRSLR

SEQ ID NO: 31153 - protein, 12 aa, Homo sapiens
IEEESLEQATGY

SEQ ID NO: 31154 - protein, 1864 aa, Homo sapiens
ILECPICLELIKEPVSTKCDHIFCKFCMLKLLNQKKGPSQCPLCKNDITKRSLQESTRFSQLVEELLKIICAFQLDTGLEYANSYNFAKKENNSPEHLKDEVSIIQSMGYRNRAKRLLQSEPENPSLQETSLSVQLSNLGTVRTLRTKQRIQPQKTSVYIELGSDSSEDTVNKATYCSVGDQELLQITPQGTRDEISLDSAKKAACEFSETDVTNTEHHQPSNNDLNTTEKRAAERHPEKYQGSSVSNLHVEPCGTNTHASSLQHENSSLLLTKDRMNVEKAEFCNKSKQPGLARSQHNRWAGSKETCNDRRTPSTEKKVDLNADPLCERKEWNKQKLPCSENPRDTEDVPWITLNSSIQKVNEWFSRSDELLGSDDSHDGESESNAKVADVLDVLNEVDEYSGSSEKIDLLASDPHEALICKSERVHSKSVESNIEDKIFGKTYRKKASLPNLSHVTENLIIGAFVTEPQIIQERPLTNKLKRKRRPTSGLHPEDFIKKADLAVQKTPEMINQGTNQTEQNGQVMNITNSGHENKTKGDSIQNEKNPNPIESLEKESAFKTKAEPISSSISNMELELNIHNSKAPKKNRLRRKSSTRHIHALELVVSRNLSPPNCTELQIDSCSSSEEIKKKKYNQMPVRHSRNLQLMEGKEPATGAKKSNKPNEQTSKRHDSDTFPELKLTNAPGSFTKCSNTSELKEFVNPSLPREEKEEKLETVKVSNNAEDPKDLMLSGERVLQTERSVESSSISLVPGTDYGTQESISLLEVSTLGKAKTEPNKCVSQCAAFENPKGLIHGCSKDNRNDTEGFKYPLGHEVNHSRETSIEMEESELDAQYLQNTFKVSKRQSFAPFSNPGNAEEECATFSAHSGSLKKQSPKVTFECEQKEENQGKNESNIKPVQTVNITAGFPVVGQKDKPVDNAKCSIKGGSRFCLSSQFRGNETGLITPNKHGLLQNPYRIPPLFPIKSFVKTKCKKNLLEENFEEHSMSPEREMGNENIPSTVSTISRNNIRENVFKEASSSNINEVGSSTNEVGSSINEIGSSDENIQAELGRNRGPKLNAMLRLGVLQPEVYKQSLPGSNCKHPEIKKQEYEEVVQTVNTDFSPYLISDNLEQPMGSSHASQVCSETPDDLLDDGEIKEDTSFAENDIKESSAVFSKSVQKGELSRSPSPFTHTHLAQGYRRGAKKLESSEENLSSEDEELPCFQHLLFGKVNNIPSQSTRHSTVATECLSKNTEENLLSLKNSLNDCSNQVILAKASQEHHLSEETKCSASLFSSQCSELEDLTANTNTQDPFLIGSSKQMRHQSESQGVGLSDKELVSDDEERGTGLEENNQEEQSMDSNLGEAASGCESETSVSEDCSGLSSQSDILTTQQRDTMQHNLIKLQQEMAELEAVLEQHGSQPSNSYPSIISDSSALEDLRNPEQSTSEKDSHIHGQRNNSMFSKRPREHISVLTSQKSSEYPISQNPEGLSADKFEVSADSSTSKNKEPGVERSSPSKCPSLDDRWYMHSCSGSLQNRNYPSQEELIKVVDVEEQQLEESGPHDLTETSYLPRQDLEGTPYLESGISLFSDDPESDPSEDRAPESARVGNIPSSTSALKVPQLKVAESAQSPAAAHTTDTAGYNAMEESVSREKPELTASTERVNKRMSMVVSGLTPEEFMLVYKFARKHHITLTNLITEETTHVVMKTDAEFVCERTLKYFLGIAGGKWVVSYFWVTQSIKERKMLNEHDFEVRGDVVNGRNHQGPKRARESQDRKIFRGLEICCYGPFTNMPTDQLEWMVQLCGASVVKELSSFTLGTGVHPIVVVQPDAWTEDNGFHAIGQMCEAPVVTREWVLDSVALYQCQELDTYLIPQIPHSHY

SEQ ID NO: 31155 - protein, 22 aa, Homo sapiens
IHRSSSFPKQPEVICENGSLFT

SEQ ID NO: 31156 - protein, 189 aa, Homo sapiens
KVLGSLARILQFLPGDCRGAASTVDYNCNMTLEELVACDNAAQKMQTVTAAVEELLVAAQRQDRLTVGVYESAKLMNVDPDSVVLCLLAIDEEEEDDIALQIHFTLIQSFCCDNDINIVRVSGMQRLAQLLGEPAETQGTTEARDLHCLLVTNPHTDAWKSHGLVEVASYCEESRGNNQWVPYISLQER

SEQ ID NO: 31157 - protein, 87 aa, Homo sapiens
IQAVATSLLPLTEANLRMFQRAQDDLIPAVDRQFACSSCDHVWWRRVPQRKEVSRCRKCRKRYEPVPADKMWGLAEFHCPKCRHNFR

SEQ ID NO: 31158 - protein, 14 aa, Homo sapiens
LEQSEGKINYCHKH

SEQ ID NO: 31159 - protein, 408 aa, Homo sapiens
LAELQGFQIERKIYECNQIEKSVTRGSSVSLLQTNLPCVNTSISNIYRNDFMHPSLLTQDQKAYIREKPYKCSDCGKAFNQRSNLTTHQRIHTGQKPHKCDICGKGFRRIANLASHHRIHTGEKPYRCNECGKTFNQTFNLTTHQRIHTGQKPYKCDRCGKGFRQIGNLASHHRIHTGEKPYRCNECGKTFNRMFHLTRHQRIHTGQKPYKCDICGKGFRQIANLASHHRIHTGEKPYKCSDCGKTFNYRSHLTRHQRIHTGQKPYKCDTCGKDFSQNSYLENHQRIHTREKSYRCNECGKTFNKMTNLTTHQRIHTGQKTYKCDICGKGFRQIGNLASHHRIHTGEKPYRCNECGKTFNRMFHLTRHQRIHTGQKPYKCDICGKSFSQNSYLENHQRIHTGEKTYKL

SEQ ID NO: 31160 - protein, 7 aa, Homo sapiens
LDCVFPP

SEQ ID NO: 31161 - protein, 23 aa, Homo sapiens
TDFVGWALDVLSPNLISTSMLGR

SEQ ID NO: 31162 - protein, 64 aa, Homo sapiens
KYLAFLRKRMNTNPSRGPYHFRAPSRIFWRTVRGEQSVGTAGGDGQAAGDENFSHSHSSFPTMR

SEQ ID NO: 31163 - protein, 258 aa, Homo sapiens
IPLNLHLHHDPFRSLQEPRHQPPTMGSKERFHWQSHNVKQSGVDDMVLLPQITEDAIAANLRKRFMDDYIFTYIGSVLISVNPFKQMPYFTDREIDLYQGAAQYENPPHIYALTDNMYRNMLIDCENQCVIISGESGAGKTVAAKYIMGYISKVSGGGEKVQHVKDIILQSNPLLEAFGNAKTVRNNNSSRFGKYFEIQFSRGGEPDGGKISNFLLEKSRVVMQNENERNFHIYYQVQGRGRGRGSTTWSPAGWTMGR

SEQ ID NO: 31164 - protein, 64 aa, Homo sapiens
LEGASQEQRQNLGLMTPDYYYYLNQSDTYQVDGTDDRSDFGETLVSTGLYSSPRPGRPQPQKPS

SEQ ID NO: 31165 - protein, 124 aa, Homo sapiens
KLTSRKMDSRWGGRSESINVTLNVEQAAYTRDALAKGLYARLFDFLVEAINRAMQKPQEEYSIGVLDIYGFEIFQKNGFEQFCINFVNEKLQQIFIELTLKAEQVGGQAVRDGGSWGGGGVEGP

SEQ ID NO: 31166 - protein, 17 aa, Homo sapiens
LEVPLSRPPRWGLDDAS

SEQ ID NO: 31167 - protein, 40 aa, Homo sapiens
RTTHHAYPGAEGPDHHSLRTEEAACYSWCCIPPDTLLFPA

SEQ ID NO: 31168 - protein, 50 aa, Homo sapiens
RMGLHGEWKGRLCTLGKVEQGRSYSGRRWRSAAEKLEKVGRKEEKRRRLH

SEQ ID NO: 31169 - protein, 11 aa, Homo sapiens
ISPNTIRLANG

SEQ ID NO: 31170 - protein, 18 aa, Homo sapiens
LSGCRVSMEKRLASVPGC

SEQ ID NO: 31171 - protein, 35 aa, Homo sapiens
LWKTDPLDKRHVWGKRGFLMLFWMFPKSTAAALPP

SEQ ID NO: 31172 - protein, 45 aa, Homo sapiens
LGSAASPTGQGMTAPALEYRLCFGAFGISFHLVRKSVVSPASSGK

SEQ ID NO: 31173 - protein, 42 aa, Homo sapiens
ILASKTVQEVHPGEPPFDLELFYVKYRNLYVYLKYSLYLGFI

SEQ ID NO: 31174 - protein, 27 aa, Homo sapiens
VTTMDEACQEGNIFVTTTGCIDIILGR

SEQ ID NO: 31175 - protein, 30 aa, Homo sapiens
RKQHRRCLSHGMDPSLPRRPCLLHRIRGLL

SEQ ID NO: 31176 - protein, 19 aa, Homo sapiens
LLEPLPDQLPLPVWLGFGG

SEQ ID NO: 31177 - protein, 27 aa, Homo sapiens
VLVKLGHPALSDDQQILSGRNICSAVR

SEQ ID NO: 31178 - protein, 50 aa, Homo sapiens
IPYSHDQVGTTRALSHPPTSQSPPALDAPAAPPASPALTAAARLRAPART

SEQ ID NO: 31179 - protein, 98 aa, Homo sapiens
IPGVTSRWHTKKLPRKTHRGLRKVACIGAWHPARVAFSVARAGQKGYHHRTEINKKIYKIGQGYLIKDGKLIKNNASTDYDLSDKSINPLVSNGCSAL

SEQ ID NO: 31180 - protein, 182 aa, Homo sapiens
LRPQKEISILCPEQNRMAMSQESLTFKDVFVDFTLEEWQQLDSAQKNLYRDVMLENYSHLVSVGYLVAKPDVIFRLGPGEESWMADGGTPVRTCAEVWQVDEQIDHYKESQDKLPWQAAFIGKETLKDESGQESRTCRKSIYLSTEFDSVRQRLPKYYSWEKAFKTSFKLSWSKWKLCKKER

SEQ ID NO: 31181 - protein, 92 aa, Homo sapiens
VDVHVSDLALPQCRLQTGMRGAFGKPQGTVARVHIGQVIMSIRTKLQNKEHVIEALRRAKFKFPGRQKVCSAAAPFSHLCPRPPDSVLSIAP

SEQ ID NO: 31182 - protein, 249 aa, Homo sapiens
LVPRRISLSGLDNMRTWKADVEGQSLRHRDKRLSLNLPCRFSPMYPTASASIEDSYVPMSPQAGASGLGPHCSPDDYIPMNSGSISSPLPELPANLEPPPVNRDLKPQRKSRPPPLDLRNLSIIREHASLTRTRTVPCSRTSFLSPERNGINSARFFANPVSREDEESYIEMEEHRTASSLSSGALTWTKKFSLDYLALDFNSASPAPMQQKLLLSEEQRVDYVQVDEQKTQALQSTKQEWTDERQSKV

SEQ ID NO: 31183 - protein, 163 aa, Homo sapiens
RLHEDGARTKTLLGKAVRCYESLILKAEGKVESDFFCQLGHFNLLLEDYSKALSAYQRYYSLQADYWKNAAFLYGLGLVYFYYNAFHWAIKAFQDVLYVDPSFCRAKEIHLRLGLMFKVNTDYKSSLKHFQLALIDCNPCTLSNAEIQFHIAHLYETQVSVLT

SEQ ID NO: 31184 - protein, 221 aa, Homo sapiens
MLFSLKYLGMTLVEQPKGEELSAAAIKRIVATAKASGKKLQKVTLKVSPRGIILTDNLTNQLIENVSIYRISYCTADKMHDKVFAYIAQSQHNQSLECHAFLCTKRKMAQAVTLTVAQAFKVAFEFWQVSKEEKEKRDKASQEGGDVLGARQDCTPSLKSLVATGNLLDLEETAKAPLSTVSANTTNMDEVPRPQALSGSSVVWVSGCVASRSVILSLTSG

SEQ ID NO: 31185 - protein, 36 aa, Homo sapiens
MERRCPLCPNPIPLLNLILSFRKPRSSTLTVVLEET

SEQ ID NO: 31186 - protein, 181 aa, Homo sapiens
MHPENKLTNHGKTGNGGAQSQHQNVNQGPTCNVGSKGVGAGNHGAKANQISPSNSSLKNPQAGVPPFSSLKGKVKRDRSVSVDSGEQREAGTPSLDSEAKEVAPRSKRRCVLERKQPYSGDEWCSGPDSEEDDKPIGATHRLQRQCCRAGPTPSSPTTSRTCPGPSLTRPLKCPPPQNRYP

SEQ ID NO: 31187 - protein, 2167 aa, Homo sapiens
MTDSKPITKSKSEANLIPSQEPFPASDNSGETPQRNGEGHTLPKTPSQAEPASHKGPKDAGRRRNSLPPSHQKPPRNPLSSSDAAPSPELQANGTGTQGLEATDTNGLSSSARPQGQQAGSPSKEDKKQANIKRQLMTNFILGSFDDYSSDEDSVAGSSRESTRKGSRASLGALSLEAYLTTGEAETRVPTMRPSMSGLHLVKRGREHKKLDLHRDFTVASPAEFVTRFGGDRVIEKVLIANNGIAAVKCMRSIRRWAYEMFRNERAIRFVVMVTPEDLKANAEYIKMADHYVPVPGGPNNNNYANVELIVDIAKRIPVQAVWAGWGHASENPKLPELLCKNGVAFLGPPSEAMWALGDKIASTVVAQTLQVPTLPWSGSGLTVEWTEDDLQQGKRISVPEDVYDKGCVKDVDEGLEAAERIGFPLMIKASEGGGGKGIRKAESAEDFPILFRQVQSEIPGSPIFLMKLAQHARHLEVQILADQYGNAVSLFGRDCSIQRRHQKIVEEAPATIAPLAIFEFMEQCAIRLAKTVGYVSAGTVEYLYSQDGSFHFLELNPRLQVEHPCTEMIADVNLPAAQLQIAMGVPLHRLKDIRLLYGESPWGVTPISFETPSNPPLARGHVIAARITSENPDEGFKPSSGTVQELNFRSSKNVWGYFSVAATGGLHEFADSQFGHCFSWGENREEAISNMVVALKELSIRGDFRTTVEYLINLLETESFQNNDIDTGWLDYLIAEKVQAEKPDIMLGVVCGALNVADAMFRTCMTDFLHSLERGQVLPADSLLNLVDVELIYGGVKYILKVARQSLTMFVLIMNGCHIEIDAHRLNDGGLLLSYNGNSYTTYMKEEVDSYRITIGNKTCVFEKENDPTVLRSPSAGKLTQYTVEDGGHVEAGSSYAEMEVMKMIMTLNVQERGRVKYIKRPGAVLEAGCVVARLELDDPSKVHPAEPFTGELPAQQTLPILGEKLHQVFHSVLENLTNVMSGFCLPEPVFSIKLKEWVQKLMMTLRHPSLPLLELQEIMTSVAGRIPAPVEKSVRRVMAQYASNITSVLCQFPSQQIATILDCHAATLQRKADREVFFINTQSIVQLVQRYRSGIRGYMKTVVLDLLRRYLRVEHHFQQAHYDKCVINLREQFKPDMSQVLDCIFSHAQVAKKNQLVIMLIDELCGPDPSLSDELISILNELTQLSKSEHCKVALRARQILIASHLPSYELRHNQVESIFLSAIDMYGHQFCPENLKKLILSETTIFDVLPTFFYHANKVVCMASLEVYVRRGYIAYELNSLQHRQLPDGTCVVEFQFMLPSSHPNRMTVPISITNPDLLRHSTELFMDSGFSPLCQRMGAMVAFRRFEDFTRNFDEVISCFANVPKDTPLFSEARTSLYSEDDCKSLREEPIHILNVSIQCADHLEDEALVPILRTFVQSKKNILVDYGLRRITFLIAQEKEFPKFFTFRARDEFAEDRIYRHLEPALAFQLELNRMRNFDLTAVPCANHKMHLYLGAAKVKEGVEVTDHRFFIRAIIRHSDLITKEASFEYLQNEGERLLLEAMDELEVAFNNTSVRTDCNHIFLNFVPTVIMDPFKIEESVRYMVMRYGSRLWKLRVLQAEVKINIRQTTTGSAVPIRLFITNESGYYLDISLYKEVTDSRSGNIMFHSFGNKQGPQHGMLINTPYVTKDLLQAKRFQAQTLGTTYIYDFPEMFRQALFKLWGSPDKYPKDILTYTELVLDSQGQLVEMNRLPGGNEVGMVAFKMRFKTQEYPEGRDVIVIGNDITFRIGSFGPGEDLLYLRASEMARAEGIPKIYVAANSGARIGMAEEIKHMFHVAWVDPEDPHKGFKYLYLTPQDYTRISSLNSVHCKHIEEGGESRYMITDIIGKDDGLGVENLRGSGMIAGESSLAYEEIVTISLVTCRAIGIGAYLVRLGQRVIQVENSHIILTGASALNKVLGREVYTSNNQLGGVQIMHYNGVSHITVPDDFEGVYTILEWLSYMPKDNHSPVPIITPTDPIDREIEFLPSRAPYDPRWMLAGRPHPTLKGTWQSGFFDHGSFKEIMAPWAQTVVTGRARLGGIPVGVIAVETRTVEVAVPADPANLDSEAKIIQQAGQVWFPDSAYKTAQAVKDFNREKLPLMIFANWRGFSGGMKGCLGTWRDVSWWKIRAMLPMHIGEGSV

SEQ ID NO: 31188 - protein, 23 aa, Homo sapiens
MVLNLLASQPPFESLDSSAEQIL

SEQ ID NO: 31189 - protein, 398 aa, Homo sapiens
MRPAAGPCPTFRGHCPPSTAASSRSCGAATRATTTPWIPAPAARPSCWTVRWQSSGHGTKRRRHGCPSTEGGTLGMPLRPPRVEGQGPQLGLRPRPCPARMWPSLLRTATRWGPGRASHLSQACPFAGPQGSWVRSSFHLQPRMIGDVLSEDENDKKQNAQSSDESFEPYPERKVSGKKSESKEAKKSEEPRIRKKPGPKPGWKKKLRCEREELPTIYKCPYQGCTAVYRGADGMKKHIKEHHEEVRERPCPHPGCNKVFMIDRYLQRHVKLIHTEVRNYICDECGQTFKQRKHLLVHQMRHSGAKPLQCEVCGFQCRQRASLKYHMTKHKAETELDFACDQCGRRFEKAHNLNVHMSMVHPLTQTQDKALPLEAEPPPGPPSPSVTTEGQAVKPEPT

SEQ ID NO: 31190 - protein, 66 aa, Homo sapiens [sequence omitted]

SEQ ID NO: 31191 - protein, 167 aa, Homo sapiens
MGSKERFHWQSHNVKQSGVDDMVLLPQITEDAIAANLRKRFMDDYIFTYIGSVLISVNPFKQMPYFTDREIDLYQGAAQYENPPHIYALTDNMYRNMLIDCENQCVIISGESGAGKTVAAKYIMGYISKVSGGGEKVQVRRGKQKDKLGRPHLHGSAAPPICTPASV

SEQ ID NO: 31192 - protein, 32 aa, Homo sapiens
MQKSPVFCVNHAENCRPELFLFGHLGTGLSLF

SEQ ID NO: 31193 - protein, 77 aa, Homo sapiens
MHLGENRLKSHGNQLVSPVMAQSCKDGCGSLISPWLTCVCNAAAVARGKDTASDSNSDSLLQCVTLSQSQISAFSQL

SEQ ID NO: 31194 - protein, 126 aa, Homo sapiens
MAGAASPCANGCGPGAPSDAEVLHLCRSLEVGTVMTLFYSKKSQRPERKTFQVKLETRQITWSRGADKIEGAIDIREIKEIRPGKTSRDFDRYQEDPAFRPDQSHCFVILYGMEFRLKTLSLQGGS

SEQ ID NO: 31195 - protein, 1028 aa, Homo sapiens
MRWIFENWRLDAIGEHERPAAKEPVLCGDVQATSRKFEEGSFANSTDQEPTRPQPGGGDVRAARWLFETKPLDELTGQAKELEATVREPAASGDVQGTRMLFETRPLDRLGSRPSLQEQSPLELRSEIQELKGDVKKTVKLFQTEPLCAIQDAEGAIHEVKAACREEIQSNAVRSARWLFETRPLDAINQDPSQVRVIRGISLEEGARPDVSATRWIFETQPLDAIREILVDEKDFQPSPDLIPPGPDVQQQQHLFETRALDTLKGDEEAGAEAPPKEEVVPGDVRSTLWLFETKPLDAFRDKVQVGHLQRVDPQDGEGHLSSDSSSALPFSQSAPQRDELKGDVKTFKNLFETLPLDSIGQGEVLAHGSPSREEGTDSAGQAQGIGSPVYAMQDSKGRLHALTSVSREQIVGGDVQGYRWMFETQPLDQLGRSPSTIDVVRGITRQEVVAGDVGTARWLFETQPLEMIHQREQQERQKEEGKSQGDPQPEAPPKGDVQTIRWLFETCPMSELAEKQGSEVTDPTAKAEAQSCTWMFKPQPVDRPVGSREQHLQVSQVPAGERQTDRHVFETEPLQASGRPCGRRPVRYCSRVEIPSGQVSRQKEVFQALEAGKKEEQEPRVIAGSIPAGSVHKFTWLFENCPMGSLAAESIQGGNLLEEQPMSPSGNRMQESQETAAEGTLRTLHATPGILHHGGILMEARGPGELCLAKYVLSGTGQGHPYIRKEELVSGELPRIICQVLRRPDVDQQGLLVQEDPTGQLQLKPLRLPTPGSSGNIEDMDPELQQLLACGLGTSVARTGLVMQETEQGLVALTAYSLQPRLTSKASERSSVQLLASCIDKGDLSGLHSLRWEPPADPSPVPASEGAQSLHPTESIIHVPPLDPSMGMGHLRASGATPCPPQAIGKAVPLAGEAAAPAQLQNTEKQEDSHSGQKGMAVLGKSEGATTTPPGPGAPDLLAAMQSLRMATAEAQSLHQQVLNKHKQGPTPTATSNPIQDGLRKAGATQSNIRPGGGSDPRIPAAPRKLL

SEQ ID NO: 31196 - protein, 11 aa, Homo sapiens
MGEGRCHTTWR

SEQ ID NO: 31197 - protein, 3165 aa, Homo sapiens
MEQPNSKGYSLGRTPQGPECSSAPAVQVGTHRGLEYNPGKILPGSDYGLGNPPALDPKLPHLPLPPAPPTLSDLGQPRKSPLTGTDKKYPLMKQRGFYSDILSPGTLDQLGEVCRGPRMSQNLLRQADLDKFTPRVGSFEVPEDFQERMEQQCIGSTTRLLAQTDFPLQAYEPKMQVPFQVLPGQHPRKIEIERRKQQYLSLDIEQLLFSQGIDSNKLMPRHLDHQHPQTIEQGHDPIFPIYLPLKVFDNEDFDCRTPREWINMGLEPGSLDRKPVPGKALLPTDDFLGHEDPKSQKLKYKWCEVGVLDYDEEKKLYLVHKTDEKGLVRDEMGRPILNAGVTTEGRPPLQVCQYWVPRIQLLFCAEDPCMFAQRVVQANALRKNTEALLLYNLYVDCMPSDGQHVISEQSLSKIKQWALSTPRMRKGPSVLEHLSSLAREVSLDYERSMNKINFDHVVSSKPETFSYVTLPKKEEEQVPERGLVSVPKYHFWEQKEDFTFVSLLTRPEVITALSKVRAECNKVTAMSLFHSSLSKYSHLEEFEQIQSQTFSQVQMFLKDSWISSLKVAMRSSLRDMSKGWYNLYETNWEVYLMSKLRKLMELVKYMLQDTLRFLVQDSLASFSQFISDTCCSVLNCTDDMVWGDDLINSPYRPRKNPLFIMDLVLDSSGVHYSTPLEQFEASLLNLFDKGILATHAVPQLEKLVMEDIFISGDPLLESVGLHEPLVEELRATIASAVSKAMIPLQAYAKEYRKYLELNNNDIASFLKTYQTQGLLAQEVREVVLTHLREKEILDSSLPSSIIIGPFYINTDNVKQSLSKKRKALATSVLDILAKNLHKEVDSICEEFRSISRKIYEKPNSIEELAELREWMKGIPERLVGLEERIVKVMDDYQVMDEFLYNLSSDDFNDKWIASNWPSKILGQIELVQQQHVEDEEKFRKIQIMDQNNFQEKLEGLQLVVAGFSIHVEISRAHEIANEVRRVKKQLKDCQQLAMLYNNRERIFSLPITNYDKLSRMVKEFQPYLDLWTTASDWLRWSESWMNDPLSAIDAEQLEKNVVEAFKTMHKCVKQFKDMPACQEVALDIRARIEEFKPYIPLIQGLRNPGMRIRHWETLSNQININVRPKANLTFARCLEMNLQDHIESISKVAEVAGKEYAIEQALDKMEKEWSTILFNVLPYKATDTYILKSPDEASQLLDDHIVMTQNMSFSPYKKPFEQRINSWENKLKLTQEVLEEWLNCQRSWLYLEPIFSSEDINQQLPVESKRYQTMERIWKKIMKNAYENREVINVCSDLRMLDSLRDCNKILDLVQKGLSEYLETKRSAFPRFYFLSDDELLEILSQTKDPTAVQPHLRKCFENIARLLFQEDLEITHMYSAEGEEVQLCFSIYPSSNVEDWLREVERSMKASVHDIIEKAIRAYPTMPRTQWVLNWPGQVTIAGCQTYWTMEVAEALEAGNLRSQLFPQLCQQLSDLVALVRGKLSRMQRAVLSALIVIEVHAKDVVSKLIQENVVSVNDFQWISQLRYYWTNNDLYIRAVNAEFIYGYEYLGNSGRLVITPLTDRCYLTLTGALHLKFGGAPAGPAGTGKTETTKDLGKALAIQTVVFNCSDQLDFMAMGKFFKGLASAGAWACFDEFNRIDIEVLSVVAQQITTIQKAQQQRVERFMFEGVEIPLVPSCAVFITMNPGYAGRTELPDNLKALFRPVAMMVPDYAMITEISLYSFGFNEASVLAKKITTTFKLSSEQLSSQDHYDFGMRAVKTVISAAGNLKRENPSMNEELICLRAIRDVNVPKFLQEDLKLFSGIVSDLFPTIKEEDTDYGILDEAIREACRNSNLKDVEGFLTKCIQLYETTVVRHGLMLVGPTGSGKSTCYRVLAAAMTSLKGQPSISGGMYEAVNYYVLNPKSITMGQLYGEFDLLTHEWTDGIFSSFIRAGAITSDTNKKWYMFDGPVDAIWIENMNTVLDDNKKLCLSSGEIIKLTEAMTMMFEVQDLAVASPATVSRCGMVYLEPSILGLMPFIECWLRKLPPLLKPYEEHFKALFVSFLEESISFVRSSVKEVIASTNCNLTMSLLKLLDCFFKPFLPREGLKKIPSEKLSRIVELIEPWFIFSLIWSVGATGDSSGRTSFSHWLRLKMENEQLTLLFPEEGLVFDYRLEDAGISGTNDSEDEEEEYKQVAWVKWMDSSAPFTMVPDTNYCNIIVPTMDTVQMSHLLDMLLTNKKPVLCIGPTGTGKTLTISDKLLKNLALDYISHFLTFSARTSANQTQDFIDSKLDKRRKGVFGPPLGRNFIFFIDDLNMPALETYGAQPPIELLRQWMDHGGWYDRKIIGAFKNLVDINFVCAMGPPGGGRNTVTPRLMRHFNYLSFAEMDEVSKKRIFSTILGNWLDGLLGEKSYRERVPGAPHIAHFTEPLVEATIMVYATITSQLLPTPAKSHYTFNLRDLSKVFQGMLMADPAKVEDQVQLLRLWYHENCRVFRDRLVNEEDRSWFDQLLKRCMEQWEVTFNKVCPFQPILYGDFMSPGSDVKSYELITSESKMMQVIEEYIEDYNQINTAKLKLVLFMDAMSHICRISRTLRQALGNALLLGVGGSGRSSLTRLASHMAEYECFQIELSKNYGMSEWRDDVKKVLLKAGLQNLPITFLFSDTQIKNESFLEDINNVLNSGDIPNLYTADEQDQIVSTMRPYIQEQGLQPTKANLMAAYTGRVRSNIHMVLCMSPIGEVFRARLRQFPSLVNCCTIDWFNEWPAEALKSVATVFLNEIPELESSQEEIQGLIQVCVYIHQSVSKKCIEYLAELTRHNYVTPKSYLELLHIFSILIGQKKLELKTAKNRMKSGLDKLLRTSEDVAKMQEDLESMHPLLEEAAKDTMLTMEQIKVDTAIAEETRNSVQTEEIKANEKAKKAQAIADDAQKDLDEALPALDAALASLRNLNKNDVTEVRAMQRPPPGVKLVIEAVCIMKGIKPKKVPGEKPGTKVDDYWEPGKGLLQDPGHFLESLFKFDKDNIGDVVIKAIQPYIDNEEFQPATIAKVSKACTSICQWVRAMHKYHFVAKAVEPKRQALLEAQDDLGVTQRILDEAKQRLREVEDGIATMQAKYRECITKKEELELKCEQCEQRLGRAGKVRTLLLQGLQAGPAQTGARKDQGAGGSWGGCPHPLPGNPRCHSG

SEQ ID NO: 31198 - protein, 259 aa, Homo sapiens
MLNQPCIFQILNQCGIKSTCFMAQVVEMDENNGLLLLELNPPNPWDLQPRSPEELAFGEVQITYLTHACMDLKLGDKRMVFDPWLIGPAFARGWWLLHEPPSDWLERLCQADLIYISHLHSDHLSYPTLKKLAGRRPDIPIYVGNTERPVFWNLNQSGVQLTNINVVPFGIWQQVDKNLRFMILMDGVHPEMDTCIIVEYKGHKILNIVDCTRPNGGRLPMKVALMMSDFAGGASGFPMTFSGGKFTVYIHCLPECVTT

SEQ ID NO: 31199 - protein, 8 aa, Homo sapiens
MALFKPGE

SEQ ID NO: 31200 - protein, 112 aa, Homo sapiens
MKWLKKCLDTAPTPMWPDDLQNHTFLHTVYCQDGSPSVGLSEAYDEDQLFFFDFSQNTRVPRLPEFADWAQEQGDAPAILFDKEFCEWMIQQIGPKLDGKIPVSRGQEFSGE

SEQ ID NO: 31201 - protein, 118 aa, Homo sapiens
MLPLLWLLPHSWAVPEAPTPMWPDDLQNHTFLHTVYCQDGSPSVGLSEAYDEDQLFFFDFSQNTRVPRLPEFADWAQEQGDAPAILFDKEFCEWMIQQIGPKLDGKIPVSRGQEFSGE

SEQ ID NO: 31202 - protein, 279 aa, Homo sapiens
MCDHDYDGLLPKSGKRHLGKTRWTREENRTDVQCQHRWQKVLNPELIKGPWTKEEDQRVIELVQKYGPKRWSVIAKHLKGRIGKQCRERWHNHLNPEVKKTSWTEEEDRIIYQAHKRLGNRWAEIAKLLPGRTDNAIKNHWNSTMRRKVEQEGYLQESSKASQPAVATSFQKNSHLMGFAQAPPTAQLPATGQPTVNNDYSYYHISEAQNVSSHVPYPVALHVNIVNVPQPAAAAIQRHYNDEDPEKEKRIKELELLLMSTENELKGQQVLPVRLSSCA

SEQ ID NO: 31203 - protein, 28 aa, Homo sapiens
MTPTPPALCWNQESAQGSMILTEAQGRT

SEQ ID NO: 31204 - protein, 94 aa, Homo sapiens
MESGKMAPPKNAPRDALVMAQILKDMGITEYEPRVINQMLEFAFRYVTTILDDAKIYSSHAKKPNVDADDVRLAIQCRADQSFTSPPPRDVSKL

SEQ ID NO: 31205 - protein, 42 aa, Homo sapiens
VSPSDQKESGCGTCWPSWFQARDIQKVFSSIFAWCCVSGGPL

SEQ ID NO: 31206 - protein, 16 aa, Homo sapiens
KTMLESLPAEVQEVLL

SEQ ID NO: 31207 - protein, 12 aa, Homo sapiens
LRPSSRLHFDLI

SEQ ID NO: 31208 - protein, 22 aa, Homo sapiens
IEFSHFGQDFEDSSMYSTFDIR

SEQ ID NO: 31209 - protein, 146 aa, Homo sapiens
ILLRGSERCLCLTLISVMSGRGKQGGKARAKAKSRSSRAGLQFPVGRVHRLLRKGNYAERVGAGAPVYMAAVLEYLTAEILELAGNAARDNKKTRIIPRHLQLAIRNDEELNKLLGKVTIAQGGVLPNIQAVLLPKKTESHKAKSK

SEQ ID NO: 31210 - protein, 31 aa, Homo sapiens
MKRKPRKGKTTRTEMCLAMSIGSNQWKRSNT

SEQ ID NO: 31211 - protein, 16 aa, Homo sapiens
IKRNLEAEAREHLKGS

SEQ ID NO: 31212 - protein, 29 aa, Homo sapiens
IAGSRRDTDCGTCLPGFYEHGDGCVSCPT

SEQ ID NO: 31213 - protein, 16 aa, Homo sapiens
KRRSRPCLRELVILWM

SEQ ID NO: 31214 - protein, 49 aa, Homo sapiens
KFEMLYLIGLGLGDAKDITVKGLEVVRRCSRVYLEAYTSVLTVGKEALG

SEQ ID NO: 31215 - protein, 29 aa, Homo sapiens
LRKKMKKLEEVQKVDRVKERDFFLKNCDV

SEQ ID NO: 31216 - protein, 22 aa, Homo sapiens
KALASLARKNISIFLAVATGTS

SEQ ID NO: 31217 - protein, 30 aa, Homo sapiens
LCPNPIPLLNLILSFRKPRSSTLTVVLEET

SEQ ID NO: 31218 - protein, 128 aa, Homo sapiens
IQHFLFSLCEYLNAYSGRKYQADRLQSDFAALLTGPLQRNPLCNLLSFTYKLDPGGQSFPFCARLLYKDLTATLPTDVTVTCQGVEVLSTSWEEQRASHETLFCTKPLHQVFASFTRKGEKLDMSLVS

SEQ ID NO: 31219 - protein, 28 aa, Homo sapiens
MGSLQLYHPNSQRKTVGTKFIIHIRNKI

SEQ ID NO: 31220 - protein, 61 aa, Homo sapiens
MSFRSQQYQEMSSFYSQILTSSYWIGSTLSKMQLTDCQRIQVVHQETWNYSKSKDPLALNC

SEQ ID NO: 31221 - protein, 33 aa, Homo sapiens
MVLPIMRCLYFTTEVYKFYANILTLSSNLKCSC

SEQ ID NO: 31222 - protein, 24 aa, Homo sapiens
KQSPTEDIVDLNSSELEGFLGDLF

SEQ ID NO: 31223 - protein, 26 aa, Homo sapiens
ISFGILIHTSMERLKTHLKTDISSSM

SEQ ID NO: 31224 - protein, 14 aa, Homo sapiens
KNWVLNTEQICSLS

SEQ ID NO: 31225 - protein, 483 aa, Homo sapiens
KSRMSAEVIHQVEEALDTDEKEMLLFLCRDVAIDVVPPNVRDLLDILRERGKLSVGDLAELLYRVRRFDLLKRILKMDRKAVETHLLRNPHLVSDYRVLMAEIGEDLDKSDVSSLIFLMKDYMGRGKISKEKSFLDLVVELEKLNLVAPDQLDLLEKCLKNIHRIDLKTKIQKYKQSVQGAGTSYRNVLQAAIQKSLKDPSNNFRLHNGRSKEQRLKEQLGAQQEPVKKSIQESEAFLPQSIPEERYKMKSKPLGICLIIDCIGNETELLRDTFTSLGYEVQKFLHLSMHGISQILGQFACMPEHRDYDSFVCVLVSRGGSQSVYGVDQTHSGLPLHHIRRMFMGDSCPYLAGKPKMFFIQNYVVSEGQLEDSSLLEVDGPAMKNVEFKAQKRGLCTVHREADFFWSLCTADMSLLEQSHSSPSLYLQCLSQKLRQERKRPLLDLHIELNGYMYDWNSRVSAKEKYYVWLQHTLRKKLILSYT

SEQ ID NO: 31226 - protein, 40 aa, Homo sapiens
LASDPFSTGDLPLLRSSSSSFTSPPSSSLALIMLMLEENE

SEQ ID NO: 31227 - protein, 35 aa, Homo sapiens
IGLEPGVLHSVDFQGKKKTVLVVVIINIWTSVMVK

SEQ ID NO: 31228 - protein, 19 aa, Homo sapiens
LRWSSPGTALIRVTSSCWT

SEQ ID NO: 31229 - protein, 68 aa, Homo sapiens
MVAPGYVVTVLTWPGTNPTLSSILLNSHTDVVPVFKEHWSHDPFEAFKDSEGYIYARGAQDMKCVSIQ

SEQ ID NO: 31230 - protein, 14 aa, Homo sapiens
MLIYQAECKLCDEF

SEQ ID NO: 31231 - protein, 12 aa, Homo sapiens
LIICLNVIGDAL

SEQ ID NO: 31232 - protein, 15 aa, Homo sapiens
LRRKDQREVQSLACL

SEQ ID NO: 31233 - protein, 73 aa, Homo sapiens
IFRTFHNPTYFSRRLVRFSDLYMASLSCLLNYRVDFTFYPRRTPLQHEAPLWMDQLCTGCMKTPFLGDMAHIR

SEQ ID NO: 31234 - protein, 126 aa, Homo sapiens
LVLAGLSHFCSGVIHVTKEVKEVATLSCGHNVSVEELAQTRIYWQKEKKMVLTMMSGDMNIWPEYKNRTIFDITNNLSIVILALRPSDEGTYECVVLKYEKDAFKREHLAEVTLSVKGWWDFLILL

SEQ ID NO: 31235 - protein, 32 aa, Homo sapiens
VSQKLLLTIPVSEQNISAMVRASIPSLICCQP

SEQ ID NO: 31236 - protein, 268 aa, Homo sapiens
RLIIIWGAYDGKYEKTLYGHNLEISDVAWSSDSSRLVSASDDKTLKLWDVRSGKCLKTLKGHSNYVFCCNFNPPSNLIISGSFDETVKIWEVKTGKCLKTLSAHSDPVSAVHFNCSGSLIVSGSYDGLCRIWDAASGQCLKTLVDDDNPPVSFVKFSPNGKYILTATLDNTLKLWDYSRGRCLKTYTGHKNEKYCIFANFSVTGGKWIVSGSEDNLVYIWNLQTKEIVQKLQGHTDVVISAACHPTENLIASAALENDKTIKLWMSNH

SEQ ID NO: 31237 - protein, 18 aa, Homo sapiens
LFKFWLDAKPWDMNNFHV

SEQ ID NO: 31238 - protein, 30 aa, Homo sapiens
ISCFTDHLELEKHPLFWQQLENSLGLNFSD

SEQ ID NO: 31239 - protein, 8 aa, Homo sapiens
ISLRSGSA

SEQ ID NO: 31240 - protein, 29 aa, Homo sapiens
ISLCIMLVYENVQMYCRDFMIRIAYIYET

SEQ ID NO: 31241 - protein, 78 aa, Homo sapiens
ISSTGNKWRSRRKMLTPTFHFTILEDFLDIMNEQANILVKKLEKHINQEAFNCFFYITLCALDIICGESHRSVSKFMA

SEQ ID NO: 31242 - protein, 39 aa, Homo sapiens
VSCGHLESTLSLLCPSTPRTVSLSQMEAELNTLRWMMET

SEQ ID NO: 31243 - protein, 11 aa, Homo sapiens
KRMKIGLTSLS

SEQ ID NO: 31244 - protein, 42 aa, Homo sapiens
KFPVGRIHRHLKSRTTSHGRVGATAAVYSAAILEYLTAEVNG

SEQ ID NO: 31245 - protein, 35 aa, Homo sapiens
LRSLLETLIHKDNHCQPLFRLLQEPSSKIKHKKVF

SEQ ID NO: 31246 - protein, 14 aa, Homo sapiens
ISTILPKLKSRIRR

SEQ ID NO: 31247 - protein, 27 aa, Homo sapiens
IMAAKAVANTMRTSLGPNGKSPPFRVF

SEQ ID NO: 31248 - protein, 16 aa, Homo sapiens
IWGIKCRLTLQKPSCL

SEQ ID NO: 31249 - protein, 7 aa, Homo sapiens
IATRVLQ

SEQ ID NO: 31250 - protein, 40 aa, Homo sapiens
MKVMKLLDLEGKSSFTPLPKVSHRPLQHAFPAGSLYTFRL

SEQ ID NO: 31251 - protein, 28 aa, Homo sapiens
MYKCQILEVYSIPMLYEWAESSSLFFFW

SEQ ID NO: 31252 - protein, 28 aa, Homo sapiens
MKPCTTVYIICSDFIDNIFNMTDYVSTL

SEQ ID NO: 31253 - protein, 6 aa, Homo sapiens
RSLNCR

SEQ ID NO: 31254 - protein, 44 aa, Homo sapiens
RQRRGSNAPTSDMPGTTLNRYGRTWPRWGWLWTPTGRCPSVRER

SEQ ID NO: 31255 - protein, 63 aa, Homo sapiens
MPKIMKIVFYKEKFLPDNPEEDFGKLTIKESAKPLLMMWRLTAIFLFQLILPRCISQKTLIHR

SEQ ID NO: 31256 - protein, 7 aa, Homo sapiens
TRSSTNC

SEQ ID NO: 31257 - protein, 347 aa, Homo sapiens
KMAASQAVEEMRSRVVLGEFGVRNVHTTDFPGNYSGYDDAWDQDRFEKNFRVDVVHMDENSLEFDMVGIDAAIANAFRRILLAEVPTMAVEKVLVYNNTSIVQDEILAHRLGLIPIHADPRLFEYRNQGDEEGTEIDTLQFRLQVRCTRNPHAAKDSSDPNELYVNHKVYTRHMTWIPLGNQADLFPEGTIRPVHDDILIAQLRPGQEIDLLMHCVKGIGKDHAKFSPVATASYRLLPDITLLEPVEGEAAEELSRCFSPGVIEVQEVQGKKVARVANPRLDTFSREIFRNEKLKKVVRLARVRDHYIFSVESTGVLPPDVLVSEAIKVLMGKCRRFLDELDAVQMD

SEQ ID NO: 31258 - protein, 21 aa, Homo sapiens
VAPPYTSSFWGCCWFCCLGPR

SEQ ID NO: 31259 - protein, 15 aa, Homo sapiens
ILLDSMSRSLTIDKL

SEQ ID NO: 31260 - protein, 16 aa, Homo sapiens
MRFFAGQGWECLFINN

SEQ ID NO: 31261 - protein, 18 aa, Homo sapiens
RTACLPPCLPPAPSFCQG

SEQ ID NO: 31262 - protein, 18 aa, Homo sapiens
MQRCSPFPKNWSLGYYPR

SEQ ID NO: 31263 - protein, 23 aa, Homo sapiens
LVYISTKMTSFEMPRKYLFCHSY

SEQ ID NO: 31264 - protein, 51 aa, Homo sapiens
MAWHILKHFSVSRSRKRRQLPRHTERLTDTRFGKLCRHLWSSYCPKLYSCA

SEQ ID NO: 31265 - protein, 398 aa, Homo sapiens
KLAGRRPDIPIYVGNTERPVFWNLNQSGVQLTNINVVPFGIWQQVDKNLRFMILMDGVHPEMDTCIIVEYKGHKILNIVDCTRPNGGRLPMKVALMMSDFAGGASGFPMTFSGGKFTEEWKAQFIKTERKKLLNYKARLVKNLQPRIYCPFAGYFVESHPSDKYIKETNTKNDPNELNNLIKKNSDVITWTPRPGATLDLGRMLKDRTDSKGIIEPPEGTKIYKDSWDFEPYLEILNAALGDEIFLHSSWIKEYFTWAGFKDYNLVVRMIETDEDFNPFPGGYDYLVDFLDLSFPKERPQREHPYEEIHSRVDVIRHVVKNGLLWDELYIGFQTRLQRDPDIYHHLFWNHFQIKLPLTPPNWKSFLMCCEQNGPVILQFSTERTNEPNRNKFSVENKA

SEQ ID NO: 31266 - protein, 11 aa, Homo sapiens
LEIIIMDRVIP

SEQ ID NO: 31267 - protein, 67 aa, Homo sapiens
MWELHGQLCGGAFHPGWRVCEGQWEIGGKDIGHWCGRLGSHASDRRKLLIREAAFWRWNLDNGLCAM

SEQ ID NO: 31268 - protein, 35 aa, Homo sapiens
LMPSRIMGRWPFHSLRAASLTGFYKMAQPIPSLET

SEQ ID NO: 31269 - protein, 52 aa, Homo sapiens
MRWIWRGSPCTSSLWSLRTSSEVSPGSYFQATSLRSGWVLWRCRTRRTESRP

SEQ ID NO: 31270 - protein, 88 aa, Homo sapiens
IQEMSYRELWKLILTKIRGIQETSEKESKEMSTAILDMVEVFTNQIQSFPEHMANVELKKSLDEIQSILESFNDRLDQAEKKLSKLKI

SEQ ID NO: 31271 - protein, 24 aa, Homo sapiens
RRRRKMMMRKKTTWKLRKKMESWS

SEQ ID NO: 31272 - protein, 19 aa, Homo sapiens
TPFSRRGSCMAFLPSSPNR

SEQ ID NO: 31273 - protein, 30 aa, Homo sapiens
LCSESSGYCGAFPRRSARRHLHLGPTSWAG

SEQ ID NO: 31274 - protein, 677 aa, Homo sapiens
TSAPPTLSASAGETPSPTIQRARYPPGPHHLFSSQDFIPYMHDSIRFGNVDMPCVQAQYSPSPPGSSYAAQTYSSEYTTEIMNPDYTKLTMDLGSTEITATATTSLPSISTFVEGYSSNYELKPSCVYQMQRPLIKVEEGRAPSYHHHHHHHHHHHHHHQQQHQQPSIPPASSPEDEVLPSTSMYFKQSPPSTPTTPAFPPQAGALWDEALPSAPGCIAPGPLLDPPMKAVPTVAGARFPLFHFKPSPPHPPAPSPAGGHHLGYDPTAAAALSLPLGAAAAAGSQAAALESHPYGLPLAKRAAPLAFPPLGLTPSPTASSLLGESPSLPSPPSRSSSSGEGTCAVCGDNAACQHYGVRTCEGCKGFFKRTVQKNAKYVCLANKNCPVDKRRRNRCQYCRFQKCLSVGMVKEVVRTDSLKGRRGRLPSKPKSPLQQEPSQPSPPSPPICMMNALVRALTDSTPRDLDYSRYCPTDQAAAGTDAEHVQQFYNLLTASIDVSRSWAEKIPGFTDLPKEDQTLLIESAFLELFVLRLSIRSNTAEDKFVFCNGLVLHRLQCLRGFGEWLDSIKDFSLNLQSLNLDIQALACLSALSMITERHGLKEPKRVEELCNKITSSLKDHQSKGQALEPTESKVLGALVELRKICTLGLQRIFYLKLEDLVSPPSIIDKLFLDTLPF

SEQ ID NO: 31275 - protein, 46 aa, Homo sapiens
ISSHTCMTQSDLEMWICPASKPNIALPLQVPVMRRRHTARNTPRRS

SEQ ID NO: 31276 - protein, 48 aa, Homo sapiens
LALLLYCYPPDPKGLPGTRRVLGFSPVIIDRHVSRYLLAFLADDLGGL

SEQ ID NO: 31277 - protein, 40 aa, Homo sapiens
KRVEQVAVLAPPWTSLICFLEEEEGCREKGEVKMLYISSQ

SEQ ID NO: 31278 - protein, 11 aa, Homo sapiens
MGLDPTSKPPL

SEQ ID NO: 31279 - protein, 10 aa, Homo sapiens
MRYISSLVNT

SEQ ID NO: 31280 - protein, 20 aa, Homo sapiens
TPPEKSFSTRQQVKVFFQVT

SEQ ID NO: 31281 - protein, 10 aa, Homo sapiens
LEQRIHRQVP

SEQ ID NO: 31282 - protein, 41 aa, Homo sapiens
MAVKAPPMEDCPVPPVRRAERPIPLSRSVTTRDQPRSRWTW

SEQ ID NO: 31283 - protein, 41 aa, Homo sapiens
IPHPPARCQKEADGNWAFCRERPPLHCPGWSQGSGRWIHTC

SEQ ID NO: 31284 - protein, 7 aa, Homo sapiens
KKMFCFG

SEQ ID NO: 31285 - protein, 14 aa, Homo sapiens
LWTSSQSYRSVSVT

SEQ ID NO: 31286 - protein, 23 aa, Homo sapiens
IMSLILNLICGNKGKVILAGAYC

SEQ ID NO: 31287 - protein, 12 aa, Homo sapiens
MEKNMLYSCAPP

SEQ ID NO: 31288 - protein, 7 aa, Homo sapiens
KTSIGEV

SEQ ID NO: 31289 - protein, 21 aa, Homo sapiens
LRCTCCASMAIERTQISRRTL

SEQ ID NO: 31290 - protein, 35 aa, Homo sapiens
ICVDQMLGRLAMPQGRLTAKPRMRGSHSSSPWGPS

SEQ ID NO: 31291 - protein, 30 aa, Homo sapiens
IRRTQTLEKIQQELEKLSVHLISVLMAEDT

SEQ ID NO: 31292 - protein, 15 aa, Homo sapiens
IGFPGLEMYTKGMHL

SEQ ID NO: 31293 - protein, 443 aa, Homo sapiens
KEGARLCALGVMILLRASEVRQLLHNKFVVILGDSVHRAVYKDLVLLLQKDRLLTPGQLRARGELNFEQDELVDGGQRGHMHNGLNYREVREFRSDHHLVRFYFLTRVYSDYLQTILKELQSGEHAPDLVIMNSCLWDISRYGPNSWRSYLENLENLFQCLGQVLPESCLLVWNTAMPVGEEVTGGFLPPKLRRQKATFLKNEVVKANFHSATEARKHNFDVLDLHFHFRHARENLHWDGVHWNGRVHRCLSQLLLAHVADAWGVELPHRHPVGEWIKKKKPGPRVEGPPQANRNHPALPLSPPLPSPTYRPLLGFPPQRLPLLPLLSPQPPPPILHHQGMPRFPQGPPDACFSSDHTFQSDQFYCHSDVPSSAHAGFFVEDNFMVGPQLPMPFFPTPRYQRPAPVVHRGFGRYRPRGPYTPWGQRPRPSKRRAPANPEPRPQ

SEQ ID NO: 31294 - protein, 134 aa, Homo sapiens
RFRPRPPSAVQGPSVSAPGPRLPASPGPGPGTMSEKSVEAAAELSAKDLKEKKEKVEEKASRKERKKEVVEEEENGAEEEEEETAEDGEEEDEGEEEDEEEEEEDDEGPALKRAAEEEDEADPKRQKTENGASA

SEQ ID NO: 31295 - protein, 23 aa, Homo sapiens
IDNIMTLHVMDQLTPSRSVNWFI

SEQ ID NO: 31296 - protein, 84 aa, Homo sapiens
ITKVSKAHQETFPSLCQLGKYTTNSSADHRVQLDLGLWDKFSELATKCIIKIVEFAKRLPGFTGLSIADQITLLKAACLDILVS

SEQ ID NO: 31297 - protein, 97 aa, Homo sapiens
MDLGLRSMSSSLQLRRLPRACWREARTTTSPSSPTMTSKTTSAGSGTCRLRRSGQNECIHPFPHPCHLEEFSQACSAPCPSSLSTAGSLFNTATFPY

SEQ ID NO: 31298 - protein, 6 aa, Homo sapiens
ITRKTA

SEQ ID NO: 31299 - protein, 394 aa, Homo sapiens
ILVADIWSSYNMADIDNKEQSELDQDLDDVEEVEEEETGEETKLKARQLTVQMMQNPQILAALQERLDGLVETPTGYIESLPRVVKRRVNALKNLQVKCAQIEAKFYEEVHDLERKYAVLYQPLFDKRFEIINAIYEPTEEECEWKPDEEDEISEELKEKAKIEDEKKDEEKEDPKGIPEFWLTVFKNVDLLSDMVQEHDEPILKHLKDIKVKFSDAGQPMSFVLEFHFEPNEYFTNEVLTKTYRMRSEPDDSDPFSFDGPEIMGCTGCQIDWKKGKNVTLKTIKKKQKHKGRGTVRTVTKTVSNDSFFNFFAPPEVPESGDLDDDAEAILAADFEIGHFLRERIIPRSVLYFTGEAIEDDDDDYDEEGEEADEGYQLFEEVKSCSKLFQRWLQ

SEQ ID NO: 31300 - protein, 9 aa, Homo sapiens
RKECHFENY

SEQ ID NO: 31301 - protein, 7 aa, Homo sapiens
MSSQLDS

SEQ ID NO: 31302 - protein, 74 aa, Homo sapiens [sequence omitted]

SEQ ID NO: 31303 - protein, 17 aa, Homo sapiens
ILFDLRSRSRPRGGSRP

SEQ ID NO: 31304 - protein, 28 aa, Homo sapiens
LLSGSTVPSGTVKLTVSWEISVKRMFFH

SEQ ID NO: 31305 - protein, 24 aa, Homo sapiens
MAKKSLKILLDLDSHLEGFRKSRN

SEQ ID NO: 31306 - protein, 30 aa, Homo sapiens
VMSETKVYSSVCRCVAPPFSPAAPHIQSRS

SEQ ID NO: 31307 - protein, 42 aa, Homo sapiens
ICRRTKSKLQICIDLCMMRCLVIDQMLLNPLIHRFYRKHVLH

SEQ ID NO: 31308 - protein, 7 aa, Homo sapiens
LMKVLPN

SEQ ID NO: 31309 - protein, 10 aa, Homo sapiens
LAQMFHYSAG

SEQ ID NO: 31310 - protein, 10 aa, Homo sapiens
IRKVSFVVLS

SEQ ID NO: 31311 - protein, 18 aa, Homo sapiens
VQPPSLPLLFLPSLAPCL

SEQ ID NO: 31312 - protein, 134 aa, Homo sapiens
LETAGWTPTCAFQLLLEPQGPRKAVWSLQPGPSPGRNTSTFAKDSLIHHHGTQKKKMQKRRLKLWPTQGGCKLFEIFLVEKWGSKFPPLNLGRPSDCLTNRNSMEATLYRFLRLSLKRLAVPTSCHLGIIVLET

SEQ ID NO: 31313 - protein, 43 aa, Homo sapiens
KRNIIFSRMKPWQPKQDSLANHDREVLMDELLMKDCQQLLYWK

SEQ ID NO: 31314 - protein, 37 aa, Homo sapiens
KRMKPWQPKQDSLANHDREVLMDELLMKDCQQLLYWK

SEQ ID NO: 31315 - protein, 9 aa, Homo sapiens
KAFPLGDQH

SEQ ID NO: 31316 - protein, 26 aa, Homo sapiens
LKTMVLNLLASQPPFESLDSSAEQIL

SEQ ID NO: 31317 - protein, 184 aa, Homo sapiens
IANMPNSEPASLLELFNSIATQGELVRSLKAGNASKDEIDSAVKMLVSLKMSYKAAAGEDYKADCPPGNPAPTSNHGPDATEAEEDFVDPWTVQTSSAKGIDYDKLIVRFGSSKIDKELINRIERATGQRPHHFLRRGIFFSHRDMNQVLDAYENKKPFYLYTGRGPSSEAMHVGHLIPFIFTK

SEQ ID NO: 31318 - protein, 85 aa, Homo sapiens
LLHKKIQVGQHGHSSVEDATTAMELYRLVEVQWEQQEARSLWTCPEDREPDSSTDMEQYMEDQYWPDDLAHGSRGGAREAQDRRN

SEQ ID NO: 31319 - protein, 219 aa, Homo sapiens
LLLLTTLRVKLCDRPRSENVIKKKGGSRRAQGRGEMEPSQCVEELEDDVFQPEDGEPVTQPGSLLSADLFAQSLLDCPLSRLQLFPLTHCCGPGLRPTSQEDKATQTLSPASPSQGVMLPCGVTEEPQRLFYGNAGYRLPLPASFPAVLPIGEQPPEGQWQHQAEVQIARKLQCIADQFHRLHVQQHQQNQNRVWWQILLFLHNLALNGEENRNGAGPR

SEQ ID NO: 31320 - protein, 36 aa, Homo sapiens
ICSASYRYHNLDQVQAKRPECYKMLRSQSKKKWKRI

SEQ ID NO: 31321 - protein, 55 aa, Homo sapiens
KRQIILCMEALDHTPDTSFERDVVCEDEDAFCLSLENIATLQKLLRQVLSSQIMP

SEQ ID NO: 31322 - protein, 22 aa, Homo sapiens
LAVSRGRLFSGAVDSTVKVWTC

SEQ ID NO: 31323 - protein, 87 aa, Homo sapiens
KTPGHPGSWEMGLLTFRDVAVEFSLEEWEHLEPAQKNLYQDVMLENYRNLVSLGLVVSKPDLITFLEQRKEPWNVKSEETVAIQPGH

SEQ ID NO: 31324 - protein, 8 aa, Homo sapiens
LLLTAEIK

SEQ ID NO: 31325 - protein, 25 aa, Homo sapiens
ISKEEFPLKHRNLLLPAPCPTNIQH

SEQ ID NO: 31326 - protein, 31 aa, Homo sapiens
KYLAQIIVMGVQVVGRAFARALRQEFAASTP

SEQ ID NO: 31327 - protein, 262 aa, Homo sapiens
VKISKDPSKIPSWLKVNKIYYPDFIVPDPKKAAVWEITGAEFSKSEAHTADGISIRFPRCTRIRDDKDWKSATNLPQLKELYQLSKEKADFTVVAGDEGSSTTGGSSEENKGPSGSAVSRKAPSKPSASTKKAEGKLSNSNSKDGNMQTAKPSAMKVGEKLATKSSPVKVGEKRKAADETLCQTKVLLDIFTGVRLYLPPSTPDFSRLRRYFVAFDGDLVQEFDMTSATHVLGSRDKNPAAQQVSPEWIWACIRKRRLVAPC

SEQ ID NO: 31328 - protein, 30 aa, Homo sapiens
LESAKAGTRFPGPQWGCANPRELVAETSTT

SEQ ID NO: 31329 - protein, 65 aa, Homo sapiens
KSYLFPPASLLPPTGFLTSQDQLEKVVRVGKRLLSEDCPANQLGFIPFTSTFCTRGRGKGGSPGS

SEQ ID NO: 31330 - protein, 32 aa, Homo sapiens
LMPEAMVDTKGGFPTIRMHLLCFEIATMDSYG

SEQ ID NO: 31331 - protein, 61 aa, Homo sapiens
KTWPLQSVLSTASSLRPLVMMVQSASVSKAGKGSSSSHGVAAALNQDLDPDPKCHVFNVSK

SEQ ID NO: 31332 - protein, 8 aa, Homo sapiens
IFPTEQMT

SEQ ID NO: 31333 - protein, 25 aa, Homo sapiens
LSTKSHGNNGVKKIVSWVFVTYKLS

SEQ ID NO: 31334 - protein, 10 aa, Homo sapiens
VTKSRIFLVV

SEQ ID NO: 31335 - protein, 26 aa, Homo sapiens
LKKRVHTVSSCWFWITLECVSNPKPG

SEQ ID NO: 31336 - protein, 29 aa, Homo sapiens
VARHVLLRGAPGPGGWPHRPLGKTCKEFA

SEQ ID NO: 31337 - protein, 64 aa, Homo sapiens
INPWMIQERIFMSTIQPSLADQRLEFKLILDMSALVMTLMYSCMDLYAIFFHYPRSTLDTSCLN

SEQ ID NO: 31338 - protein, 6 aa, Homo sapiens
MKYSHL

SEQ ID NO: 31339 - protein, 56 aa, Homo sapiens
IQVNKAPKMRRRTYRAHGRINPYMSSPCHIEMILTEKEQIVPKPEEEVAQKKKVNK

SEQ ID NO: 31340 - protein, 32 aa, Homo sapiens
KMAEVEQKKKRTFRKFTYRGVDLDQLLDMSYA

SEQ ID NO: 31341 - protein, 17 aa, Homo sapiens
VSELQGEISRPAKLSSR

SEQ ID NO: 31342 - protein, 30 aa, Homo sapiens
LLPTSDHPTSLLRRGRMSRARPSPVRVAAL

SEQ ID NO: 31343 - protein, 24 aa, Homo sapiens
LGQRRRRKRWTSRTRPRGSSAAAS

SEQ ID NO: 31344 - protein, 12 aa, Homo sapiens
RPPAALDCVFPP

SEQ ID NO: 31345 - protein, 35 aa, Homo sapiens
VNEVIEILMEDPSGWWKGRLHGQEGLFPGNYVEKI

SEQ ID NO: 31346 - protein, 42 aa, Homo sapiens
VSYGPQCLWWMDRPTSHSRGWDEATGDSRAVWPGWVWVSCCC

SEQ ID NO: 31347 - protein, 69 aa, Homo sapiens
LGAFVSITHFGSKFKKGRLVRTHPERDLTFLRGSLSNLMDFVKKTGICASKWEWGTTHNFLYKHVPRSS

SEQ ID NO: 31348 - protein, 107 aa, Homo sapiens
RRSPTLLSAGQGGETKTLQGLQLFTICSSLKRRKNGALLSSDVARIKKISFFMTLPLPEFPALFHLIQLQLALRHGLAARRAGPAAGPAAAQRLTVAQHSHSAHRAG

SEQ ID NO: 31349 - protein, 62 aa, Homo sapiens
VPPIDVLWIKGAQGGDYFYSFGGCHRYAAYQQLQRETIPAKLVQSTLSDLRVYLGASTPDLQ

SEQ ID NO: 31350 - protein, 20 aa, Homo sapiens
VGTGLDFSGEGSQGILKGGH

SEQ ID NO: 31351 - protein, 55 aa, Homo sapiens
LTFSPTSFPRKDTAGVSLVMWKRTGLRPQKGLNRRWRPPVPSMATHPGTWQTAPR

SEQ ID NO: 31352 - protein, 6 aa, Homo sapiens
MSHPAG

SEQ ID NO: 31353 - protein, 16 aa, Homo sapiens
MQTFSFKCQAHVCFYH

SEQ ID NO: 31354 - protein, 26 aa, Homo sapiens
VGLALCGQTLVVRGGSRFLATSIASR

SEQ ID NO: 31355 - protein, 56 aa, Homo sapiens
IEKFDYVFAENGTVQYKHGRLLSKQTIQNHLGEELLQDLINFCLSYMALLRLPKKR

SEQ ID NO: 31356 - protein, 122 aa, Homo sapiens
MSHRKFSAPRHGSLGFLPRKRSSRHRGKVKSFPKDDPSKPVHLTAFLGYKAGMTHIVREVDRPGSKVNKKEVVEAVTIVETPPMVVVGIVGYVETPRGLRTFKTVFAEHISDECKRRFYKNW

SEQ ID NO: 31357 - protein, 39 aa, Homo sapiens
LHDHGLTGEPEVLCRDQRKALIPSLQPVQLSTWLTLGTQ

SEQ ID NO: 31358 - protein, 29 aa, Homo sapiens
LMTVGWLPKEIQKADFRQTLSAFLMGFAS

SEQ ID NO: 31359 - protein, 6 aa, Homo sapiens
LSSKKF

SEQ ID NO: 31360 - protein, 854 aa, Homo sapiens
MYAWVLQAGCRCVEVDCWDGPDGEPIVHHGYTLTSKILFKDVIETINKYAFIKNEYPVILSIENHCSVIQQKKMAQYLTDILGDKLDLSSVSSEDATTLPSPQMLKGKILVKGKKLPANISEDAEEGEVSDEDSADEIDDDCKLLNGDASTNRKRVENTAKRKLDSLIKESKIRDCEDPNNFSVSTLSPSGKLGRKSKAEEDVESGEDAGASRRNGRLVVGSFSRRKKKGSKLKKAASVEEGDEGQDSPGGQSRGATRQKKTMKLSRALSDLVKYTKSVATHDIEMEAASSWQVSSFSETKAHQILQQKPAQYLRFNQQQLSRIYPSSYRVDSSNYNPQPFWNAGCQMVALNYQSEGRMLQLNRAKFSANGGCGYVLKPGCMCQGVFNPNSEDPLPGQLKKQLVLRIISGQQLPKPRDSMLGDRGEIIDPFVEVEIIGLPVDCSREQTRVVDDNGFNPTWEETLVFMVHMPEIALVRFLVWDHDPIGRDFIGQRTLAFSSMMPGYRHVYLEGMEEASIFVHVAVSDISGKVKQALGLKGLFLRGPKPGSLDSHAAGRPPARPSVSQRILRRTASAPTKSQKPGRRGFPELVLGTRDTGSKGVADDVVPPGPGPAPEAPAQEGPGSGSPRGKAPAAVAEKSPVRVRPPRVLDGPGPAGMAATCMKCVVGSCAGVNTGGLQRERPPSPGPASRQAAIRQQPRARADSLGAPCCGLDPHAIPGRSREAPKGPGAWRQGPGGSGSMSSDSSSPDSPGIPERSPRWPEGACRQPGALQGEMSALFAQKLEEIRSKSPMFSAGKPLLPCVVLPHAPGMAGPGSPAAASAWTVSPRVLVLVALYPWHCLRGTLLPWLACGP

SEQ ID NO: 31361 - protein, 80 aa, Homo sapiens
MATPSILKSQVFPLVQPCLSANWPVSIVMKFKYVEQRSSLVLLQNSLKIYPAYRRENRGLWPAPGKEDETPTYTLSILYS

SEQ ID NO: 31362 - protein, 188 aa, Homo sapiens
MRGNFVCKEKTQLPLDRLLIDWPTPEDPEPLVISEVLHQVTPVFRHPPCSNWPQREKGIQGHQASEKDMMHSASSPPPPRALQAESRQLVDLYKVLESRGSDPKPENPACPWTVLPAGDLPTHDGYLPSNIDDLPSHEAPLADSLEELEPQHISLSVFPSSSLHPLTFSCGDKLTLDQLKMRCDSLML

SEQ ID NO: 31363 - protein, 16 aa, Homo sapiens
MTNICPPEERTGTRCL

SEQ ID NO: 31364 - protein, 877 aa, Homo sapiens
MDYYYYLSLSGSYKVDDIDDRREFQETLHAMNVIGIFAEEQTLVLQIVAGILHLGNISFKEVGNYAAVESEEFLAFPAYLLGINQDRLKEKLTSRQMDSKWGGKSESIHVTLNVEQACYTRDALAKALHARVFDFLVDSINKAMEKDHEEYNIGVLDIYGFEIFQKNGFEQFCINFVNEKLQQIFIELTLKAEQEEYVQEGIRWTPIEYFNNKIVCDLIENKVNPPGIMSILDDVCATMHAVGEGADQTLLQKLQMQIGSHEHFNSWNQGFIIHHYAGKVSYDMDGFCERNRDVLFMDLIELMQSSELPFIKSLFPENLQADKKGRPTTAGSKIKKQANDLVSTLMKCTPHYIRCIKPNETKKPRDWEESRVKHQVEYLGLKENIRVRRAGYAYRRIFQKFLQRYAILTKATWPSWQGEEKQGVLHLLQSVNMDSDQFQLGRSKVFIKAPESLFLLEEMRERKYDGYARVIQKSWRKFVARKKYVQMREEASDLLLNKKERRRNSINRNFIGDYIGMEEHPELQQFVGKREKIDFADTVTKYDRRFKGVKRDLLLTPKCLYLIGREKVKQGPDKGLVKEVLKRKIEIERILSVSLSTMQDDIFILHEQEYDSLLESVFKTEFLSLLAKRYEEKTQKQLPLKFSNTLELKLKKENWGPWSAGGSRQVQFHQGFGDLAVLKPSNKVLQVSIGPGLPKNSRPTRRNTTQNTGYSSGTQNANYPVRAAPPPPGYHQNGVIRNQYVPYPHAPGSQRSNQKSLYTSMARPPLPRQQSTSSDRVSQTPESLDFLKVPDQGAAGVRRQTTSRPPPAGGRPKPQPKPKPQVPQCKALYAYDAQDTDELSFNANDIIDIIKEDPSGWWTGRLRGKQGLFPNNYVTKI

SEQ ID NO: 31365 - protein, 27 aa, Homo sapiens
MVHCHCFSAVANTWITHLILCVFIIKL

SEQ ID NO: 31366 - protein, 19 aa, Homo sapiens
MHTSNTSQAMASAKAEAIG

SEQ ID NO: 31367 - protein, 54 aa, Homo sapiens
MVLDVPVDNLKEHGTWDMTAPSIPSGGRQSLSVRQHPAFMRTVCCLLTEPPVVY

SEQ ID NO: 31368 - protein, 428 aa, Homo sapiens [sequence omitted]

SEQ ID NO: 31369 - protein, 214 aa, Homo sapiens
MAIRLRGMDLEETSVLTQALAQSGQQLEWPEAWRQQLVDKHSTGGVGDKVSLVLAPALAACGCKVPMISGRGLGHTGGTLDKLESIPGFNVIQSPEQMQVLLDQAGCCIVGQSEQLVPADGILYAARDVTATVDSLPLITGDLTPWPASACSQAPDLQTQVKGLSLGVTRHLTVCPPTPITRCLTTTMWGGLILNPPGAATPIIRDLTLNAQGP

SEQ ID NO: 31370 - protein, 325 aa, Homo sapiens
MKALCPTIFPVVPRLLNRMYDKIFSQANTPLKRWLLEFAAKRKQAEVRSGIIRNDSIWDELFFNKIQASLGGCVRMIVTGAAPASPTVLGFLRAALGCQVYEGYGQTECTAGCTFTTPGDWTSGHVGAPLPCNHIKLVDVEELNYWACKGEGEICVRGPNVFKGYLKDPDRTKEALDSDGWLHTGDIGKWLPGEYVAPEKIENIYIRSQPVAQIYVHGDSLKAFLVGIVVPDPEVMPSWAQKRGIEGTYADLCTNKDLKKAILEDMVRLGKESGLHSFEQVKAIHIHSDMFSVQNGLLTPTLKAKRPELREYFKKQIEELYSISM

SEQ ID NO: 31371 - protein, 329 aa, Homo sapiens
MIYEPHFTYSLLEHVELPRSREVWADSRSPGIISQASAPRTTGTPRTSLPHFHHPETSRPDSNIYKKPPIYKQRESVGGSPQTKHLIEDLIIESSKFPAAQPPDPNQPAKIETDYWPCPPSLAVVETEWRKRKASRRGAEEEEEEEDDDSGEEMKALRERQREELSKVTSNLGKMILKEEMEKSLPIRRKTRSLPDRTPFHTSLHQGTSKSSSLPAYGRTTLSRLQSTEFSPSGSETGSPGLQNGEGQRGRMDRGNSLPCVLEQKIYPYEMLVVTNKGRTKLPPGVDRMRLERHLSAEDFSRVFAMSPEEFGKLALWKRNELKKKASLF

SEQ ID NO: 31372 - protein, 194 aa, Homo sapiens
MLQCYRCRQWFHEACTQCLNEPMMFGDRFYLFFCSVCNQGPEYIERLPLRWVDVVHLALYNLGVQSKKKYFDFEEILAFVNHHWELLQLGKLTSTPVTDRGPHLLNALNSYKSRFLCGKEIKKKKCIFRLRIRVPPNPPGKLLPDKGLLPNENSASSELRKRGKSKPGVTSPQPGAPTTTWLAYLTSRWMKFKV

SEQ ID NO: 31373 - protein, 776 aa, Homo sapiens
MEQDTAAVAATVAAADATATIVVIEDEQPGPSTSQEEGAAAAATEATAATEKGEKKKEKNVSSFQLKLAAKAPKSEKEMDPEYEEKMKADRAKRFEFLLKQTELFAHFIQPSAQKSPTSPLNMKLGRPRIKKDEKQSLISAGDYRHRRTEQEEDEELLSESRKTSNVCIRFEVSPSYVKGGPLRDYQIRGLNWLISLYENGVNGILADEMGLGKTLQTIALLGYLKHYRNIPGPHMVLVPKSTLHNWMNEFKRWVPSLRVICFVGDKDARAAFIRDEMMPGEWDVCVTSYEMVIKEKSVFKKFHWRYLVIDEAHRIKNEKSKLSEIVREFKSTNRLLLTGTPLQNNLHELWALLNFLLPDVFNSADDFDSWFDTKNCLGDQKLVERLHAVLKPFLLRRIKTDVEKSLPPKKEIKIYLGLSKMQREWYTKILMKDIDVLNSSGKMDKMRLLNILMQLRKCCNHPYLFDGAEPGPPYTTDEHIVSNSGKMVVLDKLLAKLKEQGSRVLIFSQMTRLLDILEDYCMWRGYEYCRLDGQTPHEEREEAIEAFNAPNSSKFIFMLSTRAGGLGINLASADVVILYDSDWNPQVDLQAMDRAHRIGQKKPVRVFRLITDNTVEERIVERAEIKLRLDSIVIQQGRLIDQQSNKLAKEEMLQMIRHGATHVFASKESELTDEDITTILERGEKKTAEMNERLQKMGESSLRNFRMDIEQSLYKFEGEDYREKQKLGMVEWIEPPKRERKANYAVDAYFREALRVSEPKIPKVKLYKASFYVLK

SEQ ID NO: 31374 - protein, 358 aa, Homo sapiens
KCLPRVRPFYAVKCNSSPGVLKVLAQLGLGFSCANKAEMELVQHIGIPASKIICANPCKQIAQIKYAAKHGIQLLSFDNEMELAKVVKSHPSAKMVLCIATDDSHSLSCLSLKFGVSLKSCRHLLENAKKHHVEVVGVSFHIGSGCPDPQAYAQSIADARLVFEMGTELGHKMHVLDLGGGFPGTEGAKVRFEEIASVINSALDLYFPEGCGVDIFAELGRYYVTSAFTVAVSIIAKKEVLLDQPGREEENGSTSKTIVYHLDEGVYGIFNSVLFDNICPTPILQKKPSTEQPLYSSSLWGPAVDGCDCVAEGLWLPQLHVGDWLVFDNMGAYTVGMGSPFWGTQACHITYAMSRVAW

SEQ ID NO: 31375 - protein, 66 aa, Homo sapiens
ICVHDVSSIYRVPLLLEEQGVVDYFLRRLDLPIERQPRKMLMKWKEMADRFACNEELGVLASFTLL

SEQ ID NO: 31376 - protein, 48 aa, Homo sapiens
LAVVEFSRNVLGWQDANSTEFDPTTSHPVGNSMETQTTWKRGTATDLR

SEQ ID NO: 31377 - protein, 176 aa, Homo sapiens
ISFSTYNCFSIRYRTMEVTTRLTWNDENHLRKLLGNVSLSLLYKSSVHGGSIEDMVERCSRQGCTITMAYIDYNMIVAFMLGNYINLHESSTEPNDSLWFSLQKKNDTTEIETLLLNTAPKIIDEQLVCRLSKTDIFIICRDNKIYLDKMITRNLKLRFYGHRQYLECEVFRVEGL

SEQ ID NO: 31378 - protein, 35 aa, Homo sapiens
RNCFYSILPVIQIIYPEVNSKASDGSYNTHRLSIY

SEQ ID NO: 31379 - protein, 558 aa, Homo sapiens
LGHFAGFVGAHWWNQQDAALGRATDSKEPPGELCPDVLYRTGRTLHGQETYTPRLILMDLKGSLSSLKEEGGLYRDKQLDAAIAWQGKLTTHKEELYPKNPYLQDFLSAEGVLSSDGVWRVKSIPNGKGSSPLPTATTPKPLIPTEASIRVWSDFLRVHLHPRSICMIQKYNHDGEAGRLEAFGQGESVLKEPKYQEELEDRLHFYVEECDYLQGFQILCDLHDGFSGVGAKAAELLQDEYSGRGIITWGLLPGPYHRGEAQRNIYRLLNTAFGLVHLTAHSSLVCPLSLGGSLGLRPEPPVSFPYLHYDATLPFHCSAILATALDTVTVPYRLCSSPVSMVHLADMLSFCGKKVVTAGAIIPFPLAPGQSLPDSLMQFGGATPWTPLSACGEPSGTRCFAQSVVLRGIDRACHTSQLTPGTPPPSALHACTTGEEILAQYLQQQQPGVMSSSHLLLTPCRVAPPYPHLFSSCSPPGMVLDGSPKGAAVESIPVFGALCSSSSLHQTLEALARDLTKLDLRRWASFMDAGVEHDDVAELLQELQSLAQCYQGGDSLVD

SEQ ID NO: 31380 - protein, 107 aa, Homo sapiens
LAFRVMRLQDELVTLRLECTNLYRKGHFTSLELVPPSTLTTTHLKAEPLTKATHSSSTSWFRKPMTRAELVAISSSEDEGNLRFVYELLSWVEEMQVGAYPKAYAVH

SEQ ID NO: 31381 - protein, 105 aa, Homo sapiens
IAQLPSPAIDHEQLRQQQEEMRQLRESIAEHKPHIDKLLKIGPQLKELNPEEGEMVEEKYQKAENMYAQIKEEVRQRALALDEAVSQSTQVCVCLTLITLNCLLF

SEQ ID NO: 31382 - protein, 331 aa, Homo sapiens
IKSFKTNNNALEKAGLNAPSGTTMEKGGNIQLEIPDFSNSVLSHLNQLRMQGRLCDIVVNVQGQAFRAHKVVLAASSPYFRDHMSLNEMSTVSISVIKNPTVFEQLLSFCYTGRICLQLADIISYLTAASFLQMQHIIDKCTQILEGIHFKINVAEVEAELSQTRTKHQERPPESHRVTPNLNRSLSPRHNTPKGNRRGQVSAVLDIRELSPPEESTSPQIIEPSSDVESREPILRINRAGQWYVETGVADRGGRSDDEVRVLGAVHIKTENLEEWLGPENQPSGEDGSSAEEVTAMVIDTTGHGSVGQENYTLGSSGAKVARPTSSEVDR

SEQ ID NO: 31383 - protein, 9 aa, Homo sapiens
IGTIQRRLA

SEQ ID NO: 31384 - protein, 761 aa, Homo sapiens
LVRSPVSKSAAAPTVTSVRGTSAHFGIQLRGGTRLPDRLSWPCGPGSAGWQQEFAAMDSSETLDASWEAACSDGARRVRAAGSLPSAELSSNSCSPGCGPEVPPTPPGSHSAFTSSFSFIRLSLGSAGERGEAEGCPPSREAESHCQSPQEMGAKAASLDGPHEDPRCLSRPFSLLATRVSADLAQAARNSSRPERDMHSLPDMDPGSSSSLDPSLAGCGGDGSSGSGDAHSWDTLLRKWEPVLRDCLLRNRRQMEVISLRLKLQKLQEDAVENDDYDKAETLQQRLEDLEQEKISLHFQLPSRQPALSSFLGHLAAQVQAALRRGATQQASGDDTHTPLRMEPRLLEPTAQDSLHVSITRRDWLLQEKQQLQKEIEALQARMFVLEAKDQQLRREIEEQEQQLQWQGCDLTPLVGQLSLGQLQEVSKALQDTLASAGQIPFHAEPPETIRSLQERIKSLNLSLKEITTKVCMSEKFCSTLRKKVNDIETQLPALLEAKMHAISGNHFWTAKDLTEEIRSLTSEREGLEGLLSKLLVLSSRNVKKLGSVKEDYNRLRREVEHQETAYETSVKENTMKYMETLKNKLCSCKCPLLGKVWEADLEACRLLIQSLQLQEARGSLSVEDERQMDDLEGAAPPIPPRLHSEDKRKTPLKVLEEWKTHLIPSLHCAGGEQKEESYILSAELGEKCEDIGKKLLYLEDQLHTAIHSHDEDLIQSLRRELQMVKETLQAMILQLQPAKEAGEREAAASCMTAGVHEAQA

SEQ ID NO: 31385 - protein, 326 aa, Homo sapiens
VDGLPSPKTPKSPGEKTRYDTSLGLLTKKFIYLLSESEDGVLDLNWAAEVLDVQKRRIYDITNVLEGIQLIRKKAKNNIQWVGRGMFEDPTRPGKQQQLGQELKELMNTEQALDQLIQSCSLSFKHLTEDKANKRLAYVTYQDIRAVGNFKEQTVIAVKAPPQTRLEVPDRTEDNLQIYLKSTQGPIEVYLCPEEVQEPDSPSEEPLPSTSTLCPSPDSAQPSSSTDPSIMEPTASSVPAPAPTPQQAPPPPSLVPLEATDSLLELPHPLLQQTEDQFLSPTLACSSPLISFSPSLDQDDYLWGLEAGEGISDLFDSYDLGDLLIN

SEQ ID NO: 31386 - protein, 143 aa, Homo sapiens [sequence omitted]

SEQ ID NO: 31387 - protein, 253 aa, Homo sapiens
KQCLAEFKRDLEWVERLDVTLGPVPEIGGSEAPAPQNKDQKAVDPEDDFQREMSFYRQAQAAVLAVLPRLHQLKVPTKRPTDYFAEMAKSDLQMQKIRQKLQTKQAAMERSEKAKQLRALRKYGKKVQTEVLQKRQQEKAHMMNAIKKYQKGFSDKLDFLEGDQKPLAQRKKAGAKGQQMRKGPSAKRRYKNQKFGFGGKKKGSKWNTRESYDDVSSFRAKTAHGRGLKRPGKKGSNKRPGKRTREKMKNRTH

SEQ ID NO: 31388 - protein, 17 aa, Homo sapiens
IGSTGCRKSTAQDLLPC

SEQ ID NO: 31389 - protein, 53 aa, Homo sapiens
ILDEVEKRHQISMAVIYPFMQGLREAAFPAPGKTVTLKSFIPDSGTEVKVQRN

SEQ ID NO: 31390 - protein, 171 aa, Homo sapiens
ICSRRQRVSFGVSEQQAVEAWEKLTREEGTPLTLYYSHWRKLRDREIQLEISGKERLEDLNFPEIKRRKMADRKDEDRKQFKDLFDLNSSEEDDTEGFSERGILRPLSTRHGVEDDEEDEEEGEEDSSNSEGEWSWDGDPDAEAGLAPGELQQLAQGPEDELEDLQLSEDD

SEQ ID NO: 31391 - protein, 1231 aa, Homo sapiens
IGPEEDYDPGYFNNESDIIFQDLEKLKSRPAHLGVFLRYIFSQADPSPLLFYLCAEVYQQASPKDSRSLGKDIWNIFLEKNAPLRVKIPEMLQAEIDSRLRNSEDARGVLCEAQEAAMPEIQEQIHDYRTKRTLGLGSLYGENDLLDLDGDPLRERQVAEKQLAALGDILSKYEEDRSAPMDFALNTYMSHAGIRLREARPSNTAEKAQSAPDKDKWLPFFPKTKKSSNSKKEKDALEDKKRNPILKYIGKPKSSSQSTFHIPLSPVEVKPGNVRNIIQHFENNQQYDAPEPGTQRLSTGSFPEDLLESDSSRSEIRLGRSESLKGREEMKRSRKAENVPRSRSDVDMDAAAEATRLHQSASSSTSSLSTRSLENPTPPFTPKMGRRSIESPSLGFCTDTLLPHLLEDDLGQLSDLEPEPDAQNWQHTVGKDVVAGLTQREIDRQEVINELFVTEASHLRTLRVLDLIFYQRMKKENLMPREELARLFPNLPELIEIHNSWCEAMKKLREEGPIIKEISDLMLARFDGPAREELQQVAAQFCSYQSIALELIKTKQRKESRFQLFMQEAESHPQCRRLQLRDLIISEMQRLTKYPLLLESIIKHTEGGTSEHEKLCRARDQCREILKYVNEAVKQTENRHRLEGYQKRLDATALERASNPLAAEFKSLDLTTRKMIHEGPLTWRISKDKTLDLHVLLLEDLLVLLQKQDEKLLLKCHSKTAVGSSDSKQTFSPVLKLNAVLIRSVATDKRAFFIICTSKLGPPQIYELVALTSSDKNTWMELLEEAVRNATRHPGAAPMPVHPPPPGPREPAQQGPTPSRVELDDSDVFHGEPEPEELPGGTGSQQRVQGKHQVLLEDPEQEGSAEEEELGVLPCPSTSLDGENRGIRTRNPIHLAFPGPLFMEGLADSALEDVENLRHLILWSLLPGHTMETQAAQEPEDDLTPTPSVISVTSHPWDPGSPGQAPPGGEGDNTQLAGLEGERPEQEDMGLCSLEHLPPRTRNSGIWESPELDRNLAEDASSTEAAGGYKVVRKAEVAGSKVVPALPESGQSEPGPPEVEGGTKATGNCFYVSMPSGPPDSSTDHSEAPMSPPQPDSLPAGQTEPQPQLQGGNDDPRRPSRSPPSLALRDVGMIFHTIEQLTLKLNRLKDMELAHRELLKSLGGESSGGTTPVGSFHTEAARWTDGSLSPPAKEPLASDSRNSHELGPCPEDGSDAPLEDSTADAAASPGP

SEQ ID NO: 31392 - protein, 8 aa, Homo sapiens
ISLYTLMD

SEQ ID NO: 31393 - protein, 44 aa, Homo sapiens
LLLPVIFLPWVLPQHKHTSATPGFSSEKQFMSETENQTANVKFY

SEQ ID NO: 31394 - protein, 22 aa, Homo sapiens
VVGPSEQSSWFWRWLRRLDCGV

SEQ ID NO: 31395 - protein, 14 aa, Homo sapiens
IAAAEQGFWKALRT

SEQ ID NO: 31396 - protein, 38 aa, Homo sapiens
RTHMNKEGNSKTSRQMDTLDTVKSNRRRQTVGGCAHVR

SEQ ID NO: 31397 - protein, 42 aa, Homo sapiens
IMEYKKTTKAMKKRRMFYLHPISKPLLSCYCMSLQAQYRASS

SEQ ID NO: 31398 - protein, 66 aa, Homo sapiens
LAREFLTDVNRLCNAVVQRVEAREEEEEETHMATLGQYLVHGRGFLLLTKLNSIIDQRWGFTVLTS

SEQ ID NO: 31399 - protein, 43 aa, Homo sapiens
KRSTITSREIQTAVRLLLPGKLAKHAVSEGTKAVTKYTSSNIF

SEQ ID NO: 31400 - protein, 726 aa, Homo sapiens
LAFYKFQKMSRGYSENNNFLNNNNQMVLDMILYPLIGIPQTINWETIARLVPGLTPKECAKRFDELKSSGSSPVDNQYNSLMAAGESPVETLATYIKSSLLDIHGEFQETPVGHDAVSKTGRHSIASTRNCSSESENCTTHNGGEMTEESEGPNMVIHVCDEAKNLKEDFTCPRDLLISEMKYFAEYLSMDAQRWEEVDISVHCDVHIFNWLIKYIKRNTKENKDCEMPTLEPGNVISILISSEFLKMDSLVEQCIQYCHKNMNAIVATPCNMNCINANLLTRIADLFSHNEVDDLKDKKDKFKSKLFCKKIERLFDPEYLNPDSRSNAATLYRCCLCKKLLTKETERRIPCIPGKINVDRRGNIVYIHIRDKTWDVHEYLNSLFEELKSWRDVYWRLWGTINWLTCSRCYQAFLCIEFSHCQYHSETVVYPTAASSLNTVGTGIYPCCNQKVLRFDPTQLTKGCKVRDHMVTLRDQGEGGDLPSCPTARMLDDLHKYRDVIVVPFSKDTVSDVGVGLCDEKGIECDVLLEPNTPWGPKTGELNAFLSLKNWTLQLKQQSLFSEEEEYTTGSEVTEDEVGDEEEVSKKQRKKEKPKKFTRQPKKQVSSPCAQRKEKALEKSASRDVSPFVMSMQKNKWDATRSLRFNQDAQREDDQRRMTEITGHLIKMRLGDLDRVKSKEAKEFAGGIYSRLEAQIKASVPVSARQSSSEKNTRSKSRFGQGRPA

SEQ ID NO: 31401 - protein, 68 aa, Homo sapiens
LPTSLAVGLSWEGGRRAPGVRTRPPAVPVCARVILTRDAGTVFKSQGRVSACPRTSCLYISPFTAPTI

SEQ ID NO: 31402 - protein, 33 aa, Homo sapiens
LTFEMDGCSSSCWRSSLERGCLNPPRDECASTA

SEQ ID NO: 31403 - protein, 130 aa, Homo sapiens
LEENRLIPTELRREALALQGSLEFDDAGGEGVTSHVDDEYRWAGVEDPKVMITTSRDPSSRLKMFAKELKLVFPGAQRMNRGRHEVGALVRACKANGVTDLLVVHEHRGTPGKAGGRESGWEPSEGRRGL

SEQ ID NO: 31404 - protein, 55 aa, Homo sapiens
KNSSVLSRLCEKIWRKFCIMSSWNIQFLHKGFNCDGGPRIILLDWLSFCLQYNYK

SEQ ID NO: 31405 - protein, 25 aa, Homo sapiens
MVNQALKEEIKEMHGLRIFTSVPKR

SEQ ID NO: 31406 - protein, 77 aa, Homo sapiens
LWEVCPPSIATMPQILYFRQLWVDYWQNCWSWPFVCWWRYWWHYPICQMGFPFPGKCRENHTLLRQTLRDGSWSCSL

SEQ ID NO: 31407 - protein, 12 aa, Homo sapiens
IQLSLQDWEELG

SEQ ID NO: 31408 - protein, 13 aa, Homo sapiens
VVSFQISLFHKYL

SEQ ID NO: 31409 - protein, 57 aa, Homo sapiens
KRMLPTTMPVVTIPLARRSLTQCWIGSASCLTSAQDFRASWCSTALVGALALASPHS

SEQ ID NO: 31410 - protein, 2124 aa, Homo sapiens
INPCGHLFRTAGDQPFNLSTVSSAFPMVSHPVFGLHSASSGHSEFGGLGTLGTPTALAAHPQLASFPGAEWWRTTDAHTRTGATFFPPLLGIPPLFAPPAQNHDSSSFHSRTSGKSNRNGPEKGVNGSINGSNTSSVIGINTSVLSTTASSSMGQTKSTSSGGGNRKCNQEQSKNQPLDARVDKIKDKKPRKKAMESSSNSDSDSGTSSDTSSEGISSSDSDDLEEDEEEEDQSIEESEDDDSDSESEAQHKSNNQVLLHGISDPKADGQKATEKAQEKRIHQPLPLASESQTHSFQSQQKQPQVLSQQLPFIFQSSQAKEESVNKHTSVIQSTGLVSNVKPLSLVNQAKKETYMKLIVPSPDVLKAGNKNTSEESSLLTSELRSKREQYKQAFPSQLKKQESSKSLKKVIAALSNPKATSSSPAHPKQTLENNHPNPFLTNALLGNHQPNGVIQSVIQEAPLALTTKTKMQSKINENIAAASSTPFSSPVNLSTSGRRTPGNQTPVMPSASPILHSQGKEKAVSNNVNPVKTQHHSHPAKSLVEQFRGTDSDIPSSKDSEDSNEDEEEDDEEEDEEDDEDDESDDSQSESDSNSESDTEGSEEEDDDDKDQDESDSDTEGEKTSMKLNKTTSSVKSPSMSLTGHSTPRNLHIAKAPGSAPAALCSESQSPAFLGTSSSTLTSSPHSGTSKRRRVTDERELRIPLEYGWQRETRIRNFGGRLQGEVAYYAPCGKKLRQYPEVIKYLSRNGIMDISRDNFSFSAKIRVGDFYEARDGPQGMQWCLLKEEDVIPRIRAMEGRRGRPPNPDRQRAREESRMRRRKGRPPNVGNAEFLDNADAKLLRKLQAQEIARQAAQIKLLRKLQKQEQARVAKEAKKQQAIMAAEEKRKQKEQIKIMKQQEKIKRIQQIRMEKELRAQQILEAKKKKKEEAANAKLLEAEKRIKEKEMRRQQAVLLKHQERERRRQHMMLMKAMEARKKAEEKERLKQEKRDEKRLNKERKLEQRRLELEMAKELKKPNEDMCLADQKPLPELPRIPGLVLSGSTFSDCLMVVQFLRNFGKVLGFDVNIDVPNLSVLQEGLLNIGDSMGEVQDLLVRLLSAAVCDPGLITGYKAKTALGEHLLNVGVNRDNVSEILQIFMEAHCGQTELTESLKTKAFQAHTPAQKASVLAFLINELACSKSVVSEIDKNIDYMSNLRRDKWVVEGKLRKLRIIHAKKTGKRDTSGGIDLGEEQHPLGTPTPGRKRRRKGGDSDYDDDDDDDSDDQGDEDDEDEEDKEDKKGKKTDICEDEDEGDQAASVEELEKQIEKLSKQQSQYRRKLFDASHSLRSVMFGQDRYRRRYWILPQCGGIFVEGMESGEGLEEIAKEREKLKKAESVQIKEEMFETSGDSLNCSNTDHCEQKEDLKEKDNTNLFLQKPGSFSKLSKLLEVAKMPPESEVMTPKPNAGANGCTLSYQNSGKHSLGSVQSTATQSNVEKADSNNLFNTGSSGPGKFYSPLPNDQLLKTLTEKNRQWFSLLPRTPCDDTSLTHADMSTASLVTPQSQPPSKSPSPTPAPLGSSAQNPVGLNPFALSPLQVKGGVSMMGLQFCGWPTGVVTSNIPFTSSVPSLGSGLGLSEGNGNSFLTSNVASSKSESPVPQNEKATSAQPAAVEVAKPVDFPSPKPIPEEMQFGWWRIIDPEDLKALLKVLHLRGIREKALQKQIQKHLDYITQACLKNKDVAIIELNENEENQVTRDIVENWSVEEQAMEMDLSVLQQVEDLERRVASASLQVKGWMCPEPASEREDLVYFEHKSFTKLCKEHDGEFTGEDESSAHALERKSDNPLDIAVTRLADLERNIERRIEEDIAPGLRVWRRALSEARSAAQVALCIQQLQKSIAWEKSIMKVYCQICRKGDNEELLLLCDGCDKGCHTYCHRPKITTIPDGDWFCPACIAKASGQTLKIKKLHVKGKKTNESKKGKKVTLTGDTEDEDSASTSSSLKRGNKDLKKRKMEENTSINLSKQESFTSVKKPKRDDSKDLALCSMILTEMETHEDAWPFLLPVNLKLVPGYKKVIKKPMDFSTIREKLSSGQYPNLETFALDVRLVFDNCETFNEDDSDIGRAGHNMRKYFEKKWTDTFKVS

SEQ ID NO: 31411 - protein, 9 aa, Homo sapiens
MHILVELLF

SEQ ID NO: 31412 - protein, 8 aa, Homo sapiens
LEFTFFMT

SEQ ID NO: 31413 - protein, 14 aa, Homo sapiens
MRSRRFCATSSCAS

SEQ ID NO: 31414 - protein, 26 aa, Homo sapiens
LPSRICSSCFPSLFGATMQQTSGFLG

SEQ ID NO: 31415 - protein, 551 aa, Homo sapiens
IVVEVDHGKTFSCHRNVLAAISPYFRSMFTSGLTESTQKEVRIVGVEAESMDLVLNYAYTSRVILTEANVQALFTAASIFQIPSIQDQCAKYMISHLDPQNSIGVFIFADHYGHQELGDRSKEYIRKKFLCVTKEQEFLQLTKDQLISILDSDDLNVDREEHVYESIIRWFEHEQNEREVHLPEIFAKCIRFPLMEDTFIEKIPPQFAQAIAKSCVEKGPSNTNGCTQRLGMTASEMIICFDAAHKHSGKKQTVPCLDIVTGRVFKLCKPPNDLREVGILVSPDNDIYIAGGYRPSSSEVSIDHKAENDFWMYDHSTNRWLSKPSLLRARIGCKLVYCCGKMYAIGGRVYEGDGRNSLKSVECYDSRENCWTTVCAMPVAMEFHNAVEYKEKIYVLQGEFFLFYEPQKDYWGFLTPMTVPRIQGLAAVYKDSIYYIAGTCGNHQRMFTVEAYDIELNKWTRKKDFPCDQSINPYLKLVLFQNKLHLFVRATQVTVEEHVFRTSRKNSLYQYDDIADQWMKVYETPDRLWDLGRHFECAVAKLYPQCLQKVL

SEQ ID NO: 31416 - protein, 114 aa, Homo sapiens
LRVCFGIPSIWPLLRKKKQLTKHCDNKDYSVCSLQDIHDDIENEFFVFTRYSYMRRSILNSLNIFSSVGPAWQDLSEGMMERLLDYMIWIKPWVEAILPWLNLPGMSLRVKRWQ

SEQ ID NO: 31417 - protein, 291 aa, Homo sapiens
KQLRPLNCQAGKQAEEMSTIGSFEGFQAVSLKQEGDDQPSETDHLSMEEEDPMPRQISRQSSVTESTLYPNPYHQPYISRKYFATRPGAIETAMEDLKGHVAETSGETIQGFWLLTKIDHWNNEKERILLVTDKTLLICKYDFIMLSCVQLQRIPLSAVYRICLGKFTFPGMSLDKRQGEGLRIYWGSPEEQSLLSRWNPWSTEVPYATFTEHPMKYTSEKFLEICKLSGFMSKLVPAIQNAHKNSTGSGRGKKLMVLTEPILIETYTGLMSFIGNRNKLGYSLARGSIGF

SEQ ID NO: 31418 - protein, 22 aa, Homo sapiens
IRRSYRCSHRLIICLNVIGDAL

SEQ ID NO: 31419 - protein, 36 aa, Homo sapiens
LSLLQASWCLHTSGSWPRKSQQEQGMGEGRCHTTWR

SEQ ID NO: 31420 - protein, 21 aa, Homo sapiens
MVWTSSDTLMQQTQLFTALTK

SEQ ID NO: 31421 - protein, 661 aa, Homo sapiens
INLHNFSNSVLETLNEQRNRGHFCDVTVRIHGSMLRAHRCVLAAGSPFFQDKLLLGYSDIEIPSVVSVQSVQKLIDFMYSGVLRVSQSEALQILTAASILQIKTVIDECTRIVSQNVGDVFPGIQDSGQDTPRGTPESGTSGQSSDTESGYLQSHPQHSVDRIYSALYACSMQNGSGERSFYSGAVVSHHETALGLPRDHHMEDPSWITRIHERSQQMERYLSTTPETTHCRKQPRPVRIQTLVGNIHIKQEMEDDYDYYGQQRVQILERNESEECTEDTDQAEGTESEPKGESFDSGVSSSIGTEPDSVEQQFGPGAARDSQAEPTQPEQAAEAPAEGGPQTNQLETGASSPERSNEVEMDSTVITVSNSSDKSVLQQPSVNTSIGQPLPSTQLYLRQTETLTSNLRMPLTLTSNTQVIGTAGNTYLPALFTTQPAGSGPKPFLFSLPQPLAGQQTQFVTVSQPGLSTFTAQLPAPQPLASSAGHSTASGQGEKKPYECTLCNKTFTAKQNYVKHMFVHTGEKPHQCSICWRSFSLKDYLIKHMVTHTGVRAYQCSICNKRFTQKSSLNVHMRLHRGEKSYECYICKKKFSHKTLLERHVALHSASNGTPPAGTPPGARAGPPGVVACTEGTTYVCSVCPAKFDQIEQFNDHMRMHVSDG

SEQ ID NO: 31422 - protein, 12 aa, Homo sapiens
IACMGKNTFDVI

SEQ ID NO: 31423 - protein, 16 aa, Homo sapiens
ILANMAYGSYSVCCFV

SEQ ID NO: 31424 - protein, 913 aa, Homo sapiens
IPLLDHKMDMEYMGSGKLGQILKQIWRQNQMLKQALLGDDLCEGAGGATWMATVVFLGQELSSALHQLLEHTSGTLRSTCQQLHVLLDKENQCVSRKEIITFIDCLIKITEHLGSTAALLKKEEKEICNLCGMHDECTPQQTMSSIQDTKAADIAARGELNVIETATVSPTNGEESHYTNQVQLEKNKTHMSSALVEKENNTSLNGRVLGQEESQNKMFPDNAENEDDKQIEHMTVENINGNREETHGIIQTTETEIQETSESPREEMTTSSIICDISKKYINSTLPNDSENIKHKNNIMEKEYLDVLSDVTGPQVSCYITAPSYVLQQLECRIINHMSSLIVGDNEELVSNVITIECSDKEKRVPFPIGIAIPFTARYRGNYRDIMVKVCDINLQSSYLNPNSLEGMKGGYKGTCASVKVYKLGIFSVVSCLKKESFTVTKKGLALKSSMDSRISLNYPPGVFTSPVLVQLKIQPVDPALVAHLKAQQDTFYSVQSTSPLIHIQHPSTYPFQKPVTLFLPCSPYLDKNNLGSEIDHKRRASATINRITPSYFNRTKIASIRKPRKNASECLKLLGFRSQDSGWCGLDDVVKTIQSGLVSVELYEHLERFIVLHLSSTMDNSHLVTFVKSLEEAMLSTTACIVLSHQKDNPHRIAVLVVPSKDLSQVLKDLHLEGFGGPPEPSRHFQVREGEQLLLRFTGNIFASSNGKDYGKDYTLIFHLQRKPRLELQIKEVDEFGNYSCPHYKGTIVVYKVPKGKIVPNLNQSLVINENHSQLPICKLPLKLPKHKKLINRPQSTKRVSKDPVEALWDNLLHWLAEELSEENAESLSSTLPLRRSTIQLIKLKNPDDLTEQIHEFLCFWKKSLPTFTDKLRLLARHLRKIGRSDLAEELKFKWENKVFTEPQQCFDVAPE

SEQ ID NO: 31425 - protein, 942 aa, Homo sapiens
KFVTSFHQSDMEDDEEEEDGGLLNYLFTFLLKSHEANSNAVRFRVCLLINKLLGSMPENAQIDDDVFDKINKAMLIRLKDKIPNVRIQAVLALSRLQDPKDDECPVVNAYATLIENDSNPEVRRAVLSCIAPSAKTLPKIVGRTKDVKEAVRKLAYQVLAEKVHMRAMSIAQRVMLLQQGLNDRSDAVKQAMQKHLLQGWLRFSEGNILELLHRLDVENSSEVAVSVLNALFSITPLSELVGLCKNNDGRKLIPVETLTPEIALYWCALCEYLKSKGDEGEEFLEQILPEPVVYADYLLSYIQSIPVVNEEHRGDFSYIGNLMTKEFIGQQLILIIKSLDTSEEGGRKKLLAVLQEILILPTIPISLVSFLVERLLHIIIDDNKRTQIVTEIISEIRAPIVTVGVNNDPADVRKKELKMAEIKVKLIEAKEALENCITLQDFNRASELKEEIKALEDARINLLKETEQLEIKEVHIEKNDAETLQKCLILCYELLKQMSISTGLSATMNGIIESLILPGIISIHPVVRNLAVLCLGCCGLQNQDFARKHFVLLLQVLQIDDVTIKISALKAIFDQLMTFGIEPFKTKKIKTLHCEGTEINSDDEQESKEVEETATAKNVLKLLSDFLDSEVSELRTGAAEGLAKLMFSGLLVSSRILSRLILLWYNPVTEEDVQLRHCLGVFFPVFAYASRTNQECFEEAFLPTLQTLANAPASSPLAEIDITNVAELLVDLTRPSGLNPQAKTSQDYQALTVHDNLAMKICNEILTSPCSPEIRVYTKALSSLELSSHLAKDLLVLLNEILEQVKDRTCLRALEKIKIQLEKGNKEFGDQAEAAQDATLTTTTFQNEDEKNKEVYMTPLRGVKATQASKSTQLKTNRGQRKVTVSARTNRRCQTAEADSESDHEVPEPESEMKMRLPRRAKTAALEKSKLNLAQFLNEDLS

SEQ ID NO: 31426 - protein, 717 aa, Homo sapiens
IGKRKHSIASSRFQVALFGRFYTDLIPVMEDTGIQRGIWDGDAKAVQQCLTDIFTSVYTTCDIPENAIFGPCVLSHTSLYDSIAFIALKSTDKRTVPYIFRVDTSAANGSSEGLMWLRLVQSARDKEEQNLEAYIKNGQLFYRSLRRIAKDEELLVWYGKELTELLLLCPSRSHNKMNGSSPYTCLECSQRFQFEFPYVAHLRFRCPKRLHSADISPQDEQGGGVGTKDHGGGGGGGKDQQQQQQEAPLGPGPKFCKAGPLHHYPSPSPESSNPSAAAGGSSAKPSTDFHNLARELENSRGGSSCSPAQSLSSGSGSGGGGGHQEAELSPDGIATGGGKGKRKFPEEAAEGGGGAGLVGGRGRFVERPLPASKEDLVCTPQQYRASGSYFGLEENGRLFAPPSPETGEAKRSAFVEVKKAARAASLQEEGTADGAGVASEDQDAGGGGGSSTPAAASPVGAEKLLAPRPGGPLPSRLEGGSPARGSAFTSVPQLGSAGSTSGGGGTGAGAAGGAGGGQGAASDERKSAFSQPARSFSQLSPLVLGQKLGALEPCHPADGVGPTRLYPAAADPLAVKLQGAADLNGGCGSLPSGGGGLPKQSPFLYATAFWPKSSAAAAAAAAAAAAGPLQLQLPSALTLLPPSFTSLCLPAQNWCAKCNASFRMTSDLVYHMRSHHKKEYAMEPLVKRRREEKLKCPICNESFRERHHLSRHMTSHN

SEQ ID NO: 31427 - protein, 131 aa, Homo sapiens
IGAQSNDDSEYVRAVYRMSEMIFRRIKMPWLWLDLWYLMFKEGWEHKKSLQILHTFTNSVIAERANEMNANEDCRGDGRGSAPSKNKRRAFLDLLLSVTDDEGNRLSHEDIREEVDTFMFEVLYIVRFRYH

SEQ ID NO: 31428 - protein, 171 aa, Homo sapiens
LLASKFEEIYPPEVAEFVYITDDTYTKKQVLRMEHLVLKVLTFDLAAPTVNQFLTQYFLHQQPANCKVESLAMFLGELSLIDADPYLKYLPSVIAGAAFHLALYTVTGQSWPESLIRKTGYTLESLKPCLMDLHQTYLKAPQHAQQSIREKYKNSKYHGVSLLNPPETLNL

SEQ ID NO: 31429 - protein, 148 aa, Homo sapiens
ILNRERETVPVELEPKRTIQSLKEKTEKVKDPKTAADVVSPGANSVDSRVQRPKEESSEDENEVSNILRSGRSKQFYNQTYGSRKYKSDWGYSGRGGYQHVRSEESWKGQPSRSRDEGYQYHRNVRGRPFRGDRRRSGMGDGHRGQHT

SEQ ID NO: 31430 - protein, 16 aa, Homo sapiens
MHPKQNIKRTKRKKST

SEQ ID NO: 31431 - protein, 8 aa, Homo sapiens
ITCFRLGK

SEQ ID NO: 31432 - protein, 17 aa, Homo sapiens
MRTSLGPNGKSPPFRVF

SEQ ID NO: 31433 - protein, 39 aa, Homo sapiens
TILLESKDLLLFVNLPSFMYILEGMRPTSTMIIFICLFV

SEQ ID NO: 31434 - protein, 36 aa, Homo sapiens
KLLDLEGKSSFTPLPKVSHRPLQHAFPAGSLYTFRL

SEQ ID NO: 31435 - protein, 702 aa, Homo sapiens
LKRFNDPSGCAPSPGAYDVKTLEVLKGPVSFQKSQRFKQQKESKQNLNVDKDTTLPASARKVKSSESKIRVLLQERGAQDRRIQDLETELEKMEARLNAALREKTSLSANNATLEKQLIELTRTNELLKSKFSENGNQKNLRILSLELMKLRNKRETKMRGMMAKQEGMEMKLQVTQRSLEESQGKIAQLEGKLVSIEKEKIDEKSETEKLLEYIEEISCASDQVEKYKLDIAQLEENLKEKNDEILSLKQSLEENIVILSKQVEDLNVKCQLLEKEKEDHVNRNREHNENLNAEMQNLKQKFILEQQEREKLQQKELQIDSLLQQEKELSSSLHQKLCSFQEEMVKEKNLFEEELKQTLDELDKLQQKEEQAERLVKQLEEEAKSRAEELKLLEEKLKGKEAELEKSSAAHTQATLLLQEKYDSMVQSLEDVTAQFESYKALTASEIEDLKLENSSLQEKAAKAGKNAEDVQHQILATESSNQEYVRMLLDLQTKSALKETEIKEITVSFLQKITDLQNQLKQQEEDFRKQLEDEEGRKAEKENTTAELTEEINKWRLLYEELYNKTKPFQLQLDAFEVEKQALLNEHGAAQEQLNKIRDSYAKLLGHQNLKQKIKHVVKLKDENSQLKSEVSKLRCQLAKKKQSETKLQEELNKVLGIKHFDPSKAFHHESKENFALKTPLKEGNTNCYRAPMECQESWK

SEQ ID NO: 31436 - protein, 565 aa, Homo sapiens
LDKCRNEMMTMTESYEQEKYTLQREVELKSRMLESLSCECEAIKQQQKMHLEKLEEQLSRSHGQEVNELKTKIEKLKVELDEARLSEKQLKHQVDHQKELLSCKSEELRVMSERVQESMSSEMLALQIELTEMESMKTTLKEEVNELQYRQEQLELLITNLMRQVDRLKEEKEEREKEAVSYYNALEKARVANQDLQVQLDQALQQALDPNSKGNSLFAEVEDRRAAMERQLISMKVKYQSLKKQNVFNREQMQRMKLQIATLLQMKGSQTEFEQQERLLAMLEQKNGEIKHLLGEIRNLEKFKNLYDSMESKPSVDSGTLEDNTYYTDLLQMKLDNLNKEIESTKGELSIQRMKALFESQRALDIERKLFANERCLQLSESENMKLRAKLDELKLKYEPEETVEVPVLKKRREVLPVDITTAKDACVNNSALGGEVYRLPPQKEETQSCPNSLEDNNLQLEKSVSIYTPVVSLSPHKNLPVDMQLKKEKKCVKLIGVPADAEALSERSGNTPNSPRLAAESKLQTEVKEGKETSSKLEKETCKKLHPILYVSSKSTPETQCPQQ

SEQ ID NO: 31437 - protein, 53 aa, Homo sapiens
MLPSVSLAGDMMILKYRKTLKMFPLKLSVPPMVMPGLRLMGNCILRVRLEHLC

SEQ ID NO: 31438 - protein, 60 aa, Homo sapiens
IMKIVFYKEKFLPDNPEEDFGKLTIKESAKPLLMMWRLTAIFLFQLILPRCISQKTLIHR

SEQ ID NO: 31439 - protein, 95 aa, Homo sapiens
KGTSSFGKRRNKTHTLCRRCGSKAYHLQKSTCGKCGYPAKRKRKYNWSAKAKRRNTTGTGRMRHLKIVYRRFRHGFREGTTPKPKRAAVAASSSS

SEQ ID NO: 31440 - protein, 120 aa, Homo sapiens
LGNYLEMRLKSSFLRGLGSWKSNPLRLGGWTILLTLTMGQGEPGGPQGDPWVPHELLLPSLCDSSHASSWGSGSITCAWRGGDSSSHPLVSGHILSNSPVAAVMCSSMGTHLSPFKGTLL

SEQ ID NO: 31441 - protein, 174 aa, Homo sapiens
IFRQLLPVMPEPSKSAPAPKKGSKKAVTKAQKKDGKKRKRSRKESYSVYVYKVLKQVHPDTGISSKAMGIMNSFVNDIFERIAGEASRLAHYNKRSTITSREIQTAVRLLLPGELAKHAVSEGTKAVTKYTSSKKRKRRFTESIKKAHGFRKLKIWLKLRVSNQSPDDIYIARD

SEQ ID NO: 31442 - protein, 135 aa, Homo sapiens
LGEFGVRNVHTTDFPGNYSGYDDAWDQDRFEKNFRVDVVHMDENSLEFDMVGIDAAIANAFRRILLAEVPTMAVEKVLVYNNTSIVQDEILAHRLGLIPIHADPRLFEYRNQGEKMKFWEKWTIWVQILVDCDVG

SEQ ID NO: 31443 - protein, 45 aa, Homo sapiens
ICAGDEEGTEIDTLQFRLQVRCTRNPHAAKDSSDPNELYVNHKGE

SEQ ID NO: 31444 - protein, 368 aa, Homo sapiens
TRPATAAAASPDAPPACAATMERPEAGGINSNECENVSRKKKMSEEFEANTMDSLVDMPFATVDIQDDCGITDEPQINLKRSQENEWVKSDQVKKRKKKRKDYQPNYFLSIPITNKEIIKGIKILQNAIIQQDERLAKAMVSDGSFHITLLVMQLLNEDEVNIGIDALLELKPFIEELLQGKHLTLPFQGIGTFGNQVGFVKLAEGDHVNSLLEIAETANRTFQEKGILVGESRSFKPHLTFMKLSKSPWLRKNGVKKIDPDLYEKFISHRFGEEILYRIDLCSMLKKKQSNGYYHCESSIVIGEKNGGEPDDAELVRLSKRLVENAVLKAVQQYLEETQNKNKPGEGSSVKTEAADQNGNDNENNRK

SEQ ID NO: 31445 - protein, 244 aa, Homo sapiens
TMTDYGEEQRNELEALESIYPDSFTVLSENPPSFTITVTSEAGENDETVQTTLKFTYSEKYPDEAPLYEIFSQENLEDNDVSDILKLLALQAEENLGMVMIFTLVTAVQEKLNEIVDQIKTRREEEKKQKEKEAEEAEKQLFHGTPVTIENFLNWKAKFDAELLEIKKKRMKEEEQAGKNKLSGKQLFETDHNLDTSDIQFLEDAGNNVEVDESLFQEMDDLELEDDEDDPDYNPADPESDSAD

SEQ ID NO: 31446 - protein, 72 aa, Homo sapiens
IAAGGVMDVNTALQEVLKTALIHDGLARGIREAAKALDKYVYQSQYCGFLQPEQNCHPREEGMEFMVLAQKF

SEQ ID NO: 31447 - protein, 17 aa, Homo sapiens
RSVGIQGIAIYSSSGSL

SEQ ID NO: 31448 - protein, 13 aa, Homo sapiens
LARRSCPRSLVSR

SEQ ID NO: 31449 - protein, 18 aa, Homo sapiens
LRRVPGCILCLPNSASWV

SEQ ID NO: 31450 - protein, 40 aa, Homo sapiens
RQKFSEQVFKVASSDLVNMGISVVSYTLKDIHDDQVKLGN

SEQ ID NO: 31451 - protein, 118 aa, Homo sapiens
VTISPSRTEALNHHNLLVCSVTDFYPGQIKVRWFRNDQEETAGVVSTPLIRNGDWTFQILVMLEMTPQRGDVYTCHVEHPSLQSPITVEWRKGILSFCYYGPTRQRAPSDPFLPISYP

SEQ ID NO: 31452 - protein, 11 aa, Homo sapiens
LALSMRRLVVF

SEQ ID NO: 31453 - protein, 295 aa, Homo sapiens
IDFDKLEIPQPDFEVPGADCLLSKEQLRSIYESSLSIGNFASRLLVHLFPELFTHENLRKQYNCSGSLGKKQLDPSRIKLIRHYVQLLYPRAKNDRVWTLEFVGKLDERCRRRDTEQRRSYQQQRKVHVPGPECRDLTSYAINPERFREEFEGPPLPPERSSKDFCKIPLDELVVPSPDFPVPSPYLLSDKEVREIVQQSLSVGNFAARLLVRLFPELFTAENLRLQYNHSGACNKKQLDPTRLRLIRHYVEAVYPVEKMEEVWHYECIPSIDERCRRPNRKKCDILKKAKKVEK

SEQ ID NO: 31454 - protein, 12 aa, Homo sapiens
LAELPLFAMDFG

SEQ ID NO: 31455 - protein, 51 aa, Homo sapiens
IDLMVNSGKLGTTVKPKSLVTSSSGALKKQHKKPFDAMNNIVANLLLNLTR

SEQ ID NO: 31456 - protein, 205 aa, Homo sapiens
LAFGEVQITYLTHACMDLKLGDKRMVFDPWLIGPAFARGWWLLHEPPSDWLERLCQADLIYISHLHSDHLSYPTLKKLAGRRPDIPIYVGNTERPVFWNLNQSGVQLTNINVVPFGIWQQVDKNLRFMILMDGVHPEMDTCIIVEYKGHKILNIVDCTRPNGGRLPMKVALMMSDFAGGASGFPMTFSGGKFTVYIHCLPECVTT

SEQ ID NO: 31457 - protein, 182 aa, Homo sapiens
IKETNTKNDPNELNNLIKKNSDVITWTPRPGATLDLGRMLKDRTDSKGIIEPPEGTKIYKDSWDFEPYLEILNAALGDEIFLHSSWIKEYFTWAGFKDYNLVVRMIETDEDFNPFPGGYDYLVDFLDLSFPKERPQREHPYEEIHSRVDVIRHVVKNGLLWDELYIGFQTRLQRDPDIYHHL

SEQ ID NO: 31458 - protein, 24 aa, Homo sapiens
VCDKHLVNHYYCKRPIYEFKITWW

SEQ ID NO: 31459 - protein, 586 aa, Homo sapiens
ISSVDVKSEVPVGLEPISPLDLRTDLRMMMPVVDPVVREKQLQQELLLIQQQQQIQKQLLIAEFQKQHENLTRQHQAQLQEHIKELLAIKQQQELLEKEQKLEQQRQEQEVERHRREQQLPPLRGKDRGRERAVASTEVKQKLQEFLLSKSATKDTPTNGKNHSVSRHPKLWYTAAHHTSLDQSSPPLSGTSPSYKYTLPGAQDAKDDFPLRKTASEPNLKVRSRLKQKVAERRSSPLLRRKDGNVVTSFKKRMFEVTESSVSSSSPGSGPSSPNNGPTGSVTENETSVLPPTPHAEQMVSQQRILIHEDSMNLLSLYTSPSLPNITLGLPAVPSQLNASNSLKEKQKCETQTLRQGVPLPGQYGGSIPASSSHPHVTLEGKPPNSSHQALLQHLLLKEQMRQQKLLVAGGVPLHPQSPLATKERISPGIRGTHKLPRHRPLNRTQSAPLPQSTLAQLVIQQQHQQFLEKQKQYQQQIHMNKLLSKSIEQLKQPGSHLEEAEEELQGDQAMQEDRAPSSGNSTRSDSSACVDDTLGQVGAVKVKEEPVDSDEDAQIQEMESGEQAAFMQQVIGKDLAPGFVIKVII

SEQ ID NO: 31460 - protein, 38 aa, Homo sapiens
ITDPILQHHQEESNIIGSSLGSPVSEDSKDVEDLVNCH

SEQ ID NO: 31461 - protein, 37 aa, Homo sapiens
KMGLRELRIKSAESSTSLWIKRDVWMKLQSQEEAREN

SEQ ID NO: 31462 - protein, 33 aa, Homo sapiens
LKMCTHFCKLIMIILEKEEKSFFFADENKGVFG

SEQ ID NO: 31463 - protein, 12 aa, Homo sapiens
VDQASQECGHVF

SEQ ID NO: 31464 - protein, 1023 aa, Homo sapiens
LPKVLSRRGVGAGLEAAERESFERTQTVSINKAINTQEVAVKEKHARTCILGTHHEKGAQTFWSVVNRLPLSSNAVLCWKFCHVFHKLLRDGHPNVLKDSLRYRNELSDMSRMWGHLSEGYGQLCSIYLKLLRTKMEYHTKNPRFPGNLQMSDRQLDEAGESDVNNFFQLTVEMFDYLECELNLFQTVFNSLDMSRSVSVTAAGQCRLAPLIQVILDCSHLYDYTVKLLFKLHSCLPADTLQGHRDRFMEQFTKLKDLFYRSSNLQYFKRLIQIPQLPENPPNFLRASALSEHISPVVVIPAEASSPDSEPVLEKDDLMDMDASQQNLFDNKFDDIFGSSFSSDPFNFNSQNGVNKDEKDHLIERLYREISGLKAQLENMKTESQRVVLQLKGHVSELEADLAEQQHLRQQAADDCEFLRAELDELRRQREDTEKAQRSLSEIERKAQANEQRYSKLKEKYSELVQNHADLLRKNAEVTKQVSMARQAQVDLEREKKELEDSLERISDQGQRKTQEQLEVLESLKQELATSQRELQVLQGSLETSAQSEANWAAEFAELEKERDSLVSGAAHREEELSALRKELQDTQLKLASTEESMCQLAKDQRKMLLVGSRKAAEQVIQDALNQLEEPPLISCAGSADHLLSTVTSISSCIEQLEKSWSQYLACPEDISGLLHSITLLAHLTSDAIAHGATTCLRAPPEPADSLTEACKQYGRETLAYLASLEEEGSLENADSTAMRNCLSKIKAIGEELLPRGLDIKQEELGDLVDKEMAATSAAIETATARIEEMLSKSRAGDTGVKLEVNERILGCCTSLMQAIQVLIVASKDLQREIVESGRGTASPKEFYAKNSRWTEGLISASKAVGWGATVMVDAADLVVQGRGKFEELMVCSHEIAASTAQLVAASKVKADKDSPNLAQLQQASRGVNQATAGVVASTISGKSQIEETDNMDFSSMTLTQIKRQEMDSQVRVLELENELQKERQKLGELRKKHYELAGVAEGWEEGTEASPPTLQEVVTEKE

SEQ ID NO: 31465 - protein, 161 aa, Homo sapiens
LYFQGPSSNKPRVIREVRADSVGKLVTVRGIVTRVSEVKPKMVVATYTCDQCGAETYQPIQSPTFMPLIMCPSQECQTNRSGGRLYLQTRGSRFIKFQEMKMQEHSDQVPVGNIPRSITVLVEGENTRIAQPGDHVSVTGIFLPILRTGFRQVVQVRKSLT

SEQ ID NO: 31466 - protein, 55 aa, Homo sapiens
LDRPCFVMTASCKSPVRTYERFTVTYTLLNNLQDFLAVRLVWTPEHAQAGRSAAR

SEQ ID NO: 31467 - protein, 435 aa, Homo sapiens
LGWLLDPPKDGWSEQQQILNGTPLYMYQDCPMQGRRDTDHWLRSNWIYRGEEASRVHVELQFTVRDCKSFPGGAGPLGCKETFNLLYMESDQDVGIQLRRPLFQKVTTVAADQSFTIRDLVSGSVKLNVERCSLGRLTRRGLYLAFHNPGACVALVSVRVFYQRCPETLNGLAQFPDTLPGPAGLVEVAGTCLPHARASPRPSGAPRMHCSPDGEWLVPVGRCHCEPGYEEGGSGEACVACPSGSYRMDMDTPHCLTCPQQSTAESEGATICTCESGHYRAPGEGPQVACTGPPSAPRNLSFSASGTQLSLRWEPPADTGGRQDVRYSVRCSQCQGTAQDGGPCQPCGVGVHFSPGARGLTTPAVHVNGLEPYANYTFNVEAQNGVSGLGSSGHASTSVSISMGHAGERLRGAGTGTWWRQKGLRPQNKLMGRKP

SEQ ID NO: 31468 - protein, 21 aa, Homo sapiens
RKMMMRKKTTWKLRKKMESWS

SEQ ID NO: 31469 - protein, 40 aa, Homo sapiens
TDPSGWSGHHWRPSAAIPQFHFLKPQVRSRCTTLCRTPES

SEQ ID NO: 31470 - protein, 32 aa, Homo sapiens
LTSMVPTTRQLLELSCFLEKVPRCGWHLSFYS

SEQ ID NO: 31471 - protein, 15 aa, Homo sapiens
IFGLLFFFMYLIIGF

SEQ ID NO: 31472 - protein, 10 aa, Homo sapiens
MAFLPSSPNR

SEQ ID NO: 31473 - protein, 7 aa, Homo sapiens
KKRICEV

SEQ ID NO: 31474 - protein, 7 aa, Homo sapiens
TASSSMC

SEQ ID NO: 31475 - protein, 20 aa, Homo sapiens
LKEPSPWRKMGLDPTSKPPL

SEQ ID NO: 31476 - protein, 1027 aa, Homo sapiens
LAERKASAHSIVECDPVRKEVSVRTGGLADKSSRKTYTFDMVFGASTKQIDVYRSVVCPILDEVIMGYNCTIFAYGQTGTGKTFTMEGERSPNEEYTWEEDPLAGIIPRTLHQIFEKLTDNGTEFSVKVSLLEIYNEELFDLLNPSSDVSERLQMFDDPRNKRGVIIKGLEEITVHNKDEVYQILEKGAAKRTTAATLMNAYSSRSHSVFSVTIHMKETTIDGEELVKIGKLNLVDLAGSENIGRSGAVDKRAREAGNINQSLLTLGRVITALVERTPHVPYRESKLTRILQDSLGGRTRTSIIATISPASLNLEETLSTLEYAHRAKNILNKPEVNQKLTKKALIKEYTEEIERLKRDLAAAREKNGVYISEENFRVMSGKLTVQEEQIVELIEKIGAVEEELNRVTELFMDNKNELDQCKSDLQNKTQELETTQKHLQETKLQLVKEEYITSALESTEEKLHDAASKLLNTVEETTKDVSGLHSKLDRKKAVDQHNAEAQDIFGKNLNSLFNNMEELIKDGSSKQKAMLEVHKTLFGNLLSSSVSALDTITTVALGSLTSIPENVSTHVSQIFNMILKEQSLAAESKTVLQELINVLKTDLLSSLEMILSPTVVSILKINSQLKHIFKTSLTVADKIEDQKKELDGFLSILCNNLHELQENTICSLVESQKQCGNLTEDLKTIKQTHSQELCKLMNLWTERFCALEEKCENIQKPLSSVQENIQQKSKDIVNKMTFHSQKFCADSDGFSQELRNFNQEGTKLVEESVKHSDKLNGNLEKISQETEQRCESLNTRTVYFSEQWVSSLNEREQELHNLLEVVSQCCEASSSDITEKSDGRKAAHEKQHNIFLDQMTIDEDKLIAQNLELNETIKIGLTKLNCFLEQDLKLDIPTGTTPQRKSYLYPSTLVRTEPREHLLDQLKRKQPELLMMLNCSENNKEETIPDVDVEEAVLGQYTEEPLSQEPSVDAGVDCSSIGGVPFFQHKKSHGKDKENRGINTLERSKVEETTEHLVTKSRLPLRAQINL

SEQ ID NO: 31477 - protein, 241 aa, Homo sapiens
RPSPPSAAMSTRSVSSSSYRRMFGGPGTASRPSSSRSYVTTSTRTYSLGSALRPSTSRSLYASSPGGVYATRSSAVRLRSSVPGVRLLQDSVDFSLADAINTEFKNTRTNEKVELQELNDRFANYIDKVRFLEQQNKILLAELEQLKGQGKSRLGDLYEEEMRELRRQVDQLTNDKARVEVERDNLAEDIMRLREKLQEEMLQREEAENTLQSFRQVCRLSSHSQPPDPTQHNPRAILKVA

SEQ ID NO: 31478 - protein, 33 aa, Homo sapiens
MLQTDDTPIKRCLQTKWPYIELLWTTDRSPSLN

SEQ ID NO: 31479 - protein, 116 aa, Homo sapiens
TSFLVLQEILESEEKGDPNKPSGFRSVKAPVTKVAASIGNAQKLPMCDKCGTGIVGVFVKLRDRHRHPECYVCTDCGTNLKQKGHFFVEDQIYCEKHARERVTPPEGYEVVTVFPK

SEQ ID NO: 31480 - protein, 35 aa, Homo sapiens
KCLPLKASVVVFKPQKSHTQDHLTPTLTSVHDAGP

SEQ ID NO: 31481 - protein, 98 aa, Homo sapiens
VVEVVARNHDHQEIAVPVANLKLSCQPMLSLDDFQLQPPVTFRLKSGSGPVRITGRHQIVTMSNDVSEEESEEEEEDSDEEEVELCPILPAKKQGGRP

SEQ ID NO: 31482 - protein, 70 aa, Homo sapiens
IPPGHCLKSWSWNYYRIVARYENTLAAQFFGHTHVDEFEVFYDEETLSRPLAVAFLAPSATTYIGLNPGE

SEQ ID NO: 31483 - protein, 116 aa, Homo sapiens
LESHWFVWVTQMNHIVMEIDQEAYRDWFSSQLTATCNVEQSFFNDWFSGHLNFQIEHHLFPTMPRHNLHKIAPLVKSLCAKHGIEYQEKPLLRALLDIIRSLKKSGKLWLDAYLHK

SEQ ID NO: 31484 - protein, 26 aa, Homo sapiens
MIIQAAGLPLWTKLAFIFSPITVLVG

SEQ ID NO: 31485 - protein, 63 aa, Homo sapiens
LGCPEALTGSYKSMFQKLPDIREVLTCKIEELGSELKEHYKIEAFTPLLAPAQVRVVLIVLTN

SEQ ID NO: 31486 - protein, 25 aa, Homo sapiens
IILYNRVQGSPTGAALGSPALLPPL

SEQ ID NO: 31487 - protein, 14 aa, Homo sapiens
KMKACTSAYITATL

SEQ ID NO: 31488 - protein, 883 aa, Homo sapiens
LKHFQKQVKYRVNQQIRLRKKQQLQKSYERAQKEGSIAMQSSATHLTSKRTSVFPNNLNVAIGSSRLPPSLMPGDGIEDEENQNELFQQQAQALSETMKQARHRLASFKTVIKKKGSVFPDDGRKSFLTREEVLSRKPASTGINTGIRGELPIKVHQGLLAAVPYQNYMENQELDYEEPDYEESSSLVTDEKGKEDLFGRGQQDQQAIHSEDKNKPFSRVQKVKFKNPLFVLMEEEEQKQLHFEGLQDILPEAQDYFLEAQGDLLETQGDLTGIQSVKPDTQAVEMKVQVTEPEGQAIEPEGQPIKTETQGIMLKAQSIELEEGSIVLKTQDFLPTNQALLTKNQDVLLKDHCVLPKDQSILLKYQDQDFLPRDQHVLHKDQDILPKYQDQNFLPKDQNFLSRDQHVLPKDQDILPKYQDQNFLPKDQNFLSRDQHVLPKDQNILPKYQGQDFLPKDQDFLSRDQHVLPKDWNILPKCQDQDFLPRDQGVLPKDQNILPICQDQDFLPRDQGYLPKDQNILPICQDRDFLPRDLHVLSNDQNILPKCQDQDFLPKYQKVHFKEPYSDMTDEKGREDFSLADYQCLPPKSQDQDDIKNQQPASFMREERVREELPLDYHQYVVPKIQDQDSPREQNKHIKLPSSFEKWEIARGNTPGVPLAYDRYQSGLSTEFQAPLAFQSDVDKEEDKKERQKQYLRHRRLFMDIEREQVKEQQRQKEQKKKIEKIKKKREQECYAAEQRILRMNFHEDPYSGEKLSEILAQLQLQEIKGTREKQQREKEYLSSLCLIILYLYRYVEALRAQIQEKMQLYNITLPPLCCCGPDFWDAHPDTCANNCIFYKNHRAYTRALHSFINSCDVPGGNSTLRVAIHNFASAHRRTLKNL

SEQ ID NO: 31489 - protein, 6 aa, Homo sapiens
MFTYCS

SEQ ID NO: 31490 - protein, 13 aa, Homo sapiens
MAIERTQISRRTL

SEQ ID NO: 31491 - protein, 138 aa, Homo sapiens
LRVANMQLFVRAQELHTFEVTGQETVAQIKAHVASLEGIAPEDQVVLLAGAPLEDEATLGQCGVEALTTLEVAGRMLGGKVHGSLARAGKVRGQTPKVAKQEKKKKKTGRAKRRMQYNRRFVNVVPTFGKKKGPNANS

SEQ ID NO: 31492 - protein, 46 aa, Homo sapiens
RVFLEDVKSWEVSDPEEQLKKLINFMKMLSQKLKSYDTWINICLTD

SEQ ID NO: 31493 - protein, 9 aa, Homo sapiens
RFSDKISLS

SEQ ID NO: 31494 - protein, 35 aa, Homo sapiens
IMQRSLTWTHHLSSARQPRVQWFLRGAAYIQRCKY

SEQ ID NO: 31495 - protein, 147 aa, Homo sapiens
IKDGYKVNSHIAKLQELWKTPQNQTIHLSKSMMEASFFKHPDLTTGQKRYLCSIAKIYNANYLKMLMKRQYMHVLQHSSQKPGVLTHHRSRLSSRYSQKQHYPCTTWRHQLEREDSGSSDIAAASAPEMLIQHSLWRPVRNKEGSVS

SEQ ID NO: 31496 - protein, 162 aa, Homo sapiens
VCEDLVRHGYNYLGKDYVTSGITGEPLEAYIYFGPVYYQKLKHMVLDKMHARARGPRAVLTRQPTEGRSRDGGLRLGEMERDCLIGYGASMLLLERLMISSDAFEVDVCGQCGLLGYSGWCHYCKSSCHVSSLRIPYACKLLFQELQSMNIIPRLKLSKYNE

SEQ ID NO: 31497 - protein, 38 aa, Homo sapiens
ILSVYIKPWVHIVVVIEGNWLNSTLVYGTFCGHLRKTS

SEQ ID NO: 31498 - protein, 180 aa, Homo sapiens
KKNNPRKYLRSVGDGETVEFDVVEGEKGAEAANVTGPDGVPVEGSRYAADRRRYRRGYYGRRRGPPRNAGEIGEMKDGVPEGAQLQGPVHRNPTYRPRYRSRGPPRPRPAPAVGEAEDKENQQATSGPNQPSVRRGYRRPYNYRRRPRPPNAPSQDGKEAKAGEAPTENPAPPTQQSSAE

SEQ ID NO: 31499 - protein, 17 aa, Homo sapiens
LHVMDQLTPSRSVNWFI

SEQ ID NO: 31500 - protein, 721 aa, Homo sapiens
KGPQSLFNAPRGKKRPAPGSDEEEEEEDSEEDGMVNHGDLWGSEDDADTVDDYGADSNSEDEEEGEALLPIERAARKQKAREAAAGIQWSEEETEDEEEEKEVTPESGPPKVEEADGGLQINVDEEPFVLPPAGEMEQDAQAPDLQRVHKRIQDIVGILRDFGAQREEGRSRSEYLNRLKKDLAIYYSYGDFLLGKLMDLFPLSELVEFLEANEVPRPVTLRTNTLKTRRRDLAQALINRGVNLDPLGKWSKTGLVVYDSSVPIGATPEYLAGHYMLQGASSMLPVMALAPQEHERILDMCCAPGGKTSYMAQLMKNTGVILANDANAERLKSVVGNLHRLGVTNTIISHYDGRQFPKVVGGFDRVLLDAPCSGTGVISKDPAVKTNKDEKDILRCAHLQKELLLSAIDSVNATSKTGGYLVYCTCSITVEENEWVVDYALKKRNVRLVPTGLDFGQEGFTRFRERRFHPSLRSTRRFYPHTHNMDGFFIAKFKKFSNSIPQSQTGNSETATPTNVDLPQVIPKSENSSQPAKKAKGAAKTKQQLQKQQHPKKASFQKLNGISKGADSELSTVPSVTKTQASSSFQDSSQPAGKAEGIREPKVTGKLKQRSPKLQSSKKVAFLRQNAPPKGTDTQTPAVLSPSKTQATLKPKDHHQPLGRAKGVEKQQLPEQPFEKAAFQKQNDTPKGPQPPTVSPIRSSRPPPAKRKKSQSRGNSQLLLS

SEQ ID NO: 31501 - protein, 28 aa, Homo sapiens
ISSVKAKHLILQETLKWIWKLGSQLGSS

SEQ ID NO: 31502 - protein, 97 aa, Homo sapiens
IVIDDEEDIETNGGAEKKSSCFIEWGLPGTKNKTNDLDFSTSSLSRSKVNAGMGNSGITTELTLKYIITNVTTLETGISSVNAGQDVNIIITYKTSL

SEQ ID NO: 31503 - protein, 11 aa, Homo sapiens
ILAQMFHYSAG

SEQ ID NO: 31504 - protein, 55 aa, Homo sapiens
KRWNTDYLIPFSSKLNIAAKVNFLAYSEVLTDNLKVGSFYKTYSRILFDLMELAI

SEQ ID NO: 31505 - protein, 44 aa, Homo sapiens
IVICRRTKSKLQICIDLCMMRCLVIDQMLLNPLIHRFYRKHVLH

SEQ ID NO: 31506 - protein, 41 aa, Homo sapiens
KKKDILICQKEEFLQRKQSNVKTNSQNPKLFIAFFVMLLRC

SEQ ID NO: 31507 - protein, 28 aa, Homo sapiens
VATGQAEEAPVGGGGLVAQEKSGREPSW

SEQ ID NO: 31508 - protein, 59 aa, Homo sapiens
IAFRFYLLDCLFSTNFKPATTCVWFCPTSSGVGECTVMVIVAPVAILLSSPLSHFGVVY

SEQ ID NO: 31509 - protein, 125 aa, Homo sapiens
IMSGCRVFIGRLNPAAREKDVERFFKGYGRIRDIDLKRGFGFVEFEDPRDADDAVYELDGKELCSERVTIEHARARSRGGRGRGRYSDRFSSRRPRNDRRNAPPVRTENRLIVENLSSRVSWQVC

SEQ ID NO: 31510 - protein, 32 aa, Homo sapiens
LVLWNLRIQGMQMMLCMSLMEKNSVVKGEIPV

SEQ ID NO: 31511 - protein, 19 aa, Homo sapiens
LNLDSPRGWEGLWTALGEA

SEQ ID NO: 31512 - protein, 21 aa, Homo sapiens
METKKGHLQESTSRSHTSCPG

SEQ ID NO: 31513 - protein, 877 aa, Homo sapiens
RVPASESAVVVQTECSLLFVWLRFHARRWLRMSSSHFASRHRKDISTEMIRTKIAHRKSLSQKENRHKEYERNRHFGLKDVNIPTLEGRILVELDETSQGLVPEKTNVKPRAMKTILGDQRKQMLQKYKEEKQLQKLKEQREKAKRGIFKVGRYRPDMPCFLLSNQNAVKAEPKKAIPSSVRITRSKAKDQMEQTKIDNESDVRAIRPGPRQTSEKKVSDKEKKVVQPVMPTSLRMTRSATQAAKQVPRTVSSTTARKPVTRAANENEPEGKVPSKGRPAKNVETKPDKGISCKVDSEENTLNSQTNATSGMNPDGVLSKMENLPEINTAKIKGKNSFAPKDFMFQPLDGLKTYQVTPMTPRSANAFLTPSYTWTPLKTEVDESQATKEILAQKCKTYSTKTIQQDSNKLPCPLGPLTVWHEEHVLNKNEATTKNLNGLPIKEVPSLERNEGRIAQPHHGVPYFRNILQSETEKLTSHCFEWDRKLELDIPDDAKDLIRTAVGQTRLLMKERFKQFEGLVDDCEYKRGIKETTCTDLDGFWDMVSFQIEDVIHKFNNLIKLEESGWQVNNNMNHNMNKNVFRKKVVSGIASKPKQDDAGRIAARNRLAAIKNAMRERIRQEECAETAVSVIPKEVDKIVFDAGFFRVESPVKLFSGLSVSSEGPSQRLGTPKSVNKAVSQSRNEMGIPQQTTSPENAGPQNTKSEHVKKTLFLSIPESRSSIEDAQCPGLPDLIEENHVVNKTDLKVDCLSSERMSLPLLAGGVADDINTNKKEGISDVVEGMELNSSITSQDVLMSSPEKNTASQNSILEEGETKISQSELFDNKSLTTECHLLDSPGLNCSNPFTQLERRHQEHARHISFGGNLITFSPLQPGEF

SEQ ID NO: 31514 - protein, 7 aa, Homo sapiens
LQIILPT

SEQ ID NO: 31515 - protein, 904 aa, Homo sapiens
ILLETFKIHEMIRQEILEQVLNRVVTRASSPISHFLDLLSNIVMYAPLVLQSCSSKVTEAFDYLSFLPLQTVQRLLKAVQPLLKVSMSMRDCLILVLRKAMFANQLDARKSAVAGFLLLLKNFKVLGSLSSSQCSQSLSVSQVHVDVHSHYNSVANETFCLEIMDSLRRCLSQQADVRLMLYEGFYDVLRRNSQLANSVMQTLLSQLKQFYEPKPDLLPPLKLEACILTQGDKISLQEPLDYLLCCIQHCLAWYKNTVIPLQQGEEEEEEEEAFYEDLDDILESITNRMIKSELEDFELDKSADFSQSTSIGIKNNICAFLVMGVCEVLIEYNFSISSFSKNRFEDILSLFMCYKKLSDILNEKAGKAKTKMANKTSDSLLSMKFVSSLLTALFRDSIQSHQESLSVLRSSNEFMRYAVNVALQKVQQLKETGHVSGPDGQNPEKIFQNLCDITRVLLWRYTSIPTSVEESGKKEKGKSISLLCLEGLQKIFSAVQQFYQPKIQQFLRALDVTDKEGEEREDADVSVTQRTAFQIRQFQRSLLNLLSSQEEDFNSKEALLLVTVLTSLSKLLEPSSPQFVQMLSWTSKICKENSREDALFCKSLMNLLFSLHVSYKSPVILLRDLSQDIHGHLGDIDQDVEVEKTNHFAIVNLRTAAPTVCLLVLSQAEKVLEEVDWLITKLKGQVSQETLSEEASSQATLPNQPVEKAIIMQLGTLLTFFHELVQTALPSGSCVDTLLKDLCKMYTTLTALVRYYLQVCQSSGGIPKNMEKLVKLSGSHLTPLCYSFISYVQNKSKSLNYTGEKKEKPAAVATAMARVLRETKPIPNLIFAIEQYEKFLIHLSKKSKVNLMQHMKLSTSRDFKIKGNILDMVLREDGEDENEEGTASEHGGQNKEPAKKKRKK

SEQ ID NO: 31516 - protein, 200 aa, Homo sapiens
VIKKKGGSRRAQGRGEMEPSQCVEELEDDVFQPEDGEPVTQPGSLLSADLFAQSLLDCPLSRLQLFPLTHCCGPGLRPTSQEDKATQTLSPASPSQGVMLPCGVTEEPQRLFYGNAGYRLPLPASFPAVLPIGEQPPEGQWQHQAEVQIARKLQCIADQFHRLHVQQHQQNQNRVWWQILLFLHNLALNGEENRNGAGPR

SEQ ID NO: 31517 - protein, 14 aa, Homo sapiens
TQPREGGRPLPAEP

SEQ ID NO: 31518 - protein, 37 aa, Homo sapiens
LLMDDVVSADNYTLDLWAGQQLLWKGSFKPSEHVQNL

SEQ ID NO: 31519 - protein, 57 aa, Homo sapiens
TRGSPMMTSTHPLLSQPAKPRAPTAPSMGTVKQNSPWSLKCRAWSGAKNSPRGPTRC

SEQ ID NO: 31520 - protein, 57 aa, Homo sapiens
LESTVDASRPNWLPLLLSPPLPFLSIECTLYNFSGIVIENKIFTIITGFFQVTSCRL

SEQ ID NO: 31521 - protein, 23 aa, Homo sapiens
LPWLSMSLATPWAWATPQPPTPL

SEQ ID NO: 31522 - protein, 45 aa, Homo sapiens
IPVVMEGHICQSLESAKAGTRFPGPQWGCANPRELVPSEAITDDV

SEQ ID NO: 31523 - protein, 35 aa, Homo sapiens
LLSSTLSTNGLRPSHRLLLFLHREEASSQLCGRLL

SEQ ID NO: 31524 - protein, 31 aa, Homo sapiens
RSCRPLPALMWLMFQADLGSLRWQVLYGEKT

SEQ ID NO: 31525 - protein, 56 aa, Homo sapiens
IHPSSVLFHCKPACVVYTELLYTNKCYMRDLCVIDAQWLYEAAPEYFRRKLRTARN

SEQ ID NO: 31526 - protein, 50 aa, Homo sapiens
IQSLKLCPGGHRPASLSSGCPAGCRLSFNLPPSMLLSVQKCCMPSSLKTC

SEQ ID NO: 31527 - protein, 20 aa, Homo sapiens
MSTIIQVTCMRKRVSSYRPA

SEQ ID NO: 31528 - protein, 32 aa, Homo sapiens
LIVSRGVHSPPLASAQGATAAIATSSLSQGPV

SEQ ID NO: 31529 - protein, 597 aa, Homo sapiens
KLLSKGERGFFLLPTAQPNAFRFLPPRTFHVGSRGWRARHSGATAGGPLFGEAPTGAGSAVPREAAAGFLRGAPGPESRAGRGPRGVGQPERRPPIPGGRPRAPARAPASGRLAHATERPSGRRRSCPGPCCCCCRLRLLPQLGARLLHGVRRSCSLLSRQTTFLLASSPRMFRTKRSALVRRLWRSRAPGGEDEEEGAGGGGGGGELRGEGATDSRAHGAGGGGPGRAGCCLGKAVRGAKGHHHPHPPAAGAGAAGGAEADLKALTHSVLKKLKERQLELLLQAVESRGGTRTACLLLPGRLDCRLGPGAPAGAQPAQPPSSYSLPLLLCKVFRWPDLRHSSEVKRLCCCESYGKINPELVCCNPHHLSRLCELESPPPPYSRYPMDFLKPTADCPDAVPSSAETGGTNYLAPGGLSDSQLLLEPGDRSHWCVVAYWEEKTRVGRLYCVQEPSLDIFYDLPQGNGFCLGQLNSDNKSQLVQKVRSKIGCGIQLTREVDGVWVYNRSSYPIFIKSATLDNPDSRTLLVHKVFPGFSIKAFDYEKAYSLQRPNDHEFMQQPWTGFTVQISFVKGWGQCYTRQFISSCPCWLEVIFNSR

SEQ ID NO: 31530 - protein, 590 aa, Homo sapiens
VYSYFEKETLTFRDVAIEFSLEEWECLNPAQQNLYMNVMLENYKNLVFLAGIAVSKQDPITSLEQEKEPWNMKICEMVDESPAMCSSFTRDLWPEQDIKDSFQQVILRRHGKCEHENLQLRKGSANVVECKVYKKGYNELNQCLTTTQSKIFPCDKYIKVFHKIFNSNRHKTRHTGEKPFKCKKCDESFCMLLHLHQHKRIHIRENSYQCEECDKVFKRFSTLTRHKRVHTGEKPFKCEECGKAFKHSSTLTTHKMIHTGEKPYRCEECGKAFYHSSHLTTHKVIHTGEKPFKCEECGKAFNHPSALTTHKFIHVKEKPYKCEECDKAFNRFSYLTKHKIIHSGEKSYKCEQCGKGFNWSSTLTKHKRIHTGEKPYKCEECGKAFNVSSHLTTHKMIHTGEKPYKCEECGKAFNHSSKLTIHKIIHTGEKPYKCEECGKAFNQSSNLTKHKIIHTGEKLYKCEECGKAFNRSSNLTTHKRIHTGEKPYKCEECGKAFNRSSNLTKHNIIHTGEKSYKCEECGKAFNQSSTLTKHRKIQQGMVAHACNPNTLRGLGEQIARSGVQDQPGQHGKTPSLLKIQKFAGCGGRRL

SEQ ID NO: 31531 - protein, 19 aa, Homo sapiens
MPQLWMRNPVSPEHWPALL

SEQ ID NO: 31532 - protein, 445 aa, Homo sapiens
IPAIKIKNITGRRDQGDGRNAGNKPVENQLELSFWLHLAELQGFQIERKIYECNQIEKSVTRGSSVSLLQTNLPCVNTSISNIYRNDFMHPSLLTQDQKAYIREKPYKCSDCGKAFNQRSNLTTHQRIHTGQKPHKCDICGKGFRRIANLASHHRIHTGEKPYRCNECGKTFNQTFNLTTHQRIHTGQKPYKCDRCGKGFRQIGNLASHHRIHTGEKPYRCNECGKTFNRMFHLTRHQRIHTGQKPYKCDICGKGFRQIANLASHHRIHTGEKPYKCSDCGKTFNYRSHLTRHQRIHTGQKPYKCDTCGKDFSQNSYLENHQRIHTREKSYRCNECGKTFNKMTNLTTHQRIHTGQKTYKCDICGKGFRQIGNLASHHRIHTGEKPYRCNECGKTFNRMFHLTRHQRIHTGQKPYKCDICGKSFSQNSYLENHQRIHTGEKTYKL

SEQ ID NO: 31533 - protein, 119 aa, Homo sapiens
IPETDAVGVTVVLITCTYHGQEFIRVGYYVNNEYLNPELRENPPMKPDFSQLQRNILASNPRVTRFHINWDNNMDRLEAIETQDPSLGCGLPLNCTPIKGLGLPGCIPGLLPENSMDCI

SEQ ID NO: 31534 - protein, 32 aa, Homo sapiens
MDRPTSHSRGWDEATGDSRAVWPGWVWVSCCC

SEQ ID NO: 31535 - protein, 771 aa, Homo sapiens
VAMPASWTSPQKSSALAPEDHGSSYEGSVSFRDVAIDFSREEWRHLDLSQRNLYRDVMLETYSHLLSVGYQVPKPEVVMLEQGKEPWALQGERPRHSCPGEKLWDHNQHRKIIGYKPASSQDQKIYSGEKSYECAEFGKSFTWKSQFKVHLKVPTGEKLYVCIECGRAFVQKPEFITHQKTHMREKPYKCNECGKSFFQVSSLFRHHRIHTGEKLYECSECGKGFPYNSDLSIHEKIHTGERHHECTDCGKAFTQKSTLKIHQKIHTGERSYICIECGQAFIQKTQLIAHRRIHSGEKPYECNNCGKSFISKSQLQVHQRVHTRVKPYICTEYGKVFSNNSNLITHEKIQSREKSSICTECGKAFTYRSELIIHQRIHTGEKPYECSDCGRAFTQKSALTVHQRIHTGEKSYICMKCGLAFIRKAHLITHQIIHTGEKPYKCGHCGKLFTSKSQLHVHKRIHTGEKPYVCNKCGKAFTNRSNLITHQKTHTGEKSYICSKCGKAFTQRSDLITHQRIHTGEKPYECNTCGKAFTQKSNLNIHQKIHTGERQYECHECGKAFNQKSILIVHQKIHTGEKPYVCTECGRAFIRKSNFITHQRIHTGEKPYECSDCGKSFTSKSQLLVHQPVHTGEKPYVCAECGKAFSGRSNLSKHQKTHTGEKPYICSECGKTFRQKSELITHHRIHTGEKPYECSDCGKSFTKKSQLQVHQRIHTGEKPYVCAECGKAFSNRSNLNKHQTTHTGDKPYKCGICGKGFVQKSVFSVHQSSHA

SEQ ID NO: 31536 - protein, 48 aa, Homo sapiens
ISETTAMFSATHSKAKVKTKIVKYLKNNKNGIYISEALVYSKTVLKII

SEQ ID NO: 31537 - protein, 43 aa, Homo sapiens
KYFLRQMAQPFHREDQLGLSLLSLEQLESEETLKRIEQIAQQL

SEQ ID NO: 31538 - protein, 63 aa, Homo sapiens
LWLRHYNRALSPLSKSWEMVIVNASPILEAPGCRGPQLDPSHPWSLTLDLSQKAEKRSSLESL

SEQ ID NO: 31539 - protein, 12 aa, Homo sapiens
LTPKYQNILQNG

SEQ ID NO: 31540 - protein, 94 aa, Homo sapiens
KRMSELEKAMVALIDVFHQYSGREGDKHKLKKSELKELINNELSHFLEEIKEQEVVDKVMETLDNDGDGECDFQEFMAFVAMVTTACHEFFEHE

SEQ ID NO: 31541 - protein, 13 aa, Homo sapiens
KGFSEIGLKLEMR

SEQ ID NO: 31542 - protein, 123 aa, Homo sapiens
IRFDHIYTKPLVLEIPSETESQANVVVKIEEAPLSPSENDHPEFIVSVKEEPVEDDLVPELGISNLLSSSHCPKPSSCLLDAYSDCGYGGSLSPFSDMSSLLGVNHSWEDTFANELFPQLISV

SEQ ID NO: 31543 - protein, 13 aa, Homo sapiens
RESSCLLRLYYAW

SEQ ID NO: 31544 - protein, 526 aa, Homo sapiens
IYFTLESHENALHDAEIACKLRPMGFKAHFRKAQALATLGKVEEALREFLYCVSLDGKNKRARCEAQRLLLSFFSPSVPGDSQEHSPDILKLLAPHPRLKENVESMTTEVTSHNLPRLLQDNLELPHCSSQEEAAARGDGSSLMDPAKVKGDGQQHHMKDQEEEEEKWDATSPKAASSKTGKCQEKKRKHCQIESQEETGMPNKASKQDPPTDQGDKPALSLPLASFDASDLECALCMRLFYEPVTTPCGHTFCLKCLERCLDHNAKCPLCKDGLSQCLASRKYSKNVIMEELIAKFLPEELKERRKLYEEEMEELSNLNKNVPIFVCTMAYPTVPCPLHIFEPCYRLMIRRCIETGTRQFGMCLGDPVKGFAEYGCILEIRNVQFFADGRSVVDSIGKRRFRVLHQSQRDGYNTADIEYIEDQKVQGEDCAELMGLHNCVYQQASLWFHSLKLSLKNRILNHFGPMPEKDADPQMNPNGPAWCWWMLAVLPLESRAQLPFLAMRSLKDRLNGIRRVLAFISRNQN

SEQ ID NO: 31545 - protein, 36 aa, Homo sapiens
IPTFPVTAARTDRHCCRELATVFHAVAGGSRLHAPF

SEQ ID NO: 31546 - protein, 563 aa, Homo sapiens
RFPYPFQVVYDEGPLYVFSPTEELRKRWIHQLKNVIRYNSDLVQKYHPCFWIDGQYLCCSQTAKNAMGCQILENRNGSLKPGSSHRKTKKPLPPTPEEDQILKKPLPPEPAAAPVSTSELKKVVALYDYMPMNANDLQLRKGDEYFILEESNLPWWRARDKNGQEGYIPSNYVTEAEDSIEMYEWYSKHMTRSQAEQLLKQEGKEGGFIVRDSSKAGKYTVSVFAKSTGDPQGVIRHYVVCSTPQSQYYLAEKHLFSTIPELINYHQHNSAGLISRLKYPVSQQNKNAPSTAGLGYGSWEIDPKDLTFLKELGTGQFGVVKYGKWRGQYDVAIKMIKEGSMSEDEFIEEAKVMMNLSHEKLVQLYGVCTKQRPIFIITEYMANGCLLNYLREMRHRFQTQQLLEMCKDVCEAMEYLESKQFLHRDLAARNCLVNDQGVVKVSDFGLSRYVLDDEYTSSVGSKFPVRWSPPEVLMYSKFSSKSDIWAFGVLMWEIYSLGKMPYERFTNSETAEHIAQGLRLYRPHLASEKVYTIMYSCWHEKADERPTFKILLSNILDVMDEES

SEQ ID NO: 31547 - protein, 25 aa, Homo sapiens
INWLDKNQTAEKEEFEHQQKELKKV

SEQ ID NO: 31548 - protein, 298 aa, Homo sapiens
MLPSPLNVRLEAPAGMGEQLTETFALDTNTGSFLHTLEGPRFRASQCIYAHRTLPHVLAFRVSIARLAPGSGPITLLLRSAFSPESPDLDLHQGPDFQGARYLYGHTLTPEQPGGPQQEVHMLWTPAPPDLTLGEGEEARTWDFLTAVGGSQAEAQACLTEALQLQARGALYTAHAQAWAQLWVECGLDVVGPLQLRQALRGSLYYLLSALPQPKAPGYICHGLSPGGLSNGSREECYWGHVFWDQVSTVHPAPATQQATHGGPRSLPSLGPGLWLGKHRDCGKREEAWKVCRSLVEE

SEQ ID NO: 31549 - protein, 401 aa, Homo sapiens
MKRAVDCPENIKKEICINKMLNHENVVKFYGHRREGNIQYLFLEYCSGGELFDRIEPDIGMPEPDAQRFFHQLMAGVVYLHGIGITHRDIKPENLLLDERDNLKISDFGLATVFRYNNRERLLNKMCGTLPYVAPELLKRREFHAEPVDVWSCGIVLTAMLAGELPWDQPSDSCQEYSDWKEKKTYLNPWKKIDSAPLALLHKILVENPSARITIPDIKKDRWYNKPLKKGAKRPRVTSGGVSESPSGFSKHIQSNLDFSPVNSASSEENVKYSSSQPEPRTGLSLWDTSPSYIDKLVQGISFSQPTCPDHMLLNSQLLGTPGSSQNPWQRLVKRMTRFFTKLDADKSYQCLKETCEKLGYQWKKSCMNQGDGLEFKRHFLKIKGKLIDIVSSQKIWLPAT

SEQ ID NO: 31550 - protein, 219 aa, Homo sapiens
MGLRLPPFSSKTGSSLPGLRATLGLGVLGTGFPIISFQGGEGGRGVMWGVRCRASLLLQTTVHAITATQKTVDGPSGKLWRDGRGALQNIIPASTGAAKAVGKVIPELNGKLTGMAFRVPTANVSVVDLTCRLEKPAKYDDIKKVVKQASEGPLKGILGYTEHQVVSSDFNSDTHSSTFDAGAGIALNDHFVKLISWYDNEFGYSNRVVDLMAHMASKE

SEQ ID NO: 31551 - protein, 95 aa, Homo sapiens
MASLSLAPVNIFKAGADEERAETARLTSFIGAIAIGDLVKSTLGPKGMDKILLSSGRDASLMVTNDGATILKNIGVDNPAAKVLVGKSEYTFSPT

SEQ ID NO: 31552 - protein, 131 aa, Homo sapiens
MDERNRQVTFTKRKFGLMKKAYELSVLCDCEIALIIFNSSNKLFQYASTDMDKVLLKYTEYNEPHESRTNSDIVETLRKKGLNGCESPDADDYFEHSPLSEDRFSKLNEDSDFIFKRGPVSTFTLPLLFIC

SEQ ID NO: 31553 - protein, 849 aa, Homo sapiens
MEGDEETREAYANIAELDQYVFQDSQLEGLSKDIFKHIGPDEVIGESMEMPAEVGQKSQKRPFPEELPADLKHWKPAEPPTVVTGSLLVGPVSDCSTLPCLPLPALFNQEPASGQMRLEKTDQIPMPFSSSSLSCLNLPEGPIQFVPTISTLPHGLWQISEAGTGVSSIFIYHGEVPQASQVPPPSGFTVHGLPTSPDRPGSTSPFAPSATDLPSMPEPALTSRANMTEHKTSPTQCPAAGEVSNKLPKWPEPVEQFYRSLQDTYGAEPAGPDGILVEVDLVQARLERSSSKSLERELATPDWAERQLAQGGLAEVLLAAKEHRRPRETRVIAVLGKAGQGKSYWAGAVSRAWACGRLPQYDFVFSVPCHCLNRPGDAYGLQDLLFSLGPQPLVAADEVFSHILKRPDRVLLILDGFEELEAQDGFLHSTCGPAPAEPCSLRGLLAGLFQKKLLRGCTLLLTARPRGRLVQSLSKADALFELSGFSMEQAQAYVMRYFESSGMTEHQDRALTLLRDRPLLLSHSHSPTLCRAVCQLSEALLELGEDAKLPSTLTGLYVGLLGRAALDSPPGALAELAKLAWELGRRHQSTLQEDQFPSADVRTWAMAKGLVQHPPRAAESELAFPSFLLQCFLGALWLALSGEIKDKELPQYLALTPRKKRPYDNWLEGVPRFLAGLIFQPPARCLGALLGPSAAASVDRKQKVLARYLKRLQPGTLRARQLLELLHCAHEAEEAGIWQHVVQELPGRLSFLGTRLTPPDAHVLGKALEAAGQDFSLDLRSTGICPSGLGSLVGLSCVTRFRWGEGLGEETSLCWALTAVLVPSPVLCGVSFSMQSSRVGQNGFSPFLR

SEQ ID NO: 31554 - protein, 2344 aa, Homo sapiens
MALQNAYQAIHSGQCPAAIVGGINVLLKPNTSVQFLRLGMLSPEGTCKAFDTAGNGYCRSEGVVAVLLTKKSLARRVYATILNAGTNTDGFKEQGVTFPSGDIQEQLIRSLYQSAGVAPESFEYIEAHGTGTKVGDPQELNGITRALCATRQEPLLIGSTKSNMGHPEPASGLAALAKVLLSLEHGLWAPNLHFHSPNPEIPALLDGRLQVVDQPLPVRGGNVGINSFGFGGSNVHIILRPNTQPPPAPAPHATLPRLLRASGRTPEAVQKLLEQGLRHSQDLAFLSMLNDIAAVPATAMPFRGYAVLGGERGGPEVQQVPAGERPLWFICSGMGTQWRGMGLSLMRLDRFRDSILRSDEAVKPFGLKVSQLLLSTDESTFDDIVHSFVSLTAIQIGLIDLLSCMGLRPDGIVGHSLGEVACGYADGCLSQEEAVLAAYWRGQCIKEAHLPPGAMAAVGLSWEECKQRCPPGVVPACHNSKDTVTISGPQAPVFEFVEQLRKEGVFAKEVRTGGMAFHSYFMEAIAPPLLQELKKVIREPKPRSARWLSTSIPEAQWHSSLARTSSAEYNVNNLVSPVLFQEALWHVPEHAVVLEIAPHALLQAVLKRGLKPSCTIIPLMKKDHRDNLEFFLAGIGRLHLSGIDANPNALFPPVEFPAPRGTPLISPLIKWDHSLAWDVPAAEDFPNGSGSPSAAIYNIDTSSESPDHYLVDHTLDGRVLFPATGYLSIVWKTLARALGLGVEQLPVVFEDVVLHQATILPKTGTVSLEVRLLEASRAFEVSENGNLVVSGKVYQWDDPDPRLFDHPESPTPNPTEPLFLAQAEVYKELRLRGYDYGPHFQGILEASLEGDSGRLLWKDNWVSFMDTMLQMSILGSAKHGLYLPTRVTAIHIDPATHRQKLYTLQDKAQVADVVVSRWLRVTVAGGVHISGLHTESAPRRQQEQQVPILEKFCFTPHTEEGCLSERAALQEELQLCKGLVQALQTKVTQQGLKMVVPGLDGAQIPRDPSQQELPRLLSAACRLQLNGNLQLELAQVLAQERPKLPEDPLLSGLLDSPALKACLDTAVENMPSLKMKVVLAGHGHLYSRIPGLLSPHPLLQLSYTATDRHPQALEAAQAELQQHDVAQGQWDPADPAPSALGSADLLVCNCAVAALGDPASALSNMVAALREGGFLLLHTLLRGHPLGDIVAFLTSTEPQYGQGILSQDAWESLFSRVSLRLVGLKKSFYGSTLFLCRRPTPQDSPIFLPVDDTSFRWVESLKGILADEDSSRPVWLKAINCATSGVVGLVNCLRREPGGNRLRCVLLSNLSSTSHVPEVDPGSAELQKVLQGDLVMNVYRDGAWGAFRHFLLEEDKPEEPTAHAFVSTLTRGDLSSIRWVCSSLRHAQPTCPGAQLCTVYYASLNFRDIMLATGKLSPDAIPGKWTSQDSLLGMEFSGRDASGKRVMGLVPAKGLATSVLLSPDFLWDVPSNWTLEEAASVPVVYSTAYYALVVRGRVRPGETLLIHSGSGGVGQAAIAIALSLGCRVFTTVGSAEKRAYLQARFPQLDSTSFANSRDTSFEQHVLWHTGGKGVDLVLNSLAEEKLQASVRCLATHGRFLEIGKFDLSQNHPLGMAIFLKNVTFHGVLLDAFFNESSADWREVWALVQAGIRDGVVRPLKCTVFHGAQVEDAFRYMAQGKHIGKVVVQVLAEEPEAVLKGAKPKLMSAISKTFCPAHKSYIIAGGLGGFGLELAQWLIQRGVQKLVLTSRSGIRTGYQAKQVRRWRRQGVQVQVSTSNISSLEGARGLIAEAAQLGPVGGVFNLAVVLRDGLLENQTPEFFQDVCKPKYSGTLNLDRVTREACPELDYFVVFSSVSCGRGNAGQSNYGFANSAMERICEKRRHEGLPGLAVQWGAIGDVGILVETMSTNDTIVSGTLPQRMASCLEVLDLFLNQPHMVLSSFVLAEKAAAYRDRDSQRDLVEAVAHILGIRDLAAVNLDSSLADLGLDSLMSVEVRQTLERELNLVLSVREVRQLTLRKLQELSSKADEASELACPTPKEDGLAQQQTQLNLRSLLVNPEGPTLMRLNSVQSSERPLFLVHPIEGSTTVFHSLASRLSIPTYGLQCTRAAPLDSIHSLAAYYIDCIRQVQPEGPYRVAGYSYGACVAFEMCSQLQAQQSPAPTHNSLFLFDGSPTYVLAYTQSYRAKLTPGCEAEAETEAICFFVQQFTDMEHNRVLEALLPLKGLEERVAAAVDLIIKSHQGLDRQELSFAARSFYYKLRAAEQYTPKAKYHGNVMLLRAKTGGAYGEDLGADYNLSQVCDGKVSVHVIEGDHRTLLEGSGLESIISIIHSSLAEPRVSVREG

SEQ ID NO: 31555 - protein, 539 aa, Homo sapiens
MSQWYELQQLDSKFLEQVHQLYDDSFPMEIRQYLAQWLEKQDWEHAANDVSFATIRFHDLLSQLDDQYSRFSLENNFLLQHNIRKSKRNLQDNFQEDPIQMSMIIYSCLKEERKILENAQRFNQAQSGNIQSTVMLDKQKELDSKVRNVKDKVMCIEHEIKSLEDLQDEYDFKCKTLQNREHETNGVAKSDQKQEQLLLKKMYLMLDNKRKEVVHKIIELLNVTELTQNALINDELVEWKRRQQSACIGGPPNACLDQLQNWFTIVAESLQQVRQQLKKLEELEQKYTYEHDPITKNKQVLWDRTFSLFQQLIQSSFVVERQPCMPTHPQRPLVLKTGVQFTVKLRLLVKLQELNYNLKVKVLFDKDVNERNTVKGFRKFNILGTHTKVMNMEESTNGSLAAEFRHLQLKEQKNAGTRTNEGPLIVTEELHSLSFETQLCQPGLVIDLETTSLPVVVISNVSQLPSGWASILWYNMLVAEPRNLSFFLTPPCARWAQLSEVLSWQFSSVTKRGLNVDQLNMLGEKLLGICILTCYVYKN

SEQ ID NO: 31556 - protein, 32 aa, Homo sapiens
MWSEQSAKDKQPYEQKAAKLKEKYEKVQCHLF

SEQ ID NO: 31557 - protein, 400 aa, Homo sapiens
MNSSAHYHVNFSQAISQDVNLHEAILLCPNNTFRRDPTARTSQSQEPFLQLNSHTTNPEQTLPGTNLTGFLSPVDNHMRNLTSQDLLYDLDINIFDEINLMSLATEDNFDPIDVSQLFDEPDSDSGLSLDSSHNNTSVIKSNSSHSVCDEGAIGYCTDHESSSHHDLEGAVGGYYPEPSKLCHLDQSDSDFHGDLTFQHVFHNHTYHLQPTAPESTSEPFPWPGKSQKIRSRYLEDTDRNLSRDEQRAKALHIPFSVDEIVGMPVDSFNSMLSRYYLTDLQVSLIRDIRRRGKNKVAAQNCRKRKLDIILNLEDDVCNLQAKKETLKREQAQCNKAINIMKQKLHDLYHDIFSRLRDDQGRPVNPNHYALQCTHDGSILIVPKELVASGHKKETQKGKRK

SEQ ID NO: 31558 - protein, 193 aa, Homo sapiens
MREIVHLQAGQCGNQIGAKFWEVISDEHGIDPTGTYHGDSDLQLERINVYYNEATGGKYVPRAVLVDLEPGTMDSVRSGPFGQIFRPDNFVFGEPWLGTGRRLKGQGAAPRAPPWELRSRGPWTPSSSLSHSIPSTKSALGARSSCLPRRGAATHVISLQGAELGQWLFLCPWELAVAPPGRGLLSCQVWPLT

SEQ ID NO: 31559 - protein, 83 aa, Homo sapiens
MNSLRVILQASPGKLLWRKFQIPRFMPARPCSLYTCTYKTRNRAFFLLFLILPIHGTSKGQGNGPPQTDVHWFCSSHLGVSTG

SEQ ID NO: 31560 - protein, 59 aa, Homo sapiens
MNSLRVILQASPGKLLWRKFQIPRFMPARPCSLYTCTYKTRNRACEYTTSLKRTKRAPA

SEQ ID NO: 31561 - protein, 17 aa, Homo sapiens
KDPSPCGRSHGTVRVRE

SEQ ID NO: 31562 - protein, 26 aa, Homo sapiens
LKGPEMQGFGIHFEPLSCLTLTSFHY

SEQ ID NO: 31563 - protein, 430 aa, Homo sapiens
LPRGCRGRAAPAGACPRQGPASVASSSIAQFPQPEHPLKMAEESSCTRDCMSFSVLNWDQVSRLHEVLTEVVPIHGRGNFPTLEITLKDIVQTVRSRLEEAGIKVHDVRLNGSAAGHVLVKDNGLGCKDLDLIFHVALPTEAEFQLVRDVVLCSLLNFLPEGVNKLKISPVTLKEAYVQKLVKVCTDTDRWSLISLSNKNGKNVELKFVDSIRRQFEFSVDSFQIILDSLLFFYDCSNNPISEHFHPTVIGESMYGDFEEAFDHLQNRLIATKNPEEIRGGGLLKYSNLLVRDFRPTDQEEIKTLERYMCSRFFIDFPDILEQQRKLETYLQNHFAEEERSKYDYLMILRRVVNESTVCLMGHERRQTLNLISLLALRVLAEQNIIPSATNVTCYYQPAPYVSDGNFSNYYVAHPPVTYSQPYPTWLPCN

SEQ ID NO: 31564 - protein, 39 aa, Homo sapiens
LRSGCADPCDFPKCGKLECIICDSRELRSRFLLVLLWCE

SEQ ID NO: 31565 - protein, 59 aa, Homo sapiens
KAVHPARDPLCPAPAPPSGWNFPLTARLKLRIVGSLAGCRTEPRPQYPIHALCLCQGFK

SEQ ID NO: 31566 - protein, 25 aa, Homo sapiens
LRVILYARPLPLPPGGTSPSPPDLS

SEQ ID NO: 31567 - protein, 33 aa, Homo sapiens
LWILSSGNWMPTRRVILESCVGDHKAFVSQVPE

SEQ ID NO: 31568 - protein, 36 aa, Homo sapiens
LPLFKMKRKPRKGKTTRTEMCLAMSIGSNQWKRSNT

SEQ ID NO: 31569 - protein, 30 aa, Homo sapiens
RNHSFTSRRQNAKKEAKDFVSLFRVSLCEF

SEQ ID NO: 31570 - protein, 10 aa, Homo sapiens
KQTASFHQVS

SEQ ID NO: 31571 - protein, 479 aa, Homo sapiens
KLEKFHSTSSKRGVHDGGRGKLGEDRKMSPKRIAKRRSPPADAIPKSKKVKDTRAAASRRVPGARSCQGACGPSPPDQKTRPVSHRSHSTEPGLVLTLGQGDVGQLGLGENVMERKKPALVSIPEDVVQAEAGGMHTVCLSKSGQVYSFGCNDEGALGRDTSVEGSEMVPGKVELQEKVVQVSAGDSHTAALTDDGRVFLWGSFRDNNGVIGLLEPMKKSMVPVQVQLDVPVVKVASGNDHLVMLTADGDLYTLGCGEQGQLGRVPELFANRGGRQGLERLLVPKCVMLKSRGSRGHVRFQDAFCGAYFTFAISHEGHVYGFGLSNYHQLGTPGTESCFIPQNLTSFKNSTKSWVGFSGGQHHTVCMDSEGKAYSLGRAEYGRLGLGEGAEEKSIPTLISRLPAVSSVACGASVGYAVTKDGRVFAWGMGTNYQLGTGQDEDAWSPVEMMGKQLENRVVLSVSSGGQHTVLLVKDKEQS

SEQ ID NO: 31572 - protein, 42 aa, Homo sapiens
LIPSVKEISKLQAKILSDPSVLQLTPSLPMFLQQAAAAKAIG

SEQ ID NO: 31573 - protein, 54 aa, Homo sapiens
RCSAVFSALESTKLFGSQVGLCPGSCWFHVCQDSMSDFLIPQSHRHANVQEVQM

SEQ ID NO: 31574 - protein, 42 aa, Homo sapiens
ITGKEFNESVVRCRRHAYYGRKFERKLRTGDFSLHIVLEPDF

SEQ ID NO: 31575 - protein, 17 aa, Homo sapiens
LVLYFRPEDCRMGFQKI

SEQ ID NO: 31576 - protein, 144 aa, Homo sapiens
LRRVMGPRRRSRKPEAPRRRSPSPTPTPGPSRRGPSLGASSHQHSRRRQGWLKEIRKLQKSTHLLIRKLPFSRLAREICVKFTRGVDFNWQAQALLALQEAAEAFLVHLFEDAYLLTLHAGRVTLFPKDVQLARRIRGLEEGLG

SEQ ID NO: 31577 - protein, 365 aa, Homo sapiens
RSCLRVTFASACPASMEPKRIREGYLVKKGSVFNTWKPMWVVLLEDGIEFYKKKSDNSPKGMIPLKGSTLTSPCQDFGKRMFVFKITTTKQQDHFFQAAFLEERDAWVRDIKKAIKCIEGGQKFARKSTRRSIRLPETIDLGALYLSMKDTEKGIKELNLEKDKKIFNHCFTGNCVIDWLVSNQSVRNRQEGLMIASSLLNEGYLQPAGDMSKSAVDGTAENPFLDNPDAFYYFPDSGFFCEENSSDDDVILKEEFRGVIIKQGCLLKQGHRRKNWKVRKFILREDPAYLHYYDPAGAEDPLGAIHLRGCVVTSVESNSNGRKSEEENLFEIITADEVHYFLQAATPKERTEWIRAIQMASRTGK

SEQ ID NO: 31578 - protein, 46 aa, Homo sapiens
IAVFGSLRSRRHRLGALSWPLFPQMSDSDSRTEKRKKKRPNGKATF

SEQ ID NO: 31579 - protein, 9 aa, Homo sapiens
IALNKYSLK

SEQ ID NO: 31580 - protein, 7 aa, Homo sapiens
IHIRNKI

SEQ ID NO: 31581 - protein, 11 aa, Homo sapiens
VTSEMLSACSA

SEQ ID NO: 31582 - protein, 22 aa, Homo sapiens
LQILVEACVELFRDLAVSSFPE

SEQ ID NO: 31583 - protein, 13 aa, Homo sapiens
LSNLLKMTQLVGG

SEQ ID NO: 31584 - protein, 15 aa, Homo sapiens
IVVRLKKTSRCSDRL

SEQ ID NO: 31585 - protein, 74 aa, Homo sapiens
IENEFFVFTRYSYMRRSILNSLNIFSSVGPAWQDLSEGMMERLLDYMIWIKPWVEAILPWLNLPGMSLRVKRWQ

SEQ ID NO: 31586 - protein, 32 aa, Homo sapiens
LLDYMIWIKPWVEAILPWLNLPGMSLRVKRWQ

SEQ ID NO: 31587 - protein, 34 aa, Homo sapiens
LLGLLEPVSSPLPPRPDPLFCPKELALTASGSRS

SEQ ID NO: 31588 - protein, 32 aa, Homo sapiens
LGSGEWPGRQSRGPRTPGLFSERWAAETDLPP

SEQ ID NO: 31589 - protein, 285 aa, Homo sapiens
IMPIRALCTICSDFFDHSRDVAAIHCGHTFHLQCLIQWFETAPSRTCPQCRIQVGKRTIINKLFFDLAQEEENVLDAEFLKLQTVYSELDQAKLELKSAQKDLQSADKEIMSLKKKLTMLQETLNLPPVASETVDRLVLESPAPVEVNLKLRRPSFRDDIDLNATFDVDTPPARPSSSQHGYYEKLCLEKSHSPIQDVPKKICKGPRKESQLSLGGQSCAGEPDEELVGAFPIFVRNAILGQKQPKRPRSESSCSKDVVRTGFDGLGGRTKFIQPVSFSCDVELS

SEQ ID NO: 31590 - protein, 18 aa, Homo sapiens
MEDWKICFEELANTWCHM

SEQ ID NO: 31591 - protein, 55 aa, Homo sapiens
KLHEFSLLMKGSDLISRSKIWHPESSPQREGYPHDSLPCLAFDYFSLLPPQCKGM

SEQ ID NO: 31592 - protein, 22 aa, Homo sapiens
LHTPYRSHTLTLTFFAPVFQKK

SEQ ID NO: 31593 - protein, 84 aa, Homo sapiens [sequence omitted]

SEQ ID NO: 31594 - protein, 85 aa, Homo sapiens
MTQLILNEMPKAGYSSILNDFVESNFFVIDGDSLLVTCLGVKSFKWGQNLHFFYLVECYLVDLLSNGGQFTIVFFKMEFRSFCTG

SEQ ID NO: 31595 - protein, 43 aa, Homo sapiens
LSKGCLDSLLSQDSKYSNSCPVLVIPVDCISVKNTILPFCNSI

SEQ ID NO: 31596 - protein, 101 aa, Homo sapiens
LMAGNKGRGRAAYTFNIEAVGFSKGEKLPDVVLKPPPLFPDTDYKPVPLKTGEGEEYMLALKQELRETMKRMPYFIETPEERQETGVLLFCSHWSHIPGFK

SEQ ID NO: 31597 - protein, 224 aa, Homo sapiens
LMAGNKGRGRAAYTFNIEAVGFSKGEKLPDVVLKPPPLFPDTDYKPVPLKTGEGEEYMLALKQELRETMKRMPYFIETPEERQDIERYSKRYMKVYKEEWIPDWRRLPREMMPRNKCKKAGPKPKKAKDAGKGTPLTNTEDVLKKMEELEKRGDGEKSDEENEEKEGSKEKSKEGDDDDDDDAAEQEEYDEEEQEEENDYINSYFEDGDDFGADSDDNMDEATY

SEQ ID NO: 31598 - protein, 9 aa, Homo sapiens
LKLQIHFSF

SEQ ID NO: 31599 - protein, 39 aa, Homo sapiens
LNHVMIYRNTFPVAFIVIVFQRRYTSPHPGFKKALVGIE

SEQ ID NO: 31600 - protein, 38 aa, Homo sapiens
IVFFLVRSETTVPATYMSFLVILIDLFGFQKDTVIMCV

SEQ ID NO: 31601 - protein, 37 aa, Homo sapiens
VDSLSITFISMFLEVGKCIGLLVKHVLGIIFSSLGND

SEQ ID NO: 31602 - protein, 44 aa, Homo sapiens
LSLIKKYIDGQKKKCGEERRRVNQFLDYLQEFLGVMNTEWIIES

SEQ ID NO: 31603 - protein, 16 aa, Homo sapiens
MFTVSDFFPRTFSTSL

SEQ ID NO: 31604 - protein, 24 aa, Homo sapiens
LLVYISTKMTSFEMPRKYLFCHSY

SEQ ID NO: 31605 - protein, 44 aa, Homo sapiens
KGFNMDGLQISRWKRGMARPASYGSTLRRVPGCILCLPNSASWV

SEQ ID NO: 31606 - protein, 13 aa, Homo sapiens
LSLSLMSLKSRSW

SEQ ID NO: 31607 - protein, 47 aa, Homo sapiens
IQKVKMINMEVMKMLFTLEPLMIDLMFLLFITMLNAIVLYLELSITH

SEQ ID NO: 31608 - protein, 33 aa, Homo sapiens
IQSWTVWLACCLSHKMLLISWTNFQFLGSASVT

SEQ ID NO: 31609 - protein, 566 aa, Homo sapiens
IADSTELRVLLSVMYLMVENIRLERETDPCGWRTARETFRTELSFSMHNEEPFALLLFSMVTKFCSGLAPHFPIKKVLLLLWKVVMFTLGGFEHLQTLKVQKRAELGLPPLAEDSIQVVKSMRAASPPSYTLDLGESQLAPPPSKLRGRRGSRRQLLTKQDSLDIYNERDLFKTEEPATEEEEESAGDGERTLDGELDLLEQDPLVPPPPSQAPLSAERVAFPKGLPWAPKVRQKDIEHFLEMSRNKFIGFTLGQDTDTLVGLPRPIHESVKTLKQHKYISIADVQIKNEEELEKCPMSLGEEVVPETPCEILYQGMLYSLPQYMIALLKILLAAAPTSKAKTDSINILADVLPEEMPITVLQSMKLGIDVNRHKEIIVKSISTLLLLLLKHFKLNHIYQFEYVSQHLVFANCIPLILKFFNQNILSYITAKNSISVLDYPCCTIQDLPELTTESLEAGDNSQFCWRNLFSCINLLRLLNKLTKWKHSRTMMLVVFKSAPILKRALKVKQAMLQLYVLKLLKLQTKYLGRQWRKSNMKTMSAIYQKVRHRMNDDWAYGNGESSQSS

SEQ ID NO: 31610 - protein, 39 aa, Homo sapiens
ICKMGLRELRIKSAESSTSLWIKRDVWMKLQSQEEAREN

SEQ ID NO: 31611 - protein, 346 aa, Homo sapiens [sequence omitted]

SEQ ID NO: 31612 - protein, 100 aa, Homo sapiens
VATSAFSVSDGVNGGGGWDAAAGLAAGGWVGAGPGDGEGDRRQPLVHAADRLRLHPQPGLPDPSGRRPPGPAARRGEKSSIHFLPNSIPWACHSIWEKSN

SEQ ID NO: 31613 - protein, 51 aa, Homo sapiens
TEILLVKQNKPLNRKNEEAVSTSGRNEPGRGTGTISEAMPLRLELALSPRR

SEQ ID NO: 31614 - protein, 36 aa, Homo sapiens
VVSILDFHHSNRDSRIHPGGPGTTGAPLRLFPSSIF

SEQ ID NO: 31615 - protein, 63 aa, Homo sapiens
LELTTPEQGRDSPDAGRLFCPFGDTSPPLPGPASLKGSPCSCLDAGFFSGSGKPASRDDAPQR

SEQ ID NO: 31616 - protein, 11 aa, Homo sapiens
RVSLGAARDQF

SEQ ID NO: 31617 - protein, 27 aa, Homo sapiens
MQTTPLACWMKEQTLEMLLITMFMNIP

SEQ ID NO: 31618 - protein, 39 aa, Homo sapiens
IKKSKKNLKKSFKKPQKNLQKIRVSPAGDFYFFSSSFIK

SEQ ID NO: 31619 - protein, 66 aa, Homo sapiens
LPALFPQITKTWKLRCLLQNVKVFLESPLPHIPWTIPPLSIHPRIMASLLITTNPWIMMLPERSAI

SEQ ID NO: 31620 - protein, 93 aa, Homo sapiens
KKNIMLKSFQSANIIELLHYHQCDSRSSTKAEILKCLLNLQIQHIDARFAVLLTDKPTIPREVFENSGILVTDVNNFIENIEKIAAPFRSSYW

SEQ ID NO: 31621 - protein, 414 aa, Homo sapiens
KLYKMAAVGAEARGAWCVPCLVSLDTLQELCRKEKLTCKSIGITKRNLNNYEVEYLCDYKVVKDMEYYLVKWKGWPDSTNTWEPLQNLKCPLLLQQFSNDKHNYLSQVKKGKAITPKDNNKTLKPAIAEYIVKKAKQRIALQRWQDELNRRKNHKGMIFVENTVDLEGPPSDFYYINEYKPAPGISLVNEATFGCSCTDCFFQKCCPAEAGVLLAYNKNQQIKIPPGTPIYECNSRCQCGPDCPNRIVQKGTQYSLCIFRTSNGRGWGVKTLVKIKRMSFVMEYVGEVITSEEAERRGQFYDNKGITYLFDLDYESDEFTVDAARYGNVSHFVNHSCDPNLQVFNVFIDNLDTRLPRIALFSTRTINAGEELTFDYQMKGSGDISSDSIDHSPAKKRVRTVCKCGAVTCRGYLN

SEQ ID NO: 31622 - protein, 19 aa, Homo sapiens
LSRRKRRRPVGVGPMLQGV

SEQ ID NO: 31623 - protein, 43 aa, Homo sapiens
IGCAARGRGQWAVRAADCAQSGRHPGPAVVCGRRLIRIIASSF

SEQ ID NO: 31624 - protein, 26 aa, Homo sapiens
MTISRAGRTISKEMKPWIPPRTPARR

SEQ ID NO: 31625 - protein, 99 aa, Homo sapiens
TDPAGQLQWLVGELQAAEDRGDKVHIIGHIPPGHCLKSWSWNYYRIVARYENTLAAQFFGHTHVDEFEVFYDEETLSRPLAVAFLAPSATTYIGLNPGE

SEQ ID NO: 31626 - protein, 20 aa, Homo sapiens
LFKKYPCVFQLNHPFIFKPS

SEQ ID NO: 31627 - protein, 26 aa, Homo sapiens
LGHIVKAFFSELARQSPTGTFSHYVE

SEQ ID NO: 31628 - protein, 8 aa, Homo sapiens
MLYSCAPP

SEQ ID NO: 31629 - protein, 54 aa, Homo sapiens
TKMERLIGSGRMKQFGEDRSLKWKTGRQKYGKAKKRIEKIGKLEDKNILLEEKR

SEQ ID NO: 31630 - protein, 29 aa, Homo sapiens
LRLPVSWASLGPHERESFLSLMVNSRPPA

SEQ ID NO: 31631 - protein, 74 aa, Homo sapiens
VNFILKPQLERRRGYKLFLDDRDLLPRAEPSADLLVNLSRCRRLIVVLSDAFLSRAWCSHSFRWVPRGVGWAPA

SEQ ID NO: 31632 - protein, 327 aa, Homo sapiens
LSSVSGSVMSVYSGDFGNLEVKGNIQFAIEYVESLKELHVFVAQCKDLAAADVKKQRSDPYVKAYLLPDKGKMGKKKTLVVKKTLNPVYNEILRYKIEKQILKTQKLNLSIWHRDTFKRNSFLGEVELDLETWDWDNKQNKQLRWYPLKRKTAPVALEAENRGEMKLALQYVPEPVPGKKLPTTGEVHIWVKECLDLPLLRGSHLNSFVKCTILPDTSRKSRQKTRAVGKTTNPIFNHTMVYDGFRPEDLMEACVELTVWDHYKLTNQFLGGLRIGFGTGKSYGTEVDWMDSTSEEVALWEKMVNSPNTWIEATLPLRMLLIAKISK

SEQ ID NO: 31633 - protein, 77 aa, Homo sapiens
RTLGPLGASPGLMIVQKAAIKGAWEAGWRREQKKPNSADLGTVRAASRNCGQRLCVLAGRACSFLPWQPRAMAIIAL

SEQ ID NO: 31634 - protein, 17 aa, Homo sapiens
RRMAHQRKGLKSSMAAS

SEQ ID NO: 31635 - protein, 78 aa, Homo sapiens
VERPLQRCGQLVRMAIRAQHSNAAQTQTGEANRGWTGQESLSDSDPEMWELLQREKDRQCRGLELIASEILWGSRGGG

SEQ ID NO: 31636 - protein, 81 aa, Homo sapiens
IMTQESRACSSVWKEFGSVGRCNVHRHFQGNSKQSPFPFAFPQILSVYIKPWVHIVVVIEGNWLNSTLVYGTFCGHLRKTS

SEQ ID NO: 31637 - protein, 21 aa, Homo sapiens
IFGSRTQGISMTCMEGRSLRL

SEQ ID NO: 31638 - protein, 35 aa, Homo sapiens
RGRPIVSASASLTIFPAMFNPEERSCSLEGNPVAW

SEQ ID NO: 31639 - protein, 247 aa, Homo sapiens
KAQILLDCGEDNICVPDLQLEVFGEQNHVYLGDKNALNLTFHAQNVGEGGAYEAELRVTAPPEAEYSGLVRHPGNFSSLSCDYFAVNQSRLLVCDLGNPMKAGASLWGGLRFTVPHLRDTKKTIQFDFQILSKNLNNSQSDVVSFRLSVEAQAQVTLNGVSKPEAVLFPVSDWHPRDQPQKEEDLGPAVHHVYELINQGPSSISQGVLELSCPQALEGQQLLYVTRVTGLNCTTNHPINPKGLEVRS

SEQ ID NO: 31640 - protein, 10 aa, Homo sapiens
REDWPPKPVY

SEQ ID NO: 31641 - protein, 128 aa, Homo sapiens
IDECGTGRHSCANDTICFNLDGGYDCRCPHGKNCTGDCIHDGKVKHNGQIWVLENDRCSVCSCQNGFVMCRRMVCDCENPTVDLFCCPECDPRLSSQCLHQNGETLYNSGDTWVQNCQQCRCLVNLAT

SEQ ID NO: 31642 - protein, 15 aa, Homo sapiens
LSMSSWKELHRGLHP

SEQ ID NO: 31643 - protein, 35 aa, Homo sapiens
RTGLSRLQPVTPHTRLRPRRRVGTCTCGASAGVSP

SEQ ID NO: 31644 - protein, 93 aa, Homo sapiens
KIVREHYLRDDIGCGAPGCAACGGAHEGPALEPQPQDPASSVCPQPHYLLPDTNVLLHQIVSAWRPGTWASVASSLRLPGSLLMFLRTLPSGM

SEQ ID NO: 31645 - protein, 112 aa, Homo sapiens
VRRTQGSEDSSDDVRRVQRREKNRIAAQKSRQRQTQKADTLHLESEDLEKQNAALRKEIKQLTEELKYFTSVLNSHEPLCSVLAASTPSPPEVVYSAHAFHQPHVSSPRFQP

SEQ ID NO: 31646 - protein, 68 aa, Homo sapiens
KNMAAQIPESDQIKQFKEFLGTYNKLTETCFLDCVKDFTTREVKPEEEYHIQQNEALAAKAGLLGQPR

SEQ ID NO: 31647 - protein, 62 aa, Homo sapiens
KNMAAQIPESDQIKQFKEFLGTYNKLTETCFLDCVKDFTTREVKPEENEALAAKAGLLGQPR

SEQ ID NO: 31648 - protein, 35 aa, Homo sapiens
RGHLLMKFPVPVSAAVELPWQCDSLIPGKSEEQAT

SEQ ID NO: 31649 - protein, 97 aa, Homo sapiens
MYMDLVDGIFLNQIMLQIDPRPTNQRINKHVNNDVNLRIQNLTILVRNIKTYYQRWGDDYDEEGEEADEEGEEGGDEENDPDYDPKKDQNPTECKQQ

SEQ ID NO: 31650 - protein, 607 aa, Homo sapiens
LCLSVSLSLALPPSSFLPEAMTRFSYAEYFSLFHSCSAPSRSTAPPESSPARAPMGLFQGVMQKYSSSLFKTSQLAPADPLIKAIKDGDEEALKTMIKEGKNLAEPNKEGWLPLHEAAYYGQVGCLKVLQRAYPGTIDQRTLQEETAVYLATCRGHLDCLLSLLQAGAEPDISNKSRETPLYKACERKNAEAVKILVQHNADTNHRCNRGWTALHESVSRNDLEVMQILVSGGAKVESKNAYGITPLFVAAQSGQLEALRFLAKYGADINTQASDNASALYEACKNEHEEVVEFLLSQGADANKTNKDGLLPLHIASKKGNYRIVQMLLPVTSRTRIRRSGVSPLHLAAERNHDEVLEALLSARFDVNTPLAPERARLYEDRRSSALYFAVVNNNVYATELLLQHGADPNRDVISPLLVAIRHGCLRTMQLLLDHGANIDAYIATHPTAFPATIMFAMKCLSLLKFLMDLGCDGEPCFSCLYGNGPHPPAPQPSSRFNDAPAADKEPSVVQFCEFVSAPEVSRWAGPIIDVLLDYVGNVQLCSRLKEHIDSFEDWAVIKEKAEPPRPLAHLCRLRVRKAIGKYRIKLLDTLPLPGRLIRYLKYENTQ

SEQ ID NO: 31651 - protein, 452 aa, Homo sapiens
IFRVSPGFRIAMIIPSLEELDSLKYSDLQNLAKSLGLRANLRATKLLKALKGYIKHEARKGNENQDESQTSASSCDETEIQISNQEEAERQPLGHVTKTRRRCKTVRVDPDSQQNHSEIKISNPTEFQNHEKQESQDLRATAKVPSPPDEHQEAENAVSSGNRDSKVPSEGKKSLYTDESSKPGKNKRTAITTPNFKKLHEAHFKEMESIDQYIERKKKHFEEHNSMNELKQQPINKGGVRTPVPPRGRLSVASTPISQRRSQGRSCGPASQSTLGLKGSLKRSAISAAKTGVRFSAATKDNEHKRSLTKTPARKSAHVTVSGGTPKGEAVLGTHKLKTITGNSAAVITPFKLTTEATQTPVSNKKPVFDLKASLSRPLNYEPHKGKLKPWGQSKENNYLNQHVNRINFYKKTYKQPHLQTKEEQRKKREQERKEKKAKVLGMRRGLILAED

SEQ ID NO: 31652 - protein, 351 aa, Homo sapiens
TRGFRLLPHWKITPQASLAPSSELTGMVPREAPESAQCLCPSLTIPNAKDVLRKRHKRRSRQHQRFMARKALLQEQGLLSMPPEPGSSPLPTPFGAATATEAASSGKQCLRAGSGSAPCSRRPAPGKASGPLPSKCVAIDCEMVGTGPRGRVSELARCSIVSYHGNVLYDKYIRPEMPIADYRTRWSGITRQHMRKAVPFQVAQKEILKLLKGKVVVGHALHNDFQALKYVHPRSQTRDTTYVPNFLSEPGLHTRARVSLKDLALQLLHKKIQVGQHGHSSVEDATTAMELYRLVEVQWEQQEARSLWTCPEDREPDSSTDMEQYMEDQYWPDDLAHGSRGGAREAQDRRN

SEQ ID NO: 31653 - protein, 28 aa, Homo sapiens
VHHYASRKLPIKGAEHMSLLYPVAIRTL

SEQ ID NO: 31654 - protein, 87 aa, Homo sapiens
IAVMLGAALRRCAVAATTRADPRGLLHSARTPGPAVAIQSVRCYSHGSQETDEEFDARWVTYFNKPDIDAWELRKDGLPQGFIDIAT

SEQ ID NO: 31655 - protein, 27 aa, Homo sapiens
LIQMEHVLCNLITQMMKKNRTFSFIFE

SEQ ID NO: 31656 - protein, 78 aa, Homo sapiens
VLSLLRGRPGKTVDLGSGDGRIVLAAHRCGLRPAVGYELNPWLVALARLHAWRAGCAGSVCYRRKDLWKVTWGSLATR

SEQ ID NO: 31657 - protein, 37 aa, Homo sapiens
LTIRAKAKLQKKKEVCLYSTPSTSKLWRSRLWTDQKT

SEQ ID NO: 31658 - protein, 210 aa, Homo sapiens
VGRAKEMDETVAEFIKRTILKIPMNELTTILKAWDFLSENQLQTVNFRQRKESVVQHLIHLCEEKRASISDAALLDIIYMQFHQHQKVWEVFQMSKGPGEDVDLFDMKQFKNSFKKILQRALKNVTVSFRETEENAVWIRIAWGTQYTKPNQYKPTYVVYYSQTPYAFTSSSMLRRNTPLLGQELEATGKIYLRQEEIILDITEMKKACN

SEQ ID NO: 31659 - protein, 21 aa, Homo sapiens
KDSDSLVLGSMARLWSMIYRR

SEQ ID NO: 31660 - protein, 16 aa, Homo sapiens
VAEAENRKRGWRGCKS

SEQ ID NO: 31661 - protein, 19 aa, Homo sapiens
LRGGPSRSVSLLSVVPARV

SEQ ID NO: 31662 - protein, 41 aa, Homo sapiens
MEGHICQSLESAKAGTRFPGPQWGCANPRELVPSEAITDDV

SEQ ID NO: 31663 - protein, 43 aa, Homo sapiens
ISTTQVFSLAGSTFSLPSTHIFGTPMGAVNPLLSQAESSHTGM

SEQ ID NO: 31664 - protein, 281 aa, Homo sapiens
VSLLLVRNIAITGNLEVETPFCHPSVPRAAANPPAGLQDPGLTERPHRSRRPRARYAPGIMGEKSRRKGPAPRHADGKLGRTCDHPYAPWSFTPSSRAPTAWVRPPCPVWASRLQEHSPEPRRARAPPTRRAQAALYAPALRLRDHLDRFSILMTSCTSWLQAPQAPGLCRDEQSSRISVPQLSGAPILLPDLEGTKLSNFQESSPLPHKHERKDKRSTPEEEGRSAPEKIIQSLKLCPGGHRPASLSSGCPAGCRLSFNLPPSMLLSVQKCCMPSSLKTC

SEQ ID NO: 31665 - protein, 59 aa, Homo sapiens
TSIRALPQGSIKFHCRKSPLRYADICPEPSPYSITGFNQILLERHRLIHVTSSAFTGLG

SEQ ID NO: 31666 - protein, 33 aa, Homo sapiens
ILIVSRGVHSPPLASAQGATAAIATSSLSQGPV

SEQ ID NO: 31667 - protein, 25 aa, Homo sapiens
MKLRRKEKFRSIKPSLRCLEVGSWN

SEQ ID NO: 31668 - protein, 9 aa, Homo sapiens
KRWIKNALD

SEQ ID NO: 31669 - protein, 86 aa, Homo sapiens
TLLLPGLGIFGSTSTVTLPETLLFVSTLDGSLHAVSKRTGSIKWTLKEGNLDLVLGRHGHLLNWFHRNIFWRKRKHYSLSNKINKK

SEQ ID NO: 31670 - protein, 8 aa, Homo sapiens
LKMKYSHL

SEQ ID NO: 31671 - protein, 56 aa, Homo sapiens
LQYIFPPFLEGFRCFPKVLDERSSSVGRFWALWLGFCNFSLGTAVEPHPLWIIIAT

SEQ ID NO: 31672 - protein, 13 aa, Homo sapiens
MKMTIIELQVLTD

SEQ ID NO: 31673 - protein, 22 aa, Homo sapiens
TSTKPCVTWRTCWSAPALSLSP

SEQ ID NO: 31674 - protein, 231 aa, Homo sapiens
KERFHWQSHNVKQSGVDDMVLLPQITEDAIAANLRKRFMDDYIFTYIGSVLISVNPFKQMPYFTDREIDLYQGAAQYENPPHIYALTDNMYRNMLIDCENQCVIISGESGAGKTVAAKYIMGYISKVSGGGEKVQHVKDIILQSNPLLEAFGNAKTVRNNNSSRFGKYFEIQFSRGGEPDGGKISNFLLEKSRVVMQNENERNFHIYYQVQGRGRGRGSTTWSPAGWTMGR

SEQ ID NO: 31675 - protein, 50 aa, Homo sapiens
VNAADSGAAQTRARHEARWRLPFWWQPGSWSGRKKRKPVGEECDGGAASA

SEQ ID NO: 31676 - protein, 23 aa, Homo sapiens
TAAEAQVGHQTARAAPGPAQQQG

SEQ ID NO: 31677 - protein, 45 aa, Homo sapiens
KDTAGVSLVMWKRTGLRPQKGLNRRWRPPVPSMATHPGTWQTAPR

SEQ ID NO: 31678 - protein, 412 aa, Homo sapiens
LLLITARGIMDRSKENCISGPVKATAPVGGPKRVLVTQQFPCQNPLPVNSGQAQRVLCPSNSSQRIPLQAQKLVSSHKPVQNQKQKQLQATSVPHPVSRPLNNTQKSKQPLPSAPENNPEEELASKQKNEESKKRQWALEDFEIGRPLGKGKFGNVYLAREKQSKFILALKVLFKAQLEKAGVEHQLRREVEIQSHLRHPNILRLYGYFHDATRVYLILEYAPLGTVYRELQKLSKFDEQRTATYITELANALSYCHSKRVIHRDIKPENLLLGSAGELKIADFGWSVHAPSSRRTTLCGTLDYLPPEMIEGRMHDEKVDLWSLGVLCYEFLVGKPPFEANTYQETYKRISRVEFTFPDFVTEGARDLISRLLKHNPSQRPMLREVLEHPWITANSSKPSNCQNKESASKQS

SEQ ID NO: 31679 - protein, 20 aa, Homo sapiens
RGNLWFKFFMPHPLSAEGLL

SEQ ID NO: 31680 - protein, 28 aa, Homo sapiens
ICLISGISQKKNYSHSLTPKYQNILQNG

SEQ ID NO: 31681 - protein, 374 aa, Homo sapiens
VAARAGTSVSEAPQNSQMDSVEKTTNRSEQKSRKFLKSLIRKQPQELLLVIGTGVSAAVAPGIPALCSWRSCIEAVIEAAEQLEVLHPGDVAEFRRKVTKDRDLLVVAHDLIRKMSPRTGDAKPSFFQDCLMEVFDDLEQHIRSPVVLQSILSLMDRGAMVLTTNYDNLLEAFGRRQNKPMESLDLKDKTKVLEWARGHMKYGVLHIHGLYTDPCGVVLDPSGYKDVTQDAEVMEVLQNLYRTKSFLFVGCGETLRDQIFQALFLYSVPNKVDLEHYMLVLKENEDHFFKHQADMLLHGIKVVSYGDCFDHFPGYVQDLATQICKQQSPDADRVDSTTLLGNACQDCAKRKLEENGIEVSKKRTQSDTDDAGGS

SEQ ID NO: 31682 - protein, 39 aa, Homo sapiens
RSAASTCRRRRRRCSRTSRSLRSSWRRRRAPGRSCSWRR

SEQ ID NO: 31683 - protein, 12 aa, Homo sapiens
LKSILESTRSSM

SEQ ID NO: 31684 - protein, 66 aa, Homo sapiens
LTARKSQIPASVRSSSWRWQSSWSQKAGRMQVMSTSALMTVGWLPKEIQKADFRQTLSAFLMGFAS

SEQ ID NO: 31685 - protein, 299 aa, Homo sapiens [sequence omitted]

SEQ ID NO: 31686 - protein, 640 aa, Homo sapiens
MPQLNGGGGDDLGANDELISFKDEGEQEEKSSENSSAERDLADVKSSLVNESETNQNSSSDSEAERRPPPRSESFRDKSRESLEEAAKRQDGGLFKGPPYPGYPFIMIPDLTSPYLPNGSLSPTARTYLQMKWPLLDVQAGSLQSRQALKDARSPSPAHIVQSPLPCCTQGHDCQHFYPPSDFTVSTQVFRDMKRSHSLQKVGEPWCIESNKVPVVQHPHHVHPLTPLITYSNEHFTPGNPPPHLPADVDPKTGIPRPPHPPDISPYYPLSPGTVGQIPHPLGWQGQPVYPITTGGFRHPYPTALTVNASMSRFPPHMVPPHHTLHTTGIPHPAIVTPTVKQESSQSDVGSLHSSKHQDSKKEEEKKKPHIKKPLNAFMLYMKEMRAKVVAECTLKESAAINQILGRRWHALSREEQAKYYELARKERQLHMQLYPGWSARDNYGKKKKRKRDKQPGETNEHSECFLNPCLSLPPITDANTPKKCRALFGLDRQTLWCKPCRRKKKCVRYIQGEGSCLSPPSSDGSLLDSPPPSPNLLGSPPRDAKSQTEQTQPLSLSLKPDPLAHLSMMPPPPALLLAEATHKASALCPNGALDLPPAALQPAAPSSSIAQPSTSSLHSHSSLAGTQPQPLSLVTKSLE

SEQ ID NO: 31687 - protein, 524 aa, Homo sapiens
MYRKVHNLRILACGGDGTVGWILSTLDQLRLKPPPPVAILPLGTGNDLARTLNWGGGYTDEPVSKILSHVEEGNVVQLDRWDLHAEPNPEAGPEDRDEGATDRLPLDVFNNYFSLGFDAHVTLEFHESREANPEKFNSRFRNKMFYAGTAFSDFLMGSSKDLAKHIRVVCDGMDLTPKIQDLKPQCVVFLNIPRYCAGTMPWGHPGEHHDFEPQRHDDGYLEVIGFTMTSLAALQVGGHGERLTQCREVVLTTSKAIPVQVDGEPCKLAASRIRIALRNQATMVQKAKRRSAAPLHSDQQPVPEQLRIQVSRVSMHDYEALHYDKEQLKEASVPLGTVVVPGDSDLELCRAHIERLQQEPDGAGAKSPTCQKLSPKWCFLDATTASRFYRIDRAQEHLNYVTEIAQDEIYILDPELLGASARPDLPTPTSPLPTSPCSPTPRSLQGDAAPPQGEELIEAAKRNDFCKVLAPGSSSFPQQLPRALGSEASGLGQELTCSGAVICHRLALCGISSDRPIPLHCISV

SEQ ID NO: 31688 - protein, 215 aa, Homo sapiens
MAQALGEDLVQPPELQDDSSSLGSDSELSGPGPYRQADRYGFIGGSSAEPGPGHPPADLIRQREMKWVEMTSHWEKTMSRRYKKVKMQCRKGIPSALRARCWPLLCGAHVCQKNSPGTYQELAEAPGDPQWMETIGRDLHRQFPLHEMFVSPQGHGRGSCRCSRPTPCIDRSRATARPRGPWLLCCSCTCPQRRPSGAWCRSVRSTSLGTTGPTW

SEQ ID NO: 31689 - protein, 132 aa, Homo sapiens
MVESPFSVPSLPLSHGRYYGGAEVVDEIELLCQRRALEAFDLDPAQWGVNVQPYSGSPANLAVYTALLQPHDRIMGLDLPDGGHLTHGYMSDVKRISATSIFFESMPYKLNVSALGCGEGLLALVVVLPWRS

SEQ ID NO: 31690 - protein, 99 aa, Homo sapiens
MLEERALGRYRPDLNPHSSCFGPCNSRLPLNPLSSINTWLSRNNYDLGPGPSGIFTPNLNFITLERETVEWNDSPELQIEGIFSSDFDLNGGNTFMAPL

SEQ ID NO: 31691 - protein, 101 aa, Homo sapiens
MIVRLPQPCGNLIPSCIDPETSSHLPIRQRERMIEMLEERALGRYRPDLNPHSSCFGPCNSRLPLNPLSSINTWLSRNNYDLGPGPSGIFTPNLNFITLER

SEQ ID NO: 31692 - protein, 198 aa, Homo sapiens
MQEPPKSIEEFLKFQNWDYWPREIHFRDDDKWSCTLKKIKEDSSFVSIYTHLWENVPRIFEALLIMESKLKEYSLILQNHTSEIFKWKSMISETSSYRKLERYGEFLKKYHKKKKIMLSDEMETEKNIEGCSFTGFKANELTQLPRHLDAEQIYLFILKAHNFDERVFKIWKTHFLSEASIALLHDSFWWWFLHKFRV

SEQ ID NO: 31693 - protein, 482 aa, Homo sapiens
MSLKENLARCWTLTEAEKMSFETQKTNLATENQYLRVSLEKEEKALSSLQEELNKLREQIRILEDKGTSTELVKENQKLKQHLEEEKQKKHSFLSQRETLLTEAKMLKRELERERLVTTALRGELQQLSGSQLHGKSDSPNVYTEKKEIAILRERLTELERKLTFEQQRSDLWERLYVEAKDQNGKQGTDGKKKGGRGSHRAKNKSKETFLGSVKETFDAMKNSTKEFVRHHKEKIKQAKEAVKENLKKFSDSVKSTFRHFKDTTKNIFDEKGNKRFGATKEAAEKPRTVFSDYLHPQYKAPTENHHNRGPTMQNDGRKEKPVHFKEFRKNTNSKKCSPGHDCRENSHSFRKACSGVFDCAQQESMSLFNTVVNPIRMDEFRQIIQRYMLKELDTFCHWNELDQFINKFFLNGVFIHDQKLFTDFVNDVKDYLRNMKEYEVDNDGVFEKLDEYIYRHFFGHTFSPPYGPRSVYIKPCHYSSL

SEQ ID NO: 31694 - protein, 71 aa, Homo sapiens
MVFEVFEVFLEFTCWRLQLTERPGLDCASCSSRTKDISWKCMRPRICDRNGSSHVRYAPWKDLEIRNLSEH

SEQ ID NO: 31695 - protein, 444 aa, Homo sapiens
MPTFSIQHQRIHTDEKLLECKECGKDFSFVSVLVRHQRIHTGEKPYECKECGKAFGSGANLAYHQRIHTGEKPFECKECGKAFGSGSNLTHHQRIHTGEKPYECKECGKAFSFGSGLIRHQIIHSGEKPYECKECGKSFSFESALIRHHRIHTGEKPYECIDCGKAFGSGSNLTQHRRIHTGEKPYECKACGMAFSSGSALTRHQRIHTGEKPYICNECGKAFSFGSALTRHQRIHTGEKPYVCKECGKAFNSGSDLTQHQRIHTGEKPYECKECEKAFRSGSKLIQHQRMHTGEKPYECKECGKTFSSGSDLTQHHRIHTGEKPYECKECGKAFGSGSKLIQHQLIHTGERPYECKECGKSFSSGSALNRHQRIHTGEKPYECKECGKAFYSGSSLTQHQRIHTGEKLYECKNCGKAYGRDSEFQQHKKSHNGKKLCELETIN

SEQ ID NO: 31696 - protein, 170 aa, Homo sapiens
MASWAKGRSYLAPGLLQGQVAIVTGGATGIGKAIVKELLELGSNVVIASRKLERLKSAADELQANLPPTKQARVIPIQCNIRNEEEVNNLVKSTLDTFGKINFLVNNGGGQFLSPAEHISSKGWHAVLETNLTGTFYMCKAGKYHQYPQVNMSLFRDLRIPIRDSEAPCH

SEQ ID NO: 31697 - protein, 110 aa, Homo sapiens [sequence omitted]

SEQ ID NO: 31698 - protein, 280 aa, Homo sapiens
MLPADYNLFVEEFRKSPSSTWIMKPCGKAQGKGIFLINKLSQIKKWSRDSKTSSFVSQSNKEAYVISLYINNPLLIGGRKFDLRLYVLVSTYRPLRCYMYKLGFCRFCTVKYTPSTSELDNMFVHLTNVAIQKHGEDYNHIHGGKWTVSNLRLYLESTRGKEVTSKLFDEIHWIIVQSLKAVAVNASPSLTSSTANDRILKYNLINDTLNIAVPNGEIPDCKWNKSPPKEVLGNYEILYDEELAQGDGADRELRSRQGQSLGPRAGRSRDSGRAVLTTWK

SEQ ID NO: 31699 - protein, 7 aa, Homo sapiens
MCESRVS

SEQ ID NO: 31700 - protein, 109 aa, Homo sapiens
MTQAGQSSGCTALWFPSMLFSLSLLSNLNQIGSSHLDRPHIPGQSAQLFIYQMSSQQLQQQPSANKKAGKIHNTPFANQLNPTQHLAKPFQQILPGRQSGSLTSPFLAC

SEQ ID NO: 31701 - protein, 61 aa, Homo sapiens
MPSKGWRYCPVLAMKVPRHGKPLSPGQIKMTFSMHMQACHQEQSTEGQHSFCASSWLPSRS

SEQ ID NO: 31702 - protein, 126 aa, Homo sapiens
MRGMVAILIAFMKQRRMGLNDFIQKIANNSYACKHPEVQSILKISQPQEPELMNANPSPPPSPSQQINLGPSSNPHAKPSDFHFLKVIGKGSFGKVISNLKIFWYTSFMSSFVFSLDEDRKMIFLN

SEQ ID NO: 31703 - protein, 77 aa, Homo sapiens
MRGMVAILIAFMKQRRMGLNDFIQKIANNSYACKHPEVQSILKISQPQEPELMNANPSPPVSFCMCRASVENCKGVS

SEQ ID NO: 31704 - protein, 539 aa, Homo sapiens
MTNPLREIDKIVGQLMDGLKQLKLHRCVNVIFVGDHGMEDVTCDRTEFLSNYLTNVDDITLVPGTLGRIRSKFSNNAKYDPKAIIANLTCKKPDQHFKPYLKQHLPKRLHYANNRRIEDIHLLVERRWHVARKPLDVYKKPSGKCFFQGDHGFDNKVNSMQTVFVGYGSTFKYKTKVPPFENIELYNVMCDLLGLKPAPNNGTHGSLNHLLRTNTFRPTMPEEVTRPNYPGIMYLQSDFDLGCTCDDKVEPKNKLDELNKRLHTKGSTEERHLLYGRPAVLYRTRYDILYHTDFESGYSEIFLMPLWTSYTVSKQAEVSSVPDHLTSCVRPDVRVSPSFSQNCLAYKNDKQMSYGFLFPPYLSSSPEAKYDAFLVTNMVPMYPAFKRVWNYFQRVLVKKYASERNGVNVISGPIFDYDYDGLHDTEDKIKQYVEGSSIPVPTHYYSIITSCLDFTQPADKCDGPLSVSSFILPHRPDNEESCNSSEDESKWVEELMKMHTARVRDIEHLTSLDFFRKTSRSYPEILTLKTYLHTYESEI

SEQ ID NO: 31705 - protein, 14 aa, Homo sapiens
MSRLNFFSLTIMMP

SEQ ID NO: 31706 - protein, 7 aa, Homo sapiens
MVKNFFT

SEQ ID NO: 31707 - protein, 60 aa, Homo sapiens
KQRQTLRKMVIDMVLATDMSKHMSLLADLKTMVETKKVTSSGVLLLDNYTDRIQVFEESL

SEQ ID NO: 31708 - protein, 38 aa, Homo sapiens
INSVAFHPDGKSYSSGGEDGYVRIHYFDPQYFEFEFEA

SEQ ID NO: 31709 - protein, 11 aa, Homo sapiens
KQTASFHQAFS

SEQ ID NO: 31710 - protein, 10 aa, Homo sapiens
KQSHRIDTDG

SEQ ID NO: 31711 - protein, 37 aa, Homo sapiens
LPAGALPVASGHFFFSTLAPSDTCLMLSKFNKDSWKF

SEQ ID NO: 31712 - protein, 1399 aa, Homo sapiens
LQTPLQIDCSESSPSLSLGGFTPNSEPASSDEHTNLFTSAIGSCRVSNPNSSGRKKLTDSPGLFSAQDTSLNRLHRKESLPSNERAVQTLAGSQPTSDKPSQRPSESTNCSPTRKRSSSESTSSTVNGVPSRSPRLVASGDDSVDSLLQRMVQNEDQEPMEKSIDAVIATASAPPSSSPGRSHSKDRTLGKPDSLLVPAVTSDSCNNSISLLSEKLTSSCSPHHIKRSVVEAMQRQARKMCNYDKILATKKNLDHVNKILKAKKLQRQARTGNNFVKRRPGRPRKCPLQAVVSMQAFQAAQFVNPELNRDEEGAALHLSPDTVTDVIEAVVQSVNLNPEHKKGLKRKGWLLEEQTRKKQKPLPEEEEQENNKSFNEAPVEIPSPSETPAKPSEPESTLQPVLSLIPREKKPPRPPKKKYQKAGLYSDVYKTTDPKSRLIQLKKEKLEYTPGEHEYGLFPAPIHVVFFVSGKYLRQKRIDFQLPYDILWQWKHNQLYKKPDVPLYKKIRSNVYVDVKPLSGYEATTCNCKKPDDDTRKGCVDDCLNRMIFAECSPNTCPCGEQCCNQRIQRHEWVQCLERFRAEEKGWGIRTKEPLKAGQFIIEYLGEVVSEQEFRNRMIEQYHNHSDHYCLNLDSGMVIDSYRMGNEARFINHSCDPNCEMQKWSVNGVYRIGLYALKDMPAGTELTYDYNFHSFNVEKQQLCKCGFEKCRGIIGGKSQRVNGLTSSKNSQPMATHKKSGRSKEKRKSKHKLKKRRGHLSEEPSENINTPTRLTPQLQMKPMSNRERNFVLKHHVFLVRNWEKIRQKQEEVKHTSDNIHSASLYTRWNGICRDDGNIKSDVFMTQFSALQTARSVRTRRLAAAEENIEVARAARLAQIFKEICDGIISYKDSSRQALAAPLLNLPPKKKNADYYEKISDPLDLITIEKQILTGYYKTVEAFDADMLKVFRNAEKYYGRKSPVGRDVCRLRKAYYNARHEASAQIDEIVGETASEADSSETSVSEKENGHEKDDDVIRCICGLYKDEGLMIQCDKCMVWQHCDCMGVNSDVEHYLCEQCDPRPVDREVPMIPRPHYAQPGCVYFICLLRDDLLLRQGDCVYLMRDSRRTPDGHPVRQSYRLLSHINRDKLDIFRIEKLWKNEKEERFAFGHHYFRPHETHHSPSRRFYHNELFRVPLYEIIPLEAVVGTCCVLDLYTYCKGRPKGVKEQDVYICDYRLDKSAHLFYKIHRNRYPVCTKPYAFDHFPKKLTPKKDFSPHYVPDNYKRNGGRSSWKSERSKPPLKDLGQEDDALPLIEEVLASQEQAANEIPSLEEPEREGATANVSEGEKKTEESSQEPQSTCTPEERRHNQRERLNQILLNLLEKIPGKNAIDVTYLLEEGSGRKLRRRTLFIPENSFRK

SEQ ID NO: 31713 - protein, 31 aa, Homo sapiens
RDRCLYHNTKLDNNLDSVSLLIDHVCSRLVN

SEQ ID NO: 31714 - protein, 101 aa, Homo sapiens
KKYQKRMKIKEKEKRRKLLEKSSVDQAGKYSKTVASEKLKQLTKTGKASFIKDEGKDKALKSSQAFFSKLQDQVKMQINDAKKTEKKKKKRQDISVHKLKL

SEQ ID NO: 31715 - protein, 14 aa, Homo sapiens
VKHIQSTCIMIWNC

SEQ ID NO: 31716 - protein, 26 aa, Homo sapiens
IHQLSKSEEKELRKFRKIDYSWIAAL

SEQ ID NO: 31717 - protein, 107 aa, Homo sapiens
LFQRLQSMDTSGLPEEHLKAIQDYLSTQLAQDSEFVKTGSSSLPHLKKLTTLLCKELYGEVIRTLPSLESLQRLFDQQLSPGLRPRPQVKGLGVEKVRLIPQGGGLS

SEQ ID NO: 31718 - protein, 17 aa, Homo sapiens
LWHHSRPQRVRQLPQPL

SEQ ID NO: 31719 - protein, 46 aa, Homo sapiens
IPVLPQVMMILIPGQTLPLQLFHPQEVSMVRNLIQKDRTFAVLAYR

SEQ ID NO: 31720 - protein, 49 aa, Homo sapiens
VPRSLTMFPPRTAKPSWKELPNWPSESPTPMPGCAVKKMSRQLMCTFSV

SEQ ID NO: 31721 - protein, 8 aa, Homo sapiens
VMLILECI

SEQ ID NO: 31722 - protein, 47 aa, Homo sapiens
IFASWSAGDFGSVGATEWLEGYLSSLHLKAFTYINLDKAVLGKYPFH

SEQ ID NO: 31723 - protein, 253 aa, Homo sapiens
INQFSYLFPEEFKAIYLRSKPSKFPRYSAEVHMSIPNVSLPLRFDWRDKQVVTQVRNQQMCGGCWAFSVVGAVESAYAIKGKPLEDLSVQQVIDCSYNNYGCNGGSTLNALNWLNKMQVKLVKDSEYPFKAQNGLCHYFSGSHSGFSIKGYSAYDFSDQEDEMAKALLTFGPLVVIVDAVSWQDYLGGIIQHHCSSGEANHAVLITGFDKTGSTPYWIVRNSWGSSWGVDGYAHVKMGSNVCGIADSVSSIFV

SEQ ID NO: 31724 - protein, 236 aa, Homo sapiens
REASPLGPAALRDSEEKLAPGGRGSVNMGKGDPNKPRGKMSSYAFFVQTCREEHKKKHPDSSVNFAEFSKKCSERWKTMSAKEKSKFEDMAKSDKARYDREMKNYVPPKGDKKGKKKDPNAPKRPPSAFFLFCSEHRPKIKSEHPGLSIGDTAKKLGEMWSEQSAKDKQPYEQKAAKLKEKYEKDIAAYRAKGKSEAGKKGPGRPTGSKKKNEPEDEEEEEEEEDEDEEEEDEDEE

SEQ ID NO: 31725 - protein, 7 aa, Homo sapiens
IPPAFSP

SEQ ID NO: 31726 - protein, 9 aa, Homo sapiens
IYSAIEEAY

SEQ ID NO: 31727 - protein, 116 aa, Homo sapiens
MSSPLSKELRQKYNVRSMPIRKDDEVQVVRGHYKGQQIGKVVQVYRKKYVIYIERVQREKANGTTVHVGIHPSKVVITRLKLDKDRKKILERKAKSRQVGKEKGKYKEELIEKMQE

SEQ ID NO: 31728 - protein, 62 aa, Homo sapiens
VTSISSRKRGKRRYFWEYSEQLTPSQQERMLRPSEWNRDTLPSNMYQKNGLHHGKRGLQSDI

SEQ ID NO: 31729 - protein, 80 aa, Homo sapiens
KEKNKLASRACRLKKKAQYEANKVKLWGLNTEYDNLLFVINSIKQEIVNRVQNPRDERGPNMGQKLEILIKDTLGKKNAR

SEQ ID NO: 31730 - protein, 10 aa, Homo sapiens
LQKNRPNHYS

SEQ ID NO: 31731 - protein, 36 aa, Homo sapiens
ILLTGTPGVGKTTLGKELASKSGLKYINVGDLAREV

SEQ ID NO: 31732 - protein, 26 aa, Homo sapiens
LPSGALLVAGVSSAFLVSSTRRLAGF

SEQ ID NO: 31733 - protein, 63 aa, Homo sapiens
TTSSNASRVRLPAWRITTSARPSPPGRSRRPCACCCPGSWPSTPCPRAPRPSPSTPALSKLAK

SEQ ID NO: 31734 - protein, 11 aa, Homo sapiens
IGPRKQMESIR

SEQ ID NO: 31735 - protein, 13 aa, Homo sapiens
KRPGSCGCASGQG

SEQ ID NO: 31736 - protein, 46 aa, Homo sapiens
IDNNSVSSPLQSLQQRTWLIHWSLFVFFNHPKGRDNIIDLFLYQPQ

SEQ ID NO: 31737 - protein, 76 aa, Homo sapiens
MCFIYSEENIEYSPPNAFLEEDGTSLLISCAKCCVRVHASKWIYNSSITGFSAFHIIFISHFFGTCQICCMDYWHS

SEQ ID NO: 31738 - protein, 45 aa, Homo sapiens
IHRSTSQGSINSPVYSRHSYTPTTSRSPQHFHRPGKGDCSWIHSI

SEQ ID NO: 31739 - protein, 15 aa, Homo sapiens
LCKSSYLSGSQLSHL

SEQ ID NO: 31740 - protein, 71 aa, Homo sapiens
LQYAEDVLSGKVSADNTVGRFLMSLVNQVPKIVPDDFETMLNSNINDLLMVTYLANLTQSQIALNEKLVNL

SEQ ID NO: 31741 - protein, 19 aa, Homo sapiens
MRFSMDFWQKVSTYFYILK

SEQ ID NO: 31742 - protein, 47 aa, Homo sapiens
LSQSALPYRRSVPTWLKLTSDDVKEQIYKLAKKGLTPSQIGECLCLT

SEQ ID NO: 31743 - protein, 8 aa, Homo sapiens
RQINEDEP

SEQ ID NO: 31744 - protein, 52 aa, Homo sapiens
KEATCNRRFFYSKQKSQQNRRKCFRRFPKCRFCGADAQEAWPQKTSNVNSSN

SEQ ID NO: 31745 - protein, 41 aa, Homo sapiens
LQPPKAPCQTKHACHTCYNSLDGFFCLQLFTHSKYFARYRK

SEQ ID NO: 31746 - protein, 35 aa, Homo sapiens
IAKKIHPQTIIAGWREATKAAREALLSSAVDHGFV

SEQ ID NO: 31747 - protein, 220 aa, Homo sapiens; identical to SEQ ID NO: 23795

SEQ ID NO: 31748 - protein, 35 aa, Homo sapiens
LVSNTLPQVILPPLGLQTLHVMDQLTPSRSVNWFI

SEQ ID NO: 31749 - protein, 33 aa, Homo sapiens
LSPGSPWFVRVPRDQSPWTLLEIWKPSKRKPLC

SEQ ID NO: 31750 - protein, 32 aa, Homo sapiens
LSPGSPWFVRVPRDQSPWTLLIWKPSKRKPLC

SEQ ID NO: 31751 - protein, 198 aa, Homo sapiens
LSLERNRLTDYYEPLLKNNSTAYSTRGNRIEISYENLQVTNITRKGSMLPVSCKLPNMGTSQSYLSSSMPAGCVLPVGGNFEILLHYYLLNYAKKCHQSEETMVSMIIANALLGIPKVLYKSKTGKYSFPHTYIRAVHALQTNQPLVSSQTGLESVMGKYQLLTSVLQCLTKILTIDMVITVKRHPQKVHNQDSEDEL

SEQ ID NO: 31752 - protein, 42 aa, Homo sapiens
LSMVLHSRINCTSVCAKSTRHWRNSRNNTWYRHMDLSGKRSR

SEQ ID NO: 31753 - protein, 62 aa, Homo sapiens
LPPAQFRKRWNTDYLIPFSSKLNIAAKVNFLAYSEVLTDNLKVGSFYKTYSRILFDLMELAI

SEQ ID NO: 31754 - protein, 6 aa, Homo sapiens
MKKQYL

SEQ ID NO: 31755 - protein, 7 aa, Homo sapiens
LPMPSLK

SEQ ID NO: 31756 - protein, 29 aa, Homo sapiens
ILAVFVETAFGKRKEMNFTDLTFLHLPFF

SEQ ID NO: 31757 - protein, 8 aa, Homo sapiens
ICTLLNVP

SEQ ID NO: 31758 - protein, 84 aa, Homo sapiens
KGQSPRKNKNKNKNRQPAENPETTEPGQFYIALGFLRGRGEGVRDKSPSFLCFFFSFAFSSFIFLFVCIFFPLLVEVRFPPTRP

SEQ ID NO: 31759 - protein, 29 aa, Homo sapiens
RTSCRAQTNTWCAKSSTPTATKKRTCLFQ

SEQ ID NO: 31760 - protein, 27 aa, Homo sapiens
IQSSNLETAMSVIGDRRSREQKAKQER

SEQ ID NO: 31761 - protein, 27 aa, Homo sapiens
VFLWSLGQATCLFYCKSCHEILRCEIG

SEQ ID NO: 31762 - protein, 28 aa, Homo sapiens
LYNFSGIVIENKIFTIITGFFQVTSCRL

SEQ ID NO: 31763 - protein, 38 aa, Homo sapiens
IFKDNFSSAIAGVVEGDYRMDGHIQLICCSVDGESKLG

SEQ ID NO: 31764 - protein, 20 aa, Homo sapiens
TAGRPLLLSKGSLMITIKRN

SEQ ID NO: 31765 - protein, 10 aa, Homo sapiens
VVKNTSGKTS

SEQ ID NO: 31766 - protein, 18 aa, Homo sapiens
KTPPRPRMQSTSNKIAGL

SEQ ID NO: 31767 - protein, 13 aa, Homo sapiens
KALDKKLEDIALP

SEQ ID NO: 31768 - protein, 405 aa, Homo sapiens
LQGFQIERKIYECNQIEKSVTRGSSVSLLQTNLPCVNTSISNIYRNDFMHPSLLTQDQKAYIREKPYKCSDCGKAFNQRSNLTTHQRIHTGQKPHKCDICGKGFRRIANLASHHRIHTGEKPYRCNECGKTFNQTFNLTTHQRIHTGQKPYKCDRCGKGFRQIGNLASHHRIHTGEKPYRCNECGKTFNRMFHLTRHQRIHTGQKPYKCDICGKGFRQIANLASHHRIHTGEKPYKCSDCGKTFNYRSHLTRHQRIHTGQKPYKCDTCGKDFSQNSYLENHQRIHTREKSYRCNECGKTFNKMTNLTTHQRIHTGQKTYKCDICGKGFRQIGNLASHHRIHTGEKPYRCNECGKTFNRMFHLTRHQRIHTGQKPYKCDICGKSFSQNSYLENHQRIHTGEKTYKL

SEQ ID NO: 31769 - protein, 130 aa, Homo sapiens
IEEIGDVLLARFDGAEGSWFQKISSRFCSRQSFALEQLKAKQRKDPRFCAFVQEAESRPRCRRLQLKDMIPTEMQRLTKYPLLLQSIGQNTEEPTEREKVELAAECCREILHHVNQAVRDMEDLLVSPST

SEQ ID NO: 31770 - protein, 18 aa, Homo sapiens
ISRWSADVPVGMATMPMA

SEQ ID NO: 31771 - protein, 17 aa, Homo sapiens
ILKKLMTTNEIQSNIYT

SEQ ID NO: 31772 - protein, 12 aa, Homo sapiens
KLNCPVSDSDFS

SEQ ID NO: 31773 - protein, 23 aa, Homo sapiens
LGHPALSDDQQILSGRNICSAVR

SEQ ID NO: 31774 - protein, 55 aa, Homo sapiens
RVILQASPGKLLWRKFQIPRFMPARPCSLYTCTYKTRNRACEYTTSLKRTKRAPA

SEQ ID NO: 31775 - protein, 6 aa, Homo sapiens
LGVSTG

SEQ ID NO: 31776 - protein, 241 aa, Homo sapiens
IEVVCEYIVKKIPVPPRDFTSEPRLIVIRSFDVNKPGCEVDDLKGGVAGGSILKGVLKVGQEIEVRPGIVSKDSEGKLMCKPIFSKIVSLFAEHNDLQYAAPGGLIGVGTKIDPTLCRADRMVGQVLGAVGALPEIFTELEISYFLLRRLLGVRTEGDKKAAKVQKLSKNEVLMVNIGSLSTGGRVSAVKADLGKIVLTNPVCTEVGEKIALSRRVEKHWRLIGWGQIRRGVTIKPTVDDD

SEQ ID NO: 31777 - protein, 203 aa, Homo sapiens
VTPLESLPFNSSWSACLALGSFCSLRPAPSLRAGLQRRAQPSAACQQPPSRPAAQPRTKPGQSFLAARAMNTEMYQTPMEVAVYQLHNFSISFFSSLLGGDVVSVKLDNSASGASVVAIDNKIEQAMDLVKNHLMYAVREEVEILKEQIRELVEKNSQLERENTLLKTLASPEQLEKFQSCLSPEEPAPESPQVPEAPGGSAV

SEQ ID NO: 31778 - protein, 1488 aa, Homo sapiens
MFYETLKSPLFNQILTLQQSIKQLKGQLNHIPSDCSANFDFSRKGLLVFTDGSITNGNVHRPSNNSTVSGLFPWTPKLGNEDFNSVIQQMAQGRQIEYIDIERPSTGGLGFSVVALRSQNLGKVDIFVKDVQPGSVADRDQRLKENDQILAINHTPLDQNISHQQAIALLQQTTGSLRLIVAREPVHTKSSTSSSLNDTTLPETVCWGHVEEVELINDGSGLGFGIVGGKTSGVVVRTIVPGGLADRDGRLQTGDHILKIGGTNVQGMTSEQVAQVLRNCGNSVRMLVARDPAGDISVTPPAPAALPVALPTVASKGPGSDSSLFETYNVELVRKDGQSLGIRIVGYVGTSHTGEASGIYVKSIIPGSAAYHNGHIQVNDKIVAVDGVNIQGFANHDVVEVLRNAGQVVHLTLVRRKTSSSTSPLEPPSDRGTVVEPLKPPALFLTGAVETETNVDGEDEEIKERIDTLKNDNIQALEKLEKVPDSPENELKSRWENLLGPDYEVMVATLDTQIADDAELQKYSKLLPIHTLRLGVEVDSFDGHHYISSIVSGGPVDTLGLLQPEDELLEVNGMQLYGKSRREAVSFLKEVPPPFTLVCCRRLFDDEASVDEPRRTETSLPETEVDHNMDVNTEEDDDGELALWSPEVKIVELVKDCKGLGFSILDYQDPLDPTRSVIVIRSLVADGVAERSGGLLPGDRLVSVNEYCLDNTSLAEAVEILKAVPPGLVHLGICKPLVEDNEEESCYILHSSSNEDKTEFSGTIHDINSSLILEAPKGFRDEPYFKEELVDEPFLDLGKSFHSQQKEIEQSKEAWEMHEFLTPRLQEMDEEREILVDEEYELYQDPSPSMELYPLSHIQEATPVPSVNELHFGTQWLHDNEPSESQEARTGRTVYSQEAQPYGYCPENVMKENFVMESLPSVPSTEGNSQQGRFDDLENLNSLAKTSLDLGMIPNDVQGPSLLIDLPVVAQRREQEDLPLYQHQATRVISKASAYTGMLSSRYATDTCELPEREEGEGEETPNFSHWGPPRIVEIFREPNVSLGISIVGGQTVIKRLKNGEELKGIFIKQVLEDSPAGKTNALKTGDKILEVSGVDLQNASHSEAVEAIKNAGNPVVFIVQSLSSTPRVIPNVHNKANKITGNQNQDTQEKKEKRQGTAPPPMKLPPPYKALTDDSDENEEEDAFTDQKIRQRYADLPGELHIIELEKDKNGLGLSLAGNKDRSRMSIFVVGINPEGPAAADGRMRIGDELLEINNQILYGRSHQNASAIIKTAPSKVKLVFIRNEDAVNQMAVTPFPVPSSSPSSIEDQSGTEPISSEEDGSVEVGIKQLPESESFKLAVSQMKQQKYPTKVSFSSQEIPLAPASSYHSTDADFTGYGGFQAPLSVDPATCPIVPGQEMIIEISKGRSGLGLSIVGGKDTPLVNGVDLRNSSHEEAITALRQTPQKVRLVVYRDEAHYRDEENLEIFPVDLQKKAGRGLGLSIVGKR

SEQ ID NO: 31779 - protein, 751 aa, Homo sapiens
MGYEYSERGDAVCTESGWRPLPSCEEKSCDNPYIPNGDYSPLRIKHRTGDEITYQCRNGFYPATRGNTAKCTSTGWIPAPRCTLKPCDYPDIKHGGLYHENMRRPYFPVAVGKYYSYYCDEHFETPSGSYWDHIHCTQDGWSPAVPCLRKCYFPYLENGYNQNHGRKFVQGKSIDVACHPGYALPKAQTTVTCMENGWSPTPRCIRVKTCSKSSIDIENGFISESQYTYALKEKAKYQCKLGYVTADGETSGSITCGKDGWSAQPTCIKSCDIPVFMNARTKNDFTWFKLNDTLDYECHDGYESNTGSTTGSIVCGYNGWSDLPICYERECELPKIDVHLVPDRKKDQYKVGEVLKFSCKPGFTIVGPNSVQCYHFGLSPDLPICKEQVQSCGPPPELLNGNVKEKTKEEYGHSEVVEYYCNPRFLMKGPNKIQCVDGEWTTLPVCIVEESTCGDIPELEHGWAQLSSPPYYYGDSVEFNCSESFTMIGHRSITCIHGVWTQLPQCVAIDKLKKCKSSNLIILEEHLKNKKEFDHNSNIRYRCRGKEGWIHTVCINGRWDPEVNCSMAQIQLCPPPPQIPNSHNMTTTLNYRDGEKVSVLCQENYLIQEGEEITCKDGRWQSIPLCVEKIPCSQPPQIEHGTINSSRSSQESYAHGTKLSYTCEGGFRISEENETTCYMGKWSSPPQCEGLPCKSPPEISHGVVAHMSDSYQYGEEVTYKCFEGFGIDGPAIAKCLGEKWSHPPSCISMVH

SEQ ID NO: 31780 - protein, 8 aa, Homo sapiens
MYTKGMHL

SEQ ID NO: 31781 - protein, 22 aa, Homo sapiens
MSDYLFNFSTLQMWKLKPREKV

SEQ ID NO: 31782 - protein, 66 aa, Homo sapiens
MLEERALGRYRPDLNPHSSCFGPCNSRLPLNPLSSINTWLSRNNYDLGPGPSGIFTPNLNFITLER

SEQ ID NO: 31783 - protein, 17 aa, Homo sapiens
MCSCKNGSIGNSSFRML

SEQ ID NO: 31784 - protein, 800 aa, Homo sapiens
MPAEVGQKSQKRPFPEELPADLKHWKPAEPPTVVTGSLLVGPVSDCSTLPCLPLPALFNQEPASGQMRLEKTDQIPMPFSSSSLSCLNLPEGPIQFVPTISTLPHGLWQISEAGTGVSSIFIYHGEVPQASQVPPPSGFTVHGLPTSPDRPGSTSPFAPSATDLPSMPEPALTSRANMTEHKTSPTQCPAAGEVSNKLPKWPEPVEQFYRSLQDTYGAEPAGPDGILVEVDLVQARLERSSSKSLERELATPDWAERQLAQGGLAEVLLAAKEHRRPRETRVIAVLGKAGQGKSYWAGAVSRAWACGRLPQYDFVFSVPCHCLNRPGDAYGLQDLLFSLGPQPLVAADEVFSHILKRPDRVLLILDGFEELEAQDGFLHSTCGPAPAEPCSLRGLLAGLFQKKLLRGCTLLLTARPRGRLVQSLSKADALFELSGFSMEQAQAYVMRYFESSGMTEHQDRALTLLRDRPLLLSHSHSPTLCRAVCQLSEALLELGEDAKLPSTLTGLYVGLLGRAALDSPPGALAELAKLAWELGRRHQSTLQEDQFPSADVRTWAMAKGLVQHPPRAAESELAFPSFLLQCFLGALWLALSGEIKDKELPQYLALTPRKKRPYDNWLEGVPRFLAGLIFQPPARCLGALLGPSAAASVDRKQKVLARYLKRLQPGTLRARQLLELLHCAHEAEEAGIWQHVVQELPGRLSFLGTRLTPPDAHVLGKALEAAGQDFSLDLRSTGICPSGLGSLVGLSCVTRFRWGEGLGEETSLCWALTAVLVPSPVLCGVSFSMQSSRVGQNGFSPFLR

SEQ ID NO: 31785 - protein, 104 aa, Homo sapiens
MKQFKNSFKKILQRALKNVTVSFRETEENAVWIRIAWGTQYTKPNQYKPTYVVYYSQTPYAFTSSSMLRRNTPLLGQELEATGKIYLRQEEIILDITEMKKACN

SEQ ID NO: 31786 - protein, 450 aa, Homo sapiens
MLLTAGSGGRGGGGGRRQQPPLAQPSASPYPEAVELQRRSLPIFQARGQLLAQLRNLDNAVLIGSPFFTGHPGVPHWAGGDRSHEQDVPRHCKAPPRRLPCDAGPSSVRLPALCTAAPSLPRGPKDSGLEVLAVQRVSKTQAWQRTGRAGREDSGICYRLYTEDEFEKFDKMTVPEIQRCNLASVMLQLLAMKVPNVLTFDFMSKPSPDHIQAAIAQLDLLGALEHKDDQLTLTPMGRKMAAFPLEPKFAKTILMSPKFHCTEEILTIVSLLSVDSVLHNPPSRREEVQGVRKKFISSEGDHMTLLNIYRTFKNLGGNKDWCKENFVNSKNMTLVAEVRAQLRDICLKMSMPIASSRGDVESVRRCLAHSLFMSTAELQPDGTYATTDTHQPVAIHPSSVLFHCKPACVVYTELLYTNKCYMRDLCVIDAQWLYEAAPEYFRRKLRTARN

SEQ ID NO: 31787 - protein, 446 aa, Homo sapiens [sequence omitted]

SEQ ID NO: 31788 - protein, 187 aa, Homo sapiens
MPLARLAPCCLIRAKAVSEKEVDSGNDIYGNPIKRIQYEIKQIKMFKGPEKDIEFIYTAPSSAVCGVSLDVGGKKEYLIAGKAEGDGKMHITLCDFIVPWDTLSTTQKKSLNHRYQMGCECKITRCPMIPCYISSPDECLWMDWVTEKNINGHQAKFFACIKRSDGSCAWYRGAAPPKQEFLDIEDP

SEQ ID NO: 31789 - protein, 446 aa, Homo sapiens
MEHQAVVGAVKSLQALGEVIEAELRSTKHWELTAEGEEIAREGSHEARVFRSIPPEGLAQSELMRLPSGKVGFSKAMSNKWIRVDKSAADGPRVFRVVDSMEDEVQRRLQLVRGGQAEKLGEKERSELRKRKLLAEVGSWRDRPFKPYNFLAHGVLPDSGHLHPLLKVRSQFRQIFLEMGFTEMPTDNFIESSFWNFDALFQPQQHPARDQHDTFFLRDPAEALQLPMDYVQRVKRTHSQGGYGSQGYKYNWKLDEARKNLLRTHTTSASARALYRLAQKKPFTPVKYFSIDRVFRNETLDATHLAEFHQIEGVVADHGLTLGHLMGVLREFFTKLGITQLRFKPAYNPYTEPSMEVFSYHQGLKKWVEVGNSGVFRPEMLLPMGLPENVSVIAWGLSLERPTMIKYGINNIRELVGHKVNLQMVYDSPLCRLDAEPRPPPTQEAA

SEQ ID NO: 31790 - protein, 720 aa, Homo sapiens
MKLEAVTPFLGKYRPFVGRCCQTCTPKSWESLFHRSITDLGFCNVILVKEENTRFRGWLVRRLCYFLWSLEQHIPPCQDVPQKIMESTGVQNLLSGRVPGGTGEGQVPDLVKKEVQRILGHIQAPPRPFLVRLFSWALLRFLNCLFLNVQLHKGQMKMVQKAAQAGLPLVLLSTHKTLLDGILLPFMLLSQGLGVLRVAWDSRACSPALRALLRKLGGLFLPPEASLSLDSSEGLLARAVVQAVIEQLLVSGQPLLIFLEEPPGALGPRLSALGQAWVGFVVQAVQVGIVPDALLVPVAVTYDLVPDAPCDIDHASAPLGLWTGALAVLRSLWSRWGCSHRICSRVHLAQPFSLQEYIVSARSCWGGRQTLEQLLQPIVLGQCTAVPDTEKEQEWTPITGPLLALKEEDQLLVRRLSCHVLSASVGSSAVMSTAIMATLLLFKHQKGVFLSQLLGEFSWLTEEILLRGFDVGFSGQLRSLLQHSLSLLRAHVALLRIRQGDLLVVPQPGPGLTHLAQLSAELLPVFLSEAVGACAVRGLLAGRVPPQGPWELQGILLLSQNELYRQILLLMHLLPQDLLLLKPCQSSYCYCQEVLDRLIQCGLLVAEETPGSRPACDTGRQRLSRKLLWKPSGDFTDSDSDDFGEADGRYFRVCFKKLPLEGGGREAVGSCTHPGLSPPAQPAVTLPRFLSFPLPPAQPAAQGLCTGCRLPPPGPAARYW

SEQ ID NO: 31791 - protein, 155 aa, Homo sapiens
MERRVITISKSEYSVHSSLASKVDVEQVVMYCKEKLIRGESEFSFEELRAQKYNQRRKHEQWVNEDRHYMKRKEANAFEEQLLKQKMDELHKKLHQVVETSHEDLPASQERSEVCCAPHDTSCAQQQEWQFDLFLSMCCFRVNSDVNLASNFLKV

SEQ ID NO: 31792 - protein, 123 aa, Homo sapiens
MSAHLQTHRHHLPPPISPCPFHLDSPTKPRENTTEKETFCRAATVLRQFYSHHEKDTRCLGATAQQFHRHKQLIRFLKRLDRNLWGLAGLNSCPVKEANQSTLENFLERLKTIMREKYSKCSS

SEQ ID NO: 31793 - protein, 21 aa, Homo sapiens
MDRRTACLPPCLPPAPSFCQG

SEQ ID NO: 31794 - protein, 40 aa, Homo sapiens
IRVRKLQKERITILLPKRPPKTTEDKEETIQKLEVRRKCA

SEQ ID NO: 31795 - protein, 15 aa, Homo sapiens
KRRAADRSPEVVHYG

SEQ ID NO: 31796 - protein, 71 aa, Homo sapiens
IKSCQHECGGISASIGHDPHLLYTLSAVQILTLYDSINVIDVNKVVEYVKGLQKEDGSFAGDIWGPTKQLV

SEQ ID NO: 31797 - protein, 50 aa, Homo sapiens
TISPGLRAPKSPTTSKRPQKDKSRSPSRAPWPRPPFVCATSPSTCPPGSP

SEQ ID NO: 31798 - protein, 49 aa, Homo sapiens
LSLTEKNTLLSRGLNRLLTLPEVQCIFQDFQVFDAVMLRVHYPRLFIQE

SEQ ID NO: 31799 - protein, 213 aa, Homo sapiens
LPTTCCPAPAAMCRTLAAFPTTCLERAKEFKTRLGIFLHKSELGCDTGSTGKFEWGSKHSKENRNFSEDVLGWRESFDLLLSSKNGVAAFHAFLKTEFSEENLEFWLACEEFKKIRSATKLASRAHQIFEEFICSEAPKEVNIDHETHELTRMNLQTATATCFDAAQGKTRTLMEKDSYPRFLKSPAYRDLAAQASAASATLSSCSLDEPSHT

SEQ ID NO: 31800 - protein, 9 aa, Homo sapiens
IPPRIILPL

SEQ ID NO: 31801 - protein, 64 aa, Homo sapiens
IFYSAEKEDVAGHPGAEVALVGGLKLLARLSLLTEQDLWTVNGLPNENNSSDHLPLLAKFRLEL

SEQ ID NO: 31802 - protein, 43 aa, Homo sapiens
VCPAGSQTCTLTFEMDGCSSSCWRSSLERGCLNPPRDECASTA

SEQ ID NO: 31803 - protein, 265 aa, Homo sapiens
LGAVQRKGGSARLAVAEPRWPVSAPDQSRTLDSRGPGTTELMASSTPSSSATSSNAGADPNTTNLRPTTYDTWCGVAHGCTRKLGLKICGFLQRTNSLEEKSRLVSAFKERQSSKNLLSCENSDRDARFRRTETDFSNLFARDLLPAKNGEEQTVQFLLEVVDILLNYVRKTFDRSTKVLDFHHPHQLLEGMEGFNLELSDHPESLEQILVDCRDTLKYGVRTGHPRFFNQLSTGLDIIGLAGEWLTSTANTNMPSDMRECWLLR

SEQ ID NO: 31804 - protein, 7 aa, Homo sapiens
LDMDLSP

SEQ ID NO: 31805 - protein, 651 aa, Homo sapiens
KEFQPFLKKWYRVIGLSGDTQLKISFPEVVKSCDIIISTAQILENSLLNLENGEDAGVQLSDFSLIIIDECHHTNKEAVYNNIMRHYLMQKLKNNRLKKENKPVIPLPQILGLTASPGVGGATKQAKAEEHILKLCANLDAFTIKTVKENLDQLKNQIQEPCKKFAIADATREDPFKEKLLEIMTRIQTYCQMSPMSDFGTQPYEQWAIQMEKKAAKEGNRKERVCAEHLRKYNEALQINDTIRMIDAYTHLETFYNEEKDKKFAVIEDDSDEGGDDEYCDGDEDEDDLKKPLKLDETDRFLMTLFFENNKMLKRLAENPEYENEKLTKLRNTIMEQYTRTEESARGIIFTKTRQSAYALSQWITENEKFAEVGVKAHHLIGAGHSSEFKPMTQNEQKEVISKFRTGKINLLIATTVAEEGLDIKECNIVIRYGLVTNEIAMVQARGRARADESTYVLVAHSGSGVIEHETVNDFREKMMYKAIHCVQNMKPEEYAHKILELQMQSIMEKKMKTKRNIAKHYKNNPSLITFLCKNCSVLACSGEDIHVIEKMHHVNMTPEFKELYIVRENKALQKKCADYQINGEIICKCGQAWGTMMVHKGLDLPCLKIRNFVVVFKNNSTKKQYKKWVELPITFPNLDYSECCLFSDED

SEQ ID NO: 31806 - protein, 62 aa, Homo sapiens
IKFFSDHMADTTTELERIKSKNLKNNVLQLPLCEKTISVNIQRNPKEGLLCASSPASCCHVI

SEQ ID NO: 31807 - protein, 41 aa, Homo sapiens
IIVNPQELPQALPKYIFNLVVQISFWLTSKHIIKNAVEEVT

SEQ ID NO: 31808 - protein, 27 aa, Homo sapiens
LESLKEEEVGFKAKDGQGKMPEKVLSR

SEQ ID NO: 31809 - protein, 18 aa, Homo sapiens
KFLRGFLKITPALPSLLP

SEQ ID NO: 31810 - protein, 8 aa, Homo sapiens
IYTTKYYL

SEQ ID NO: 31811 - protein, 17 aa, Homo sapiens
IPMLYEWAESSSLFFFW

SEQ ID NO: 31812 - protein, 79 aa, Homo sapiens
LPSTDSREGDPQYLTPSRRWEQAPAMERDTAASPHDPSCMTPKPPPDSASDSMQNLGSGDLPQPREEASSSGDRLRTGV

SEQ ID NO: 31813 - protein, 44 aa, Homo sapiens
RPHVSGLQHMQLPGEREPVSYVRAAAAAEPPPGRSSRCRPGLGP

SEQ ID NO: 31814 - protein, 24 aa, Homo sapiens
RDATQLGFQPLMSALGSTGSTEGT

SEQ ID NO: 31815 - protein, 351 aa, Homo sapiens [sequence omitted]

SEQ ID NO: 31816 - protein, 36 aa, Homo sapiens
VGSVAMNSSVKWMKTTSRTNLILLDSMSRSLTIDKL

SEQ ID NO: 31817 - protein, 6 aa, Homo sapiens
ISASAL

SEQ ID NO: 31818 - protein, 456 aa, Homo sapiens
KLGDKRMVFDPWLIGPAFARGWWLLHEPPSDWLERLCQADLIYISHLHSDHLSYPTLKKLAGRRPDIPIYVGNTERPVFWNLNQSGVQLTNINVVPFGIWQQVDKNLRFMILMDGVHPEMDTCIIVEYKGHKILNIVDCTRPNGGRLPMKVALMMSDFAGGASGFPMTFSGGKFTEEWKAQFIKTERKKLLNYKARLVKNLQPRIYCPFAGYFVESHPSDKYIKETNTKNDPNELNNLIKKNSDVITWTPRPGATLDLGRMLKDRTDSKGIIEPPEGTKIYKDSWDFEPYLEILNAALGDEIFLHSSWIKEYFTWAGFKDYNLVVRMIETDEDFNPFPGGYDYLVDFLDLSFPKERPQREHPYEEIHSRVDVIRHVVKNGLLWDELYIGFQTRLQRDPDIYHHLFWNHFQIKLPLTPPNWKSFLMCCEQNGPVILQFSTERTNEPNRNKFSVENKA

SEQ ID NO: 31819 - protein, 31 aa, Homo sapiens
VSPPLPPQLQPRYSCGSVTVLLALTARGEGR

SEQ ID NO: 31820 - protein, 34 aa, Homo sapiens
ITRKAFSDAIKKWQELSPETSGKRKKRKEMNQYS

SEQ ID NO: 31821 - protein, 24 aa, Homo sapiens
VGPEKRGTPQLVDTSRLLSQFRAW

SEQ ID NO: 31822 - protein, 9 aa, Homo sapiens
LVGVWAMSF

SEQ ID NO: 31823 - protein, 99 aa, Homo sapiens
KGIGFLTSGWRFVQIKEMVPEFVVPDLTGFKLKPYVSYLAPESEETPLTAAQLFSEAVAPAIEKDFKDGTFDPDNLEKYGFEPTQEGKLFQLYPRNFLR

SEQ ID NO: 31824 - protein, 463 aa, Homo sapiens
TAFLTLQLSDNIYPVEDLAATSVTIFPNAELGGPFDQMNGVAGDGMINIDMTGEKRSLDLPYPSSFAPVSAPRNQTFTYMGKFSIDPQYPGASCYPEGIINIVSAGILQGVTSPASTTASSSVTSASPNPLATGPLGVCTMSQTQPDLDHLYSPPPPPPPYSGCAGDLYQDPSAFLSAATTSTSSSLAYPPPPSYPSPKPATDPGLFPMIPDYPGFFPSQCQRDLHGTAGPDRKPFPCPLDTLRVPPPLTPLSTIRNFTLGGPSAGVTGPGASGGSEGPRLPGSSSAAAAAAAAAAYNPHHLPLRPILRPRKYPNRPSKTPVHERPYPCPAEGCDRRFSRSDELTRHIRIHTGHKPFQCRICMRNFSRSDHLTTHIRTHTGEKPFACDYCGRKFARSDERKRHTKIHLRQKERKSSAPSASVPAPSTASCSGGVQPGGTLCSSNSSSLGGGPLAPCSSRTRTP

SEQ ID NO: 31825 - protein, 26 aa, Homo sapiens
MNEEYDVIVLGTGLTVTSQNNTFRCL

SEQ ID NO: 31826 - protein, 44 aa, Homo sapiens
MKMKVFRMEGSQLNFQEKYVNRSQHVVSQDLASLLTLMRVREYL

SEQ ID NO: 31827 - protein, 27 aa, Homo sapiens
KWCFGSKSDCCKIMGRCSKTWCKTNTN

SEQ ID NO: 31828 - protein, 16 aa, Homo sapiens
LATTRRRRAGVVRRGS

SEQ ID NO: 31829 - protein, 10 aa, Homo sapiens
MHFQVNFRCH

SEQ ID NO: 31830 - protein, 32 aa, Homo sapiens
VVFGPVSEQRFLFVRHLDEAAVSAAILRASQW

SEQ ID NO: 31831 - protein, 49 aa, Homo sapiens
KWLKPSKVGFFFLSAIRKMTYFTSWILDSDSTHYIPSCNRKSCYKRMWS

SEQ ID NO: 31832 - protein, 465 aa, Homo sapiens
TCSRLFGALLERGELFVGQLPSEEMVMTGSQGATRKYKVWMRHRYHSCCNRLGELLGHPSFQVKELALSALLKFVQLEGAHPLEKSKWEGNYLFPRELFKLVVGGLLSPEEDQSLLLSQFREYLDYDDTRYHTMQAAVDAVARVTGQHPEVPPAFWNNAFTLLSAVSLPRREPTVSSFYVKRAELWDTWKVAHLKEHRRVFQAMWLSFLKHKLPLSLYKKVLLIVHDAILPQLAQPTLMIDFLTRACDLGGALSLLALNGLFILIHKHNLEYPDFYRKLYGLLDPSVFHVKYRARFFHLADLFLSSSHLPAYLVAAFAKRLARLALTAPPEALLMVLPFICNLLRRHPACRVLVHRPHGPELDADPYDPGEEDPAQSRALESSLWELQALQRHYHPEVSKAASVINQALSMPEVSIAPLLELTAYEIFERDLKKKGPEPVPLEFIPAQGLLGRPGELCAQHFTLS

SEQ ID NO: 31833 - protein, 201 aa, Homo sapiens
LQRCGQLVRMAIRAQHSNAAQTQTGEANRGWTGQESLSDSDPEMWELLQREKDRQCRGLELIASENFCSRAALEALGSCLNNKYSEGYPGKRYYGGAEVVDEIELLCQRRALEAFDLDPAQWGVNVQPYSGSPANLAVYTALLQPHDRIMGLDLPDGGHLTHGYMSDVKRISATSIFFESMPYKLNGFSCLCVCPAQNWPH

SEQ ID NO: 31834 - protein, 25 aa, Homo sapiens
RNRIKIFYSSANNFFFSRKYKAEWK

SEQ ID NO: 31835 - protein, 25 aa, Homo sapiens
IESLFLHTSLMPPSSVCHGPTSNIC

SEQ ID NO: 31836 - protein, 29 aa, Homo sapiens
LGSPRPECVRSRGCIMGRKPFSFKILPEA

SEQ ID NO: 31837 - protein, 37 aa, Homo sapiens
RQEVEQNTPSLVPIIDNIMTLHVMDQLTPSRSVNWFI

SEQ ID NO: 31838 - protein, 310 aa, Homo sapiens
RVSLDLRMATSRYEPVAEIGVGAYGTVYKARDPHSGHFVALKSVRVPNGGGGGGGLPISTVREVALLRRLEAFEHPNVVRLMDVCATSRTDREIKVTLVFEHVDQDLRTYLDKAPPPGLPAETIKDLMRQFLRGLDFLHANCIVHRDLKPENILVTSGGTVKLADFGLARIYSYQMALTPVVVTLWYRAPEVLLQSTYATPVDMWSVGCIFAEMFRRKPLFCGNSEADQLGKIFDLIGLPPEDDWPRDVSLPRGAFPPRGPRPVQSVVPEMEESGAQLLLEMLTFNPHKRISAFRALQHSYLHKDEGNPE

SEQ ID NO: 31839 - protein, 819 aa, Homo sapiens
LTWSGTWGEGTMGRKLDPTKEKRGPGRKARKQKGAETELVRFLPAVSDENSKRLSSRARKRAAKRRLGSVEAPKTNKSPEAKPLPGKLPKGAVQTAGKKGPQSLFNAPRGKKRPAPGSDEEEEEEDSEEDGMVNHGDLWGSEDDADTVDDYGADSNSEDEEEGEALLPIERAARKQKAREAAAGIQWSEEETEDEEEEKEVTPESGPPKVEEADGGLQINVDEEPFVLPPAGEMEQDAQAPDLQRVHKRIQDIVGILRDFGAQREEGRSRSEYLNRLKKDLAIYYSYGDFLLGKLMDLFPLSELVEFLEANEVPRPVTLRTNTLKTRRRDLAQALINRGVNLDPLGKWSKTGLVVYDSSVPIGATPEYLAGHYMLQGASSMLPVMALAPQEHERILDMCCAPGGKTSYMAQLMKNTGVILANDANAERLKSVVGNLHRLGVTNTIISHYDGRQFPKVVGGFDRVLLDAPCSGTGVISKDPAVKTNKDEKDILRCAHLQKELLLSAIDSVNATSKTGGYLVYCTCSITVEENEWVVDYALKKRNVRLVPTGLDFGQEGFTRFRERRFHPSLRSTRRFYPHTHNMDGFFIAKFKKFSNSIPQSQTGNSETATPTNVDLPQVIPKSENSSQPAKKAKGAAKTKQQLQKQQHPKKASFQKLNGISKGADSELSTVPSVTKTQASSSFQDSSQPAGKAEGIREPKVTGKLKQRSPKLQSSKKVAFLRQNAPPKGTDTQTPAVLSPSKTQATLKPKDHHQPLGRAKGVEKQQLPEQPFEKAAFQKQNDTPKGPQPPTVSPIRSSRPPPAKRKKSQSRGNSQLLLS

SEQ ID NO: 31840 - protein, 20 aa, Homo sapiens
KSLLKMNRLQFIYHGYLCHE

SEQ ID NO: 31841 - protein, 111 aa, Homo sapiens
RRTQGSEDSSDDVRRVQRREKNRIAAQKSRQRQTQKADTLHLESEDLEKQNAALRKEIKQLTEELKYFTSVLNSHEPLCSVLAASTPSPPEVVYSAHAFHQPHVSSPRFQP

SEQ ID NO: 31842 - protein, 22 aa, Homo sapiens
VFLSLASNLGFWLRRLLNNDLS

SEQ ID NO: 31843 - protein, 37 aa, Homo sapiens
VMAAVTRTTPVKLRSGRYIQKVPRRNFLLEKMKKQYL

SEQ ID NO: 31844 - protein, 28 aa, Homo sapiens
RQISGQPACARTPMAAPGGGKEEVSKPA

SEQ ID NO: 31845 - protein, 35 aa, Homo sapiens
MKPWQPKQDSLANHDREVLMDELLMKDCQQLLYWK

SEQ ID NO: 31846 - protein, 12 aa, Homo sapiens
IAMSFGSSNCLA

SEQ ID NO: 31847 - protein, 58 aa, Homo sapiens
IVPLFQSLTGFSDLLFPPPHWVSVLEARVRGGGGWPRRSALGAASVPLGRRSTACTAA

SEQ ID NO: 31848 - protein, 57 aa, Homo sapiens
MRIRMKVKLLHPLVMRLRYRSATRKKLRDSHLAMSPKQGEGARLSVWTLTHSRIIQR

SEQ ID NO: 31849 - protein, 22 aa, Homo sapiens
MMFCLTQYGSCWKLLYEIVMAF

SEQ ID NO: 31850 - protein, 26 aa, Homo sapiens
IQMEHVLCNLITQMMKKNRTFSFIFE

SEQ ID NO: 31851 - protein, 12 aa, Homo sapiens
RDPRPLSLSGPL

SEQ ID NO: 31852 - protein, 491 aa, Homo sapiens
KMEDSASASLSSAAATGTSTSTPAAPTARKQLDKEQVRKAVDALLTHCKSRKNNYGLLLNENESLFLMVVLWKIPSKELRVRLTLPHSIRSDSEDICLFTKDEPNSTPEKTEQFYRKLLNKHGIKTVSQIISLQTLKKEYKSYEAKLRLLSSFDFFLTDARIRRLLPSLIGRHFYQRKKVPVSVNLLSKNLSREINDCIGGTVLNISKSGSCSAIRIGHVGMQIEHIIENIVAVTKGLSEKLPEKWESVKLLFVKTEKSAALPIFSSFVSNWDEATKRSLLNKKKKEARRKRRERNFEKQKERKKKRQQARKTASVLSKDDVAPESGDTTVKKPESKKEQTPEHGKKKRGRGKAQVKATNESEDEIPQLVPIGKKTPANEKVEIQKHATGKKSPAKSPNPSTPRGKKRKALPASETPKAAESETPGKSPEKKPKIKEEAVKEKSPSLGKKDARQTPKKPEAKFFTTPSKSVRKASHTPKKWPKKPKVPQST

SEQ ID NO: 31853 - protein, 1343 aa, Homo sapiens
RTPAEMSPVLHFYVRPSGHEGAAPGHTRRKLQGKLPELQGVETELCYNVNWTAEALPSAEETKKLMWLFGCPLLLDDVARESWLLPGSNDLLLEVGPRLNFSTPTSTNIVSVCRATGLGPVDRVETTRRYRLSFAHPPSAEVEAIALATLHDRMTEQHFPHPIQSFSPESMPEPLNGPINILGEGRLALEKANQELGLALDSWDLDFYTKRFQELQRNPSTVEAFDLAQSNSEHSRHWFFKGQLHVDGQKLVHSLFESIMSTQESSNPNNVLKFCDNSSAIQGKEVRFLRPEDPTRPSRFQQQQGLRHVVFTAETHNFPTGVCPFSGATTGTGGRIRDVQCTGRGAHVVAGTAGYCFGNLHIPGYNLPWEDPSFQYPGNFARPLEVAIEASNGASDYGNKFGEPVLAGFARSLGLQLPDGQRREWIKPIMFSGGIGSMEADHISKEAPEPGMEVVKVGGPVYRIGVGGGAASSVQVQGDNTSDLDFGAVQRGDPEMEQKMNRVIRACVEAPKGNPICSLHDQGAGGNGNVLKELSDPAGAIIYTSRFQLGDPTLNALEIWGAEYQESNALLLRSPNRDFLTHVSARERCPACFVGTITGDRRIVLVDDRECPVRRNGQGDAPPTPLPTPVDLELEWVLGKMPRKEFFLQRKPPMLQPLALPPGLSVHQALERVLRLPAVASKRYLTNKVDRSVGGLVAQQQCVGPLQTPLADVAVVALSHEELIGAATALGEQPVKSLLDPKVAARLAVAEALTNLVFALVTDLRDVKCSGNWMWAAKLPGEGAALADACEAMVAVMAALGVAVDGGKDSLSMAARVGTETVRAPGSLVISAYAVCPDITATVTPDLKHPEGRGHLLYVALSPGQHRLGGTALAQCFSQLGEHPPDLDLPENLVRAFSITQGLLKDRLLCSGHDVSDGGLVTCLLEMAFAGNCGLQVDVPVPRVDVLSVLFAEEPGLVLEVQEPDLAQVLKRYRDAGLHCLELGHTGEAGPHAMVRVSVNGAVVLEEPVGELRALWEETSFQLDRLQAEPRCVAEEERGLRERMGPSYCLPPTFPKASVPREPGGPSPRVAILREEGSNGDREMADAFHLAGFEVWDVTMQDLCSGAIGLDTFRGVAFVGGFSYADVLGSAKGWAAAVTFHPRAGAELRRFRKRPDTFSLGVCNGCQLLALLGWVGGDPNEDAAEMGPDSQPARPGLLLRHNLSGRYESRWASVRVGPGPALMLRGMEGAVLPVWSAHGEGYVAFSSPELQAQIEARGLAPLHWADDDGNPTEQYPLNPNGSPGGVAGICSCDGRHLAVMPHPERAVRPWQWAWRPPPFDTLTTSPWLQLFINARNWTLEGSC

SEQ ID NO: 31854 - protein, 28 aa, Homo sapiens
RPLPALMWLMFQADLGSLRWQVLYGEKT

SEQ ID NO: 31855 - protein, 12 aa, Homo sapiens
TEASLGSFEPVQ

SEQ ID NO: 31856 - protein, 42 aa, Homo sapiens
KTARFECALVSASLTTAGTPGKNLSSYNSKCGGKTHQSRDGK

SEQ ID NO: 31857 - protein, 212 aa, Homo sapiens
LHRDKTPLHQKHAAFVTPDQKYSMDNTPHTPTPFKNALEKYGPLKPLPQTPHLEEDLKEVLRSEAGIELIIEDDIRPEKQKRKPGLRRSPIKKVRKSLALDIVDEDVKLMMSTLPKSLSLPTTAPSNSSSLTLSGIKEDNSLLNQGFLQAKPEKAAVAQKPRSHFTTPAPMSSAWKTVACGGTRDQLFMQEKARQLLGRLKPSHTSRTLILS

SEQ ID NO: 31858 - protein, 211 aa, Homo sapiens
KLWPEAQIRNTMALLTAETFRLQFNNKRRLRRPYYPRKALLCYQLTPQNGSTPTRGYFENKKKCHAEICFINEIKSMGLDETQCYQVTCYLTWSPCSSCAWELVDFIKAHDHLNLGIFASRLYYHWCKPQQKGLRLLCGSQVPVEVMGFPEFADCWENFVDHEKPLSFNPYKMLEELDKNSRAIKRRLERIKIPGVRAQGRYMDILCDAEV

SEQ ID NO: 31859 - protein, 140 aa, Homo sapiens
LRRWQETRGELQCRSPPRLHGAKAILDAEPGPRPALQPSPSIRLPLDAPLPGSKAKPKPPKQAQKEQRKQMKGRGQLEKPPAPNQAMVVAAAGDACPPQHVPPKDSAPKDSAPQDLAPQVSAHHRSQESLTSQESEDTYL

SEQ ID NO: 31860 - protein, 35 aa, Homo sapiens
KTIRKMVFYGKYLSVGLNVKERGRERNPFIMFSLP

SEQ ID NO: 31861 - protein, 10 aa, Homo sapiens
LCTKAILSSM

SEQ ID NO: 31862 - protein, 67 aa, Homo sapiens
MSGIYWGLTVMDLMGQLHRMNREEILAFIKSCQHECGGISASIGHDPHLLYTLSAVQVPLSSWSNWS

SEQ ID NO: 31863 - protein, 105 aa, Homo sapiens
MKQLFSILEELAMVTSLRPPVQANPDLLSLLTVSLDQYQTEDELYQLSLQREPRSKSSPTSPTSCTPPPRPPVLEEWTSAAKPKLDQALVVEHIEKMVEVSSCGA

SEQ ID NO: 31864 - protein, 338 aa, Homo sapiens
MISSLSQNHPDNRNETFSSVISLLNEDPLSQDLPVKMASIFKNFVITYNRTYESKEEARWRLSVFVNNMVRAQKIQALDRGTAQYGVTKFSDLTEEEFRTIYLNTLLRKEPGNKMKQAKSVGDLAPPEWDWRSKGAVTKVKDQGMCGSCWAFSVTGNVEGQWFLNQGTLLSLSEQELLDCDKMDKACMGGLPSNAYSAIKNLGGLETEDDYSYQGHMQSCNFSAEKAKVYINDSVELSQNEQKLAAWLAKRGPISVAINAFGMQFYRHGISRPLRPLCSPWLIDHAVLLVGYGNRSDVPFWAIKNSWGTDWGEKGYYYLHRGSGACGVNTMASSAVVD

SEQ ID NO: 31865 - protein, 133 aa, Homo sapiens
MQQIRMSLRGKAVVLMGKNTMMRKAIRGHLENNPALEKLLPHIRGNVGFVFTKEDLTEIRDMLLANKVPAAARAGAIAPCEVTVPAQNTGLGPEKTSFFQALGITTKISRGTIEILVSGPGLPVLTRQMGSCF

SEQ ID NO: 31866 - protein, 238 aa, Homo sapiens
MGHCRLCHGKFSSRSLRSISERAPGASMERPSAEERVLVRDFQRLLGVAVRQDPTLSPFVCKSCHAQFYQCHSLLKSFLQRVNASPAGRRKPCAKVGAQPPTGAEEGACLGESSPGGGWAGCRPAVDLTSLLTLCSGSDHIQPPVPARLGGVGAWTCGQLRGPAPPSEDTVLRVLRRHPGRVGLRPGPRLHHGYQLQLQGLLAGQCAGSQVAMGQRDGATAAPAPRVEPWGCPSDLPG

SEQ ID NO: 31867 - protein, 69 aa, Homo sapiens
MAPCIQWVDKIKGIFPFVSKNKGKLAELWRKRKGRWKTMTYQKMARALRNYGRSEEITKIRRKLTYQFS

SEQ ID NO: 31868 - protein, 6 aa, Homo sapiens
MAPAQE

SEQ ID NO: 31869 - protein, 306 aa, Homo sapiens
MAAGESPVETLATYIKSSLLDIHGEFQETPVGHDAVSKTGRHSIASTRNCSSESENCTTHNGGEMTEESEGPNMVIHVCDEAKNLKEDFTCPRDLLISEMKYFAEYLSMDAQRWEEVDISVHCDVHIFNWLIKYIKRNTKENKDCEMPTLEPGNVISILISSEFLKMDSLVEQCIQYCHKNMNAIVATPCNMNCINANLLTRIADLFSHNEVDDLKDKKDKFKSKLFCKKIERLFDPEYLNPDSRSNAATLYRCCLCKKLLTKETERRIPCIPGKINVDRRGNIVYIHIRCREDKIHTCIFVYIYI

SEQ ID NO: 31870 - protein, 32 aa, Homo sapiens
MHSTIHRRFEEVSVFGGTGSFPLSPSGPQVWI

SEQ ID NO: 31871 - protein, 23 aa, Homo sapiens
TGLALLYSGVFVAFWACALAVGS

SEQ ID NO: 31872 - protein, 32 aa, Homo sapiens
LKSKSIQRWMNYKRNLKLQDLRSFSPNLYLLW

SEQ ID NO: 31873 - protein, 31 aa, Homo sapiens
MTGSISHVLVQLPHVFQRMEAENLASVIDAR

SEQ ID NO: 31874 - protein, 56 aa, Homo sapiens
TDSAAFNALVTFCIRDLIGCLQKLLFGKVAKDSSSKCGPKETSLRQLVVPGRPQRC

SEQ ID NO: 31875 - protein, 33 aa, Homo sapiens
KVGHDPAKEFTNHWWNELFNKTAANLVVETGQV

SEQ ID NO: 31876 - protein, 23 aa, Homo sapiens
RGMGLLPVTGKLTRWNWLNWDPC

SEQ ID NO: 31877 - protein, 267 aa, Homo sapiens
IQRLQADWVLEIDTFLSQTPYGYRSFSNIISTLNPTAKRHLVLACHYDSKYFSHWNNRVFVGATDSAVPCAMMLELARALDKKLLSLKTVSDSKPDLSLQLIFFDGEEAFLHWSPQDSLYGSRHLAAKMASTPHPPGARGTSQLHGMDLLVLLDLIGAPNPTFPNFFPNSARWFERLQAIEHELHELGLLKDHSLEGRYFQNYSYGGVIQDDHIPFLRRGVPVLHLIPSPFPEVWHTMDDNEENLDESTIDNLNKILQVFVLEYLHL

SEQ ID NO: 31878 - protein, 44 aa, Homo sapiens
MKLKNITSKSITYLMQNQMKMKILKSRLDFSRLASHSLWLDPIS

SEQ ID NO: 31879 - protein, 1031 aa, Homo sapiens
ITGESGAGKTEASKLVMSYVAAVCGKGAEVNQVKEQLLQSNPVLEAFGNAKTVRNDNSSRFGKYMDIEFDFKGDPLGGVISNYLLEKSRVVKQPRGERNFHVFYQLLSGASEELLNKLKLERDFSRYNYLSLDSAKVNGVDDAANFRTVRNAMQIVGFMDHEAESVLAVVAAVLKLGNIEFKPESRVNGLDESKIKDKNELKEICELTGIDQSVLERAFSFRTVEAKQEKVSTTLNVAQAYYARDALAKNLYSRLFSWLVNRINESIKAQTKVRKKVMGVLDIYGFEIFEDNSFEQFIINYCNEKLQQIFIELTLKEEQEEYIREDIEWTHIDYFNNAIICDLIENNTNGILAMLDEECLRPGTVTDETFLEKLNQVCATHQHFESRMSKCSRFLNDTSLPHSCFRIQHYAGKVLYQVEGFVDKNNDLLYRDLSQAMWKASHALIKSLFPEGNPAKINLKRPPTAGSQFKASVATLMKNLQTKNPNYIRCIKPNDKKAAHIFNEALVCHQIRYLGLLENVRVRRAGYAFRQAYEPCLERYKMLCKQTWPHWKGPARSGVEVLFNELEIPVEEYSFGRSKIFIRNPRTLFKLEDLRKQRLEDLATLIQKIYRGWKCRTHFLLMKKSQIVIAAWYRRYAQQKRYQQTKSSALVIQSYIRGWKARKILRELKHQKRCKEAVTTIAAYWHGTQARRELRRLKEEARNKHAIAVIWAYWLGSKARRELKRLKEEARRKHAVAVIWAYWLGLKVRREYRKFFRANAGKKIYEFTLQRIVQKYFLEMKNKMPSLSPIDKNWPSRPYLFLDSTHKELKRIFHLWRCKKYRDQFTDQQKLIYEEKLEASELFKDKKALYPSSVGQPFQGAYLEINKNPKYKKLKDAIEEKIIIAEVVNKINRANGKSTSRIFLLTNNNLLLADQKSGQIKSEVPLVDVTKVSMSSQNDGFFAVHLKEGSEAASKGDFLFSSDHLIEMATKLYRTTLSQTKQKLNIEISDEFLVQFRQDKVCVKFIQGNQKNGSVPTCKRKNNRLLEVAVP

SEQ ID NO: 31880 - protein, 21 aa, Homo sapiens
LKKHLIQMRRRCCSFCAGMLL

SEQ ID NO: 31881 - protein, 1222 aa, Homo sapiens
LPSDPLLSMKQPIMADGPRCKRRKQANPRRKNVVNYDNVVDTGSETDEEDKLHIAEDDGIANPLDQETSPASVPNHESSPHVSQALLPREEEEDEIREGGVEHPWHNNEILQASVDGPEEMKEDYDTMGPEATIQTAINNGTVKNANCTSDFEEYFAKRKLEERDGHAVSIEEYLQRSDTAIIYPEAPEELSRLGTPEANGQEENDLPPGTPDAFAQLLTCPYCDRGYKRLTSLKEHIKYRHEKNEENFSCPLCSYTFAYRTQLERHMVTHKPGTDQHQMLTQGAGNRKFKCTECGKAFKYKHHLKEHLRIHSGEKPYECPNCKKRFSHSGSYSSHISSKKCIGLISVNGRMRNNIKTGSSPNSVSSSPTNSAITQLRNKLENGKPLSMSEQTGLLKIKTEPLDFNDYKVLMATHGFSGTSPFMNGGLGATSPLGVHPSAQSPMQHLGVGMEAPLLGFPTMNSNLSEVQKVLQIVDNTVSRQKMDCKAEEISKLKGYHMKDPCSQPEEQGVTSPNIPPVGLPVVSHNGATKSIIDYTLEKVNEAKACLQSLTTDSRRQISNIKKEKLRTLIDLVTDDKMIENHNISTPFSCQFCKESFPGPIPLHQHERYLCKMNEEIKAVLQPHENIVPNKAGVFVDNKALLLSSVLSEKGMTSPINPYKDHMSVLKAYYAMNMEPNSDELLKISIAVGLPQEFVKEWFEQRKVYQYSNSRSPSLERSSKPLAPNSNPPTKDSLLPRSPVKPMDSITSPSIAELHNSVTNCDPPLRLTKPSHFTNIKPVEKLDHSRSNTPSPLNLSSTSSKNSHSSSYTPNSFSSEELQAEPLDLSLPKQMKEPKSIIATKNKTKASSISLDHNSVSSSSENSDEPLNLTFIKKEFSNSNNLDNKSTNPVFSMNPFSAKPLYTALPPQSAFPPATFMPPVQTSIPGLRPYPGLDQMSFLPHMAYTYPTGAATFADMQQRRKYQRKQGFQGELLDGAQDYMSGLDDMTDSDSCLSRKKIKKTESGMYACDLCDKTFQKSSSLLRHKYEHTGKRPHQCQICKKAFKHKHHLIEHSRLHSGEKPYQCDKCGKRFSHSGSYSQHMNHRYSYCKREAEEREAAEREAREKGHLEPTELLMNRAYLQSITPQGYSDSEERESMPRDGESEKEHEKEGEDGYGKLGRQDGDEEFEEEEEESENKSMDTDPETIRDEEETGDHSMDDSSEDGKMETKSDHEEDNMEDGM

SEQ ID NO: 31882 - protein, 1226 aa, Homo sapiens
RRKQANPRRKNVVNYDNVVDTGSETDEEDKLHIAEDDGIANPLDQETSPASVPNHESSPHVSQALLPREEEEDEIREGGVEHPWHNNEILQASVDGPEEMKEDYDTMGPEATIQTAINNGTVKNANCTSDFEEYFAKRKLEERDGHAVSIEEYLQRSDTAIIYPEAPEELSRLGTPEANGQEENDLPPGTPDAFAQLLTCPYCDRGYKRLTSLKEHIKYRHEKNEENFSCPLCSYTFAYRTQLERHMVTHKPGTDQHQMLTQGAGNRKFKCTECGKAFKYKHHLKEHLRIHSDSSLGRQLQLLSNQGNVTVILIIILGEKPYECPNCKKRFSHSGSYSSHISSKKCIGLISVNGRMRNNIKTGSSPNSVSSSPTNSAITQLRNKLENGKPLSMSEQTGLLKIKTEPLDFNDYKVLMATHGFSGTSPFMNGGLGATSPLGVHPSAQSPMQHLGVGMEAPLLGFPTMNSNLSEVQKVLQIVDNTVSRQKMDCKAEEISKLKGYHMKDPCSQPEEQGVTSPNIPPVGLPVVSHNGATKSIIDYTLEKVNEAKACLQSLTTDSRRQISNIKKEKLRTLIDLVTDDKMIENHNISTPFSCQFCKESFPGPIPLHQHERYLCKMNEEIKAVLQPHENIVPNKAGVFVDNKALLLSSVLSEKGMTSPINPYKDHMSVLKAYYAMNMEPNSDELLKISIAVGLPQEFVKEWFEQRKVYQYSNSRSPSLERSSKPLAPNSNPPTKDSLLPRSPVKPMDSITSPSIAELHNSVTNCDPPLRLTKPSHFTNIKPVEKLDHSRSNTPSPLNLSSTSSKNSHSSSYTPNSFSSEELQAEPLDLSLPKQMKEPKSIIATKNKTKASSISLDHNSVSSSSENSDEPLNLTFIKKEFSNSNNLDNKSTNPVFSMNPFSAKPLYTALPPQSAFPPATFMPPVQTSIPGLRPYPGLDQMSFLPHMAYTYPTGAATFADMQQRRKYQRKQGFQGELLDGAQDYMSGLDDMTDSDSCLSRKKIKKTESGMYACDLCDKTFQKSSSLLRHKYEHTGKRPHQCQICKKAFKHKHHLIEHSRLHSGEKPYQCDKCGKRFSHSGSYSQHMNHRYSYCKREAEEREAAEREAREKGHLEPTELLMNRAYLQSITPQGYSDSEERESMPRDGESEKEHEKEGEDGYGKLGRQDGDEEFEEEEEESENKSMDTDPETIRDEEETGDHSMDDSSEDGKMETKSDHEEDNMEDGM

SEQ ID NO: 31883 - protein, 46 aa, Homo sapiens
IRTATSQPRSASATFPPPKRLLMLLEQALDQKEWIKCWWSCLRLKI

SEQ ID NO: 31884 - protein, 9 aa, Homo sapiens
LSYMFRRFM

SEQ ID NO: 31885 - protein, 18 aa, Homo sapiens
VFVKMCSTFSSVHPSSSC

SEQ ID NO: 31886 - protein, 57 aa, Homo sapiens
RRERAVEWRERAVEKRERALEEVERAILEMKWKVRAEKEACQREKELPAAVHPFHFV

SEQ ID NO: 31887 - protein, 19 aa, Homo sapiens
LPCLAFDYFSLLPPQCKGM

SEQ ID NO: 31888 - protein, 7 aa, Homo sapiens
IGLTSLS

SEQ ID NO: 31889 - protein, 14 aa, Homo sapiens
MRTLWRETSELLFL

SEQ ID NO: 31890 - protein, 42 aa, Homo sapiens
LLRHILSLQQRNLQSQHHESNCHSDLLPYLSDSKWHSRSTSL

SEQ ID NO: 31891 - protein, 139 aa, Homo sapiens
LGTVNRATEKSVKTKGPLKQKQPSFSAKKMTEKTVKAKSSVPASDDAYPEIEKFFPFNPLDFESFDLPEEHQIAHLPLSGVPLMILDEERELEKLFQLGPPSPVKMPSPPWESNLLQSPSSILSTLDVELPPVCCDIDI

SEQ ID NO: 31892 - protein, 34 aa, Homo sapiens
LAIPTAQVFPDQVTGAFKEGILGIPGDHTSLNHP

SEQ ID NO: 31893 - protein, 19 aa, Homo sapiens
LLTTSAATVTCSHHPLPQN

SEQ ID NO: 31894 - protein, 838 aa, Homo sapiens
LPRPPPAARSCLDQDLGLCERIAGPGEVTAAPPGEVTAAPPGEVLESTMAEQVLPQALYLSNMRKAVKIRERTPEDIFKPTNGIIHHFKTMHRYTLEMFRTCQFCPQFREIIHKALIDRNIQATLESQKKLNWCREVRKLVALKTNGDGNCLMHATSQYMWGVQDTDLVLRKALFSTLKETDTRNFKFRWQLESLKSQEFVETGLCYDTRNWNDEWDNLIKMASTDTPMARSGLQYNSLEEIHIFVLCNILRRPIIVISDKMLRSLESGSNFAPLKVGGIYLPLHWPAQECYRYPIVLGYDSHHFVPLVTLKDSGPEIRAVPLVNRDRGRFEDLKVHFLTDPENEMKEKLLKEYLMVIEIPVQGWDHGTTHLINAAKLDEANLPKEINLVDDYFELVQHEYKKWQENSEQGRREGHAQNPMEPSVPQLSLMDVKCETPNCPFFMSVNTQPLCHECSERRQKNQNKLPKLNSKPGPEGLPGMALGASRGEAYEPLAWNPEESTGGPHSAPPTAPSPFLFSETTAMKCRSPGCPFTLNVQHNGFCERCHNARQLHASHAPDHTRHLDPGKCQACLQDVTRTFNGICSTCFKRTTAEASSSLSTSLPPSCHQRSKSDPSRLVRSPSPHSCHRAGNDAPAGCLSQAARTPGDRTGTSKCRKAGCVYFGTPENKGFCTLCFIEYRENKHFAAASGKVSPTASRFQNTIPCLGRECGTLGSTMFEGYCQKCFIEAQNQRFHEAKRTEEQLRSSQRRDVPRTTQSTSRPKCARASCKNILACRSEELCMECQHPNQRMGPGAHRGEPAPEDPPKQRCRAPACDHFGNAKCNGYCNECFQFKQMYG

SEQ ID NO: 31895 - protein, 16 aa, Homo sapiens
IFLPHTYLEASKKIKF

SEQ ID NO: 31896 - protein, 56 aa, Homo sapiens
REFSGMAWHILKHFSVSRSRKRRQLPRHTERLTDTRFGKLCRHLWSSYCPKLYSCA

SEQ ID NO: 31897 - protein, 11 aa, Homo sapiens
VQVGLIELVLC

SEQ ID NO: 31898 - protein, 23 aa, Homo sapiens
RWSSSVEHMANDNGLTDQKQERT

SEQ ID NO: 31899 - protein, 394 aa, Homo sapiens
LIIVYWDSAGAAHFYLHTSFSRPHTGPPLPTPGPDRDRELTADSDVDEFLDKFLSAGVKQSDLPRKETEQPPAPGSMEESVRGYDWSPRDARRSPDQGRQQAERRSVLRGFCANSSLAFPTKERAFDDIPNSELSHLIVDDRHGAIYCYVPKVACTNWKRVMIVLSGSLLHRGAPYRDPLRIPREHVHNASAHLTFNKFWRRYGKLSRHLMKVKLKKYTKFLFVRDPFVRLISAFRSKFELENEEFYRKFAVPMLRLYANHTSLPASAREAFRAGLKVSFANFIQYLLDPHTEKLAPFNEHWRQVYRLCHPCQIDYDFVGKLETLDEDAAQLLQLLQVDRQLRFPPSYRNRTASSWEEDWFAKIPLAWRQQLYKLYEADFVLFGYPKPENLLRD

SEQ ID NO: 31900 - protein, 1043 aa, Homo sapiens
LENKQPVESTSAKSCSPSPVSPQVQPQAADTISDSVAVPASLLGMRRGLNSRLEATAASSVKTRMQKLAEQRRRWDNDDMTDDIPESSLFSPMPSEEKAASPPRPLLSNASATPVGRRGRLANLAATICSWEDDVNHSFAKQNSVQEQPGTACLSKFSSASGASARINSSSVKQEATFCSQRDGDASLNKALSSSADDASLVNASISSSVKATSPVKSTTSITDAKSCEGQNPELLPKTPISPLKTGVSKPIVKSTLSQTVPSKGELSREICLQSQSKDKSTTPGGTGIKPFLERFGERCQEHSKESPARSTPHRTPIITPNTKAIQERLFKQDTSSSTTHLAQQLKQERQKELACLRGRFDKGNIWSAEKGGNSKSKQLETKQETHCQSTPLKKHQGVSKTQSLPVTEKVTENQIPAKNSSTEPKGFTECEMTKSSPLKITLFLEEDKSLKVTSDPKVEQKIEVIREIEMSVDDDDINSSKVINDLFSDVLEEGELDMEKSQEEMDQALAESSEEQEDALNISSMSLLAPLAQTVGVVSPESLVSTPRLELKDTSRSDESPKPGKFQRTRVPRAESGDSLGSEDRDLLYSIDAYRSQRFKETERPSIKQVIVRKEDVTSKLDEKNNAFPCQVNIKQKMQELNNEINMQQTVIYQASQALNCCVDEEHGKGSLEEAEAERLLLIATGKRTLLIDELNKLKNEGPQRKNKASPQSEFMPSKGSVTLSEIRLPLKADFVCSTVQKPDAANYYYLIILKAGAENMVATPLASTSNSLNGDALTFTTTFTLQDVSNDFEINIEVYSLVQKKDPSGLDKKKKTSKSKAITPKRLLTSITTKSNIHSSVMASPGGLSAVRTSNFALVGSYTLSLSSVGNTKFVLDKVPFLSSLEGHIYLKIKCQVNSSVEERGFLTIFEDVSGFGAWHRRWCVLSGNCISYWTYPDDEKRKNPIGRINLANCTSRQIEPANREFCARRNTFELITVRPQREDDRETLVSQCRDTLCVTKNWLSADTKEERDLWMQKLNQVLVDIRLWQPDACYKPIGKP

SEQ ID NO: 31901 - protein, 677 aa, Homo sapiens
RCFEEDFKTQVQGKEWLELEEDAQKAYIMGLLDRLEVVSRERRLKVARAVLYLAQGTFGECDSEVDVLHWSRYNCFLLYQMGTFSTFLELLHMEIDNSQACSSALRKPAVSIADSTELRVLLSVMYLMVENIRLERETDPCGWRTARETFRTELSFSMHNEEPFALLLFSMVTKFCSGLAPHFPIKKVLLLLWKVVMFTLGGFEHLQTLKVQKRAELGLPPLAEDSIQVVKSMRAASPPSYTLDLGESQLAPPPSKLRGRRGSRRQLLTKQDSLDIYNERDLFKTEEPATEEEEESAGDGERTLDGELDLLEQDPLVPPPPSQAPLSAERVAFPKGLPWAPKVRQKDIEHFLEMSRNKFIGFTLGQDTDTLVGLPRPIHESVKTLKQHKYISIADVQIKNEEELEKCPMSLGEEVVPETPCEILYQGMLYSLPQYMIALLKILLAAAPTSKAKTDSINILADVLPEEMPITVLQSMKLGIDVNRHKEIIVKSISTLLLLLLKHFKLNHIYQFEYVSQHLVFANCIPLILKFFNQNILSYITAKNSISVLDYPCCTIQDLPELTTESLEAGDNSQFCWRNLFSCINLLRLLNKLTKWKHSRTMMLVVFKSAPILKRALKVKQAMLQLYVLKLLKLQTKYLGRQWRKSNMKTMSAIYQKVRHRMNDDWAYGNGESSQSS

SEQ ID NO: 31902 - protein, 11 aa, Homo sapiens
IFFSEISWELL

SEQ ID NO: 31903 - protein, 169 aa, Homo sapiens
INDEIFVELVNALGQYNDDDDDDDGDDPEEREEKQKDLEDHRDDKESRPPRKFPSDKIFEAISSMFPDKGTAEELKEKYKELTEQQLPGALPPECTPNIDGPNAKSVQREQSLHSFHTLFCRRCFKYDCFLHPFHATPNTYKRKNTETALDNKPCGPQCYQHLPLLPRN

SEQ ID NO: 31904 - protein, 7 aa, Homo sapiens
KKIFWKI

SEQ ID NO: 31905 - protein, 31 aa, Homo sapiens
TEWPLLETQPCMCRRAPWPATWGPRAAAISI

SEQ ID NO: 31906 - protein, 364 aa, Homo sapiens
IFEFKETLGTGAFSEVVLAEEKATGKLFAVKCIPKKALKGKESSIENEIAVLRKIKHENIVALEDIYESPNHLYLVMQLVSGGELFDRIVEKGFYTEKDASTLIRQVLDAVYYLHRMGIVHRDLKPENLLYYSQDEESKIMISDFGLSKMEGKGDVMSTACGTPGYVAPEVLAQKPYSKAVDCWSIGVIAYILLCGYPPFYDENDSKLFEQILKAEYEFDSPYWDDISDSAKDFIRNLMEKDPNKRYTCEQAARHPWIAGDTALNKNIHESVSAQIRKNFAKSKWRQAFNATAVVRHMRKLHLGSSLDSSNASVSSSLSLASQKDCLAPSTLCSFISSSSGVSGVGAERRPRPTTVTAVHSGSK

SEQ ID NO: 31907 - protein, 34 aa, Homo sapiens
RNMVAELSSVFLDSLYSTDTVTQGSQMNGSPKPH

SEQ ID NO: 31908 - protein, 11 aa, Homo sapiens
TRDQPRSRWTW

SEQ ID NO: 31909 - protein, 627 aa, Homo sapiens
KNGYTPLHQAAQQGHTHIINVLLQNNASPNELTVNGNTALGIARRLGYISVVDTLKIVTEETMTTTTVTEKHKMNVPETMNEVLDMSDDEGEDAMTGDTDKYLGPQDLKELGDDSLPAEGYMGFSLGARSASPKISSDRSYTLNRSSYARDSMMIEELLVPSKEQHLTFTREFDSDSLRHYSWAADTLDNVNLVSSPIHSGYSSPLPQYDSRFLVSFMVDARGGSMRGSRHHGMRIIIPPRKCTAPTRITCRLVKRHKLANPPPMVEGEGLASRLVEMGPAGAQFLGPVIVEIPHFGSMRGKERELIVLRSENGETWKEHQFDSKNEDLTELLNGMDEELDSPEELGKKRICRIITKDFPQYFAVVSRIKQESNQIGPEGGILSSTTVPLVQASFPEGALTKRIRVGLQAQPVPDEIVKKILGNKATFSPIVTVEPRRRKFHKPITMTIPVPPPSGEGVSNGYKGDTTPNLRLLCSITGGTSPAQWEDITGTTPLTFIKDCVSFTTNVSARFWLADCHQVLETVGLATQLYRELICVPYMAKFVVFAKMNDPVESSLRCFCMTDDKVDKTLEQQENFEEVARSKDIEVPCSQKQVHFITYSRYEVLFCGLNSTHYKIPSALLILLLL

SEQ ID NO: 31910 - protein, 29 aa, Homo sapiens
LPPGNKALKSAVEKPNVCEIQETMLANHW

SEQ ID NO: 31911 - protein, 8 aa, Homo sapiens
LGAIELNG

SEQ ID NO: 31912 - protein, 31 aa, Homo sapiens
MPEILKTELDEWAAAMNAEFEAAEQFDLLVE

SEQ ID NO: 31913 - protein, 29 aa, Homo sapiens
ISLSSTQPQQAHFGIGFPGLEMYTKGMHL

SEQ ID NO: 31914 - protein, 6 aa, Homo sapiens
INIPLS

SEQ ID NO: 31915 - protein, 23 aa, Homo sapiens
RLRIDPPAFRGMVLIQGSSTPWS

SEQ ID NO: 31916 - protein, 52 aa, Homo sapiens
IQAGEIGEMKDGVPEGAQLQGPVHRNPTYRPRYRRYVAFSTNGQLKDLCAQW

SEQ ID NO: 31917 - protein, 1079 aa, Homo sapiens
KPLSENELLELFEKMMEDMNLNEDKKAPLREKDFSIKKEMVMQYINTASKTGSLKRSRQISPQEFIHELKMGSADERLVTCLESLRVSLTSNPVSWVESFGHEGLGLLLDILEKLISGKIQEKVVKKNQHKVIQCLKALMNTQYGLERIMSEERSLSLLAKAVDPRHPNMMTDVVKLLSAVCIVGEESILEEVLEALTSAGEEKKIDRFFCIVEGLRHNSVQLQVACMQLINALVTSPDDLDFRLHIRNEFMRCGLKEILPNLKCIKNDGLDIQLKVFDEHKEEDLFELSHRLEDIRAELDEAYDVYNMVWSTVKETRAEGYFISILQHLLLIRNDYFIRQQYFKLIDECVSQIVLHRDGMDPDFTYRKRLDLDLTQFVDICIDQAKLEEFEEKASELYKKFEKEFTDHQETQAELQKKEAKINELQAELQAFKSQFGALPADCNIPLPPSKEGGTGHSALPPPPPLPSGGGVPPPPPPPPPPPLPGMRMPFSGPVPPPPPLGFLGGQNSPPLPILPFGLKPKKEFKPEISMRRLNWLKIRPHEMTENCFWIKVNENKYENVDLLCKLENTFCCQQKERREEEDIEEKKSIKKKIKELKFLDSKIAQNLSIFLSSFRVPYEEIRMMILEVDETRLAESMIQNLIKHLPDQEQLNSLSQFKSEYSNLCEPEQFVVVMSNVKRLRPRLSAILFKLQFEEQVNNIKPDIMAVSTACEEIKKSKSFSKLLELVLLMGNYMNAGSRNAQTFGFNLSSLCKLKDTKSADQKTTLLHFLVEICEEKYPDILNFVDDLEPLDKASKVSVETLEKNLRQMGRQLQQLEKELETFPPPEDLHDKFVTKMSRFVISAKEQYETLSKLHENMEKLYQSIIGYYAIDVKKVSVEDFLTDLNNFRTTFMQAIKENIKKREAEEKEKRVRIAKELAERERLERQQKKKRLLEMKTEGDETGVMDNLLEALQSGAAFRDRRKRTPMPKDVRQSLSPMSQRPVLKVCNHENQKVQLTEGSRSHYNINCNSTRTPVAKELNYNLDTHTSTGRIKAAEKKEACNVESNRKKETELLGSFSKNESVPEVEALLARLRAL

SEQ ID NO: 31918 - protein, 8 aa, Homo sapiens
LMTSDFGS

SEQ ID NO: 31919 - protein, 16 aa, Homo sapiens
MDLQWVLLGSRSCRML

SEQ ID NO: 31920 - protein, 54 aa, Homo sapiens
IHLNRAKVGYMESTCGPSAQGWILFCSLIAKHCLIWNKSSWVIPISPYHMSTTS

SEQ ID NO: 31921 - protein, 48 aa, Homo sapiens
VNLDIFTGWLRTICSASYRYHNLDQVQAKRPECYKMLRSQSKKKWKRI

SEQ ID NO: 31922 - protein, 22 aa, Homo sapiens
RWTCTWCGRQTDWGSQQLVFAG

SEQ ID NO: 31923 - protein, 12 aa, Homo sapiens
MPLPPPSSWPWP

SEQ ID NO: 31924 - protein, 1112 aa, Homo sapiens
LRRAGVSGAMAGASVKVAVRVRPFNARETSQDAKCVVSMQGNTTSIINPKQSKDAPKSFTFDYSYWSHTSTEDPQFASQQQVYRDIGEEMLLHAFEGYNVCIFAYGQTGAGKSYTMMGRQEPGQQGIVPQLCEDLFSRVSENQSAQLSYSVEVSYMEIYCERVRDLLNPKSRGSLRVREHPILGPYVQDLSKLAVTSYADIADLMDCGNKARTVAATNMNETSSRSHAVFTIVFTQRCHDQLTGLDSEKVSKISLVDLAGSERADSSGARGMRLKEGANINKSLTTLGKVISALADMQSKKRKSDFIPYRDSVLTWLLKENLGGNSRTAMIAALSPADINYEETLSTLRYADRTKQIRCNAIINEDPNARLIRELQEEVARLRELLMAQGLSASALEGLKTEEGSVRGALPAVSSPPAPVSPSSPTTHNGELEPSFSPNTESQIGPEEAMERLQETEKIIAELNETWEEKLRKTEALRMEREALLAEMGVAVREDGGTVGVFSPKKTPHLVNLNEDPLMSECLLYHIKDGVTRVGQVDMDIKLTGQFIREQHCLFRSIPQPDGEVVVTLEPCEGAETYVNGKLVTEPLVLKSGNRIVMGKNHVFRFNHPEQARLERERGVPPPPGPPSEPVDWNFAQKELLEQQGIDIKLEMEKRLQDLENQYRKEKEEADLLLEQQRLYADSDSGDDSDKRSCEESWRLISSLREQLPPTTVQTIVKRCGLPSSGKRRAPRRVYQIPQRRRLQGKDPRWATMADLKMQAVKEICYEVALADFRHGRAEIEALAALKMRELCRTYGKPDGPGDAWRAVARDVWDTVGEEEGGGAGSGGGSEEGARGAEVEDLRAHIDKLTGILQEVKLQNSSKDRELQALRDRMLRMERVIPLAQDHEDENEEGGEVPWAPPEGSEAAEEAAPSDRMPSARPPSPPLSSWERVSRLMEEDPAFRRGRLRWLKQEQLRLQGLQGSGGRGGGLRRPPARFVPPHDCKLRFPFKSNPQHRESWPGMGSGEAPTPLQPPEEVTPHPATPARRPPSPRRSHHPRRNSLDGGGRSRGAGSAQPEPQHFQPKKHNSYPQPPQPYPAQRPPGPRYPPYTTPPRMRRQRSAPDLKESGAAV

SEQ ID NO: 31925 - protein, 6 aa, Homo sapiens
MVAPEL

SEQ ID NO: 31926 - protein, 171 aa, Homo sapiens
ILMSSGLPRETLGQIWALANRTTPGKLTKEELYTVLAMIAVTQRGVPAMSPDALNQFPAAPIPTLSGFSMTLPTPVSQPTVIPSGPAGSMPLSLGQPVMGINLVGPVGGAAAQASSGFIPTYPANQVVKPEEDDFQDFQDASKSGSLDDSFSDFQELPASSKTSNSQHGNR

SEQ ID NO: 31927 - protein, 20 aa, Homo sapiens
MAELPWNASWTSGDISHIFR

SEQ ID NO: 31928 - protein, 32 aa, Homo sapiens
TLLLLALLAPRSLGNRLGTPPCHPLRPTSRKR

SEQ ID NO: 31929 - protein, 19 aa, Homo sapiens
KSWSSWRCRRNTSKMSKRT

SEQ ID NO: 31930 - protein, 301 aa, Homo sapiens
LVVQVYCPLEGSPFHRLLHVFACACPGCSTGGARSWKVFRSQCLQVPEREAQDAQKQGNSLAAEDWCEGADDWGSDTEEGPSPQFTLDFGNDASSAKDVDWTARLQDLRLQDAVLGAAHPVPPGLPLFLPYYICVADEDDYRDFVNLDHAHSLLRDYQQREGIAMDQLLSQSLPNDGDEKYEKTIIKSGDQTFYKFMKRIAACQEQILRYSWSGEPLFLTCPTSEVTELPACSQCGGQRIFEFQLMPALVSMLKSANLGLSVEFGTILVYTCEKSCWPPNHQTPMEEFCIIQEDPDELLFK

SEQ ID NO: 31931 - protein, 247 aa, Homo sapiens
VRVFVRVFTGQAKVKASASKQALVFQCVGCGAFHLQRLGKASGVPSGRAKFSAACGPPVTPECEHCGQRHQLGGPMWAEPIHDLDFVGRVLEAVSANPGRFHTSERIRGVLSVITEELPDVPLYYTLDQLSSTIHCNTPSLLQLRSALLHADFRVSLSHACKNAVKTDAPASALWDIMRCWEKECPVKRERLSETSPAFRILSVEPRLQANFTIREDANPSSRQRGLKRFQANPEANWGPRPRARPG

SEQ ID NO: 31932 - protein, 37 aa, Homo sapiens
ISALRARTATGSPGSCRCTAGPLPCASALESCCCRVT

SEQ ID NO: 31933 - protein, 540 aa, Homo sapiens
LVREKETQKRKRKAKESGMALPQGLLTFRDVAIEFSQEEWKCLDPAQRTLYRDVMLENYRNLVSLDISSKCMLKTLSSTGQGNTEVIHTGTLHRQASHHIGEFCFHEIEKDIHGFEFQWKEDETNGHAAPMTEIKELAGSTGQHDQRHAGNKRIKDQLGSSFHLHLPEPHIFQSEGKIGNQVEKSINNASSVSTSQRICCRPKTHISNKYGNNSLHSSLLTQKWEVHMREKSFECIQSFKSFNCSSLLKKHQIIHLEEKQCKCDVCGKVFNQKRYLACHRRCHTGEKPYKCNECGKTFGHNSSLFIHKALHTGEKPYECEECDKVFSRKSHLERHKRIHTGEKPYKCKVCDEAFAYNSYLAKHTILHTGEKPYTCNECGKVFNRLSTLARHHRLHTGEKPYKCEECDKVFSRKSHLERHRRIHSGEKPYKCEECCKVFSRKSNLERHRRIHTGEKPYKCKVCDKAFQRDSHLAQHQRVHTGEKPYKCNECGKTFGQTSSLIIHRRLHTGEKPYKCNECGKTFSQMSSLVYHHRLHSGEKP

SEQ ID NO: 31934 - protein, 644 aa, Homo sapiens
IPPVNDFKVGMKLEARDPRNATSVCIATVIGITGARLRLRLDGSDNRNDFWRLVDSPDIQPVGTCEKEGDLLQPPLGYQMNTSSWPMFLLKTLNGSEMASATLFKKEPPKPPLNNFKVGMKLEAIDKKNPYLICPATIGDVKGDEVHITFDGWSGAFDYWCKYDSRDIFPAGWCRLTGDVLQPPGTSVPIVKNIAKTESSPSEASQHSMQSPQKTTLILPTQQVRRSSRIKPPGPTAVPKRSSSVKNITPRKKGPNSGKKEKPLPVICSTSAASLKSLTRDRGMLYKDVASGPCKIVMSTVCVYVNKHGNFGPHLDPKRIQQLPDHFGPGPVNVVLRRIVQACVDCALETKTVFGYLKPDNRGGEVITASFDGETHSIQLPPVNSASFALRFLENFCHSLQCDNLLSSQPFSSSRGHTHSSAEHDKNQSAKEDVTERQSTKRSPQQTVPYVVPLSPKLPKTKEYASEGEPLFAGGSAIPKEENLSEDSKSSSLNSGNYLNPACRNPMYIHTSVSQDFSRSVPGTTSSPLVGDISPKSSPHEVKFQMQRKSEAPSYIAVPDPSVLKQGFSKDPSTWSVDEVIQFMKHTDPQISGPLADLFRQHEIDGKALFLLKSDVMMKYMGLKLGPALKLCYYIEKLKEGKYS

SEQ ID NO: 31935 - protein, 602 aa, Homo sapiens
RSVRGGPKPPGRGGARASGGAAGPAPAMPPGKVLQPVLKMKVDELFLYWLSEASTQRMLQDCLRRIKAPGRDQPTPGDGEQPGAWPTAPLAAPRPSGLEPPGTPGPGPALPLGAASSPRNAPHVRGTRRSAGTRVVQTRKEEPLPPATSQSIPTFYFPRGRPQDSVNVDAVISKIESTFARFPHERATMDDMGLVAKACGCPLYWKGPLFYGAGGERTGSVSVHKFVAMWRKILQNCHDDAAKFVHLLMSPGCNYLVQEDFVPFLQDVVNTHPGLSFLKEASEFHSRYITTVIQRIFYAVNRSWSGRITCAELRRSSFLQNVALLEEEADINQLTEFFSYEHFYVIYCKFWELDTDHDLLIDADDLARHNDHALSTKMIDRIFSGAVTRGRKVQKEGKISYADFVWFLISEEDKKTPTSIEYWFRCMDLDGDGALSMFELEYFYEEQCRRLDSMAIEALPFQDCLCQMLDLVKPRTEGKITLQDLKRCKLANVFFDTFFNIEKYLDHEQKEQISLLRDGDSGGPELSDWEKYAAEEYDILVAEETAGEPWEDGFEAELSPVEQKLSALRSPLAQRPFFEAPSPLGAVDLYEYACGDEDLEPL

SEQ ID NO: 31936 - protein, 28 aa, Homo sapiens
MTVGWLPKEIQKADFRQTLSAFLMGFAS

SEQ ID NO: 31937 - protein, 442 aa, Homo sapiens
MDLLTKNCKAAAGKSPSLIFTNRHEVRRIDLVKRNYSRLIPMLKNVVALDVEVATNRIYWCDLSYRKIYSAYMDKASDPKEQEVLIDEQLHSPEGLAVDWVHKHIYWTDSGNKTISVATVDGGRRRTLFSRNLSEPRAIAVDPLRGFMYWSDWGDQAKIEKSGLNGVDRQTLVSDNIEWPNGITLDLLSQRLYWVDSKLHQLSSIDFSGGNRKTLISSTDFLSHPFGIAVFEDKVFWTDLENEAIFSANRLNGLEISILAENLNNPHDIVIFHELKQPRAPDACELSVQPNGGCEYLCLPAPQISSHSPKYTCACPDTMWLGPDMKRCYRAPQSTSTTTLASTMTRTVPATTRAPGTTVHRSTYQNHSTETPSLTAAVPSSVSVPRAPSISPSTLSPATSNHSQHCKEMSSAFFHDMGGLLGKPGRGYVIRQNLPELNTAYL

SEQ ID NO: 31938 - protein, 35 aa, Homo sapiens
MKKMMMISEIHQLSFYFFYKCFSLHNKNSERNAYL

SEQ ID NO: 31939 - protein, 454 aa, Homo sapiens
MELAEHLTYLEYRSFCKILFQDYHSFVTHGCTVDNPVLERFISLFNSVSQWVQLMILSKPTAPQRALVITHFVHVAEKLLQLQNFNTLMAVVGGLSHSSISRLKETHSHVSPETIKLWEGLTELVTATGNYGNYRRRLAACVGFRFPILGVHLKDLVALQLALPDWLDPARTRLNGAKMKQLFSILEELAMVTSLRPPVQANPDLLSLLTVSLDQYQTEDELYQLSLQREPRSKSSPTSPTSCTPPPRPPVLEEWTSAAKPKLDQALVVEHIEKMVESVFRNFDVDGDGHISQEEFQIIRGNFPYLSAFGDLDQNQDGCISREEMVSYFLRSSSVLGGRMGFVHNFQESNSLRPVACRHCKALILGIYKQGLKCRACGVNCHKQCKDRLSVECRRRAQSVSLEGSAPSPSPMHSHHHRAFSFSLPRPGRRGSRPPEIREEEVQTVEDGVFDIHL

SEQ ID NO: 31940 - protein, 173 aa, Homo sapiens
MWGVRCRASLLLQTTVHAITATQKTVDGPSGKLWRDGRGALQNIIPASTGAAKAVGKVIPELNGKLTGMAFRVPTANVSVVDLTCRLEKPAKYDDIKKVVKQASEGPLKGILGYTEHQVVSSDFNSDTHSSTFDAGAGIALNDHFVKLISWYDNEFGYSNRVVDLMAHMASKE

SEQ ID NO: 31941 - protein, 60 aa, Homo sapiens
MCRRMVCDCENPTVDLFCCPECDPRLSSQCLHQNGETLYNSGDTWVQNCQQCRCLVNLAT

SEQ ID NO: 31942 - protein, 603 aa, Homo sapiens
MSLIDLAGSERASSTHAKGERLREGANINRSLLALINVLNALADAKGRKTHVPYRDSKLTRLLKDSLGGNCRTVMIAAISPSSLTYEDTYNTLKYADRAKEIRLSLKSNVTSLDCHISQYATICQQLQAEVAALRKKLQVYEGGGQPPPQDLPGSPKSGPPPEHQPCTPELPAGPRALQEESLGMEAQVERAMEGNSSDQEQSPEDEDEGPAEEVPTQMPEQNPTHALPESPRLTLQPKPVVGHFSARELDGDRSKQLALKVLCVAQRQYSLLQAANLLTPDMITEFETLQQLVQEEKIEPGAEALRTSGLARGAPLAQELCSESIPVPSPLCPEPPGYTGPVTRTMARRLSGPLHTLGIPPGPNCTPAQGSRWPMEKKRRRPSALEADSPMAPKRGTKRQRQSFLPCLRRGSLPDTQPSQGPSTPKGERASSPCHSPRVCPATVIKSRVPLGPSAMQNCSTPLALPTRDLNATFDLSEEPPSKPSFHECIGWDKIPQELSRLDQPFIPRAPVPLFTMKGPKPTSSLPGTSACKKKRVASSSVSHGRSRIARLPSSTLKRPAGPLVLPELPLSPLCPSNRRNGKDLIRVGRALSAGNGVTKVS

SEQ ID NO: 31943 - protein, 98 aa, Homo sapiens
MTKYLEGSLYPSTQQYNDVVNALLQAHPFLDEDGCGFFLWKRALKDRFKYVRRPIEDDEQVIRNKCKFGHRRGQTRKSLADIRFDEIKLVQIKVRLNS

SEQ ID NO: 31944 - protein, 88 aa, Homo sapiens
IEEGTFLFTSESVGEGHPDKICDQISDAVLDAHLQQDPDAKVACETVAKTGMILLAGEITSRAAVDYQKVVREAVKHIGYDDSSKGVF

SEQ ID NO: 31945 - protein, 34 aa, Homo sapiens
TLSKMQLTDCQRIQVVHQETWNYSKSKDPLALNC

SEQ ID NO: 31946 - protein, 11 aa, Homo sapiens
VALSPPQGSRT

SEQ ID NO: 31947 - protein, 8 aa, Homo sapiens
VRCVPRHL

SEQ ID NO: 31948 - protein, 85 aa, Homo sapiens
LIVEKIMQSSSEVGYDAMAGDFVNMVEKGIIDPTKVVRTALLDAAGVASLLTTAEVVVTEIPKEEKDPGMGAMGGMGGGMGGGMF

SEQ ID NO: 31949 - protein, 40 aa, Homo sapiens
LKNYDFGSSTETSDSHLTKALSTFIHAEDFARRRKRSVSL

SEQ ID NO: 31950 - protein, 23 aa, Homo sapiens
LGCSLISDSRRNLKGNFHNVRSP

SEQ ID NO: 31951 - protein, 15 aa, Homo sapiens
LGCLTDSPVGAMLCA

SEQ ID NO: 31952 - protein, 24 aa, Homo sapiens
VPLKHSGHLMKTNLRKGKYLQAKS

SEQ ID NO: 31953 - protein, 60 aa, Homo sapiens
LFCSEHRPKIKSEHPGLSIGDTAKKLGEMWSEQSAKDKQPYEQKAAKLKEKYEKVQCHLF

SEQ ID NO: 31954 - protein, 23 aa, Homo sapiens
KAVANTMRTSLGPNGKSPPFRVF

SEQ ID NO: 31955 - protein, 46 aa, Homo sapiens
RYVYSILCCKESSDPSSYNSSGQLMASKMDTCSSNLNNSIYKKLLT

SEQ ID NO: 31956 - protein, 7 aa, Homo sapiens
ITFVEVF

SEQ ID NO: 31957 - protein, 42 aa, Homo sapiens
LSLCWSSWPVCYGKKGLSLSYGPVSPIIRRLWNIFVRNQEKI

SEQ ID NO: 31958 - protein, 34 aa, Homo sapiens
LYTADSGMDSVKEQHLNPRGQLLQHPVHLKNVND

SEQ ID NO: 31959 - protein, 6 aa, Homo sapiens
RSLVSR

SEQ ID NO: 31960 - protein, 23 aa, Homo sapiens
RKSLADIRFDEIKLVQIKVRLNS

SEQ ID NO: 31961 - protein, 6 aa, Homo sapiens
KRICEV

SEQ ID NO: 31962 - protein, 139 aa, Homo sapiens
KGAGSVFRAHVKHRKGAARLRAVDFAERHGYIKGIVKKVISSANRAVVGVVAGGGRIDKPILKAGRAYHKYKAKRNCWPRVRGVAMNPVEHPFGGGNHQHIGKPSTIRRDAPAGRKVGLIAARRTGRLRGTKTVQEKEN

SEQ ID NO: 31963 - protein, 39 aa, Homo sapiens
ILKALLTHPFSDLGFEHLSVMLLPHSYCNTPLLKKVFLD

SEQ ID NO: 31964 - protein, 99 aa, Homo sapiens
ITRRSLGYAYVNFQQPADAERALDTMNFDVIKGKPVRIMWSQRDPSLRKSGVGNIFIKNLDKSIDNKALYDTFSAFGNILSCKVSQKCPIHMFTLLSYI

SEQ ID NO: 31965 - protein, 44 aa, Homo sapiens
IWHFADNQLFVSGPNGTAGIFATYPSGHLDMINGFFDQVWAGDV

SEQ ID NO: 31966 - protein, 12 aa, Homo sapiens
LAFLIKFLLPCK

SEQ ID NO: 31967 - protein, 16 aa, Homo sapiens
LPFARCRETSRSHTRK

SEQ ID NO: 31968 - protein, 366 aa, Homo sapiens
LALLVAGLAQGIRGPLRAQDLGPQPLELKEAFKLFQIQFNRSYLSPEEHAHRLDIFAHNLAQAQRLQEEDLGTAEFGVTPFSDLTEEEFGQLYGYRRAAGGVPSMGREIRSEEPEESVPFSCDWRKVASAISPIKDQKNCNCCWAMAAAGNIETLWRISFWDFVDVSVQELLDCGRCGDGCHGGFVWDAFITVLNNSGLASEKDYPFQGKVRAHRCHPKKYQKVAWIQDFIMLQNNEHRIAQYLATYGPITVTINMKPLQLYRKGVIKATPTTCDPQLVDHSVLLVGFGSVKSEEGIWAETVSSQSQPQPPHPTPYWILKNSWGAQWGEKGYFRLHRGSNTCGITKFPLTARVQKPDMKPRVSCPP

SEQ ID NO: 31969 - protein, 23 aa, Homo sapiens
LFLLEIRGYSKLHDDLGEFPYGK

SEQ ID NO: 31970 - protein, 89 aa, Homo sapiens
TCLENPAVIMQTYLEKAVEVAGNYDGESSDELRNGKMKAFLSLARFSDTQYQRIENYMKSSEFENKQALLKRAKEEVGLLREHKIQTNR

SEQ ID NO: 31971 - protein, 131 aa, Homo sapiens
LPYFWEHFDKDGWSLWYSEYRFPEELTQTFMSCNLITGMFQRLDKLRKNAFASVILFGTNNSSSISGVWVFRGQELAFPLSPDWQVDYESYTWRKLDPGSEETQTLVREYFSWEGAFQHVGKAFNQGKIFK

SEQ ID NO: 31972 - protein, 27 aa, Homo sapiens
INPDGSQSVVEVTVTVPPNKVAHSGFG

SEQ ID NO: 31973 - protein, 7 aa, Homo sapiens
LHIGLWD

SEQ ID NO: 31974 - protein, 54 aa, Homo sapiens
TPPVLDSDGSFFLYSRLTVDKSRWQEGNVFSCSVMHEALHNHYTQKSLSLSLGK

SEQ ID NO: 31975 - protein, 66 aa, Homo sapiens
RVIPLGLTQLGSEKQRPEGSSEPGSLLCRETQGLGRRMESEMLKVYVSFAPSASEPLPLGSTEHRD

SEQ ID NO: 31976 - protein, 37 aa, Homo sapiens
MFEKIAKYIGENLQLLVDRPDGTYCFRLHNDRVYYVR

SEQ ID NO: 31977 - protein, 18 aa, Homo sapiens
VKNQHHVWQLSIGARSLP

SEQ ID NO: 31978 - protein, 31 aa, Homo sapiens
ISEKKLKRRRKPEFDIARNVLELIYGQTLTW

SEQ ID NO: 31979 - protein, 7 aa, Homo sapiens
VPFNAPK

SEQ ID NO: 31980 - protein, 23 aa, Homo sapiens
MSADGEAEPTCQWPGAGFVAKLM

SEQ ID NO: 31981 - protein, 18 aa, Homo sapiens
TMRIVFPALAPDPYYSVN

SEQ ID NO: 31982 - protein, 20 aa, Homo sapiens
IKSIKTKTEQFQARKKQKVK

SEQ ID NO: 31983 - protein, 14 aa, Homo sapiens
VAGVVLLGSLFSRK

SEQ ID NO: 31984 - protein, 46 aa, Homo sapiens
LWLRHYNRALSPLSKSWEMVIVNASPILEAPGCRGPQLAGCGGSGL

SEQ ID NO: 31985 - protein, 43 aa, Homo sapiens
LKVTYDSFCSNGVTHRNQPRGDCDGVQINVPVSLATRVPIPAC

SEQ ID NO: 31986 - protein, 13 aa, Homo sapiens
LQLPARRKASDFF

SEQ ID NO: 31987 - protein, 28 aa, Homo sapiens
MKNGDVVDKFVGIKDEDQLEAFLKKLIG

SEQ ID NO: 31988 - protein, 249 aa, Homo sapiens
MRRKKSTRGDQAPGHDREAEAAVKEKEEGPEPRLTIDEAPQERLRETEGPDFPSPSVPLKASDPEEASQAQEDPGQGDQQVCAEEADPELEPASGGEQEPRPQQAQVGGSGPWLLSTSGADSGRGALLPRAASRPRPRALGAGVGKEGAPRHLPPLQTKAASQILENGEEAPGPDPSLDRMLSSSSSVSSLNSSTLSGSQMSLSGDAEAVQVRGSVHFALHYEPGAAELRVHVIQCQGLAAARRRRSDP

SEQ ID NO: 31989 - protein, 1163 aa, Homo sapiens
MKLSQIKEKLLPLQGQLWHHWCKKDKELYHLREKGNQSIEQHKSEIETDKQIIRHEQLARALPLNDLMQSVLQFLQEHSEIHTKLYFLQWLSVFLDKLTAGHLEELHEKQKYWWSLVQTVKQKAPNSHSLICLQSEIEAISTEISDCTLGIEQLIREVGQIYEALEEASSIKKIFFSLPQIAADLMISGVPIELMDGDAAYVPLTWVAAVFDKVSEKLGDKRLFVLSILGLQSSGKSTVLNALFGLQFTVSAGKCTQGAYMQLLKVEETFTEELGFDFVLAVDTEGLRAPEHSNKSKDRDNELVTFVIGLANLTLINIFGENPSEMQDILQIVVQAFLRMKQVKIFPSCLFVHQNVGEATATDQTMDGRRRLEQKLDEMAAIAAEQEQCLDVTCFSDVIRFDVNTHVYYFAHLWDGNPPMAPPNPRYSHNVQQLKSRILMTATQESRGNIMKISDVKSRVQDLWRGLMNENFIFSFRNTQEVMAMNKLETMYNHWTWELRSHVLGLQNQLINQIQNGKIQTLEASTFEVLVTEKYEVVKQELEKYFNEGPCSKILIQCKANFENKLIVLKEKLISDSKRQANELISFKNQSQERLNKKKTDYEKELLEKSRKLALTVKGKELSEEELHEKFNQLWKKWVCDVSTTLPQVTEPDIDLDSENILWEYFKNKTNVVGLLTNSAEKFQINYDKHIKVNKKYNHIPMTLTVFEKEFINMTTDYIVSRFNKIINNMWKQQCGYNPNYFHEILKTIEEEVKSASTQKRYTFTNTFIIDLCVCLFQRARENFKEMHRAFKRANDPVNYLESKKDDFFTSFKISCQGATSIKTFVDVLWYKLTPAVSTTIWEDMTFKIAGDMRATCPAFNGNRTNLEKHILFSLAEEENFDNYWEYLHNSKSFFRSYIKNHIKRYCSDNGGEKMKTFFEKSLIDIKNTILSAIHESTSVAKDKSSTASEWLDLFCDCLGCNLIFPRRDLISIEHQEIKHTEFLKEAMSAALDLTMKKIEQNYSSKPIEAMVSKIEKMLSEHLCGCWKQCPSCGAICTNTIPTHEGDHSVPFHRPQAVNGEEWYETDDFVIDCCTSLVASDCLLVLRDGRNFPFKNYRQAGGDYAMWSITPDTSIQLYWKWFVSHFRSNLEEKYQKKFAGKGKIPNAWAKITKQDVLEDLKKQ

SEQ ID NO: 31990 - protein, 141 aa, Homo sapiens
MVKELQEIRLEPQEVPRGSEPWKQQLTEDGDSFLHLAIIHEEKALTMEVIRQVKGDLAFLNFQNNLQQTPLHLAVITNQPEIAEALLGAGCDPELRDFRGNTPLHLACEQGCLASVGVLTQSCTTPHLHSILKATNYNGAL

SEQ ID NO: 31991 - protein, 95 aa, Homo sapiens
MHAHSASLWVAFFYRSPFLFFTTGPPPPTSSSPAGLPLLESTVDASRPNWLPLLLSPPLPFLSIECTLYNFSGIVIENKIFTIITGFFQVTSCRL

SEQ ID NO: 31992 - protein, 146 aa, Homo sapiens
MVLLPQITEDAIAANLRKRFMDDYIFTYIGSVLISVNPFKQMPYFTDREIDLYQGAAQYENPPHIYALTDNMYRNMLIDCENQCVIISGESGAGKTVAAKYIMGYISKVSGGGEKVQVRRGKQKDKLGRPHLHGSAAPPICTPASV

SEQ ID NO: 31993 - protein, 648 aa, Homo sapiens
MGATPTPFKSTGDIAGTVVPETNKEPRYQEDPPAPQPKAAPRTFLRPSPEDEAIYGPNTKMVRFKKGDSVGLRLAGGNDVGIFVAGIQEGTSAEQEGLQEGDQILKVNTQDFRGLVREDAVLYLLEIPKGEMVTILAQSRADVYRDILACGRGDSFFIRSHFECEKETPQSLAFTRGEVFRVVDTLYDGKLGNWLAVRIGNELEKGLIPNKSRAEQMASVQNAQRDNAGDRADFWRMRGQRSGVKKNLRKSREDLTAVVSVSTKFPAYERVLLREAGFKRPVVLFGPIADIAMEKLANELPDWFQTAKTEPKDAGSEKSTGVVRLNTVRQIIEQDKHALLDVTPKAVDLLNYTQWFPIVIFFNPDSRQGVKTMRQRLNPTSNKSSRKLFDQANKLKKTCAHLFTATINLNSANDSWFGSLKDTIQHQQGEAVWVSEGKMEGMDDDPEDRMSYLTAMGADYLSCDSRLISDFEDTDGEGGAYTDNELDEPAEEPLVSSITRSSEPVQHEEAKTQNKEESYDFSKSYEYKSNPSAVAGNETPGASTKGYPPPVAAKPTFGRSILKPSTPIPPQEGEEVGESSEEQDNAPKSVLGKVKIFEKMDHKARLQRMQELQEAQNARIEIAQKHPDIYAVPIKTHKPDPGTPQHTR

SEQ ID NO: 31994 - protein, 42 aa, Homo sapiens
MYIPQTFTQTSETAMVQVQGESPAWEFVGQEVLLKGPVSRGQ

SEQ ID NO: 31995 - protein, 16 aa, Homo sapiens
RWFFSGRSLSIAFRMC

SEQ ID NO: 31996 - protein, 118 aa, Homo sapiens
LRDENYYQLEELAFRVMRLQDELVTLRLECTNLYRKGHFTSLELVPPSTLTTTHLKAEPLTKATHSSSTSWFRKPMTRAELVAISSSEDEGNLRFVYELLSWVEEMQVGAYPKAYAVH

SEQ ID NO: 31997 - protein, 30 aa, Homo sapiens
IPPFPSKEEGSFPGGNSEEIRSCRRKTQVP

SEQ ID NO: 31998 - protein, 55 aa, Homo sapiens
KDGKQLPNSYNLEKITVNSVSRDNSKYHCTAYRKFYILDIEVTSKPLNIQVQGNG

SEQ ID NO: 31999 - protein, 31 aa, Homo sapiens
MASCPDSDNSWVLAGSEGRSSRLKALSLAAF

SEQ ID NO: 32000 - protein, 87 aa, Homo sapiens
IQLLMSEPNPDDPLMADISSEFKYNKPAFLKNARQWTEKHARQKQKADEEEMLDNLPEAGDSRVHNSTQKRKASQLVGIEKKFHPDV

SEQ ID NO: 32001 - protein, 57 aa, Homo sapiens
RLLITHSFRNLMMQMKIMEEIRALPLRKFDHLPEKLKIRGDLERIHRKIVRTQKTKM

SEQ ID NO: 32002 - protein, 29 aa, Homo sapiens
VQPNSEEKRGGKGLDFHIGTTFFPVLKDL

SEQ ID NO: 32003 - protein, 32 aa, Homo sapiens
TRRATTRRRASSRATCSWPSATTRSSTSCWAA

SEQ ID NO: 32004 - protein, 129 aa, Homo sapiens
KQRYPRARRGKSASGCSSKELSRLGGPETSGRVPEPTFASLSCVLGFSTAVKTRRRRRATQEKKDVRSASLAPVVELGRARAAAAGRPLPLAAEEGTSRRSPGGQDPPPAGHCRVRTDPLRGESRCSGK

SEQ ID NO: 32005 - protein, 31 aa, Homo sapiens
RRLFENLVVNIHLFKSYFIFKLKLLKNTLIP

SEQ ID NO: 32006 - protein, 74 aa, Homo sapiens
MALKTALSLCMPLSSSSCHHRLILRWIPASSTTMCSEHVEEKKQLYLLVSFCLSSWTLTFSETQQSLQWSVGPP

SEQ ID NO: 32007 - protein, 25 aa, Homo sapiens
IPLLNLILSFRKPRSSTLTVVLEET

SEQ ID NO: 32008 - protein, 71 aa, Homo sapiens
VSTLPTSLAVGLSWEGGRRAPGVRTRPPAVPVCARVILTRDAGTVFKSQGRVSACPRTSCLYISPFTAPTI

SEQ ID NO: 32009 - protein, 109 aa, Homo sapiens
IHYAKTAKKMDMKKLKQSMWSLLTALSGKEADAEANHREAGKEAALAEVADEKMLSGLTKDLQRSLPPVMAQNLSIPLAFACLLHLANEKNLKLEGTEDLSDVLVRQGD

SEQ ID NO: 32010 - protein, 100 aa, Homo sapiens
VRTSGCVYLLQVPSEPSHLVLWKKHRLLSSDPGNLSNLCRLLASSIQNPLSSLPPLTPSAVLPSHENKVSSKILAAAASSLVDLRGGCQWHAGVSCVVLQ

SEQ ID NO: 32011 - protein, 37 aa, Homo sapiens
IGSTLSKMQLTDCQRIQVVHQETWNYSKSKDPLALNC

SEQ ID NO: 32012 - protein, 102 aa, Homo sapiens
MCFTCSVCLVCWEPTDEPWSEHERHSPNCPFVKGEHTQNVPLSVTLATSPAQFPCTDGTDRISCFGSGSCPHFLAAATKRGKICIWDVSKLMKVCLNFEVTN

SEQ ID NO: 32013 - protein, 43 aa, Homo sapiens
LHYVEKPSTFISDIINCGIYLFSPEALKPLRDVFQRNQQDGQL

SEQ ID NO: 32014 - protein, 20 aa, Homo sapiens
IAAGGGGGVTSGQPRNPTIL

SEQ ID NO: 32015 - protein, 7 aa, Homo sapiens
MTQLVGG

SEQ ID NO: 32016 - protein, 156 aa, Homo sapiens
RSAPRFSPSPLPHSAGPSRRPAPLHSPSPLAPRQTFGPSPPLARYSSWLKPGHAAPRAPPDLPACRSGHCGIQKHVDHTSVRLLRCRLLVQDREIPGQPQPEQHAGQEGGGDACGRRPQLGLRAGIPPTALGQQPACTRPPRAQPRQLLAQVPGRR

SEQ ID NO: 32017 - protein, 48 aa, Homo sapiens
IFTMSGALDVLQMKEEDVLKFLAAGTHLGGTNLDFQMEQYIYKRKSDG

SEQ ID NO: 32018 - protein, 30 aa, Homo sapiens
RGFQRAQTQRNICGETPEALSRAVLIQTLR

SEQ ID NO: 32019 - protein, 80 aa, Homo sapiens
KDALEGEKNIAIEFLTLENEIFRKKNHVCQYYIYELQKRIAEMETQKEKIHEDTKEINEKSNILSNEMKAKNKDVKDTEK

SEQ ID NO: 32020 - protein, 22 aa, Homo sapiens
IDFTADQVVSMIRNWVLNIKVS

SEQ ID NO: 32021 - protein, 48 aa, Homo sapiens
IYTVQTVQIFWSVYNNIPPVTSLPLRCSYHLMRGERRPLCPQFGKSCC

SEQ ID NO: 32022 - protein, 883 aa, Homo sapiens
LHHPSSSSASSCCCCRTSSPQDFSKRQQQQLSSQKRKEFSPPHLPHPPDSKPPPPPPPLHCPGRFSPPPPPAGPLLQPAQLAQRQQQQPPQQFSLLHQQHLSPQDFAPRQRPADLPPLPQLPPSPPAAPRRRHGGAGSPRKTPAAGEGSAAESPNAGLASSTPVNPAPGSMESPNHPLLNSPSNLLPGGALGAGAFSSLQSPDLPHPGGGGGGGGGGPPGGGGGGGSASPPPLPGFGTPWSVQTASPPPQPQQPPPTQPQQQPPPPQQPPQPQPQPPGSSATTPGGGSGGSLSAMPPPSPDSENGFYPGLPSSMNPAFFPSFSPVSPHGCTGLSVPTSGGGGGGFGGPFSATAVPPPPPPAMNIPQQQPPPPAAPQQPQSRRSPVSPQLQQQHQAAAAAFLQQRNSYNHHQPLLKQSPWSNHQSSGWGTGSMSWGAMHGRDHRRTGNMGIPGTMNQISPLKKPFSGNVIAPPKFTRSTPSLTPKSWIEDNVFRTDNNSNTLLPLQVRSSLQLPAWGSDSLQDSWCTAAGTSRIDQDRSRMYDSLNMHSLENSLIDIMRAEHDPLKGRLSYPHPGTDNLLMLNGRSSLFPIDDGLLDDGHSDQVGVLNSPTCYSAHQNGERIERFSRKVFVGGLPPDIDEDEITASFRRFGPLVVDWPHKAESKSYFPPKGYAFLLFQEESSVQALIDACIEEDGKLYLCVSSPTIKDKPVQIRPWNLSDSDFVMDGSQPLDPRKTIFVGGVPRPLRAVELAMIMDRLYGGVCYAGIDTDPELKYPKGAGRVAFSNQQSYIAAISARFVQLQHGDIDKRVEVKPYVLDDQMCDECQGARCGGKFAPFFCANVTCLQYYCEFCWANIHSRAGREFHKPLVKEGADRPRQIHFRWN

SEQ ID NO: 32023 - protein, 910 aa, Homo sapiens
LDHKMDMEYMGSGKLGQILKQIWRQNQMLKQALLGDDLCEGAGGATWMATVVFLGQELSSALHQLLEHTSGTLRSTCQQLHVLLDKENQCVSRKEIITFIDCLIKITEHLGSTAALLKKEEKEICNLCGMHDECTPQQTMSSIQDTKAADIAARGELNVIETATVSPTNGEESHYTNQVQLEKNKTHMSSALVEKENNTSLNGRVLGQEESQNKMFPDNAENEDDKQIEHMTVENINGNREETHGIIQTTETEIQETSESPREEMTTSSIICDISKKYINSTLPNDSENIKHKNNIMEKEYLDVLSDVTGPQVSCYITAPSYVLQQLECRIINHMSSLIVGDNEELVSNVITIECSDKEKRVPFPIGIAIPFTARYRGNYRDIMVKVCDINLQSSYLNPNSLEGMKGGYKGTCASVKVYKLGIFSVVSCLKKESFTVTKKGLALKSSMDSRISLNYPPGVFTSPVLVQLKIQPVDPALVAHLKAQQDTFYSVQSTSPLIHIQHPSTYPFQKPVTLFLPCSPYLDKNNLGSEIDHKRRASATINRITPSYFNRTKIASIRKPRKNASECLKLLGFRSQDSGWCGLDDVVKTIQSGLVSVELYEHLERFIVLHLSSTMDNSHLVTFVKSLEEAMLSTTACIVLSHQKDNPHRIAVLVVPSKDLSQVLKDLHLEGFGGPPEPSRHFQVREGEQLLLRFTGNIFASSNGKDYGKDYTLIFHLQRKPRLELQIKEVDEFGNYSCPHYKGTIVVYKVPKGKIVPNLNQSLVINENHSQLPICKLPLKLPKHKKLINRPQSTKRVSKDPVEALWDNLLHWLAEELSEENAESLSSTLPLRRSTIQLIKLKNPDDLTEQIHEFLCFWKKSLPTFTDKLRLLARHLRKIGRSDLAEELKFKWENKVFTEPQQCFDVAPE

SEQ ID NO: 32024 - protein, 42 aa, Homo sapiens
LGYTWHDTCFVCSVCCESLEGQTFFSKKDKPLCKKHAHSVNF

SEQ ID NO: 32025 - protein, 31 aa, Homo sapiens
LPAKTLFLANFSFSSPPPRPPSSAPPPSLAD

SEQ ID NO: 32026 - protein, 56 aa, Homo sapiens
LTLPWRARASAFSLLFFLKKVSLCREHICINIGQLYVSIRKIIIGKHVLELVTKII

SEQ ID NO: 32027 - protein, 14 aa, Homo sapiens
LNLMKYMYFMVRIL

SEQ ID NO: 32028 - protein, 31 aa, Homo sapiens
LPLAECVESCSGVRYSVFDRGGLRGTRCSEL

SEQ ID NO: 32029 - protein, 66 aa, Homo sapiens
LSVSPEKRHAWRITTSARPSLRGRSRRPCAYCYPGNWPSTPCPRAPRPSPSIPAPSEPLAAVTVPP

SEQ ID NO: 32030 - protein, 57 aa, Homo sapiens
MSSQQLQQQPSANKKAGKIHNTPFANQLNPTQHLAKPFQQILPGRQSGSLTSPFLAC

SEQ ID NO: 32031 - protein, 41 aa, Homo sapiens
LLPPPRSAAAYLWPLSRKRWQPLAMTWRRTTAASSWVSRAW

SEQ ID NO: 32032 - protein, 45 aa, Homo sapiens
ILSKWLPQTHPWPEVDFSTTHWKKYTYLSFATSSEGQSLSFQTKC

SEQ ID NO: 32033 - protein, 14 aa, Homo sapiens
MLLPFYLTKSSASG

SEQ ID NO: 32034 - protein, 50 aa, Homo sapiens
LSFLGRQKHVGDCSTCSYHSCTRRKNTCEEKGEEGRRNCWETQSIRTPSI

SEQ ID NO: 32035 - protein, 33 aa, Homo sapiens
RELRIKSAESSTSLWIKRDVWMKLQSQEEAREN

SEQ ID NO: 32036 - protein, 18 aa, Homo sapiens
LRSFKHKGKKFRPTAKPS

SEQ ID NO: 32037 - protein, 67 aa, Homo sapiens
IKFQEMKMQEHSDQVPVGNIPRSITVLVEGENTRIAQPGDHVSVTGIFLPILRTGFRQVVQVRKSLT

SEQ ID NO: 32038 - protein, 33 aa, Homo sapiens
LFSVSSRLGAVPLLRQEDGGRKEDEKVAGVDQL

SEQ ID NO: 32039 - protein, 550 aa, Homo sapiens
IFEGTDTHWTFRQLDEYSSSVANFLQARGLASGDVAAIFMENRNEFVGLWLGMAKLGVEAALINTNLRRDALLHCLTTSRARALVFGSEMASAICEVHASLDPSLSLFCSGSWEPGAVPPSTEHLDPLLKDAPKHLPSCPDKGFTDKLFYIYTSGTTGLPKAAIVVHSRYYRMAALVYYGFRMRPNDIVYDCLPLYHSAGNIVGIGQCLLHGMTVVIRKKFSASRFWDDCIKYNCTIVQYIGELCRYLLNQPPREAENQHQVRMALGNGLRQSIWTNFSSRFHIPQVAEFYGATECNCSLGNFDSQVGACGFNSRILSFVYPIRLVRVNEDTMELIRGPDGVCIPCQPGEPGQLVGRIIQKDPLRRFDGYLNQGANNKKIAKDVFKKGDQAYLTGDVLVMDELGYLYFRDRTGDTFRWKGENVSTTEVEGTLSRLLDMADVAVYGVEVPGTEGRAGMAAVASPTGNCDLERFAQVLEKELPLYARPIFLRLLPELHKTGTYKFQKTELRKEGFDPAIVKDPLFYLDAQKGRYVPLDQEAYSRIQAGEEKL

SEQ ID NO: 32040 - protein, 25 aa, Homo sapiens
IFATYPSGHLDMINGFFDQVWAGDV

SEQ ID NO: 32041 - protein, 27 aa, Homo sapiens
MNANFVLSMRSVWPQKLLLTLWVKNGR

SEQ ID NO: 32042 - protein, 122 aa, Homo sapiens
LGSARYSTPVDIWSIGTIFAELATKKPLFHGDSEIDQLFRIFRALGTPNNEVWPEVESLQDYKNTFPKWKPGSLASHVKNLDENGLDLLSKMLIYDPAKRISGKMALNHPYFNDLDNQIKKM

SEQ ID NO: 32043 - protein, 545 aa, Homo sapiens
LGPTMMSWNAVEKLCAKSANAIETKGFNKKDLELALSPIHNSSALPTTGRSCVNLAKKCFSGEVSWEAVELDVNNINMDTDTSQLGFHQSNQWAVDSGGISEEHLGKRSLKRNFELVDSSPCKKIIQNKKTCVEYKHNEMTNCYTNQNTGLTVEVQDLKLSVHKSQQNDCANKENIVNSFTDKQQTPEKLPIPMIAKNLMCELDEDCEKNSKRDYLSSSFLCSDDDRASKNISMNSDSSFPGISIMESPLESQPLDSDRSIKESSFEESNIEDPLIVTPDCQEKTSPKGVENPAVQESNQKMLGPPLEVLKTLASKRNAVAFRSFNSHINASNNSEPSRMNMTSLDAMDISCAYSGSYPMAITPTQKRRSCMPHQTPNQIKSGTPYRTPKSVRRGVAPVDDGRILGTPDYLAPELLLGRAHGPAVDWWALGVCLFEFLTGIPPFNDETPQQVFQNILKRDIPWPEGEEKLSDNAQSAVEILLTIDDTKRAGMKELKRHPLFSDVDWENLQHQTMPFIPQPDDETDTSYFEARNTAQHLTVSGFSL

SEQ ID NO: 32044 - protein, 10 aa, Homo sapiens
VMKKMLGLRK

SEQ ID NO: 32045 - protein, 48 aa, Homo sapiens
KENAVETNFVDRETVGTALQSILTAHLRILTIRTHISLQEASWPSQTT

SEQ ID NO: 32046 - protein, 39 aa, Homo sapiens
VDRETVGTALQSILTAHLRILTIRTHISLQEASWPSQTT

SEQ ID NO: 32047 - protein, 951 aa, Homo sapiens
IDKDFGYLILYPDMLISGTSIASSIRCMRRAVLSETFRSSDPATRQMLIGTVLHEVFQKAINNSFAPEKLQELAFQTIQEIRHLKEMYRLNLSQDEIKQEVEDYLPSFCKWAGDFMHKNTSTDFPQMQLSLPSDNSKDNSTCNIEVVKPMDIEESIWSPRFGLKGKIDVTVGVKIHRGYKTKYKIMPLELKTGKESNSIEHRSQVVLYTLLSQERRADPEAGLLLYLKTGQMYPVPANHLDKRELLKLRNQMAFSLFHRISKSATRQKTQLASLPQIIEEEKTCKYCSQIGNCALYSRAVEQQMDCSSVPIVMLPKIEEETQHLKQTHLEYFSLWCLMLTLESQSKDNKKNHQNIWLMPASEMEKSGSCIGNLIRMEHVKIVCDGQYLHNFQCKHGAIPVTNLMAGDRVIVSGEERSLFALSRGYVKEINMTTVTCLLDRNLSVLPESTLFRLDQEEKNCDIDTPLGNLSKLMENTFVSKKLRDLIIDFREPQFISYLSSVLPHDAKDTVACILKGLNKPQRQAMKKVLLSKDYTLIVGMPGTGKTTTICTLVRILYACGFSVLLTSYTHSAVDNILLKLAKFKIGFLRLGQIQKVHPAIQQFTEQEICRSKSIKSLALLEELYNSQLIVATTCMGINHPIFSRKIFDFCIVDEASQISQPICLGPLFFSRRFVLVGDHQQLPPLVLNREARALGMSESLFKRLEQNKSAVVQLTVQYRMNSKIMSLSNKLTYEGKLECGSDKVANAVINLRHFKDVKLELEFYADYSDNPWLMGVFEPNNPVCFLNTDKVPAPEQVEKGGVSNVTEAKLIVFLTSIFVKAGCSPSDIGIIAPYRQQLKIINDLLARSIGMVEVNTVDKYQGRDKSIVLVSFVRSNKDGTVGELLKDWRRLNVAITRAKHKLILLGCVPSLNCYPPLEKLLNHLNSEKLIIDLPSREHESLCHILGDFQRE

SEQ ID NO: 32048 - protein, 49 aa, Homo sapiens
RRGVTAAEEEVLRDTRGWTRQGNTRPTTAGDKIAQPHPAVQRLPACAPS

SEQ ID NO: 32049 - protein, 725 aa, Homo sapiens
KSFSAMEDDQRTRPEVSKDTVMKQTHADTPVDHCLSGIRKCSSTFKLKSEVNKHETALEMQNPNLNNKECCFTFTLNGNSRKLDRSVFTAYGKPSESIYSALSANDYFSERIKNQFNKNIIVYEEKTIDGHINLGMPLKCLPSDSHFKITFGQRKSSKEDGHILRQCENPNMECILFHVVAIGRTRKKIVKINELHEKGSKLCIYALKGETIEGALCKDGRFRSDIGEFEWKLKEGHKKIYGKQSMVDEVSGKVLEMDISKKKALQQKDIHKKIKQNESATDEINHQSLIQSKKKVHKPKKDGETKDVEHSREQILPPQDLSHYIKDKTRQTIPRIRNYYFCSLPRKYRQINSQVRRRPHLGRRYAINLDVQKEAINLLKNYQTLNEAIMHQYPNFKEEAQWVRKYFREEQKRMNLSPAKQFNIYKKDFGKMTANSVSVATCEQLTYYSKSVGFMQWDNNGNTGNATCFVFNGGYIFTCRHVVHLMVGKNTHPSLWPDIISKCAKVTFTYTEFCPTPDNWFSIEPWLKVSNENLDYAILKLKENGNAFPPGLWRQISPQPSTGLIYLIGHPEGQIKKIDGCTVIPLNERLKKYPNDCQDGLVDLYDTTSNVYCMFTQRSFLSEVWNTHTLSYDTCFSDGSSGSPVFNASGKLVALHTFGLFYQRGFNVHALIEFGYSMDSILCDIKKTNESLYKSLNDEKLETYDEEKGKQESSLQDHQIEPMEC

SEQ ID NO: 32050 - protein, 42 aa, Homo sapiens
LRVVRRNCSQLLWQLQNIQETVVALYFQRTDDSLGLGLKTMV

SEQ ID NO: 32051 - protein, 20 aa, Homo sapiens
KINVMIGQEIIQLFTRPLIF

SEQ ID NO: 32052 - protein, 45 aa, Homo sapiens
IFKTWTLGLAPGHLSLYQDSTSVLPTSSSDSWYPLGWRLLIFLPN

SEQ ID NO: 32053 - protein, 39 aa, Homo sapiens
LNYFNCKFISIIRKEPKPKKKVLMNQQNGEVFYTTYMIC

SEQ ID NO: 32054 - protein, 469 aa, Homo sapiens
ITAPQPAAPVGASAPPPTPPRPEPKEAATSTLSSSTSNGTDSTQTSGWQYDTQCSLAGVGIEMGDWQEVWDENTGCYYYWNTQTNEVTWELPQYLATQVQGLQHYQPSSVPGAETSFVVNTDIYSKEKTISVSSSKSGPVIAKREVKKEVNEGIQALSNSEEEKKGVAASLLAPLLPEGIKEEEERWRRKVICKEEPVSEVKETSTTVEEATTIVKPQEIMLDNIEDPSQEDLCSVVQSGESEEEEEQDTLELELVLERKKAELRALEEGDGSVSGSSPRSDISQPASQDGMRRLMSKRGKWKMFVRATSPESTSRSSSKTGRDTPENGETAIGAENSEKIDENSDKEMEVEESPEKIKVQTTPKVEEEQDLKFQIGELANTLTSKFEFLGINRQSISNFHVLLLQTETRIADWREGALNGNYLKRKLQDAAEQLKQYEINATPKGWSCHWDRYALFSPFHLSPLTSQT

SEQ ID NO: 32055 - protein, 31 aa, Homo sapiens
RRGRAKTMALVDIQLDHHERCDCICSSRPPR

SEQ ID NO: 32056 - protein, 53 aa, Homo sapiens
KKMFQTVPQMPVLWSRRPRSLASEDVKRKQLELRICFLVYQIHHCLMKQGRYT

SEQ ID NO: 32057 - protein, 20 aa, Homo sapiens
IMTLHVMDQLTPSRSVNWFI

SEQ ID NO: 32058 - protein, 64 aa, Homo sapiens
KMLGEALSKNPGYIKLRKIRAAQNISKTIATSQNRIYLTADNLVLNLQDESFTRGSDSLIKGKK

SEQ ID NO: 32059 - protein, 28 aa, Homo sapiens
LDFLLPCFQAVGGYRGREVGSAETWIWF

SEQ ID NO: 32060 - protein, 24 aa, Homo sapiens
TRGSASVLYQHFCLQHCTSSATSS

SEQ ID NO: 32061 - protein, 58 aa, Homo sapiens
KTKVVVRPSRPLFLSAFRPVRKPGVAAPPSGPRRRAPAAPGRPRTPPPCIPSTPGPPP

SEQ ID NO: 32062 - protein, 33 aa, Homo sapiens
VDCAVTVEISPVLPLRRWDLTKGNVREILMAQV

SEQ ID NO: 32063 - protein, 97 aa, Homo sapiens
RTAAAPCPPTSHLLEIALHALCRPPLMPPHPPPGGPHAAHHPLPQCCPCSPAAQPSPLCSLLLPPPLPVLCPPLPQCLPPTSHPMPQVPQTIRTSRP

SEQ ID NO: 32064 - protein, 22 aa, Homo sapiens
IVNTNFLPQKCSTCKNRKSSYS

SEQ ID NO: 32065 - protein, 40 aa, Homo sapiens
TDAGTSTRSRLLDLGTLTRFLWGTAEDYFEFRWSPVVWHI

SEQ ID NO: 32066 - protein, 13 aa, Homo sapiens
IRPGFSLLVRNSL

SEQ ID NO: 32067 - protein, 53 aa, Homo sapiens
IFGKVSILYSKNMNLKLNPLKAPYNEVDIGGNIYKYLGTGLQSKHRFPLPLNI

SEQ ID NO: 32068 - protein, 83 aa, Homo sapiens
LPAVFKAPIRPDIVNFVHTNLRKNNRQPYAVSELAGHQTSAESWGTGRAVARIPRVRGGGTHRSGQGAFGNVSFVSLPKTGHL

SEQ ID NO: 32069 - protein, 442 aa, Homo sapiens
TAPRPPAAASPRPQPREKMSVGCPEPEPPRSLTCCGPGTAPGPGAGVPLLTEDMQALTLRTLAASDVTKHYELVRELGKGTYGKVDLVVYKGTGTKMALKFVNKSKTKLKNFLREVSITNSLSSSPFIIKVFDVVFETEDCYVFAQEYAPAGDLFDIIPPQVGLPEDTVKRCVQQLGLALDFMHGRQLVHRDIKPENVLLFDRECRRVKLADFGMTRRVGCRVKRVSGTIPYTAPEVCQAGRADGLAVDTGVDVWAFGVLIFCVLTGNFPWEAASGADAFFEEFVRWQRGRLPGLPSQWRRFTEPALRMFQRLLALEPERRGPAKEVFRFLKHELTSELRRRPSHRARKPPGDRPPAAGPLRLEAPGPLKRTVLTESGSGSRPAPPAVGSVPLPVPVPVPVPVPVPVPEPGLAPQGPPGRTDGRADKSKGQVVLATAIEICV

SEQ ID NO: 32070 - protein, 7 aa, Homo sapiens
LWTDQKT

SEQ ID NO: 32071 - protein, 29 aa, Homo sapiens
MKTEFLHVKRSCHLRTWKGQMKFALLAPL

SEQ ID NO: 32072 - protein, 13 aa, Homo sapiens
ISSTDPGAEEGAV

SEQ ID NO: 32073 - protein, 30 aa, Homo sapiens
LVSGSSGFTQEVHHPVVSSVFAIMQQSMQF

SEQ ID NO: 32074 - protein, 1354 aa, Homo sapiens
ISPAKDTSLQQRTPAEMSPVLHFYVRPSGHEGAAPGHTRRKLQGKLPELQGVETELCYNVNWTAEALPSAEETKKLMWLFGCPLLLDDVARESWLLPGSNDLLLEVGPRLNFSTPTSTNIVSVCRATGLGPVDRVETTRRYRLSFAHPPSAEVEAIALATLHDRMTEQHFPHPIQSFSPESMPEPLNGPINILGEGRLALEKANQELGLALDSWDLDFYTKRFQELQRNPSTVEAFDLAQSNSEHSRHWFFKGQLHVDGQKLVHSLFESIMSTQESSNPNNVLKFCDNSSAIQGKEVRFLRPEDPTRPSRFQQQQGLRHVVFTAETHNFPTGVCPFSGATTGTGGRIRDVQCTGRGAHVVAGTAGYCFGNLHIPGYNLPWEDPSFQYPGNFARPLEVAIEASNGASDYGNKFGEPVLAGFARSLGLQLPDGQRREWIKPIMFSGGIGSMEADHISKEAPEPGMEVVKVGGPVYRIGVGGGAASSVQVQGDNTSDLDFGAVQRGDPEMEQKMNRVIRACVEAPKGNPICSLHDQGAGGNGNVLKELSDPAGAIIYTSRFQLGDPTLNALEIWGAEYQESNALLLRSPNRDFLTHVSARERCPACFVGTITGDRRIVLVDDRECPVRRNGQGDAPPTPLPTPVDLELEWVLGKMPRKEFFLQRKPPMLQPLALPPGLSVHQALERVLRLPAVASKRYLTNKVDRSVGGLVAQQQCVGPLQTPLADVAVVALSHEELIGAATALGEQPVKSLLDPKVAARLAVAEALTNLVFALVTDLRDVKCSGNWMWAAKLPGEGAALADACEAMVAVMAALGVAVDGGKDSLSMAARVGTETVRAPGSLVISAYAVCPDITATVTPDLKHPEGRGHLLYVALSPGQHRLGGTALAQCFSQLGEHPPDLDLPENLVRAFSITQGLLKDRLLCSGHDVSDGGLVTCLLEMAFAGNCGLQVDVPVPRVDVLSVLFAEEPGLVLEVQEPDLAQVLKRYRDAGLHCLELGHTGEAGPHAMVRVSVNGAVVLEEPVGELRALWEETSFQLDRLQAEPRCVAEEERGLRERMGPSYCLPPTFPKASVPREPGGPSPRVAILREEGSNGDREMADAFHLAGFEVWDVTMQDLCSGAIGLDTFRGVAFVGGFSYADVLGSAKGWAAAVTFHPRAGAELRRFRKRPDTFSLGVCNGCQLLALLGWVGGDPNEDAAEMGPDSQPARPGLLLRHNLSGRYESRWASVRVGPGPALMLRGMEGAVLPVWSAHGEGYVAFSSPELQAQIEARGLAPLHWADDDGNPTEQYPLNPNGSPGGVAGICSCDGRHLAVMPHPERAVRPWQWAWRPPPFDTLTTSPWLQLFINARNWTLEGSC

SEQ ID NO: 32075 - protein, 13 aa, Homo sapiens
KRDSQLSISTGHS

SEQ ID NO: 32076 - protein, 81 aa, Homo sapiens
KRLASSVLRCGKKKVWLDPNETNEIANANSRQQIRKLIKDGLIIRKPVTVHSRARCRKNTLARRKGRHMGIGKCGHLLLKK

SEQ ID NO: 32077 - protein, 39 aa, Homo sapiens
MRPAASAPSQLWYSKPKEASKSVLIPVNPGSRSTCMTWN

SEQ ID NO: 32078 - protein, 6 aa, Homo sapiens
LSSDWM

SEQ ID NO: 32079 - protein, 35 aa, Homo sapiens
MPGSSRRLHHGTRRPRWTSATWGLTPSWSRCAGRP

SEQ ID NO: 32080 - protein, 37 aa, Homo sapiens
RRSTSTARSASRTPASTAASTSSPPPATPSGPWTSSL

SEQ ID NO: 32081 - protein, 35 aa, Homo sapiens
RRGSTSNSGSPQTCCPTASTCTPRRNLMRTRRTGW

SEQ ID NO: 32082 - protein, 50 aa, Homo sapiens
KDGDFDSGPAPRDAVAAAVRRPRSSCSRRRADPRWLRAPWSPTASFPPPG

SEQ ID NO: 32083 - protein, 16 aa, Homo sapiens
TKTTTATATPKHSFRG

SEQ ID NO: 32084 - protein, 14 aa, Homo sapiens
RIMLYLKNTTSQRK

SEQ ID NO: 32085 - protein, 483 aa, Homo sapiens
IQRHMIMHNGDGTYKCKFCGKACPCLSIYLIHERVHTGEKPYKCKQCGKAFSYSTSLQIHERTHTGEKPYECKECGKAFGSPNSLYEHRRTHTGEKPYECKQCGKAFRWFHSFQIHERTHSEEKAYECTKCGKAFKCPSYLCRHEVTHSGKKPCECKQCGKALSYLNFQRHMKMHTRMRPYKCKTVEKPLILPVRFEDMKELTLERNLMNASTVVKPSIVPVPFTIMKGLTLERNPMNVSSVVKPSFLPLPFDIMKGLTLERNRMSVSNVGKPSDLPHTFKCMEGLTLKRNPMNVSSVVKPSFFPLPFDIMKGLTLERNPMSVSNVGKPSHLPHTFKCMKGLTLESNCMNLNNVKKPLDLSETFKFMKRHTLERNPIRNMEKHSTISLPFKYMQQCTEDRMPMNVKSVTKHSYLPRSFEYMQEHTLERNPMNVRNAEKRSIIFLLCVYTKGCTLERNHINVRIVGKHSVCLVPFVDIKGLTLE

SEQ ID NO: 32086 - protein, 13 aa, Homo sapiens
RNPVSPEHWPALL

SEQ ID NO: 32087 - protein, 41 aa, Homo sapiens
LEEFHVSPETAGPAPGRIAVASLPLLHPGGCSPLPPAPGAP

SEQ ID NO: 32088 - protein, 129 aa, Homo sapiens
IRGTSYQSPHGIPIDLLDRLLIVSTTPYSEKDTKQILRIRCEEEDVEMSEDAYTVLTRIGLETSLRYAIQLITAASLVCRKRKGTEVQVDDIKRVYSLFLDESRSTQYMKEYQDAFLFNELKGETMDTS

SEQ ID NO: 32089 - protein, 401 aa, Homo sapiens
LRTAAGWLLPARASPRERATRHPVRSPQRRARRSLQRGPERPRRDPPQTAWAARMCTKMEQPFYHDDSYTATGYGRAPGGLSLHDYKLLKPSLAVNLADPYRSLKAPGARGPGPEGGGGGSYFSGQGSDTGASLKLASSELERLIVPNSNGVITTTPTPPGQYFYPRGGGSGGGAGGAGGGVTEEQEGFADGFVKALDDLHKMNHVTPPNVSLGATGGPPAGPGGVYAGPEPPPVYTNLSSYSPASASSGGAGAAVGTGSSYPTTTISYLPHAPPFAGGHPAQLGLGRGASTFKEEPQTVPEARSRDATPPVSPINMEDQERIKVERKRLRNRLAATKCRKRKLERIARLEDKVKTLKAENAGLSSTAGLLREQVAQLKQKVMTHVSNGCQLLLGVKGHAF

SEQ ID NO: 32090 - protein, 85 aa, Homo sapiens
KQSGVDDMVLLPQITEDAIAANLRKRFMDDYIFTYIGSVLISVNPFKQMPYFTDREIDLYQGAVRLGLGGRHSPQTPGPQPWAET

SEQ ID NO: 32091 - protein, 4103 aa, Homo sapiens
KIFQHAVVIHSDYAISVQALNAKPDTAELTLLRPIQALGTEYFVLTPPGTSARNVKEFAVVAGAAGASVSVTLKGSVTFNGKFYPAGDVLRVTLQPYNVAQLQSSVDLSGSKVTASSPVAVLSGHSCAQKHTTCNHVVEQLLPTSAWGTHYVVPTLASQSRYDLAFVVASQATKLTYNHGGITGSRGLQAGDVVEFEVRPSWPLYLSANVGIQVLLFGTGAIRNEVTYDPYLVLIPDVAAYCPAYVVKSVPGCEGVALVVAQTKAISGLTIDGHAVGAKLTWEAVPGSEFSYAEVELGTADMIHTAEATTNLGLLTFGLAKAIGYATAADCGRTVLSPVEPSCEGMQCAAGQRCQVVGGKAGCVAESTAVCRAQGDPHYTTFDGRRYDMMGTCSYTMVELCSEDDTLPAFSVEAKNEHRGSRRVSYVGLVTVRAYSHSVSLTRGEVGFVLVDNQRSRLPVSLSEGRLRVYQSGPRAVVELVFGLVVTYDWDCQLALSLPARFQDQVCGLCGNYNGDPADDFLTPDGALAPDAVEFASSWKLDDGDYLCEDGCQNNCPACTPGQAQHYEGDRLCGMLTKLDGPFAVCHDTLDPRPFLEQCVYDLCVVGGERLSLCRGLSAYAQACLELGISVGDWRSPANCPLSCPANSRYELCGPACPTSCNGAAAPSNCSGRPCVEGCVCLPGFVASGGACVPASSCGCTFQGLQLAPGQEVWADELCQRRCTCNGATHQVTCRDKQSCPAGERCSVQNGLLGCYPDRFGTCQGSGDPHYVSFDGRRFDFMGTCTYLLVGSCGQNAALPAFRVLVENEHRGSQTVSYTRAVRVEARGVKVAVRREYPGQVLVDDVLQYLPFQAADGQVQVFRQGRDAVVRTDFGLTVTYDWNARVTAKVPSSYAEALCGLCGNFNGDPADDLALRGGGQAANALAFGNSWQEETRPGCGATEPGDCPKLDSLVAQQLQSKNECGILADPKGPFRECHSKLDPQGAVRDCVYDRCLLPGQSGPLCDALATYAAACQAAGATVHPWRSEELCPLSCPPHSHYEACSYGCPLSCGDLPVPEGCESACREGCVCDAGFVLSGDTCVPVGQCGCLHDDRYYPLGQTFYPGPGCDSLCRCREGGEVSCEPSSCGPHETCRPSGGSLGCVAVGSTTCQASGDPHYTTFDGHRFDFMGTCVYVLAQTCGTRPGLHRFAVLQENVAWGNGRVSVTRVITVQVANFTLRLEQRQWKVTVNGVDMKLPVVLANGQIRASQHGSDVVIETDFGLRVAYDLVYYVRVTVPGNYYQLMCGLCGNYNGDPKDDFQKPNGSQAGNANEFGNSWEEVVSDSPCLPPPTCPPGSEGCIPSEECPPELEKKYQKEEFCGLLSSPTGPLSSCHKLVDPQGPLKDCIFDLCLGGGNLSILCSNIHAYVSACQVAGGHVEPWRNETFCPMECPQNSHYELCADTCSLGCSALSAPLQCPDGCAEGCQCDSGFLYNGQACVPIQQCGCYHNGAYYEPEQTVLIDNCRQQCTCHAGKVVVCQEHSCKPGQVCQPSGGILSCVTKDPCHGVTCRPQETCKEQGGQGVCLPNYEATCWLWGDPHYHSFDGRKFDFQGTCNYVLATTGCPGVSTQGLTPFTVTTKNQNRGNPAVSYVRVVTVAALGTNISIHKDEIGKVRVNGVLTALPVSVADGRISVTQGASKALLVADFGLQVSYDWNWRVDVTLPSSYHGAVCGLCGNMDRNPNNDQVFPNGTLAPSIPIWGGSWRAPGWDPLCWDECRGSCPTCPEDRLEQYEGPGFCGPLAPGTGGPFTTCHAHVPPESFFKGCVLDVCMGGGDRDILCKALASYVAACQAAGVVIEDWRAQVGCEITCPENSHYEVCGPPCPASCPSPAPLTTPAVCEGPCVEGCQCDAGFVLSADRCVPLNNGCGCWANGTYHEAGSEFWADGTCSQWCRCGPGGGSLVCTPASCGLGEVCGLLPSGQHGCQPVSTAECQAWGDPHYVTLDGHRFDFQGTCEYLLSAPCHGPPLGAENFTVTVANEHRGSQAVSYTRSVTLQIYNHSLTLSARWPRKLQVDGVFVTLPFQLDSLLHAHLSGADVVVTTTSGLSLAFDGDSFVRLRVPAAYAGSLCGLCGNYNQDPADDLKAVGGKPAGWQVGGAQGCGECVSKPCPSPCTPEQQESFGGPDACGVISATDGPLAPCHGLVPPAQYFQGCLLDACQVQGHPGGLCPAVATYVAACQAAGAQLREWRRPDFCPFQCPAHSHYELCGDSCPGSCPSLSAPEGCESACREGCVCDAGFVLSGDTCVPVGQCGCLHDDRYYPLGQTFYPGPGCDSLCRCREGGEVSCEPSSCGPHETCRPSGGSLGCVAVGSTTCQASGDPHYTTFDGHRFDFMGTCVYVLAQTCGTRPGLHRFAVLQENVAWGNGRVSVTRVITVQVANFTLRLEQRQWKVTVNGVDMKLPVVLANGQIRASQHGSDVVIETDFGLRVAYDLVYYVRVTVPGNYYQLMCGLCGNYNGDPKDDFQKPNGSQAGNANEFGNSWEEVVPDSPCLPPPTCPPGSAGCIPSDKCPPELEKKYQKEEFCGLLSSPTGPLSSCHKLVDPQGPLKDCIFDLCLGGGNLSILCSNIHAYVSACQAAGGHVEPWRNETFCPMECPQNSHYELCADTCSLGCSALSAPLQCPDGCAEGCQCDSGFLYNGQACVPIQQCGCYHNGVYYEPEQTVLIDNCRQQCTCHVGKVVVCQEHSCKPGQVCQPSGGILSCVTKDPCHGVTCRPQETCKEQGGQGVCLPNYEATCWLWGDPHYHSFDGRKFDFQGTCNYVLATTGCPGVSTQGLTPFTVTTKNQNRGNPAVSYVRVVTVAALGTNISIHKDEIGKVRVNGVLTALPVSVADGRISVAQGASKALLVADFGLQVSYDWNWRVDVTLPSSYHGAVCGLCGNMDRNPNNDQVFPNGTLAPSIPIWGGSWRAPGWDPLCWDECRGSCPTCPEDRLEQYEGPGFCGPLSSGTGGPFTTCHAHVPPESFFKGCVLDVCMGGGDRDILCKALASYVAACQAAGVVIEDWRAQVGCEITCPENSHYEVCGPPCPASCPSPAPLTTPAVCEGPCVEGCQCDAGFVLSADRCVPLNNGCGCWANGTYHEAGSEFWADGTCSQWCRCGPGGGSLVCTPASCGLGEVCGLLPSGQHGCQPVSTAECQAWGDPHYVTLDGHRFDFQGTCEYLLSAPCHGPPLGAENFTVTVANEHRGSQAVSYTRSVTLQIYNHSLTLSARWPRKLQVDGVFVALPFQLDSLLHAHLSGADVVVTTTSGLSLAFDGDSFVRLRVPAAYAASLCGLCGNYNQDPADDLKAVGGKPAGWQVGGAQGCGECVSKPCPSPCTPEQQESFGGPDACGVISATDGPLAPCHGLVPPAQYFQGCLLDACQVQGHPGGLCPAVATYVAACQAAGAQLGEWRRPDFCPLQCPAHSHYELCGDSCPVSCPSLSAPEGCESACREGCVCDAGFVLSGDTCVPVGQCGCLHDGRYYPLGEVFYPGPECERRCECGPGGHVTCQEGAACGPHEECRLEDGVQACHATGCGRCLANGGIHYITLDGRVYDLHGSCSYVLAQVCHPKPGDEDFSIVLEKNAAGDLQRLLVTVAGQVVSLAQGQQVTVDGEAVALPVAVGRVRVTAEGRNMVLQTTKGLRLLFDGDAHLLMSIPSPFRGRLCGLCGNFNGNWSDDFVLPNGSAASSVETFGAAWRAPGSSKGCGEGCGPQGCPVCLAEETAPYESNEACGQLRNPQGPFATCQAVLSPSEYFRQCVYDLCAQKGDKAFLCRSLAAYTAACQAAGVAVKPWRTDSFCPLHCPAHSHYSICTRTCQGSCAALSGLTGCTTRCFEGCECDDRFLLSQGVCIPVQDCGCTHNGRYLPVNSSLLTSDCSERCSCSSSSGLTCQAAGCPPGRVCEVKAEARNCWATRGLCVLSVGANLTTFDGARGATTSPGVYELSSRCPGLQNTIPWYRVVAEVQICHGKTEAVGQVHIFFQDGMVTLTPNKGVWVNGLRVDLPAEKLASVSVSRTPDGSLLVRQKAGVQVWLGANGKVAVIVSNDHAGKLCGACGNFDGDQTNDWHDSQEKPAMEKWRAQDFSPCYG

SEQ ID NO: 32092 - protein, 26 aa, Homo sapiens
THRHQGPLTRTNRNRSRRLQLRPKRT

SEQ ID NO: 32093 - protein, 8 aa, Homo sapiens
KSQGTSVL

SEQ ID NO: 32094 - protein, 11 aa, Homo sapiens
VPPSGLSFLML

SEQ ID NO: 32095 - protein, 12 aa, Homo sapiens
KKSFEASELQRS

SEQ ID NO: 32096 - protein, 30 aa, Homo sapiens
MEHLAQLRKKFEEDKQRIELLRAQRKFRPY

SEQ ID NO: 32097 - protein, 44 aa, Homo sapiens
LSSPSTRPPSPPSRPRLHSWRSSWTTRPRSARQPANRCVGPRRS

SEQ ID NO: 32098 - protein, 118 aa, Homo sapiens
KFSAPRHGSLGFLPRKRSSRHRGKVKSFPKDDPSKPVHLTAFLGYKAGMTHIVREVDRPGSKVNKKEVVEAVTIVETPPMVVVGIVGYVETPRGLRTFKTVFAEHISDECKRRFYKNW

SEQ ID NO: 32099 - protein, 60 aa, Homo sapiens
VARAGQKGYHHRTEINKKIYKIGQGYLIKDGKLIKNNASTDYDLSDKSINPLVSNGCSAL

SEQ ID NO: 32100 - protein, 25 aa, Homo sapiens
LLVLPCTILPMTRGLASYCILRTSS

SEQ ID NO: 32101 - protein, 53 aa, Homo sapiens
IIREYTDVYPEIIERACFVLEKKFGIQLKEIDKEEHLYILISTPESLAGILGT

SEQ ID NO: 32102 - protein, 312 aa, Homo sapiens
KEHLQETDVVRAVYRVLKNCPSVALKKKAKCLLSKWKAVYKQTHSKARNSPKLFPVRGNKEENSGPSHDPSQNETLGICSSNSLSSQDVAKLSEMIVPENRAIQLKPKEEHFGDGDPESTGKRSSELLDPTTPMRTKCIELLYAALTSSSTDQPKADLWQNFAREIEEHVFTLYSKNIKKYKTCIRSKVANLKNPRNSHLQQNLLSGTTSPREFAEMTVMEMANKELKQLRASYTESCIQEHYLPQVIDGTQTNKIKCRRCEKYNCKVTVIDRGTLFLPSWVRNSNPDEQMMTYVICNECGEQWYHSKWVCW

SEQ ID NO: 32103 - protein, 25 aa, Homo sapiens
MYFCPLRSSELSVYTFTLVISFDLG

SEQ ID NO: 32104 - protein, 39 aa, Homo sapiens
MNSMERRCPLCPNPIPLLNLILSFRKPRSSTLTVVLEET

SEQ ID NO: 32105 - protein, 126 aa, Homo sapiens
MIEMLEERALGRYRPDLNPHSSCFGPCNSRLPLNPLSSINTWLSRNNYDLGPGPSGIFTPNLNFITLERETVEWNDSPELQIEGIFSSDFGDYVSNLSGNKISMAGTPSWPLYSWYVFFLWTMRNM

SEQ ID NO: 32106 - protein, 6 aa, Homo sapiens
MMWTQS

SEQ ID NO: 32107 - protein, 180 aa, Homo sapiens
MANFNPGYSDNSTVVYFDNGTVFVVQWDHVYLQGWEDKGSFTFQAALHHDGRIVFAYKEIPMSVPEISSSQHPVKTGLSDAFMILNPSPDVPESRRRSIFEYHRIELDPSKVTSMSAVEFTPLPTCLQHRSCDACMSSDLTFNCSWCHVLQRSLNNQDENTYVNCLDSQQCHGSSESRRP

SEQ ID NO: 32108 - protein, 142 aa, Homo sapiens
MANLLKTVVTGCSCPLLSNLGSCKGLRVKKDFLRTFYTHQELWCKAPVKPGIPYKQLTVGVPKEIFQNEKRVALSPAGVQNLVKQGFNVVVESGAGEASKFSDDHYRVAGAQIQGAKEVLASDLVVKVIIPFSSPIYSMLTF

SEQ ID NO: 32109 - protein, 581 aa, Homo sapiens
MAVNEIFFDRYPDSILEHQIQVRPFNALKTKNMRNLNPEDIDQLITISGMVIRTSQLIPEMQEAFFQCQIKLQESPEDMPAGQTPHTVILFAHNDLVDKVQPGDRVNVTGIYRAVPIRVNPRVSNVKSVYKTHIDVIHYRKTDAKRLHGLDEEAEQKLFSEKRVELLKELSRKPDIYERLASALAPSIYEHEDIKKGILLQLFGGTRKDFSHTGRGKFRAEINILLCGDPGTSKSQLLQYVYNLVPRGQYTSGKGSSAVGLTAYVMKDPETRQLVLQTGALVLSDNGICCIDEFDKMNESTRSVLHEVMEQQTLSIAKAGIICQLNARTSVLAAANPIESQWNPKKTTIENIQLPHTLLSRFDLIFLLLDPQDEAYDRRLAHHLVALYYQSEEQAEEELLDMAVLKDYIAYAHSTIMPRLSEEASQALIEAYVDMRKIGSSRGMVSAYPRQLESLIRLAEAHAKVRLSNKVEAIDVEEAKRLHREALKQSATDPRTGIVDISILTTGMSATSRKRKEELAEALKKLILSKGKTPALKYQQLFEDIRGQSDIAITKDMFEEALRALADDDFLTVTGKTVRLL

SEQ ID NO: 32110 - protein, 32 aa, Homo sapiens
IMKALFSWSRLIHCVPDVLTSAISPNVGNSTA

SEQ ID NO: 32111 - protein, 13 aa, Homo sapiens
LWPRTLSSMYGTL

SEQ ID NO: 32112 - protein, 28 aa, Homo sapiens
LPVIQIIYPEVNSKASDGSYNTHRLSIY

SEQ ID NO: 32113 - protein, 366 aa, Homo sapiens
IDSLSAQLSQLQKQLAAKEAKLRDLEDSLARERDTSRRLLAEKEREMAEMRARMQQQLDEYQELLDIKLALDMEIHAYRKLLEGEEERLRLSPSPTSQRSRGRASSHSSQTQGGGSVTKKRKLESTESRSSFSQHARTSGRVAVEEVDEEGKFVRLRNKSNEDQSMGNWQIKRQNGDDPLLTYRFPPKFTLKAGQVVTIWAAGAGATHSPPTDLVWKAQNTWGCGNSLRTALINSTGEEVAMRKLVRSVTVVEDDEDEDGDDLLHHHHGSHCSSSGDPAEYNLRSRTVLCGTCGQPADKASASGSGAQVGGPISSGSSASSVTVTRSYRSVGGSGGGSFGDNLVTRSYLLGNSSPRTQSPQNCSIM

SEQ ID NO: 32114 - protein, 31 aa, Homo sapiens
VNSLAFFGCLDRPRRTNDSEWINMKVIQAQS

SEQ ID NO: 32115 - protein, 8 aa, Homo sapiens
KVRVPVRE

SEQ ID NO: 32116 - protein, 567 aa, Homo sapiens
RPLNLEEENKKCQDRSHLSISPVSLPKHQLSQSFLKSSKEYCTYVVCNATNSSLSKNCALDFNEENDADDEGEIWYNPIPEDDDLGISSALSFGEADSAVLKLPAVNLSMLSGSDLMKAERHTEDSLCSSEHAGDIQTTRSNGMNPIHPAHSTEFVQQYKQKLGHKTQEGIMVEDSPMLKSPFAGSGILAATNSTELGIMEPSSPNPSPVKKGSSINWSLPDKIKSPRTVRKLSMKMKKLPEFSRKLSVKGTLNYINSPDNTPSLSKYNCREVHHTDILPSGNTTTAAKRNVISRYHLDTSVSSQQSYQKKNSMSSKYSCKGGYLSDGDSPELTTKASKHGSENKFGKGKEIISNSCSKNEIDIDAFRHYSFSDQPKCSQYISGLMSVHFYGAEDLKPPRIDSKDVFCAIQVDSVNKARTALLTCRTTFLDMDHTFNIEIENAQHLKLVVFSWEPTPRKNRVCCHGTVVLPTLFRVTKTHQLAVKLEPRGLIYVKVTLMEQWENSLHGLDINQEPIIFGVDIQKVVEKENIGLMVPLLIQKCIMEIEKRGCQVLSYYGSLLLPLLID

SEQ ID NO: 32117 - protein, 23 aa, Homo sapiens
MDTLDTVKSNRRRQTVGGCAHVR

SEQ ID NO: 32118 - protein, 1586 aa, Homo sapiens
INRTYVISASRKTADMPLTPNPVGRLALQRRTTRNKESSLLVSELEDTTEKTAETRLTLQRRAKTDSAEKWKTAEIDSVKMTLNVGGETENNGVSKESRTNVRIVNNAKNSFVASSVPLDEDPQVIEMMADKKYKETFSAPSRANENVALKYSSNRPPIASLSQTEVVRSGHLTTKPTQSKLDIKVLGTGNLYHRSIGKEIAKTSNKFGSLEKRTPTKCTTEHKLTTKCSLPQLKSPAPSILKNRMSNLQVKQRPKSSFLANKQERSAENTILPEEETVVQNTSAGKDPLKVENSQVTVAVRVRPFTKREKIEKASQVVFMSGKEITVEHPDTKQVYNFIYDVSFWSFDECHPHYASQTTVYEKLAAPLLERAFEGFNTCLFAYGQTGSGKSYTMMGFSEEPGIIPRFCEDLFSQVARKQTQEVSYHIEMSFFEVYNEKIHDLLVCKDENGQRKQPLRVREHPVYGPYVEALSMNIVSSYADIQSWLELGNKQRATAATGMNDKSSRSHSVFTLVMTQTKTEFVEGEEHDHRITSRINLIDLAGSERCSTAHTNGDRLKEGVSINKSLLTLGKVISALSEQANQRSVFIPYRESVLTWLLKESLGGNSKTAMIATISPAASNIEETLSTLRYANQARLIVNIAKVNEDMNAKLIRELKAEIAKLKAAQRNSRNIDPERYRLCRQEITSLRMKLHQQERDMAEMQRVWKEKFEQAEKRKLQETKELQKAGIMFQMDNHLPNLVNLNEDPQLSEMLLYMIKEGTTTVGKYKPNSSHDIQLSGVLIADDHCTIKNFGGTVSIIPVGEAKTYVNGKHILEITVLRHGDRVILGGDHYFRFNHPVEVQKGKRPSGRDTPISEGPKDFEFAKNELLMAQRSQLEAEIKEAQLKAKEEMMQGIQIAKEMAQQELSSQKAAYESKIKALEAELREESQRKKMQEINNQKANHKIEELEKAKQHLEQEIYVNKKRLEMETLATKQALEDHSIRHARILEALETEKQKIAKEVQILQQNRNNRDKTFTVQTTWSSMKLSMMIQEANAISSKLKTYYVFGRHDISDKSSSDTSIRVRNLKLGISTFWSLEKFESKLAAMKELYESNGSNRGEDAFCDPEDEWEPDITDAPVSSLSRRRSRSLMKNRRISGCLHDIQVHPIKNLHSSHSSGLMDKSSTIYSNSAESFLPGICKELIGSSLDFFGQSYDEERTIADSLINSFLKIYNGLFAISKAHEEQDEESQDNLFSSDRAIQSLTIQTACAFEQLVVLMKHWLSDLLPCTNIARLEDELRQEVKKLGGYLQLFLQGCCLDISSMIKEAQKNAIQIVQQAVKYVGQLAVLKGSKLHFLENGNNKAASVQEEFMDAVCDGVGLGMKILLDSGLEKAKELQHELFRQCTKNEVTKEMKTNAMGLIRSLENIFAESKIKSFRRQVQEENFEYQDFKRMVNRAPEFLKLKHCLEKAIEIIISALKGCHSDINLLQTCVESIRNLASDFYSDFSVPSTSVGSYESRVTHIVHQELESLAKSLLFCFESEESPDLLKPWETYNQNTKEEHQQSKSSGIDGSKNKGVPKRVYELHGSSPAVSSEECTPSRIQWV

SEQ ID NO: 32119 - protein, 771 aa, Homo sapiens
ISPPPDLDQIFYPSESSQSLLLQEFNESFPYPDLGQMPSPSSPTLNDTFLSKEFNPLVIVGLSKDGTDYIEIIPKEEVQSSEDDYAEIDYVPYDDPYKTDVRTNINSSRDPDNIAAWYLRSNNGNRRNYYIAAEEISWDYSEFVQRETDIEDSDDIPEDTTYKKVVFRKYLDSTFTKRDPRGEYEEHLGILGPIIRAEVDDVIQVRFKNLASRPYSLHAHGLSYEKSSEGKTYEDDSPEWFKEDNAVQPNSSYTYVWHATERSGPESPGSACRAWAYYSAVNPEKDIHSGLIGPLLICQKGILHKDSNMPMDMREFVLLFMTFDEKKSWYYEKKSRSSWRLTSSEMKKSHEFHAINGMIYSLPGLKMYEQEWVRLHLLNIGGSQDIHVVHFHGQTLLENGNKQHQLGVWPLLPGSFKTLEMKASKPGWWLLNTEVGENQRAGMQTPFLIMDRDCRMPMGLSTGIISDSQIKASEFLGYWEPRLARLNNGGSYNAWSVEKLAAEFASKPWIQVDMQKEVIITGIQTQGAKHYLKSCYTTEFYVAYSSNQINWQIFKGNSTRNVMYFNGNSDASTIKENQFDPPIVARYIRISPTRAYNRPTLRLELQGCEVNGCSTPLGMENGKIENKQITASSFKKSWWGDYWEPFRARLNAQGRVNAWQAKANNNKQWLEIDLLKIKKITAIITQGCKSLSSEMYVKSYTIHYSEQGVEWKPYRLKSSMVDKIFEGNTNTKGHVKNFFNPPIISRFIRVIPKTWNQSIALRLELFGCDIY

SEQ ID NO: 32120 - protein, 11 aa, Homo sapiens
MPTFSRILMPK

SEQ ID NO: 32121 - protein, 36 aa, Homo sapiens
IPDLTCLFLFLNLRWSRHQNADFRENPYGEDHHPRG

SEQ ID NO: 32122 - protein, 30 aa, Homo sapiens
LRSHHRGIRFAAFPPPPPRRPFLALVPPNV

SEQ ID NO: 32123 - protein, 117 aa, Homo sapiens
KARTKKDQMAKQPSDVSSECDREGRQLQPAERPPQLRPGAPTSLQTEPQDRSPAPMSCDKSTQTPSPPCQAFNHYLSAMASMRQAEPADMRPEIWIAQELRRIGDEFNAYYARRLEK

SEQ ID NO: 32124 - protein, 37 aa, Homo sapiens
RERPAQPRSTGGVQRRPLPLPSCRSRLGSLTNLQQTL

SEQ ID NO: 32125 - protein, 253 aa, Homo sapiens
KSRMSAEVIHQVEEALDTDEKEMLLFLCRDVAIDVVPPNVRDLLDILRERGKLSVGDLAELLYRVRRFDLLKRILKMDRKAVETHLLRNPHLVSDYRVLMAEIGEDLDKSDVSSLIFLMKDYMGRGKISKEKSFLDLVVELEKLNLVAPDQLDLLEKCLKNIHRIDLKTKIQKYKQSGGWNGTWMTKASFSLWLEIASLYILHIPDLPTPLPCIFMISAKCCQAVLNISVFKKESGICTGWQSYGHSGVLHVC

SEQ ID NO: 32126 - protein, 12 aa, Homo sapiens
LLFVSLLIAPDD

SEQ ID NO: 32127 - protein, 53 aa, Homo sapiens
LLMGLPCGHVFHQNCIVMWLAGGRHCCPVCRWPSYKKKQPYAQHQPLSNDVPS

SEQ ID NO: 32128 - protein, 41 aa, Homo sapiens
MSKKISGGSVVEMQGDEMTRIIWELIKEKLIFPYVELDLHR

SEQ ID NO: 32129 - protein, 19 aa, Homo sapiens
LQRPQLSKVKRKKPRGLFS

SEQ ID NO: 32130 - protein, 23 aa, Homo sapiens
LVDFCNKPILLHQVEALAAAWTT

SEQ ID NO: 32131 - protein, 40 aa, Homo sapiens
IVNPQELPQALPKYIFNLVVQISFWLTSKHIIKNAVEEVT

SEQ ID NO: 32132 - protein, 19 aa, Homo sapiens
IPKSYHRPFPNIYLILWFK

SEQ ID NO: 32133 - protein, 330 aa, Homo sapiens
MDSDKPFFSLSKSQRSSSTEILDDGSSYTSQSSTEYYCVTPVTGPYYTTQTLDTRTRGRRRSKKQNVSTSNSGSMPNLAQKDSLRNGVYSKSQEPPSSSYYIAGYTPYAECDFYYSGGYVYENDTEGQYSVNPSYRSSAHYGYERQRDYSRSFHEDEVDRVPHNPYATLRLPRKAAAKSEHITKNIHKALVAEHLRGWYQRASGQKDQGHSPQTSFDSDRGSQRCLGFAGLQVPCSPSSRASSYSSVSSTNASGNWRTQLTIGLSDYETPAHSSYTSCYGNVYNPLPSPSRQYTEISQLDGTDGNQLEDNLESSEQRLFWHEDSKPGTLV

SEQ ID NO: 32134 - protein, 12 aa, Homo sapiens
IPRFLHESFQVF

SEQ ID NO: 32135 - protein, 25 aa, Homo sapiens
ICMWCVPRQTSRGKCTFYCVQPNKS

SEQ ID NO: 32136 - protein, 50 aa, Homo sapiens
LQDPWVPTGPGAVQKQREHPPDYQWYALDQLPPDVQHKANGLSSVKKVHP

SEQ ID NO: 32137 - protein, 619 aa, Homo sapiens
KHPQLEADLSAVREIYGPHAVSLREYGAIDDVDIDLHIDVSFLDEEIAVAWEVIRTEPIIVRLHCSLTQYLNGPVPTVDVFQISTKERFGLGHQLKKIMQTFVTQQWKQSKEKSNCLHNKKLSEKKVKSPLHLFSTLRRSPSYPPPGCGKSKSKLKSEQDGISKTHKLLRRTCSSTVKTDDVCVTKSHRTFGRSLSSDPRAEQAMTAIKSHKLLNRPCPAAVKSEECLTLKSHRLLTRSCSGDPRCEHNTNLKPHKLLSRSYSSNLRMEELYGLKNHKLLSKSYSSAPKSSKTELFKEPNAEGRRLSLTSGLIGILTPSSSSSSQLAPNGAKCIPVRDRGFLVQTIEFAEQRIPVLNEYCVVCDEPHVFQNGPMLRPTVCERELCVFAFQTLGVMNEAADEIATGAQKKNYDRVMKALDSITSIREMTQAPYLEIKKQMDKQDPLAHPLLQWVISSNRSHIVKLPVNRQLKFMHTPHQFLLLSSPPAKESNFRAAKKLFGSTFAFHGSHIENWHSILRNGLVVASNTRLQLHGAMYGSGIYLSPMSSISFGYSGMNKKQKVSAKDEPASSSKSSNTSQSQKKGQQSQFLQSRNLKCIALCEDFNEKRYIKSEWTRIPLE

SEQ ID NO: 32138 - protein, 125 aa, Homo sapiens
ITLQEIIKTLNSLTEQKTLCTELTVTDIFAASKNTTEKETFCRAATVLRQFYSHHEKDTRCLGATAQQFHRHKQLIRFLKRLDRNLWGLAGLNSCPVKEANQSTLENFLERLKTIMREKYSKCSS

SEQ ID NO: 32139 - protein, 181 aa, Homo sapiens
LHKYQKMLEPPPSAKPFTIDVDKKLEEGQKNIRLLRTELQKLGESLQSAERACCHSTGAGKLRQALTTCDDILIKQDQTLAELQNNMVLVKLDLRKKAACIAEQYHTVLKLQGQVSAKKRLGTNQENQQPNQQPPGKKPFLRNLLPRTPTCQSSTDCSPYARILRSRRSPLLKSGPFGKKY

SEQ ID NO: 32140 - protein, 30 aa, Homo sapiens
KQMFPQLLAFLDFFFKNFLNLLSLAVYIFT

SEQ ID NO: 32141 - protein, 35 aa, Homo sapiens
LGRSSARKYQPKSFLRMTGALLSMTFPLKHQHIFW

SEQ ID NO: 32142 - protein, 39 aa, Homo sapiens
VLVNFFEKRVDIGLKIKDQKKVERQFSTASDHEQPGVSG

SEQ ID NO: 32143 - protein, 32 aa, Homo sapiens
MFPLKLSVPPMVMPGLRLMGNCILRVRLEHLC

SEQ ID NO: 32144 - protein, 24 aa, Homo sapiens
RLTAIFLFQLILPRCISQKTLIHR

SEQ ID NO: 32145 - protein, 15 aa, Homo sapiens
IAPAAEPTCPSLGCA

SEQ ID NO: 32146 - protein, 26 aa, Homo sapiens
LSNSPVAAVMCSSMGTHLSPFKGTLL

SEQ ID NO: 32147 - protein, 13 aa, Homo sapiens
LDSMSRSLTIDKL

SEQ ID NO: 32148 - protein, 24 aa, Homo sapiens
LADYEGDDSITSAHPRLKRDVSRA

SEQ ID NO: 32149 - protein, 55 aa, Homo sapiens
IISKIDLMVNSGKLGTTVKPKSLVTSSSGALKKQHKKPFDAMNNIVANLLLNLTR

SEQ ID NO: 32150 - protein, 11 aa, Homo sapiens
VAAWRTPAALL

SEQ ID NO: 32151 - protein, 33 aa, Homo sapiens
LSSVAQWSSSEDAKIHEKTSRTSGRIFNGKSLG

SEQ ID NO: 32152 - protein, 643 aa, Homo sapiens
IPCWHHVRVKTVFASSLDILTILCLKGPSTEGIFRRAANEKARKELKEELNSGDAVDLERLPVHLLAVVFKDFLRSIPRKLLSSDLFEEWMGALEMQDEEDRIEALKQVADKLPRPNLLLLKHLVYVLHLISKNSEVNRMDSSNLAICIGPNMLTLENDQSLSFEAQKDLNNKVKTLVEFLIDNCFEIFGENIPVHSSITSDDSLEHTDSSDVSTLQNDSAYDSNDPDVESNSSSGISSPSRQPQVPMATAAGLDSAGPQDAREVSPEPIVSTVARLKSSLAQPDRRYSEPSMPSSQECLESRVTNQTLTKSEGDFPVPRVGSRLESEEAEDPFPEEVFPAVQGKTKRPVDLKIKNLAPGSVLPRALVLKAFSSSSLDASSDSSPVASPSSPKRNFFSRHQSFTTKTEKGKPSREIKKHSMSFTFAPHKKVLTKNLSAGSGKSQDFTRDHVPRGVRKESQLAGRIVQENGCETHNQTARGFCLRPHALSVDDVFQGADWERPGSPPSYEEAMQGPAARLVASESQTVGSMTVGSMRARMLEAHCLLPPLPPAHHVEDSRHRGSKEPLPGHGLSPLPERWKQSRTVHASGDSLGHVSGPGRPELLPLRTVSESVQRNKRDCLVRRCSQPVFEADQFQYAKESYI

SEQ ID NO: 32153 - protein, 62 aa, Homo sapiens
KLQSPFFELMILLNYIQKVKMINMEVMKMLFTLEPLMIDLMFLLFITMLNAIVLYLELSITH

SEQ ID NO: 32154 - protein, 16 aa, Homo sapiens
IHLSRGLMRLVMTLKL

SEQ ID NO: 32155 - protein, 596 aa, Homo sapiens
MHNEEPFALLLFSMVTKFCSGLAPHFPIKKVLLLLWKVVMFTLGGFEHLQTLKVQKRAELGLPPLAEDSIQVVKSMRAASPPSYTLDLGESQLAPPPSKLRGRRGSRRQLLTKQDSLDIYNERDLFKTEEPATEEEEESAGDGERTLDGELDLLEQDPLVPPPPSQAPLSAERVAFPKGLPWAPKVRQKDIEHFLEMSRNKFIGFTLGQDTDTLVGLPRPIHESVKTLKQHKYISIADVQIKNEEELEKCPMSLGEEVVPETPCEILYQGMLYSLPQYMIALLKILLAAAPTSKAKTDSINILADVLPEEMPITVLQSMKLGIDVNRHKEIIVKSISTLLLLLLKHFKLNHIYQFEYVSQHLVFANCIPLILKFFNQNILSYITAKNSISVLDYPCCTIQDLPELTTESLEAGDNSQFCWRNLFSCINLLRLLNKLTKWKHSRTMMLVVFKSAPILKRALKVKQAMLQLYVLKLLKLQTKYLGRQWRKSNMKTMSAIYQKVRHRMNDDWAYGNDIDARPWDFQAEECTLRANIEAFNSRRYDRPQDSEFSPVDNCLQSVLGQRLDLPEDFHYSYELWLEREVFSQPICWEELLQNH

SEQ ID NO: 32156 - protein, 26 aa, Homo sapiens
LSQQLLCKMPRPGIVAEHPRPAEVPP

SEQ ID NO: 32157 - protein, 730 aa, Homo sapiens
KCLTLLVEIHPVNNVKVLKAVDSYIWVQFLYPHIESHPLPENHLLLISEEKYIEQFRIHVAQEDGNRVVIKNSGHLPRDRIAEDFVWAQWDMSEQRLYYIDLKKSRSILKCIQFYADESYNLMFEVPLDISLSNSGFKLVNFGCDYHQYRDKFSKHLTLCVFTNHTGSLCVCYSPKCASWGQITYSVFYIHKGHSKTFTTSLENVGSHMTKGITFLNLDYYVAVYLPGHFFHLLNVQHPDLICHNLFLTGNNEMIDMLPHCPLQSLSGSLVLDCCSGKLYRALLSQSSLLQLLQNTCLDCEKMAALHCALYCGQGAQFLEAQIIQWISENVSACHSFDLIQEFIIASSYWSVYSETSNMDKLLPHSSVLTWNTEIPGITLVTEDIALPLMKVLSFKGYWEKLNSNLEYVKYAKPHFHYNNSVVRREWHNLISEEKTGKRRSAAYVRNILDNAVKVISNLEARNLGPRLTPLLQEEDSHQRLLMGLMVSELKDHFLRHLQGVEKKKIEQMVLDYISKLLDLICHIVETNWRKHNLHSWVLHFNSRGSAAEFAVFHIMTRILEATNSLFLPLPPGFHTLHTILGVQCLPLHNLLHCIDSGVLLLTETAVIRLMKDLDNTEKNEKLKFSIIVRLPPLIGQKICRLWDHPMSSNIISRNHVTRLLQNYKKQPRNSMINKSSFSVEFLPLNYFIEILTDIESSNQALYPFEGHDNVDAEFVEEAALKHTAMLLGL

SEQ ID NO: 32158 - protein, 62 aa, Homo sapiens
IKMKPNIEPPENVEWSGAEASMFRVLIGTYYDNFCAIARLIGTKTCRQVRYPIKMLLKELQT

SEQ ID NO: 32159 - protein, 444 aa, Homo sapiens
LAHPFPSSLPPPPELSLSHAFPLHHGSPLGCRLPGSCVRSERRRWRRWRRRRQLGSAMTGKLAEKLPVTMSSLLNQLPDNLYPEEIPSALNLFSGSSDSVVHYNQMATENVMDIGLTNEKPNPELSYSGSFQPAPGNKTVTYLGKFAFDSPSNWCQDNIISLMSAGILGVPPASGALSTQTSTASMVQPPQGDVEAMYPALPPYSNCGDLYSEPVSFHDPQGNPGLAYSPQDYQSAKPALDSNLFPMIPDYNLYHHPNDMGSIPEHKPFQGMDPIRVNPPPITPLETIKAFKDKQIHPGFGSLPQPPLTLKPIRPRKYPNRPSKTPLHERPHACPAEGCDRRFSRSDELTRHLRIHTGHKPFQCRICMRSFSRSDHLTTHIRTHTGEKPFACEFCGRKFARSDERKRHAKIHLKQKEKKAEKGGAPSASSAPPVSLAPVVTTCA

SEQ ID NO: 32160 - protein, 56 aa, Homo sapiens [sequence omitted]

SEQ ID NO: 32161 - protein, 30 aa, Homo sapiens
TLSHLGNLADDRGVPSPNLSILLHILRTQT

SEQ ID NO: 32162 - protein, 23 aa, Homo sapiens
MMVLLLQLDCLTMDIYLRVQLKI

SEQ ID NO: 32163 - protein, 100 aa, Homo sapiens
VEGHSNVYAIGDCADVRTPKMAYLAGLHANIAVANIVNSVKQRPLQAYKPGALTFLLSMGRNDGVGQISGFYVGRLMVRLTKSRDLFVSTSWKTMRQSPP

SEQ ID NO: 32164 - protein, 855 aa, Homo sapiens
IKQEVEDYLPSFCKWAGDFMHKNTSTDFPQMQLSLPSDNSKDNSTCNIEVVKPMDIEESIWSPRFGLKGKIDVTVGVKIHRGYKTKYKIMPLELKTGKESNSIEHRSQVVLYTLLSQERRADPEAGLLLYLKTGQMYPVPANHLDKRELLKLRNQMAFSLFHRISKSATRQKTQLASLPQIIEEEKTCKYCSQIGNCALYSRAVEQQMDCSSVPIVMLPKIEEETQHLKQTHLEYFSLWCLMLTLESQSKDNKKNHQNIWLMPASEMEKSGSCIGNLIRMEHVKIVCDGQYLHNFQCKHGAIPVTNLMAGDRVIVSGEERSLFALSRGYVKEINMTTVTCLLDRNLSVLPESTLFRLDQEEKNCDIDTPLGNLSKLMENTFVSKKLRDLIIDFREPQFISYLSSVLPHDAKDTVACILKGLNKPQRQAMKKVLLSKDYTLIVGMPGTGKTTTICTLVRILYACGFSVLLTSYTHSAVDNILLKLAKFKIGFLRLGQIQKVHPAIQQFTEQEICRSKSIKSLALLEELYNSQLIVATTCMGINHPIFSRKIFDFCIVDEASQISQPICLGPLFFSRRFVLVGDHQQLPPLVLNREARALGMSESLFKRLEQNKSAVVQLTVQYRMNSKIMSLSNKLTYEGKLECGSDKVANAVINLRHFKDVKLELEFYADYSDNPWLMGVFEPNNPVCFLNTDKVPAPEQVEKGGVSNVTEAKLIVFLTSIFVKAGCSPSDIGIIAPYRQQLKIINDLLARSIGMVEVNTVDKYQGRDKSIVLVSFVRSNKDGTVGELLKDWRRLNVAITRAKHKLILLGCVPSLNCYPPLEKLLNHLNSEKLIIDLPSREHESLCHILGDFQRE

SEQ ID NO: 32165 - protein, 471 aa, Homo sapiens
LLHELSSWLVLEGMASTITGSQDCIVNHRGEVDGEPELDISPCQQWGEASSPISRNRDSVMTLQSGCFENIESETYLPLKVSSQIDTQDSSVKFCKNEPQDHQESRRLFVMEESTERKVIKGESCSENLQVKLVSDGQELASPLLNGEATCQNGQLKESLDPIDCNCKDIHGWKSQVVSCSQQRAHTEEKPCDHNNCGKILNTSPDGHPYEKIHTAEKQYECSQCGKNFSQSSELLLHQRDHTEEKPYKCEQCGKGFTRSSSLLIHQAVHTDEKPYKCDKCGKGFTRSSSLLIHHAVHTGEKPYKCDKCGKGFSQSSKLHIHQRVHTGEKPYECEECGMSFSQRSNLHIHQRVHTGERPYKCGECGKGFSQSSNLHIHRCIHTGEKPYQCYECGKGFSQSSDLRIHLRVHTGEKPYHCGKCGKGFSQSSKLLIHQRVHTGEKPYECSKCGKGFSQSSNLHIHQRVHKKDPR

SEQ ID NO: 32166 - protein, 48 aa, Homo sapiens
RLLFLGTQVSSLYCYNFFSRTAVFFACTNGTSSSAGYFSTAGVWREEG

SEQ ID NO: 32167 - protein, 14 aa, Homo sapiens
TTPSAFCPPDHSPF

SEQ ID NO: 32168 - protein, 301 aa, Homo sapiens
LDHSKHPESKETQQSSSENSYFCSTKFSYIPLASCHFPIDQLQLSKPAVQELKCIEELLSQTTNPDRFSLLRHRIINFFHRFGSHVNQGPLHLGGIYWWKAISEGYCTEQLAEVRQQSAEALDIFIRDSYSGFGVKVAAGVNVSDSHSKTATQTKTSQNLQTKVQLSVAQTGGPPEADGLVQWKAGLIASNQTWCVIDRGLQLVPVWDIILSSHRSNFKDPLQVANFLKDSYTALTSITAQIQNGEELLSAGKEARVFLEDVKSWEVSDPEEQLKKLINFMKMLSQKLKSYDTWINICLTD

SEQ ID NO: 32169 - protein, 2016 aa, Homo sapiens
LVLYRLKNAFLTGGAKELKCNSHTVKKMTKVPPAFDFSFLNDEEARKILQVLERNEELQRAEKDRISKLQKTKRDIRWLQGVTGEWFEEIQRKKFCNETDVSQMLKQPLTYRLSKEMAKNDPIELPTSRSKNVTNQKKPTPFSSRMSFRSSFASLFSFRKSGKETSKLPSLGQKGCDGHAGPPMPVRGAAVQAKIYNSPLENHLVDSTFVPKPAVMREESGMPPPWDASLLENEFFQVLDDLDSKLAQEQSASSVNTRTPLNYGSRTQFGHFYSSGNRHGNITERHKKHYNETSNMSIYDILRPGTPREGFKTFSPRTSTIYDMYRTREPRVFKEDYVQKNTFGSTSLCFDSRQRSALPATGHFTARSLHFPATTQSKSGFIPPRHQQSPKRTPLSSIIWNRSDSSRDRENQEEFLRAPSPMEIDPADKYVYPRGFQENKRYESYHSQNVYQRVSLNAPMENAMSPDTFENSENMPFYHQSNTFTRSFFSNTFGRSGEQRRFGQGPFWGQEKGHSFWSDFHRSRKSFSSSDRDFEMISMEANSVSAIHGHNVSSEHWESFSSGYGTDVSRGQEEPHPWQFDFQRSTLDSMVVSHGNETQLTPHFGTPNVCSMTGSSYHVKSSELVSQQDSSPVEVHINKEASSFGIAQTLASSFKTSFSQISDDRRNPQSPNLQNPTVTLQKIFPNKPASHPMRSHTEVTVTSSNSVDSLPLAKSQPNILVTEVNNEKDLNESISEEDKQLSKMDQTNKAGEIPQPVSQTGISNSLPDFQNPLSQDSAKSNGFGFNASTIISSKKSPRVFSRKDTSKMYIPHTDKSNDIKQDKRFTENRKLGSTASLPFIQEHRTPPSFPRTDQGCHQELTVNNEDISRIITNNHWSSALTDTQNAQYSKCKLTPGHKTSCDSLDLSSAALPDSSPSKNSSLDAPVVPSTTVFSRRSPSDKDPSLGEREEKDNAGKNQKNQFIVSHSENQERNDSPVPTHDEVVDVKCHSHSPFRNERGKGKIRHHISCIEKLSKTESISVPTSDHRSLIEANQSNSKVSELDTIYCTLPRKSSSFLIHGRQSGSKIMAASLRNGPPPFQIKNNVEDAMGNYMLNKFSPSSPESANECSKVLSDSALEAPEATERMTNVKSSGSTSVRKGPLPFLINRAMSCPSGEPHASTGREGRKKPLTSGMDASELTPRAWERIISPVESDSSVRDCSLTKRQHQKENFQEYTEKEGKMAASRRSVFALSNEDPLPFCSDLSGKERGKTLHKVKTTSTFSVSGDEDNVKCLEVVSIYYTLPRKPSKKFCNLLQQYTQNTNLLIESPQVETETFPNALEKDKQNYSTREQSGTPSCENLKMSVNSDQTLTTENMTAFRLSNRGPLAPTLQEMASVEAAVSLPEEESKAREIFSDNLAKTPLGDSENKKERGKKLQSETLHTSLMLQRKNVSEEKSENCQQSINSSNSGPSSLPALSEVNIGNSQTRRSSWECTGSGRAIPFTGSGKCPQKDHTSTAVGDGSSGSQPREGRGDIGTNCQKMTNKTLSHSESQVFALTPALHKLQLGEETQSDEPNLESLQSEPRELPQRSQEANMTESRKAEDEMQKSAWDQPSLPEGNKNKTNLDDLVKGENRSSVKHRLAAMSKASRKFPAKDVSPRRHVATIFPQSGSRSGFDHLSLGTVECNPLFPEPTPKSAESIGESRLSENGKHVKKSENLLPITVLPNREPSTHVSNQKSNSISQRHQNEFKNVSESPSKHENSKDVTAAQNLVRESGAPSPITFTSLREAEFSDNQRRLSPPFPLEPAQKSRVSSPLASFLQQQRSASSLEWEPEPHLYRSKSLKSINVHGDLLRKSHPPKVRERHFSESTSIDNALSRLTLGNEFSVNNGYSRRFRSFSELPSCDGNESWAYRSGTKTGPRSAISIYRPIDYGIFGKEQQLAFLENVKRSLTQGRLWKPSFLKNPGFLKDDLRNPPNPSESLSSNSPSSQVPEDGLSPSEPLNIYEDDPVDSDCDTDTTTDDEYYLDENDKESEL

SEQ ID NO: 32170 - protein, 32 aa, Homo sapiens
ISTCEDASWAERERRVHNLVSSSFWLFLFFVF

SEQ ID NO: 32171 - protein, 91 aa, Homo sapiens
IYNANYLKMLMKRQYMHVLQHSSQKPGVLTHHRSRLSSRYSQKQHYPCTTWRHQLEREDSGSSDIAAASAPEMLIQHSLWRPVRNKEGSVS

SEQ ID NO: 32172 - protein, 28 aa, Homo sapiens
MTCTTLINASAISTNTLTDMGSFDRRES

SEQ ID NO: 32173 - protein, 75 aa, Homo sapiens
VDKHIRRLDTDLARFEADLKEKQIESSDYDSSSSKGKKKGRTQKEKKAARARSKGKNSDEEAPKTAQKKLKLVRT

SEQ ID NO: 32174 - protein, 12 aa, Homo sapiens
LIQELLISTSLA

SEQ ID NO: 32175 - protein, 6 aa, Homo sapiens
IIATFV

SEQ ID NO: 32176 - protein, 40 aa, Homo sapiens
MVLHSRINCTSVCAKSTRHWRNSRNNTWYRHMDLSGKRSR

SEQ ID NO: 32177 - protein, 235 aa, Homo sapiens
KAKIEDEKKDEEKEDPKGIPEFWLTVFKNVDLLSDMVQEHDEPILKHLKDIKVKFSDAGQPMSFVLEFHFEPNEYFTNEVLTKTYRMRSEPDDSDPFSFDGPEIMGCTGCQIDWKKGKNVTLKTIKKKQKHKGRGTVRTVTKTVSNDSFFNFFAPPEVPESGDLDDDAEAILAADFEIGHFLRERIIPRSVLYFTGEAIEDDDDDYDEEGEEADEGYQLFEEVKSCSKLFQRWLQ

SEQ ID NO: 32178 - protein, 121 aa, Homo sapiens
RHSCANDTICFNLDGGYDCRCPHGKNCTGDCIHDGKVKHNGQIWVLENDRCSVCSCQNGFVMCRRMVCDCENPTVDLFCCPECDPRLSSQCLHQNGETLYNSGDTWVQNCQQCRCLVNLAT

SEQ ID NO: 32179 - protein, 2747 aa, Homo sapiens
IISLIMGMKFFRIKMYPVEDFEASLQFMQECAHYFLEVKDKDIKHALAGLFVEILVPVAAAVKNEVNVPCLRNFVESLYDTTLELSSRKKHSLALYPLVTCLLCVSQKQLFLNRWHIFLNNCLSNLKNKDPKMARVALESLYRLLWVYMIRIKCESNTATQSRLITIITTLFPKGSRGVVPRDMPLNIFVKIIQFIAQERLDFAMKEIIFDFLCVGKPAKAFSLNPERMNIGLRAFLVIADSLQQKDGEPPMPVTGAVLPSGNTLRVKKTYLSKTLTEEEAKMIGMSLYYSQVRKAVDNILRHLDKEVGRCMMLTNVQMLNKEPEDMITGERKPKIDLFRTCVAAIPRLLPDGMSKLELIDLLARLSIHMDDELRHIAQNSLQGLLVDFSDWREDVLFGFTNFLLREVNDMHHTLLDSSLKLLLQLLTQWKLVIQTQGKVYEQANKIRNSELIANGSSHRIQSERGPHCSVLHAVEGFALVLLCSFQVATRKLSVLILKEIRALFIALGQPEDDDRPMIDVMDQLSSSILESFIHVAVSDSATLPLTHNVDLQWLVEWNAVLVNSHYDVKSPSHVWIFAQSVKDPWVLCLFSFLRQENLPKHCPTALSYAWPYAFTRLQSVMPLVDPNSPINAKKTSTAGSGDNYVTLWRNYLILCFGVAKPSIMSPGHLRASTPEIMATTPDGTVSYDNKAIGTPSVGVLLKQLVPLMRLESIEITESLVLGFGRTNSLVFRELVEELHPLMKEALERRPENKKRRERRDLLRLQLLRIFELLADAGVISDSTNGALERDTLALGALFLEYVDLTRMLLEAENDKEVEILKDIRAHFSAMVANLIQCVPVHHRRFLFPQQSLRHHLFILFSQWAGPFSIMFTPLDRYSDRNHQITRYQYCALKAMSAVLCCGPVFDNVGLSPDGYLYKWLDNILACQDLRVHQLGCEVVVLLLELNPDQINLFNWAIDRCYTGSYQLASGCFKAIATVCGSRNYPFDIVTLLNLVLFKASDTNREIYEISMQLMQILEAKLFVYSKKVAEQRPGSILYGTHGPLPPLYSVSLALLSCELARMYPELTLPLFSEVSQRFPTTHPNGRQIMLTYLLPWLHNIELVDSRLLLPGSSPSSPEDEVKDREGDVTASHGLRGNGWGSPEATSLVLNNLMYMTAKYGDEVPGPEMENAWNALANNEKWSNNLRITLQFLISLCGVSSDTVLLPYIKKVAIYLCRNNTIQTMEELLFELQQTEPVNPIVQHCDNPPFYRFTASSKASAAASGTTSSSNTVVAGQENFPDAEENKILKESDERFSNVIRAHTRLESRYSNSSGGSYDEDKNDPISPYTGWLLTITETKQPQPLPMPCTGGCWAPLVDYLPETITPRGPLHRCNIAVIFMTEMVVDHSVREDWALHLPLLLHAVFLGLDHYRPEVFEHSKKLLLHLLIALSCNSNFHSIASVLLQTREMGEAKTLTVQPAYQPEYLYTGGFDFLREDQSSPVPDSGLSSSSTSSSISLGGSSGNLPQMTQEVEDVDTAAETDEKANKLIEFLTTRAFGPLWCHEDITPKNQNSKSAEQLTNFLRHVVSVFKDSKSGFHLEHQLSEVALQTALASSSRHYAGRSFQIFRALKQPLSAHALSDLLSRLVEVIGEHGDEIQGYVMEALLTLEAAVDNLSDCLKNSDLLTVLSRSSSPDLSSSSKLTASRKSTGQLNMNPGTTSGNTATAERSRHQRSFSVPKKFGVIDRSSDPPRSATLDRIQACTQQGLSSKTRSSSSLKDSLTDPSHINHPTNLLATIFWVTVALMESDFEFEYLMALRLLSRLLAHMPLDKAENREKLEKLQAQLKWADFSGLQQLLLKGFTSLTTTDLTLQLFSLLTPVSKISMVDASHAIGFPLNVLCLLPQLIQHFENPNQFCKDIAERIAQVCLEEKNPKLSNLAHVMTLYKTHSYTRDCATWVNVVCRYLHEAYADITLNMVTYLAELLEKGLPSVQQPLLQVIYSLLSYMDLSVVPVKQFNVEVLKTIEKYVQSVHWREALNILKLVVSRSASLVLPSYQHSDLSKIEIHRVWTSASKELPGKTLDFHFDISETPIIGRRYDELQNSSGRDGKPRAMAVTRSTSSTSSGSNSNVLVPVSWKRPQYSQKRTKEKLVHVLSLCGQEVGLSKNPSVIFSSCGDLDLLEHQTSLVSSEDGAREQENMDDTNSEQQFRVFRDFDFLDVELEDGEGESMDNFNWGVRRRSLDSLDKCDMQILEERQLSGSTPSLNKMHHEDSDESSEEEDLTASQILEHSDLIMTLSPSEETNPMELLTTACDSTPAEPHSFNTRMSSFDASLPDMNNLQISEGSKAEAVREEEDTTVHEDDLSSSINELPAAFECSDSFSLDMTEGEEKGNRALDQFTLASFGEGDRGVSPPPSPFFSAILAAFQPAACDDAEEAWRSHINQLMCDSDGSCAVYTFHVFSSLFKNIQKRFCFLTCDAASYLGDNLRGIGSKFVSSSQMLTSCSECPTLFVDAETLLSCGLLDKLKFSVLELQEYLDTYNNRKEATLSWLANCKATFAGGSRDGVITCQPGDSEEKQLELCQRLYKLHFQLLLLFQSYCKLIGQVHEVSSMPELLNMSRELSDLKKHLKEASAVIAADPLYSDGAWSEPTFTSTEAAIQSMLECLKNNELGKALRQIRECRSLWPNDIFGSSSDDEVQTLLNIYFRHQTLGQTGTYALVGSNQSLTEICTKLMELNMEIRDMIRRAQSYRVLTTFLPDSSVSGTSL

SEQ ID NO: 32180 - protein, 112 aa, Homo sapiens
LPSRVKLKIPFGNKLLDAVCLVPNKSLTYGIILTHGASGDMNLPHLMSLASHLASHGFFCLRFTCKGLNIVHRIKAYKSVLNYLKTSGEYKLAGVFLGELVGESGTENASSP

SEQ ID NO: 32181 - protein, 23 aa, Homo sapiens
LVPWSQYMLFWPKCSIIQLADTT

SEQ ID NO: 32182 - protein, 26 aa, Homo sapiens
LAMAHAYFRASGRGLQPAGHFSPALS

SEQ ID NO: 32183 - protein, 13 aa, Homo sapiens
LSGSQPPKTPSGR

SEQ ID NO: 32184 - protein, 6 aa, Homo sapiens
TTRKIG

SEQ ID NO: 32185 - protein, 13 aa, Homo sapiens
IWACCMSCCRCLH

SEQ ID NO: 32186 - protein, 62 aa, Homo sapiens
ICRGPCTCQVMSYEVDLLTHEWVTTRSLETAGWTPTCAFQLLLEPQGPRKAVWSLQPASRDF

SEQ ID NO: 32187 - protein, 21 aa, Homo sapiens
KNVEKKIDKYTEVFKTHGLLV

SEQ ID NO: 32188 - protein, 7 aa, Homo sapiens
RLMSKCS

SEQ ID NO: 32189 - protein, 500 aa, Homo sapiens
KNKILEMKTSEPDADESCLNARLVAYASDQAHSSVEKAGLISLVKMKFLPVDDNFSLRGEALQKAIEEDKQRGLVPVFVCATLGTTGVCAFDCLSELGPICAREGLWLHIDAAYAGTAFLCPEFRGFLKGIEYADSFTFNPSKWMMVHFDCTGFWVKDKYKLQQTFSVNPIYLRHANSGVATDFMHWQIPLSRRFRSVKLWFVIRSFGVKNLQAHVRHGTEMAKYFESLVRNDPSFEIPAKRHLGLVVFRLKGPNCLTENVLKEIAKAGRLFLIPATIQDKLIIRFTVTSQFTTRDDILRDWNLIRDAATLILSQHCTSQPSPRVGNLISQIRGARAWACGTSLQSVSGAGDDPVQARKIIKQPQRVGAGPMKRENGLHLETLLDPVDDCFSEEAPDATKHKLSSFLFSYLSVQTKKKTVRSLSCNSVPVSAQKPLPTEASVKNGGSSRVRIFSRFPEDMMMLKKSAFKKLIKFYSVPSFPECSSQCGLQLPCCPLQAMV

SEQ ID NO: 32190 - protein, 6 aa, Homo sapiens
KKSTPK

SEQ ID NO: 32191 - protein, 19 aa, Homo sapiens
ITLNSAFVNLICRYVQTTS

SEQ ID NO: 32192 - protein, 1058 aa, Homo sapiens
INCDQFSRLLCDMEGDEETREAYANIAELDQYVFQDSQLEGLSKDIFKHIGPDEVIGESMEMPAEVGQKSQKRPFPEELPADLKHWKPAEPPTVVTGSLLVGPVSDCSTLPCLPLPALFNQEPASGQMRLEKTDQIPMPFSSSSLSCLNLPEGPIQFVPTISTLPHGLWQISEAGTGVSSIFIYHGEVPQASQVPPPSGFTVHGLPTSPDRPGSTSPFAPSATDLPSMPEPALTSRANMTEHKTSPTQCPAAGEVSNKLPKWPEPVEQFYRSLQDTYGAEPAGPDGILVEVDLVQARLERSSSKSLERELATPDWAERQLAQGGLAEVLLAAKEHRRPRETRVIAVLGKAGQGKSYWAGAVSRAWACGRLPQYDFVFSVPCHCLNRPGDAYGLQDLLFSLGPQPLVAADEVFSHILKRPDRVLLILDGFEELEAQDGFLHSTCGPAPAEPCSLRGLLAGLFQKKLLRGCTLLLTARPRGRLVQSLSKADALFELSGFSMEQAQAYVMRYFESSGMTEHQDRALTLLRDRPLLLSHSHSPTLCRAVCQLSEALLELGEDAKLPSTLTGLYVGLLGRAALDSPPGALAELAKLAWELGRRHQSTLQEDQFPSADVRTWAMAKGLVQHPPRAAESELAFPSFLLQCFLGALWLALSGEIKDKELPQYLALTPRKKRPYDNWLEGVPRFLAGLIFQPPARCLGALLGPSAAASVDRKQKVLARYLKRLQPGTLRARQLLELLHCAHEAEEAGIWQHVVQELPGRLSFLGTRLTPPDAHVLGKALEAAGQDFSLDLRSTGICPSGLGSLVGLSCVTRFRAALSDTVALWESLQQHGETKLLQAAEEKFTIEPFKAKSLKDVEDLGKLVQTQRTRSSSEDTAGELPAVRDLKKLEFALGPVSGPQAFPKLVRILTAFSSLQHLDLDALSENKIGDEGVSQLSATFPQLKSLETLNLSQNNITDLGAYKLAEALPSLAASLLRLSLYNNCICDVGAESLARVLPDMVSLRVMDVQYNKFTAAGAQQLAASLRRCPHVETLAMWTPTIPFSVQEHLQQQDSRISLR

SEQ ID NO: 32193 - protein, 43 aa, Homo sapiens
LRLRLHEHLYLRVEDEWSHQLQHRAPPVVPAGFSALRSPHVYP

SEQ ID NO: 32194 - protein, 107 aa, Homo sapiens
VVRSSKFRHVFGQPAKADQCYEDVRVSQTTWDSGFCAVNPKFVALICEASGGGAFLVLPLGKTGRVDKNAPTVCGHTAPVLDIAWCPHNDNVIASGSEDCTVMVVTT

SEQ ID NO: 32195 - protein, 90 aa, Homo sapiens
IGPENGPISGEEKRRPPVTLWKLDTYVTRKVIWTRGSPMMTSTHPLLSQPAKPRAPTAPSMGTVKQNSPWSLKCRAWSGAKNSPRGPTRC

SEQ ID NO: 32196 - protein, 1149 aa, Homo sapiens
LPGPGPRPRPGARPARGARAPSPGPGPGPRVPGPGAPRPRPPAPPGRPRAVPGPGSRRGAGGSMVEKRCPLQRDGVYRWFSELPSPQRVEFLCGLLDLCIPLELRFLGSCLEDLARKDYHSLRDSEIKANNPADLGSLTNLTDEVVRSKLLVSLALLGSEQREAAGVLYRTLTHIDSIIHNYGLQLNEGRTGDEFLLLFTMASNHPAFSFHQKQVLRQELTQIQSSLNGGGGHGGKGAPGPGGALPTCPACHKITPRTEAPVSSVSNSLENALHTSAHSTEESLPKRPLGKHSKVSVEKIDLKGLSHTKNDRNVECSFEVLWSDSSITSVTKSSSEVTEFISKLCQLYPEENLEKLIPCLAGPDAFYVERNHVDLDSGLRYLASLPSHVLKNDHVRRFLSTSSPPQQLQSPSPGNPSLSKVGTVMGVSGRPVCGVAGIPSSQSGAQHHGQHPAGSAAPLPHCSHAGSAGSALAYRTQMDTSPAILMPSSLQTPQTQEQNGILDWLRKLRLHKYYPVFKQLSMEKFLSLTEEDLNKFESLTMGAKKKLKTQLELEKEKSERRCLNPSAPPLVTSSGVARVPPTSHVGPVQSGRGSHAAELRVEVEQPHHQLPREGSSSEYSSSSSSPMGVQAREESSDSAEENDRRVEIHLESSDKEKPVMLLNHFTSSSARPTAQVLPVQNEASSNPSGHHPLPPQMLSAASHITPIRMLNSVHKPERGSADMKLLSSSVHSLLSLEERNKGSGPRSSMKVDKSFGSAMMDVLPASAPHQPVQVLSGLSESSSMSPTVSFGPRTKVVHASTLDRVLKTAQQPALVVETSTAATGTPSTVLHAARPPIKLLLSSSVPADSAISGQTSCPNNVQISVPPAIINPRTALYTANTKVAFSAMSSMPVGPLQGGFCANSNTASPSSHPSTSFANMATLPSCPAPSSSPALSSVPESSFYSSSGGGGSTGNIPASNPNHHHHHHHQQPPAPPQPAPPPPGCIVCTSCGCSGSCGSSGLTVSYANYFQHPFSGPSVFTFPFLPFSPMCSSGYVSAQQYGGGSTFPVVHAPYSSSGTPDPVLSGQSTFAVPPMQNFMAGTAGVYQTQGLVGSSNGSSHKKSGNLSCYNCGATGHRAQDCKQPSMDFNRPGTFRLKYAPPAESLDSTD

SEQ ID NO: 32197 - protein, 456 aa, Homo sapiens
LEGHSRESMEEVIEQMSPQERDFPSGLMIFKKSPSSEKDRENNESERGCSPSPNLVTHQGDTTEGVSAFATSGQNFLEILESNKTQRSSVGEKPHTCKECGKAFNQNSHLIQHMRVHSGEKPFECKECGKTFGTNSSLRRHLRIHAGEKPFACNECGKAFIQSSHLIHHHRIHTGERPYKCEECGKAFSQNSALILHQRIHTGEKPYECNECGKTFRVSSQLIQHQRIHTEERYHECNECGKAFKHSSGLIRHQKIHTGEKPYLCNECGKGFGQSSELIRHQRIHTGDKPYECNECGKTFGQNSEIIRHIRIHTGEKPYVCKECGKAFRGNSELLRHERIHTGEKPYECFECGKAFRRTSHLIVHQRIHTGEKPHQCNECARTFWDNSELLLHQKIHIGEKPYECSECEKTFSQHSQLIIHQRIHTGEKPYECQECQKTFSRSSHLLRHQSVHCME

SEQ ID NO: 32198 - protein, 163 aa, Homo sapiens
VVACDFSPDGALLATASYDTRVYIWDPHNGDILMEFGHLFPPPTPIFAGGANDRWVRSVSFSHDGLHVASLADDKMVRFWRIDEDYPVQVAPLSNGLCCAFSTDGSVLAAGTHDGSVYFWATPRQVPSLQHLCRMSIRRVMPTQEVQELPIPSKLLEFLSYRI

SEQ ID NO: 32199 - protein, 125 aa, Homo sapiens
LFPPPTPIFAGGANDRWVRSVSFSHDGLHVASLADDKMVRFWRIDEDYPVQVAPLSNGLCCAFSTDGSVLAAGTHDGSVYFWATPRQVPSLQHLCRMSIRRVMPTQEVQELPIPSKLLEFLSYRI

SEQ ID NO: 32200 - protein, 538 aa, Homo sapiens
LETTAQRVPEREALVVLHEDVRLTFAQLKEEVDKAASGLLSIGLCKGDRLGMWGPNSYAWVLMQLATAQAGIILVSVNPAYQAMELEYVLKKVGCKALVFPKQFKTQQYYNVLKQICPEVENAQPGALKSQRLPDLTTVISVDAPLPGTLLLDEVVAAGSTRQHLDQLQYNQQFLSCHDPINIQFTSGTTGSPKGATLSHYNIVNNSNILGERLKLHEKTPEQLRMILPNPLYHCLGSVAGTMMCLMYGATLILASPIFNGKKALEAISRERGTFLYGTPTMFVDILNQPDFSSYDISTMCGGVIAGSPAPPELIRAIINKINMKDLVVAYGTTENSPVTFAHFPEDTVEQKAESVGRIMPHTEARIMNMEAGTLAKLNTPGELCIRGYCVMLGYWGEPQKTEEAVDQDKWYWTGDVATMNEQGFCKIVGRSKDMIIRGGENIYPAELEDFFHTHPKVQEVQVVGVKDDRMGEEICACIRLKDGEETTVEEIKAFCKGKISHFKIPKYIVFVTNYPLTISGKIQKFKLREQMERHLNL

SEQ ID NO: 32201 - protein, 22 aa, Homo sapiens
LCMVYRRQLTFEEEIAALRSFL

SEQ ID NO: 32202 - protein, 39 aa, Homo sapiens
MPTNTGMTSTKSTKMGFSRIDIGFLPNSLSWHLAKIKII

SEQ ID NO: 32203 - protein, 14 aa, Homo sapiens
KKIVSWVFVTYKLS

SEQ ID NO: 32204 - protein, 765 aa, Homo sapiens
TFVFDRVFGEAATQQDVFQHTTHSVLDSFLQGYNCSVFAYGATGAGKTHTMLGREGDPGIMYLTTVELYRRLEARQQEKHFEVLISYQEVYNEQIHDLLEPKGPLAIREDPDKGVVVQGLSFHQPASAEQLLEILTRGNRNRTQHPTDANATSSRSHAIFQIFVKQQDRVPGLTQAVQVAKMSLIDLAGSERASSTHAKGERLREGANINRSLLALINVLNALADAKGRKTHVPYRDSKLTRLLKDSLGGNCRTVMIAAISPSSLTYEDTYNTLKYADRAKEIRLSLKSNVTSLDCHISQYATICQQLQAEVAALRKKLQVYEGGGQPPPQDLPGSPKSGPPPEHLPSSPLPPHPPSQPCTPELPAGPRALQEESLGMEAQVERAMEGNSSDQEQSPEDEDEGPAEEVPTQMPEQNPTHALPESPRLTLQPKPVVGHFSARELDGDRSKQLALKVLCVAQRQYSLLQAANLLTPDMITEFETLQQLVQEEKIEPGAEALRTSGLARGAPLAQELCSESIPVPSPLCPEPPGYTGPVTRTMARRLSGPLHTLGIPPGPNCTPAQGSRWPMEKKRRRPSALEADSPMAPKRGTKRQRQSFLPCLRRGSLPDTQPSQGPSTPKGERASSPCHSPRVCPATVIKSRVPLGPSAMQNCSTPLALPTRDLNATFDLSEEPPSKPSFHECIGWDKIPQELSRLDQPFIPRAPVPLFTMKGPKPTSSLPGTSACKKKRVASSSVSHGRSRIARLPSSTLKRPAGPLVLPGDWH

SEQ ID NO: 32205 - protein, 24 aa, Homo sapiens
IFFSCSLEGSLVWLMKSQSSEIPS

SEQ ID NO: 32206 - protein, 9 aa, Homo sapiens
LGKTCKEFA

SEQ ID NO: 32207 - protein, 64 aa, Homo sapiens
KDMIPTEMQRLTKYPLLLQSIGQNTEEPTEREKVELAAECCREILHHVNQAVRDMEDLLVSPST

SEQ ID NO: 32208 - protein, 27 aa, Homo sapiens
ISAQHLCYSHVTPGDPGAGAGQGPAPS

SEQ ID NO: 32209 - protein, 474 aa, Homo sapiens
IQDFYFREMQQNIHDFECQCHNDERNYREIPAIKIKNITGRRDQGDGRNAGNKPVENQLELSFWLHLAELQGFQIERKIYECNQIEKSVTRGSSVSLLQTNLPCVNTSISNIYRNDFMHPSLLTQDQKAYIREKPYKCSDCGKAFNQRSNLTTHQRIHTGQKPHKCDICGKGFRRIANLASHHRIHTGEKPYRCNECGKTFNQTFNLTTHQRIHTGQKPYKCDRCGKGFRQIGNLASHHRIHTGEKPYRCNECGKTFNRMFHLTRHQRIHTGQKPYKCDICGKGFRQIANLASHHRIHTGEKPYKCSDCGKTFNYRSHLTRHQRIHTGQKPYKCDTCGKDFSQNSYLENHQRIHTREKSYRCNECGKTFNKMTNLTTHQRIHTGQKTYKCDICGKGFRQIGNLASHHRIHTGEKPYRCNECGKTFNRMFHLTRHQRIHTGQKPYKCDICGKSFSQNSYLENHQRIHTGEKTYKL

SEQ ID NO: 32210 - protein, 20 aa, Homo sapiens
KHPIRLPRGGMPTLSSSCPQ

SEQ ID NO: 32211 - protein, 31 aa, Homo sapiens
RLCSQDDRVGDSSTSGGRDPRHQALWEVEHR

SEQ ID NO: 32212 - protein, 8 aa, Homo sapiens
VLSNFGFL

SEQ ID NO: 32213 - protein, 43 aa, Homo sapiens
VRLSSPRSEPCRPRARCSLCRSSDARRQRQLWRTANAAMVSSR

SEQ ID NO: 32214 - protein, 20 aa, Homo sapiens
IMYLYTLGDTVKCTSHCGLP

SEQ ID NO: 32215 - protein, 393 aa, Homo sapiens
VNESHQKSSNMNAGPSWNKVQHSKNSSGKRQSKSQVPHASSQPRSSLTAVTQPTEEKLKESISPEARRKRNPLGSRCQGASGNKLFLDFQSMKIIKENADEDSASDLSDSERIPIPPSPLTPPDLNLRAEEIDPVYFDLHPGQGHTKPEYYYPNFLPSPFSSWDLRDMALLLNAENKTEAVPRVGGLLGKYIDRLIQLEWLQVQTVQCEKAKGGKARPPTAPGTSGALKSPGRSKLIASALSKPLPHQEGASKSGPSRKKAFHHEEIHPSHYAFETSPRPIDVLGGTRFCSQRQTLEMRTEEKKKKSSKSTKLQRWDLSGSGSSSKVETSGHIRVPKQAAVILDSADSCKASKTQAHAHPRKKGKAESCGHATVSSEKKLKTNGVKQNTYKLK

SEQ ID NO: 32216 - protein, 6 aa, Homo sapiens
KKLKPF

SEQ ID NO: 32217 - protein, 66 aa, Homo sapiens
LEGSAGADASFSSLYKATFDNVTSYLKKKEERLQQQLEKKQRRRSPPPGPDGHAKKMRPGEATLSC

SEQ ID NO: 32218 - protein, 22 aa, Homo sapiens
VWPLTEISQPMAPNKGSCLCSL

SEQ ID NO: 32219 - protein, 40 aa, Homo sapiens
LSTEFDSVRQRLPKYYSWEKAFKTSFKLSWSKWKLCKKER

SEQ ID NO: 32220 - protein, 6 aa, Homo sapiens
LLLFFN

SEQ ID NO: 32221 - protein, 552 aa, Homo sapiens
LREELNALRGENANLGLQLGRALAEVNSLRGNVSSYIRWPVPIVPVLAEENLEFALSEIEVIPGGELPFLCRPPPRAEPDCISDDLLINVIQDRSTPDGPADPPLLPIPPPPALPPPASKEPPPQPPLAPLERPEIEPFSGDPVYLAEFLMQLETFIADHEVHFPGGAERVAFLISFFTGEAKDWAISVTQEGSPLHANFPRFLDEIRKEFCGPIPPRVAKKAIRKLKQGHCTLGSYADAFQFLAQFLSWDDCRLQNQFLKGLSEFFRKELLWSTEMADLDELILECVEIERKVRVPKPIPLPGVRNIIFPFAPSPNEEESEDEEYYSEDEDQEARRHRLHSKDQRKRMRAFQQEMKEKEEEEMKKEEEMKKKEEKEEEEEEEMKQKEEEEEIRNKNEEEGESKDEEDEDEDGGQKPEGEPQQDPGTEETYGEVEEEPLDEAQDDDLDELMEMEPTFVHASSQTSGPTSGYHAENFLGASPPIIQPSRRRNQNRVPLLEGLPGTNSPFYSSPQLIRRTGRLGQRQVRRRPPVLFRLTPRQGGHRAARGRIRV

SEQ ID NO: 32222 - protein, 338 aa, Homo sapiens
MSLPKLQQVPGLHPQAVPQPDVALHARPATSTVTGLGLSTRTPSVSTSESSAGAGTGTGTSTPSTPTTTSQSRLIASSPTLISGITSPPLLDSIKTIQGHGLLGPPKSERGRKKIKAENPGGPPVLVVPYPILASGETAKEGKTYRCKVCPLTFFTKSEMQIHSKSHTEAKPHKCPHCSKSFANASYLAQHLRIHLGVKPYHCSYCDKSFRQLSHLQQHTRIHTGDRPYKCPHPGCEKAFTQLSNLQSHQRQHNKDKPYKCPNCYRAYSDSASLQIHLSAHAIKHAKAYCCSMCGRAYTSETYLMKHMSKHTVVEHLVSHHSPQRTESPGIPVRISLI

SEQ ID NO: 32223 - protein, 59 aa, Homo sapiens
MLGTQSEFEVARPRGANVWPNMDAQDSWETAPAGPRAVPECPQRPALSHWASPARAAFP

SEQ ID NO: 32224 - protein, 571 aa, Homo sapiens [sequence omitted]

SEQ ID NO: 32225 - protein, 55 aa, Homo sapiens
MTVQEDRKCESDLRHYYDSTIELCVGDPEIKKTSFKVRLCTCLDWLLGERCLGNI

SEQ ID NO: 32226 - protein, 71 aa, Homo sapiens
MPPHPPPGGPHAAHHPLPQCCPCSPAAQPSPLCSLLLPPPLPVLCPPLPQCLPPTSHPMPQVPQTIRTSRP

SEQ ID NO: 32227 - protein, 92 aa, Homo sapiens
MPQLQFKDAFWCRDFTAHTGYEVLLQRLLDGRKMCKDMEELLRQRAQAEERYGKELVQIARKAGGQTEINWWTVVSLPRGEPWKRRGLQGRC

SEQ ID NO: 32228 - protein, 2346 aa, Homo sapiens
MALQNAYQAIHSGQCPAAIVGGINVLLKPNTSVQFLRLGMLSPEGTCKAFDTAGNGYCRSEGVVAVLLTKKSLARRVYATILNAGTNTDGFKEQGVTFPSGDIQEQLIRSLYQSAGVAPESFEYIEAHGTGTKVGDPQELNGITRALCATRQEPLLIGSTKSNMGHPEPASGLAALAKVLLSLEHGLWAPNLHFHSPNPEIPALLDGRLQVVDQPLPVRGGNVGINSFGFGGSNVHIILRPNTQPPPAPAPHATLPRLLRASGRTPEAVQKLLEQGLRHSQDLAFLSMLNDIAAVPATAMPFRGYAVLGGERGGPEVQQVPAGERPLWFICSGMGTQWRGMGLSLMRLDRFRDSILRSDEAVKPFGLKVSQLLLSTDESTFDDIVHSFVSLTAIQIGLIDLLSCMGLRPDGIVGHSLGEVACGYADGCLSQEEAVLAAYWRGQCIKEAHLPPGAMAAVGLSWEECKQRCPPGVVPACHNSKDTVTISGPQAPVFEFVEQLRKEGVFAKEVRTGGMAFHSYFMEAIAPPLLQELKKVIREPKPRSARWLSTSIPEAQWHSSLARTSSAEYNVNNLVSPVLFQEALWHVPEHAVVLEIAPHALLQAVLKRGLKPSCTIIPLMKKDHRDNLEFFLAGIGRLHLSGIDANPNALFPPVEFPAPRGTPLISPLIKWDHSLAWDVPAAEDFPNGSGSPSAAIYNIDTSSESPDHYLVDHTLDGRVLFPATGYLSIVWKTLARALGLGVEQLPVVFEDVVLHQATILPKTGTVSLEVRLLEASRAFEVSENGNLVVSGKVYQWDDPDPRLFDHPESPTPNPTEPLFLAQAEVYKELRLRGYDYGPHFQGILEASLEGDSGRLLWKDNWVSFMDTMLQMSILGSAKHGLYLPTRVTAIHIDPATHRQKLYTLQDKAQVADVVVSRWLRVTVAGGVHISGLHTESAPRRQQEQQVPILEKFCFTPHTEEGCLSERAALQEELQLCKGLVQALQTKVTQQGLKMVVPGLDGAQIPRDPSQQELPRLLSAACRLQLNGNLQLELAQVLAQERPKLPEDPLLSGLLDSPALKACLDTAVENMPSLKMKVVEVLAGHGHLYSRIPGLLSPHPLLQLSYTATDRHPQALEAAQAELQQHDVAQGQWDPADPAPSALGSADLLVCNCAVAALGDPASALSNMVAALREGGFLLLHTLLRGHPLGDIVAFLTSTEPQYGQGILSQDAWESLFSRVSLRLVGLKKSFYGSTLFLCRRPTPQDSPIFLPVDDTSFRWVESLKGILADEDSSRPVWLKAINCATSGVVGLVNCLRREPGGNRLRCVLLSNLSSTSHVPEVDPGSAELQKVLQGDLVMNVYRDGAWGAFRHFLLEEDKPEEPTAHAFVSTLTRGDLSSIRWVCSSLRHAQPTCPGAQLCTVYYASLNFRDIMLATGKLSPDAIPGKWTSQDSLLGMEFSGRDASGKRVMGLVPAKGLATSVLLSPDFLWDVPSNWTLEEAASVPVVYSTAYYALVVRGRVRPGETLLIHSGSGGVGQAAIAIALSLGCRVFTTVGSAEKRAYLQARFPQLDSTSFANSRDTSFEQHVLWHTGGKGVDLVLNSLAEEKLQASVRCLATHGRFLEIGKFDLSQNHPLGMAIFLKNVTFHGVLLDAFFNESSADWREVWALVQAGIRDGVVRPLKCTVFHGAQVEDAFRYMAQGKHIGKVVVQVLAEEPEAVLKGAKPKLMSAISKTFCPAHKSYIIAGGLGGFGLELAQWLIQRGVQKLVLTSRSGIRTGYQAKQVRRWRRQGVQVQVSTSNISSLEGARGLIAEAAQLGPVGGVFNLAVVLRDGLLENQTPEFFQDVCKPKYSGTLNLDRVTREACPELDYFVVFSSVSCGRGNAGQSNYGFANSAMERICEKRRHEGLPGLAVQWGAIGDVGILVETMSTNDTIVSGTLPQRMASCLEVLDLFLNQPHMVLSSFVLAEKAAAYRDRDSQRDLVEAVAHILGIRDLAAVNLDSSLADLGLDSLMSVEVRQTLERELNLVLSVREVRQLTLRKLQELSSKADEASELACPTPKEDGLAQQQTQLNLRSLLVNPEGPTLMRLNSVQSSERPLFLVHPIEGSTTVFHSLASRLSIPTYGLQCTRAAPLDSIHSLAAYYIDCIRQVQPEGPYRVAGYSYGACVAFEMCSQLQAQQSPAPTHNSLFLFDGSPTYVLAYTQSYRAKLTPGCEAEAETEAICFFVQQFTDMEHNRVLEALLPLKGLEERVAAAVDLIIKSHQGLDRQELSFAARSFYYKLRAAEQYTPKAKYHGNVMLLRAKTGGAYGEDLGADYNLSQVCDGKVSVHVIEGDHRTLLEGSGLESIISIIHSSLAEPRVSVREG

SEQ ID NO: 32229 - protein, 115 aa, Homo sapiens [sequence omitted]

SEQ ID NO: 32230 - protein, 170 aa, Homo sapiens [sequence omitted]

SEQ ID NO: 32231 - protein, 109 aa, Homo sapiens [sequence omitted]

SEQ ID NO: 32232 - protein, 243 aa, Homo sapiens
MEVFDDLEQHIRSPVVLQSILSLMDRGAMVLTTNYDNLLEAFGRRQNKPMESLDLKDKTKVLEWARGHMKYGVLHIHGLYTDPCGVVLDPSGYKDVTQDAEVMEVLQNLYRTKSFLFVGCGETLRDQIFQALFLYSVPNKVDLEHYMLVLKENEDHFFKHQADMLLHGIKVVSYGDCFDHFPGYVQDLATQICKQQSPDADRVDSTTLLGNACQDCAKRKLEENGIEVSKKRTQSDTDDAGGS

SEQ ID NO: 32233 - protein, 117 aa, Homo sapiens
MVKRKPTGDLELLQLDIGRVWPGTKMPGKMGNIYRTEYGLKVWRINTKHNIIYVNGSVPGHKNCLVKVKDSKLPAYKDLGKNLPFPTYFPDGDEEELPEDLYDENVCQPGAPSITFA

SEQ ID NO: 32234 - protein, 8 aa, Homo sapiens
MIGCDFRS

SEQ ID NO: 32235 - protein, 42 aa, Homo sapiens
LVHTGFLGSSQDRSAYQTIDSAEAPADPFAVPEGRSQDARGY

SEQ ID NO: 32236 - protein, 58 aa, Homo sapiens
IYRVPLLLEEQGVVDYFLRRLDLPIERQPRKMLMKWKEMADRFACNEELGVLASFTLL

SEQ ID NO: 32237 - protein, 149 aa, Homo sapiens
KFKRVGKEKCRPVLAGGGSGSAGTPLQHSFLTEVTDVYEMEGGLLNLLNDFHSGRLQAFGKECSFEQLEHVREMQEKLARLHFSLDVCGEEEDDEEEEDGVTEGLPEEQKKTMADRNLDQLLSNLEDLSNSIQKLHLAENAEPEEQSAA

SEQ ID NO: 32238 - protein, 36 aa, Homo sapiens
RRNCFYSILPVIQIIYPEVNSKASDGSYNTHRLSIY

SEQ ID NO: 32239 - protein, 234 aa, Homo sapiens
KGKKYKTNSSTKVLQDASNSIDHRIPNSQRKISADTIGDEGFFDLLSRFQSNRMDDQRCCLQEKNCHTASTTTSSTPPKMMLKTSSVPVVSPNTDEFLDLLASSQSRRLDDQRASFSNLPGLRLTQNSQSVLSHLMTNDNKEADEDFFDILVKCQGSRLDDQRCAPPPATTKGPTVPDEDFFSLILRSQGKRMDEQRVLLQRDQNRDTDFGLKDFLQNNALLEFKNSGKKSADH

SEQ ID NO: 32240 - protein, 70 aa, Homo sapiens
ISRDNWHKRRKTGGKRKPYHKKRKYELGRPAANTKIGPRRIHTVRVRGGNKKYRALRLDVGNFSWGSECE

SEQ ID NO: 32241 - protein, 28 aa, Homo sapiens
RNAKKTGLSHFRNNWSLKSDCYSRRQLW

SEQ ID NO: 32242 - protein, 26 aa, Homo sapiens
MDMKAYLRSMIPHLESGMKSSKSKDV

SEQ ID NO: 32243 - protein, 1252 aa, Homo sapiens
KLAVKNTGLQRSSSDAGRDRLSDAKKPPSGIARPSTSGSFGYKKPPPATGTATVMQTGGSATLSKIQKSSGIPVKPVNGRKTSLDVSNSAEPGFLAPGARSNIQYRSLPRPAKSSSMSVTGGRGGPRPVSSSIDPSLLSTKQGGLTPSRLKEPTKVASGRTTPAPVNQTDREKEKAKAKAVALDSDNISLKSIGSPESTPKNQASHPTATKLAELPPTPLRATAKSFVKPPSLANLDKVNSNSLDLPSSSDTTHASKVPDLHATSSASGGPLPSCFTPSPAPILNINSASFSQGLELMSGFSVPKETRMYPKLSGLHRSMESLQMPMSLPSAFPSSTPVPTPPAPPAAPTEEETEELTWSGSPRAGQLDSNQRDRNTLPKKGLRYQLQSQEETKERRHSHTIGGLPESDDQSELPSPPALPMSLSAKGQLTNIVHGSVLSLASSASSTYSSAEERMQSEQIRKLRRELESSQEKVATLTSQLSANANLVAAFEQSLVNMTSRLRHLAETAEEKDTELLDLRETIDFLKKKNSEAQAVIQGALNASETTPKELRIKRQNSSDSISSLNSITSHSSIGSSKDADAKKKKKKSWLRSSFNKAFSIKKGPKSASSYSDIEEIATPDSSAPSSPKLQHGSTETASPSIKSSTSSSVGTDVTEGPAHPAPHTRLFHANEEEEPEKKEVSELRSELWEKEMKLTDIRLEALNSAHQLDQLRETMHNMQLEVDLLKAENDRLKVAPGPSSGSTPGQVPGSSALSSPRRSLGLALTHSFGPSLADTDLSPMDGISTCGPKEEVTLRVVVRMPPQHIIKGDLKQQEFFLGCSKVSGKVDWKMLDEAVFQVFKDYISKMDPASTLGLSTESIHGYSISHVKRVLDAEPPEMPPCRRGVNNISVSLKGLKEKCVDSLVFETLIPKPMMQHYISLLLKHRRLVLSGPSGTGKTYLTNRLAEYLVERSGREVTEGIVSTFNMHQQSCKDLQLYLSNLANQIDRETGIGDVPLVILLDDLSEAGSISELVNGALTCKYHKCPYIIGTTNQPVKMTPNHGLHLSFRMLTFSNNVEPANGFLVRYLRRKLVESDSDINANKEELLRVLDWVPKLWYHLHTFLEKHSTSDFLIGPCFFLSCPIGIEDFRTWFIDLWNNSIIPYLQEGAKDGIKVHGQKAAWEDPVEWVRDTLPWPSAQQDQSKLYHLPPPTVGPHSIASPPEDRTVKDSTPSSLDSDPLMAMLLKLQEAANYIESPDRETILDPNLQATL

SEQ ID NO: 32244 - protein, 990 aa, Homo sapiens
KDQQFKKDQNVLSPVNCWNLLLNQVKRESRDHTTLSDIYLNNIIPRFVQVSEDSGRLFKKSKEVGQQLQDDLMKVLNELYSVMKTYHMYNADSISAQSKLKEAEKQEEKQIGKSVKQEDRQTPRSPDSTANVRIEEKHVRRSSVKKIEKMKEKRQAKYTENKLKAIKARNEYLLALEATNASVFKYYIHDLSDLIDQCCDLGYHASLNRALRTFLSAELNLEQSKHEGLDAIENAVENLDATSDKQRLMEMYNNVFCPPMKFEFQPHMGDMASQLCAQQPVQSELVQRCQQLQSRLSTLKIENEEVKKTMEATLQTIQDIVTVEDFDVSDCFQYSNSMESVKSTVSETFMSKPSIAKRRANQQETEQFYFTKMKEYLEGRNLITKLQAKHDLLQKTLGESQRTDCSLARRSSTVRKQDSSQAIPLVVESCIRFISRHGLQHEGIFRVSGSQVEVNDIKNAFERGEDPLAGDQNDHDMDSIAGVLKLYFRGLEHPLFPKDIFHDLMACVTMDNLQERALHIRKVLLVLPKTTLIIMRYLFAFLNHLSQFSEENMMDPYNLAICFGPSLMSVPEGHDQVSCQAHVNELIKTIIIQHENIFPSPRELEGPVYSRGGSMEDYCDSPHGETTSVEDSTQDVTAEHHTSDDECEPIEAIAKFDYVGRTARELSFKKGASLLLYQRASDDWWEGRHNGIDGLIPHQYIVVQDTEDGVVERSSPKSEIEVISEPPEEKVTARAGASCPSGGHVADIYLANINKQRKRPESGSIRKTFRSDSHGLSSSLTDSSSPGVGASCRPSSQPIMSQSLPKEGPDKCSISGHGSLNSISRHSSLKNRLDSPQIRKTATAGRSKSFNNHRPMDPEVIAQDIEATMNSALNELRELERQSSVKHTPDVVLDTLEPLKTSPVVAPTSEPSSPLHTQLLKDPEPAFQRSASTAGDIACAFRPVKSVKMAAPVKPPATRPKPTVFPKTNATSPGVNSSTSPQSTDKSCTV

SEQ ID NO: 32245 - protein, 12 aa, Homo sapiens
ILGPKKTIRRIH

SEQ ID NO: 32246 - protein, 20 aa, Homo sapiens
IRSCRRKTQGKRSNSQKAGY

SEQ ID NO: 32247 - protein, 11 aa, Homo sapiens
KSLRFHFSQLG

SEQ ID NO: 32248 - protein, 568 aa, Homo sapiens
LRPLNLEEENKKCQDRSHLSISPVSLPKHQLSQSFLKSSKEYCTYVVCNATNSSLSKNCALDFNEENDADDEGEIWYNPIPEDDDLGISSALSFGEADSAVLKLPAVNLSMLSGSDLMKAERHTEDSLCSSEHAGDIQTTRSNGMNPIHPAHSTEFVQQYKQKLGHKTQEGIMVEDSPMLKSPFAGSGILAATNSTELGIMEPSSPNPSPVKKGSSINWSLPDKIKSPRTVRKLSMKMKKLPEFSRKLSVKGTLNYINSPDNTPSLSKYNCREVHHTDILPSGNTTTAAKRNVISRYHLDTSVSSQQSYQKKNSMSSKYSCKGGYLSDGDSPELTTKASKHGSENKFGKGKEIISNSCSKNEIDIDAFRHYSFSDQPKCSQYISGLMSVHFYGAEDLKPPRIDSKDVFCAIQVDSVNKARTALLTCRTTFLDMDHTFNIEIENAQHLKLVVFSWEPTPRKNRVCCHGTVVLPTLFRVTKTHQLAVKLEPRGLIYVKVTLMEQWENSLHGLDINQEPIIFGVDIQKVVEKENIGLMVPLLIQKCIMEIEKRGCQVLSYYGSLLLPLLID

SEQ ID NO: 32249 - protein, 517 aa, Homo sapiens
LDHPLLRRTGSQGRQSQGSVMRTQIEVIPCKICGDKSSGIHYGVITCEGCKGFFRRSQRCNAAYSCTRQQNCPIDRTSRNRCQHCRLQKCLALGMSRDAVKFGRMSKKQRDSLHAEVQKQLQQRQQQQQEPVVKTPPAGAQGADTLTYTLGLPDGQLPLGSSPDLPEASACPPGLLKASGSGPSYSNNLAKAGLNGASCHLEYSPERGKAEGRESFYSTGSQLTPDRCGLRFEEHRHPGLGELGQGPDSYGSPSFRSTPEAPYASLTEIEHLVQSVCKSYRETCQLRLEDLLRQRSNIFSREEVTGYQRKSMWEMWERCAHHLTEAIQYVVEFAKRLSGFMELCQNDQIVLLKAGAMEVVLVRMCRAYNADNRTVFFEGKYGGMELFRALGCSELISSIFDFSHSLSALHFSEDEIALYTALVLINAHRPGLQEKRKVEQLQYNLELAFHHHLCKTHRQSILAKLPPKGKLRSLCSQHVERLQIFQHLHPIVVQAAFPPLYKELFSTETESPVGLSK

SEQ ID NO: 32250 - protein, 28 aa, Homo sapiens
KTSRQMDTLDTVKSNRRRQTVGGCAHVR

SEQ ID NO: 32251 - protein, 12 aa, Homo sapiens
LVIMLLTRTETV

SEQ ID NO: 32252 - protein, 44 aa, Homo sapiens
IESMLEYEPAKRLTLGEALQHPFFARLRAEPPNKLWDSSRDISR

SEQ ID NO: 32253 - protein, 16 aa, Homo sapiens
KVVFPERVLSIALRIC

SEQ ID NO: 32254 - protein, 20 aa, Homo sapiens
MNGAPIQRFSSFNKFKTLSN

SEQ ID NO: 32255 - protein, 9 aa, Homo sapiens
LGFLAAPTI

SEQ ID NO: 32256 - protein, 33 aa, Homo sapiens
KLLVRAGFKSMLQILVEACVELFRDLAVSSFPE

SEQ ID NO: 32257 - protein, 1092 aa, Homo sapiens
ILVTQGRRWPLMIDPQDQANRWIRNKESKSGLKIIKLTDSNFLRILENSIRLGLPVLLEELKETLDPALEPILLKQIFISGGRLLIRLGDSDIDYDKNFRFYMTTKMPNPHYLPEVCIKVTIINFTVTKSGLEDQLLSDVVRLEKPRLEEQRIKLIVRINTDKNQLKTIEEKILRMLFTSEGNILDNEELIDTLQDSKITSGAIKTRLEEAESTEQMINVAREKYRPVATQGSVMYFVIASLSEIDPMYQYSLKYFKQLFNTTIETSVKTENLQQRLDVLLEQTLLTAYVNVSRGLFEQHKLIYSFMLCVEMMRQQGTLSDAEWNFFLRGSAGLEKERPPKPEAPWLPTATWFACCDLEESFPVFHGLTQNILSHPISIRLGSFETYINPQKWEGYSKMKHEDKHMRQEKEAAHQDPWSAGLSSFHKLILIKCCKEEKVVFALTDFVIENLGKQFIETPPVDLPTLYQDMSCNTPLVFILSTGSDPMGAFQRFARESGYSERVQSISLGQGQGPIAEKMVKDAMKSGNWVFLQNCHLAVSWMLAMEELIKTFTDPDSAIKDTFRLFLSSMPSNTFPVTVLQNSVKVTNEPPKGLRANIRRAFTEMTPSFFEENILGKKWRQIIFGICFFHAIIQERKKFGPLGWNICYEFNDSDRECALLNLKLYCKEGKIPWDALIYITGEITYGGRVTDSWDQRCLRTILKRFFSPETLEEDYKYSESGIYFAPMADSLQEFKDYIENLPLIDDPEIFGMHENANLVFQYKETSTLINTILEVQPRSSTGGEGKSNDEIVQELVASVQTRVPEKLEMEGASESLFVKDLQGRLNSLTTVLGQEVDRFNNLLKLIHTSLETLNKAIAGFVVMSEEMEKVYNSFLNNQVPALWSNTAYPSLKPLGSWVKDLILRTSFVDLWLKRGQPKSYWISGFFFPQGFLTGTLQNHARKYNLPIDELSFKYSVIPTYRDQAAVIEAAKTVQFGQELPMDMELPSPEDGVLVHGMFMDASRWDDKEMVIEDALPGQMNPVLPVVHFEPQQNYKPSPTLYHCPLYKTGARAGTLSTTGHSTNFVVTVLLPSKRSKDYWIAKGSALLCQLSE

SEQ ID NO: 32258 - protein, 8 aa, Homo sapiens
LRYCPMSA

SEQ ID NO: 32259 - protein, 73 aa, Homo sapiens
LEENRLIPTELRREALALQGSLEFDDAGGEGVTSHVDDEYRWAGVEDPKVMITTSRDPSSRLKMFAKVLVSRE

SEQ ID NO: 32260 - protein, 80 aa, Homo sapiens
VWICVEHTLNGPRKNRAERMSFRSQQYQEMSSFYSQILTSSYWIGSTLSKMQLTDCQRIQVVHQETWNYSKSKDPLALNC

SEQ ID NO: 32261 - protein, 35 aa, Homo sapiens
LKSAGILHLCNLLLSPSHHRNQSLEAFGLGAAFTV

SEQ ID NO: 32262 - protein, 12 aa, Homo sapiens
LALIMLMLEENE

SEQ ID NO: 32263 - protein, 33 aa, Homo sapiens
IGSASCLTSAQDFRASWCSTALVGALALASPHS

SEQ ID NO: 32264 - protein, 27 aa, Homo sapiens
LTSAQDFRASWCSTALVGALALASPHS

SEQ ID NO: 32265 - protein, 4217 aa, Homo sapiens
LGNPPALDPKLPHLPLPPAPPTLSDLGQPRKSPLTGTDKKYPLMKQRGFYSDILSPGTLDQLGEVCRGPRMSQNLLRQADLDKFTPRVGSFEVPEDFQERMEQQCIGSTTRLLAQTDFPLQAYEPKMQVPFQVLPGQHPRKIEIERRKQQYLSLDIEQLLFSQGIDSNKLMPRHLDHQHPQTIEQGHDPIFPIYLPLKVFDNEDFDCRTPREWINMGLEPGSLDRKPVPGKALLPTDDFLGHEDPKSQKLKYKWCEVGVLDYDEEKKLYLVHKTDEKGLVRDEMGRPILNAGVTTEGRPPLQVCQYWVPRIQLLFCAEDPCMFAQRVVQANALRKNTEALLLYNLYVDCMPSDGQHVISEQSLSKIKQWALSTPRMRKGPSVLEHLSSLAREVSLDYERSMNKINFDHVVSSKPETFSYVTLPKKEEEQVPERGLVSVPKYHFWEQKEDFTFVSLLTRPEVITALSKVRAECNKVTAMSLFHSSLSKYSHLEEFEQIQSQTFSQVQMFLKDSWISSLKVAMRSSLRDMSKGWYNLYETNWEVYLMSKLRKLMELVKYMLQDTLRFLVQDSLASFSQFISDTCCSVLNCTDDMVWGDDLINSPYRPRKNPLFIMDLVLDSSGVHYSTPLEQFEASLLNLFDKGILATHAVPQLEKLVMEDIFISGDPLLESVGLHEPLVEELRATIASAVSKAMIPLQAYAKEYRKYLELNNNDIASFLKTYQTQGLLAQEVREVVLTHLREKEILDSSLPSSIIIGPFYINTDNVKQSLSKKRKALATSVLDILAKNLHKEVDSICEEFRSISRKIYEKPNSIEELAELREWMKGIPERLVGLEERIVKVMDDYQVMDEFLYNLSSDDFNDKWIASNWPSKILGQIELVQQQHVEDEEKFRKIQIMDQNNFQEKLEGLQLVVAGFSIHVEISRAHEIANEVRRVKKQLKDCQQLAMLYNNRERIFSLPITNYDKLSRMVKEFQPYLDLWTTASDWLRWSESWMNDPLSAIDAEQLEKNVVEAFKTMHKCVKQFKDMPACQEVALDIRARIEEFKPYIPLIQGLRNPGMRIRHWETLSNQININVRPKANLTFARCLEMNLQDHIESISKVAEVAGKEYAIEQALDKMEKEWSTILFNVLPYKATDTYILKSPDEASQLLDDHIVMTQNMSFSPYKKPFEQRINSWENKLKLTQEVLEEWLNCQRSWLYLEPIFSSEDINQQLPVESKRYQTMERIWKKIMKNAYENREVINVCSDLRMLDSLRDCNKILDLVQKGLSEYLETKRSAFPRFYFLSDDELLEILSQTKDPTAVQPHLRKCFENIARLLFQEDLEITHMYSAEGEEVQLCFSIYPSSNVEDWLREVERSMKASVHDIIEKAIRAYPTMPRTQWVLNWPGQVTIAGCQTYWTMEVAEALEAGNLRSQLFPQLCQQLSDLVALVRGKLSRMQRAVLSALIVIEVHAKDVVSKLIQENVVSVNDFQWISQLRYYWTNNDLYIRAVNAEFIYGYEYLGNSGRLVITPLTDRCYLTLTGALHLKFGGAPAGPAGTGKTETTKDLGKALAIQTVVFNCSDQLDFMAMGKFFKGLASAGAWACFDEFNRIDIEVLSVVAQQITTIQKAQQQRVERFMFEGVEIPLVPSCAVFITMNPGYAGRTELPDNLKALFRPVAMMVPDYAMITEISLYSFGFNEASVLAKKITTTFKLSSEQLSSQDHYDFGMRAVKTVISAAGNLKRENPSMNEELICLRAIRDVNVPKFLQEDLKLFSGIVSDLFPTIKEEDTDYGILDEAIREACRNSNLKDVEGFLTKCIQLYETTVVRHGLMLVGPTGSGKSTCYRVLAAAMTSLKGQPSISGGMYEAVNYYVLNPKSITMGQLYGEFDLLTHEWTDGIFSSFIRAGAITSDTNKKWYMFDGPVDAIWIENMNTVLDDNKKLCLSSGEIIKLTEAMTMMFEVQDLAVASPATVSRCGMVYLEPSILGLMPFIECWLRKLPPLLKPYEEHFKALFVSFLEESISFVRSSVKEVIASTNCNLTMSLLKLLDCFFKPFLPREGLKKIPSEKLSRIVELIEPWFIFSLIWSVGATGDSSGRTSFSHWLRLKMENEQLTLLFPEEGLVFDYRLEDAGISGTNDSEDEEEEYKQVAWVKWMDSSAPFTMVPDTNYCNIIVPTMDTVQMSHLLDMLLTNKKPVLCIGPTGTGKTLTISDKLLKNLALDYISHFLTFSARTSANQTQDFIDSKLDKRRKGVFGPPLGRNFIFFIDDLNMPALETYGAQPPIELLRQWMDHGGWYDRKIIGAFKNLVDINFVCAMGPPGGGRNTVTPRLMRHFNYLSFAEMDEVSKKRIFSTILGNWLDGLLGEKSYRERVPGAPHIAHFTEPLVEATIMVYATITSQLLPTPAKSHYTFNLRDLSKVFQGMLMADPAKVEDQVQLLRLWYHENCRVFRDRLVNEEDRSWFDQLLKRCMEQWEVTFNKVCPFQPILYGDFMSPGSDVKSYELITSESKMMQVIEEYIEDYNQINTAKLKLVLFMDAMSHICRISRTLRQALGNALLLGVGGSGRSSLTRLASHMAEYECFQIELSKNYGMSEWRDDVKKVLLKAGLQNLPITFLFSDTQIKNESFLEDINNVLNSGDIPNLYTADEQDQIVSTMRPYIQEQGLQPTKANLMAAYTGRVRSNIHMVLCMSPIGEVFRARLRQFPSLVNCCTIDWFNEWPAEALKSVATVFLNEIPELESSQEEIQGLIQVCVYIHQSVSKKCIEYLAELTRHNYVTPKSYLELLHIFSILIGQKKLELKTAKNRMKSGLDKLLRTSEDVAKMQEDLESMHPLLEEAAKDTMLTMEQIKVDTAIAEETRNSVQTEEIKANEKAKKAQAIADDAQKDLDEALPALDAALASLRNLNKNDVTEVRAMQRPPPGVKLVIEAVCIMKGIKPKKVPGEKPGTKVDDYWEPGKGLLQDPGHFLESLFKFDKDNIGDVVIKAIQPYIDNEEFQPATIAKVSKACTSICQWVRAMHKYHFVAKAVEPKRQALLEAQDDLGVTQRILDEAKQRLREVEDGIATMQAKYRECITKKEELELKCEQCEQRLGRAGKLINGLSDEKVRWQETVENLQYMLNNISGDVLVAAGFVAYLGPFTGQYRTVLYDSWVKQLRSHNVPHTSEPTLIGTLGNPVKIRSWQIAGLPNDTLSVENGVINQFSQRWTHFIDPQSQANKWIKNMEKDNGLDVFKLSDRDFLRSMENAIRFGKPCLLENVGEELDPALEPVLLKQTYKQQGNTVLKLGDTVIPYHEDFRMYITTKLPNPHYTPEISTKLTLINFTLSPSGLEDQLLGQVVAEERPDLEEAKNQLIISNAKMRQELKDIEDQILYRLSSSEGNPVDDMELIKVLEASKMKAAEIQAKVRIAEQTEKDIDLTRMEYIPVAIRTQILFFCVSDLANVDPMYQYSLEWFLNIFLSGIANSERADNLKKRISNINRYLTYSLYSNVCRSLFEKHKLMFAFLLCVRIMMNEGKINQSEWRYLLSGGSISIMTENPAPDWLSDRAWRDILALSNLPTFSSFSSDFVKHLSEFRVIFDSLEPHREPLPGIWDQYLDQFQKLLVLRCLRGDKVTNAMQDFVATNLEPRFIEPQTANLSVVFKDSNSTTPLIFVLSPGTDPAADLYKFAEEMKFSKKLSAISLGQGQGPRAEAMMRSSIERGKWVFFQNCHLAPSWMPALERLIEHINPDKVHRDFRLWLTSLPSNKFPVSILQNGSKMTIEPPRGVRANLLKSYSSLGEDFLNSCHKVMEFKSLLLSLCLFHGNALERRKFGPLGFNIPYEFTDGDLRICISQLKMFLDEYDDIPYKVLKYTAGEINYGGRVTDDWDRRCIMNILEDFYNPDVLSPEHSYSASGIYHQIPPTYDLHGYLSYIKSLPLNDMPEIFGLHDNANITFAQNETFALLGTIIQLQPKSSSAGSQGREEIVEDVTQNILLKVPEPINLQWVMAKYPVLYEESMNTVLVQEVIRYNRLLQVITQTLQDLLKALKGLVVMSSQLELMAASLYNNTVPELWSAKAYPSLKPLSSWVMDLLQRLDFLQAWIQDGIPAVFWISGFFFPQAFLTGTLQNFARKFVISIDTISFDFKVMFEAPSELTQRPQVGCYIHGLFLEGARWDPEAFQLAESQPKELYTEMAVIWLLPTPNRKAQDQDFYLCPIYKTLTRAGTLSTTGHSTNYVIAVEIPTHQPQRHWIKRGVALICALDY

SEQ ID NO: 32266 - protein, 33 aa, Homo sapiens
LGFAKLRTKPSRANRIQRSCTAKNLKRYLSLGD

SEQ ID NO: 32267 - protein, 53 aa, Homo sapiens
KACPPVSMDVCALRIQLFIGLKAICHFKNHIILLTKAEPEAIPERRQSPKRLL

SEQ ID NO: 32268 - protein, 379 aa, Homo sapiens [sequence omitted]

SEQ ID NO: 32269 - protein, 111 aa, Homo sapiens
VCTFLEKTETKSHPHTECHSYVFAIDEVLEKVRKTQKRITKKNPKKAEKLERKKVYRAEYINFLENLKILEISEDCTYADVKALHTEITRNKDSVRQRIINIIRYSCDILS

SEQ ID NO: 32270 - protein, 13 aa, Homo sapiens
INTFHLGFLNLNL
